United States Patent Application Publication US 2007/0083945 A1 - sequence listing, part 6

SEQ ID NO: 34399 - DNA, 611 bp, Glycine max
  unsure (1)..(611): unsure at all n locations
attgtacttgcgcatcttgagtaccgcggctgcagctgatcacgcggatggtacattcaagaagacacctgantgtaacacaatagaagagtgcggactatangggccaaagcanatgaaggacgtggtaacctctanganggttatanttgaggcactgcaagaggcnggcatggnttcctttgatgagcacaagaagagattcctgttgatgcatncgggcacatcgcatgacatggaaacatgttcaacggtcgatgagctatacagcgaataatggaccaanggccgttntgaatggtgttggagcanngagagaaacatgtgtgcatgcaatnactgacaaagcccaagcagcccaaactttgtgatcaattaccagaatgcgactccanaaacccangctctcaacctatccggaaggaagctgtccattccctatagaacaacanggngtgccatgaggacgccctcaaagccnacgaaagaagacangtcgcngggtgcatatctctacanagtaccatatcacacataagcgtgtaccgtacangctgtttgtgcaccacccgtgtgtatcaggcgcaaggaaacgangtgcacaagaacat

SEQ ID NO: 34400 - DNA, 444 bp, Glycine max
  unsure (1)..(444): unsure at all n locations
gacaaagaaattaaagatattcaagatggatgatcatagacagtctctagagtcttaggaatggtatattaaataggaagggaattcctaattgaagtagcaaaaggtttggccaagaaatttaagttaaaaagtctttntcaagagatttactctctggtaatcgattaccagaggatgtaattgattaccagtggccaaaaatgatttacaacagctattaaaatttgaattcaaaattngcactgtgtaatcgattacacatatatggtaatcgattaccagcagttattgaacgttttatattcaaatttaaagcttgtaatcgattacacacatactataatcgattaccagaggagatnttcaganaatattgtcaacagtcacatcttttcatttggttcttgaatggccatcanaggcctatatatatgtgacttg

SEQ ID NO: 34401 - DNA, 658 bp, Glycine max
  unsure (1)..(658): unsure at all n locations
atgatgtgacgnttgattgagcacccttgtagtcgacctgcngcatgcaagcatatcccccatcgtctcactggccgaccttgacccttgtattttgaggtcatatctagtttcagagtttgcctcgatttggtaccgctctcgcaggccgcaccgaaacagtgctttacctctagatgtctagtcaactgctgcgcctcaacgcatttcggtgagaaccagctagctctgggttcgagtggcatttcacccctaaccacaactcatgcgctgattcttcaacatcagtcggttcggaccctcacttagtttcacccaagcttcatcctggtcatggatagatcacccaggttcgggtccataagcagtgacaattgccctgtgaagactcgctttcgctacggctccggtgtgtttccttaaccaagccactgcctatgagtncgcggctcattcttcacaggcacgcggtcagagtcccgagcctcctccactgcttggagctacnngttatgtctattcactcccgatggggtctttcatccttcctacngtactctcactatcgtcaccangagtattaccttgcanggtggtctgtgatcacacggatcacgtgcccatgctctcggcagagcgatgctatgatgcttngtcg

SEQ ID NO: 34402 - DNA, 562 bp, Glycine max
  unsure (1)..(562): unsure at all n locations
agagtgtgcctgtaccttgatcacggacacatgaaactaagcttgtcagttngtgaagagggtntgattgatcaataagaagaatctacttctaccgatatgcccttaggcacggcaatacataacatataaatcacactctgaaagggtggacaattagctagagcagcatgtgctgtagcgaaactaattgcaaaagaggggaaatcggccacattaaaattaccttctggggaggtccgtttgatatccaaaaactgctcggcaacagtcggacaagtgggaaatgtnggagtaaaccataaaaatttatgtagagccggatctaaatgttggctaggtaagcgtcctgtattaagaggagtatttatgaaccccgtagaccatccgcatggtggtggtgaatggagggccccaattggtagataaacacccgcaactccttgtgggtttcctgcactttgaagaagaagtatataaggaaggatatagtgataatttgattcttcgtcgtcgactaaatagagatagaataaaattgtctttcttctcacaagaaaag

SEQ ID NO: 34403 - DNA, 178 bp, Glycine max
  unsure (1)..(178): unsure at all n locations
atgcgatgaattcgctaagcgtgcatgtngcattaagcgagttcatcaatattgcttgaatatatgcattttcagacgaactcgctaagcgcgcctacgacgctaagcgagttcatcttttgtggatgaacattcatctccctgatgagttgactgtggctaagcggngctgattcac

SEQ ID NO: 34404 - DNA, 323 bp, Glycine max
  unsure (1)..(323): unsure at all n locations
tctcagctttgttcttttataaatgagaagttntggactcattacgttatctaaaaatctnggggtggatccaagtgttccgatcatccatttgcatactcatgttttggtggcatactcaccattgtttatttctttagaaatttcatcataactaagaaaacaccaaggcacccctataacactcgatccagaataatggataatgaagagggcgtgcatgaacagatgaaggccgatctatcggccttaaaagatcatatggctttcatctcggaggtcatgttaaaactccagaaaaccatagaggataaagccaccgc

SEQ ID NO: 34405 - DNA, 223 bp, Glycine max
  unsure (1)..(223): unsure at all n locations
cttgttttgaagctcactacnaagccttaagtgaaaaccatgatatcaccatatccttaagggaatttggagctttggaattngtttgggaataagtgtgggggggttttgtttcattggacaacttgttngtggctatgcttcatgatgtatnttgngccatacttgatgtacattgtatattggttaaatgttggacatgctgaatgaaaatattgttctc

SEQ ID NO: 34406 - DNA, 271 bp, Glycine max
  unsure (1)..(271): unsure at all n locations
tgtccaaactgaatatggatattgacgtgaatcttacggtgcggaaccgttgacacatgattgttgacananatggacaccacttccagagatggaagttaagtcacggtgacgccacaaggaatcaaccttgataagtcagaatttggttcaacaggaaccctgagagaagctttttcacgtatttgaaaagaatgccaagagtcccnttattcaatctgacgaaaatatatatagttcaccaaaccctataaaaatgaaataaattggt

SEQ ID NO: 34407 - DNA, 270 bp, Glycine max
  unsure (1)..(270): unsure at all n locations
cgtggatcggntnngtgttattggccttattaaggcatagtatgctgccaacaacaagggcttgatggatgtcttaatggagaggtgacaccaaacgacgtcttccttccactttgttcttgaagagatgaccatcacttangatgtgtgtcttgtntgatgcactngcttgtgatangcagactcgttgaccatcatgtctcctcactttntgatagagaggtggtgaaggtcctgctgatgactcatcttgacattctgatagagata

SEQ ID NO: 34408 - DNA, 257 bp, Glycine max
tgacaggagcataatggcaacccatgtggatgaaagaaaagctgagaagaagatggaggaacataaacaacagctagcagctgagccgacacttaaaccggttgacgaattagttgaacttgaagaagttgttgaggaagcagaatgtgatgaaaaggagagacaccatagagactatcagagaaatatgaaaagagaaaagaaaagatgagaatttaaaaagagaaagaaaaagtgaaagaaaacaaaaaagtgtg

SEQ ID NO: 34409 - DNA, 222 bp, Glycine max
  unsure (1)..(222): unsure at all n locations
gtagactcatgccataagttgatacaatntcaaggagttagctctattcatctctgctattntctatgtatatatcaaagngtaactcataatatcaagttgctgcannaaaagcctactgaagcatggttcacgcagatagcattaaaggagaatgaagcttaattgcttttgctctttaacagctatcccaagctccatatttatgcattgtaacttgta

SEQ ID NO: 34410 - DNA, 630 bp, Glycine max
  unsure (1)..(630): unsure at all n locations
ccagttatattgnnataacctnatctgactatttactatgtttaaatttanannnnnnnnnnnnagggagcggactgtaccttgtagcactgaannagngacacatagaanacccaagcttaggatgaagaatcaaggtggttcaagctggtttgatgattacatagatgatgaccaaaagtcccagataatgattcccagattgagtcaacaaggttcaagaatctagagacgtttgatttctagattcaagagaagataattcaagattcatgagaagaaatcatgaagactgcccgagggaagtatcgaaaagacttctctaaaaacaaacatagcccaatatttggtttcaaaagagtttttctcaaaatgttcgagagtaccagaggatttactctctggtgatcaattaccaggtacctggtatcgaataccagtggcaagtttgatttcaacagtttcaacttgatttgcaacgttccaattgattacaaaatggtgtaactcgatacaagatatnggtattcgataccagtgtatttgacgttgaattcagaataattgtgaagagtcatatctttctcacaagctttgtgtaattgatacactggttcgggtatcnatacg

SEQ ID NO: 34411 - DNA, 297 bp, Glycine max
  unsure (1)..(297): unsure at all n locations
accactactnggaaacacanatgcanatcgtcattgaggcaattgacttannacattgngaagccatagaaataagaccttatgtacccactgtggtggctggaaatacaacaataganaagcctatggaaaattggagtgaggaagaaagaagacgagtacaatataacttcaaagccaaaaacataattacttcttggataaatactntaactcatgagtatgaattggttaggatgaagacanaatgaagtatataagatatgcagaanagaatcacacatatagttaatcatc

SEQ ID NO: 34412 - DNA, 280 bp, Glycine max
  unsure (1)..(280): unsure at all n locations
cacccagttctatggctgctgacggaggagctagagtggatgatgaagggatgtcatcttgtctagcccattttcttgatgccatctataactaaaaagaactcaaaattccttagaccaaatttattaaagtgtaaaaacaaaaacaaaagctgaaattaatgatgggcgcttagtggcatacaactcgctcggtgcaccctcagaaatacaacatatcaactnagctggcatctgcttgctaagcctaatggttgctgcaacaaaatgcgcttagctc

SEQ ID NO: 34413 - DNA, 327 bp, Glycine max
  unsure (1)..(327): unsure at all n locations
tgtgtcntacgatatggtgatcatctctttgtccgtcattggaggtgtcactggagatgcgaggtctcttcacctttaggtgtattctttgaaagattcgtgctccttttttgcacatgttctgtagttgcatcctattcggagccatatcagaattgtactgatactgcctaacgaaggcaaccattatgtccttccaagaatggactcgagaagggtccaatgtagtgtactangtaacaactatcccagtaagactttcttggaagaaatgtatcagtagtttctcatcttttgcgtatgctccctatcnttcgacaatacatc

SEQ ID NO: 34414 - DNA, 427 bp, Glycine max
atctactggcacaaaaagcatgcagagaaatgttaaattgagccagttataccaaaatatgaaagaagcatatgatgaaattcagactccattggttccccaaatgccaactacattttcaaaggtgtccataattcaagagctggatgcaacggcatacgaggaagcacctgctatcgctttcaacatgtcctttgaagtaagtagtttgaaccatactagtttaactctaaccaatattagattgagaacacactctcttattggttaacatttatagcaaactacaacaggagtgggaaattattttttatttccattatatttcaaccaatagtagagtgttaagaagtgtattactaacatttcttatatcagaatagtataaaaatgaggaagcatacagtgtttttgccttatttaagtg

SEQ ID NO: 34415 - DNA, 377 bp, Glycine max
  unsure (1)..(377): unsure at all n locations
gctttcgcaagctacggtaaatctgtgacttagccatggtagaagtctccacagaggccatngcctcccttgcccagtactatgatcagccgttgaggtgcttcacctttgnggacttccagctatcacctatggtagaagaatttgaagagatcctatgatgccctctagagggaaggaaaccatacctcttctcaaggttctatccctcattagctagacattccaagatagtccanatctcggcggaagaattagaccacacgaagcaagtcgaatatagggtggttggaataccgagaaaatatttggaggcataagcaagaatcttggcaggtaaggaagtggcctcgncataatatcttgcctgtgatttc

SEQ ID NO: 34416 - DNA, 623 bp, Glycine max
  unsure (1)..(623): unsure at all n locations
acctaccgttacattgactctctatttatatatgtatggttattnatatatnttantatncnnaaaaggaacgtgngttganccatgatatcgatggattacgcgaactattnaatactcaaactttcatcgcattagtgatgaagagagaaggagaataaatgtgctcttattcagaatcaatgggcaccttgctgaatactggagagaagctaaccagatagtaccatgtgcccttattaaaactcgcctctatgaaaatcaagatgcctgccccatccaatacattgcctggttcattctcttctaatctccccatacataacatacccttccttaatcatatattttgtacattctatacatgcatgttgtcaatcacattttgaacttacatgctcctggttatactataaactaacccatgtctttacttttcttctgttatgctaattaattaataactaatgcctatattctaaagtggtctggtgaggtttagaatatcacctattactgcaatgccaaatctgtcttccgtgtctatcgagttacccttatatggatcgatgttgagtacatgcatatataangcatgtatgatgtccaatatattgaaaccn

SEQ ID NO: 34417 - DNA, 326 bp, Glycine max
  unsure (1)..(326): unsure at all n locations
tcgacatctaccaatatttattcanggattgaatagaataaacaatggccggtgtcggtcgctatatggccccgactgatatccatcatccgacattgcgcaatttcatatataaaagcatgccgataatgtattttacgtgagaggaagttttctgtctgctattgcctacaaaatatacaatgtaagtcggctaggtatttccgtgcgagctcaaccgatgtagtgttctgccaacactgtcatgttctcatttantcagccaacaaaacgttgtccactccagcacaaaaaacatcatcacagaaattgtcgaatatatgata

SEQ ID NO: 34418 - DNA, 347 bp, Glycine max
  unsure (1)..(347): unsure at all n locations
tagctgacgtacattgtaaatgggaacatgctagtttcggtctaaacaaaacgtcggatgagctcgcacaaaagaaccttgccgacctacattgtacattctttatgcaacaccaaaacacgagaacaaactttcactgccgtaataaaaacattatctgccatcgagggtttttttaataaaaatagcgcaatgtcagctgaaaaatatcagtcgcggtgaataatattatattgccgcgttgngctaatgtattcttggccgaataaatgggaacatgccattttctgacgatcaaaacgtcggttgagctcgcacatataaacctatccgacctacattgttca

SEQ ID NO: 34419 - DNA, 611 bp, Glycine max
  unsure (1)..(611): unsure at all n locations
atgtgtgccctgattgacncnntgnatgatcnccntttgaccggcatncnagagtcacctgaggctgcaagctcatacaagtgtaactcgatcttggcatgctgtataatatntanntctgagtatgactagtcacttttcttttattagaaaatgttaattgttagtctgtgatagtaagaggaatcaaacccgtgacctttcttccttctttcttttataaccatccaaccaatcgtatatctcctatattactaatcacttgattacctgctgaanaaatgtgcaggaccaaagccttgaattggagtacctggccacatacctagctgaactaacactgatggactatggtgtcttgaattccttccctctatcattgctgcatagctgatatcttgaaaggggcactagatcagtcaaccaacattggtagtgcctacattcatatttcctacatgtgaagtatgtaaggaagtagctactacatgaatacactcatgttatacagatcaactctaacacttgctgtacangttagatngaaacacagtatgatacagactaagtgatctgtgttgcttactgcgcgacaaacgacaaaagtaaag

SEQ ID NO: 34420 - DNA, 568 bp, Glycine max
  unsure (1)..(568): unsure at all n locations
gaacgaggaccatataatataattagtataaaacatgcatataatatnnnaagaagagaatgaactggactgaagcctcaatacggaacatanatactangctgagaactaaaaggtagggaagttttgtgataaaggaaatctaccctccattcctcaagaaactgtatatgtgcagaaaaggaccaagaccttctgctgtaatcctagtggatattgccaaacatacatggtgtgaggtattctcatgctagttttaacatatgcaatctcaatgtgattgcagcaaggtgatccaatagatgggcgatacgagaatacacggagaagggtactataattgaacagctcgggattgtaaaaaagttacagacatgttgcatgtcaaatgatcctatattcgagcacactgaccttaacgatacacaaanggaattgcatgcaactttctttccatgatcatggaaggatggaataatctgaaccattatcttactatggttgatgtcataaaaatggttaagctggaagtggtaatgagagcacaccaccagctatttcaaatacg

SEQ ID NO: 34421 - DNA, 242 bp, Glycine max
  unsure (1)..(242): unsure at all n locations
caccccatggatctaccattcacaccttanaagagatccttcanagttcaatttcggatcanagcggttccgttccgccactgataaattaaaattgagagagagagagagagagagagaatgaanatcccttggtgttcggtttgccaaacgcggtacaacgaggaggagcgagttccgcttctgctccaatgcgggcacgggttctgcagagagtgtctctcgagaaatgtctcggcgtc

SEQ ID NO: 34422 - DNA, 367 bp, Glycine max
  unsure (1)..(367): unsure at all n locations
tactaccattaaaagaantcatggannaaataattatgttcctcatcttccatatagaccagaccacagccatccaccaactttgccacctacttcttcttaacccttccacttgagcaaaggagtgctgaaggaaatgctgagctggattggaagggaagactgtagtgatactcagccatgatatagtctcccaccaaataggccaaatctttattggagatgcagtttctatggtgcggttggaaaacatttttcaaatccttccaccaaggagaatagtctgctttgtttctgccacagcaaagagtattccatcctccatatttggacattaatattctggcccaaagctgatcctgattat

SEQ ID NO: 34423 - DNA, 609 bp, Glycine max
  unsure (1)..(609): unsure at all n locations
atgtgtacctgaccgcgatcttgagtcacctgcngcatgcaagcttgccaggtagtcgtggacctgaacgcacgactgaatgagtcatagtcangatgganngatccgagttatgggcattcaaggagagggaggctaactatgagttngaataggagttgctagtatacaagaaagacgttgtctagtagcatgaataagggcngcacaaggctgttacgcacgctcggttcttcgtcaaggaccttgtcttggctctttntaaccctttctagcacgtgaatgaatggtgtctacttatcaangaagatataactgctgacgaggagacgagcaaggagtacgatgttgcgccaatgttacgccgatgttaaattcttctttgtggattctggcacaatggctattattatanaaatcttcgttgaaatgaattccttcncttgtatgaatatcactgttatatgttgatgttgattagctatcatgctccgtgctgagagtaggatcgccatagagtggactgacggtcgagcagacttaattttgataataagaataatacatatcattcagttattaccagtaaagctgtatattgtatctctt

SEQ ID NO: 34424 - DNA, 419 bp, Glycine max
  unsure (1)..(419): unsure at all n locations
gcttctacagattagaatcttcatttgatgaggaggattgattatcttcctctgtttgtaccttaggcgtagtttagcacttttagtcgcgaagtgatctgctatgatcctagaccctatatgatattttgatgtaatatgaggggcaagatctgtactgaaaatgttttttgatgtaacaaatgtgtattgatcatttcactatttttacactttgggttgtatacaaattcttctatcgtgatactatttatttgttttatatacgtaaaaaggcttcgtattgtaaatctgcgttcatctgtttatagatttaattacaacatgaaaacttaatgcttntcaagcaacatgcttaatttacctatatttattgtatcttaattataataaaatgatgagatattttgtcaacgtac

SEQ ID NO: 34425 - DNA, 288 bp, Glycine max
gaaatctgcatagcaacacaatggcaatagttgatacaagattcaaactcgagacgactatttgaagttaacaaaaagttgcgatatttttcttttctggtgataacttccaaatttaggaatccttatactatggaggaaccccattaatcaataataccaaattactacacacagcgggcaattaaatgactgctgaaataacaataagatgtattctcatgtaagataagcaattactgtcgtaagaagaaaccaatatattcaactacctcactctgccatact

SEQ ID NO: 34426 - DNA, 633 bp, Glycine max
  unsure (1)..(633): unsure at all n locations
tagctgancataacacattctcactctactttattatatctataccttnnattaaataaaaangggagaggggatgaagcttgtaacatctgaacacnnanactaagcngacaangaaaagtgtgtgttccccatgaagaacaacatttgtggttcatttgcatcacattacattaaattatgatgacacaaatatagctacatatggttgactagcacctacaaaatgaagttgagaatacaagaataataaaatgaacttccttaagaaaaatctcgagtttaccatattangtgcaaacaaaatgcgagcaaaataatatttattgtctttaaatatttttaaagcaactcacctttattaacagtttgaaagctattaggtgtgatcaagatcattttactcatcataggattgaatatgatttgaatcaaaaaacaattatattttgtttaccaattatccatgcaaatgtaaccacactttaccactctgtacgcttaacgcataaaggtgttaggtatactttaggtttctcatggtacatattaattgttcccactctatgatttaactttcattaagtgtcaatgtgatcaccttcataaagtatgacatctaatataactcan

SEQ ID NO: 34427 - DNA, 323 bp, Glycine max
  unsure (1)..(323): unsure at all n locations
cacatacatattctttttcctagtcgatcactcacttaattctccatattctcccnctctggtattgagtttaagcttcacttgacatgaaattacttaactatatgagctcctggattaaatcctattgtcgctcccctttgggcgtcaacaaagagccaaagtgcgtaacaaatataaaatatacataaatgacttatcatacacaagacattcantgagatatctanaccaatcatgaagcatatacatgaataacccacattaggatgtggaccacatagtcatataacataagtcatatatgttcagtcatacttatc

SEQ ID NO: 34428 - DNA, 430 bp, Glycine max
  unsure (1)..(430): unsure at all n locations
ttgcggatttggtcttcgccggcgaaatgatcgaagtgngtctataaaaggcaaatatgatcatcttgctttgataaatgcaaaaaaaaactggggcaaatgaagagggtgaggatgaaagagaagcccgtgctgtgactgccattcctatacagccaagtttcccaccaacccaacaatgtcattactcagccaataacaaaccttctccttacccaccgcccagttatccacaaaggccatccctaaaatcaaccacaaagcctacctaccgcactttcaatgacaaacaccacctttagcataaaccaaaacaccaaccaagaaatgaattttgcagcgagatagcctatataattcaccccaattccagtgtcctatgttgacttgctcccatatctacttgataattcaatggtagccataaccc

SEQ ID NO: 34429 - DNA, 357 bp, Glycine max
  unsure (1)..(357): unsure at all n locations
agagaggggggagcacganatngaaggaataaaagagggggagaagtataactttgaagtgtgtctcataagactntcattcatcanagttacaacaagtgttacacatgcttctatatatagactacagtagcttcttgagaagctttcttgaganaacttccttgagaagcttctttgagaagacttccttgagaagctagagcttagctacacacacncctctcataactaagctcacctccttgagaagcttgcttaagagaactcctaaagaagctagagcttagcaacacacacatctctaatagctaagctcacctccttgagatgagaagctagagcttagctacacac

SEQ ID NO: 34430 - DNA, 346 bp, Glycine max
tctcggtatattatgcacctgaatcagacctccgggtgacatgttatgactcattgaatttctcgagagcttccgttgttcaatttctagcgtctcgatatcttatgcgcttgaatcggacctccgagtgaaaagttatgaccatatgaatcgctcaatagctttcactgttcaatttctagcgtctcgatatgatatacgcctgaatcggacctccaagtgaaaagttgtgaccatttgaagttctcgagagcttccgttgttcaacttagagcgtctttatattttatgcgcgtgaatcagacctccgagtgaaaagttatgaccattcgaatatctcgagagc

SEQ ID NO: 34431 - DNA, 397 bp, Glycine max
ccaccaagatcatagtaatgtgggcttaccattatataaatataatgacaaaaccaaggcataaataatacctcgtgctgctctgaaatctgaaccaacatttacaattacagagtaattgacaattataaaatcaaacactatgttagagacaaatacacaatgcataatattccgcggtgaaaaccaattctagactgactgtacatgtaacttatctgctacttggagcacatgactaatgtttgtagagggataactttgcagcatcttgaggtatatgcgaaatacccgctcaaggcgttacgaacgataatagcattgacagatattctgagaagtgctctacacatatgcatagttatttcctgctttctattttcactgacgaagaata

SEQ ID NO: 34432 - DNA, 296 bp, Glycine max
  unsure (1)..(296): unsure at all n locations
actaagctttgtanagcaactgtagtaattgaagctgttacactccatttctactacaatgggtagggtagggtactatggcattntgccccccatcctcacattttatataaatacttgtccccaatcctgcgtggagagcaaatatagtgcccatctttgtatcctcttaatacttgtactcttatcttcaattgtataatgacaaaaagcctgtcgtgggaattcatgagatggattcaggcagtatgtcctctttcacttttcccagcatgccatattactcaatactgtga

SEQ ID NO: 34433 - DNA, 347 bp, Glycine max
  unsure (1)..(347): unsure at all n locations
aaaaccnaactgataataataaacacgaggacttttatctaagggaacaacgccacacgcacaacaaacatccttaggccgaaccatccacaaagaacacgcatacaaaaacaaagggcataccaaccccccaccaaacgaactccacaaatgacttcctaaccatgccacgcacccaaaaatctacaccacccatcactaatcgaatctcccacggccacgatcatcacctgcgtagacaacggagactaataccaacatgacacaaccaccacttcgcgcacaaccatacacggaaccaaaaatcatcacgacctgcctgacaaaccacacctacccgacacaca

SEQ ID NO: 34434 - DNA, 540 bp, Glycine max
  unsure (1)..(540): unsure at all n locations
ccttattaccccgtacttatctcaattattaannnatnnnaacnttgtacctgttgccttgattgcacttaagcactgagctcagcttggaatgattcttacatatgtatctgttaagcgctaacagaatataggtgtatancttatttctctgggactatatttgttatctatgatcttgtagcgactacagtgtgaacgccgtcggcggaacataaatattcgtttctgacaaaatgcaaaatccaacaaggaaaatggctttcttggttcttgccctactcgctcagctacctctacttgctgtgccccaataactcatgggaaaaaccactcgcaggcgactattgcttacactaagttagctgctggcagctgactgtcaaggaccttgtataatagcgtttaggtgttatagccacgccacttggagaattaagagagataagataacacgagcggcctccaatgatgatactctcttcttctgatcgatattgttagttatgacatgcctaggcttctgttgcttctttttct

SEQ ID NO: 34435 - DNA, 282 bp, Glycine max
  unsure (1)..(282): unsure at all n locations
gattatgaggaagaacatgaacactctagctcagacatggagcgttcattccttttctaacctcattcttagctccaacacatctaatgtcaccttggatagagccaagttgatttatggtattattatgaagatggatatgaacttanggtacctcatctcccaccagatctctctgattccacaacatgatacatccaaacttggattccctgccttgatcacagctctatgcaaggccagaggagtccagtcagattctagatccctagagaacttgag

SEQ ID NO: 34436 - DNA, 534 bp, Glycine max
  unsure (1)..(534): unsure at all n locations
tttgatgtangcatgcatctctacagcactattgtccctatcacgtttcatatcagatgcgtgagtgtgcatcttaataatcaatagaaataggtaggtttgtaagtaaaatacctgtctacacantattataacgcaatgtggggaggaactgnttccttgcctgaaaatgcattatccgaatcagacgagaatggatacgattattacttgtttcaacncacccatctcaaatgactgtcgtgtcgacattgctaatgcttcaatacgtgacagagtaattatctgcagacgtattccttatatgatataccaatatattaaccactccaaaatatataaaatacattcctaccaatctttttgtcagcacgaaacgtcataactaatatgtgaatgtgcacttactggctgcttaaacaagaaagatatccattttatgtttaataacataaactcanctgaacatgtgatatttacaataatttccacactatactcttctttctgttgacagaataattccttataaag

SEQ ID NO: 34437 - DNA, 634 bp, Glycine max
  unsure (1)..(634): unsure at all n locations
taaacgtctcattnatctactactcnactacagaaatttctacaatctanataaantaaatttnnnnntggccgtggatgaaccttgaagcatncaanacgcgacacttanatacttaagcttccacaatctcagccttcactgtcagaagctgcatattattgtcatattaataagagaagctatgactaaaagcattcttgacagggatgatggagaattggaaaatgtaccctgcctcgttaacacttccaatcaatggaatacaaggatgtactgacacaattctacaaagcattttacaccatattcangaacatattgtctttcaaagcatcaaatagtgtaacccatctggtctctataaactgaagcctgcacatngccaccaattgcctctacctcacgaactacccgaaagtgactccggttactagtggtcttgaaagccattcgttcaagctgatgcgtaacctcataacttatcagactctcatattttgaaccacaatctacatataaacctattgacgcagtgggactctgaagaaccaaaaaatgtcggcataatatatataatgtagacttttgcaggactcatctgaaattataccgtcatgtctaatgccacttg

SEQ ID NO: 34438 - DNA, 323 bp, Glycine max
  unsure (1)..(323): unsure at all n locations
ctggntcgaggtacttacccgttgaagatcgaagatcgatgattaacgaatgataaacgtcaaagaacggtcgaaaccttcgcgaatattctcactgaaatgttactgaaacgtttcagaagcacctcattgtgtatttcttcactgaaagcaattttcttagctaattctaaagagagagatgtgcctaatgtgcgtgaacccttttcacttcacattctcccctatttatagaaatattgtgggagatgcttgccacacatctcgcacaggcgagcatggttgcttcctccagaagcaacatgccttctggaggaatcttc

SEQ ID NO: 34439 - DNA, 373 bp, Glycine max
  unsure (1)..(373): unsure at all n locations
gtcacctgcngcatgcagctcttctggccagcctgaacaagacgttanagggttattatggaatgtgtcacatgccancagaataagaatagtcacaggcgcccagctggtgtactgcaacctttaccgacatcagagggcgtgtgggaagacctctctatggacttcatcacccacttgccaacctccaatgggttcactgtcatcctagttgtggntgatcgtgtntcgaaaggagtgcatctatgtgctctttccaccggattcacggcgttcaaagtcgcaagcctattcctcgatatcatatgccaactacatgggttccgcaagagcatcgtgtctgaccgggaccctatcttcatgagcaagttct

SEQ ID NO: 34440 - DNA, 374 bp, Glycine max
  unsure (1)..(374): unsure at all n locations
cactatgatactaagcttcattcatctttggtttctcgctggatatttttatttgtgataagtgctgcctacaataaggattggaagaggaaattgatgcattgctcgacagaagatatttgagtcttggaggttaaccatcctatgagcagcattggatttgaagcacacaaagtctcaccaaattttgagtgataaacttgagaaaacaaaaaagcattgaagacaaatttgaagagcttgattgctttgttaaatttgttataatagaacaattgagtgcttaattttttctattgcaattccttgtatatggacattctntaggggtgtgtggggagtctccaagagaccacccaaacctctatttgtgt

SEQ ID NO: 34441 - DNA, 293 bp, Glycine max
accgcgatcttagcactcgctcactaattttatttccccaacaaataaaaactaactttcaatcaatagctaaagcatctgcgggcctgcatgaaatgtcatctgcatggttggtacccacttcctacctagacagcggcctacagtgacactgtacctctgcactatctttcaagtttttcctaccatgagccctacgagtctatcgaacatacaaataattgctacactccttcaataagtgataccatgacgtcgttgcaccatgcgactgtggctcctgtgctgagctg

SEQ ID NO: 34442 - DNA, 431 bp, Glycine max
  unsure (1)..(431): unsure at all n locations
caacaagaatcaagccaaggctattgtgccagcaatcaatggggcaaaacacaccaaatgattatgatgatggatggctcaaattctcacaaaggtaaactcatcactttcaaattgagctttcaaaactatcatgacatgtagagaagaatcaaggatttcaagtcacaaaatgtcaagaacttttattttcaaaacaattacccatttcttgaacatatcctataattcatagaanaacatgcaaattcgagcgtgcacactaaattgacccanaatattaaactataaatccgacgaaactaacaacattaacanattaacacaactaacaaattaacaaaacccacataactatgcaaaccaaagaacactctccccccccatacttaacaacacattgtctcaatgttcacaattaaagataaaac

SEQ ID NO: 34443 - DNA, 558 bp, Glycine max
  unsure (1)..(558): unsure at all n locations
tcgcgcttagcgctacctanntaaatactcatgggctaaaggcagcggactcgctcttatccttaagacacacaatatntttctgcagattaagcttagtgcaacaagctgggcttagcctaagtcttacaattnttgacacagaagaggacttgagcttagcagagcatggcgtgcttatggtcagctcaccaaaatgacactcaagcttagcgcatangtcgcgcttatcctaactacaataactcaaaaaaaaaatgagagagtngagcttagcgcagcagggcgcgcttagctcaaccttctcgacacacaccaagggcttagcatatgcagtgcacttagccttantcacaggactgactaacagaagcatagtggcgcttagcctgacaagccangcttagcgctaaaacaaaactttcataatcttaatgtctgacactgggcccgcttacngccacacgctgctatcgggtcatcatttcattatcacaagatgacacactagcgcactggctgtagccatcatataatcaatctacagtgcagacagtg

SEQ ID NO: 34444 - DNA, 165 bp, Glycine max
ggactctcttttaatttgaaatcaaactttaggctctataatcatacagtttgtgtatcgatacacatgttaaaatgattgaaatgtttaacacaagttgaactcttgaaattgatatctaatgatcaggcgtcccaatcaatatcatgaaatgtatacttgagt

SEQ ID NO: 34445 - DNA, 234 bp, Glycine max
  unsure (1)..(234): unsure at all n locations
gcgctcgtcatcacaacacgcacgcgctgatgcagtcaccctataatggccttgacaacatcttccctttcatgtgagaagtcttcatggtggggtggcgaggggtgcctnctgcaatgtatggtgtctatntcatgagagccatcacannatagaanataaaataanaacattacattagtctaaatacactacagaatcatggtnntcttcatgcatttgtcaaaatacaca

SEQ ID NO: 34446 - DNA, 446 bp, Glycine max
  unsure (1)..(446): unsure at all n locations
aagcttacttaagcttgttacaatcgtattctcctatccttccatgtcactattggctcttacacaaatcagaagatntgttggtttgattgcacaatgactaacattcttttgtcttattgacagatacacaaattcaacacttagtctttnttcttaagatgaataaagtattttgaaagcttttttaaactttacaagaatttacacaaagagctntttataaaaaagaaattgaattatgcgcactttagttctatttcatgtcttcaaagcttttggtatttataggccttcttcaatcaagtatcagttgtctctaaatggatatatnttctctcttaagcttgcgtatgaagaatgtgcccattgnggcattaaatgcatgtactntntcatgctggaaaaccactctctgttgccagcgtattgaacactactgcaag

SEQ ID NO: 34447 - DNA, 261 bp, Glycine max
  unsure (1)..(261): unsure at all n locations
gttatctctttatctagtgaaggattctctaattcttagtgatcaagacacctggctgatcaaggactttacaaccttgtgtgtgccctcgctgaaagagtgattctntcttctttatcatacccttgtctttcaaccacaattcagaaatccactctgccagaatatctcgtggcataactccatttacgcactcaataagtgattctgacctaaatgaatntanaanagaccttcacctcgtttggaatcacctcattg

SEQ ID NO: 34448 - DNA, 322 bp, Glycine max
tacctacggaattaagacaaacttaatggctgagtgttactgaaattgtggcaaccaaaagtcaccccaacagccaacaagtcagccaccatttggtctcccaaaaggctgatgcctaggctgccaattaagcccttattacaacttgaactaaacctaactaaagcccttttagttgattaacccaagacatatctttggtcaaccaaatttacaaggattgggccattatttagacaaactatacactctaaaagtgagacacagtggtgccatttagtccttctccatttgggccatgatacaactcacaaccttggac

SEQ ID NO: 34449 - DNA, 162 bp, Glycine max
ctgctggcgattttacgtagtggattatctcgataaccacatttctgtaatcccaacctacgcgatggcacaatttatcttttcttttgttattgatgaatcatactattttcgaaagtctctattaaattcatctgtttgagtcatatttcttaactggag

SEQ ID NO: 34450 - DNA, 382 bp, Glycine max
  unsure (1)..(382): unsure at all n locations
tacattcatattttcatgatttcaattgtaaattcataaattgaatnttatagggatgcttgagttcacgtccattgtacgcacaagataggctcttgatctgttgggaaacgccgtctcgaacaatttgaactgttcgtcaaacatatacatattttgaatgagatatatttgttcaaaccataatgatggaccaacaattaaattgaaactgatgaattatgaacaactcataccctcgtaccaattaatcgattcagatcgtaattctctatcctaatttcataatatgaatatatatattaatccctaattcgaaagtacagagatttataacatttcattcatgcacatctttaaactaattaagctagaatccctg

SEQ ID NO: 34451 - DNA, 393 bp, Glycine max
  unsure (1)..(393): unsure at all n locations
atacacaactnttaaatggacaacttgagataatntcatntcattntntaatgaagtataacatgacctatacttcttagcatgccagcataatcaatatacacagtgaaatagaatctttcattaatagttatagaacaatataagactaccttgtattccattgcatatataatccttaaatctagtactttanatacataaatntgatgtgttgcatttgggttaacttgttatgtaccctttaattaagtaaacaaatattgatcatcacanaaataatgatgggctaaaagaaaaactagcgattaagatatcatctacagaaagcacanagtctaagggaaaacaagatattcgtccctaaaataagaatgngatgatatataatct

SEQ ID NO: 34452 - DNA, 276 bp, Glycine max
  unsure (1)..(276): unsure at all n locations
gtatgccatttttgttntaagagtagcgtcccactgttaanactaactttccaaatggttgccttcgcangaaatggccccgaggaagctggcctcatagaggtccaggaaggacaatgcagccgaaggaactagttccgctccggagtatgacagtcaccgctttaggagcgatgtacaccagcagcgcttcgaggccatcaagggatggtcgtttctccaggagcgacgcgtncagctcatggacgacgagtatactgatttccaggaggaaat

SEQ ID NO: 34453 - DNA, 161 bp, Glycine max
gatgtgcagaatagtagtcgcgctaatctcacattcttatctgttatgaaaatatgtggaattgggcatagcgagcctgctcgctatgccgattctgcagagaaaaatggatttgtgttcactcgctcagtgtgtggtagccacacgcttatcgcatgagt

SEQ ID NO: 34454 - DNA, 352 bp, Glycine max
  unsure (1)..(352): unsure at all n locations
tcattctgtaagaagtgagccaatcccatagatgggagatcttttttggatatacactgtcttctgatcataaccaattggctcaatcttctccacaggttcggcataaccaattggctcaatcttctncacaggttcgacttaactctttagaggtaccttatgatcctatctctgataatactaatgtagatgagactgatcatganattgttctcttgacctacccttgaaatactaattatgtagaccgatcatgaatgtccttgctgtgtagataccacacacctacaccggttactatgtcatatatctccacccctctaattgggtcacttcactaatatgacta

SEQ ID NO: 34455 - DNA, 325 bp, Glycine max
gcaagtgtgttgctatgtgagtggtaaacctcgcgttatggcttctgcttaatgggtaagcatattccaattgtctttggatgtgttcagacattgtctatcttttgctgatgtattacctgcatgtttcattgtattgcgctttcattatgtactagcattgttcatcccatgctggaagtgttagtacaccttctatctcgtggggggctgtatatataagtccatatcatcggttgcctaatcatgactcattgctgtcttgggtccatctggctaaaccatctttcggtcagatattattgtaagctaaagctattaactt

SEQ ID NO: 34456 - DNA, 485 bp, Glycine max
  unsure (1)..(485): unsure at all n locations
tgacccnatgttccctgatcgcatcttaagcacctgggctgcagctgagtgaaaaggtcaggactctcttgtctncatgatttttccaacattacattggctggagacaactcgaacntgaanggcttgtgtcgctgcccttaagctagagtcaaaagggttggagaatcgcgctacaaatgtcaaagacttcgcanattaaatgtaaggaaatggaaggtgaaacttgtggctggtgaaagaagaatgctaaagaaaaactggtgacaactcttatactgatagcgcacttggttatatgcttgcagtctttatggagtatatagcattttattgaaaaatgtatatggaatatccttaatacttcgagagggcctatcgacatgcacttcaggaatagtgatagcaatagataataggaagagattctagatctctaaaattattacaatatagtctggttacaagctttgcagtgcatgctt

SEQ ID NO: 34457 - DNA, 364 bp, Glycine max
  unsure (1)..(364): unsure at all n locations
agatcactgtgtaactcttcaagatgcaattgaagganaaggaagaaagcaaggaaattagagaagtccacgagaccgaggtagaggtcattgtcacagtcgaggacaggttggatgtggcaatagtgaaagaggttcaaatttcatcaacaacagttgcgagataggaagaaattcaacaagagaacgtggaagaggctatgcaagcataaggtatgataaatctcaaactcaatgctataattgtcaaaagattggccactatgcttctaaatgtagattcgccaagaatagagttgaggaggagactaactatgtggagcaaanagacgagaagnttgaaacaatgctcctagcatgtgga

SEQ ID NO: 34458 - DNA, 630 bp, Glycine max
  unsure (1)..(630): unsure at all n locations
caccgtataatatcgtgatgtcgcgtgttcctcttnnnnttttnnnnncnnaagtgtcctgtgacacctgtacgcatcttnancccttngctcanctccactgtgaacctgctgcttctattaattatgtatctgaacgaaattctgtctaattaagctcactactaaagaaaatgattgctctagtcaactataaattcttgaggtcactgcccactaacattattcaaagcactaagagagaattcgagccaattgtctgtgtatcacctacgcatatacatccaacatgaatacgtgactgttccttgataattaaagtgacacccatctcataactctgttggtcggttgtggtggcttgagatcattcgantagctcncatatccacatctcaacatagtataaaaagtaatccatccttcatggccttgtgcataccagtattcatgagactgtgacccttaccacagcttctacactgtatatattcacaaaggattctcttaatctatatagtgaggtaataacaaccaatgtgatgctaagattttactgttctacacccgcatttatgatgcttcaatgggacgtacacagcattatgtgagaagccgtggtctctcccg

SEQ ID NO: 34459 - DNA, 243 bp, Glycine max
taccctctcccgagtggactaaaccctaacagtatttaaagtactgagatatcaggataataagaaagataagtatatataagaacctggaatgaaatcctctttacattgataactcttgtaatgctctatacatcacattggcttctaggcctaccaagccctatctaatgatttagccactcaagccatgaggctttacaacaaataggggtaaagaataaagtagatataaaccctaaa

SEQ ID NO: 34460 - DNA, 416 bp, Glycine max
  unsure (1)..(416): unsure at all n locations
acatgtatctcgaacactataatctatgattaaaacatataacntctgaatataaattcatacatgcatatatgtcacaacacaaagtttccttgggtaatctgagttgaaatctttagggtgtacaactctaacttattttaattctacatcatataattagagactntaattagtcaccaactaattaaactaaaattctacttgtcaaaccagtatataagttattacaaaaatggtctccactttacactcttatgagttcattacnncctttctaattcaatggaatctagatcaccattaatcaaccttaattagtcctcagtaaattctaagtctacttacattaatttataatgttctttcacgcgtctaaattctatttctagaccaagatccaattattaacatct

SEQ ID NO: 34461 - DNA, 607 bp, Glycine max
  unsure (1)..(607): unsure at all n locations
atatacttctatcctcttatttatatgttatnntatttctttctttattaatttanntnaannggnaagtggtttgnnactgatattatgcattacggaactatgaaactcatcttgagatttgtcttgccatgaaagatcgtgttggtctgttaaaatgcaaatttaatcatcctgcttggacgaatgataaaactggcgctaatgaagatggtgatatagatggagaatcccatgctgtgactgcccttcctatacgaacaatgtttccaccaactcaacaatgtcattactcagccaattacaaacctcttcctttcccacctgccatgtatacacaaatgccatccctatattaaccacatagcctgtctaccgtactttcaatgacgaagaccacctattgcacaaaccatataacaccaactataaggaattttgctgcataatacctgtacggttcaccccaaattacgttgtcatatgctatactctgtcccattatcactctatatttcaatggtttcataacctcaccaatgttctcaccctcatttatctgtgaacnactcgcatctaactgtgttatatggatgactacgggcat

SEQ ID NO: 34462 - DNA, 316 bp, Glycine max
  unsure (1)..(316): unsure at all n locations
cacagtctccacgttgtacccactctctaacttcatcatcgacctgctcgaaaccgctgcannaaannaaccccaaanaacccacatttcaaaccttcataacccatctaccanaaccaaagccaaaaaccaaacttgcaccagatccacacccgttttggtggtggccttgagcgaccacacccacttggtgaaagcaggcacgggcattggagagaaacccactaacaatttctgaaaccaagaagacacagagctatctatgagcaaaagaagcanactttgatgatacggaagcgagagaatgagcacaagt

SEQ ID NO: 34463 - DNA, 443 bp, Glycine max
  unsure (1)..(443): unsure at all n locations
tcttaanatntctatcatgcagcaatgattgtttttttatggttgntatttgtaactgactatgtataaattataaccctggtttttcctaccctatatctgctgcatgcatgatgtgtagagttctggttttgtttgttttttattttgacatatgaacatatggtattttagctcaccatggtgctgaaccaactctgctagatgttctggcgctatttaagactacaagttgatcatcagagagtgttctaatatgaaatttacgggaatataagaaatataactgtctaatatgttggaatgaattccccttagaagttgagttgctatttatcttctctctctttatcaatgttgttgcctgtgggacttgctctacttaatgtctattatcctctgagatcttcacgtatttttaaaataaaataaaagtgaatgat

SEQ ID NO: 34464 - DNA, 380 bp, Glycine max
ttctgttgcctgtgatcctgaccggacttagcacgagctcgctgaggttctctacaatttgtgggttagaggaaagctaattctgatgaacaaaaacttacaattatttatttgttagtaaaaacctgattgctttatacaaatcctcaactattggttgtagacagaacctattctgtttacaaatcctcaaaatcctgtagacaatcctctagaaacaaacaccgaaaattcatgtaaagaaaaatgtgtactaaacattcttgaaaatatcactttttaaaactgctctgttaaaggtcctgaggatggaattccgcccaaaccgtagcacgtaaactttgactggtgtaaagaagacccactctacaatgctgtgg

SEQ ID NO: 34465 - DNA, 366 bp, Glycine max
gaggagacattcttacgcttgtatttattcaatccttcattgttctcttctctttgttgtaaaggaagcttcccagttatggagatctaaatccgctgttggttcttccttgcaggtacttgatgtgaatacctgtatatctatttaatgatgtattgtgtgttcactgggctatcagaactacattctaccatgcatttgccttgatcacgtagatgtatgtgtcattaggatcattctacaatggaaattggtctgattcttagaacatgatattgactggctagtttatttattatcacaagggatctgggtacaatagcctagatgttgtatgtttgtcttaatgcatctctgatcgagttt

SEQ ID NO: 34466 - DNA, 569 bp, Glycine max
  unsure (1)..(569): unsure at all n locations
cacttttcattttgtctagaactagntatcttatctggngaagatggnggcaggtgtttgcttcagttacaagatataacagaanaaggttaacatttgtttggcanaatangatgtaaaaggaactaantaggatgaaggaagtcaccanatagatcanaaagaatctgtgcgctggccaatagtggagcaacttggaactggccaaatttgattgatgtagatagaataacctgttcttaactttttgaatanngaatggctcatgggtcttttctacaatacgaagcacgtaatgatttatttacattcagacatggtttgnggtccttnagtccttatagtgatactctctagtattatctctcaacattcttcaaatctttctntctcgtttgggtttataacannaatataccgtttgtanattggcttgttaagaccaaaactgtgcatatactaaaatatgtcctttttgttagactagaggcagaggttngnggcaacgatgaacaancatatttcacgaaggtatttcatgatgccttgttgtgattatgaaactaggn

SEQ ID NO: 34467 - DNA, 596 bp, Glycine max
  unsure (1)..(596): unsure at all n locations
tgtgtacctgaccgcatcttaatcaccgctgctgcagctgtggaatcattatggtctatagatnntttgatgatatntatggggcgaaatactgtgtgtgttgacanttgaaattttctatagcatatgctattgtcaatggtgaagaataatataattggaaatggtgtttgactatgntacatcaatatctaggtgagaaaaaataattnggttggaactctatgtctaacgttcaaagataagagtctcactaatttttgcattcatgcatgcatcaatatctatcatttgtgcattgatcgtggaccaatctatcaatatatattatagtatggagaccactctaacattaagttcatacattangcgccaatatgtaagtatgtgtgtcaattgtaaattatntgactgtacttatgttatatgcatcacgccggttggtccagtactagagtttcgtatgctctccacgtgtgtatgcttatgtagatttctctaaatnaaaatacgagctaggttgcatggagggctactgttctactgacatcattgactggagagagatgatagtctatgggacttcttctacaacg

SEQ ID NO: 34468 - DNA, 391 bp, Glycine max
  unsure (1)..(391): unsure at all n locations
cttctagaattgctngttagcatctcatttttaatgtattgcagagggggtatgatatgatatnttttcatgatatcatatttgaaggatatatatgggaattatctaaagctaattatgtcatgttggataactggattttttaaatgtagttatttttgtgtaaaataagaatgatattggtttgaacgaatgcagtatatgcagcatgatgtgctacatgtggacgattggcatgaacgatttttaaaaatattgtttaagcatattatatatagcagtgcatattatgctaatattcatcttgactcacaattaaattctatattcacaaaaataaaaattgtctgtatgtcaacaatgtagctggataacgtaatattacattata

SEQ ID NO: 34469 - DNA, 358 bp, Glycine max
  unsure (1)..(358): unsure at all n locations
gtcggattgaaattggaaatataaataaatcaaggtagtcataaataatagtttggttaatatttttgacttgaattatgatttcattagtcttgaaatagctttttttcttttattttaaaatgtaggataaaaataaaataacatatttataaggactaaaaagaatataagtagacagagaaaaaacacactaaatatagaaataanaaaatattaaaccataatttttaaaaactgcctaccagtaananaatacaatcaataagnaaatgcacaatcatatactgtgacacgactgctaacttgtcggtagtacttatggaattgaccttacaaagcttctaaatatataaca

SEQ ID NO: 34470 - DNA, 326 bp, Glycine max
ttataataaactcacccatcgcaatttttgtatcatgtggttggtacctgtgatgatgccaacctttgtttatgggagcaaaatgacagccatagagtacgagaagtgagattcttttgtggagccgccgagcccgacgtgataacgttgggattattttgggaaaaagatgtgttttgtaatcaactcttcgatagttggttccatgattctctttgttgaataaagatggtaataaaaatctaatttatgtatgaacaaattacttttcactatgtgaatggtgtgtactgagttactattcctatatatatgtgtattcactt

SEQ ID NO: 34471 - DNA, 337 bp, Glycine max
  unsure (1)..(337): unsure at all n locations
ctgcagcttacctatcacagctgcttanaagctctgctncctatggttcttaataactcgctattatactgtcctgaacagccatatagactcaaatatataagtgaattgaggcacaatatgctgttgggtaagcttactagactnttacagtcttccaaaatcaaatattcaagctctcttagaagaccgacggatggattgatatgcttgagatgtgtacatccttcaagagttagatgttgaagatttacgtcctctntgaaatgtggtaactcaacaagacttgtgcagtctttcaaattcaaataagccagctttcttagaagaccgatgg

SEQ ID NO: 34472 - DNA, 424 bp, Glycine max
  unsure (1)..(424): unsure at all n locations
aatatttttaaaggcttgaatattattgagtataaaggactatgaaattctatagtttttattgaatggaccttagatgtaacaaatactattgtttgggtgcctgtcaagtactagttacaatgtagtgtcatatcattacttaattgacgataaagattcaacacaaggtttgatatatcaagaaaataatgttacccaatcatttattgaagacccaaaataaanagattgtcatctatcaatgaattcaaacatatttatatctttcttttattaacaagaagttcacgtgtgaattattaataagctcttattaataacattatattgataggngcttattaacctgttacctaatatttttagaatttgaaactctttacccaatttaatttgatctagcacaaaatgtcacacaact

SEQ ID NO: 34473 - DNA, 256 bp, Glycine max
  unsure (1)..(256): unsure at all n locations
caagacacaagtgagggtggaattaanagaaaacagagttatctntatcataccgactcacacttaacaaattnttngatattggaggaacatgtagtaacttgtgaagtatatatgttatgtgagaatcattatgtgacacaaaacaagaggaaccagcactagagatacttaaaacctcaccatctcctatgaagaattgatcatgtccatcacagtgagagaactgcttaatgttctgtgattaccaatcact

SEQ ID NO: 34474 - DNA, 446 bp, Glycine max
  unsure (1)..(446): unsure at all n locations
tgatgaatttccatccaatgttggagaaaggttcttgtgtgatgtatagatgtctaaagggttaaagaaatgttaactctataaaaatgatcttgtaaacaatanaagattattacttacttnttgctaacattntcagtagtagttaccgccatgttcaaagaaagcattgtttttttatattgactaccggtgagagtttccataattctcttattattattggaagtaatcattgataaaaatgtttaagaaggaaaaaaaacttatataaaaagtatgcacaatactagaaaggaataatttcttgtgaaaaagtgactttgatatttataatgtttgtgaagtaattaactaanaaaaaaagttgacactccagtaataataaccataacgtcatgtagtttnttctctagctaacttaatatggtataacataacgtttc

SEQ ID NO: 34475 - DNA, 282 bp, Glycine max
  unsure (1)..(282): unsure at all n locations
acattatttccatgacacacatgcanatatgatgaacttgganattntatgcanaactggtcatgcatgcacctatgtggacactcaagtgtcaaanttttacggtcatgtgatgctagggctcatgattcatttcctctattatagtcaacccaatgtttccaaaatatgttcttttatcaattagtgcattcatccgagaccatttcgggcgtccggtatcatatacacagcattcaccctttaggtgtacacacanttttttcanaactagttatgatc

SEQ ID NO: 34476 - DNA, 465 bp, Glycine max
  unsure (1)..(465): unsure at all n locations
agctatactgcanacatctacaatagacctcctcaacctcagcagttaaatcatccactacagaacaaatatgacctctccagcaacaggtacaatcctaggtggaggaatcatccaaaccttatatggtcgaatccttcacaacaacaacaacaacaacaacaaccttatttttagaatgttgctggcccaagcagaccatatgttcctccaccaatccaacaacaacaacaacaacaacaacaacaaccctagaaatagcaaatagttgaggctcctccgcaaccttcccttgaagaacttgtgaggcaaatgactatgcaaaacatgcagtttcaacaagagaccagaagcctcattcagagcttaactaatcagatgggacgaattgctacacagttaaatcaacaacaattccaaaattctgacagattaccttctcaatctgtctagaatcccaaaata

SEQ ID NO: 34477 - DNA, 202 bp, Glycine max
  unsure (1)..(202): unsure at all n locations
gttcacagatattcttagtctcggaacattccatgatattataaanatgtgttggtaactataaaaatggttggaatatttttatatgcccaggaaaattaagacatgtgttcgttgactctttttcttaggaatatatataataactactaaaatatcattgtgcacacttggtgtatatgaaactgcctattcacccttg

SEQ ID NO: 34478 - DNA, 235 bp, Glycine max
  unsure (1)..(235): unsure at all n locations
atgaagaacgtcnaagaacggttgtaatctttgcgaaatacctcacggaaaacgttacggaagcgcctccgcttaaaatttcttcacggaaacaatttttccaagcaaattcgaaagagagagaagtgcctaatgggctgaaccccttccttcttgccttcctcccctatttatagcaaaataggggaggtggttgccgcccagctcgcccaggcgagctcagctctgccaggcg

SEQ ID NO: 34479 - DNA, 261 bp, Glycine max
  unsure (1)..(261): unsure at all n locations
tctttttctatgcaatcatgtatatatatatgaggcataatatccatcccccaatccaaaaatanatttggtttatctatgttntgatcacacgtcattgaatcggtgaaagcataaataaattcacattaagtaattctgttttattcatttgcagcagacactaagctatttgtttatgagaatattaagtaatctaaccatgggtaattaagggtcgaatcaagtgataatcacacgcggtatttaatatttgataat

SEQ ID NO: 34480 - DNA, 301 bp, Glycine max
gtttcttgagagatcaataaaggaaagggatgtggaagatgaaatgtcatctggaattccaccagaaagactattgttagccaactctaacctttgaagcattccaagcttcccaagacccacaggaaccgtcccagaaagaaaattgttctgaattctaacacgaactagtgaaggacacattgataggcttgatggaattggaccagtgaatgcattgttgaatagtataagcatggtgagaatgccctggctgcaaagagtttctggaatctctccagagagtgaattggatgataca

SEQ ID NO: 34481 - DNA, 320 bp, Glycine max
  unsure (1)..(320): unsure at all n locations
agactggatagcggtttctaatgactcctctgcggcttccacataaggcatagaggatgggcagctcaccaagatgtcttcttcgcctgatacgatgaccagatgcccttccactacgaatntcaacttttggtggagtgtagagggaacaacctccactgagtggatccacgggcgccccaacagacagctgtagggggggtaatatccattanttggaaagtgacttgacaggtgtgagggcctatctgtactgngagatcgatctcttccctaacctctcggcgggtgccgtcgaaggcacgaaccaccattgaact

SEQ ID NO: 34482 - DNA, 367 bp, Glycine max
  unsure (1)..(367): unsure at all n locations
cggacttcactccccgtgccaccctggaagatataagccaagcccctactttcgaggggcaactcccaccttatgacgactatcccgggcaagacgatgaggaaggagatacccatctcggtcccctgctccacctcaaagatccgttcccccatgaactaccccaaccaaacatagtccgccatatcccgacttcacccacacccgtaaaagaatctgttcccttcatggaagataagggaaagaatgaggcacttgaagagaggttgagagcagtcgagggcctcngcaattacccattctcggatctagtggacttatgtctcgtacccaatatcgtcattcctcccaagttcaaagtaccgga

SEQ ID NO: 34483 - DNA, 167 bp, Glycine max
  unsure (1)..(167): unsure at all n locations
tgtgtctaccatcacgaatatcgtctccctttccattattaggggaccacctgngccgccagatccctccaccttttgggcatgttctttgaatgatccgtcctnccttttgcacatgttctgtagttgcatcctatccggaaccatatcaaaattgtactgatact

SEQ ID NO: 34484 - DNA, 377 bp, Glycine max
  unsure (1)..(377): unsure at all n locations
tggttggaggtacttacccgctgaagactgaagaacgatgattaacgaatgaagaacgtcgaagaacggtcgaaaaccttcgcaaaatcactcacggaaacgttacggaagcgcctcggcttggattatcttcacggaaacaattttcctaagcaaattcgaaagagagagaagtgcctaagggactgaacccttttctactacacttctccccctatttatagaaaattgggggagaagcttgccacccagctcgcccaggcgagctcagctagcccaggcgagcagggttgcttcctccagaagtaacagccttctggagggcccaagtgggcctggttgctattcgcacccccatttntactaagtacacccca

SEQ ID NO: 34485 - DNA, 622 bp, Glycine max
  unsure (1)..(622): unsure at all n locations
tgtgcccttgttggacnnccntnattgattccgcttcgaccngcacnctctgagtcacctgaggctgcagcttatagagagtaanatcnattggaggacaatattcttgctaacagccacgaaggagaagaagttgtttctacccagaattgttttggatcacatgagaaaaaaaggttctcggacatacgatatctaagctttaaccaaagggagatggaccatttctagtgcttgaaagaatcaatgacaatggcttacaagntgagctgctcggtgagtataatgttagttccatctttaatgtctctgattnatctctttatgatgcaaatggagaatccgatttgacgacaaatccttctcaagagggagagaatgatgacgacatgaccaagagcataggctatgatccacttgaggacttgagggccttnacatgggctatagcaggtaagccantgagctcttcacaagtgtngtctactatttgatacaactcacgcttcaagaaaaaagccanagttggagttgatcatggccaatggagaggctaatggacactttgctcatttagagggtacgtgctaatataaccatcttgaagtgttacaaatatttt

SEQ ID NO: 34486 - DNA, 403 bp, Glycine max
  unsure (1)..(403): unsure at all n locations
tgattgtgagactcatcttggtttccaaccttgtgctatgaaaatggcagcgagacccactatccacaatgagagaacaattnttgtttaaaaccttacatcttgtatgacagatgttctctctttgggtctggattagtgtcacaacctaccctttcgcgggagggcgaaaaggtcaaaatatgtgggccaaggagtttgtctcctagggagaaaacaaatggagtcgccaccaatgtttattcgaggaaaattttagaataaccaataagacaaacgtctgagtatcttgagaatgagggttcaggagttatttacacacggtgaaggtatatcacctcacgcgtccgcccaaggaacgacagccattaatctaatgtgaacaatcatgacttcacattta

SEQ ID NO: 34487 - DNA, 376 bp, Glycine max
  unsure (1)..(376): unsure at all n locations
gctgaacttccgtaagctagttgagctgagtagagtcttacatganggatctacggacgaaactcagtttaagttagtctaaacctaagagggttgtctaaattgngcctagtcttacatgatggaattgcggacgaggctnggatactcatcctgatgagggatngaagggttagtaatttaggctacaacatagaacacaagagcatganntgatagagaaatatatntctatgcatcagcttgtttgtagaaagacccaacatacctacctactgctgtcattttatttaccttngcatttatagttnttagcatannaaattagtttaaatcctgtttgaaatatcacttatacatgttctctcaacaattc

SEQ ID NO: 34488 - DNA, 633 bp, Glycine max
  unsure (1)..(633): unsure at all n locations
attcactcactctctatacgtctatgcgtaacttattnactatcattttttttactatatacttanaaagggaccgtgngttgancccttgtattcgcttccatggcattangcgagacttanaancacaagcgtatagttagcacgcagcatgagatgtctatattctttatatatattataagaacacgacctgacacgttgcgtctatctctactctctgagtactctcgtatggtctacacatcttttgttcggcacgaatcatctgagttatgctacaatatgtgagtctacgttggacttagggcagatttctcttatgctcttattcaaaaaagaccctaatgctaggtgcccaaatctcttttctcatggttggaattgttaattgcttgcactgatactatatgcatagcagaaatctaacttcggtattggataatataactgacttagcttctatagtgatacagagtgaaacaaattataaacggtggtacaccatctctagatcataattttattgccactctagtcatgagaaatcctctagatgctcatgaacacatcgttntgaaagacagaactctatccacgatctttgtgtaattgatggactgactaatctcg

SEQ ID NO: 34489 - DNA, 306 bp, Glycine max
atcttatatcgctcacttaccatctatacatactgccatgtaatgcatctactgacaaaaataaggattcatcaaaaaagaattctagaaaaatagaatccataatggaaagcaaagagagaatccatagagaagcagaaaagaatcctaatgaaagtaagaaaagaaagtcttagataaacaatgtcaagttgacactttcacatgtcataaaaaagaagaccacaatatttcttatcacaatctccacattttttgcgctaaaaacaaaaagcaatagcacctacggaaactaactcagacttt

SEQ ID NO: 34490 - DNA, 452 bp, Glycine max
  unsure (1)..(452): unsure at all n locations
tatctactacgcagctngtagttacatgaatggccgaccaagaatgagaggaatatatgcatcctcttctatgtctatcacaacaaaatcagttgggaatataaggtgtttcaccttcactaaaacatcttcaatcactccatacggtcttgtgatggatcgatttgccaactaaagggtcatgcgtgtaggcattatctcaagctctccaagtcgccggcacatgaagagaggcattagattgatactagctcccaaatctatgagagcttttcctatagcaacctcaccaatagaacatgatattgtgacaactccaggatctntgtgcttatgaggaaaaatgcattgaatcacagcactacaattgccttccaccataattcaatcattgtggatgtaccggttcttcttcgttaacatatcttttaaaaatatgcatagagtgacat

SEQ ID NO: 34491 - DNA, 307 bp, Glycine max
gcttcgccgagtgtccccattgaaaaacctttattcaaacctttcaaagttagtgataaggctaaacgaaaaattagggaacttagaaaaactaaatccttaattgaaggcgtaggtgacaatcatagcgaattactaaacaagattagttgtttgcttaaggtcattccagatactccccaagcttcggaaaatacttccaaaatggtaacaagaagtacctccaaattaattaatgttattaatgaagatagtgaccaaaacttagataacacaactgagatatgatcagtgtcagaaaagaata

SEQ ID NO: 34492 - DNA, 297 bp, Glycine max
  unsure (1)..(297): unsure at all n locations
gatcgctaatntgtacgtatgtntgtgcatgaaatctgganaatcttgaccgtctatgaacaaattaacggttcgtagaaaggaaataatataacgtgtccgagattatcacgcatagattaaccacttgaaagtggagaccacgactactaatanaaataattattctatgtattatataccattttttaaaaatatccttcaataaatatgaattttttatatccttcgtanactgttaagatgtaaaggatgtcacttccctaanaaactgttttattactttcttaactattt

SEQ ID NO: 34493 - DNA, 309 bp, Glycine max
  unsure (1)..(309): unsure at all n locations
aggcttcaaaaatcgccatgcccctctctgatgcatattccagccccaaagaattgatgctggttgaatatagcagcatctatattgctttgtatcttacctcttggtggcttcttccaagttgtgggttgcagattacaagtgtatcaactatcaccttcttcgagttattcctttcctgagaccattctgaaagtattgaaatgctagggactggttcctcaatgttccaaacctngtcattccttcttcttcagatgcaccaaatggccatagctacattacagcagacttcttgagagaaattct

SEQ ID NO: 34494 - DNA, 291 bp, Glycine max
  unsure (1)..(291): unsure at all n locations
acacacagctcttcgtgggcccttcaggctcaacacgaattgtgtntgggctctcacatttcaccccaatgatanttttttaatctttntcataactntctttaatataaaataaccttagaatggcgttggataccagaatttaactgaggaaagtaatttatcagaagaattgaatttttgtaatttagaattcattggtntggatgcttttatgaagaaattaaaatttggaatttaaaacagaatttaaacaactaaacatctggaatntcaatttctttctaaaat

SEQ ID NO: 34495 - DNA, 378 bp, Glycine max
  unsure (1)..(378): unsure at all n locations
tacctcagctggtntcataagatcatgtntactccgtcgcacgttgagcaagttttgcacagcttgcccctctatggacatcctcacccgactagctcttactctggcctgaactcgaaccaatgcctgcatgcaccttaatgtccccgctgtctgcttcctcacctgtctccccccgaacaagtgcttgaatcctcaccactgccttcaatgccctcaaagcccttcttgcctgcaatcaccacacaagtgatgtcgaaatataaggttggtctagtggtaaaggccgaacgcataatgaaaaggtggagaggccatatgttagaaactaacaatcctagcaattaatatttgtctataaaaaaaaatagtgaatgt

SEQ ID NO: 34496 - DNA, 567 bp, Glycine max
  unsure (1)..(567): unsure at all n locations
tgatctccttntggtgctctanatngngggaatgtgctcanatatgtnngggcaattctggttgttntcttgcttgattgngttgaattggggggttgtatgagatggccttangcctataatgcatnttgaagcaatgggacatgccacattgtccccgttctcttgctattgatgcctanacacgcgcccgccaagtgttcggtgaaatgcctcaatggcattagcgcgtgattntcgtatggaaacaacccatgtggcagattcggntgcacatatttatctatttttgggacatgcattcatgttcgaaagggctagagtaatcgcctcacatatatcctatgcctangaaccaaagnnnttatgcaaaaacacangaggngtgcatattgngtaaagtactcttttggccagcaatcagctatgagccatgcctacatanttccctacgccctagatgttangaatnntgctatcntanttgtgatggtaggatacgtagaaaatacctttgcatctccactttgggtgtgtagcanacacatggatgtatgacatggaatn

SEQ ID NO: 34497 - DNA, 604 bp, Glycine max
  unsure (1)..(604): unsure at all n locations
ttactaatttaacattaccnccatgtntnnnttctcttnatagattantctttanttggggccgaggtgaaccatganttgactgacttgctaanagcgaacnatanaaacacaagctgtagganccaaccttgctgcgcagatgtcttaaacgtcacttatgtgtacacattatctcactaggatacaagttcagactaacactacttttgggagtatacacttatcaccggagtcttctaattacagattatagagcttggatctttctaatccatcttcttaccaggacctttgagaggtaatatgaatagtccttcgatgagctcaatggaaggttttatatatcttctagagatctaactaataatgcttntgagtagaaatagcactgtagagcactgaacccagatcatctctaaaaacttcaagagagatacagctgctttgatgaccctgtgatccctcaactttgttggacccgacgcctcactacttaagagggatagagctagntgcagatgaagtacattaattaataatgtcttcaacatgccaaaaaattgttcgcaaaaataaatgaataaggaagagagatgccacg

SEQ ID NO: 34498 - DNA, 251 bp, Glycine max
  unsure (1)..(251): unsure at all n locations
taccctatacatctatcatacatcaatgatgaattcaaantagaaaccttgatgnttagtcatgcatactcttagagtgatctccattatatattggtagcaagagttattatcatactttaggtgaagacaatggcatacatataatgtttgactttctaaactcaccaagtatggaatataaataacataaccacaatcaaatatatatatatacttaacacatntagtatgaaaaatttcaacaagta

SEQ ID NO: 34499 - DNA, 362 bp, Glycine max
  unsure (1)..(362): unsure at all n locations
gaaagcttctcaaggtagctacctagtctataaatagaagcatgtgtaacactngatgtaactttgatgaatgagagtcttgtgagacatacttcaaagttccacttctttgcctcttttattccttcaatttcgtgctcccccctctctctgtctttttctccattgaagcatccttccaagcttcttatccaaggctcatcttggtggtgaagctccttcttccatggcttattacctagtggatggcgcctcctctcacctcttctcttttgtcttccgctgcatctccatggtggaaaatcaccattaaaggacctcattgaagctcatagatccacgcctcatagaagccccacaag

SEQ ID NO: 34500 - DNA, 330 bp, Glycine max
  unsure (1)..(330): unsure at all n locations
tttatgaaaaataagatgtaaagtctgaggctttaaaattgggtgtactaaaattgattntctgtgttcacagannaaataaggtaaaatgtaccacaatntgtgttatatgctatcntttaccactaactctgtggagtgcacttgaattcaaattctcacaatagacaaataaaaccctcgtatcatcttcttaattttatatggcatgatgaacagtaggaggaaacaacaagttgacttaccacanttccacatgaagaatgcattgacagaatagctctttcaagaacacacaaatacacaaaatccacttgacttctgtaacac

SEQ ID NO: 34501 - DNA, 185 bp, Glycine max
  unsure (1)..(185): unsure at all n locations
atattggggtcgtgctattttatgacacatacgtatntgcacacataaaataatttgtgtgaagcattttacgacacctatccatgtacatatatcttgacaaacctttttatgctacatcctatatatatacacacacatcttttttggaatgcttcttttgtacctactcacaaatacacatt

SEQ ID NO: 34502 - DNA, 323 bp, Glycine max
  unsure (1)..(323): unsure at all n locations
tgacattccattgtgaattgatcactntgcatttctcaaagaaatcagcgattntgttgcttgattcctctccattgagggggtcaatgtggaagccggagaccccatcaacaataatntctgctggacctccttggttggtggcaaaagtgggcaagccacagttcattgcttcaatgacagttaatccaaatgcttcatacanagcangctgcacaaaggctcctcttgtgtcagcgatgcaacggtagagctctccattgcgatacctattcgtctgtgcagcaatccatctaaattgacccttgagttggtacttatca

SEQ ID NO: 34503 - DNA, 416 bp, Glycine max
  unsure (1)..(416): unsure at all n locations
cttagctcctaaaaatttatattgtttagttttttatttgattccagtttggcctcaattttaaatcagatattttgtctctctattttaaaacataaataattntaattcttgtgtgagttaaccatctcaagacaaatggttgactttgacgtgatatgaaatctatgtacgcaatttacataatacttattgtaaaaaagatttaataataataaatatagaaaaatatcttaatggaaatncaactaataatcctttataaataatgagagcagtcaataagatatgtgtcttagttagttaattacattaatattatctnttatgtattattatgtaagattatttcttttcaaatatcaaaattatattctaacaatattaatatataatatttttatatatgtcatata

SEQ ID NO: 34504 - DNA, 320 bp, Glycine max
  unsure (1)..(320): unsure at all n locations
tatgtgtctcactttcttcaacaagatcantctttactatttccanatcttcgtaatctttttgtagaaaaacatggtttgtctgaagatcatacctctcttcattaagctaatcttgcaactctttaagtactgtcaactatatttgaactacctcaattnttgtttctagatcatgaaagttctataataagatatccttttctgtggatagttgttcattatcaagttggagcaggacttcggaactttgtcctttctaacaatcattgcttattgaaatagaattacaagaactaccatnnttttcttcataaaca

SEQ ID NO: 34505 - DNA, 184 bp, Glycine max
atgaacaaacattatatcatgcgctgaccgtgccgaacgaaccagctaattcatcgcataattgtccactaactatagttgaagttcctgaacagaatgattttcatacacatgaccgactcatatgaatcggtggccacaataatcatgaggtggttgacttctaagagggaaaaatgtcatg

SEQ ID NO: 34506 - DNA, 299 bp, Glycine max
  unsure (1)..(299): unsure at all n locations
gagatctgtatggtgatctgcagaagaacatagaccacagactcttgcaacatgcgtagagttatgattcatggcaagctgagttactanggtgaccaaggcatcaagtcttccttcaagctctntatnttagtagatgaagatgaatccatggccacctcatggactcctctaagaacaataacatcatttcttgcactgaattgttgggagttggaagccatcttctcaatcaaattcctagcctcagcaggggtcatatcaccaagagctccaccactggcagcatcaatcatact

SEQ ID NO: 34507 - DNA, 349 bp, Glycine max
tcatttcaatttctcactagtaaaacggatcattttcaaggtccaacgccttaaaatgatcacctcttaaagtaaaaaagaatcacttgataagaaagaactacgtaggtctgatttcctcaccgcaattgaggaatacgtatgagcaaagggaaacacccttgtcgaccacaaaaagagacaaatataaaaagggtattaaggatataaagacatataaaggggaacatataaaatcaaagtcatgtttgcacattcgattaaaggctgctgtccctcgggacggacgtgtggggtgctaataccttcctcgtgcgtaaatacaactcccgaaccttttcacttaaaa

SEQ ID NO: 34508 - DNA, 288 bp, Glycine max
  unsure (1)..(288): unsure at all n locations
actatattatctacacaaaaggtacacttctctatattngcatagagggtgtttttcctaaggactgaaagaacttgtctgagatgtcctaagtgatcatctatgctcctactatacactataatatcatcaaaataaacaactacaaatctacctatganatcccttaaacatgatgcataagctcataaggtgcttggtgcatagtgagccaaaagcatactaccattatacaaccaacttgtctgaacagtttcactctaccttttatctgattgtatacccttt

SEQ ID NO: 34509 - DNA, 392 bp, Glycine max
  unsure (1)..(392): unsure at all n locations
gactngagtcatcaagagattataaatatgtgaccatccttgaatcaatctttcaacatccttgaatcaatctttcaacatctctcaatattttcttttatctctttcaacactttcaaaagaactttctaattgatttctcttcatcattctaaaagtttttgttcaacactttctcttccaagaaaagttctttgataaaaaacttgtgctattcatctttttcattctcttctccctttgccaaaagaacgaaggactaaccgcttgaattcttttgtgtctctcttttcccttacaaaagattcanaggactaacctcctgagaattcttttgattcttcccttccccttaagaaaaagattcaaaggactaaccacctgagaatatc

SEQ ID NO: 34510 - DNA, 666 bp, Glycine max
  unsure (1)..(666): unsure at all n locations
atgtccttgattgacnncnnntattgttcccccttgtacncgcgatcctctgagtcgacctgaggcatgcangcagaagcccatactcgagccatagtgtgacgtataaagatatatacgtcaaacatcagaatcagtgcctggcaaaataatcagagtaaaacttagtcttaganatggcattataccaatcaaccgaaccatggcattttggagnanataatgagaagagaagagagggtttctaagaagcatcaaagagtcttnttagggcaatgttgtgagtagaatagtcattcaatagatactataatggacaaaacttagatatggcttcataattcatagtgtcattggtgtcgctttccaatcagaattgaagtntcacattgataatccatgcaatanaagtgtgcaccgaaataggcacacggatactaagatgaattcacatttgaatgagatcagtaanacaagatctaagaactgtatctagtcttgcccaagctttgatttcccttatttatgcaacatatagaatgccacattgaataatttgataacanataggaccaatccataataacgtgagttatagttagatggatacttccagtgggacaacctgtagtaactctgagacagataataatgcctactcttctt

SEQ ID NO: 34511 - DNA, 371 bp, Glycine max
  unsure (1)..(371): unsure at all n locations
ctaatatgcttctcagntcaagaaaaccatggttacattcatcattgactttnggacaaggaatgctaccattactttctgcatgccacccagatcttgaccactcacgaactacagtctcagcaacagcatttggttcattntgttcaacagcatatggttcattgtgttatacacttatattatcctcaccatgcaggtaatcacgaccctgacagacaaactccaacataattggatctgcaccacctacaagctggccagttcgaagctcgcgacaacagatgagacanaggtcgaaagagcattntgtacagcttctgtggtaatcaaatattgacgttttgcagttgtcactacaagagagagcg

SEQ ID NO: 34512 - DNA, 411 bp, Glycine max
  unsure (1)..(411): unsure at all n locations
actaagctattcggggacaatngatgatcgtatgcaatcngcaagagttgtctcaccttatgcttatcatatctatggagcagttcctagaaaaagtgccatggcctgaagctcatctccctctggaaagagcacataaggatgttcctcccagacttgtaccagctatgactgagctgacatcagctgaaccacaacctcctatagtagatccacctgcttctccggagcttgagacattgtctcctccggcaccacctctgataatcatccctgatgactcagctgatgaagttgtngctcctcctgattcaccatcttgcaacatagatgatggttctaactaatctgacaggatggattgctgangaagttgtgcctcatactgacaagaatgttgatatccctgat

SEQ ID NO: 34513 - DNA, 260 bp, Glycine max
  unsure (1)..(260): unsure at all n locations
tagtgttgccatgttttcaaagcccgtactaaggcatacaactccttatcataagttgaatagttaagggtaggaccacttaacttttcactaaaataagcaattggatggccttcttgcatcaacacagccccaatcccaacattngaagcatcacactcaatttcaaaagatntttgaaagtttggcaacgcaagtatggnggcattagttagcttttgcttaagaacattgaaagcttcttcttgtttctctcccca

SEQ ID NO: 34514 - DNA, 390 bp, Glycine max
  unsure (1)..(390): unsure at all n locations
gctttaccttgactggagaacctctngccggttngattngncctatgctttctttgtgagacaaaagctggtgcaaatcaaaactccgatatctcatgggtggaatggatgaatgcatgaaggaatgcatataacacagatgtaatctaggaatgcggnggtccggngaattcgtccccttcttagacacaatgtctaggggtagcaaagtgccccaacgtacgtttntaagaaggcgacacggaccctccgttggtttgtatacagaagggatcaagacagaacccatatgcgatgcctatgcaaaagacacaatgcgggaatgtacacagtatgataatattcactgaacataagcaaaagggtatatgatacttatgcatggcagtg

SEQ ID NO: 34515 - DNA, 369 bp, Glycine max
  unsure (1)..(369): unsure at all n locations
ctataaatagacctcccatctttaatggagtgggttaccattactagaaaacccgcatgcaaatttttatagagggcaatagatttaaatattttggaagccatagaacaaggaccttatgttccctctataatagctggaagtgcaacaatagaaaaacctagagcagattggactgaggaagaaagaagattagtacaatataatttaaaggccaaaaatattattacatctgccttaagaatagatgaatactntagggtttcanaatgtaaaagtgctaaggatatgagggatacactacaagtaacacatgaaggcacaacagaatgtaaaagatctangataaatactntaactcgtgagtat

SEQ ID NO: 34516 - DNA, 439 bp, Glycine max
  unsure (1)..(439): unsure at all n locations
attcaaaataggtaagatagaaatgattatagtcattggcacaaacattgacttctgcaattgctactaagcttgcaatcaaagatattatatatttagtaatgaactntgcattcagcaacacaaatntgttntatttgtactcttaaatctgttagatttcctgttcaacttgaaatgtcaaatntctatcttacgtcttttatttggacaatatctaacaaaagatgcaacaaagaagtgtagtaaaccctgtatcagagatggacatcagttctttatatattgcttgtctagcgcaccacaantttttntatctcttttgttcatggattaaacangttttatatagttctcgtttgctctagttaaaatcggtattatacttgcataagccatcaatgaacataaatatgacacttganatgcacaacacatg

SEQ ID NO: 34517 - DNA, 348 bp, Glycine max
  unsure (1)..(348): unsure at all n locations
acatatatgaataattaaaaaacaataaaacacaataccaaaagtaagtacataccactagtcatatatcattaaagtaattaagtttaaaacacataatcataaacaaccaagagcaagtcaatataatcatcatgttcagtcatactaagcaagtattaaaagaaatactaagtattcaaatttcataaaaacatagccaaatacaaggcttaanaacaaaatataattataatctaaatctattatcagagaatcaaaacttaattctaagtaacaaanattagttatgaacacatacatggtaactcattacttatctcaattattttagcatatcaatataat

SEQ ID NO: 34518 - DNA, 354 bp, Glycine max
  unsure (1)..(354): unsure at all n locations
ctgtctntgtccggattcaatgctgtctgcagcaccggctccgcttccctaactgtactggaggcggntgcggtggctatatcctctatggttttctggagntttaacatgacctccgagatggaagccatttgatcttttaaggccgatagatcgaccttcatctgttcctgcacgcgctcttcattatccatttttctggatcgagtgttataggggtgccttggtgttttcttagttatgatgaaattcctaaagaaataaacaacggtgagtatgccaccaaaacatgagtatgcaaatggatgatcggagcacttggatccaccccaagattttatataacgtaatgag

SEQ ID NO: 34519 - DNA, 311 bp, Glycine max
  unsure (1)..(311): unsure at all n locations
tgaatgatgaggacatgttcaagagcaatggcaaggatccacttgaaggacttggaggacctatgacaagggctagagcaaggaaagccaatgaagctcttcaacatgtgctgtccatactatttgaatacaagtccaagtttcaaggagaataagtcaacgttgtgagtngtatcatggcccacatggacgaggactaaatgacaccactatgtctcaattgtagagtgtgtagtttgtctaaataatggcccaatccttgtaaagttggctgaccaaaaatatgtcttaggtttagttcaagttgtaat

SEQ ID NO: 34520 - DNA, 581 bp, Glycine max
  unsure (1)..(581): unsure at all n locations
ggggatgnnccatgttncactagaacctntgatctcagagncacctgcggctgcagctatctcntttctggnnaaaaattatattntgttttaagtcttgnannnngccaggggnnnangaacattgaacacttaatatttcttttattattttgataggatgactgaccatgatagatatattaacttgctctggcttggtaatgattatgggttttaaacttaattactttaatgatatatggctagtggtatgtactgacatttggnatggggttttatggatatcttttttaattattcatatgtnttatctgaatattgtggatgattttctagtttgtttgatgttatgaatgaagtattgtcttttctaagtcgatgaatggttaaagtatcttggtggactggtatctatttattgtgatngatctattcatggttcttgttcatgatcggttatattcttcaatgatgcatgtaatgatatatgttgtcttgacttgtaccactttgcttttgttgtgcagaagggagagaatagggataatcagactccatgatatcacttatttagatag

SEQ ID NO: 34521 - DNA, 488 bp, Glycine max
  unsure (1)..(488): unsure at all n locations
ngatctnaggttgggtgaaacttgtcatctcttgcgacccnaganactaagcttgatctgcaccgcccacatcnaganactatatgtcaatgttattgtacccgagggcagccgcgtattggtatattatatgacttcgaacaataggatgttcttatttgataatatgatagacaatatcaatatgctgatgactatgggtgttaatatctgtatatcaagtccttgctctgatcgatgagacttgcaacgaagatcgcaatgatagcaaatatgttgtctatttagtgccacttgcttttgagatgcccagggaagaattgatacatctgactgacgggaattactatttcaggacccagctaagacaagggagattggaataaggggatcacagaaagatggatgtgtttgaccaggtgctctcaaagggaatgcgacagctatatagaatngtatcacaggtgtatacaggagaacaaaccatg

SEQ ID NO: 34522 - DNA, 235 bp, Glycine max
  unsure (1)..(235): unsure at all n locations
atctccttgataggggccaaatgggtggactcagaatcgccatgcatagagttgtcaggctctgagtctgaggtgtaatctattcatgcagaactaataggtcatataaatctctacataatgaagtaaaatggaaattctaccacaacaaaattacaaataataaaatgatgctagagaaatntaaggaggttgatacttnttgaatcanaattgatatagattgaccatacta

SEQ ID NO: 34523 - DNA, 90 bp, Glycine max
  unsure (1)..(90): unsure at all n locations
agagacnagcggcacaaggtgggtggggaaagccccgccaggggggcgaacccacacccagcaggaaaggacacaagaaagcgcaccaag

SEQ ID NO: 34524 - DNA, 264 bp, Glycine max
cctgaccttcttttgtgtgggagtaatgaaagtttacagcccaagcacctcaacagcatgagccagaaccagaaaacaatcactcatttcaagccaccatctctggagctgttgattgtaaaaaaagaagattagagacgagatccaatgaggatgctcatcatgaaccagtgccatcatcagttgatgcaccatttccaggagtagatccatcttcacctcaacacgcaacagactcttccattctgatcttatagatacatg

SEQ ID NO: 34525 - DNA, 602 bp, Glycine max
  unsure (1)..(602): unsure at all n locations
actgtgacgtcagtacatcgacnanngcgacacnataaaaatctcaagctngntgtgcaccatcacccgaccgccacctagaccacacttgatttgtctcctctaaccnacaggctggagatgaggaagtgttgaatggtgaaacttcctgctcttattgttgaccacagagtggtacctggagatatgtacctggggtcaagagacctcggggacgtcatgtggggtgctatagcccaaaatcaatcttgaccgatcccgacccaacccgggcatagtctgtcggtgagaacctgtgatgtacctaagctggcgagctcctggcagtcaacagataaatggaatacaagaccaccaagcatggaggcttgtggtggctggccagctgtgaatattgtgtatatgtggattgtggctatggtatagattacacgggtggctatctatacaacgcttanagttgagacaagacgctattattgtctctgtgatcaacaacccatgcgtgtatctattacaggctcgaaactactcacgaactaaagagcactcgaatcattacctcctgtcaatgatacacagagaagggttactggtatacg

SEQ ID NO: 34526 - DNA, 603 bp, Glycine max
  unsure (1)..(603): unsure at all n locations
atganncatgtancactaaaaccgtgcgnacnccnganccnntnagncgacctgcaggcgtgcaagctntctccgcgaggtatttatgncaatattcgtttattctaaganncncnnngnngagtagtnagaccccgaatagatgagnggcatcgcgataatataacaaaagggtttttgnttagcgattctacangcttccgctgacgtgcgcgtgttgctggattctcttgatcaaggtaacactaacttgtatacttcatttgacctattttatctattctgggtagtaataagtaatgttgcatgacttttagtaacgtcgtattctggttgcactataatagagaatgaaccatgatttctgtagatggatccacaggggtcttganattgctgcaagtgctntaacattatactgtccaacagagggggcttgactgntgtagttcaacatatttttcgttcttgaccaataatgcttaagatagataagctccttcattctanaagaaccgtaccttcaagattttgtttaatatgtcatgacggaatctttataaaattaatcaataacgttaagattcgtctttctataacccg

SEQ ID NO: 34527 - DNA, 352 bp, Glycine max
  unsure (1)..(352): unsure at all n locations
atacagaattcaccactaacatactctagtgccccatttgcattatgtatcaatttaccattatggtgcaaaataagagtgaattcaccacaaatcctacaggtaaacataaaaagtcatttttttttattttcacaaaccctgtttatacacaacatcagtaacgaaaaaaagtaaagaaaacaattttgagaacccaaatataaactccaaatgaaacatcatttgaaaaaaaggaacacaaagccaaatgagaaaaccaataaggaacaaactgttagagtanggggagcaacatgaagacttatccttgaagcttgaataagctagaagaagtgtcgtcttttacatg

SEQ ID NO: 34528 - DNA, 373 bp, Glycine max
  unsure (1)..(373): unsure at all n locations
aacaccggtcacgtgtctactatcattgggataatctctntctctggttttgggggtgctacttgagttgccaagcctctccatctttgggcgtgttctttgaaagatccgtccccccttttgcacatgttctgtagttgcatcctatccgaagacattatactgacactgcctaacgaaggccaccactangtccttccaagaatggactcgggaaggttccaagttagtgtaccaggtaacagctacccagtaagactntcttggaatgaatgtatcagtaattccttatctnttgcgcatgcccncatcttccgataatacatctttagatgggtcttggggcaagtagtccccttgtacttgtcaaagt

SEQ ID NO: 34529 - DNA, 277 bp, Glycine max
  unsure (1)..(277): unsure at all n locations
gcttgatgacatgcnaactttgtatggtcctcgtgaggtgcttggcacccatcattaggcaatttgtgaaattccgggacatgccggaaaacaaaagaaaatattgatgcacaatccgttaggttccgtgacacaccggaaatcaaatggaagcatcgttgcacaattagtgaggttccgtaacattccgtaagtcaaaaaaggggatgattatgtaatccgcaaggttccgtaacattacggaaagaaaacaagtatcgttacaaaattcgtaagt

SEQ ID NO: 34530 - DNA, 428 bp, Glycine max
  unsure (1)..(428): unsure at all n locations
actgagatgcagctgtagatgcttaaaaacctggatttgtanatttttcagctcagacgaaagancccaatcagagntggattcagacctaataatgactagcctgacatactttatttttacttctaatatcaaggaaattatattacataatgtataaaacataaccaaattacaaaacatagttttcaaaatatattaaaaataactaccatacgaaaactactttacatgtgttagtttgtacattattttttttgtataggatgttctacttgaggtaattatatttgtgtgggtaaatatattggaccatcttgttaanaaaaattataatatagaataagtgttgtttagaagaatacagtttaataaacagataagatcggtttattaaaatacacaatatattattttttaatagaaac

SEQ ID NO: 34531 - DNA, 337 bp, Glycine max
  unsure (1)..(337): unsure at all n locations
gattccaacagtaaccttaatgccgcttcattataaagtgttaataaaacattaaaacacacacacaaaccacaatacaaaaactatattacctgccatgcaaatcgttttccattcatatcaatctcaaaatctgtcaaaaagtgatacaagtaattctagaaactctataagatatagcaaaatatgtcaataacagacaagtgatctcaccagcagggtagaattgaagaataggtgatgaaggatcaatcatcaaatccctatattnttcaggaagtgcacttgaactgtaacaagaacttaaccagcatcagcacaggatgcatgatataat

SEQ ID NO: 34532 - DNA, 515 bp, Glycine max
  unsure (1)..(515): unsure at all n locations
atatacctatcaatcattatcccactttttttttcttcttcanaatatctaaatcaatttcccgagttggatatggaatgaatgaataacgtcaacctgcaaatgaagaacttatacaaatgtagcatacatttgaaataattaatatcaaagtattttacattgcatgtaactataattaattaattaattaaattatcatcatgataaaaaaaacatataactggtttttaaaaatatattaaatgaaagctgaaacataataaaaatatagaactcttaattaaaaatctattatttatgatttttcgcttgaaaatactgataccaataanaaagtatagcacacatagctaagaaagatagttgactacaatctccaatgaaaagctagttagttacacgtacacaccatgaagatgcatatatatatacttcattccacgactactactttaccggctaaaatattatctaataataacctaatactctactatagatcttctactgta

SEQ ID NO: 34533 - DNA, 412 bp, Glycine max
  unsure (1)..(412): unsure at all n locations
tctccttccgctctccgcaggccanactccactgaatccgnggactttagtctcttgaatataaaattcatggcttagaaaaaatcttgcttgtttctttntattgaaagcaaattaaactgaattcgatcttcacttgagtgatattttgatgaaaatgaatcattaataaatatattgtaataattacgtggtaatctaaaaataaaagtaaaaaaccattttcatcttttattttattctcagtgagagaaagaaataaagttgaatattgagaataccgtttcttccaacttccacggtccaataaaanaattgattcagccatttttgttccagcgagtctcctttcttatttcttcggttcctctcttcttctcttttcccccanaacacaagagagagaagaaag

SEQ ID NO: 34534 - DNA, 446 bp, Glycine max
  unsure (1)..(446): unsure at all n locations
agcacctgagctgcagctttctcccctttgcaacatcaaanagccatataactcggtttataacacagatatgacaatggagtagaaagatatagatatcagagtataaaacacaataagccaaactcacaaagaagaagtaatcaaaccagaatccaaataacttanaatgtcaacaaccacaaaacatccaagactgtaaattaaaaaaccacaagataaataagcaaagtacttagcataatagtgtaatttctaagaaactaanagccaaaatacacggcttataaaagacatataatcagaaactaaaatctaagaagacggaggtggtggtggaagatcgaaactctgacgaatgtatccgacatcctcttcaagctgtgtaaggcgaatggtcataccagcanagcgtgaatctaacgagtcgaagcggtcatcaacat

SEQ ID NO: 34535 - DNA, 229 bp, Glycine max
  unsure (1)..(229): unsure at all n locations
tcaacctaacattgtggaacttaagggtgcatatgangacanacaatcggtgcatttggtcatggaactatgtgcgggtggtgagctttttgatcgtataattgctgagggacattacactgaacgtgccgcggtttcgttgtaacaaccataatgcagantattcacgctttccactccatgggtgtcattcatagagatcttaagcccgaatattcctcatgttgaa

SEQ ID NO: 34536 - DNA, 590 bp, Glycine max
  unsure (1)..(590): unsure at all n locations
natgaacccttgaaccncttaactcttagtcacctgcggcagcaagcttatctcccccaaacatncagcgcgaatagtttattggattctggagatatngatgcagcttcagattccgataaatttgaaggtgcattggttgggaagggaaggggagctccacanggtagtggaaggggctcttttggttatggtggagctatggggactgctggaaatatcaatggtactcatggagatcataacttnccaaccttcttgcccggtcaagttttaataagcatgtttcttgataagtgtcaacagtgccaacttagtggaaaatttggatccaatatatttattggtaatttgcatttctttgtgtgaaataccatgttctcatgcagataaaggtagaatagcagcattactagtctgtgaaaagtncaagtgtatattattactgtgtacagatgagtntttgtgtgagggtgtctgattataacatcnctnggngtggtgcgttgtactgtgatccttcagacatatcagatctttnnttcttgtcaatttgctgatttatttgccactggtggcacagtatcaat

SEQ ID NO: 34537 - DNA, 447 bp, Glycine max
  unsure (1)..(447): unsure at all n locations
agacatttatttctctaggatataattcatatgtatcccgtataaacatcatcattttggagatataaaataagttgggtggttaaggggaaaaatcacaagtgcaatcctctctttctgataaanaataacaatattaactattaagagtgacanaatgtccatagtaaaaaaaaaaggtactatatatttattaattaggagcttcatgaatcggattggtagcgcttatggtaaaccgtaaaccaaaaaacttgaaccttataatattggttaattntggaagcatataccgcagtgtcataaanaaattatatctttaacatttatctccaagatatatatttatataaattatatatagataatgcaactggattctttatgataatatttntattacattacctntattagtatactcatatgttcttaatctactaaaat

SEQ ID NO: 34538 - DNA, 333 bp, Glycine max
  unsure (1)..(333): unsure at all n locations
gatgccagctaagccgattatgcagaagtagatatttttgcaacatccgctaagcggccccacgtgtcgctaagcagtagtgtgtattntgtgaaggcaagctaagcggaccatgtctcgataagccgccactgcctttntcagttttattttttagtttttgaatatgaataacttgtgtcctgattaactggttggtccctttatttgcagatggcttctacgaaacgcaagagtatcggttcaagacccacaacttaatatgatacaaggagatttcactccttagatgcatggaactggtacatagataatgtattggggagaaacatc

SEQ ID NO: 34539 - DNA, 600 bp, Glycine max
  unsure (1)..(600): unsure at all n locations
nnaatacgccctgacgtcactgcanataaganacgcngcgctagatcagagatgccacggtgtngagctattggctgctctcntctaaagactacggcatcagccttggcgctcaactgctgngagttagaggccatcttctcaacacaaactctggctccagcacgagtcatgtcttcaccggctacaccactggcagcaactatcatacttctctccatattactgagagcttcacaaagatatcgtagaacaacctgagatgtagcctgatgtgtgcgtcacataccagtgatctcaccagcacggtacaagtgaagaatcagtgatgaatgatcaatcatcaaatcccctatattttcaggaagtgcacttgaactgtaacaagaaccttaccagcatcagcacangatgcatgatatcatagatctgacgacaggagagatgaaataaccttgaagcatgtggggccacattagctgaacaaatggtttaaatgggtctcccaaanaataagtatctccacatcagcttgatctttagatcagatgcaaaggagcataatgttgggtagacccgatgacaaacatcatgagatcg

SEQ ID NO: 34540 - DNA, 290 bp, Glycine max
  unsure (1)..(290): unsure at all n locations
tgatatacgaacttatctganactgaaagactgctctcactaattaatgcttattttattagtaaacaaggtgctccatctgttgcatctcaagtattatatgtattatattgctgtgggacatcaatgtctcatgtttgagtccatggatcataacttcacatactaccggaaaagaataaggatgtgctttcattntaattaatagtgtagataaacaaatgttctgtttcaaatgtgtttgtgcaggttgatacaactgcgtgtttatgcagagtagatacaggtct

SEQ ID NO: 34541 - DNA, 279 bp, Glycine max
atatacagtggagagtaattgcaaaagtatctcgtgattccataggaagagaattcaacaaattaaaaattagctcatttataccttcgattgggtacctgtatctgttgttccagtaaatgccacaggccaggttgcagccaattcaatatctcttgcacattgatccagtcttatcccttatactttggtctcgatcaagttgggtttgactgtgaattattagcttgatcagagtttcggatcacgcaaggacaagggtaaatagatcccaacaca

SEQ ID NO: 34542 - DNA, 343 bp, Glycine max
  unsure (1)..(343): unsure at all n locations
gactaccatatatgngtaatcgattacacagtgcannatttgaattcaaattttaatagctggtgtaaatcagttntggccattggtaatcgattacatcatctggtaattgattaccagagagtaaatttgttgaaaaagactntntaacttagaattcttggccaaaccttntgctacttcaattggaattcccttcctatntaatataccctntctaagactctaanaactgtcttgatcatccatcttgaatatctntaatttctttgtcttgaataaagctttgagacgcatgtgatcctttggcatcatcaaaacatcagcttgatcctttgtctac

SEQ ID NO: 34543 - DNA, 254 bp, Glycine max
  unsure (1)..(254): unsure at all n locations
gctcatgcttttacgaanaggttcatcaagtcaagttgaaatatggaagtaatcgtcttgcaaaattggggcaaaagatgaatcgagtcgcatcactgcttcatctactgccaaacatatttaggattattgatgtccttgttacttccagtcatggaccatgttgaanatctaaattgattcaaccccatatcctgcgtaaaaattcgcaatacttcaactgtacatcattcgcatacatccatgcttttcat

SEQ ID NO: 34544 - DNA, 324 bp, Glycine max
  unsure (1)..(324): unsure at all n locations
ctgcagctttagagaaactacatgaagctgtctcggtttatatgctgtccaacctacgntaaccgntggatcatctcgaaatttggttgcaactttacgagacacttatccatgatctgacgcgtgggagctntgagaagatgtctggagtgtgctataagcttccgttcctgagagcatcttttatttaagcatttcagcctttgctttcgtgtagcttaggcaaaatgccatttcttcttctttctttcttccaaatccatttctaaagttccaagtactttctccatcacccacatccaccattagccaccacaaaccatc

SEQ ID NO: 34545 - DNA, 591 bp, Glycine max
  unsure (1)..(591): unsure at all n locations
nttgacctgtcgctatgaatangcgcactatagantactcaagcctcgtactcgcctatgtgtaccagcagtggtggttgctatgtatgttatgatctagctnncatgtaagaatattggtggtggagcagcctatgaatntcttctangaatgattggaaccttagaagatgtacaagttggaaaagtgaanaatttatcccctgtgcagtgtttctatgtatacgttcattagtttctacttcactttattaccttttttcctacttggtttcttttatgaatttagacaaatctttatgctaggattttcaatanaagagtcttaagaggaaatccgaccttatcttatggggagggttctaatcacaagtatggtaaaaatgggtggataggctatatcactttcctctctcggagaggtcgctgcaaatggttgatttgttcgctattggaacaaaaggccacgaggactcttgaaatgtgtgcaaatacttactttttttgccagcgctttaattttgttctgacaagactcgactcagggaagactctaaactttatacttgctacatttcctacacttttagg

SEQ ID NO: 34546 - DNA, 210 bp, Glycine max
accttcggaaaatagccattgccagagcatgatttataccatttgcaccgtatcttacagggatcgatccttgtctgagaacacaaataaatatatgctcttccagattacccacatcacaacaaactagaccacatataccttatgagtgcgcttgttcatgaataggacaacaaacctctaaattgtgcgcagggacgaacatttaac

SEQ ID NO: 34547 - DNA, 580 bp, Glycine max
  unsure (1)..(580): unsure at all n locations
acgcncctgtnccttganncatgataccattgagacccngatctnagagncacctgaggcatgcagctttactgaggggatggcgggctccttatctttgtgcccaaccgcgggcttttggccttgntcttcctttctaagatacttntccttatgtcagcttgcataggtttatagcctaacccaaacttcccgtggtttcctcttgtgcttaccaggctggttctgtcgccgttgttcttgcccaaacccattccgggctcgtagccgtaccccaacatcacccgggccaccatcattgccgtatcagacaggcaaggcttcccaaagagagaatctacggaggcaatgcatagtacctcaaaagattgganagtcgtttccaatgactcctccgcgcttccacatatggcatagaggaagggcaactaccaagacatcttcctcacccatactatgacaaatgtccttcattacaactcagctttggtgagtgagaaggacgactccactgagtgatcacggcgcccanagacagtgtaacgggtatatcatactggatgtactgacgataggcttn

SEQ ID NO: 34548 - DNA, 338 bp, Glycine max
  unsure (1)..(338): unsure at all n locations
tttcccacaactctcataaatgggagagaaatgttcatctaaagcatacaagtccctaatattatcaaatccttaaaattgagctcctagggagcaaaacaatgtgtgtctcctagagagggcatcagctaccacatttgtttttccctttttgtatttgataacatatggaaatngctctaggtactctacaccatttgcatgcctcatgtttaacttgctntgccctctaatgtacttaagtgattgatgatcactatgaatgacaaattccttggaaacaaggtaatgttcccaagtttggagggctcttattaaggcataaagctctatatcat

SEQ ID NO: 34549 - DNA, 483 bp, Glycine max
  unsure (1)..(483): unsure at all n locations
attattgtagncgnncgacncggatagagaatcntgaggttgtgtaaagctgaatagatcgactgcatgacatgagtgaattgtgatgcgtagaacatatgcttcgaatgaatatgctgtacatacaagagagagaacatgatctataagcatggttgaaaatgttatgttggtttgacagggtaaatagtgacggtaatcattagctcacactcagtgagtngtgtgatctgtaattgtgagagaacgaatagcatcgggtacttattattgcatgaatatcttattactgaatggatgcgtgaattntgaagataatgacagccatgtttgattgaaatagcacttagccagaagctaacttgtcatgactgatgaatcctgccctatgtgacttgattgatgatgaccgacttgggcttggaattaatccctcacctgcttggtacagatgcttgggtcaacaattgcccaatatgggat

SEQ ID NO: 34550 - DNA, 328 bp, Glycine max
  unsure (1)..(328): unsure at all n locations
aagaatntatatgagattataaaatataataaattaaaaaagaataaaanttgaatgttgaattatntntgcataaaacttatattaatattatattntgcaccaaatatntaaatgaacattntgatgtagtggtaaaagagtatgcttcttacttcaagaaccatggtacctagccttccttgatcattntntgaaatataggagactcaaataatgaattaaaaaattgattacatggtacattatccactctatagaaacgtctnttcgatgtgggctntatgtgaatattatatgaaagctntctatggaaagtcatagtcta

SEQ ID NO: 34551 - DNA, 369 bp, Glycine max
  unsure (1)..(369): unsure at all n locations
tgaaagtgagtgagacatccaaaanacaaagaaaacccatcaatttgaagccaaaaattacacatagaatgacattttctcaaagaaaaccaaatgcgatatgcagacagtacctcataacagcgacgaatatgaagtttctttagattcctacagccactagctatgccacacatggcttcatctccaatgcttgaacaatctaccaattgaagtgcttgcaagaaattgcatccctgtccaacctggacaagaccagcatcaccaattctttggcagtaaagcaatgctaactcatagagatgtctgtgcaatatacagctaagattagcatcactaatgaaagtgagctaaatattcaaatacatg

SEQ ID NO: 34552 - DNA, 299 bp, Glycine max
  unsure (1)..(299): unsure at all n locations
atacaaggtaaaatgagatttatgttntggtattactagcctttgattcttttcttttctgattttcccttctctgagattttataaactccactcccctcactgccaaaaaaaactacaagcaaaagaatgcaagaagttatctagttctagcacttttgttctatccaagatccaaagagtcccattatcttgatgaacatgagaaaaaaatgaaataaaataaaatgtatataatttaaaatgtatgctccaggaaagagagctgaatacctgtctttgttcanaatctgacaact

SEQ ID NO: 34553 - DNA, 320 bp, Glycine max
  unsure (1)..(320): unsure at all n locations
cttcgtcattgagggaaacactagggctgccagttccctctacctttcggcgtattctntgaaagatccgtgcccccttattgcacatgttttgtagttgcatcctatccgaagccattacactgacattgcctaacgaaggcaaccattatgtccttccaagaatggactcgagaaggttccaagttagtgtatcaagtaacagctaccccagtaagactntcttggaaggaatgtatcagcaattcctcatctttatcgtatgcccncatctttcgacaatacatctttagatggttcttcgggcaagtagtcccctt

SEQ ID NO: 34554 - DNA, 231 bp, Glycine max
  unsure (1)..(231): unsure at all n locations
tacacaattcaaaaaccccgcataagctgacagtccatttgaatctgcattagagaatggaaacaagtaataaataaaaaaatgcaattttcaaacatgangagtgtagtgatactgtggtacataatagttcgttataatcagttnttagaaaggactaaacaagttgttagatattacaatgatgagaatcatgaaactggccaaatacaggttaaagacccaagtgga

SEQ ID NO: 34555 - DNA, 308 bp, Glycine max
ccttcttttctcatgtgcacccttatcctatctttatgttcgaagacaaccttctttctccctttggtggcttggttagcataacttttatttctactctcaatttgatttttcactctctcatgaaacttcttcacatagtccgcctttgcttgagcttctttatacttaaaaacagaaacattatgcataggcaaaagatcaagaggagttagtgggttaaaaccataaacaacttcaaaaggagaacaattagtggtgctatgaacaactctattgtaagcaaaatcaacatggaggtaaacaac

SEQ ID NO: 34556 - DNA, 316 bp, Glycine max
  unsure (1)..(316): unsure at all n locations
tcagaaatattctcaattgtctcatctnttcattnggttcttgaatggctatcanaggcctatatatatgtgacttgagacacgaatntgctaagagttnttcagaacaaaaaggtcttatcctcttaaaaagcaaaatcgttttatcctcttacaaattccttggccaaatcacttgtgattcaataaggaattgtttgagtgctcaaattgttcaatctatctctntcaagagagatntcttcttcttttcttctntattctgaanagggattaagagaccgagggtctcttgttgtgaaagaattctaaacac

SEQ ID NO: 34557 - DNA, 157 bp, Glycine max
  unsure (1)..(157): unsure at all n locations
attgaccatacatgagactagcgagagagaantacaaactgtgataatagtacactccataggtagtgatgctgtgtaaaccactacaacaagaaagcactttaaattatagtattaggtagaaatttctatgggtgtgtngatcatgctcgccctc

SEQ ID NO: 34558 - DNA, 250 bp, Glycine max
  unsure (1)..(250): unsure at all n locations
taagcttgtcacgatcagcaccgacattttcgtgttgtttcttcgaagacgctcgcaaagaagaagaagaagaagcagtgcacgaactcacgagtttaagctttctctccttcgttggtttgatttctgttctagtcgcaaggagtgaggagatctatgagcattcaaatttcggtgtaatgtaaaagaacagaanaagaanactcgatcaatgttagggtcattctacttttaaattactttcttccct

SEQ ID NO: 34559 - DNA, 600 bp, Glycine max
  unsure (1)..(600): unsure at all n locations
naattttgcttgactagacatcgattngcacacctangctgcttcttgtcctttcattgcttaattgtgaataatccttgtaaattttctgttataacttcattggnttagctntcatttcatttttttgtctttggntattgcttgactctttgtttccttgtttgtgagttgccatatatggaattggaaaggaggattggtgccatcccttgaagaatatgattcaagaagcaaggggccaaccaccttaagagctattggactaagaagcactccaaattgagtgaatcaccaaagagaacaaccaccaaaattgagcacgttttgtagatttttaatttgcaatntacttaccttcattgctntcaagntttgtaacaaaaaggcctttcattggaagtgtgttgggagcctccaatagngtaccaaacttccatgtgtgtgtaataatttaanggcaattttctttangatagtgagtgttttgttggaaccttgaacgtgtcatcaacactctangatcacctagctactttcttgcttacttatagcnntattcttaccttncatgtcaactgctagatagtactttacaat

SEQ ID NO: 34560 - DNA, 271 bp, Glycine max
  unsure (1)..(271): unsure at all n locations
ttccctaggggatggcgcctcctctcacctcttatcctttgtcttgcgctgcatctccatggtggaaaatcaccattaaaggacctcattgaagctcaaagatccagcctccatagaagccccacaagcaagcttccatcaacattgtgacacctaacctcttggatattgagttccatcatctttttcaatcggatcatagctaagtcttgaaagtactccagatcatagntnttctatcaagatgggctcanaacaaatcactttcaca

SEQ ID NO: 34561 - DNA, 308 bp, Glycine max
  unsure (1)..(308): unsure at all n locations
ttgagaagtgtctttgagaaaacttccttgagaagctagagtttagctacacacacccatctaaaaactaagctcacctgcttgagaagcttccttgagaagctagagcttagctacacacacccatgtaaaaactaagctcacctncttgagaagctttcttgagaagctagagcttagctacacacccctataatagctaagctcacccgcatgacaaataaacatgaaaagtacacaaaaatcctactacatagactactcacaatgccctgaaatacaaggctaaaaccctatactactagaat

SEQ ID NO: 34562 - DNA, 244 bp, Glycine max
  unsure (1)..(244): unsure at all n locations
agagaaatgtgcagatctatcatactgaatttgacgagtttaaagtgaagctggagaggcataatctacacaaacgcctcaccaaccttcaggatggaaacatagacatggttgtggttaaggaattctatgctaatttatacaccccagaagaagcaagctcnaagcaagccanagtaagaggacacctgatcaaaatagatgcagacagcctgcatgagtttcttcagactctagtggatta

SEQ ID NO: 34563 - DNA, 273 bp, Glycine max
  unsure (1)..(273): unsure at all n locations
cattaattaaaatatttcatttttggaatatgaaaaactaatattcacttacatttaagaaatatcatataaatatgttgatagaaaaattagcaaactccttcataaatattgttctatctttataactctactataatntatagatntaatatcacatcggtaacatcggtatttcaaaacatcaatgttaacaagagcacggtggcattttcgtaaataaattgagttaattcacatcgatgttgaaaaaatcaatgttaactagttgat

SEQ ID NO: 34564 - DNA, 254 bp, Glycine max
  unsure (1)..(254): unsure at all n locations
actaactctgaanatacactaagtagactaatatatattctaacttatcagaagtaatggatgggtcctaattaggcccaactaatctctctaattaagccaattacacaataaggcctaaaattcgcagtccaaaatccaagtgcagaggctctgacatccaagctcaaaatgaccctcaaaccgacataattggcccaagctcatttcagaaaaaatggtagctcttagctttgtagggacaactcatatgc

SEQ ID NO: 34565 - DNA, 302 bp, Glycine max
  unsure (1)..(302): unsure at all n locations
gcttctctcactaagctccaatacttattgaaattttngaagagtngatgccgctatgcgcagcctttaaggagcttagcgtatatcttgtggcagatattcagcttagcgggcactgtctagctaagtcaattctgcagaagctaaatttctgcaacttccgctaagcggctcctcatgtcgctaagcggtagtgttttttttaaggccagctaagcggaccatgtctcgctaagcggccagtgtctttttcagttntatttttcagttntgattnttaataaatngagtcctgatcaact

SEQ ID NO: 34566 - DNA, 333 bp, Glycine max
  unsure (1)..(333): unsure at all n locations
ccatattacctttcacttgcccttggctccaatttggtgtgatattgatcaatactcaaaatgaatcttcatttatcccccgatccgcaggatgacaagatgcaaatgcatgcatgcttatgattaggaagttaaagtgcaacaactaaacaaatgttattatggttcaatttacttaaacgcttacggcgccccttttgatggagccaaatggctccagattcaatgggaaaaatggaaagtgtggttctcaagaagtaaaaacacaacacaaganattaaaacacaaatcatcaatccaatggttattaatggtgcgatcatgggttacaa

SEQ ID NO: 34567 - DNA, 287 bp, Glycine max
  unsure (1)..(287): unsure at all n locations
cccacttagcacataagcacattatcacatcactaacatatccagctntaatctaatcacttagaacttaattgaaagcatgcaaatcatagataatcaatagggagagattcagccagaggcaattggaatcaataacaatgatttatgccatagaattctaaaccctcgattggtgcagattgcgttaccaaaatcaaaaatgaaagtcagaaactggaaggggttntgcactcgagattgtggaggtgaggtcgttgctattctctacatacaagaacaaaatt

SEQ ID NO: 34568 - DNA, 137 bp, Glycine max
  unsure (1)..(137): unsure at all n locations
ctattattntatttaagctatgccacatgtctctatttgagtggagcaaaaagggcccactctctcttttgattgtgactcatactcagccacanaagtgagaaaatctgacctttgaaacgctaaaatcctgtctc

SEQ ID NO: 34569 - DNA, 277 bp, Glycine max
  unsure (1)..(277): unsure at all n locations
cattgacaatgtttcataatgcagaataatttattcttttgcagcattgtgattnttcaatcacactcgtgattggataggtttcgattaaggcaaaaattatgatatttgctngatcaactaaaatgttctttgtacatatttttctgngtatataatattnaattatgtatatctaattnttaatatttctattatttattggtattggacttttctaattatcatgtgatgtcttgggttntatnntgtaggtttttntatcattctaatcaca

SEQ ID NO: 34570 - DNA, 347 bp, Glycine max
  unsure (1)..(347): unsure at all n locations
actttcaacctaataagtactaattaaacttgttatttctgaaccttatgaactcttaattgcattattacaatgcacaccatacacaaagactaataagccataacaagatccaactnttgtcaatactgaggatcaaagctatatgatgttgtcagtcccctcgtcaaacaggtataagcctaagttaagtccaaagaaatagtattttaacaatttctccaagagtcatatatgtttgcatagattaaatatttcgtagacagaacggatgcctcgttgcatttacacagttccatcatacttacaaccctaatcgagtttctttgaaatgcagcaagctatat

SEQ ID NO: 34571 - DNA, 301 bp, Glycine max
  unsure (1)..(301): unsure at all n locations
gctctctacaatctantggcataactnttcacacggatgtctaattntgggacctaatatatcgagatgctcgaaattgaacaacggaacctatcgagaaattcaaatgttcaaaacgtttcacacggatttccgattttgggacataatataccgagatgctcgaaattgaacaacggaacctcttgagaaattcaaatgatcataactnttctttcagatgtccgagacggggacataatttatcgagacactcgaaattgaacaacanaagctctcgagaaattcaaatggtcatgac

SEQ ID NO: 34572 - DNA, 450 bp, Glycine max
  unsure (1)..(450): unsure at all n locations
gattacacagtgcanatttgaatcaaatttaatagctgctggtaaaccattttggccactggtaatcgattacatcctctggtaatcgattaccagagagtaaatctcttgaaaaacactntntaatatgcattancttggccaaacctttgctatatcaattangaatttccttcctaatgtactagtgatcatcttaatgtttgtgtcttgtattcttgaatcattgtcttgaatntaaacttganaagcgcatttgcatcattngcatcanatcatcatgatcatcatcaaaacatcaaagtcattggcttctacatgtatgactagaggcaatccatctgacttgtgcatcattntgtaccttttgatcatcctgngcattccattactggtgagtctgtgccatttgtattgggtgatttgaacatctgatnntgagcatatatt

SEQ ID NO: 34573 - DNA, 355 bp, Glycine max
  unsure (1)..(355): unsure at all n locations
agaatgaggtaaatntgaagcaaactctcacctcacacaagtccataacatcaatctaaacttgctcaaactgaatttacacctaagattccaccgaatcaaagattgactcttcaacacccaattttgccctagaaatggctctttgttcactttggtcatttgtttctacctctagcacagcctaacctttctcacatgttctaaatgacatttcaagctaggattaactcgttttaacctccatttaccacagaattcagacttaaccttccaactctcaaagcctcactctttttccactcataacaccacattctcactttccaaccctagggtgactcgtacatttatc

SEQ ID NO: 34574 - DNA, 405 bp, Glycine max
  unsure (1)..(405): unsure at all n locations
gcagctacccgagttctccttgctggaagcgattcctgatatgtgcggngtgntncnngatgagngcggggtgtggtggcggagttggcatgggtggcggagtaagcatgggtgacagggttggcttgagcggcggatgcagtattggagtgtgtgtgaggaatgtcttcacagaggaagaagatggaggtgtgggtgagtggtattgacgggcttccaacacactaatgcgctgaatgagttcatctagtttggtggtgacatggagctggttggaagctagcttggctatggcttcttcaatgtgttccattctggtattgggtcgagttgcttcagccatggtggtagtgcccaatgaaagcaccagattgttatgagcaaaaattctactcataagatcct

SEQ ID NO: 34575 - DNA, 528 bp, Glycine max
  unsure (1)..(528): unsure at all n locations
gctgtcaatatgtggatcctactacaatggtcttctaggagttattgatgcttttttcgtgaggcatgaagaacaagttgagcattccaaaattgcaacactgtgtgcaagatctttgagtgaaaaatctatgttttagcttcaaccctctctgtgagagtggcccatttttgatttgtgcttacaaagcttgtaataatcttagatagaagtgtgagaataagttcttgagtggaatccttcctgtgaggtgaaaatctatattttgtgcaatcaaacacaaatctatttctctgtaaaactccagcattagctatcaaaggtgaaatcgagtggtgtagctggtctagttaaggctaggattgatgcccagttgaaaacttatataanaatagcccacacgtgggatgaacctatataaaaatatctnttcactcttctctcttcttacttatgaactagntntgtatagatatgaagaaaaatctnntgtccagtacattaaatctattaacctttcatcttaac

SEQ ID NO: 34576 - DNA, 242 bp, Glycine max
  unsure (1)..(242): unsure at all n locations
aagagtagtgtcccactggtaaaattaactttccaaatgttngccttcgcaggaatggccccgaggaagcttgcctcatagaggtccaggaaggacaaggcggccgaaggaactagttccgctccggagtacgatagtcaccgctttatgagcgctgtacaccagcagcgcttcgaagccatcaagggatggtcgtttctccgggagcgatgcgtccagctcagggacgacgagtatactga

SEQ ID NO: 34577 - DNA, 280 bp, Glycine max
  unsure (1)..(280): unsure at all n locations
gtgtgganggggagacttctactttattcttgccattttgttgtcctggagatatgtcgtgcgggtcaggagacatatgggacgtcaggtggggtgctattgcccaaaaccaagcttgaccgatcccgacccaacccgggcatagtcagtcagtgagaacctgtgatgtacctaaacaggcgagcatctggcagtctaccaataaaagaacaatgaccacaaagcatggatgcttgtgtggtggctggcaccaatgagtcttgagtgagatttgggatat

SEQ ID NO: 34578 - DNA, 461 bp, Glycine max
  unsure (1)..(461): unsure at all n locations
caacgacgatggaagntctggttgtgacgccctctaacccaacatgcatacaaatngaaaaaaaacatataaaatatggaatcttattaaatcaattntattcaataaaattgtcagtaaatgcacatggataaaaggtccacattngcttcactgttaccaaataaaacttctcataaacatttccaggtcaaaacaaagccattcaattntacaattgaactcaagttaagcaataaaataaaatanagtaaaataacatgttcgaaacatcatgcaattaanacaaanactcatgcnctanagtcacatcctatcacaacattgtgtcctgacgtcctccagcacgaggttccttanagcaatccacctagtcattngctcctacgaacacaaggttcgagatcatcacaggatccanatataaacaatacccggngagtgaatcatcacattcctca

SEQ ID NO: 34579 - DNA, 327 bp, Glycine max
aatatatccccttgacataaattattaacaaataacaccatttaatattttaaaactattggaaataattcaagtctcacatcgattaaaagttatcccacattataatatatgagtgaggggcaaccctcaccccttgagctaacttttagagttcagttaggtctctcacattattcattctgatacggtatcagagcaaactctgatcctgggaccacgcgaattcttaatgtgaatagtaagaatattattttcctttcaaacaaatagtaatattatcaaatgttaaagcatttcacatatgaaaaatttaagaaagtaaac

SEQ ID NO: 34580 - DNA, 261 bp, Glycine max
  unsure (1)..(261): unsure at all n locations
tctcacctcttctcatttgtcttccgctgcatctccatggtggaaaatcaccattaaaggacctcattgaagctcaaagatccaacctncatagaagccccacaagcaagcttccatcacctactccatggcctaagtgtgtggacgcgctgtcgaaccacactatccatttgtccttatcttcatcttccacctnctcccccatcaaggtcatgatgtcctcgttcgaaactccgaatgcataggttggtaatcattgat

SEQ ID NO: 34581 - DNA, 340 bp, Glycine max
  unsure (1)..(340): unsure at all n locations
cgggctgcttctgtcatagtgtccaatgtggacatgcnntttggtntgcatgtgaggtctaacatgtcaggtgagggaagcctgtatatntggcaactctgtccttttctaacagttggagaatgcattgaagacaaactctatgttttgtctgttaatgcagttgcgtgtagtgcacacgtagtactcttgcacacgtgtcactcgtggagtgggcacgtactatatacgtgttgcgtgggatatgaagttgttntgtggtctcctcttgccagtgaccaccgtcacttcaaatntctatcttctntctctcgaagtataaagtntccctcacctacac

SEQ ID NO: 34582 - DNA, 337 bp, Glycine max
  unsure (1)..(337): unsure at all n locations
atgtatcttaagntgtcgagaagcatatgccactacctgtccccgatgcataagcactccacccaaacccatacttgacgcatcacaatacaccacanaagattcactcggattaggtaacactaagactggtgcagtggtcaacctttccttaatggtacggaaactactctcacattgggcatcccacacaanaacttgacctttacgagtaagcttagtcaaaggtaaggctagcttagaacaaccctctatgaatctacggtagtatcctgctaagccaagaaagctcctaatctcaaacactgacttangactctctcaactcatcactggc

SEQ ID NO: 34583 - DNA, 319 bp, Glycine max
ccgtggatcttctcgagatttggtctacaacttcacacaacactcttccatgatctgaccgttgggatctttgagaagatgtctggagtgtgctagaagtctcttaatgaagcttctggaggaagcctctcaataaagcttctagagaaaactacatgaagctgcctcggtagatacgctgcccagacgtctataacagttggatcttttcgaaatttggtttgcaacttcacaagacactctaccatgagttaaccgttgggatctctgagagaatatctggagtgtgctagaagcttacgttcccgagagcatctct

SEQ ID NO: 34584 - DNA, 223 bp, Glycine max
  unsure (1)..(223): unsure at all n locations
gctgcacacatatgnaanatgaggcaaataaccatgcatagcatattctggagctatatattcatgataatggtacaatatgagctcatttttataataataatgatatattaaaaatatcttgtgaaatacttattgaatagttatttttggctagttatgtttggatcaaatattaagaattaatattattcttatctatgatctgcaaatgtgagaatga

SEQ ID NO: 34585 - DNA, 580 bp, Glycine max
  unsure (1)..(580): unsure at all n locations
nttgacccctgagnncttganacnncngacncntagagnnganctgccgcatgcaagcttgttcttaagccccttcaccactttctctctttttatactaanccncangngccngaagagaagacaacaacttccccacctttattgaatcaaagatccttggattctttgattgccacaataatgtgattaaaagaggaagtaatgttctcaacacctcgccaacaatttgntggtctaacaacacttcattgcaggctttcattgaattngataatggtnggattagttgaaataattaacaatggactcttgatcactcattgacaataattcatattgtcttcaaagatcttgaagcttcacctttttggttttgntngcacctncataagctttgntcaagatgtcccaagcttcttttattatcataagcctttgaagtttttcaaaatttgaacatctaacactggtaatcaagactggctttgcatcatctcttgcttcttgtgatttctttgtatctgtgcacttctcagtctgaatcatctgacattctcaatcttgaatgagatgcttt

SEQ ID NO: 34586 - DNA, 347 bp, Glycine max
  unsure (1)..(347): unsure at all n locations
tcttacagacagcanaagaaagtttatacggataaccactcgggtatttccacccgtcaacgtgactcaaatgtcagtatgacagatcttgtgaaggtggccgacaaaagcgaggctcttgctcctacgtatcctncaatgaggaactcagacctacgtagttcttgataactngtgagacttgaaaaagtctccaccggaagatgctgacatctccggaaagggcgcagatgaccacattggcctctgctcgtcaatcacacttgnngtcactgaatgacgaggtgcggataaccgtaaggtgtcttcgcgaactaccagctctngggtcatggtaacaaaaagcg

SEQ ID NO: 34587 - DNA, 363 bp, Glycine max
  unsure (1)..(363): unsure at all n locations
tcaagaaagcttctcaaggaagctacctagtctataaatagaagcatgtgtaaccacttgtgtaactntgatgaatgagagtcttgtgagacacaactcanagntcaacttctctccctttttcttgcttcaatttcgtgctccctcctctctttatctctccctctntcttttcctccattgaagcatcctctccaagcttcttatccaaggctcatcttggtggtgaagcttcttcttccatggcttattccctagtggatggcgccttctctcatctcttctgctttgtcttccgctgcatctccatggtggaaaatcaccattaaaggaccccattgaagctttaagatccagctttca

SEQ ID NO: 34588 - DNA, 441 bp, Glycine max
  unsure (1)..(441): unsure at all n locations
tagaacgaacctncgatgctagcacgagnttggcaatgtcgtccatgtggtcaataaaggatgattgcaagcgggtcaagcgttgcactatatcatcaagtttgtcagggtgggtactggagtttttggatcgtgttgcaacaaccatgagtcagagaagggagaggagctctcaatgaaagcaccaaatgatgagtagtattctttgtatttaaggctagagatacctccaagaagaatgatagaagagaatagaaatcagagtataatctgcatccttacaaaaaaagaaattacgaggatatataaatgagctacccatgtgctcattctaacagaatngatcctatcatttctaacaatactncaattcatcactaataaaatcttatagtatattctagaagctactattactttattatcaatagtanataaact

SEQ ID NO: 34589 - DNA, 271 bp, Glycine max
  unsure (1)..(271): unsure at all n locations
actcttagnnaaagggagttagttaaaagaatagttggaagcttgttagtcttcctagttagttcaaagntagctacaaacagnnttcagaactggtttatatatatatatatatatctttgtaacacaatattcactggccaaatatatntttcctttcttgattcttgagttttcctctctctcanactctctctaatcttcttttatgatactgtttagtttctaataatgtttattaatgataaaaaagtgctccatgcaccccatc

SEQ ID NO: 34590 - DNA, 384 bp, Glycine max
  unsure (1)..(384): unsure at all n locations
tattcttatcctaccaagttattgttgtgctctaaaaaatcaacaagaattgttggaagtttacacactgactaaattgtgatcatcttatagatagataaatcanctcggcattttaatcttttctctcaagttatacaaagtgttttaagagcttagtatctatataaagatntatagaaagattntcaagaaagaatgaaagaatatgttcgcgtagatgaattgtgtctggtttcttctaagcttattctatntatagccttcatcttcaagtattcgttggtctcccaacggttggatggtttactctgtcctttatctgaagtcttgagtctattgcagcatttaatgctcgcattaaattcacttcccttcttcatg

SEQ ID NO: 34591 - DNA, 245 bp, Glycine max
  unsure (1)..(245): unsure at all n locations
ccacaatcaacaaagtacttttgacacctactatatgttgattccaccaacgctgttatgtgtatgctgcgacaatncttcaatacattatatacacattctgagaggggtgttgtcatgtgaccatatctacgtccttctatatcataagccatggtccaattttcctttgaaatgcgatcagtccatgttgctatggttggactcaatngacgaaagtnttctaaattctgatcaaacatatg

SEQ ID NO: 34592 - DNA, 328 bp, Glycine max
  unsure (1)..(328): unsure at all n locations
cttctcgtctgtggttctttaagtttcatgggataatttcttcatttggttntgatgaanaccccatggatcaatgcatataccacaaggttagtgggagtaaaatatgctttcttgttttatatgtagatgatattttacttgcagccaatgatcggngtttgctacatgaggtgaaacaatttctctctaagaattttgacatgaaggatatgggtgatgcatcttatgtcatcggcattaagattcatagagatagatctcgaggtattttgggtctatcacagganacctatattaacaaaattctagagagatttcggatgaa

SEQ ID NO: 34593 - DNA, 255 bp, Glycine max
  unsure (1)..(255): unsure at all n locations
aaacaccaaccaaaatcacagctnttctcacttaatgaccccagtaacaattccttctttccaattcgttaaccgttggatcgactccaaaattntactggaggtctctagtacctaagcctacattttgaccgttgggatctactagcanacatccagaactcattctacattactctttccacaaccagcaaatacatagcattnttctgcacttgtgcaaaatcctgctgcacaatttcacagcaaaaatct

SEQ ID NO: 34594 - DNA, 394 bp, Glycine max
  unsure (1)..(394): unsure at all n locations
ctgtacatctagnactgaactattattaatataattaaattttgctgtgcaaaanaagaccagaccaactntggaacaggattctggtttctaaatacaatggttggaggggtttgggtcaagggcctanaaagctatacttctctacttggtgggttgacttaagggtcatcataatggaaaggaaaaacatgcattcctgagtctaaattagctctgtctggtactntatctattctaatataaattatctntgctttccaaaaaaaaaanaacatgcattccaagcattattatagctcanaacatgcattccaatcatatngcctagtctcagcttactcaaatatcaatcatattagttagtctaactagggtttcgaaacatcaaaac

SEQ ID NO: 34595 - DNA, 371 bp, Glycine max
  unsure (1)..(371): unsure at all n locations
aatcatagntctactaagacatgtttgagtgttcgggaacaagagagggttttgaaagggcggaaggaacaaccaatttgagagcatgatagagcgtatagacatatggtaaatgtaaaactgacctagtatatctctatttagaactattatactctcaacctattaattactctacttttctttattatattattttataacaataaactatattttactcccaatcaaatgaataaattaaatattcattctattctataagaacatataattagtgtatctaccttangatcattactctaattaataaaattattcttcttatctattaattacgagaatctcattatctcctactcctctattat

SEQ ID NO: 34596 - DNA, 427 bp, Glycine max
ttcatgatttttaagtttaatgtgcctaagctgttcaagtatggtctttggcaagtgtgtacaaagatattcttgacccgctgattaataggaaacgttcaacacctatatgatatgaagagacttctagtgtattgctaaattgctgatttcttaatatgatgcaaggctaactcaatgatgtctactccaatatcaatgatatagagtcttgggaaatagagggtctttgcttaaaaaaatataaatactcaaagttctatattcttaatatcttggttctattaagattccaattaacaagaagacaagagacacttatcttctaataagtatattgtctcttacattgaagaatcaaataaaaggcgattcttctttgtagtcctatacttatatattatgttgtcagacctacttgaaactg

SEQ ID NO: 34597 - DNA, 153 bp, Glycine max
  unsure (1)..(153): unsure at all n locations
tgaagaagggctctccattgtctagctcattctttagattcaaggggaagtaactaatgttntctattttatatttntaggattacataatanataataatcatgtgcttaaatactttnttttaattgtagatattatagtcatgaatgact

SEQ ID NO: 34598 - DNA, 386 bp, Glycine max
  unsure (1)..(386): unsure at all n locations
accactactggaaaacccgaatgccaaattttatcgaggcaatagatctaaatatctgggaagccattgaaatagggccttatatacccaccacagtagaaagagtttcaatagatggtagttcatcaagtgaaagcataaccatagaagaacctatagatagatggtctgaagaggatagaaaacgagtacaatacaacctanaagccaaaaacataataacatctgccctaggaatggatgaatatttcagagtttcaaattgcaagagtgctaaggaaatgtgggacactctncgattaacacatgaaggaactacagatgttaanagatctaggacannatgcactaactcatgagtatgaattattagaatgaatacaaat

SEQ ID NO: 34599 - DNA, 335 bp, Glycine max
  unsure (1)..(335): unsure at all n locations
tcttatgttatacagagtttattccatctagantttatttcatccagatnttatttcgtctagaatttatttcatccaatcttatcttatcttatccagattntattttatttcgtttatgagcttgaacttaaaatagatttgtaaggtttgaggctgaggacctacataacagcaccaagattntagtttagggagttttttttctggagaggaanaataatttagaaatttaggattccagttntcattactgttcatgcacactggttcacgtagaataaaattgttttctgcaatttcgtttcggcttcaatctacnagttcatttctac

SEQ ID NO: 34600 - DNA, 337 bp, Glycine max
  unsure (1)..(337): unsure at all n locations
actgagatccaaatgggttaggttggatccatntgatggatggaggcaattattatcaggaatatatgtgatataaaattacattaccttgtagtagtaattctgcgctagttctgtattagaaactgcattatggcagttatcatagaanatattagatccaacccactgatggattggaggcagttgttattattagaagtatatatgtgtgtgatataaaatcacttatcttgtattagtaatactgcattattctgtatgggaaactgcatgatggttgctattcatagaaaataactgatgacagttatgtattaggactatattatatcta

SEQ ID NO: 34601 - DNA, 337 bp, Glycine max
  unsure (1)..(337): unsure at all n locations
ctagacgtgtatattgacgttcatctttatcaccttttcttgctcatttattnttcgttnttgttcattatttttccattgttttcatttagatgtctattttacccagttaaaatttcagctcacaacttgaagtattcaagccatagcagagttaagaagacaatgtgcctgaactgacaacaaccaaaatttcaacctagaaatcaagagtagtggttatgttgcttaaggctcggatagttacaatctgtatttgcttatgctcaattgtctcggataacacaattcagaagagcttaagacttattttgattcacaaatccatccataactc

SEQ ID NO: 34602 - DNA, 314 bp, Glycine max
  unsure (1)..(314): unsure at all n locations
cggacatggctcccgatcggaaccaacttcagggtatgactaaacgagagcatgagtccattaaggaatatgcccagagatggagagatctcgcagcccaagtcgtaccgcccttgacggaaagagagatgatcacaattatggtagatacgttacccacgttctactatgaatagctgataggctacatgccagccaactntgtggatctcgtcttcgccggagaaaggattgaatccgggttacgaaaaggcaagtttgaatatgctgccaatatggcccncaacaacaacagaagagccncagtagtgggt

SEQ ID NO: 34603 - DNA, 594 bp, Glycine max
  unsure (1)..(594): unsure at all n locations
acggtttatggctgattcttgagcnncagananntgaggcatgcggctcatggagaattgccaggtaagccangtttctatagttattttctgcacacacaggcggaacacctttnaatataatctagactcacagagcattcaatgaccataccaacagtggaacatgtttctgggggatatagtcaatggttgtaagagtttgggtcagaggcctataaaactatacttctctacttggcgcgtggactgtaaggtcatcttatagagcaggctatacatgcgtctctgaatgtaaagaagctctggatgctacttatatattgtagtatgacatatcttcgcctttagacaaaattaagcgtgggttccaagcctaattatagctagagacatgcatactcatcttattagatcgtgtttgttactcaactatcaatcatatcactatagctaccttgggttgagaaacatacattactacactcaccagtagctaatggagcgacccatggtgtttacttatagtaccactacggattcccaagtgtcgttagcgttacacagagtttgcacaaacccactctgctctcg

SEQ ID NO: 34604 - DNA, 318 bp, Glycine max
ccacaacaatacagccccgaagcttacccagccttaaagaggtcgtgatgtaacaaccgtaattgttaataaataaataatacagtgctaagttaataaataaataaataaaaatataattaggtcataaatctccactatataaaccacatgttaacctagagcagctattacaaaacacttatgtcactttttcttttctgacgcacaagaaccctaacagagcaaccagaggaggagctctagagagcaccagagacgccaccattgctaacagagaacatttaagcgactacctcgaggtaagggatgagtact

SEQ ID NO: 34605 - DNA, 351 bp, Glycine max
  unsure (1)..(351): unsure at all n locations
aaccacatcacccttacagatgactgatataagcttttaatggaagtcaagagcacgaaattgtgctgatactattgactggtgagcaggtcttccagcgggttgaacacttgaatattgtatttggaaagacccacaagaaggataaaaataagacttgcatatggaagaagaggtccattttctttgatcttccgtattggtcagatctggatgttagacattgtatcgatgttatgcatatggagaaaaatgtatgtgacagtgtgaatggggtgctctntaacattcaaggcaagacgaaagatggtctgaatacccgtcaagatctagctgacatgggtatatgat

SEQ ID NO: 34606 - DNA, 285 bp, Glycine max
  unsure (1)..(285): unsure at all n locations
gattaatggtgatctatatttcatagaactagataaatggtaattaagtcagaagagcttatagtggagggcctttttctaaataactatacaactatgttaanaaatacaatttagtttaattagttggtgactaattaaagtgtctaattatatgatgtagaataattaacataagttagagttgtaacatccttacaattacaacgacagagaanactnntgtgtgtgtcattcgtgcttatatgaatctaatttcagtaattatatgattataatcatgaa

SEQ ID NO: 34607 - DNA, 279 bp, Glycine max
  unsure (1)..(279): unsure at all n locations
ctaagctgtcagctatcttctcttatgataacatatgttattgtatgtctatatcncagctagggagtgagacagtttctttctcacataatcaaagcttcaagtgtatcatcaataacctcaataagaaataagccaataaattcccaaattgagtagaaaacaacataagaagatagatatattgattcaagtcacaacaaataaaccagaaataagtcattcatataagcaaccagcaggaatattacaagaagttacttagaatacagtgcatta

SEQ ID NO: 34608 - DNA, 611 bp, Glycine max
  unsure (1)..(611): unsure at all n locations
aatgaacnccatatgntcttgatancgtgaccnctgagncacctgcggcatgcaagctntatattctcaattaccccaatttgtanacggtgaggnnattcatcctacaccnnncaaacttcaaacttcagactcaattcaagcttataatctagtcataatgtgatctttccttgttataagacatcaaataatagttntaaacttataatataaacaaagaatattgattattgcttgaactacatatataaatgtatntaagagttagttgacttcactcaacaaatacgtttatatatatatatatatatatatatatatatatatatatatatatatatatatatatatatatatctcttaagaaagaataaacataataaataactatcttgttgtgagaaacaaacactatcgtagtgtgttcttaataaataagaacactcaatgttataaatattatatatctatcacgcatctactcctatattatgaattagaaaacacaacctacacaacctctcgcagatacttttttcagtgtaaaaccataattatagaagaacacacgacatgtccttttgagatatacaanatgcgttgatacn

SEQ ID NO: 34609 - DNA, 287 bp, Glycine max
  unsure (1)..(287): unsure at all n locations
aacaatagaattttttatcaactgaagttgagatcccaaaatgcattaaccatgtattagcaaanatcggataatataaatgggatagccagataagaaattactattgatgttgtaggcaaatactcatgagctntaatgtaaataggatgtatatatatatatatatatatatatatatatatatatatatatgtatagcaaaagaatcttaatttgatataaataactgtgaatatattcttagtatactcttataagagtgtgtccaacgataatatatatgg

SEQ ID NO: 34610 - DNA, 291 bp, Glycine max
  unsure (1)..(291): unsure at all n locations
aagcttaagtgtgcacatcatccacattaagaatgtgcttgatttaatttatcttgnggaaaattgtatttattttctctaattnttcaagtgaaaaattaaaaaatgattatgtttacaataaaatggtttccgtacatgtaagcatctcgattaagatgtgcaaaccttagcccaagataggcccaaaacatataacaaggactcgaagtagtggataggatcttacaataacgcangtatgcccacagactctatgaaactgagtccatgcagacttacgcaacacac

SEQ ID NO: 34611 - DNA, 273 bp, Glycine max
  unsure (1)..(273): unsure at all n locations
acttattaattcttaacgtgggatgtttgcataagatcctagcgagatatctacagcactcatgaatattgtgcacacgcatggcctagtagcacaacacaacaataatgtcaagaattgtgtgggtgactgtgattgcganattactatcacatgctacatgtttattaggttcaatagcttgctacacctactatactgtgtcatgtgttattatcagtctaaacctggttcaatagctcgctacatcaggtctcatgcattatcacatat

SEQ ID NO: 34612 - DNA, 428 bp, Glycine max
  unsure (1)..(428): unsure at all n locations
agcttaactatggactccttagcttctctgaaattctcattgtttcccatgaaagcagcttagagaacaagttccaagcacttgnganaatcagtctcttatctgatgagtattgttcctttaacaaatcatgcttcttccaattggatttcctaaccacagctttggaactagtttttggaactcaagtgtcaccagaaattgacatgaacttcatagagctagcactttgttgcattaaaaaattgctgccactnggtagtttggagcctctaaatatgatcaaagatgggtctaaatttaaccacgttgtgctactatntgaaaagggtactaactcggttaagactagctnngtgccgtgtatagagtcatcatcatcatcctctgagacagaagaattatgttctactcttggaaactctcac

SEQ ID NO: 34613 - DNA, 380 bp, Glycine max
  unsure (1)..(380): unsure at all n locations
gctgagggcatactggctacttgtactttctcacactccttcttcactctttttaatgtggaatcccttgtggcagtgccaagcaactgagaagacanatagagagaagtggaggtgccattggccattccaatcccaaccatgaccacagccatgcgttngcactgcttggattggatttcanggaggagaagcacagattgtagtacttggtgttcttgcaggttttttctatcaaactgtcatctcctttcacaaaagcgtgtggttgaaagagtgatattgctagcangaggagagatagatagaagatcttagaagccattgagatagcanaagaagaataaccaacaccgataatntangggactgcgtatttc

SEQ ID NO: 34614 - DNA, 371 bp, Glycine max
  unsure (1)..(371): unsure at all n locations
atagaagatgggtaacactcgcggtaactntgatgaatgagagtcttgtgagacacaactcanagatcaacttttcttccttcaatttcgtgctcccccctctctctttctctctctctntcttttcctccattgaagcaccctctccatgcttcttatctaaggcactctcttggtggcgaagctcctttntccatggcttattccccagtggatgacacctcctctcacctcttctcctttgtcttctgctgcatctccatggtggaaaatcaccattgaagtacctcattgaagttcagagatccaacctccatagaagctcaacanngcaagcttcatcaagacttagttcccatgtcccacaactc

SEQ ID NO: 34615 - DNA, 584 bp, Glycine max
  unsure (1)..(584): unsure at all n locations
atagctagacttcaactacgatactaagctatatgcaatgcctatggaaaagaaggaagaggaaggctgactctaattcaaggctctntaaagccagaacgagtcctctctcgcgagagggaaaanatcctttctgttttaggttcctaggactttactcaaaaaatttaactcatggccaaatcaagaaggtacaccacttctccgttcatttcaaatactaatgctgaaacaccatgagcaggaagagaagtttgaaattcanagtgaaattttttatttgcctgtctagaattaatttacctatatatatatatatatatatatatatatatatatatatatatatatatatatatatataagggatatgaaggagatcagatcacatncaccacatccgaattatgtattctaatttaatctaacaatcctaattaaaaactacagttactcacgtgtgtgcaccacctatnatcctacacaagtctctgtgaattgtaaaactaaaccctctcanagagacacactaccnctanaatatagttactgaccctagatattaccctgatcccaacaatatn

SEQ ID NO: 34616 - DNA, 449 bp, Glycine max
  unsure (1)..(449): unsure at all n locations
acagggcaaaagcataaaactctgcccanaacaccaaccaaaatcacagcttttctcacttaaagaccccagtaacaattccttcgttccagttcgttaaccgttggatcgactcgaaaattttactggaagtctctagtacataatcctacattntgaccgttggtatctattagcaaacatccagaactcattctgcactactctnttcacaaccagcaaaacatagcatttttttctgcacttatgcaaaattctgctgcacaatntcacagcacaattctgcataaagtgcagaattcgaanaccacactttctctcatccaatcttgcccaaatcaaatcctacaagtcccanatcatgtatcaatcatgtctaaaccaaagtccacctttcaaacacagcaacacaggatctaggtgtccaatacccctcaattcaatggttt

SEQ ID NO: 34617 - DNA, 192 bp, Glycine max
atcagaactgggttggcttccacgaagcgctcttttaacgtcattaacttgacgcatatacctcaatggctgatcaaatgccagatggtgtttggcttttcaaactcttcaccatggtacaatttccatcttttgacattcaccacccatgttctgtcggggtcctgtgattgtgggtcatacagctctatt

SEQ ID NO: 34618 - DNA, 367 bp, Glycine max
  unsure (1)..(367): unsure at all n locations
tcagtcacctgcggcattgcaagcttccgagtgtggtttagtggatgatagggttatgtntacattgcattngatggaggcacaagctgaatcctttgtggatgattctggtgagaaagaggtggnggatggactcgagaggagaagcgtgtgctgtccggatgggagggaagtgggtggtagtaatagagtgaagggcgtgaagccggagtcaaatgtggctgaacttgagagggtatatgagtatttagatgggacaaagtcgtgtgttagtgatagtgtaaagggcaagaaatcggattataatggnngatgaattgataatgtatgtgattttctagatgggagggagttgtgtggtactaat

SEQ ID NO: 34619 - DNA, 252 bp, Glycine max
  unsure (1)..(252): unsure at all n locations
cctattattacatggctataatcacttactaaaaccttctattcaatagttttgatatatttgtaaatggtttcaatatatattggtgaccaaaacactttttaatacatttgtgaatatatcgagtctttatcattaataaatgaatcatatgcttacttgtttaaatattaggaagtttatttnntaaaatttatgagccattaaaagactattattatattatgacatgaagtcatatgaaaaatatat

SEQ ID NO: 34620 - DNA, 346 bp, Glycine max
  unsure (1)..(346): unsure at all n locations
gagcacgaaatgaaggaagaaaaagggagagaagttgaactttgagttgtgtctcacaagactctcattcatcaaagttacaacaagtgttacacatgcttctatntatagactangtagcttccttgagaagctntcttgagaaaacttccttgagaagctntcttgagaaaacttccttgagaagctagagcttagctacacacacccctctcataactaagctcacctccttgagaagcttccttaagaagattcctaaagaagctagagcttagctacacatacctctctaatggctaagctcacctccttgagatgagaagctagaacttagctacacacc

SEQ ID NO: 34621 - DNA, 340 bp, Glycine max
  unsure (1)..(340): unsure at all n locations
aaaataacatgaagagtctnttttagtcttcgtttcttaactctgttttatccttattagttattactagtaattattatagtccctttgatttaataacttgattcggtaaagggttgctgtgaggcanaatagctattcctctcggatacagcaattgcaaagacaattgtgctgggagttcctcactatatatgaggtagcacagtagcaccttattcaaaatattatggaggtngaaatctacagaanactaatgactcagattatcaataatcttctcaagaaaaaccgttctggttaaactaatgacatgatcctacaagtaggtatggagtat

SEQ ID NO: 34622 - DNA, 367 bp, Glycine max
  unsure (1)..(367): unsure at all n locations
cagcacaatcaaccacagcagaacaattatgacctctccagcaacagatacaaccctggatggtggaatcaccctaatctcatatggtccagccctcaacaacaacaacagcaacctgctcctttcttccaaaatgctgctggcccaagcagaccatacagttctccaccaatccaacaacagcaacaaccccagaaacagccaacagttgaggcccctacacaaccttccctcgaagaacttgtgaggcaaatgactatgcaaaacatgcagtttcaacaagagaccagagcatccattcagagctngactaatcagatgggacaattagctacacaatggaatcaacaacagtcccagaattctg

SEQ ID NO: 34623 - DNA, 337 bp, Glycine max
  unsure (1)..(337): unsure at all n locations
ccatgttctcagaatatgcaaaatcagaatgctcagaatcagaatgctcaaaattataatgctcaagatcaggatgttcaaaatcaccaataacagaatgcagagattcaccagttatggaatgctcagaatgatcaaaaggtataaaatgatgcctaactaatctatgaaatgtcctatctatctcangatcaaagggttgtaagtcagatggatngactctagtcatacactacattcagcatgcacacaactagttgccttgtcatgtaaataaaggtgtaggtttgaactacagctaccctcanatgatatccaaatgacttgaaaatttgtg

SEQ ID NO: 34624 - DNA, 293 bp, Glycine max
  unsure (1)..(293): unsure at all n locations
agcaatcaaattgggtgtgagcgtgccctccgaaactcgaattggggaactagcgaattgtctaacaacccagaatttccgtggcaaacacaatgtaattcgttagtcctaaccttatcgctaggcctaggctgtaggatatntcctgcctgcttgggcttgtctttcggtaccataaatatatgaatatacaatccttcttcatttgttcttgccctttcatccattctcattctgctgcatgtttatttnntgtgcgattaaatggtacatcattgacaatgagtcctatg

SEQ ID NO: 34625 - DNA, 275 bp, Glycine max
tggcaattagaatatattagatgttcttgtatgttgacatgggtaataggatactttctacacatgcgcgtgtgcataaatggattacatgagtttggtctaaatcagaggggctagcacgacatttttgcgttaatataagcattatcttgtaaaactaacttctaaatgtttgttctcgcaggaaatggccccgaggaaacttgcctcaaagagatccaggaaggataaagcggccgaaggaactagttctgctcccgagtatgatagtcacc

SEQ ID NO: 34626 - DNA, 416 bp, Glycine max
  unsure (1)..(416): unsure at all n locations
tctgattctnttatgctgacccaagtagatattagtccaaaatgaatnttgttatttttaactaataaaaaatcacacgtgaatattcctccccaactatttattntatatttaataatcaattaagattcaaatcttagactactgtattgagagacacanattntccacttatgtcaatcgttattaaattcccaagtgctgcatatcaatccacataaacctacatggactacgggttaggtgaactgcaggagtataccaacttaatggagtaaggacctaaccaaaatctattaagtttaggagagttatcaacgtacacgctatntntggaagaaagttaatagattcaagatattatccccaacttaatttataactctctttatcaatannattttaatatatgcatg

SEQ ID NO: 34627 - DNA, 184 bp, Glycine max
  unsure (1)..(184): unsure at all n locations
agtttagtaaaaggctgttttctaactttgttgtcttacaatcttaatacatatgtagagnaatatgtgactataacgttaatggatgtaccatgtgctggccagtacttgctacgagaggattaataggattatgttctgaaccagtttatgactattcatatattagtggaagttaatgcat

SEQ ID NO: 34628 - DNA, 359 bp, Glycine max
  unsure (1)..(359): unsure at all n locations
ntgaccttgncttgancctgacctacacgcgctcgctgagaggtggagaatttagtttgattgaagaatgtgatgagagctatgagcaaaaaaagctgtttgaacagaactttgactgcagtgggggagaaaaatagctgtgaaagagaggatcgtaatgaggatatggagggaaaaaaaatgatttgaagagaacctgactcagtctgaaaaaaaaagtgtgaagaaagatgttatgagggttaagaaaaaaaggtgttaagaaactctactgagtctaaaaaaaagtgcgaggatgcatgacaagcgattattaatgcataaacgtagacacgtggtgattctaaagacaagtactn

SEQ ID NO: 34629 - DNA, 361 bp, Glycine max
caaatgaatacacccataaaaggcgaaagaaaaatatatacaattctaagagtaactgaaagatttgaattgatatgtccatgggcatgtatatcttagcatggatcaaaaggaaaacggagaccagcaacataaaagaggtaatgactgattttacaacctaatgaaaaagctactatggcctaatgggcatattaatgattcattcagatgttacaaaaggtatgaatactccgtgcgtcaattttctttcacttataagtcgaaattacgtacacgtcagatactaaaactaacaagcgtgcaatcattgcactaccgatagagtaaataactattatatgctatgtaacaaataaat

SEQ ID NO: 34630 - DNA, 550 bp, Glycine max
  unsure (1)..(550): unsure at all n locations
natgggccttgancactgattctctttgancncgngagcncagagncacctgcggcatgcaagctgatatannngngctctccatggtttgtngtttataaactacggacgagagctacctatataaaggtgtgatgagagtccaccatatagttaaaagtggcataaaatgtgcttattcagccacctgtatttgtatttgtagcatatatgaatcagttaagaaacagaacttaataaaatttattttgatcaacacctgtctattaggtttgcttctgagtgtaggcattatattgatatatgtttctcggaatgatattgatgannggccattcagtattcttgattttactttatattggacgcctgccatcatacatgacaaatgnttgtccaatgatattatatatgtgtcactgcttatgacattgattatcatacaatatgtcatgagatgacctagatcccgttgaatcggtgcatgatctagcgcaccttcctaacactgatcatatatatgaccttgcagccggagactgaatttatg

SEQ ID NO: 34631 - DNA, 383 bp, Glycine max
  unsure (1)..(383): unsure at all n locations
gaatgaagctctgatactcacttgttagtctagtggcctcatatatcttaagaagggggggttgaataagatattccanactacttccccaattaaaaatctatttgactttntattcaagttataaattcccttaacaatgaacttcttaaatattgattcanataaaacaatttgaatatgaatataaagcaataataaataaaggagtttaagggaagagaaagtacaaactcagatntatactggttcggccacacccttgtgcctacgtccagtccccaagcaacccgcttgagagttccactatcttgtaaattccctttacaagttctaaacacacaatgacaatccttcctttgtgttagaattctttacaacaa

SEQ ID NO: 34632 - DNA, 297 bp, Glycine max
  unsure (1)..(297): unsure at all n locations
gcggcgggcgatggtgcacaacaagttttccacatccacaatgcgcgaataaacccaccatcccctggtgcccacctccatccgagctcacgtactcccacgtagcccatatcctcgtttctctcaacaccgggtccccatcaatcctgccaagcttccacaacatccaagcaaaacaatattcaaacagcacagactatcacagccaagcaaaacagagcagaggcagaaaactctgcccaaaacaccaaccaaaatcacagctgttctcacccaaagaccncaataacaattcat

SEQ ID NO: 34633 - DNA, 159 bp, Glycine max
  unsure (1)..(159): unsure at all n locations
atctttgagcaagggacaaccccaatttataattgtatgcatcacatattagctcgaatggngcattccaatcangtgcatgaatgataggtgtggtagtcaccgcacgctngaggcaatcaaaagcctctctgcactgatcatcaaaatcaaactcca

SEQ ID NO: 34634 - DNA, 594 bp, Glycine max
  unsure (1)..(594): unsure at all n locations
nggtaactacgccactanangtcnactatagantactcaagctngtagagtggctagacatgatacatgtcangganntggttggtcatcgatattatgtatgccccacattatttccatgacacaaatgccaaaatgatgatttggaaactttattgcaaactggtcatgcatgcacctatgtggacactcaagtgtcaaatttttatggtcatgtgatgctagggctcaggattcatttcctctattntagtcaacccaacgtttccaaaatatgttcttttatcaatttgtgcattcatccgagtccattttgggcgtctgggaaaatcttcacagcattcacccttcaggtgtatacacattttttcaaaaactagttatgaatcagtgaattttttcaaagaaaaagtggaagtcatctcttttcaaaagcatgttggtttttcagcttgacaacttattttccttttttctcccttnnntttttcaatatcattngtaaatttctttctggggtttttttctttttttttcacgaggattttgtactaacatgtgctattttggaggattttgatatcatgctatcan

SEQ ID NO: 34635 - DNA, 358 bp, Glycine max
  unsure (1)..(358): unsure at all n locations
tggaanaacataatttctactctcccattagaaatgaacaagttgctatatgtcgcctaccatatggttatactatacactaattgctattcttaataataaattatatgttaatgagattttattgnggctttttctttattgtaactcacgatggatgatttttatgccaactatatcanaccaaccattgtaaatcatatgttgactacttggctnggtatttttgtttgctaagtattttccatagtacctcaatcttctcattataaatagatngtaaaccaaccactttacaattatagtgctaagctactaatatctctgtgcagttatgtaattccttttgtaagtctca

SEQ ID NO: 34636 - DNA, 244 bp, Glycine max
  unsure (1)..(244): unsure at all n locations
caatacttccccagaactcttagaattcaggcttagggcataactttaccctacaaaaccactntgtaaggcgaggatngcccaagctngataagctctatntaagtcatatctctagtcgatgtgggactaaacaccaattaaggcagctntccaacttccacctcacacacagggctatgggcatggagcatggcaatacgggtggcccaacaatggatcaaggataaactctaatattatc

SEQ ID NO: 34637 - DNA, 332 bp, Glycine max
  unsure (1)..(332): unsure at all n locations
atccttcaactatttctcgtccttggaaaattcttgttgcaagaatcaactgcttctttcattcttcctcactacgaggtcgtgaaaacaagacaacactaggtacctctaaaccgtacactgnggcgatgaggggcaccgtgcatgagcctcaagtgaacctaggggcagattagaagttctcacccaataggttgcctcctacaaggtcatgccgaaagacaacgattggtacctcanagccttacactggggcaatgaggggcatcgtgcatgagcctcaagtgaacatangggcagatcanaagttctcacctgtcgatgttttaaac

SEQ ID NO: 34638 - DNA, 269 bp, Glycine max
  unsure (1)..(269): unsure at all n locations
tcctcacgttggntgtttagggaataacaccataactaaacgcgccgcaagggatccctatcgcaccagatccaaatctagaacgatgggcgatcaagaggagacgcangaacagatganagccgacatgtcggctctgaaagaacaaatggcctncatgatggaggccatgttaagtatgaagcagctcatagagaagaacgcggccaccaccgccgctgtcagttcggctgccgaagcagacccgactcccttggaactacgcacca

SEQ ID NO: 34639 - DNA, 451 bp, Glycine max
  unsure (1)..(451): unsure at all n locations
gcttcttagtctcacctgatgaattcgnggctactttatgcactcttctaatgacaataacatcacttctggcacttaaatgctgngagtttgaagccatcttctcaattaaatntctggcttcagcaggggtcatgtctcctaaggctccaccactggcagcatctatcatacttctctccatgttgctgagtccttcataaaaatattggagaanaagctgctctgaaatctggtggtgagggcaactggcacataattntttaaatctctcccagtattcatataggctctctccactgagttgtctaatacctagaaatatccttttgatggtcgtggtcctggaagcagggaaaatgttntctaagaatactctcttgtggtcatcccaactcgtgatggaccttagagcaaggtaatatagccagtcctttgccactccttctaa

SEQ ID NO: 34640 - DNA, 195 bp, Glycine max
  unsure (1)..(195): unsure at all n locations
gaatgagcttcaccaccaacatgagccttggataagaagcctggagatgatgcttcaatggaggaaaagaaagagggagagaaagagagagtggggatcatgaaatcgaaggaagaaaagatggagagaangtgaactttgagttgtgtctcacaagactctcattcatcanagttacaacangtgttacacatg

SEQ ID NO: 34641 - DNA, 249 bp, Glycine max
  unsure (1)..(249): unsure at all n locations
gagaatcatggtcttgaagctcctgcgctgcangagtggtttgaagctgctatataagtaagaaatcctgatgctctgctcctcgctntagaagttagagagaagatttctattgatagctctgtatttggtaaacttctgccaaatccattcagctctagccagactatctctgctgatcacctgtcctccctgagtaatagcttgaagggagactatattcattcatctatgtgtggtcaatactgg

SEQ ID NO: 34642 - DNA, 344 bp, Glycine max
aagagaggttaaaagccgcgtgtttgattccttgtattctattaatcgtaaggaaccagaaaccatcacatagacaagtttgatggagaagaaagtaaaataatgcatgcagaaacgccaggttgctgtgcctcatgaaactgacactagtgatatggagatagatgaaagatctatgtgtggctctctagaaggatgccatgaatcaggaacttcaggaagtggtggtgaattgtctctcggagatcgaaaatcccatgaatcaacaagaggagagagttcagttccagttttgtcagaagcttctagaggtgacattacctggctgtcaagtctgaacaatg

SEQ ID NO: 34643 - DNA, 291 bp, Glycine max
catcattcagcacgtgactccttacctttccattactgataggagattttccctcattttgcattccctgagaaactctatttgcagcttcttgtaaagcatctatagcgacatcataagtttcagcagacgcgcgcgccttcatcaacaaataaaagagcctcatgccggagggtgttatatctaactggctgagattccaaatagtaagcatatacatcacaagcatgttcttctaatattacattgctattggcatatcttgtccaacgtttcaatatataatgagat

SEQ ID NO: 34644 - DNA, 151 bp, Glycine max
gagagctttcgctatgagaagactggcaagaactaagtgagaagaggaagccatcctgagagcatgagatgagtctgtgagtgattgtgaggttctagaggtggaggagacatcccaactacttgtatttcttcaatccttcgttgttctc

SEQ ID NO: 34645 - DNA, 256 bp, Glycine max
  unsure (1)..(256): unsure at all n locations
atctacaccagcctggatagtaggatataatatcttcacagaggcatcaaccgcttccaactcattcaatacagtaaatttaccaccagaanatcttactctactttcctcatttacaagagtctgcaaccttctaaaatctggagcccatgaatgtatgtcggccacattcaagtttgataacttctttgacgagccagagaatggtgcagtaaacaccctgcaaataaatacagtcttcaccttaactncatac

SEQ ID NO: 34646 - DNA, 342 bp, Glycine max
  unsure (1)..(342): unsure at all n locations
cttgagaagcaaagcttcatggtgaatcaagagtgattcanagatgttttgatgataacaaagatgataacaaaagatgatgacaaaggtgatgacaaaaagctcanaggttaatcaaagaatgagttcaagatgttcaagatagaatcaagaacactttaagattcaagaggaaagttgaattcaagaatcaagaatcaagattcaagagatcaaggttcaagactcaagattcaagaatcaagaaaaggctattcaataatcaagaaaaagcttaatcaagataagtatgagaagggtntttcataaactgagtagcacatnggattttctcanaacatg

SEQ ID NO: 34647 - DNA, 268 bp, Glycine max
  unsure (1)..(268): unsure at all n locations
cagagtggtacctggagatatgtctgcggggtcaggagaccttggngacgtcaggtggggtgctattgcccanaaccaagcttgaccaatcccgacccaacccgggcatagtcggtcagtgagaacctgtgatgtatctaagcaggcgagctcctggcagtcaacagataaaaggaaaacaagaccacaaagcaaggaggcttgtggtggctggccagctcgtgaatttgtgtaatatgtgagatatggcctctggtaatcgattacc

SEQ ID NO: 34648 - DNA, 352 bp, Glycine max
  unsure (1)..(352): unsure at all n locations
caccattcctagtaaccatgcattangaccatgttcaattattttgttttaagtgaaacgggtttatgatcccaacatggttggctcgtggtgcctaacacatganactaagaatgtagtgtgaagtttcacgcttccccctttttttgtttttggtttgtagaggaaaacgcaaggatgagcaaacatganaacaaatggtatgcaattntgcagatcaaaaagttggttgaacgcatatgcatgatgatgccatgactcatgcagaatgtgaggctggaatatgataacggacaaatgcaggatatgtccattatgatgttatgaagagatgcttatgcgatgcatgata

SEQ ID NO: 34649 - DNA, 218 bp, Glycine max
tgcagctgaacgtagtttgacattaagattttataacataaccactaacttggttcaataacttgacacgggaccagtcatttttctcttagacttttccgataaaattgaatgtgggcgagtgatgatagttatagctgactaacacatctgcttggcttatactaaagcttaggtattttattactggaggaatgacccggtttatgggtatctta

SEQ ID NO: 34650 - DNA, 353 bp, Glycine max
  unsure (1)..(353): unsure at all n locations
attctaaagcccgagtgatagntgttggttttcttcacatccaagcccaatgcctgcaaaccatgattgtctaatattttcacggattgggccttctttgagcctttttaacattattatgacctggtcttgtgaggaaaaggcagtgatggttcgaaggttagaaatagcttcaatagctattttgctagtttcatcttgggctctgatagcctttttagacatacccttgaggagtacaagtcttgtgtagaaactcgcaatgccaataggttgaacaacaatcaatataatggcaaatctccatgcaatgattatgcccattgtgcatgctatcaccactgctgaaatag

SEQ ID NO: 34651 - DNA, 307 bp, Glycine max
  unsure (1)..(307): unsure at all n locations
aacacacacgataaaggtcagtagttaaagttagcgttgaataccgagatanaattcttattgaagagctaacagctacagcacctatacatctgcaagttttgttcatacaaatattttcttctggttatttaccttcgttaacgagaacttgaggatgggcgtgagataacgatccagtgctttaacgaagacaagcaccacatgttgcaacagtttatcaatgaaactgttatcctacactacttgcctcacananatatcgtgtcaatctatgggtgtgcttctcatcacanggaatcactac

SEQ ID NO: 34652 - DNA, 351 bp, Glycine max
  unsure (1)..(351): unsure at all n locations
gaaactgcagatcatgagacactggtccacattgaccagaacccagaggtgacaacagacaaaaggcctaaaagaaccaaggttccttcatcaagacttcagggttttgaagtacacactgatgacactatcactgatgaggggtaacttctgcccagtgaagtagtgcatgttgcactgtttgttgatgttgagcctctttcctttccttanactagtaaggaaggaaaatgggtagaagcaatgaaggaagagctacagtcaattgaaaggaatgggacctangagttagtcaaacttctaaaaggaaagaanggccatatgtgtaagtgggtatacaagatcaaacat

SEQ ID NO: 34653 - DNA, 323 bp, Glycine max
  unsure (1)..(323): unsure at all n locations
atgcagcttatgggatagatggctctgaagaagaggaagagcctgcatctgaagtagaacaggatcgataatattgactgaaggaaaaaaatggaactgaactggttntattntaattattattatatatataatggctctatttgaattattatcttattattcttaaatcttnagttaattgtgaactaattatttggtatgactacatatccttaattggcttcccatttgagaactatatacaattaattaagcaccaagtttaattagatggaggccaatctttnttggtcttctatcttctcctttgtctttctttt

SEQ ID NO: 34654 - DNA, 535 bp, Glycine max
  unsure (1)..(535): unsure at all n locations
tcttcagtcacctgaggcatgcaagcttcctcggngccattcctgcgaaggcaacatttgtaaagttattttacaaganatataacaatcattacaaacaagggccaaacaacacttctcatggcacgagtgtcaacatgcactttataaaataatcatattgnggtcgtgctattntatgacacatacgtanttgcatacataaaaagtttgtatgaagcattntacgacacctatccatgtacatattnttttgacaaaccttttcatgctacatcctatatatacacacattntgtggaaggcttcttttgttacctattcacaaatacacacatatnttgaaaaacacttttacgctacccatccaacactttataaggcacttcatgctatatatattcatattatgcaaggcattttcatgctatatatanttcatatttgcaagggcatttattcaactntctgcaaggcattntattcaacattntgcaaggcatntccatgctatatatattcacatatatacata

SEQ ID NO: 34655 - DNA, 223 bp, Glycine max
  unsure (1)..(223): unsure at all n locations
gcgtgagctcagttgaaaggtgggcaactggngatggtatgtntatgttngacttgtgaaagtgggagagttgatttgcgccatcgcccgatcgccacctagtaccacatatgaccagtgccccataatccaacaagcttgatgtgagaaagcgtggaagagtcagtcttcctactttntttgttgaccacagagtggtacctggagatatgtcgtgggggtc

SEQ ID NO: 34656 - DNA, 311 bp, Glycine max
  unsure (1)..(311): unsure at all n locations
ccctactttngaggggcaactcccaccttatgaagactatcccgggcaagacgatggggaaggagatacccatcttggccccctgctccacctcaaagatccatccccgcatgaactaccccagtcgaacatagttcaccatattctggcctcacgcacgcccgtaaaagaatctgttcccttcgcagaagataggggaaagaatgaggcgcttgaagagagggtgagggcagttgagggcctcggcaattacccattctcgngattggcagatttatgtcttgtgcccaacatcgtcatccctcccaagt

SEQ ID NO: 34657 - DNA, 607 bp, Glycine max
  unsure (1)..(607): unsure at all n locations
ntaaatgcgtttgtcntcgccttcanactaagctctattagctgaccatttatcaatnacacaagnngagnttttttagatatattatagttatctctcttatcttagggagagtgagtctcctaaattcttgagtgattcaagaacaccttggttgtatcaaaggactttcacaacctttgtgtgttgccctcgctggaaagagtgattctttcctttctttcatcatcacccttgttctttcaaaccacaattccagaaaatccacctctgcccagaattatctcgtggccataactaccattntacgcactcaaattaagtgattcttggagcctaaatgaatttcaaaacgagacctttcacctcgttttggaatcacctcanttggagccctgtagcttcagttattgtcatttctatatttctgtccagccaccacttaacctacgttntaccatcccattcatttcatttatgccaagaaccaccttantatgacccacgaagatagccaccctatattccatcattttcttaatcaatntncngattttncatcangggttaatnctagacgatcctaagtcagnccttgtgcatgaag

SEQ ID NO: 34658 - DNA, 350 bp, Glycine max
  unsure (1)..(350): unsure at all n locations
tgcaagaatcanaccctagaccatctaacagcctccaaattaaaatntcgtaggagaagcaagtactcaccataagtcaatgaattcatcaacaacttcaggagcactttccttgtacagttctattattatagaacctttagaggtatttaaaacctgtcgtaatgaaggaagaggaaaccagtttacaagataaaatgacttcatttaatgagtattctaaagtaacttcattgaaatntaaggtttaattggtttgagaaaacatattntgntntcacaggtaattacaaaatctcaccttatttttacttgtttcctttatgaatctttgaaaagagtaaacaaat

SEQ ID NO: 34659 - DNA, 153 bp, Glycine max
  unsure (1)..(153): unsure at all n locations
taatcaagtgatctttcaaatgaaaacaacttcatatcaatatcataattataaaaataataattnttactntttctttaatacttaactatattnttttttatgttaaacccttaatatctaagagttataatgaaccacataatatgattc

SEQ ID NO: 34660 - DNA, 607 bp, Glycine max
  unsure (1)..(607): unsure at all n locations
aatganncctttgannnttgattnnctttgancnccngancnttagaggcacctgcggcatgcaagcttggctgaanagttttctcatctttttctatattttangnngcaagnnggatccttatatattagaagttgtaaaatgagcccttaagatgagtgcactatgattatttgcaaacaacacatatttgcttaacctatataggtagtccttctttctttcgacctgagaactatcaggatgcttgatactattgtcttgctctagatcatcatgaaagaacacaatgttgacattcctttgctctacctccaactcaagaataacaaccanattgaacatgattgggatgaatgtcattgttatcacgggtgagaatatctgatcaaatcaacatttatgttctgtgatggagtacatttgcccctaatgcgactatctatatctatactatgatagaagacgcctcttgctttgagganacttcaccagatcataagagtgatagtcatggagggattcatctattcttgatgacaagcactgagctgtattttcctctcatggaatccacgacactttacgcctctatgagcatcagcn

SEQ ID NO: 34661 - DNA, 245 bp, Glycine max
  unsure (1)..(245): unsure at all n locations
cctaatggatggcgccacctcttacctcttctgctatgtcttccgctgcatctccatggtggaaaatcaccattagaggacctcattgaagctcatagatccagcctccatagaagctccacaagcaagcttccatcaaaggcccagaggcagaggcactactaagactattaattggtgctcaaggcccaaactaatataaaggtccaagataaatatgtctntaggcataatttctatttatt

SEQ ID NO: 34662 - DNA, 265 bp, Glycine max
  unsure (1)..(265): unsure at all n locations
attaatttctttaataataaactcactcctcacatattttgtaccgtgtggttggtacctgtgatgatcacgaacctttgntcgtgggagcagaatgacagccatagtggacgagaagtgagattcttttgtggagccgccgagctgacgtgatgacgttgggattatttagggagagagttgtgctctgttaattgactcctccatagctggttccctaattctttttgttgatttgaagatgtcaatcacanatttaattata

SEQ ID NO: 34663 - DNA, 275 bp, Glycine max
  unsure (1)..(275): unsure at all n locations
tatgcaagctgaaagccttggaggaaagaggtatgcctatgttgttgtggatgatttctccagatttacctgggtcaactntatcagagagaaatcagacacctttgaagtattcaaagagttgagtctaagacttcaaagagaaaaagactgtgtcatcaagagaattaggagtgaccatggcagagagnttgaaaacagccagtttactgaattctgcacatctgaaggcatcactcatgagttctctgcagccatcacaccacaacaaaatg

SEQ ID NO: 34664 - DNA, 143 bp, Glycine max
gcatagtcagtcagtgagaacctatgatgtacctaaacaggcgagctcctggcagtcaacagataaaaggaacaaagaccacaaagcaaggaggcttgtgtggtggctggccagctgtgaactttgctagatatatgggatat

SEQ ID NO: 34665 - DNA, 350 bp, Glycine max
  unsure (1)..(350): unsure at all n locations
gctcaattcccaattcgcaaaagctagttataaatatctaaagctttatatgtagtgcattcaatcgtcaacgtaaatgaagtgtctatgagggaagtaatttgctcttttaaagtcaataatcgattccagatatttcttataattatttcttagttatttatctcaatgttaaagaatatattgagaaaaggaataggtttgagcataanagattgcatgacttcgtaaccaacccttaagcaaaccataaagatgaagttgatgcaattaacccttaagctctctctangtgtgaattttatctctgtaataatgagaactagtctagtagcaatatatggtttgga

SEQ ID NO: 34666 - DNA, 582 bp, Glycine max
  unsure (1)..(582): unsure at all n locations
nnatgctgcgactgactgcatcgaatagcacnnttaantactaagcttagcttctaaggaagtttctanagaagcttctctttgaatttctctaagaaagcnncncaaggaagccacctaggctataaanagaaacacgcggaacactnggnngaacccngangaangagagactagngagacatacttcaatggtccacctctcttcctcttttattccttcaatttcgtgctcccacctctctctttctcttgctctttcttttccttcattgaagcattcttccaagcttcttatncaacgctcatcttggtggtgaagctccttcttacatggcttattccctagtggatggcacctactctcacctcttcctctttgtcttacgctgcatcntcatggcggaaaacaccattataggacctcattgatgccaaagatctagcctcatagaagcccacaagcngcttncatcatgtggtatcagagcacatagcttcaagaggggctctaaacctcatacttttgctacatctctccattgtgtcctgatttcccacgaacctacagcttggctaaan

SEQ ID NO: 34667 - DNA, 187 bp, Glycine max
  unsure (1)..(187): unsure at all n locations
agcgactaagatgtaccaggaccttatgcagatngtttggtggccgagtatgaagaaagaaagttatgagtttgtccttgcatgcctagtgtgtcagaaagctaaaatagaacatcagaagccttcagggaagttgcaacctttagagatacctgagtggaagtgggatagcatctccatggatttc

SEQ ID NO: 34668 - DNA, 276 bp, Glycine max
  unsure (1)..(276): unsure at all n locations
tttcattctcttctcccttggccaaaaagaattcgccaaggactaaccgcctgaattctttttgtgtctctcttctcccttttccaaaagaacaaaggactaaccgcctgngaattattttgtatccccattcacaaagtatcaaaggtttaacagcctgagatctttgtcttaacacattggaggatacatcctttgtggtacaagtagagggtacatctacttgggtttgactgagaacaagagatggtacatctcttggtggatcagtctagt

SEQ ID NO: 34669 - DNA, 324 bp, Glycine max
  unsure (1)..(324): unsure at all n locations
atcttggaaacttcatgggtgataacctatatatttcacaattaatttnttggactatgtcaattttctagggtatatatntagctcaacaaaaccaacgactatttattctatagaagaaaactaagtatgcacatgcatggagatgaaaatatcactaataaaaaaatagttntaacatgctacgtaaaccattagtttataaaannattaatttaacacanataggagacatnattataactaatataagcttttaatatcggtatttaaaaaatcgatntaataaattacattatattgttttttttcaaaactgatgta

SEQ ID NO: 34670 - DNA, 301 bp, Glycine max
aagctaaagagagtttgggaagctggaacaatgggttctgtttgttgtcgcttgagttttgatgaatttgaagattatgtaaatccaaatagtcctgtatataggaactgcgtgtgtctcacttgcttgatacagaaccttttgagtgtggtatgttcatgtttcccatttccttgcctcttccaccttttgtttcctttcctcattctggcccatggaagggtaatgctgtgtcttgtgatatgtgtatgtgtgcacaacttgaattttgatgctctccacatgacttagtgcatttgtt

SEQ ID NO: 34671 - DNA, 271 bp, Glycine max
  unsure (1)..(271): unsure at all n locations
attatcattcttcaacatctttagtaataatcatcaataatctacctttcaatcttctctgaacatcattaaatatctttcaactctttctacagaattgtctgattcatttctcttcatctttctaagaaaattatatcaacactttctcttncaagacaaagtctttgttcanaaacttatgctattaatctttttcattctcttcttcctttgccaaagaatgaaggactaaccacctgaattatggtgtgtctctcttctcccttac

SEQ ID NO: 34672 - DNA, 296 bp, Glycine max
  unsure (1)..(296): unsure at all n locations
ggtcaatagacaattatataagtataagacattaattggtcataaacttaaacattatactattaacatgatatatcacaatgttaacttgtatttataaatattatcctaatagttcttgctatacaaaaactgtgcttatggngacaagtctagctattaaaactgtttcttgccagtatatatggcatattttaaatatttagtataaggctaatttattgattgattataattaggaaccactcgtacaagaacagttgcctttagagaanggactctaatgtaaatttaat

SEQ ID NO: 34673 - DNA, 362 bp, Glycine max
  unsure (1)..(362): unsure at all n locations
gtaagcctgngatgttgaacttagtcaattaccattattttcaactacccaaagaanatgttacatgcaaacttcaattaaaaaaatatatatagtaaaagaaataattaatgccaaatacaataagactctcgaagcataattaaggaatgaaactataaagctntaatcaccatccatgtatgaattanaaaaaatctataaaacacattatataacctgcaaagtatatgttctttgtggtgaaatgaaccggaagcaaaacctcanatctgattggtcagtatctactntaattgntgatgtaagcaagttcacagtgtgatgagcaatagaattctcatcatgtactccaccatgat

SEQ ID NO: 34674 - DNA, 294 bp, Glycine max
  unsure (1)..(294): unsure at all n locations
atgtatgtaaagcaatgtcctttgcatttntgcttctctaatgtaaacaaaagctatgcaaagtaaagtaaaggacatatacacaacttgacttgattgtttaagcatgtaattaacacttgttgctttgagaattatcaaccttgattactagcttattgcaactttntattatgaagtttccatttgactntntcatctntaattcatgggcttggccactgattctcctgcattactaagaaactgggttaatccctnttcttgttattaatctaatcatcattcatattc

SEQ ID NO: 34675 - DNA, 274 bp, Glycine max
  unsure (1)..(274): unsure at all n locations
taatcttccctttaagtagnttcatctcatccataaacccttgtttatgaactttcagagagccaataagttcatccgtagccaacaatttcaaattccttgcttttgttatgtcaacgactnttggtctttagattttngctaactcctcacaatcttcttgatcctttgatgtgtntgtatagtttcccccaaagcattaagttcattcactatagtaatgaaccttgtgaacatttcttctattgattcatgttcctgcatcttaaacatc

SEQ ID NO: 34676 - DNA, 135 bp, Glycine max
  unsure (1)..(135): unsure at all n locations
ttccttggattatagggttgaaccaagctcatgctcttacaaaaaggttcatcaagtcaagttgaaatatggaagtaaccgtcttgcaaaattggggcanaagatgaatcgagtcacatcactgctncgtctact

SEQ ID NO: 34677 - DNA, 398 bp, Glycine max
aatgcagaacgtattctgcgcttcactatccatgttcacacattattgcagcttgtggttacgtgaacatgaactactaccaatatatagatgctgtgtatacagacgagcacatcttataagcttactccgcacaatggtggcctcttgagaatgaagtggctattcctccttctgatgacgcatggacacttatccctgacccaactacaattcgtgcgaaaggtcggccaaaatcaacaaggataagaaatgagatggatcgtgtcgaaccatctgagcactgaccataatgtagtagatgtggagcactccaatgctatctgagcgtgggagttgtcaactcgttgatttatgcatgtagtcgagtgacttgtatttgatacgttctgtcaatg

SEQ ID NO: 34678 - DNA, 456 bp, Glycine max
  unsure (1)..(456): unsure at all n locations
ccatcatcgatgagtacaaagaaaagctagacctagtagcaactcatgagcaaaagctagaggacaagtacaccaaggtctcagtcttgcaagcagaaagggaagcaagggaaagggtgatcgattcattgcacagagaagcaatgatgtggatggacagaattcgcattactttgaatgggagtcaagatcttccctgactgctagccaaggccaaggcattggtagatgtgtactcngcccccgaggaaatccacgggctcctcaattattgcgaacacatgaatgattaatggcctacataataggagcactaaggaattgattgtgcttgactntgctaatacanctttggttactaataaaggaggtgattaatctactgttactaaaactctggtgaatcaagctcacactatcttacatcatcatgttaatcttgccatactactgatt

SEQ ID NO: 34679 - DNA, 578 bp, Glycine max
  unsure (1)..(578): unsure at all n locations
cccgctttgtatcttgatctgcgnattcnaagncaccngaggcatgcaagcttgaaaacacaacttgaagaggccananccacttattattttgtttattatnggaaccngccagaggnatgcatggagcacttataccacaatacatcgcttgttgttggatctggcaggttatgaactggtgttgcaacacttactgcgtgataatcgatgcttccatgaatatcttctactttttctgggtccatcattctacacaatattgaataatggtattatcttacaatactgatcggatcatatgtttgcaggcctatattcatggcaacagattacattaatgaagaaagttatatatctctatgctntngaagaagctgcctggaccctaggcagcgacatactagcctgctcatctacattatgacagacacgcgtagtgataatcacccacctgaaatcttcagagatgagtctnatcacacgttctattgacgtcgaaatgncttcatgtatttaatgatctgacattgtattaggttagatccgacttaatatgtgatacacttcatactacg

SEQ ID NO: 34680 - DNA, 141 bp, Glycine max
  unsure (1)..(141): unsure at all n locations
atggaacatgacgaaaccctctatggcttgacctctttgtggagacattggcagtgtntcctcttccacgaccatactaagaagaaattgctgcataccttgtaacaatcttgataaatcatggtacgatctttcccagct

SEQ ID NO: 34681 - DNA, 422 bp, Glycine max
  unsure (1)..(422): unsure at all n locations
gcttatgcgcatatntccttacanacgttctcttgttctaattatttattaaccgaaaaaaatgcacccatatacaatcaaggcagcttcgttacctagattatttacacgtacttccaaggtgtatttgttacttacatcacacacctncttggctaaattcacatacatgcatactcaaagcantttggggtaccaaaaattgcacatgtgcacatcttggtatttctaatacctatacatacacaaacttcatgatgaatcttgactatctacacaataaggtgctacattntatgctcttttcaaagttttgctacctanagccgcatgcaaattcaagtatattttcctttgctgactaanattgtattcaaattaaaaggtatacattntttggtaatgtatcttctttacataac

SEQ ID NO: 34682 - DNA, 344 bp, Glycine max
  unsure (1)..(344): unsure at all n locations
cacgattatcgtctccctttccatcattgggggtaccacttgggccgccagatccctccaccttttaggcgtgttctttgaaagatccgtccccctntttgcaaatgttctatagttgcatcctatccggaaccatatcaaaattgtactgatactgcctaacaaaggcaaccattaggtccttccaagaatggactcgggaagattccaagttagtgtaccaggtaacagctaccccagtaagactttcttggaaggaatgtattagcaattcctcatctttngcgtattcccncatcttctgacaatacatctttagatggttcttgggacaagtagtcccc

SEQ ID NO: 34683 - DNA, 372 bp, Glycine max
  unsure (1)..(372): unsure at all n locations
gcttccgttcccgagagcatctcttattaagcattcaactctttgctttcttgagctnaggaaaaangccatttcttcttctttctttcttccaaatccatttctaaagttccaagtactttctccatcagccatatccaccattagccaccacaaaccatcattattctccattgaaaacccacaccgagaggaacccttcaaccgaagcagaatntccaacttggcttgcggtttcggtagagaacgaaaaccctaatctgatctttcattntctttcgaggtaaccatggntctatgctngtttcttgttagtttcatcttggccttgcatcttttctaactntgcaaccgccattgcatgtcttatgc

SEQ ID NO: 34684 - DNA, 323 bp, Glycine max
  unsure (1)..(323): unsure at all n locations
ctaagctgtcgtggagctgcccattaactgccctaactcctttagactgttggtccctatgctctngaccttgactngatagaacctctntntaagcgaaggtgcttgacttgatcccatgntttactaaagtaaaacaaaatcagtgcgaatcaaaactccgacatctatcatgggtggaatggataaatgcatgaagagatgcatatgacacanatgcaatntatgaatgtgggagcccgggaaattgtctcctttntagatacaatgtctcgggttagcacggtgcccgacgtatgtatttaagaatgtgacacggaccc

SEQ ID NO: 34685 - DNA, 303 bp, Glycine max
  unsure (1)..(303): unsure at all n locations
acacaactagtaacaatgctctgggtcaaacacccacatcactacatgaaagagctgagagcattnntggatttacaaaggaacgtcatttggaaattccgaccacgccaatgtgaccagggttcagtgttatgaaaataacatgcatttcatgaaaggataacgtttacaaagtctctttctctaaggtttttcaaaggaagtataagacatgcaatgacggttccaaagtcagaaaagatgcanagataagatggaactaacaagaaacaagcatagaaccatggttacctcgaaagaaaa

SEQ ID NO: 34686 - DNA, 245 bp, Glycine max
  unsure (1)..(245): unsure at all n locations
ccatgatcaacaaagtacttatggcacctactatgtgatgacttgaccaacgatgttattggaatgctgcgacgatctttcggcaccgtattcacacattctgataggttggttgtcatgtgaccatatcttcntccagatgtatcgtaagtcatgctccatctttcctttgaaatgtgatcaatccatgtngctatggctggactcaattgacgacaattttctaagtgttgatcaaacacatg

SEQ ID NO: 34687 - DNA, 464 bp, Glycine max
  unsure (1)..(464): unsure at all n locations
agtcacctgaggcatgcaagcttcanattcacctctactggagnntctgttggtttacattttccatgnnaaaccttctcaaaacatttgaaatatacttcttttggtgcatganaattccctgtttagtgtatgcaaactccaatcctanaaagtatgataatgttcccaggttcgtcattccttcttcaaattatgttttagtgggtcaatcccagttgagctactctcagtaagtaatagatcatccacatacagacaaatgataagaatgtcagtgtgttttacaattctatgtaaactccctgaaagtcaatattgtgaagaaaagtgtcaattctcttgttccaagccctacgtgcctgttgtaacccatataatgccttcctcaacttcaacactttgtgttcattcccttgcatatgaaaacagaagggtgataataaacacatcttcatcaagtg

SEQ ID NO: 34688 - DNA, 258 bp, Glycine max
  unsure (1)..(258): unsure at all n locations
tttaagtctactttccctatacnttctcctataattcttgaagggttatgactcactatcaatatcacttatggtgttacattttcctcattgatgtggtatcgagtattataatataattgtatcgcggaattatggtacatgttaagagttatcaannattaattctatatactgtagaagctctcaactctcttgtgggtatatatattaatgtcttgttctcgaggttcatagattctgtatacactgatcaat

SEQ ID NO: 34689 - DNA, 348 bp, Glycine max
  unsure (1)..(348): unsure at all n locations
gcttctattatcaatttcgagcatctctatatatctcttggactcaatcgggcatccgagtaaaacgctattgtcaatntaattttctaggatcttgcattttcaatttcgagcgtctcgatatattacaggactcaattggatagccgagtaaaaagttattgtcgtttgaatttgctcagtgcttctgttctcaatttcgagcgtctcgatatattacaggacttaatcagacatctgagttaaaaagttattgtcgtttgaatttgcttggagcttctgtacttaattctgagcatctcgatatatgacgggactcaatcgaacaaactagtaaaaagttattgt

SEQ ID NO: 34690 - DNA, 361 bp, Glycine max
  unsure (1)..(361): unsure at all n locations
gtctcacgaatgtcacctgctcatgtctcattttttatctcgtggctatatgagacatcttgccaaacaaagtcaggttaacaataactcgcctgtgctntntcttccatgctatatgtagcaaagtcattgatccagtcatgtttgatgagttggaaaatgaggccgcaattatactgtgccagttggagatgtatgttcccctgctgtctttgacatcatgattcacttgattgtgcatctggtcagagaaatcaaatgttgtggtcctgtttatctacggtggatgtacccggttaagcgatacatgaagatcttaacagggtatacaaagaatctatatcattcaaaagcatctatt

SEQ ID NO: 34691 - DNA, 398 bp, Glycine max
  unsure (1)..(398): unsure at all n locations
agcttagtgtcatttttgtgaagcccgttttcgatttttgtctcgctaagcggctagtgtctnttccctgttctatgtttcagttttaaaatatgaataactgtgtcctgattaattgtttgattcctttgtctgcagatgtcttccatgaaaagaaagagtgtcggttcaaggccaaccactcaacatgatacaaganaattccactcttttgaggcttggaccacatacactgataatgtcctgngaagacatgtattagctgagaggaaagtggaaatatatcatacagagctggatgaattaaggatgaattnagaggcgtaactccataatccctcaccaattagctgacagagcatgacctacattgggaagagtctatccaccttcagtct

SEQ ID NO: 34692 - DNA, 376 bp, Glycine max
  unsure (1)..(376): unsure at all n locations
tatgctnntatattattcanttactttgtctcatactctctatatgttatttcttctaattcaaatatgaattcaattcanattgacatttaagttgtttgtttgctttgatgtaaaaaaaaatagttaatggcatgcatggttatatttntaatcaacaacttatataaaaagaagagtattaaacaaacatctattntatcagtttttcatatgcttcctttcaattagtcttaatttttctctaattataattgatcattaaatatttgtaatagttttcatatgaaatcttcgacatactaatactacatgcaacanaataaagtcatatctcacggtggtgacatggtcgattacacatatgatcgatatc

SEQ ID NO: 34693 - DNA, 253 bp, Glycine max
  unsure (1)..(253): unsure at all n locations
attctgttataacaacttagcaaaatatcttgtatgaaatggctataaaaaggggtaatgatgaaataaaaagatatcagaattattccctgcaatttagcttttcttttattccagttagctatcaactggtccgaccttagctnttcttttattccagttagctagcaacagactaataggaaagaacanaatactaaacatttatttaattaaatctaataaaaaatttacttcaatcacattatntaac

SEQ ID NO: 34694 - DNA, 269 bp, Glycine max
  unsure (1)..(269): unsure at all n locations
caatagcatcatttcttgcactgaatnngtgggagttggaagccattttctcaatcaaattcctagccttaataggggtcatatcaccaagagctccaccattgaaagcatcaatcatactcctctccatgttgctaagtccctcattgaaatattgaagaaggagttgctcanaaatctggtggtgaggacagctngcacacaatttcttgaatctttcccagtactcatacaagctttctccactaagttgcctaatgcctaaaatg

SEQ ID NO: 34695 - DNA, 285 bp, Glycine max
  unsure (1)..(285): unsure at all n locations
accacagagtggtacctggagatatgtcgtgngggtcaagagaccttgnggacgtcaggtggggtgctattgcccaaaaccaagcttgaccaatcccgacccaacccgggcatagtcggtcagtgagaacctgtgatgtacctaaacaggcgagctcctggcagtcaacagataanaggaacanagaccacanagcaaggaggctngtggtggctggccagctgtgacatttgtgtaatatgtggattatggcctctggtaatcgattaccaagggtgggtaatc

SEQ ID NO: 34696 - DNA, 335 bp, Glycine max
  unsure (1)..(335): unsure at all n locations
gattatacatgattttgacttgtattgattcaattgngcaaaattggacgaggtcaagtgtgatttcgaaaatctgcactattatgcnagaatttgctattgaaatgtgcagcagaattttggctttgtgcagaanatgatgtgtatttgctggttgtggaaagagtagtacagattgggttntggacgttttctggcagatcccaacggtcacaatgtagatttatgtacttgggaccttcattaaaatntttgagtcgatccaacggttaacgaattganaaaagagaatgtactggtgtattgagtaggaaacggcggtgtggttgtgtttt

SEQ ID NO: 34697 - DNA, 222 bp, Glycine max
  unsure (1)..(222): unsure at all n locations
atattggatgaggggaagtgtggttttcgaaatctgcactttgtgcaganttttgctgtgaaattgtgcagcaggattttgcaaaagtgaagaanaatgctatgcatttgctggttgtggaaagagcagtgcagaatgagttctgaatgtttgctagtagataccaacggtcaaaatgtaggcttatgtactagagacttccagtaaaattttggagtcgat

SEQ ID NO: 34698 - DNA, 284 bp, Glycine max
  unsure (1)..(284): unsure at all n locations
agccttctggaggaatcttctggagggcccaagtgggcctggntgctatntgcacccnncattttactaaatacacccnccttctctttnttggtgattctctttccgtaatgttacgaaactntatgaatttcgtaacgatacttatnttttcttccgcaaggttacgaacccttacgaattatgtatntactctnntttggctntcgaagaaattacggaatntcacggatcgcgcaagcctgcttcctttagatntctgagacgtctcgggaacttcatta

SEQ ID NO: 34699 - DNA, 394 bp, Glycine max
  unsure (1)..(394): unsure at all n locations
agactatgtcaagnnatggaagtacggggactcgctctaccggtgcaagtgtcttaaggatgctgctcttggccgcatgtgcactgagatcaagagggttggcccgagtttggcttatttagaacaggtcagacagcacatggctaggcttccctctattgatccaaatacgaagacctgtttgatctgtggatatcctaatgttggtaagagctcgttcattaacaagattaccagagctgatgtggatgtgcagccctatgctttcactaccaagtctgtctgtgtgggtcatactgattataaatacctgaggtaccaagtaattgatacgccagggattttggacaggccttttgaagatcgtaatattattgagatgtgcagtatcact

SEQ ID NO: 34700 - DNA, 322 bp, Glycine max
  unsure (1)..(322): unsure at all n locations
tcctctgggtcgagtggtctcatacacgtcctggaacgtgtgtcatgatctatccttatgagatcacctttgagcgccaaaccattcaatttccagaatatatcgcgggttcatctaaactagatgttgttgacgacatgtcaaaggacagagaggaaaccttccagggcattcgaaagaaactcctaaaggctcaaaccgctattgaaacatttgtggatgctaaacagcgcgaggtaacctatcaaacaggagatngngttatactcatactaagacctcaccgccaactctcggtcaaaggtccaaatgcggtgcatgg

SEQ ID NO: 34701 - DNA, 285 bp, Glycine max
tctattggataaactcggctatacatcgtatgatatggttgtcaaagtctctatcatcccttctaatgtccttgtatccatatctgacagtgcacctatacattcgatatggtctcggacaaactcgcccgattaggaaacgttctttggttaatacatgtggaacaggaactgttttcacacaaacaaagaccaacaccatgtgaaatgcatggaggttggatacaaagtgggagaatattgcaggtattcctgttgcaagttctgtgtagatgagaccaatcc

SEQ ID NO: 34702 - DNA, 421 bp, Glycine max
  unsure (1)..(421): unsure at all n locations
tatgcttctcatagacattcattatgaatattctcttctccctctgtatggtatctgnaagtttaagttgctcggttgttttgctgatgtgaaactgtgtaagacatgcttgatgcatggantttggtttgcataattagaatgggagaggaatganctgtcctgttgtatcactacgtntgctcangaatggaatgattnttttatgtttcattctgcttttatgtttggtaaagaaactcaatataaaattgaatcataattatgactaaattaaaattaataaggggtgatgaaataaaacaaacactaatttattctagcgccgcaaaataggcattaatgaggaattaaggttctgtttgttgtgactttcanacgaaaacacacacattaatgtagacacactttgcgatcatat

SEQ ID NO: 34703 - DNA, 274 bp, Glycine max
cagcccaaaagccgaagggaaaccggcagcacccaggctgaaaaaaaaaaggcaaaagagagaaaagcaaagagacgaaaaggggacacgaagcgaacgccacaaacaacacccagtacaagcgcgcggccgagacaagaaaacaaacaacaacgacccagaaaaccagcggaaaaaggaaaaggaagggagacaacccaggacacaaacaggcggaacggaacataacagggagaccgcaccggcgcgcccaaccactctggggaaaaacaac

SEQ ID NO: 34704 - DNA, 565 bp, Glycine max
  unsure (1)..(565): unsure at all n locations
cgatgacgcgtgacagtcgccanccaanctaagctcacacgtttgctataagcatggttcagctgttgcagctggttagtctctttttctcangnnaagaacaaggatcaacctatgtcttctctcttcccatggatacgtacgaaaccgggcgagacanagcttaaatttggctatgccatacaagagatgcttggcacgccacaacagtgagattgcaacatatgctggtgcatttgctctaggatcgagtcttgttggtgctggctagctcttaggtcggactgttggttgcatgttacataactcatcagtttgtaacatttatagtcaagtctgctttgcatgaagaaggtacactaaggaggaaattggttcaattagagaaagaacacaaattcgnttatcacaggtgatgcacgtttcgagactatgtagcctgaatgacatcctgatcgattccaaatgatactacgattgtttgactaacaactgattctttgaccttcaaatccctaggactggctaaccgagaagaaatgacatctgcatgaggtcgcaagct

SEQ ID NO: 34705 - DNA, 325 bp, Glycine max
  unsure (1)..(325): unsure at all n locations
acttcaaaccttctcttaattgtctntgggcttggcgaccacgatcaacaaagtactttcggcacctactatatgttgacttgaccaacgttggtattggaatgctgcgacaatctttcaacaccttattcacacattctgataggttggttgtcatgtgaccatatcgtcgtccagatgtatcgtangtcatgcctccattttcttttgaaatgcgatcaatccatcttgctatggctgggactcattgacganatnntctaagtttgatcaaacacatgcttgcaggagtgacgctgcatcanattgtatcacccaaagtgac

SEQ ID NO: 34706 - DNA, 361 bp, Glycine max
  unsure (1)..(361): unsure at all n locations
agttagtcgtataaagcgactttatgtattcactaattgtcgtagagagtggacgccatttagttttagcgtgttggatgttgaatagataggtaacagagcaatccttcttagatgatacatcctatcattaagtcctttaggaaataaaatntttccacttgtcaaaaactcattagaatattattgatttacactttnntgtattcataaaaatccaaggtagatgagacgagtggtcgtccagacctaacaattatgggtctactatgatgcgaaaaatagtttanaaaatttatgtggaaaccatngaagatctangagaatnttcactccaatgatttctcatatactacctatt

SEQ ID NO: 34707 - DNA, 414 bp, Glycine max
  unsure (1)..(414): unsure at all n locations
ctgcagctttagggcatacanagtggatacaggtctttttatttttatctaataggaaaacagaatggagttatagcactcctgtttgtaagcattatggttgcatctatatgcttcggagagatcttgtaacatgtaacaaccaactctgaccggttaccaccatagtattaggttatgagatttagtatagggttcttttgctctcccagttgagctgaaatattaatatctaacaagcttttgactgaggtttgagtcaatatagccttgttctctatctttttattatggtgaaaatagcatagcccttctttcttctaacactgtccagatgtaatacctgccttaaatatgttgtttgtattaataaaatatntcaatggtttataggttatcattgatcacaatttc

SEQ ID NO: 34708 - DNA, 348 bp, Glycine max
  unsure (1)..(348): unsure at all n locations
gcaataagtgaaagatngatagatntagcttcctctagcatgtacccttcacttccaggtgggaaaaaaataaaattagaggcaaagttcaataataataataacatgcatgcatatttgtgtgcacaagtgcacacacacacaaatcttaagttcagtttcagtatataccttatggatacgctctgatcctgccaaatctaccacaaccaacttgctcttttaacaagtggtttgaaggttagtcaagtgagagacatattatttcagtataaacaacatttactgtcacaaaaatctctaacatgacctgtagactagatattcatcaaatacgaatattttata

SEQ ID NO: 34709 - DNA, 390 bp, Glycine max
  unsure (1)..(390): unsure at all n locations
aaagagggagaatgtgaatatatgtatacatgattttgatgatgtcaaaagaagaatcaaacaaggatcantttgcttcaagattaatacaagattgtttcaacaaacaaagcctagattcaagatttcttcaagatcaagccttgcctcacaatgaaagggttcaagtcattcaaggcacatgtaatcgattaccaatggtttgaaagtgtgtaatcgattacacatcatatgtaatcgattaccagagactctgaacgttgggaatccaaattttaaatgaagggtcacaactgttcaagaaaaacaactgtgtaatcgattacactaattctgtaatcgattaccagagagaaatttaaggaatatcgcaacacgcacatcttatca

SEQ ID NO: 34710 - DNA, 131 bp, Glycine max
  unsure (1)..(131): unsure at all n locations
cgtccacagaatacgcacacatctttcggcaatacatacggagatgcccttttggacatgtcgtncctttgtacttatcaaagtctggtactttgaacttgggagggatgacgactgttggcacgagacat

SEQ ID NO: 34711 - DNA, 376 bp, Glycine max
  unsure (1)..(376): unsure at all n locations
gacaccgagagggacagtgtataaagcttgtttagggtacaagatggagtaagggacctgatttccaagaacaaatgaaggcatgtagtagatcaggtaataggatgtaataagtgcatcaccccaaaaatgatgtgggacattatagtgaaggataagagtataagttgtttcaactaaatgatgattttcctttcgcaacaccattntgttgtggtatgttggcacataacgtctcatgaagaattccttgcgaggttagaaaagagcgaaattggaagaacaaatattcatgggcattatcagtgcttataatcttaacgaaaacaccaaattgattttgatttcatatgaaaaccttgaaaaaggaaacata

SEQ ID NO: 34712 - DNA, 354 bp, Glycine max
  unsure (1)..(354): unsure at all n locations
aagctttctgtgttntgtctanagccgctggagatcagttacaaagacagtatctaacanacacacaaacacatctcccncgatatggctggtacaattacaatatatatatatatatatatatatatatatatatatatatatatntntaatattattcgaagaattagatccatggtgaaaataaatagtgattaatattattaannaaattataataagtaaaaataacactggtcaaaagaataaaatanataataagcatttcatatataaaaattaaaatgagattcacgttcataatcggtggttgaaataaaaatcctatataaactctagaagaaactcatagat

SEQ ID NO: 34713 - DNA, 352 bp, Glycine max
  unsure (1)..(352): unsure at all n locations
caatgaaattttatcgatggatcttctctgatcatgcctgtcaatagaataacaaaatntaaatgacaattaaggctaaacaataacataatatgaacataaaatacgtacctacgacacaagtgacaattaaatctgaatcaagtttctcgtgatcttgggtcatggtcatattgagacatgtgtgtggtccaccccattgagtgactntccatgaatcagttnttttagatagaattgccctcatatataaagggtaaggacaatctgcatttttattcaagcaacaaacgacatacttgtcccatttgctttcaaccactttgaaactntgatgcaccttcataacata

SEQ ID NO: 34714 - DNA, 350 bp, Glycine max
  unsure (1)..(350): unsure at all n locations
gctgtctcgccatttgcagcagcgagacatggtgctgactgttcacgaaggcggtatcgccagtagcatcatcgagacaggtgctgactgggcacaaaggcgtaggtgctgactgggcattccgccagtagcaccagcgagatcatcatgcacctctgcacgcgctacagacaccttcttcacgtcttgcatagcttctggcttgacacaacagcttatgacactgttgtttgcaggtaaggtcacatccaggctagggttctattcatttgcaggttanggttctgctcattgcangctanggcatggcatggtgagggttcacatgggtacagtttcatattcacatg

SEQ ID NO: 34715 - DNA, 371 bp, Glycine max
  unsure (1)..(371): unsure at all n locations
agctcgtagaaagtgcgtacactgtattatttnntctgtgctttattntcctgttaatctttatctntatgataatgataatcatcttttctgctggctgaattttttgcattgtgtaaatataaaagacaaaactgatgagagaattgttgaattgagtattgcaaatgatatacatgtgtgggcctatctctctctggtacctagtgtgactgcttaaatactgtcaaaactatttgaagtttgttattgttggtaggcattcctgtaaaatgaagtttactaaataggccataacttccatatctgctgctntagttntctggcatcatacattgaagcatagacttataaccattaattccttctac

SEQ ID NO: 34716 - DNA, 268 bp, Glycine max
  unsure (1)..(268): unsure at all n locations
cataaaattccttcaccaaagcaagatcaatagtcccatcagccaagttggtgaggcgtttgtgaagattacgcctctccaactntgtcttgaagttgtcaaactccgtgtggtatacctcaacctttctttctggcaaaatattcttccccaagacattatctgtataacggttccaagcatcaagcgaatggaaccgtctagtatcatattgagcagttggccttgccccaatgctcttacatttcctggaggccatctgtaacac

SEQ ID NO: 34717 - DNA, 311 bp, Glycine max
  unsure (1)..(311): unsure at all n locations
gtgtccaagtcttgatggcatatgtttgaatnngtgacagcctcagtaactgctaccatatcctcatctgcaatcatgtaaagagatcctcgcttctttccacgagccacaatgagaaatgcctttgttaccttccaagctctatatccaaaagtggtgtaatgcccctcattatccaactaccctatagatgttagatttccctctaaggcaagaatatgtcaaacattgtacagtgtccatagggatccactagaggtcttgatgtcaatatcacctcttccgacaatgtcaagagattntccatctgc

SEQ ID NO: 34718 - DNA, 249 bp, Glycine max
gaaaaaatgcacccatatacaatcaaggcaagtgcgttacctagattatttacaagtacttccaaggtgtatttgttacttacatcacacacatctacttggctaaattctcatacatgcatactcaaagcattttggagtaccaaaaattgcacatgtgcacatcttggtatatctaatacctatacatacacaaacttcatgatgaatcttgactatctacacaataaggtgctacatttcatgctc

SEQ ID NO: 34719 - DNA, 430 bp, Glycine max
  unsure (1)..(430): unsure at all n locations
ctacaaaattgttaccatgtacttatatacaaaatttatcactcanaactcttaatcataccaacattattctagtaaacaaacttgataaataaaatacttcannagtgcctatattggttgctaatagctattgcagagtatacacaattcttccagtaatacaaacttgcatattaccacaaaactcttaatggtgccaacattaaaatagtgtctatagccaggcttttanggcacaagaaagtgcaacaaatagttgaaaaaacattgtatgttgtggttcactaatctcatatgaaacaagttatgtagaaaggcttgagttgtcacatactaacatcatttcacatcacacttgtaatcttagctacaccttgcttcaagaaacanagatatgtatctaatcaatgataatgacatcaaagta

SEQ ID NO: 34720 - DNA, 571 bp, Glycine max
  unsure (1)..(571): unsure at all n locations
acccacgttaatttatgatgattgcatttgagacncccganccttagagncacctgcggcatgcaagctngaagngagaaagngnggattattcattcnnctttactttatncgnngaccacagagntggacctagagatatgtcgcggnggtcacgagaccttggngacgtcaggtggnngtgctattgcccaaaccaagcttgaccaatcccgacccaacccgngcatagtcagtcagtgagaacctgtgatgtacctaaacgggcgagctctggcagtcaaccgataaaagaacanagaccacanagcaaggaggcttgtgtggtggctagccagctatggattttgagtgatatcttgaatatggcttctggtaatcgattaccaagggtgtgtaatccattaccacgcttatnaatgaagacaggaangtatgaatgtctctggttaatgattaccaangggtgtgtattattacccgcccaaaattggatcnggagttggaaggttcttgtatccataacaagggtgtatctatacagctataaataaaacgttgtgagaagcct

SEQ ID NO: 34721 - DNA, 277 bp, Glycine max
  unsure (1)..(277): unsure at all n locations
ttgaggaagaggcttaccacctctcccatcatgcaaccaccagatggggaacttccctttgagctcatatgtgatgcctctaactatgcactnngggtttgtttgtcgtagagagttgatagactataacatgtcattgcttatgcttcatgcactntagatgcaacccaagttagctacaccaccactgagaatgagctnttagctattggttttgctttagataaattcatatcttatttcctttgctcccatatcatagtctntactgaccatg

SEQ ID NO: 34722 - DNA, 338 bp, Glycine max
  unsure (1)..(338): unsure at all n locations
gtacagncagtgtgattaacaaaattttctttgtttgtcaaggaaggagaatagtatagtatttgccatgttttctccaagtgcaacatgacctcaacgctaataatttaagcaataactacatcataaaagacanaattttgtgctaagagacaacctggcaactgtttttttagcgtattgatgtattaaaaattggagcagcgagtaaacaactgactcgcgtagcagtaaactagcagtatttaattggtgggttatacacaagggagggatctgttggtggagtcagtctagggacgtgtatacctacaacatatannatataaattttctat

SEQ ID NO: 34723 - DNA, 285 bp, Glycine max
  unsure (1)..(285): unsure at all n locations
cttaaatataatttcaaatggggatntcattttgttagatcaaatgtggtgatgccacaatttattgagggaggactatggacatgngtgaattttggaggggacatagaagattgcaacttatacacctgatcttcagtctttccttgcagaagaaccgctcccgttgtcaggctctttacctcanaatgcaagggaaaaattcaacagacacagagttagtttgacgtaattgagaaacagaaatgagattntgagagacagagggaacatagtatattggaa

SEQ ID NO: 34724 - DNA, 341 bp, Glycine max
  unsure (1)..(341): unsure at all n locations
accaacttcactattcctagttagaaattccaatattctatattacctgctcattagctgtaggaggaaggcctccaacatacacccgcctagcatgtcatgtagcctgtaaattcagtacatcaaagataggccataatcagggaaagtcatgctaaacttaaaatgaaacttaaataagactgtagtcagtctcagcaagcctccatactcggaaagactaaacttaaaatgttgtgttgacgaagttagtgtgtttctactctntttctataatgactctntntcttctcaatgaaagagaatattttctcccagcagcacagtgatactaaacaaac

SEQ ID NO: 34725 - DNA, 434 bp, Glycine max
  unsure (1)..(434): unsure at all n locations
gcttcctcggggccatntcctgcgaaggcaaacattggagagttagttttaccattatatgctattcttaaaacgaanatggcatacgacctcccncaataacacaaacatcaatgtgaatntagagcgaactcatgcgcatacttcctttcgaacattcactcgcaccagatattcttctaactaagaaaaatgcacccaggcacaatcaaggcaccttcgttacctagatcacttatatgtacttccaaggtgtatntgctacctacatcacatgcacttcctttgctaaatntacatacatgcatactcaaagcatnttggctaccanaaattgcatacgtgcacattctggtatttctaatacctatacatatacaaactntgtgatgaatcttggtacctacacaaaaggtgctcattcatgcttattc

SEQ ID NO: 34726 - DNA, 358 bp, Glycine max
  unsure (1)..(358): unsure at all n locations
gcccgacagcattntcatctcccaaggcttgagtttatactggtcgtaaatcaactgcatacataccagcacagtactgggcaacagcacagtactgaaatcaatagaanttagtcatagtccatcctaataaaattaacattgtatattgtccaacagctttcgtacctctcctcaaattgcaatgttgatgcatctatatcctacttgtttattatgtatatcaaatttggctgtagtgcttgacaaggactgatttaaccacatctacaatatcatattcgagtcatatatatgttttaatcctctcctatcatattattgagtgattactctcaattttcatgagatcatgttg

SEQ ID NO: 34727 - DNA, 396 bp, Glycine max
  unsure (1)..(396): unsure at all n locations
tatcgctgcgcacctgctggctatgggatcggtctatgacttgcgttttgtcccacacctaggtcccatttctggtgagttgtcctttacccacatgttacttgttcttttccaccgttatgaatcttatttatggaagaagaagaaacggtctaaaattctagaacgaagaagcaagcggaacaaggatatgttggtaatttcacttgcgttgtgggagacatgnatgttgggaacttgatgtggagaaagagcatgacccaagatgaggtagactntgtactntgctagagtatgggctccagctatntctatctctcttgtgttagtacttggaacttgaagaacacttcaacatttactacaacaaaataaaaatttagtaactactataac

SEQ ID NO: 34728 - DNA, 293 bp, Glycine max
  unsure (1)..(293): unsure at all n locations
caatacattnngaannaaattaaacaaacctgtgctacacatagatgacatgtgttggatacctacaaattatattatgtattgaaacaaaggtcatttttatactctgaatccttaatataacctcttatacccttttctttaaaatttacttagcgagtattttttttccagtgatcaagatgattatgaggttgtacaaaaagtgggcagggggaaatatagtgaagtttttgaaagcataaatatcaatagaaatgagcgctgtataatcaagattctgaaacctgtca

SEQ ID NO: 34729 - DNA, 368 bp, Glycine max
  unsure (1)..(368): unsure at all n locations
ctgagtntgtagctacctcatgctctctctctaatgactatggcatcatntatggcgctaaactgctgagaattggaagccatcttctcaattaaatttctggcttcagcaggagtcatgtctccaagggctccaccactggcagcatctatcatacttctctccatattactgagtccttcataaaaatattggagaagaagctgctctgaaatctgatggtgggggcaactgacacatnagttttttaaatctctcccagtactcatatatgctctctccactgagttgtctaatacctgagatatccttcttgatggctgtggtcctggaagccagggaaatttttttctaaaaatactctctta

SEQ ID NO: 34730 - DNA, 371 bp, Glycine max
  unsure (1)..(371): unsure at all n locations
acagcagaatttagtaatgacccactaacttataattattataacttaatgccattaacctagggagattaaaaaaaacttaatggctgagtgtaactganattgtggcaaccaaaagtcacccccaacagccaataagtcagccaccatttggtctcccaaaaggctgatgcctaggttgccaattgggcccttattacaacttgaactaaacctaactaaagcccttttagttgattaacccacaacatatttttggtcagccaactttagagggattgtgccattatttagacaaactaaacactctaaaaatgaaacaaagtggtgtcatttagtcctcctccatttgggccatgatacaactcaca

SEQ ID NO: 34731 - DNA, 320 bp, Glycine max
  unsure (1)..(320): unsure at all n locations
ctggtccctctcttcccttcgcagcttgagttcactattgctaccccatagagctccgcgaaatntattccggccatactcttccttgcgagccctcttggtctcttgttcaagggctcttgcggtaattgcattctcttcccgtaacccggcacactccttccgaatgtgtgttgcggccaacttgaacttctccttggcaagtttcgcctttcctaactcgcttttgagagctnggacttcttcgtcctcttccggtgcttcaaaactctcttcgctgacgactnttaactnggcgagccaatctaaaccttgtatat

SEQ ID NO: 34732 - DNA, 265 bp, Glycine max
tccttgaaagctagaactagcatcacacttatctataaactaagctcactgccttgacaaaatacatgaaaatacaaaaaaagaagtccctactacaaagactactcaaaatgccctgaaatacaaggctaaaaccctatactactagaatggccaaaatacaaggcccaaaagaaggataaaacctattctaatattcacaaagaagagtggatccaaccttgacccatgggctcaaaattctaccctaaagttcatgagaacc

SEQ ID NO: 34733 - DNA, 316 bp, Glycine max
  unsure (1)..(316): unsure at all n locations
cagtcccactcttccccatttacanaatcatattcatacatcattgnggcatttcaccgagcacttggtgggtgcacgtttcgacataaatngcaagagaatggggacaatgtggcatgccccattgcttcagaatacagcataggcctaaggccttctcattcaaatcctcaactcaagaaaacaagcataanaacaaaccanaactgccccacanatataagcacattctcacnaattggagcaccanaaggtgaagaanatataccgatgggaggctaanaacatcaaggattgaatacttactttgtggagt

SEQ ID NO: 34734 - DNA, 107 bp, Glycine max
  unsure (1)..(107): unsure at all n locations
gaaagcnattataggaactatcagaggcaacaagcctctttcgcaccggcctgttctctcgtttagagggagtgtaataaattcctatgcttgacagtataacgacg

SEQ ID NO: 34735 - DNA, 288 bp, Glycine max
  unsure (1)..(288): unsure at all n locations
acaacttcaaatagatagtaataatatttacatccgcactcagcggaatttcccaacaaaggattctagccctccattagaagggagtacctttcacaaataagagaaggggttcagagaaaataccagattacatatcagtggggatgtctcctccacctctaggaacctaagaatactcctaaacctaanatctacctaaaagttagggcctttatcttccttgctcagcttttcctctgttattcattcagcactaggctcatgcagtctattcatacctctctc

SEQ ID NO: 34736 - DNA, 201 bp, Glycine max
  unsure (1)..(201): unsure at all n locations
tttcctctgtacttcanaaccttcatgtggagcacgtgatcgagcatctctccacacaataatgtgattatcgggataaagtctctgatccaaagaaatgtgtactcttttaaagaaagctgaaaactttggatacaaaggagacgacttctgaactactcctggctgatcagggtcaacaccatcctccaatatcctccc

SEQ ID NO: 34737 - DNA, 246 bp, Glycine max
  unsure (1)..(246): unsure at all n locations
gatattctntggagaagcatctatggcaaatgtcaaaactgtgaaggttactctcanngagtttgagctggtttctggattgagaattaattttgctaagagcanaattggagctgttggtcaatctgaggagtggtgtcttcatgctgcaaactacctcaatngtgctntgctccaatatcctttctttatttaggtattccgattggagtcaatcccaaaagaaaggtggtgtgggatcctata

SEQ ID NO: 34738 - DNA, 340 bp, Glycine max
  unsure (1)..(340): unsure at all n locations
atccttgagtcacctgcggcatgcaagcttgtgatggccttcatgccccttatatgtctcttattccatctccttnggggggttcaccggcaccactgacgtcattgccatcgccgatttgtcggaagaaaaaaaagggtttcgaaagaaagggagaacgaattttggagaagtgtgaggttacagtgttacgagccctataaaaggtagcattgtatattattgatttataaacttcgttgggtcgggtaaggttaaaggttntatcctcagttccagattaaaaaaatatcatgataataatcctatcttnttagatatcattgagttaaatcttcaa

SEQ ID NO: 34739 - DNA, 316 bp, Glycine max
  unsure (1)..(316): unsure at all n locations
tgactatcactatgaactatcatgcaaaggaactatcactatgaactatcatcaagagaaacagaanacaacatgcccatgctccaagaatcaatggctctattgaagagacttcttaaatgcatcccagtcttattttgccaactcattnggttgattatgatccaacaagtcatgcatttngctaaacatgaagcatgaaaacttgtgacgacaatnttgtgttacctattccatatcctctattctataataaagaatcccaactcanatcattacatgggagcatccatgatagtcaaattttcataaatct

SEQ ID NO: 34740 - DNA, 339 bp, Glycine max
  unsure (1)..(339): unsure at all n locations
agctntgaaaaacactctntattttanatcactngttcttaccttcgctaattcaattaggaattcccttcctaatattctagtgatcatcttgatgttgtgacttgtaatcttgaagtattgtcttgaattttaatcttgaaaagcccatttgcatcaattgcaacacatcatcatgatcatcatcaaaacatcaaagccaattgcatctacaatctcccnctttttgatgatgacaatacaatacctgaaatcaagattcaagcaagcaacaaacaattgtatatagataaaatgtgcatccgttctctcccnctatatttcggaatacatgatcac

SEQ ID NO: 34741 - DNA, 224 bp, Glycine max
  unsure (1)..(224): unsure at all n locations
aacggatgcacantttatctatatacaattgtttgttgcttgcttgaatcttgatttcangtattgtattgtcatcatcaaaaagggggagattgtagatgcaattggctttgatgntttgatgatgatcatgatgatgtgctgcannatgggcttttcaagaataaaattcaagacaatacttcaagaatacaagtcacaacatcaagatgatcactagaata

SEQ ID NO: 34742 - DNA, 305 bp, Glycine max
agtttggtgacaaaaaaaacaagaagaacaagtaaggtagctggagtatctttctattgaacagaggttctaagctacgaggcacaagctctaacacagacaaaaatacttcgccactgttattgcctaaaatataggacactgacaatgcatatatgcatgcatgtgtgtgtgtgtgagagagagagagggagagagagaactcaaataaaattgaatatgagaaacatgagaacacttctaaattaatagtcaaggtttgtatgtatctaagcatgacatacttgttatatcttttgatgata

SEQ ID NO: 34743 - DNA, 324 bp, Glycine max
  unsure (1)..(324): unsure at all n locations
ttatgctacaacatagaacacgagaacatgattaattagagaaatatcctcatatgcatcaacttgtttgctagaaagacccaacgctnnttacctattgttgtcaactnttacttacttacatttattgtttttaccatagaattagtttatttctgtttttaaccatcaattatcagtgtttattccaacaatgccttacatctgaataaaactctgtctaataagcaagtttcctgagttcgatactcagaccattccgttttaattttaaatacttgatgacccggtgcgctttccggtatttcatttcccttgaatata

SEQ ID NO: 34744 - DNA, 393 bp, Glycine max
  unsure (1)..(393): unsure at all n locations
ataagttagtggaaacatggtgggttgccaagaactggacgtagtctcggggtggagacaaacatgtataaattcttgtgtgttattctttactgcttttctttgtgtttgattgacaaagggtttgaatttatttttacatcttatatttgttttgatctgataaagaaaactattgtctaataaagctattttcgaaatcctttatctgttttttgtaaaatgtgtattagacgataaatgtgtctttggtcaaagaaaaaatttaaatntataaagacataattcaactcctctttgtgtgttacacctcaagacctctagagctattacatcttgngacctctagaagtgtacatctaagaacacaattctgaagcatctaaggcatac

SEQ ID NO: 34745 - DNA, 405 bp, Glycine max
  unsure (1)..(405): unsure at all n locations
cacatgtggtactaggtggcggtctggcgatggtgtacaacaagttntccacatccacaatgcgcgcataaacccaccatccnctggtgcccacctccatctgagctcacgtactcccacgtagcccatatcctcgtttctctcaacaccgggtccccatcaatccttccaagcttccacaacatccaagcaaaacaacattcaaacagcacaagctatcacagccaagcaaaacagagcanaggcagaanactctgccaaaacaccaaccaaatcacaacttttctcacttaaagaccccagtaaaaaattcctttgatccaatcgttaaccggtggagtcgactccaaaatttactggaagtctatagtacataagcctacattgtgaaccgtgggatctact

SEQ ID NO: 34746 - DNA, 333 bp, Glycine max
  unsure (1)..(333): unsure at all n locations
cggtatcgccagtagcatcagcgagacaggtgctgactgngcacaaaggcgtangtgctgactgggcattccgccagtagcaccagcgagatcatcatgcacctctgcacgcgctacagacaccttcttcacgtcttgcatagcttctggcttgacacaacagcttangacactgttgtttgcggtaaggtcacatccaggctagggttctattcatttgcaggttagggttctgctcattgcangctatggcatggcatggtgagggttcacatgggtacagtttcatattcacatgcgcctgtaattattgtagaagatcatgggtgtaaa

SEQ ID NO: 34747 - DNA, 371 bp, Glycine max
  unsure (1)..(371): unsure at all n locations
agctcgtagaaagtgcgtacactgttttattttctgtngcnntttatttcctgttaatctttatctttatgataatgataatcatcttttctgctggcttgaatttttgcattgtgtaaatataaaagacaaaactgatgagagaattgttgaattgagtattgcaaatgatatacatggttgggcctatctctctctggtacctagtgtgactgcttaaatactgtcaaaactanttgaagttngttattgttggtaggcattcctgtaaaatgagttttactaaataggccataacttccatatctgctgctttagttttctggcatcatacattgaagcatagacttataaccattaattccttctac

SEQ ID NO: 34748 - DNA, 401 bp, Glycine max
  unsure (1)..(401): unsure at all n locations
aagcaccgcagctgcagcttttatccaggcacattcttggtctccttctctctgttttatttcctagnggatggngcctcccctatcctctactcctttgccttccactgcttctccatgatggaaaatcaccattgaaagacctcattgaagctcaaatatccaggctccatagaagctccacaagcaaacttccatcaagtagtaatcagagcacaagagcttcaagtaagtgctccttaaacctccattaattntttgctntaccttctcttccattgttgtctcttaattnttctccatgtatctcctcacatgtcttgtgctaaatggttttaacaagattctntagagtttccaccaattaaacttgctatagaagctagaattgattntctatg

SEQ ID NO: 34749 - DNA, 350 bp, Glycine max
ctgcacctgtcgccagactctgtggtttatgctcctctgccgaccaccacacagacctttgcccttctgtgcaacaatctgaaacaattgaacagcttgaagcttatgctgcaaacatctacaacagacctcctcaacctcagcagcaaaatcagccacaacaaaataactatgacctttcctgcaacaggtacaatcctggatggaggaatcatcccaaccttagatggtcgaatctcttcacaacatcaacaacaaccttatttcaaaatgttgctggcccaagcagaccatacgttcctccaccaatccaacaacaacaacaacaacagcctcagaaagaacaaaca

SEQ ID NO: 34750 - DNA, 466 bp, Glycine max
  unsure (1)..(466): unsure at all n locations
accatccttaagagcccagtctctcctcagctaaccatctaacatcatctctttccctagttagaccctcttcccctttcagaaacatccttaaccctctaactgacatccacctatcgaagtaactcatgttataataacagttattaaatgttatgtcactgactgactgnatcaagctccattttgtatctaccatataatagtaattcaattgatggacagaagatatatcatacaactgggtgcagcgttattgactaatggattctctntgcgtgtagaatcaaatggttaataatgtgtgacatctagagagagatagagaactgatcnaaatcataattgtgtttcattattgatttgtgattacactaggtctattataggcagagtcacatgaggctaacttgacttacatactactgattgttgactacaaatccactctactaacacaattcac

SEQ ID NO: 34751 - DNA, 606 bp, Glycine max
  unsure (1)..(606): unsure at all n locations
aaacgcaaatgatancgatagacgttgcgnacnncgnganccnanagagcccacctgcacgcatgcaagctngtaatgggtagaaaagagcaacacatacngttatctaataagcatcaagtatatatatatatatatatatatatatatatatatatatatatatatataaaaactgtgagtataaaataaaagtgtgtgtttctatgtaagaaaaagaaaagctaagtgcggaaaggcaagtaatagagctagaataaaaagaaaaagattgatctatggatgaatgctctcctagaacctaagcttttgcatcctataaaaaccatgaattgattgcagcccagcctcgttacaaacctaaaaaagtcctttggatatcagttgtgtgttcttgactgtatggcaagagatgaagttcacagattgagatntattttgtttcttgattcatggataagcctacacacttgtgcttgagtganacagtagctatgaggctgttggtaataatccttcctcgatatatgtcgctctcactagcatattatagtgggggtccttgataatcatgtcacatctttgagagccgatgtctgtgagaag

SEQ ID NO: 34752 - DNA, 319 bp, Glycine max
  unsure (1)..(319): unsure at all n locations
cacatgtggtactatgtggcggtctggcgatggtgcacaacaagtntttccacatccacaatgcgcgcataaacccaccatcccctgttgcccacctccaactgagctcgcgtactcccacgtagcccatatcctcgtttctctcaacaccgggtccccatcaatcctctcaagcttccacaacatccaagcaaaacaacattcaaacagcacaagctatcacagccaagcaaaacagagcaaaggcagagaactctgctcaacacatcaaccaaaatcacagttgttctcacgtaaagaccacagtaacaattctttc

SEQ ID NO: 34753 - DNA, 429 bp, Glycine max
  unsure (1)..(429): unsure at all n locations
gaactcatatgcatngaatcatgttcaattgcaatntacaaaggaaaccacatatttcanaagttacttacgcatggcaaaaggaatattggtttcatatcaagataattntgaagggtgtggtgaagaattttcatgactnttcaaatattttccaggtagctgtaccaattcagcaaagctatctctggtatagttccagtcaaggtgaaggtcaggtatgtgattttgttntctacacaacacttattctagtaacaaataaatatagtacagagtatgttgcaatatcagaattgttatctctccaggattctggtgcatatatatntcggcctcatacccctccanatatttgttcaagatcagtaagtttcttcctctaatcggtaactcacaatattcaatgtttattatggagttcatatg

SEQ ID NO: 34754 - DNA, 350 bp, Glycine max
  unsure (1)..(350): unsure at all n locations
agaaaactacatatagattccatggtgaaactnggatcattacataccagctacatggaaagaagaaaaccatattaacatctcttcagtgaacatttctgcacgatgagacttctcctcggctcccatcgagaaacggcagagtggacacgttntgtggcgacccttaagccatctatttacacaactcnttatggaattgtgcgagcaaggaaggacacggatttcatctttggcctttaaccttgacaagcacacacaacaccaactatcctcatntaaaatggatgctgatgctgatgtagattcagatgattggtgctggtactntctatatgggctgatagcat

SEQ ID NO: 34755 - DNA, 314 bp, Glycine max
  unsure (1)..(314): unsure at all n locations
gactgctgnagacattattaagataattctccctaagaccgatagtgctaaagagtttatgagattagtgggagagtgctctcaaatagctgataagtctcttgttgggatattaacgagtacattgaccactatgaagtttgatgattcacatactatgcatgaacatgtcattgagatgataaacattgcagtaagacttaagaccttgggaatgactgtgaatgagaacttccttggttagtttattttgaactaattatcgtctgagtatggccttttccaaatgagctataataccatgaaagataaat

SEQ ID NO: 34756 - DNA, 356 bp, Glycine max
  unsure (1)..(356): unsure at all n locations
atagttccatgattaacattattatacaactntagattaatttgatatatgtaacaactcataaatattatgtttggatacaactattgtttcatttgcaaagaataattntcaatggggaaacataaagcaaaaattataagtttttaatatttttgctccttaatgagntctgttggaaaatctgagagtaaacaccggacagattgacaccaattaaccgtgagcaatcacataagtgaatttgacactacactntaacccanaaccttaagattcaagtttatgggtcttgtcctcacttatatggtgttcaatattcacattcgtactcaatgaaaacttcaccacacact

SEQ ID NO: 34757 - DNA, 286 bp, Glycine max
  unsure (1)..(286): unsure at all n locations
ataaatagtaaagttggtgatgagaaaataaaatggttgttgtgtaggtcataccatcacataatattccccttgtcttcctttgtagtgtactttaagtattccatggctgccaccaagggtgcttttcacaaaacaaaacanaaaactcaggcaaattcacttatcgaaagcaattgacaacatatatctctngcaacataaacaaagcacctacttgtatacttgccactcgtaaggagggccataattacagcctttgctgttcctatgctcaaatttcaat

SEQ ID NO: 34758 - DNA, 333 bp, Glycine max
  unsure (1)..(333): unsure at all n locations
cagctgtcggaacgtgaagatgcctagtggcgagttncaatcgctttctctatccgatcgaaggactnggaacgggtggattccgccatggcaattgngctcaatgaaagcaccaagttgctatgacccacgggtcatagctagaattcgaggttctagctcctccaagaaaaaaagggtaagaaagggaaatttgtattattgattatgtgttttccgaattacattcattctatttataagtattatgttctattctagaattgtgtaattctaacagaaattggcatatgtgccttggaggaaattgtaaatggctatggataatgctta

SEQ ID NO: 34759 - DNA, 383 bp, Glycine max
  unsure (1)..(383): unsure at all n locations
atcctctgagtcacctgcggctgcagcttaaaggcaatgcngaattgatggactgnatcttttaatggatccacagatgatgaagaggccctcatgtccaaaaagttcaaactgatgatgaaaaagaaagaaaagttccaacactcctctagatgaaaagattcaagatttcaaaagaaaaacgaggaaaacaatgagatcatgtactttaagtgtaggaaacctataattatgaagactgaatgtccccaattgaaaaagataagatactctggggacaagaaaaagaatagtctgatggtcatctagatgactcanacaatgagaagagtaacaattcanacgataaggttganggaaaaaacttattctgaaactggtac

SEQ ID NO: 34760 - DNA, 283 bp, Glycine max
  unsure (1)..(283): unsure at all n locations
atctgcacctgtcgccagactctgtggtttatgctcctctctcgaccaccacacagaccttngcccttctgtgcaacaatctgaaccaatngaacagcctgaagcttatgctgcanacatctacaacagacctcttcaacctcaatagcaaaatcagccacaacagaataattatgacctctccagcaacaggtacaatcccggatggaggaatcatcctaaccttagatggttgaatccttcacaacagcagcagcaacaacaacatacttatnttcaaaat

SEQ ID NO: 34761 - DNA, 585 bp, Glycine max
  unsure (1)..(585): unsure at all n locations
agtggcctcncgcgcgtttgggccgattgaactncattgaacaagcgacacannnnannactaagctctacctatntagggtctatacgaantaaagatatccttaattngttcttgtctgcacgnngccgagaaatggtgggttcattatcgcagagaaagttctgatatactcgctcgaacctgatgctgaatgtttattatttccacattatatacactcttgagttgtgagttagaaaccaatagtttgtatgtccttcgatgagcttaggtttctgcaatcttgacaataatagtttccattacattgcagcgactattactgaaagttatggagaaccacaattctgttgaagaaactatatcttgtggtcataatgctgatattgtccaagcctcgaaggtataattgacatgactgatgacttttaatttcagctgcatactatngttgatggtataagggatgatgaattaaatgactgaagccatgatatggttgctgacttgattgtgtatgaatgtgattggcctacatcttgagcactgattgatattactcaaatgaggatgactgcgatg

SEQ ID NO: 34762 - DNA, 227 bp, Glycine max
  unsure (1)..(227): unsure at all n locations
aactgggttcccaccaatcatacttccactgntgccacaggtttgggtaaatttctgtatgctgctggaaccaaatccaaatttaattttggaaactatatctntgatcaaactgttaagcattcagaatcttttgctatcaaattacccattgccttccctactgtattgtgtggcattatgttgagtcancatcccaatatgttaaactacactgactctgtgat

SEQ ID NO: 34763 - DNA, 462 bp, Glycine max
  unsure (1)..(462): unsure at all n locations
accccaccctccacccctgtcatcttatagcgtaccctattctgctagacaaagtggtgnctgttatcatgaaagccacanaaacaaccncccaaaacccaggaccattttcattatttaggangaccccatactattcagcaggtttcccttccgactttttcaatcaacggtaaatcaaaaaatcaaaggggccaaatacgacaataacgttacacgggagacatacttaatgaacaaattgggatgctgaaaaaaaaattgtaaaaaaaaaaaaaaattggagaaagaaccaaaccatcgattgaaaccccaatagcctgtatacaggactaaaccatattcacattttctaatataataaaaaaacccattcctttcttataaaacatacaccctttttttaacgcatacccataatttaacttgacccattaataaaaaatacccatattaatctaa

SEQ ID NO: 34764 - DNA, 354 bp, Glycine max
  unsure (1)..(354): unsure at all n locations
ctggaccctgtagctttctctactgacttgaaggatgatacaatggtaagtcaatatgtatataattctttatatcatacactgaatatgtntgtggcatctgcttctatgcaaaatttcaaatctatttttggtcttaaccctctggtttcaaatctattggaagcctattatgatatgtcagtggaataatgtctttcaacaaataacaattaaacagaaaaacttggaatatcttttgattgatattacttattccctcctcacccaaatttcaacccaattgattgtacccaagtgaattttaatatgagactactatgatngctttctaccaatgacaaagtctcaaca

SEQ ID NO: 34765 - DNA, 338 bp, Glycine max
  unsure (1)..(338): unsure at all n locations
tcgaaatgcactaatatngataacaatcgatctccatganatcgattntgaccaattgatttanaatgaaaaatcgagcactaacacaaaacgaataaactgtaaaaattaaacgagagtaaaatgcagacatcagtatagacacaaatntatgacaggaaatcaacaaaaggtaagatctaaaacaaagtggaagcaaatgtaacagatcatgacaagtaaagtaagcatcaaccagggacaaaaaagagcagaaacaaatgacagaatcgaaacataccatggagcgtagaactcgacgacgatgaaatcgtgcttgctgacagtgtcgtgaaagt

SEQ ID NO: 34766 - DNA, 336 bp, Glycine max
  unsure (1)..(336): unsure at all n locations
cgaagtttaactaaagtagttgcgtgctctgcgaaacgggttcagggtcttttggtgctaataaagtttgtggagagagaagatgatcgctgtgctgagcatgattattgatgggtagcagaagtagaacggtnaacgttaacactaaggacactaacaaggttctgaacgggatgccaagctacgctcctccattgccttcttctaattccatgtaaagttttctgacgacccttatgttgttaatgtatatttcgtcctatattggtcttatgatagctttctgggatcttgttctgttctgtcttatgattctcatgtggggagattatatat

SEQ ID NO: 34767 - DNA, 262 bp, Glycine max
  unsure (1)..(262): unsure at all n locations
caagccaagtttgggctttaagtgctcagcttggctcgactcatttacaccgctacttaaaagtatgctattgccataaagcaaatcatctacaataaacaagtaatacgctntcctagtattcaaatttcttgacggaagatatcataatcacgggttgtgtgttgatttcaatactaaaccaaccatgttacagtatgaagactgaaagtagagtctgaggagtcaagattttatgctcggacggctgatgtatccctat

SEQ ID NO: 34768 - DNA, 302 bp, Glycine max
ataatagatgattgagattcacatatctaaatttcacactaaaattgaatatatcatcaaatctttaaaagattaaccaaaaaacaaacaaatctataaagatcttagttatcacattctaaaatatctgaattaaccatcaccctgattataacaccctgagatattataagttataaatcgacatttaattttatatattgtgttggtcgactatatgatagactcgaatgagttgaattatgtggagttctttttagctaagttgaaagtatgagatgttagaatttaccacaacctag

SEQ ID NO: 34769 - DNA, 138 bp, Glycine max
acccatcgaagaagaagaagagcatatgacctctttttagcgaagggggttgacaccaatgccaatagcctatatggggagattgacggtccgaatagtgaaataaactgatctgatggttggggaaagacacatgat

SEQ ID NO: 34770 - DNA, 388 bp, Glycine max
  unsure (1)..(388): unsure at all n locations
cggatagnatgcattaatcattgtatttaatcttaaattgtcaatttggatggtttgggaatagtcatatttttatggtagattcttgcgttaaggttaagattattttgttaaatttgatgaaattntggtacaatgcatttctagttcttctttgagtgcacacttgattgtcagggaattaatctcaccattttcatgtcgtgtacttggagatcaatgcgaaatgttgccgatgtttcatcaaatttaacaaaaagagacttaacctcgatgtgtaaatctactataanaatatgtcttcctgaatgggatacagtcacacctttaatgaaaaagtagatttccatgcatcacataactatgtgagtatcacggagttattatt

SEQ ID NO: 34771 - DNA, 342 bp, Glycine max
  unsure (1)..(342): unsure at all n locations
attgctcaggtcttctnntttaatatggagcatctcaatatattacaggactaaattggacatccgagaaagaaattattgtcattngcatttgctcggatcttccgttcttaattttgagcatctcaatatattacgggactcaatctgacatccaagttaaaagttattgtcttttgaatgtgttcgtagattctgtttntaatttcgagtgtctcgataaattacgggactcaattggacatccgactaaagagttattgcggtttgaatatgctcggagctttcatttntaatctcaagcgtctcaatgaattacgggacccaatcggacatccgagt

SEQ ID NO: 34772 - DNA, 226 bp, Glycine max
  unsure (1)..(226): unsure at all n locations
agcatgcgcttcaagaataatncacgatagcttcaacgaacaagacccttgtttcaagattcactaaagaccacgccttgccttaaaacaatgtgctttcaagacatgcaacgctctggtaatctattaccacgaagtgtcatcgattaccacaagacactggtgagaaatagctgttgacaaacgttttgaatttgaattctaacatgtaatcgactaccatatg

SEQ ID NO: 34773 - DNA, 406 bp, Glycine max
  unsure (1)..(406): unsure at all n locations
cgatggtgcacaacaagttttccatatgcacaatgcgcgcataaacccaccatcccctattgcccacctccatctgagctcacgtactcccacgtagcccatatcctcttttctctcaacaccgggtgcccatcaatcctcccaagctttcccaacatcaaagcaaaacaacattcaaacagcacaagctatcacatccaagcaaaacagagcaaaggcagaatactctgtctagacaccaaccaaatcacatgctttctcacttaaagaccccagtaacaattccttcgttccggtcattaaccgtnggatcgactcgaagatntactggaaggcttagtacataagcctacttatgaccgtgggactactaaaaacatcagaactattctgactactcttccac

SEQ ID NO: 34774 - DNA, 282 bp, Glycine max
  unsure (1)..(282): unsure at all n locations
ttcttaccctcggaagcaaaaaggggagaggaaaattccaatccaagaggaagccaaanaggaaagaaaggatattcccaatcaaagagaaagcatataaggaaggaaaggaaattcccaatcaaagagtgggagatagaaataagaaaagaaagaaaattcccaaccaaagaatgtgagaaagtaaaacaggaaagaagttcttgatcaataaatataaccagaagaaatgtgcagagaggtcttcggaccatacaatatctgaacagtacagaattgtca

SEQ ID NO: 34775 - DNA, 416 bp, Glycine max
  unsure (1)..(416): unsure at all n locations
agcttctcnctctnttccctataaagaggttgtgtgtgttgatgtatataaacgcncaaccctcctagtatctgaggatcacttgaaattagtgagagaaatcgtttccgtgaagaatatccaagccgaagtgcttccgtaacgtgtctgagacgtttttgtgggtgatttcgtgaagatattccgccgtccttcgttcgttcttcgtcgttcttcggtcttcaatcggtaagttcccgaaatcgaacttttcaattcattctatgtaccctnggtggtccccacttatttcgcgtacttttattttcatttcatgtactttccgtacccnctgttgacatgctctaatcatttatgtatgtcattatctcgcctagaataaatatccaccgatcatttgaattgagcatctgtta

SEQ ID NO: 34776 - DNA, 583 bp, Glycine max
  unsure (1)..(583): unsure at all n locations
cgcggttgaacccttacccattcattatgcgcactatagannactcaagcttgcctcnagagggccaggaaggacaaggcggccgattgaactatttccgttcttgagtatgacagncaccgctntaggagcgttgtacaccagcagcgcttcgaggccatcaagggatggtcatttctccgggagcgacgcgtccagctcanggatgactagtatactgatttccacgaagagatangtcgccagcggtgggcatcactggttacccccatggccaagttcgattcagaagtaatccttgagttttatgccaatgcttggccgacagaggaaggcgtgcgtgacatgatgtcctgngtgatgggtcagaggatccccgttgaggcaatgctatcgcccactcctggatatccgtggtgcggaagaaggcangagtcaattattgccanangaggaaccggctgatgtgtcgatangaagcatcctcactgtatgttactgngcagatttagccgactgtggaggagcagtcaactatgccccacatgacacctgctcgtgtgatattgctgtccacatctcg

SEQ ID NO: 34777 - DNA, 440 bp, Glycine max
  unsure (1)..(440): unsure at all n locations
agctntatgtntgtgatgaacatccatgtttcttgttattatcactacaacatagggctttattctcaacatatgacataatatactctggtttgctgttgggctggttcatcaaaggcgacaaggcattcaagaaccaatggtttaagctggtgaaccagatcctgaatggatagtggatattgaaaaaggcaatggagaactacaatgactatatattgnggaaggcgttaatatacaattggaagtgttgttatcgataaataagggcaagtctttgcaagcaaaaactacgatggtggggacaaggtgaaccaaacttcaatgttatgaggaccaactgtgaaaattaagaatcatatgcatatcacatcttatattacatattcatatatgttctacaatactaattatattgataanttatatgatattaagaa

SEQ ID NO: 34778 - DNA, 286 bp, Glycine max
  unsure (1)..(286): unsure at all n locations
atatccatgtatatatgcctaaattgtttatttttaaaattaatatcttanaaatcatgcanatagtggattanattattntacatttaaccattaaactctncaatgattatcattaaaanatgaaaaatgagcatacaacaagttaataatgcatatatatatatatatatatatatatatatatatagacacacataaataattaattaattaatactaactcgtcaagaagaaagatttatctattaactttctttttacagaatctattgtaaccacttac

SEQ ID NO: 34779 - DNA, 373 bp, Glycine max
  unsure (1)..(373): unsure at all n locations
agcttctcgatacattatgcgcctaaattgtgacanctgagttatttgttatgacaatttgaatggctctagagattccattgttcaatttcgagcgtctcgatatattatgaatatgaatcggacctccgagttaaaagttatgaccatttgaatgtctcgagagcttccgctgttcaatttcgagcgtctcgatatattatacgccagaatcggaactccgtgtgagaagttatgaccatatgaatatctccagagattcgcgtgttcaattacgagcgtctcgatatattatgcgcccgaatcggacctccgtgagaatagttatgactatttaaatatcttgagagcttctgttgttcaattgcgagcg

SEQ ID NO: 34780 - DNA, 346 bp, Glycine max
  unsure (1)..(346): unsure at all n locations
ctcggatgtccgattcaggcgcacaatatatctttacactttanattgttaacagaagctctcgagagattcgaatggtcataacttatcacacggatgtccgattcgggcgcataatatgtcgagacgctcgatattgaacaacggaagctctcgagagaatccaatggtcataacttttcactcggaggaccgattcaggcgcataatatatcgagacgctcgaaattgaacaacggaagctcccgagagatcaaatggtcataacttttaactcagaggtccgattcaggcgcataatatatcgagactctccaaattagacatcgagagctctctagaaatt

SEQ ID NO: 34781 - DNA, 405 bp, Glycine max
  unsure (1)..(405): unsure at all n locations
agctnntgggtattatgtatgacctccatatggcagttgatgctaanatggaacatttgcatgttgctattgatagtctccgtgccatgatgcttatttatgattgtatgcaatttgagggtcacaacatcgcttctttgttggaaagtgaagcgaagtttcagaagctgcacctttggccatattgggagaaatgataattgtttaatcactcccttcttttgctaatgctgtgacagaggaagtgttcatgagtgattctatgttgatttctatatagtccatttcttgtgttaggggcttatgcccaacccatntagtaaaaaaataaaaataaaatatataagcaacagaaagtttttacttttaggtcttaaatatacaataaattaattatttatattt

SEQ ID NO: 34782 - DNA, 278 bp, Glycine max
gcttgatttggttagtggcagagagaggggaatcccttttgtattttgtattcgaaacacttaacagttggcgaattcttctcctttttatttaacttcctattgaataattctcgaatctttctacaaattgtatctagagcttcggtcaagatcatttacattattcatggagacaaatcatcagtgataaccatctgtttgtattgttcgattggtcttcaaatttattaaaaatggcaacacaatcaaatgaaaatcataggaaaatactaacc

SEQ ID NO: 34783 - DNA, 243 bp, Glycine max
taatcgattacacagaggaatgggtcactggtaatcgattaccaggtatgtgtaatcgattacacagtgcctttttcaggttctcaggtcttgaagctgtgtaattcgagtttagcctctggtaatcgattaccagagatgaaaagcctaaagataccccttttacttgcatgtagtggttatgagacacattgtgttgcggcgtagttagattctcgtgaaagagtctacccctctcttttc

SEQ ID NO: 34784 - DNA, 352 bp, Glycine max
  unsure (1)..(352): unsure at all n locations
accgngtctacaactggcaaactaagaaactcatcatcaatggagatgttgaagttgatgagtatgcttcttggaattgggatgatgaaaaagtggagaagaacgttcttatacccgctcaactacctcaagaagaagctgaggaagaagacccaagtgaaccaccttcacctccaccacaacaacaagatcaagaactatcatcaccagagtctactccaggatgagtaagatctttggttgacatatatganacctataacttggccatacttgaacctggaagctttgaagaagcatcanagcaggaagtatgggtgaaggcaatggaagaagagatacagatgatcga

SEQ ID NO: 34785 - DNA, 327 bp, Glycine max
  unsure (1)..(327): unsure at all n locations
cattcagcttcttcaaatccttttaaagatctttcagtttctttgccaaatcctgaaagttcttgagaagagtatctctttccctagcacttgtctcaatctcaagacacaacttggactctntttctttaagagttatacaagcttcacatgtctaagtggactcattcaatgaaacatatacttgatcctgaaggatnttcttagttttaaatgatcttttgatagattcttganatctattcataggttttgtaagcgtctgagagaatatgataagtatggtcgcaacctacccttcagcgggacggcgacacgtgactcgct

SEQ ID NO: 34786 - DNA, 391 bp, Glycine max
  unsure (1)..(391): unsure at all n locations
aatttatttggtagcacggactattttacaagtggatggaagttgaaccattggctagtatgactcaagaagttgtgattaaattcattaaacanaatattatctataaattcgacatacctaagtcaatcactattgaccaacgaactatgttcactggagacaaagtgaactcattcacacaacaagttggcatcaagcttacaaattcaacaccatattatgcaccaacaaatggacaagcaaaagctaaaaacaagatcttgattgatataatcaagaagaatctataagataatccanaaatatggcatgaaacattaccaaatatgtnangnngggaatatatattatatatatatatatatatatatnatataatataatatat

SEQ ID NO: 34787 - DNA, 427 bp, Glycine max
  unsure (1)..(427): unsure at all n locations
ttcttctaaggcctctttaaaaatgaaatgcaaatgtcttanatctcattattggttatgaaattctatttgtatactttcattcctccttcgccgcattatttntgagaaaatgtgtgttgatctaatcagtttggggttttgtttctttaccaagcgtgttcacattntagtaaaagtttacatgacttcatgtcttcagtctttacttttcaagacttcaatgtcttcagtctttacattccaagacttcaacgtcttcagtctttacatttcaagacttcaatgtcttcaatcattacattttcaagacttcaatgtcttcagtctttacatttcaagacttcaatgtcttcagtctttacattttcaagacntcaatgtcttcagtctttacattntcaagactttcatgtcttcagtcttt

SEQ ID NO: 34788 - DNA, 273 bp, Glycine max
  unsure (1)..(273): unsure at all n locations
tcagcctcagatgcaagggttgggcgctaagcgctngagactcgcggcttagcgcatgaatagagatgcacttagcgcgaggcttacgcttagcgaaaggactatntttcagaanaaaagttttcanagttatttttcagtcttttttcccagaaattgaaacccttatgttaaacattcaaagataggctgatatactcctatgtacagattatatagcaagttccaaatgattaaatgcatganaaaaaaaagataacaganattaaaaat

SEQ ID NO: 34789 - DNA, 312 bp, Glycine max
  unsure (1)..(312): unsure at all n locations
gaacaagaggcacacacctttnttcttctgagtttatctcttaactgtaataattacatgcatgactcctatgaggaatcgaaatgattgtgtttgccttgcctgtgtaatgtcaatccttcctgcttgagtcaaaagtcaaaacacttccattgcatttgtacaccttgtcatggtacactgttacttatataatacatttgaagtagacacattgctatcttgcaagacctaaattgtgactgtcacctaaccaagatgaccacaggctcatccaagtcatgcgagcctcatacttatcaataaataaca

SEQ ID NO: 34790 - DNA, 350 bp, Glycine max
  unsure (1)..(350): unsure at all n locations
tattaatcctgttcatgtttatgtgtgaagtgaaacttcctgctgaggaccaaaaggttaaaaaattataaatataggaaccaaaataaatggttaaaattatagggactaaaaagaaaaattatcacaactatcaagactaaaagggtagttaaaccaaaataaaataaactagcgcanaataatggtggtgtgattagaacactttaatcctatatggctcgttgtagacatatatacctctacatacttgtgcattctgcaaccaccaccattagtggaataaaattctaaatgcacacccttctatggtatattctatatacgtaatattagtctaacaataaaat

SEQ ID NO: 34791 - DNA, 345 bp, Glycine max
  unsure (1)..(345): unsure at all n locations
cggaagctngaatcaagaatctgtctaagtttaatgcagcatccctaggctgcattaaatctcattacaggagcatcactacatccaacagatgggaagtcacaaagacaatgggtgggagtggagctntatttggagaaggccattgttttgacaatgaaattgatacggctagtgtttttctcaatgaggttcaggatatggccattcaacaacatggacctgatgtgtgggaatggactgcagaccctacaggtcagtatacagcanacaatgcatataaggtaataatgggaggagcaacagcaataacccaggaggaatggtttgcaaattatggagcat

SEQ ID NO: 34792 - DNA, 420 bp, Glycine max
  unsure (1)..(420): unsure at all n locations
acatgtgcctagatgcattaaacctcanctcnatatgatatatatatgaagctgggatgataaaccaattcagtgctggtagatgaaagtttactagagaaagcatggtcattgctcaaggtaagaaggaaggctccttgtacatcatgtatgaaaagatatgcaaaagggagacaaatgttgctcaagatgcaaccaaagaattgtggcacaagagaatgngtcacatgagtgagaaaggtttggagtctctattaaaggatcactttccaaacataaagaggtaaccacttgaatcctgcgaagattgtcttgcaggtaaacaatgtagagtgtctntccaaagatcggatgaagccagaaggagaaagcatatcctgaatcttgtccactcagatgtttgctcaacgtctaaaaagt

SEQ ID NO: 34793 - DNA, 417 bp, Glycine max
  unsure (1)..(417): unsure at all n locations
ggctggatcatttgatcgccttgttttgtcttgattntggattaatgaaaatttctttgattcaaaaaaatagttgtacaacaatcaaataaatatacaaagcaagaagtgcatattgttctttcataagaaacaatgatactaagatgcaacatctaataaaacttcttgaacgagatcagtatattcattggcatagattaaagattgaagatgttgttcgtgatatcttttggtgtcatcctgatgcagtgaagttatgcaatgcatgtaatttggtatttttggtagatagtacctacaaaacanacaggtacagaactccattacttgacgttgtaggtgtgacaccaacggngatgacattctctatttgggtttgcatattgganggagaacgtataaataatgtgatct

SEQ ID NO: 34794 - DNA, 420 bp, Glycine max
  unsure (1)..(420): unsure at all n locations
ataggaatttctggatggcccaagtgggcctggtttctatttgcatccncaattnttactaaatatacccccttgctctnntttggtgattcattntccgtaacgctacgaaactttacgaatttcgtaacgatgcttgttttctttccgtgttacgaaaccttacggattacgtaatcattccttttttgccttccggaacgttacgaaactntacggattgcgcactaacacttccttntgatttccggcatgtcacggaacttcacggattgtgctacaatgctttctttngacttctggcatatcacggaacttcacanattgcctaacaatgggtgccaagtacctcggagtggtcaaacgagggtcgcatcctaacaatggatggtccccggacgaaaatatggtatgacacat

SEQ ID NO: 34795 - DNA, 416 bp, Glycine max
  unsure (1)..(416): unsure at all n locations
gcttctnagatgccttcgattatgcatagattcttgttttttctactatctcatagagacatcggtttaaaataataatgaatctagaggctagcacaacatacggaaactcataatccactaaccgatggctcttcaacatgatgtcttcaatcagaagtacccaattcatttgaatacttgatttaaaaccatacacaatctgtaaatcgtcatcaatcacttgtccgtggttgctagaccttggtgtgaaaatgtaggttatgacggacatgatctttctgtctttagcagttaaaccacctatacctacgcaattcctcatattccttgctgggtcaaggagcatacttctgtaagtctgcatcttgttgtacccgtcaacagattcttcaaactaccgactcccccatgtc

SEQ ID NO: 34796 - DNA, 296 bp, Glycine max
  unsure (1)..(296): unsure at all n locations
ggacaatttagatttattatcttctntntctaagtagatgtgattaactacactaaacattggcattggtgacaaatatattgttcaaccttggtaccagtttctcgcggacaatgattntagccatggagatgaagttacattttactggaggtattattattattattattattattattattattattattattattattattattattattattattatttagtttgtttcatgttnttcctgcattactgatatttcctgttttttctttctttctgattntcccactcac

SEQ ID NO: 34797 - DNA, 300 bp, Glycine max
  unsure (1)..(300): unsure at all n locations
cccttggcatcatcaaaacattcagcttgatcttttgtctacacgtgactacatccagtccccaagcgacctgcggtccttgagatttcttttcaaccttgtaaaaacctttacaagcaaagatccacaagggatgtaccctcccttgttcactctgaacaaccaagtggatgtatcctccacttgaaatgatccacaagaggtgtaccctctcttgttctcagttacaacaacccaagtagatgtaccctctacttgtaccacanaggatgtaccctccaatgtgttacgacaaagttc

SEQ ID NO: 34798 - DNA, 301 bp, Glycine max
  unsure (1)..(301): unsure at all n locations
tacaacacggatatgggtcctgatcggaaccaacttcagagcatgaccaagcgggaacatgagtccattaaagaatatgctcaaaggtggagagacctagcagcccaagtcgtcccgcccatgactgaaagggagatgatcacgattatggtagatacgttgcctacgttctactatgagaagatgataggatacatgccagctaactntgcagacctcgtcttcgccggagaaagaatcgagtccggactgagaaaaggcaagtttgaacatgctctcaacgntgcccccaacaacaata

SEQ ID NO: 34799 - DNA, 331 bp, Glycine max
  unsure (1)..(331): unsure at all n locations
ggtcaaagngacttcttataccaatgtcacgaggagtgtggtggtcagattcataaagaaggaactgatttgtcgatacggactccctaggaagatcattactgacaatggcaccaatctgaacaacaaaatgatgcaggaaatgtgcggngatatcaagatccagcatcataactccatccactatcgaccaaagatgaatggngctgtggaggatgcaaataanaatattaataagattattcagaagatgacggtgtcatacaaagaatggcatgagatgttgccttttgccctgcatggatatcgaacctcggtccgaacttctact

SEQ ID NO: 34800 - DNA, 220 bp, Glycine max
  unsure (1)..(220): unsure at all n locations
cgtcaagaacggtcganaccttgcgaaattcttcacggaaaacgttacggaaacgtttcggaagcgcctcggcttagattntcttcacggaaacaatttttccaagcaaattcgaaagagagagaagtgcctaaggggctgaacccttttccttctcacttcctcccctatttatagcaaaataagggagatgcttgccgcccagctcgcccaggcgagc

SEQ ID NO: 34801 - DNA, 314 bp, Glycine max
  unsure (1)..(314): unsure at all n locations
ataaaagggatgccccacattatttccatgacacaaatgcgaagatgatgaattggaaattttatgcaaaactggtcatgcatgcacctatgcggacactcaagtgtcaaatctttatggtcatgtgatgctagggctcaggatatatttcctctattttaaatcaacccaatgtttccagaatatgttcttttatcaatatgtgcattcatccgagtccattttgggtactcgggagagattcacagcattcaccctttatgtgtacacacattntttgtccaaaaactagctatgatcagcgaatttttctt

SEQ ID NO: 34802 - DNA, 133 bp, Glycine max
gctatctcaaacaagcaaggcaaacgtggcaagacaatgatagatgatggtggaataccagacccactcaagtggttcacacaattatggactgtctctagtgaaaacactctggcctgataccactctagta

SEQ ID NO: 34803 - DNA, 338 bp, Glycine max
  unsure (1)..(338): unsure at all n locations
tttgaacttatagcccgacagcattntcatctcccaagtcttgagtttatactggtcgtaaatcaactgcatacataccagcacagtactgggcaacagcacagtactgaaatcaatagaatttagtcatagtccatcctaataaaattaacattgtattntgtccaacagctttcgtacctctcctcaaattgcaatgttgatgcatctatatcctacttgtttattatgtatatcattttggctgtagttgcttgtacaaggaactgatttaaccacatctacaaatatccatattcgtagtcatatatatgttattaactccctctcctatcatc

SEQ ID NO: 34804 - DNA, 330 bp, Glycine max
  unsure (1)..(330): unsure at all n locations
acccacatgttacttgttcttttccaccgttatgaatcttatttatggaagaagaagaaacggtctaaaattctataacgaagaagcaagcggaacaaggatatgttggtaatttcactagcgttgtgggagacatgatgtttgggaacttgatgtggagaaagagcatgacccaagatgaggtagactntgtactntgctagagtatgggctccagctatttctatctctcttgtgttagtacttggaacttgaagaacacttcaacatttactacaacaagatanaaagtagtaaactactataactatttgataatatcctcttatt

SEQ ID NO: 34805 - DNA, 274 bp, Glycine max
  unsure (1)..(274): unsure at all n locations
gagccaaacccaatcccnctcattaagaactagcttctttcttcctctatttcccttagttgaatacacctttgtttggttctctatntgggtattagccctctcatgcaacttctttacaaactctaacctagattccccttctttatttataaaagaagtgtcaagtgggaggggaatgaggtttaacggtgttaggggattgcttagtggttctatgaaccctcctgttgtngcaaattctacatgaggaagatacttatcccaagacttt

SEQ ID NO: 34806 - DNA, 528 bp, Glycine max
  unsure (1)..(528): unsure at all n locations
gccagtgnctactgcctcctgtcccttgaactagctaacagtcatgatatgtgagctactaaactcttttacctgagagcagaccgctcgtaatgtggcctactaccaaatgtgggcgcttcactttgaaaatttcactaaaagggctaaagtagagttttgccnaaaaaattgaaaattctactnttactaanaatggtaaantctacctatatgcccttgatactatgatagtctctctaggaatatgtgtaaccaaagtgaacctcacacaaagctaaattacactgccactcaatgtacaacgcaattntgttacaaataggaatttcgtcaggcagttccatatctttgtaaactaactaaacanatattagactaatatagcatatatagccaaaaatatatgaataaacatataactactgaataatatgccaaccaaaggacaactaagttcttgcagctagtgtattttcggtgtcacctactatttatatcttatcttatcggcattatagcccacan

SEQ ID NO: 34807 - DNA, 353 bp, Glycine max
  unsure (1)..(353): unsure at all n locations
agctngcctccntcttcacactatgtgccagtatattctaccgaagnnncagnatcctttgtctccgggtgtataggatatatacatttagttactatagtaggaaaaatagtcaagaatgttaatttagtataacttctcttttatgtctccatgtatattcgcgtgtgtgtgtgtgtgtgttaattaatctagttcaaaacaggaatttacatctgatagtgattcacaccatctgctaattaccgtgtttgttggtagtttttctcagtgatatatgcaagagcaaaacatcacaaggcatgtatttaagcagacaaatggctgtgcttcataggctcacatgttaatat

SEQ ID NO: 34808 - DNA, 311 bp, Glycine max
  unsure (1)..(311): unsure at all n locations
agtacatanttttaaatgtaagaattctggactcatgaatcacaaactaatttctaaagtatacttaagtaaatatatatcatatacgaaattacaatataaaataaattgttgtagccatgtcactaaataaatgtatatatntatactacaaatcaggatcttttatatatatatatatatatatatatatatatatatataaaacttataggtattactcatatataattaaacataattagtcaaaatccttatattagcgaaaaaagataacattaagaacatccaaacatcatattcaccacttc

SEQ ID NO: 34809 - DNA, 277 bp, Glycine max
  unsure (1)..(277): unsure at all n locations
cccactattgtactagngctgtttgatagtcataataagttaaaacatctattcgccatagtacaccataacaagaaagctatggtctaaattcagtacgtataagggatcaaatgttaaataaagtaatgttaataattagatgatacataaacaaatatagaaacaaagtgataattaagaggtgacatgccattatattgtctctttatattttggctccttgaaaatatagttgctgcatcccaatgtttgtactcttcaaacatatatagtt

SEQ ID NO: 34810 - DNA, 252 bp, Glycine max
ctacaacacctcaatcttcacgctcacctcatcacctttgtccccatcactgttcctcgagttgatggtcttcctcaagatgctgaaaccacttgagacatacccttctctatggtcccacttctcgccacggctttggaccgcaccgagaaagacatcgaacttctcctaagggaactgaaaccacaatttgttttcttcgagatccaacattggctgcgcaacctgactcgaagcctaggcatcaagagt

SEQ ID NO: 34811 - DNA, 385 bp, Glycine max
  unsure (1)..(385): unsure at all n locations
agcttcggataccctgagactaggctcangcccttttattgttctatatcataggtgagtgagcctatngcgctctcttcttcgttctccatctaagcaaaagttcttcttctccatctaaggtgtcttcttctccgtgtaaggttgttcttctccatcgcgctctcgactgtgacagctcgccaccttatgtaggtacattatgtgagtctttctccattntaactaccctaacttgtatacaatgtgtggcatttcattcattntatatccaagtcattgtccttttctttgttctttcattgtccatttcattcattctggaagttacttatcnatgtttgttggtgaaataaaaatagctagtacactcttgagttatgtg

SEQ ID NO: 34812 - DNA, 359 bp, Glycine max
  unsure (1)..(359): unsure at all n locations
tcgccattatgttaacttcccttaaactgagcctttaacttcccttagttagtcgcaacctgcatttgatctatntaggaaagctgtagtttgagtggttgaagcttcagataccctgagactaggctcaggccctttgatttgcactatatcagaggtgagtgagcctatnggcaattacccctttgttcttagtgattattatttgtgttggtgttgatgaagctccgttgctgcagctntaggagtngtacttgctatntctttcatccacagaaggaacatngcanggtaaaatatttttttcttctgtaacatntcactaaacttatggtagtatagcatgggtttgtttatac

SEQ ID NO: 34813 - DNA, 411 bp, Glycine max
  unsure (1)..(411): unsure at all n locations
taagtcacctgcggcatgcaagcttcctctctaagcttcttatccaagacactctctttgggtgttaaacttctccttccatgacttattctctagtggataacacatcttctcacctcttcttctttatctttcgctgcaattccatggctganaatcaccattgaaggaccttattgaagctcanagatccagcctccatagaagcttctcaagcaagcttccatcactatggttttagctaacactactaaaaatagcgtattccacgacgcgcatttaaagtcgatcgtcacaaaaccgtctttgtttgggggcggtgacatttntgtaaatactggcaacattttaaagacgactttctttaattgaagcttcctctctaagcttcttatccaagacactctcttg

SEQ ID NO: 34814 - DNA, 344 bp, Glycine max
  unsure (1)..(344): unsure at all n locations
gctcttcttttatccactcagaccgtgacagctgccccctatcatgtatgttcatgagtctttcttctaaatacctangtacgaacttatgctcactataaagactctntgtttgtttcttctgcaaggaccttatctaggtacatttcactttgcagtccgtttaaggtgctcattcgtgctcacagggtctaattttgattgaggtaagtcgtgcttactttgccaagtgttaatgccattgaggctttgacgccacaagcagctttatataaaaatgtgcaaatagttttgcttaatgtatattgcctaaagcttttcctttgcagcatattcatatgtgt

SEQ ID NO: 34815 - DNA, 457 bp, Glycine max
  unsure (1)..(457): unsure at all n locations
gcttctgaaatatgagcaagaatcaaacctatggttctatctattcttctgctaaagggggatttcttttttaaactatccgcanactagatgaacttaagtaggtttcttgatcagccgtagtaactgcaaaaggtttgattgatgacacgagagattctggaccctttgttgcaatcctcttgcacaaagcatcacagttgctgataacttcagtcaaccttcctttcagttctccaatttccacctacaatgaatgaactacatgcacgttccaacatatagttaacaatttccacatacaatcatagaataccacatgagagtattgtgatttatgacatagatgcaaatgaatcaagatttacaagttagtgatcctttgtaacaatgaaagaggaaattaccattcatttcgtttaatgatacaaaacacatgtatcatgttagtacttgc

SEQ ID NO: 34816 - DNA, 398 bp, Glycine max
  unsure (1)..(398): unsure at all n locations
attcccaaacactcatttcatacanaacaatccactgcatatcaaattcaaccagttcactgttcaaacaagctntctgtagaagcaatcaactcaaggtactgaaatataaataactgaaacataaagactaaaatttaaatgactgaacataaatcataaaataactgaaataaactaaatttttcaaaatgcacaaatntaaatgtcctgctcctgtgattgctcctgtgcatgctcatagagatccaacacctgagcaattggtgaatcctgagggataggctgctctagctcaaatgttggtgtagctggcatggaatcatcangtatgggtatngaagatggctctggaatctggtctgtggaagtctcctcctcctgagccatgtgtacac

SEQ ID NO: 34817 - DNA, 340 bp, Glycine max
  unsure (1)..(340): unsure at all n locations
acaaccctcctagggttagacttacttaaactaagcttcatcctcagatccctcttgttggactagacttaactaaataacttacgaaagtttagactaatttaggctaagctntgtcctcagatccctcttattggactaaacttagactaaacaacattattgtaacaacatatttaaaaccaaaacttaatccgcatatccctcttgttggactaagtttcaattctgcttcattcaagttcaaaggcaacaatacagttcccaatggctaaagtacctaactatgcacacaaatgggtgatcagaccaagagcatatggaatttaagcatagaaag

SEQ ID NO: 34818 - DNA, 358 bp, Glycine max
  unsure (1)..(358): unsure at all n locations
tgagtgctctatcaatggagttgacaagaaatcttcagacttttctcatttgccagtggccaangatgcatgggagatcctgaanaccactcatgaaggaacctccaaagtgaagatgtccagattgcaactattggccacaaaattcgaaaatctgaagatgaaggaggaagagtgtattcatgacttccacatgaacattcttgaaattgccaatgcttgcactgccttgngagaaagaatgacagatganaagctggtgagaaagatcctcagatctttgcctaagagatttgacatganagtcactgcaatagaggaggcccaagacattngcaacatgagagtagatgaactc

SEQ ID NO: 34819 - DNA, 250 bp, Glycine max
cagatgcccctcaagtttcgctctgccatctcaattgaaatcggccgatgttcatccaaagtggtcatgctgtttggaatgttgactactctgttataacgagaaatcttggtgatgaaattgcgcggatcgctcaagtcacatgaaattggcatgcgaaccctgagggtgcacacattgtcatattctatcaagagctcttcgactctgaaaaaaataataacatccaaattataagatattattataa

SEQ ID NO: 34820 - DNA, 234 bp, Glycine max
  unsure (1)..(234): unsure at all n locations
gtcaaccaccaagatgtctgctcttaggacttgagtatcatggagtgtaagtcacacatcgagtactatggaatgtgtggtggagtatataagtactcggntctccctccttaatagctagcttttaagggagggttccccaagtccttgggtgcttatcaaattgcagagatcccaactatatcaaacttatatattatgattacaggaacaaatatatatagagtctgaatg

SEQ ID NO: 34821 - DNA, 373 bp, Glycine max
  unsure (1)..(373): unsure at all n locations
ttaagtcacctgcggctgcagcttgatgattccaaaanntctgtctatactctgatgtgctaccgattntacattcatctgggatgttaataacatttgccaacacacttccaatgtcctttntcattaatgggtgaaattcttacgagtttccctcaaggttttaaattacatttagtgacggttatacagaactccaaaatcttaatatcccaganaatngcaggcaagtgcagttgcagactgtaatttataactatcactcccagtaaatgacgtgggccccacttaagttactgngtttcatctctntatttgtgggtcctatgtaaattccacttcaataagggtgtggaaacaatttgtagatagt

SEQ ID NO: 34822 - DNA, 253 bp, Glycine max
  unsure (1)..(253): unsure at all n locations
atatacataaccaaagatngactacaaattataaaggaggtctctctttgtgtcaggacaacttacaatgcaagcaaatagagggttttcaaggttcaacgagaatggtttccttaagatacaaaattagttgggttgattggaacatataccanataccagttaaggtttacatacttgattccaccgacaaagtgaggtcaaatggttccaaaatacttcatgattgtctggtagtgatgcaatcctaccc

SEQ ID NO: 34823 - DNA, 331 bp, Glycine max
  unsure (1)..(331): unsure at all n locations
agctntctttagtgcgtcacgtttaanatctatctctatggtggtgcgagcctttgatggtactcggcgggaagtgatgggggaaatcgacattcccattcagataggcccccacacttgcaatgtggtgtttcaagtaatggatataaatcccgcctatagctgcctcttgggaagaccttggattcatgccctgngagtggtcccttcaacgcttcaccagaaattgaagttcacagtgggtggactnttagtgatagtgtcgggtgaagaggatatgttagtgagctgcccctcctccgcaccgtacgtagaagcggtagaagaatca

SEQ ID NO: 34824 - DNA, 209 bp, Glycine max
aaaacaagctacctccttaattctgacaacacttgcttttactacccccttttttttttttgaaatcttgcaaatgaacccccccccttcgagttaatattaaacccaggccaaaaaaataggttcaattatgacataaaaagctaatttaaaggactagtgctcagacctcttaagctgactgacgggataggtgagacatggccaca

SEQ ID NO: 34825 - DNA, 229 bp, Glycine max
tggatcattttcaaggtccaacgccttaacatgatcacctcttaagtaaaaaagaatcactcgatcagaaagaactacgtatgtctgattctctcatcccaattgaggaatacgtatgagcaaagggatacacccttgtccaccacaaaaagagaaaaaatattaaacgggtgtgatggatatatagacatatgaagggaacatatgaaatcaaagtcgcgtttgcaca

SEQ ID NO: 34826 - DNA, 548 bp, Glycine max
  unsure (1)..(548): unsure at all n locations
cttatccaaggctcatgtnggtggtgaagcttcttcttctctgtctntattcctagnggatggcgctgcctcttacctcttctcctttgtcttccgctgcatctccatggtggaaaatcaccattaaaggacctcattgaagctcaaagatccagcctncatataagctncacaagcaagcttccatcaaaaggggtgaacccaaacaaggtctccaaaatgatgaacatagtgcattctatgagaaatgtaaagacctgtcattattgcatganaagaggacatacattatataaatgctatgttangagattngatattcctagangcanatgtatctagattccanaagaaattattgtgaagattaaccncatttgacccnnactngantgngtaccacctctctctaattgattttgcttgaggtgtgcctaaacaaggactactatgngctngatagnggtgcttgtannncgctaatcaaataacttggtatgaaacatttcaaactgtgcagtcccccataatgtaatttgaagatttgg

SEQ ID NO: 34827 - DNA, 240 bp, Glycine max
tcacttgtttctcaattgaattatgggtgctctcaccatcatgagaattatcatactcgtgcgatacctttagaactgtcaccacaggaacgtatgcctcctctcccacatgcatttttaaagataataatttaggatcatcttcatcaattacttcctgacaaaataaaaagagagagacatcatattttgctcattcaatggtccatgctagcgtacattagtgacacataattgaat

SEQ ID NO: 34828 - DNA, 331 bp, Glycine max
  unsure (1)..(331): unsure at all n locations
tcagcttctaagaaacttctgagaagcttctttgaaactcctttgtatagttntttgagaaaacttccttgagaagctagagtttagctacacacacccatctaanaactaagctcacctccttgagaagctagagcttagctacacacacccatctaaaaactaagcttacctccttgagaagctntcttgagaagctagagcttagctacacacccctataatagctaagctcacccncatgacaaanaaacatgaaaatacaaaanaaatcctactacaaagactactcanaatgccatgaaatacaaggctaaaaccctatactact

SEQ ID NO: 34829 - DNA, 384 bp, Glycine max
  unsure (1)..(384): unsure at all n locations
atcatattcaaactggtccaaataaataataaagtcatctcgactcacagaaagtcatataagtctcatacaattaatatagaacctatatcctaatgtcacatcctatcagagcgtggtgttcccgtgtcctctagcatgaggttcttcatagtcatccacctattcatctgctcccccgaacacaagttcaagatcatcacatgatccanacacaacaacacacagggagtgagttatcacattcctagctagctaatagagaaacaagacaattaaatatacatattatataaatgagataccacttgcntaaacatagctcacgtaacttcaccacttcgtcattcaaaaattacttttcaattattcaacacattacac

SEQ ID NO: 34830 - DNA, 294 bp, Glycine max
  unsure (1)..(294): unsure at all n locations
cgattcttcttttatttcgtgcataaaanatattttaagtcatgtaacaatgtgaactctgatagttaatttacattnttaaataaaatgtcttttgttgtgtacacatagtctcggcaaatctctcaaattgacttttctaacagtacgtaacaccatgtatgctaacatggtactggatttggaggcaatgtgaacaaaaacaagagtatactaagtgagaaaactaatgaaaagaggactttcactttggtgacaatatatgctnttctctaaccgtgtaatttctactac

SEQ ID NO: 34831 - DNA, 386 bp, Glycine max
  unsure (1)..(386): unsure at all n locations
gcttactaagctcccagctggttacaagaatatnttttcccatataatacataaaanaattaanaatagagttccaccaaaaaacaatggtttgaaagacaactcagggatgctagcaaagtcggggagtattgtttgccagagagctggaataaccatcaaccatttatggcaagcaaaacaagtttcgaccttcctaagaaccacattcggaagcttcaaaccaatgacattggaggcccaaattatttaaaacttgaaactagggatgaaaccagtgcatctgggataaagataggggccaatgcatctgtggagaggaaaactngagcagaaatgcaaaataacggtacctataacatgaaaaagtcaccanaaaacatgtt

SEQ ID NO: 34832 - DNA, 306 bp, Glycine max
  unsure (1)..(306): unsure at all n locations
actatacttcagnatgggtttgtgggaaacaaatgtgattcttctctgttcatctacacacatcaggagcatactgtctatcttttagtctatgtggatgatatcatcatcacagacagttttgtctctcttattcggcagctaactttcaaactaaacattgccttctctcgtagtaactgggtcattnggattatnttttgggactagagatcaaatatctggctaataattctatactaatgactcanagcaattatattcatgatttacttcacaaaactcatatggctgaagcacattcta

SEQ ID NO: 34833 - DNA, 368 bp, Glycine max
  unsure (1)..(368): unsure at all n locations
tacgtgggagtacgtgagctcagttggaggtgggcaacaggggatggtgggtttatgcgcgctntgtggatgtgaaaaacttgttgtgcaccatcgcccgaccgccacctagtaccacatgtgatgggtaccccataatcctacaagcttgagatgaggaagtgttgaagggtgaaacttcctgcttttattgttgaccacagagtggtacctggagatatgtcgcggnggtcangagaccttgnggacgtcaggtggngtgctattgcccanaaccaagcttgaccaatcccgacccaacccnggcatagtcggtcagtgagaacctgtgatgtacctaagcaggcgagctttctgcagtcaacaga

SEQ ID NO: 34834 - DNA, 343 bp, Glycine max
  unsure (1)..(343): unsure at all n locations
gctttactcggagatctgattcangcgcataatatatcgagacgcttgtaatgttcttcggaagctctcgagaaattccaatgctcattacctttaactcggaggtctgatttaggcgcctaatatatcaagacgctcgaaattgaacaacggaagctctctagaaattcaaatggtcataacttttcactccgaggttcgattcaagtgcatgatatatccagacgctcgaaattgaacaatagaagctctcgagaaattcanatggtcataaccttaaactcggaggtccgaattaggcgcataatatatcgagacgctcgaaatttaacaatggaagctc

SEQ ID NO: 34835 - DNA, 386 bp, Glycine max
  unsure (1)..(386): unsure at all n locations
catgtgaagtggggtggaatcttatatcaattcccttatgttatcaaacataaaaagggaaaaggtaatattgtagccgatgctctttctcggcatcatgcattactttctatgcttgaaacaaaattgattggtcttgaatgtttgaaaagcatgtatgaaagtgatgaaacttttggtgaaatttttaaaaattgtgaaaaactttcaaaaaatggtttctttagacatggaggctttcttttcaaagaaaacaaattgtgtgtgcctaaatgttctacaagaaacttgcttgtttgtgaagcacatgaaggaggtttaatggggccatttgnggtccaaaagactctagaaacattacaagaaccattttattggcctcatat

SEQ ID NO: 34836 - DNA, 367 bp, Glycine max
  unsure (1)..(367): unsure at all n locations
aaatatggaagacatcccttgtcataaatcacacagtttaagtatccaagggtgtccattacacaaaacaataaagcaatcttcatatttattagtgggtgattgtaatcttgagaatgagaatctcaaggggatcttgtagaagggttctacaagaaggtattattnttcttatagggttctagaaacttanagtgtgtgtgcaaggtgtntgtgtaattctctattttcaattttgagattgcaaaanatttgaattagtgaaaactcttagttngattntgatggangtctagatgtagctcgtagtgatagaaaataaaccaatataaaaaaaaattgcactcttttccctcctttctctatc

SEQ ID NO: 34837 - DNA, 406 bp, Glycine max
  unsure (1)..(406): unsure at all n locations
tgcagctgtgactcatgttggctagcctattcttcnttcctgtgcaatatgacaaccanntttggggatagaggaccggtggattcaagcccactagtggacgacttcacccaactggtgggagttctcagccagttaacaaggtgtcttaatctgttggtagaagtggtggtggtcctgctactgtgtctacaccactccggtgtgggaagtgtggtcagcttggccatattgctcattagtgcatagatagagaggtgacttactttaactgccaaggtatgggccacattagcaccggttgcccaaaaattgatcttctagggattcctacacatgtntattctaatccccgagcacaagtaactcatcctttatcttgatgtagtcgctcaagtgttctcta

SEQ ID NO: 34838 - DNA, 382 bp, Glycine max
  unsure (1)..(382): unsure at all n locations
gctctgaggaagcctctaatgaagcttctgaggaagctcatgttttctccttggtaaaatgttgcctagccttcgttaaccggtggatcttctcgaaattntgtctgtagcttcacaagacacttgtccacgatctaaccgttgggatcgttgagaagatgtctggagtgtgctcgaagcttccgttctcgagagcatttcttatttaagcatttcagcctttgctttcgtgtagcttaggaaaaacgccatttcttctcctttctttcttccaaagtcatttctaacgtcccaagcactttctccatcacccacagccaccattagccaccacaaaccatcgttgttctccattgaaaccncacaccgagaggaacccttc

SEQ ID NO: 34839 - DNA, 329 bp, Glycine max
  unsure (1)..(329): unsure at all n locations
cagctnntgtcactccacccatatttgttcttacattaaccagactnaacaccaccgacaacaacgtcaatgaattgttgcccccggatataaaggattctttgaatcactttgtaatgtatcatacataggggcatgtgcttgctgaatagactcttgtccaaggtcacgaatcatatcctccaagtaatctcccatttctacatcagacagatcatattgnggcccactctgcatgtctgtcatttcaccatgccatatccatgtcgtataattcctcttaaatccatcatacaatagatggtcccatatgccgtagaacttttact

SEQ ID NO: 34840 - DNA, 315 bp, Glycine max
  unsure (1)..(315): unsure at all n locations
ccttgaactcgctgacttagttntacttatcttaatccgactttctttcagtnngaatcaacttaatatctttaattcgtctaagatagactccaactgtgctactgacttaactggtaagattacagattatgtgtcagatttcggcaagagtctgacatcgtatcgcatcgggatctgcgctcaatcttattgacattttctgccttggcttggcgccaactgatcataacgtggcatatggcacaactcagcttctcatgctaggctatgttacaacatttgccctttaagtcgtaagtagactacacatcc

SEQ ID NO: 34841 - DNA, 385 bp, Glycine max
  unsure (1)..(385): unsure at all n locations
agcttgccaagacagctaccaccgggccatcnntgttatggtgatatgcaaggaaagcatcaattgcggctaggtccaccaaaccatccacgtttggaaagaggacaaccccaaagattaacaatgctaatacatccatgaatgggacccactcatcttgattcgccatatccctcgccttgccttctaagtacttacgtggtaggcccactatgcagtttcgagtttgcttcacacgatccaatcctctcgccgaatccctgaccacaattgcaatttggctcaaggagggaaggaacccggagaaaagatacggtttccttcccccaagaggacatnctagaatctcctcatattcttcaacggtcggtactaattggaagtc

SEQ ID NO: 34842 - DNA, 313 bp, Glycine max
  unsure (1)..(313): unsure at all n locations
cagtcaccgctntaggagcgttgtacaccagcagcgcttcgaagccatcaagggatggtcgtttctccgggagcgacgcgtccagctcatggacgacgagtatactgatttccaggaggaaatagggcgccggcggtgggcaccactggttactcccatggccaagtntgatccagaaatagtccttgagtnttacgccaatgcttggccaacagaggcggcgggcccgatgacaagcagagaccaagttnggtcattctgcacccatgatacgcggagataccttatggttattcgcacccttttgtcatct

SEQ ID NO: 34843 - DNA, 404 bp, Glycine max
  unsure (1)..(404): unsure at all n locations
agtcacctgcggcatgcaagcttctaagttctaaccataagaaaactgtaccattatcattcttcanaatgcaggacagctcanaattcatagagtaatacaccctanaagcaagcgcttcanaatttcaacttactcaaacttcatccaaaacagaaaataacctcacgacacgcatagtcaaccagactcccctttatcaagcaaagaccatataaaanataaaaaaattcacataataataattataataataataataaatattaatgtcaattaataaataaatacattacataaataagaaagagatcaagcagcaatagcgtgatgtgctactcaacacgttccaaacaaaagaaggagatgaannatattattatacaaggaataatctcaagaaa

SEQ ID NO: 34844 - DNA, 326 bp, Glycine max
  unsure (1)..(326): unsure at all n locations
taaaatgagatctaagtgcactctttgcctcatttatcatgctatatccaagatcaaataagccttgatggtaaaaatggtttacaattatctaattgacaatatgagtatcaaagtccacatttctgtgtgccttaatttgttatgtctgggtttaataatctttcaaggagttttttattcttggtaagacttatgttcaattccttactgaaagatgctgaaggctctatttattattcanaagtcacaagtttctgctcagctaagtctcaaaataacaatatcatagagtctcaattgcagtagcagtaaaaagtactttc

SEQ ID NO: 34845 - DNA, 159 bp, Glycine max
  unsure (1)..(159): unsure at all n locations
acatcatagaanagaatggctcgaagctctaagaagaaggatccacaataatcgatgttgctggtgctggaggaataggagaggtagaacgagctggggtggggggagctgaagtaaatggagccttagatcctctggccctatatgtgagggttcccc

SEQ ID NO: 34846 - DNA, 315 bp, Glycine max
  unsure (1)..(315): unsure at all n locations
tttatatatatacatcggttgcttgaatcttgatttcaggacttatattgtcatcatcaanaagggggagattgtagaagcaaatgacttttgatgtttgatgatgatcatgatngattgatgcaaatgattcaagaatacaagccacaacatcaagatgatcactagtattttaggaagggaattcctaattgattagcaaaaggtttggcaagtaatttgattaaaagtgttttcaagagattactctctggaatcgattcgagaggatgaatcgattaccagggtaaaaatggtttgaacagctactaaata

SEQ ID NO: 34847 - DNA, 476 bp, Glycine max
  unsure (1)..(476): unsure at all n locations
agcttcctataacagagaatggaaatgctttaatgatgtgtttcttcttaacatgcanggggaatggtgatgcaaaaatcaactgagctcgtaatgaaaatgcacaaatgatatgtggttgggattatttgttataccgtgcagaagcttcctatctcggagacgtgacctcatatgtctggagatgtacagctatgtaccgtaatgagtggtttttcaaattggaattaacaacaaaaagagtaaggaaatagaggaagaaagttgaagcacaactgatgcaccgttactgaagagaatgattatattattggccgaaaatctacttatcttagtaataaaacaattgtctcattactaagatatagatcaagtgcaaagtgtttcgtcgtcacgacatcaaagccgacaatgacatcaccataatgcacctactcttccattaataatgttgtggtctgcccttttctccttca

SEQ ID NO: 34848 - DNA, 288 bp, Glycine max
  unsure (1)..(288): unsure at all n locations
aatggnngatttccaccatggagatgaagcggaagacaaaggagaagaggtgagaggaggcgccatccactatggaatangccatggaagaaggagcttcaccaccaagatgagccttgaataagaagcttggagagggtgcttcaatggaggaaaagaaagagggagagaaagagagaggggggagcacgaaattgaaggaagaaaaagggagagaagttgaactttgagtggtgtctcacaagactctcattcatcaaagttacaacaagtggtacacatgcttct

SEQ ID NO: 34849 - DNA, 280 bp, Glycine max
  unsure (1)..(280): unsure at all n locations
tgagctggagagccgttgagagtatggaagagaaacaacactatcattgttttatcaaagctctgattcagttcgggtagggttaaacaatccaatactcctttgcatgttcatcctagattcatacctctttaatccaatgctagttgcagaataaatcaacaaacttgttgaaacctagaatataaataatggctttctagtgtcaatctctgcagaacatggcatgtcccttgtaatacctngaaaactaanactcatattgtagaaagttatgtgt

SEQ ID NO: 34850 - DNA, 101 bp, Glycine max
ctccagccttcaaccaatcttcatgtgcttgtgccttcaaccccaccttaggtatctgaggcgtcaactgccatttttgcctccagccttgaacccaactt

SEQ ID NO: 34851 - DNA, 229 bp, Glycine max
tacaggttctctctcaccatcatgctaataaattagtattccatgcatttttgtattgatttactgccatcacatatatatcttcagttagtaaatatactagttcatatttaatatttcacataataatgtgtatgaatatctcaacaatacagtgcatgtgtggtactttttcagtgttaaacgtactattgaagagaatactatgtgtgtcttgtagtttgaaagt

SEQ ID NO: 34852 - DNA, 287 bp, Glycine max
  unsure (1)..(287): unsure at all n locations
gaaagcagaattgtgtaacagatatcgaaatgctggaagtaacttgacgaggaaaggaaaattgcagaatttaaaggcttagcgagttcattcgatcgaatgaactatttaaaagacaggaattataaagtaaagcgtaaattgcatggcattcgaaatgtaaagtttacagaaatttaaaatggttcacaatcatacatcttccttgcgtactcgtttctctctgcgctgggtactntgagtgtataanggattgtgtaaatgatttgcgaccctgaaatctgact

SEQ ID NO: 34853 - DNA, 300 bp, Glycine max
  unsure (1)..(300): unsure at all n locations
agctagagcttatctactcatatctctctaatagctaagctcacctccttgagatgagaagctagagcttagctacacacccnctataatagctaagctcacccncatgacaaanaacatganaataacaaanaaagtccttattacaaagacaactcataatgccccgaaatacaaggctaaaaccctatactactagaatggccaaaatacaaggcctatacgaaggaaaaacctattctaatatttacaaagataagcgggctcatacttagcccatgggctcanaatctaccctaa

SEQ ID NO: 34854 - DNA, 359 bp, Glycine max
agcttggtctctacacaagaatagaaaaaagttgtgatgaatgtgatgaacactaggaggggtgtagagaagactcctaagcttgtatgcaaggaaaatttgatgagaactttctcttctccctttcttcaacttatggctagaaatgagagaaaattggagctttcaacttctctctaagtgttttgttgtgttttgtgagacagaaatggtgagtgatggggttgggtctgataatgcatagactaagtgaatgaggctgatgctaggtgcacccaacattattgctggtgcacccaacacttaagggtaaaagtcaaaaatacccttgcttatttttttaaaagtttttcacccat

SEQ ID NO: 34855 - DNA, 358 bp, Glycine max
tcaatctcaacatttgaatacactcatgatgtatttttttataacccctaaactattattcttgttaatggctacatcagtatgcaattattaatatgattattaaatttgaacttcaaatgcttcttttgagggttggggtactactgtccttgttagtgtgccaaagaaggatgttgaattcaaattactaaagtaatttatgtagtaaaagttttcgttaaaggactacacaaattaccgaagtaaaaatttattctaattggagaacaacacaaactgcacttaagaatatgtaagttttgtccttatggttaaatgtgtgtaagtgctaatttcttgcttcatttaatggatg

SEQ ID NO: 34856 - DNA, 338 bp, Glycine max
agcttggtcaatcattgcagttgtttattcttatatgattggttgatgtgtttccacagatcgataataaaaaaaatcagtaatattaggtcataatcctaattttaattggtgtggcatttggagttctcgggtggtgcttaatcaagggttgaggaggataattggtgcgaactctgaaattaacgtgtggagggtggaggcaaccatggcagggaaccatggtttagaggtttgatatggagataaccatgccaatgaatgggatatgtactttgttcgtttggtcgtccctcccccagtgctggtctaattcagcaattgcctattagcctact

SEQ ID NO: 34857 - DNA, 389 bp, Glycine max
  unsure (1)..(389): unsure at all n locations
aaactaagcttacaagagcgctcntttattgttagttatctttattcatgatgaattctattgttggaaagtaaacaactttcccacgttgggaaacaaattgtaacccttagatataaccatcaaaaaatgaatggccaaaggattttcttatttttattttttattttctcatttttttccttttcttttccactttgtcctgcccccaccccatccaccaacaggcaacatacaccacatgtctgactgtcgcacctcccttgttgtcacccgattccatggcaaccattgttgcacctccctatttccactaattgcagctccaaaatcaattcaagtttaatttttttcaaatccatcaacaaatcaatctaaaaatcaattga

SEQ ID NO: 34858 - DNA, 355 bp, Glycine max
agctttttggagtagaaacatgggaccaactcattttatttcaaaaaaaaaaagtcgtatctagtcaagatctgagagaccatacaagtttcttagcggtttctaattatatgggccattaagtctatcatatgctgacaatagccgagaagcccatgaatttcttcgggggcagagtaagtgtccgccattgccttggccttggctaacaatcggggaagttcttgactcctgttcaaggtaagagcaaaccgatccatccacatggttgcctcttggtgtaaagagtcgatcacccttcctctagcctttttttccgcgtatacttgggcatactcgtccgcgaccctatgct

SEQ ID NO: 34859 - DNA, 387 bp, Glycine max
tgcatcctgaagacaaacttctatgatatatagacttgttgcttatgagtacatggctaatggttcattggataaatggatattcaacaagaacaaagaggaatttcagttggattgggatacaaggtataacatatcacttggaatagcaaaaggacttgcttatctacatgaagattgtgactcaaacattattcattgtgacattaaaccagaaaacgtgctcctagatgataatttcagggttaaggtttctaatttggtttggctaagctcatgaaacgtgaacaaagacatgttttcacaacacttagaggcactatagggtatcttgcacctgagtggatcacaaactgtgccatatcatagaaaaatgatgtttatagc

SEQ ID NO: 34860 - DNA, 361 bp, Glycine max
agcttgtggaagataatgctgtggtggattcctagcatgtcagatggcttccaagcaaacaagtccgcattcctatgtaggacgtcaatgatgcatctatgctcatggatggtgaggttcctgcttagttgcatgcattgcccgagtttgcgtctaagcagcatcttaacgagctcttcaataggctttgggcctctgtcaaaagtatcatcacgcagatctacatcaagttcgttgtctaggctttcttggtagacagtcagggcttggactgaagaccctcatccacactcatgacttgagtaccttcgaccactgtggggtgaggcttgacaggctttctggattctactagctcccc

SEQ ID NO: 34861 - DNA, 390 bp, Glycine max
  unsure (1)..(390): unsure at all n locations
tctccttcttttccctataaataggggaatgagggaagatacaaaaatgtttaaccctcctggtatctgagaatcacttaaaattagtgaggaaaattgtttccgtgaagaaaatccatgccgaggcacttcggtaacacttccgagacgtttccgtgagtaatttcgcgaagattttccgccgttnttcgacgatcttcgttcgttcttcgtcgttcttcggtcttcaaccggtaagttcccgaaattgaacatttcaattattctatgtacccttagaggtccacatttgtttcgcgtgcttttatttttatttcatttactttccgtacccccttttgacgtgctttagtcatttatttaagtcattttcttgcctagtcaaaaata

SEQ ID NO: 34862 - DNA, 350 bp, Glycine max
  unsure (1)..(350): unsure at all n locations
ctaagcttaatctcacattgaatacctatgatgtattnttataacccctaaactattattcttgttaatggctacatcagtatgcaattattaatatgattattaaatttgaacttcaaatgctatttttgagggttggggtactactgaccttgttagtgtgccaaagaacgatgttgaattcacattactaaagtaatttatgtattaaaagttttcgtttaaggactacacatattaccgaagtaaaaaattattctaattgtagaacaacacaaactgcacttaataatatgtaagttatgtccttatggttaaatgtgtgtaagtgctaatttcttgcttcattt

SEQ ID NO: 34863 - DNA, 346 bp, Glycine max
agcttatgctattaggtgctggctcatgaatgactttgcacatctatacatatttcctcatccaagagtcctctagacttagaagagtagacaacctatttttaatttcacatcatgtgtacaaattcatttttatttagaagaatagagacaacaaagatcaaattactaactcttaggtcacaaggttcagatacatatcaaggatcgactctcttaaaggcaagtgcatgtttacttatgctattgaattggaaaacagacatcaagttaaaaggggtagaaaagatagtttcaactaacagtgggtgcggaatcacattgataaatgccaaacaaacttgct

SEQ ID NO: 34864 - DNA, 378 bp, Glycine max
taagcttgatccatcatacaattgttaactgtatcagctatttaaagcctacacaaatgctgatttgcaatcaagttgtaattgcaagttgagagacaggctaagtaacagcgagtcagtgatgtacaaatgctaatatatcaacaaattactttaacatgtgaaaaatgaatttgaacttaatattacctagatctgcgtggcatgcgctaactgacagcaaaatgcataacaacatgcaaactgcatgttctacttctagtgcatcttaccggtcgataatttgtgggaggaatttttcttgttactcctactcagcaatatatgtatacacgtattacggatagaattcaagtcatagaatagtattgacatttg

SEQ ID NO: 34865 - DNA, 270 bp, Glycine max
  unsure (1)..(270): unsure at all n locations
gaatgctatcgtgggaaagtgaacaacttttcaacggtttgtcaccaataacatttatgaattttagccgtattgggatacacggcctaacaaatcacttgtaatatcataatgatcccgcttatctacatgaagattgtgactcttacattattcacttgcacattcacccacaaaacgtgctcctagatgataatttcacggttaaggttttgaaattcagtangatccaactcatgaaacgtgaacaaagacatgttttcacatcac

SEQ ID NO: 34866 - DNA, 220 bp, Glycine max
agcttgtaagagcttggtctctttctttttcaccacatctagaatggcggggttgactctccactgtggctgcctcactggcttagctccatcctctagaaccatcctatgcatgcaggtcgatgggctaataccaatactgtctgctaaagtccatccaatggctttcttggcttcttgagaattagcagcaacttctcctcttgctcagcaacacggg

SEQ ID NO: 34867 - DNA, 298 bp, Glycine max
tctgcatgtctagagaggtcttgagagagtatggtcctttttcctaggagtttgagagatcttggtgtgtgaagatctgctgagaccaaagctagaataagaagttgttctgagagcttgatatgactttgcgagtgattgtgatgtccttcatatggaggagtgatcgaggccgctcccgaatcatataaacatgcatgtgcggtaactaggatatgattctagttcgtttcccaactagcagtgacaaaccaacgttcataatatacttgcattctcactcacgattgcggggggg

SEQ ID NO: 34868 - DNA, 246 bp, Glycine max
agcttcaatggatgaagaaatttagagagagaaagtggcatggaaaattaaaggaagaaaatgagagaagttgaactttgaagtgtgtctcacaagactctcattcatcaaagttatgacaagtgttacacatgtttctattcactttgtgaatttcattctcatttcatgtgaatctaagaagaatattcaagaatatgccaaaggcatcttaacatattccctttagatgccacaagaatgaaa

SEQ ID NO: 34869 - DNA, 167 bp, Glycine max
tcgtcatggatttgtgcattgttgaccgtctcaaatggctgagctcacgcccgttccgcatattgtgcggactgtgcgtggactcacatgctgcgaaacaaactgaacagtgagggacaagtgcataggcatgacgtaatagctgaaccatgttaaaaatgtaatag

SEQ ID NO: 34870 - DNA, 300 bp, Glycine max
tatcttagctaacgcaacattgttcattaagagtgaaggagttgacattcttatcatctcactctatgtcaaagatctcttgagaacaagaagcaacacatgtcttggggaaaaacttaataaagaaatgatggaggagttcgagatgacagaccttgggttaatgaccttctttcttggcatggagatcaaacaaagagaacatgaaatcttcattttgtaaaaaaagtatgcccaggagaatttaaaaaaatttaaaacttgaagaatgcaaaggaaatgatcacttcaatgaaataa

SEQ ID NO: 34871 - DNA, 373 bp, Glycine max
tgcataagtccggtcccaaattccaatatttatacactcatcatcagggctcagagaaaccccagaaatttccccaaagaaatcaatctcttgacgttttctgtagtctgctttcgtgctataaacatgcacaaaatctgcaggctcagcaaccaccatatattgaccatccgaagaaaaccgaatagaccgggttgcccctaggttattcttgagaatggcagtaggagatgataagtgtctaactcccatactctgcaagtcttatcctgattccccgttgcaaaggtacatccatcgggatgccacgcagaagcgaaagagtaatctcgatgaccaaccaaattggcaacagtctaaaaaatcaaacaag

SEQ ID NO: 34872 - DNA, 245 bp, Glycine max
agcctgctagtggtatcatgtatgggttgttcacattctctaagtgctgtgagtctattgtgaacatcattgaagagggaaatcaacataagaatgttgatcctcctttgccaccatcttctaacaatgtgggtggttcgaggagttcctttgagtgtcttgtagataatggcttatagaggggaaaggatagtgttcaacaaatcagggatcagtttgttgatcctagcgttggggcattaatg

SEQ ID NO: 34873 - DNA, 390 bp, Glycine max
tactcaagctttgatgactaaaataaaaaaatagtcagatttcttgagagattttcggtgacaagggtgaaattttgagagatttgattagtgctcttgtgttgatgactataataacatgcttttgacattaacagggtgagataggtgatgggcaggacgtacttgtgagagtacattctgaatgtctcattggggacatttttggggcaacatgtcaatgtaaaaaccaattaaaacttgcattgaagcaaattgaagcagcaggtaggggtgtcttggtgtatctccgaggaaatgaaggtagaggtattggcttaagccacatggtccgtgctagcccattggaagatgacaagtatgaagaattgcagttacctgttgagtcta

SEQ ID NO: 34874 - DNA, 210 bp, Glycine max
agcttgtaactcttggaaatttctttaaaactagtcacttaaaaaggtgtgacttttgaaaaaatcttcaaaaacaagtcacttgtagaattgtgacttttggaaatgtattttttgaaatcagtcactggtaatcgattaccattaaggggtgatcgattacacatcaacagatgtgactcttctttttgaattttgaaaaataaaaca

SEQ ID NO: 34875 - DNA, 385 bp, Glycine max
  unsure (1)..(385): unsure at all n locations
ttntattaaaggaaatggcatcatgcagtttaatgtgaaacaaaccacaaaatacctatatcacctttcacttacctttgttccaatttggtgtgatattgatcactactcaaactgaatctttatttaccctccgatccgcaggatgacaagatgtaaatgcatgcatgcttatgcttaggaagtttaagtgcaacaattaaacaagtgttattatgttcaattttacttaaacgcttatggcaccccattgatggaccaaatggctctggattcaagatcgagagtgtgtactctaaagaagtaaaaagacacaacacaagaagttgaaatgcaaatcatcaatccaaatgtttattaatgttgaaatgcaaaggattggaaa

SEQ ID NO: 34876 - DNA, 350 bp, Glycine max
agctttcagctcaattataatgagattcccccaaaaaaagaaagacaaaatcacttgcgtgtttggttttgccttaccttacgtgcataaaaagcataaaaaaatggggcacggatcctctttctgcataaacgtgagaatctgacgtgtgtaacctttgaagtgacataaaccaaaacattctgtttggatttatgtttaattgcctaaaattatattaaaataataactaacatgataaaagttcgcttgattagttataaattaaacaattgattttgaatttaaaattaattctagttgagataacttaaacttcattattagataaaaaataataattcaatatc

SEQ ID NO: 34877 - DNA, 387 bp, Glycine max
  unsure (1)..(387): unsure at all n locations
ttacaattgacacanggttttgattcttttatacaaaatcaaattgcaattgctttggatcattgaggtattgaggtgtcgggtgtaattaaggtaaaccttaaaagcatcattgtaatttactcttttttctattaaattacaagaagggaaatttcgtgtatggttcgaaacattttctttggataagtcaaacctcaagtaatgaagttaaaggctgcattaactagctagccaagctcattcgcttattgaggttccgataagttcaaatgtaagatcgatttgatccaaactcttagaacaatttaaaccccaattcactctgaggttcacaaacagtgcanatacatgttcctttttggatagctgcgagcgagagagtgc

SEQ ID NO: 34878 - DNA, 350 bp, Glycine max
agctttatgtctgtgattccttccccagtgatcacatggtattctgaggcgtttgctaccttgtacatctttatgcttaattctgccgcagtgataaaaagctacaccaattagccgcgatatacagatatagatatatgaattcatttatgctcatttcttacaaataaaatataaaatgctactaagtttaagaggcatagacggccagttttgttttcaatttctataaacttgtaaataattttatttatttaattattaaataaatatttttaattttacttgttattggttttatttaagatgttgtatattctttattattttatttaacgtgttatatattt

SEQ ID NO: 34879 - DNA, 381 bp, Glycine max
tttctattggattcgtcatatcttcatctattgttaaatcatctgtgccaacttcagaattatcgtcccgtccaattcttggtgttcctaggtcagatggctcatatgcagtatcactaccataatctgaggcaacagaggaactgccagcaactaatgataagctcgactggagaggtgattgcacagaataaactgtgttgctggaatctgggtctgtttcagaattctgctggtttgcatcttggaatgctaggaaggattaaatgaggtataaaatatcaaaatttgggaaagctaacaatcaattatcataaaacagaccacactgacattgaggaaactaaatacaagttgcaaaagataatcacatacaagatc

SEQ ID NO: 34880 - DNA, 360 bp, Glycine max
agcttatccttatggcctgcctccggacttcacccctcgtgccaccccgaaagatttaagccaagcccctacttccgaggggcaactaccaccctatgaacactatcccgggcaagacgatggggaaggagatacccatcttgcccccctgctccacctcaaagatccgtctgcgcatgaactacccaacccgaacatagtccgtcataccccggtctcacccacacccgtaaaagaatctgttccctttgcgaaagataagggaaagattgacgcgcttgaagagaggttgagagcagtcgagggcctcggcaattacccattctcggatttagcggatttatgtctcgtgcccaacat

SEQ ID NO: 34881 - DNA, 332 bp, Glycine max
gccatcttaacccacaacacactacttaggagattcgatgcgatgaatggagggatgcttttgtaacttaccttccttttccatccattctgcaaatctacaaaactgagtcccccattgatcgatataattcttgtacgaacatttttaacccgtttctaaggctacaaggtgtacttgcacagacccttctagctagcaacgtctacgtgtaacaccatctacatattccaatgagcatcttctatgaatatggaagacttgaacgacattagtaggcttgctccttattgctctggccatatataacgatctatatactgaacgctatg

SEQ ID NO: 34882 - DNA, 168 bp, Glycine max
aataggatagttgaagttacggatcaagttgatccgtaagaagcatgcggatcaacactattatgcttgcggatcaaggagatccgcgtgaagcttttttaattttaaaaaggttgaattaggttatcataatgagaaatggcttttaatatgggattagggtgactt

SEQ ID NO: 34883 - DNA, 361 bp, Glycine max
tgctacacaaataacccgtgtttgtgtcaatctcctgtgattgagtgtaggaacaaggaagtaggaaccattagcctaggtgacatctggtaaataaccagattgagatagtttggtgtggccatgactatagttctaatagcagccatgatattaaaagtccctttttgtcaacctaaattcagtttagttaaaaaaaattcagttcccttctccctaatattgatctcatgtttcccacttttttctccatctctcttcattatctgattttatttaaatgattcaactctctccataacctgtcctgacatgttggaattttctttaacctagttagattggagacgaggaatatcaa

SEQ ID NO: 34884 - DNA, 82 bp, Glycine max
agcttggctactttcttgatgctttctaaatgctgcttgctagctgtctcagcagcttgagtgctaaaatccctttcaatgg

SEQ ID NO: 34885 - DNA, 361 bp, Glycine max
ggaagtgtgaggattgaaaaatatagcgtacaagagaggacatatcaattcttctcatggctaacactatgggtatgaagaggatgagggaggaacgacaggcatctggagagaaaaattccttccagacctggaggtgaacaaatagaggaacgtacttacgtagtgcatgtgaagatccctactttcaatgggacttatgatccattggtctatcttgcttgggcgctgatggcaccacatttcttggtcgcttcgccctcgatgcagaatcgaaaatcagatctctctccctataattagacgcatctcctttagtggggaggcataacatgaatccagatgtttgatagggtgaaat

SEQ ID NO: 34886 - DNA, 298 bp, Glycine max
agctttaaccgaaacactaattaagttaccaactcaattgcatgctagtcaaccgttaccttcatttgttttgcaggttacaggttgcacactttgtggtggagctcatgggccaagcttgtgtattcccactgaagaaacattttatgaagttaattacatgggaaaccagcctagacaaaactttaatgtaattggattttctggatttcaacatggccaaccttaccagcagcataatcaatggaaaactcacccctagtatcagttcaataaagaccagggtgggccacctaat

SEQ ID NO: 34887 - DNA, 363 bp, Glycine max
tggcttgaaggtagatatattttattagtatgatccatgtggacctatttgggaagattgttctgtagctagttagttgagatcttatagatgaatgttagtgtgcaatacttactatactgttttgggtagtgcatgtatattacgtaaagtttatattgctattaattaattgacatcgcacatgttatacttttgctatggaatgattgtgaaaattatatgagtcaacgtatatgtatatgggtggtgggttgtaacattactatgagacgatatcatgatatgtgaacgctactaaaaatagttgttttacgacacactatgcccatgggccctcctataccaatgtcgttttataat

SEQ ID NO: 34888 - DNA, 265 bp, Glycine max
agcttgttaatgcacccacattgtatgcagaataacgatctttactgaagactttgttgatcaaaggattgacgtaacaattatgaacaaagtcactgctgccagcactcacatatgtagagtgcattattaaaaatcaatgctgcttgttttactgccaactaccttggccagcttgcattgggattccttgtaatatattaactgacgagacaatggaatcgcatgctgcaaaagaaaaacacagtttaaaaaaccattaatt

SEQ ID NO: 34889 - DNA, 352 bp, Glycine max
tattcaatcacttatgtttattcttggaattctgaatatgcacttgcaaatgtccaacaatgtcggagagatccgcaactaggttatattgcctacagtgctcattcacacccgggatttcttgcaccttaggagctgacaacagcaagggatataagttatatcatacgagctctgcatatattttagtggatatggatatgcgggttcttgtaacaatactctcggtcttggattactgctgaaacaatgcactgacctgggtacatactacaataaattttttaaacactaaatcaagggtcctaaaatagaccaatcaacggtggaagaaacatttatcttattttgc

SEQ ID NO: 34890 - DNA, 342 bp, Glycine max
agctttcatttttctgggcgttgaggcttcagcgtgggccgtgggacccagatgtgttgcggttaccagaagggttcgaggagcggaccaaagcgcttggagttgtgtgcaccacttgggcgccgcagttgaagattttggggcacatggcggttggtggcttcttgactcactcgggttggacctctgtggtggaggctattctgaatgagaagccgttggttctgttaacgtttttgtcagaccaaggaataaatgcgagagtattggaagagaaaaaaatgggctattctgtgcccagaaatgaaagagatggattgttcacgagtgactcggtagctg

SEQ ID NO: 34891 - DNA, 371 bp, Glycine max
  unsure (1)..(371): unsure at all n locations
ntgtagcatagggactaaggtttgcgagtgttggacatctggtcctatggttgctgactgaggagctgggatggatgatgaagggatgtcattggttctagtcctttttcttgatgccatctacaactaaaaagaactcaaaacttcttagaccaaatttattcaagttcaaagactgaaaaagtaaacttaaaaagacattatatgcttagcgagacacagttcacttagctggccttcacaaaacacactacgcttagcgacatgtgaggctgcttagcagaagttgcagaaattcagcttctgcataattggcttagctgacaagttcccgctaagcctagcgtctgccgcaaggatatgcgctcaac

SEQ ID NO: 34892 - DNA, 331 bp, Glycine max
agcttatgcgcatacttctttacgaacgttcacttgcacaagacattctcataactaagaaaaatgcacccatgtacaatcaaggcaccttcgttacctagattatttatatgtacttccaaggtgtatttgttacctacatctcatgcacttccttggctaaatttacatacatgcgtactcacagcatttggggtaccaaaaattgcacatgtgcacattccggtatttctaatacttatgcatatacaaactttgtgatgaatcttggctatctacacaagaaggtgatacatttcatgctttactcaagtgtttttgctacctaaag

SEQ ID NO: 34893 - DNA, 294 bp, Glycine max
  unsure (1)..(294): unsure at all n locations
tgtgggctgctgttctcgtagttcccgtgagcttgggggtttttgagggggaagagttttttttgggtgaataaaacgttccccctccacccctttatattttcgtacaggggttgctctcccaaccgagctagcctgcaccctgaacttattcttaaccacttgtangcgtgcattaaccacgtctcccgcctgctcttggttactgttctgccggacttgagcctacttctcacttaatattgtggctttgcgaaccaaattatcacttgtgtcctagcatccggctactca

SEQ ID NO: 34894 - DNA, 321 bp, Glycine max
agcttgtccatccacgatgtttccaatagaaaggtccacccctaaccatttgctcacacgaacatgaaattggacatcaccataatcaaatccatgtgtcccacactcaaagataagcttacaaaataattataattaaaacaatttaagaaacatcaattaactatgacataaactctatcatctttagatcatggtatttgaaagtaaataaaaccaataacatccagctcacataagccaaacatctcatattcaactatcatgaaacaattcaagaatcaacatcatgcatcaactatcaagcattatcaacatgag

SEQ ID NO: 34895 - DNA, 340 bp, Glycine max
tctgcagaaccttatccggagcattctttctcaaatcaaaaacctggtacacaaatcaaattgtcttgccatcaaacaggttgtcccaccttataaaaacaaattcaaataatgtgccccacttgcataaaaaaagacaaaaaacaaacaggaaaaaaacattatacctggtttttgttaagaagtgtactataggaaacaagaagctcccctccaagctggccaccacttttggtgtttatgaaagaatcactgaacaagcaggtacatgcgaaacactattcacctcagatcccggcactaatatgtaatcaggaatacagaactccctcatatcata

SEQ ID NO: 34896 - DNA, 356 bp, Glycine max
agcttcaagaatcaagtttcatagattcaagattcaaagaatcaagattgaagaataatcaagatcaagattcaagactcaagattcaagaatcaagagaagactcaatcaagataagtactaaaaaagtttttcaaaacattgagtagcacaagaatttttcacaaaatcttttaccaaagagttttactctctggtaatcgattaccaatagccaacattgttttcaaaactgatttacaaagctgtaatcgattaccataatcatgtaatcgattaccaatgttttaaaacattagatttcaaatttcaagagtcacaactagtgataaaacatgttttaaatcattttaaac

SEQ ID NO: 34897 - DNA, 385 bp, Glycine max
tgagttcgttgttgttgccccataaagcctctcagaacttgtttcgaccccattctttttttcgggccctcttcgtttctcgttccaatgcttcaaccgtggccacattgacatccctcagctcatcacattccttcctgaccctgatggctgtcgtcttgaacttttccttgaccacttgtgtcctttcaagtttcactttcaaggcttgcacgtctttgctttcctcagggactttagcctcttcctcacttgaaactttagctttgggagccaagttatctcttgtgtcctagctttcagctacttatgatagccgctgatgatctcattgttgcttcctttgagctccttatcctttctttgcaccatgttccatgccttt

SEQ ID NO: 34898 - DNA, 359 bp, Glycine max
agcttggagccatagtctccacaccccatttaaaaatgaaattccctaccctgaccgaggagattgtaaccattaaggtagaccaaatgcaagcacaataatgctatgcagaacgcctgaaggtagcaccatatccttccaccagggagcctagcaagcctcacccaaaagcggctgaaggcactcaagtcataagtgtggacagagggcttccaatctgagccctcaccgtctaacaagcaagcctagacaatgaatttgacataaatctgtgagatgacacctatgacagaggcctaaaacccatcgaagacctcattaaattgcagctcggaactaaacccgagcagtgtatgcag

SEQ ID NO: 34899 - DNA, 386 bp, Glycine max
tgaagacaagactatacgaggtatcttccttgggtatatcaatatctctaagggctaccatgtttacaacttgcaaactaagaaactcgtcatcagtcaagatgttgaagttgatgagtacgcttcttggaattgggatgaagaaaaattggagaagaacgttcttatacccgcttaactacctcaagaagaagctgaggaagaagaccgaggtgaaccaccttcacctccaccacaacaacaagatcaagaactatcatcaccagagtctactccaagacgagtaagatctttggtggacatatatgaaacctgtaacttggccatacttgaacctggaagctttgaagaagcgtcaaagcaggaagtatgggtcaaggcaatgg

SEQ ID NO: 34900 - DNA, 305 bp, Glycine max
agctttgatgcaacatttggataggttaatgaaacatcgagatgatgcgctccatgagaggttggatcaaatggagaatacagatcataatgaagaagaaaggaggagaagagggaatgatggtgttcctaaacaaaaccgaattgatggcattaaactcaacattcctccatttaaaggaaagaatgatccggatgcctacttggagtgggagatgaaaatagagcatgtcttctcatgcaacaactatgaggaggaccaaaaggtgaagcttgccgcctcggagatctccgactatgctcttg

SEQ ID NO: 34901 - DNA, 382 bp, Glycine max
tgtgtattgctgcattcgactaagatatggaattgcccactgttctgtctgagaataacaattgcttgaccacaacaacgctggaggcggcaacggacaatggtctttcaaataaacctgttgaacatgaacaaacattatatcatgcgctgaccgtgccaaacgaaccagcgaagtcattgcataatggttacactaactatattcaatgtacctaaacaaaatgatttccaaacacgtgaccgacacatatgatgcggtgccagaatagacaggtggtggttgacttataagagggaaaaatgtcatgctgtgttgatgggacaacgatacaaggattacgttataccgtgaaacaatcacatatcccatgtctgttata

SEQ ID NO: 34902 - DNA, 354 bp, Glycine max
agcttttgaaccttcttttgaatggcaaagtgaatccacttatcaacatcacacacagtacccacatgaaaccaaaatttcaatccttgtagagttgaattcttgagtgaactcaacaattcatcgatccaagttatatatgtttgcctttcagcatcatacatgatctccattgccatctgcaattgccttcctgcagccttcttaatgtctttcataataggtgaaccatcgaattccaaggttccacaaaaaaaggttcataaatttctccattttcttgagaggatgctggtcctagcagcatcatttattggcaatttagataaaatggctacagggatttcatctggt

SEQ ID NO: 34903 - DNA, 386 bp, Glycine max
ttaacactaggtgaacatgattatttatattcacttctatatttctagaaaacttttacaatttaataaaaacctttattgcaaagataaaaaaagggtacacaccactccaaatactcataaatgcagcatcaacataaatctcacttaatgtgctattttgactgcaatgggactcctgacatggtgcttgtgatcagtccacgtcaaccacccgaaaacataatcagtggtgttcttagtttgcggcttcaaggtcaagtaactctcaactcctttctttcaccctttttcttgaacctcagtttcctaggctcgaccgtaactacaacttgtggtggtgccttgatgtgcactctatacgttcttggagacccaacattggt

SEQ ID NO: 34904 - DNA, 363 bp, Glycine max
agcttgaacactttaccaacacatatcaatgaagtacccaaagtatatcgatatacgagaaacaaattgaattatggatgcttcataagtttgggtacactactatatatcttatctaactttaacaacttttttattgtttaatacttaataaaaaatattatcaaaagtcttttgatcaaattcaaaaaatgttgttaaattataaataaatgttactgatattttttttaatattttatcaaatattatatataatctgttactaaaatttaaaaatatcaaaaaaaatttaacaacataagatatatgaaacatttcataaatatcacaaaaatatattaataacatttattcataatt

SEQ ID NO: 34905 - DNA, 385 bp, Glycine max
  unsure (1)..(385): unsure at all n locations
tgatgtttgtattgaatgcattaaaggtttacagaccataagcaagaaattaggtacatatagagctacatacgtcttggaattgatacatacgaacatttgtgggccatttcatacaccttcatggaatggtcaacaatattttatatcattcatagacgattactccagatatgcatacttgtttnttatacatgaaaagtcccaatctttggatgtgttcaaaagatttaaagtttaagttgaaaatcaactcaacaaagaataaagtgtgttagatctgattgtgatggtgaatactatggtagatatgacggttcaggtgaataacgtccggggccttttgccaggtacctaaaggaatatggaatttgcccactgtaca

SEQ ID NO: 34906 - DNA, 435 bp, Glycine max
  unsure (1)..(435): unsure at all n locations
agtgnanacatggattgaagccccttnngaannggcattcgaggccattcgatgatngccgaccacgtgatccgtctgagtccttctgcaagcatgcaagcttttattcgtgaaatcatttactcccgattgcctaataatccactaacggggtggaagaggtgccatgttctaaacatgatcaaactcaatctgcatagaatcataatgcgccatattataatgctgcaaatcacgatagttcttaacaccaatttctgagatgcgcattttactctttggtggaatgctcggatgaccaaaagggttataagatgcctaactaatcttgaaatgtccaatctattctcagattgaggagcgtttttaatggattgataaacttttacacactttcagtatgcacatctgatgcctcgccatttaaaaatgggc

SEQ ID NO: 34907 - DNA, 342 bp, Glycine max
atactatgtgaactatagaatgctacctaccatacaggtaccaaacttgtgcggctccggacaagctatggcgaaaaatgtgtactactagcttctcatcactcgagtgctcgcccatcatgcgacaatacatcttgacacggttcttgggacaagtcgaccctttatacttgacgaagtccggcaccttgaattatggggggataacaacatctggtaccaagcacagatccatcatgtcctcagaatggatagtcacccaagcacttaacaaccctaatctctccttgaggagatagaatttacatctttcttgggtctacgggggtggtgcttctgggg

SEQ ID NO: 34908 - DNA, 233 bp, Glycine max
agcttggaggggttgatgggttcccggtgctgataggaattaggagaagggctacgtacgtgtgcatgatctcaatttaaaggtgggcaactggggatggtgtacttatgcctgagcttgtggaaatgggatatttgtttctcgccattacccgatcgccatctagtaccacatatgactggtgccccataatccattaagccatgtgtgagaaagcccgaaagagtcagtct

SEQ ID NO: 34909 - DNA, 391 bp, Glycine max
ggacactatgaatctcagcttttaagcgcgggtcggagggacgaaggtcaagtggtctcgatatacgcagatggtgttccgggtacattggatttggtacgaccatgccctcctgatttccagctgggaaattggcgagtggaagaacgtcccggcatttacgcgacgagcataatgtaaacctttacggttttaaaagctctatagttgggcctaggctttagagtttttcttttgttaaggctttgtgtcttttgtttttgaatttatatacaaggatctttcttcatctgttcctacgtctctacccattcttatccatttgcatgtttacttctttatttctgaaacggcagatccgatgacgagtcccccgaaggtactaatacct

SEQ ID NO: 34910 - DNA, 335 bp, Glycine max
agcttatgcgcatacttccttacaaatgttctcttgcacaagacattctattaaccgaaaaatgcacccatatacaatcaaggcagcttcgttacctagattatttacacgtacctccaaggtgtatttgttacttacatcacacacatctccttggctaaactcacatacatgcatactcaagcattttggggcaccaaaaattgcacatgtgcacatcttggcatttctaatacctacatacgcaaacttcatgatgaatcttgactatctacacaataaggtgctacatttcatgctcttttaagtttttgctacctaaagccgcatgcaaa

SEQ ID NO: 34911 - DNA, 277 bp, Glycine max
gtgcataccgcaaggatcctttatgaaatttcttgtgaaagagagccacgagggtgggctcatgggccactttgggatagacaagatgcttgtcttactcaaagaaaatttttattggccccatatgaataaagatgtccatatgcattgcactaagtgtgatgcttgttttcaagcgatgtttgaggtgatgcctcatgggctatacacacacttacccattcgctctgcaccttgggtggacattagtatggtaacttccatgggctttctatac

SEQ ID NO: 34912 - DNA, 287 bp, Glycine max
cctgcggcatgcaagctttcatcactatgtctttatgtgtcccgacttctcgcttttagtatagggaaattcctcatccttcttctatttcatttgctgagaagtcccttccgcataacccttagacctcttccttatcttattctgataggtcgaagtcaagtgagcactttcagatctatcttcttgcagcctctccttcttttgcgcacagtgagatttaagctcattgagggaccattttttcttctgagagtttgatgggccatctttttctcctatatatg

SEQ ID NO: 34913 - DNA, 299 bp, Glycine max
ggatgcttgaacggttatctttgctagtagttgatcatgtgaacttttgcagatctccattgagcccatattgctattgtcctttgtggggacacaccgctctatttccgcttgatcgcgtggtctccatatatttcacatagggggctataattactgctatctgactcctgacatggtgctagttatccttcctcggctaccactctgatgcataatcaatggtgattttaatttacggttatccggtcatataactctaatctacttgctcacacccttattcttgaacctggatt

SEQ ID NO: 34914 - DNA, 195 bp, Glycine max
agctttttgaaattgccatgtttggatgagttagacatacccattctgttttagggttttgtgatgatgtttatatgctgaaattgcctatggaaactgttacagatgaagggtatagttcacctatggttataaagtgaaaatgtggagttgtgagcggaaaaaaaattatgcttttagagtttaaaagctcat

SEQ ID NO: 34915 - DNA, 353 bp, Glycine max
taggagatatgtacatcaattggttatcctctatgctatgacaaaaagcatacagcataattctcttttggtgtacgtctatttattaagtaagatcattttgtatgcataattaagctaactattttttactactccaggacttattatatggatatgtacctattagttatttattttagcaggcctacacactagatatgttcctattaataaataaatatcgtcccgtggatgtacttgtttaataagataaatattgtcctggttgcataaaatattataaaatggatcataatctgagttcacgccatgctcatatacaattcttgaataatctaatttaccactaa

SEQ ID NO: 34916 - DNA, 325 bp, Glycine max
agcttgcaacatttcttcctataacattacatgccataaaactattgaccataataagaatacatagcattagtttaagtaaaacaaaaaaggaacacaacaagttactatcttcgtttgtgaatgaaaaaaaaaaaagaaaaaaaattgtctggcaaaaatatgtataatatagcatctattaggtgccttccaaaaataaaaacatagcatctattttggttcgacttttgttgaaagtgtgtaccccccgctgtagtcaaaggcactactactactatcattagcattgtccttcttagtgaaagtacaatcaatgtaggga

SEQ ID NO: 34917 - DNA, 232 bp, Glycine max
tgtgctaaaggaagtaagacatgtgcctgatatgcatttaaaccttatctcaacaggaaagctagatgaagctaggatgacaaaccagttcagtgccgaaagatggaatcatagtagagaaagcatggtcattgctcgaggtaaaaaggaaggctccttgtacatcatgcagggaaagatatgcaaatgggagatgaatgttgttcaagatacaaccaaggaattgtggcac

SEQ ID NO: 34918 - DNA, 336 bp, Glycine max
agcttgcaatggaagacattgtatatatgttgatgaattttccattcactaacacaaatttgtttaatttgtacgctcaaatctattagctcatgagttcaatttgaaatatgaaatttctattttacatcttttatttggcattatgtaaccttgtccagcacatcacaattttttctttgatttctcttcgccatagattagacctgttttatatagttctactttgctgtagttaaaatcaagattaaagttgcgtaagccatcaatgaagttaaaaattgcaactgaaatatcgaacacatgattttaacaaaacagtgatagcttcaaaat

SEQ ID NO: 34919 - DNA, 378 bp, Glycine max
tgagatgaggaagtgttgaagggtgaaacttcctgcttttattgttgtctcacagagtggtacctggagatatgtcgcgggggtcaggagaccttggggacgtcaggtggggtgctattgcccaaaaccaagcttgaccaatcccgacccaacccgggcatagtcggtcagtgagaacatgtgacgtacctaagcaggcgagctcctggcagtcaacagataaaaggaaaacaagaccacatagcaaggaggcttgtggggctggccagctgtgaattttgtgtaatatgtggattgtggcctctggtaatcgattaccaagggtgggtaatcgattacaaggcttaaaattgaagacaggcggctaagatggtctct

SEQ ID NO: 34920 - DNA, 353 bp, Glycine max
agcttgtgatgtgtgctgcactttgcatttcaggagtacatgaaatgcaaagcaatttactagtaatttctattgaaattgtagttataggagggtaggtatttgtttggtgttgacatttatcattgagctcaataatcataacaagaaatttttggtgaataagtgatacatgtttcaacgttttgttgtcatttggtatggaaatggtggatgacctgtatctaccataccattggcctactgaaatacagtacttgttttaatcaatgggctgctgatggaaaatgagaaagatttttcttgaacattggcttaaaaccaaagttgtgtgtctgaaaagtgctgttcca

SEQ ID NO: 34921 - DNA, 310 bp, Glycine max
ataaatctaagctctaccttaaacaacactaccgttatatgatttaatatttgattcaccacttgctctattcattgtctcacttaacatcaccattaagctcatatgaatttttaataagatccattttgcttggcttaattgaccgtcgtgaaaaatagacgagtttgaagatatgattgtaactacaactatctgtttaatctcaaatacaactcttacacctccgaataatatgtattctaagagattgattaataatagccatctcactctattgggttaccacccatctacctctgaatacatt

SEQ ID NO: 34922 - DNA, 354 bp, Glycine max
agcttaagaaaatccatccttttttatatacaaagtacttgtgagacattagaacttcattgtaaatttactcactgagtgttgtaaagaatctttgattctgtatcaaacttttgtatgtgaaagtcaggagtggattagtaacaaaacaatacttgagtattcctaaattcaaggggaatctaagggttgtgtcagtagtggcttgagaatacttgtaagctagaagtggcttgaaagaatacttgttgtaatcaaatttgattagtagaatcctttacttgttagtaaaggagaattggacgtaacttaagttgagtgaaccagtataaaaataagtgtttctactactct

SEQ ID NO: 34923 - DNA, 383 bp, Glycine max
  unsure (1)..(383): unsure at all n locations
ttntctacaaccttttctccccctttggcttcatcaaaaagccaaagatctcgggaatcaacacagatataacaatggagtagagagatataacaatggagtataaggcataaccatccaaactcacaaacaagaaataatcaaaccataatccaaataaatcaaaacgtcaaaaaccacataatgtcaaagcataaaaggctgaaatccaaattccacaagataaataaagtacttaacataagaatntaaactctaagaactgaataaccaaaatacatggcttataaaagacatataactagaaactaaagtctaaaaacgcggaggtggtggtggaagatctaaactcttacgaatgtatccgacatcctcttcaagct

SEQ ID NO: 34924 - DNA, 350 bp, Glycine max
agcttcttatgactgactgacccaaagaagatgattgagaaacgggacaatgtctgcatgatctagtccttcagggccttcagaagaattatgagtcagtttgaagccaaattctcactacgcttgatattccttcaactgaaaatctcatcacctgtctcttacgtttccatagctcaaaaggttcaggaatgaatggatctcaagctggtcaagaatcttctgcttttatttctaattctgcaggtcatggaggatgaggttgcagttgggggtggtagaggaggtcatggtgcaagtcaccctcagtgcacctattgtaaacgatttgggcattcatacttaagact

SEQ ID NO: 34925 - DNA, 388 bp, Glycine max
tctgcatgtctagagagttcaagagagagatatggacaatgttcaagagagtttgagagattttgttgtgtgaagatctgcagataccagagcttgaaaaggaagtcgttctgagagcttgagatgagtttgtgagtgattgtgaggtcttagaggtggaggagacattcccactacttttatttctgcaatctttcatctttctcttctctttgttgtaaaggaagcttcccagttatggaaagctaaatcctctgttggacttccttgtaggtacttgatgtaaatatcttattatctatctaatgatgttttgtgtgttctctttgctatcagtattttattctagtatgcttttaccttgatcatgtagatgcatgctttgtta

SEQ ID NO: 34926 - DNA, 355 bp, Glycine max
agcttgagtattggctgctgcgccgagtgcaagactacgagttgtgttaggcttgggagcaagactgcgaggtcactaaccatagaacttagacaccgctttttgtccaaacaatatataaactcagtattaaggacattagacctcactcattcaaacaagcggcttatatcaccttcgtgtgttatatatacagcatttttggaaacgcattatattctacgcgatatattgaaaatttaggcattgttccaatagaattcaattcattaaaacacacccagtataatttttttttacatcatataatcataaaatgcagaataaaatgcagtgtttgattaactttcacatg

SEQ ID NO: 34927 - DNA, 156 bp, Glycine max
  unsure (1)..(156): unsure at all n locations
aagcttgcngaagctggcactttctttntcacctcatctagaatgaaggggttgagtcgtcgctgtggctgtctaactggattaagtgcatnctctaaaactatcctattcatgcatgtatatgggctaatnccggtaatttnttntaaagtccaa

SEQ ID NO: 34928 - DNA, 324 bp, Glycine max
  unsure (1)..(324): unsure at all n locations
agcttattgaaataaagctattaagagcttattttcacaagcatctctaggaaccttatttaagttaaaaagagctataataggaaggtcataagccactttcacacgagccctaaataacttcatccaaatgctcccaaattatatggtaaacttgcatgctgtgattgccttgaagagatagatacaggaagagtgtcgaaaattgcatcaataactattaatatattacatctacacttttatttgggggctgatggttatatttaagaacgttaacatcnttgttacagggacgggggaaacaaaagttatcagcaaggg

SEQ ID NO: 34929 - DNA, 350 bp, Glycine max
tcatgtcagctgtgcacaggttctaactattaactagtcttatttgagcaaactcgtacgtgtataattggcattaatcatgtcattttattttatgcaaaacaatatcaggtagtaagtgaacaaaaacctgtggtaggcctacggttgtacttggaaggcataaaaagtgatagacttgcaatacatgtacaccacctttcaagcctcccaaacactatgatctactcttcaggcacatcttcgtggcgagatctgatgacaatgaatccagtgacatctttctggaacctataaggtggaagggatttgcaaacgtgtgcactgcagtggtcaaacatgaccctacc

SEQ ID NO: 34930 - DNA, 340 bp, Glycine max
agcttctggtgggacatcttgacttgctttccaatctgacattcaccacagattctgccttcttctattttcagattggggatgcctctaacagcacctttgtcaatgattttcttcatgcctcttaagtgcagatgtccaaatctttgatgccatattctgacttcatcttctttggaggatagacatgtggaggagtagctggtttcttggggtgtccataagtaacaattgtcctttgatctgctgcccttcattagaacttcactcttctcatttgtcaccaagcattctgactttgtgaagtttacattgaatccttcatcacacagctgactga

SEQ ID NO: 34931 - DNA, 377 bp, Glycine max
cttgatgcaacatttggagaggttaatgaatcaacgagatgatgcgctccatgagaggttggatcaaatggagaatagagatcataatgaagaagaaaggaggagaagatggaatgatggtgttcctagacaaaaccgaattgatggtattaaactcaacattcctccatttaaaggaaagaatgatccggaggcctacttggagtgggagatgaaaatagagcttgttttctcatgcaacaactatgaggagaccagaaggtgaagcttgctgccacggagttttccgactatgctcttgtgtggtggaacaagctacaaaaagagagagcaagaaatgaagagccaatggttgatacatggacggagatgaaaaa

SEQ ID NO: 34932 - DNA, 343 bp, Glycine max
agcttgcatgatttacattctccccgtttctcaagcaaattcttcttgatatcatcaaaatcttcatgatttacagtgcgtgatgacatgatgcagatgcgaaaaagggtaacaaggagatgtacacatcatgtcaatatccacaaataatcatacaacaaaggtgtacatgacatttaagttatatgcatggtagtgtttaaaaggcatgtagcgtgttcgcttcgtgcccctattttaggtccctaaatgggaggaactaaaaaagcttttagtgataattcccaaggtggtcatatctcttttgatggtttctagagttatcatccccttcgacaaacat

SEQ ID NO: 34933 - DNA, 338 bp, Glycine max
tgatagatcggtctgtggattcatttaatatataataataaattgatatactcactacacatgtatatgtaatttaatattttgataagtgaataatcgcatcataaataaaaaaaatcttgaaaatgaaaaactaattattattcaaaactaatactctgaattttctgcttgatgtatttaaaattagacctgatgtcctttttaacatgtcggcttattaatgtttggttaaaaatataatcagtggggtatgtaatatctataaatcttaatataaaatacgttaatctgtgaagttagactttttaaagcatgagatcagatttaagaaaaaa

SEQ ID NO: 34934 - DNA, 334 bp, Glycine max
agcttttcgattcattctatgtgcccgtagtggcccacattgtgtttcgtgcatttttattctcgttttgtttactttttataccccctcttgacgtgcttaagccgttttacttaagtcgtttctcgcttaacttaaaaataaaataaatttccaccgaacgtttgaattgtattatccattaacttcggttaaaataaattccgaccgttcggtcgtgccgtaaccacgttggaaataaaaaaaagaggtaaaaaataatataataatcaaaaaatatctttttagtaaaataaagcggaaaatcaatcggacgttttctctttgggatttc

SEQ ID NO: 34935 - DNA, 379 bp, Glycine max
tcaccttctggtcctcctcataggtgttgtatgagaaaacatgctctattttcatctcccactccaagtaggcctctggatcattctttcctttaaatggaggaatgttgagtttaataccatcaattcggttttgtctaggaacaccatcattccctcttctcctcctttcttcttcattatgatctctattctccatttgatccaacctctcatggagcgcatcatctcgttgtttcattaacctctccaatgttgcatcaaagcttgcatttggaattgcgaaagccccactccatcattaggattagtacctgacatctcaaacaaacaaatcaaacgtaacaagacaattatagttgctgtttgaatacctcac

SEQ ID NO: 34936 - DNA, 249 bp, Glycine max
acacctgcggcatgcatcttgtgtttgagaatgttattctgtaatacgcaacattttccttggtatgaacactacactttataaagatgtgtgcttgaaagctttacccttgcttactgagtataaataggccattcgacgaggggagattcatgccaactcactcgctgtgaatgcatttcctctaatacctggttaatgctcctaccggattgaaatctttctcttcacaaacccccttaaaacttt

SEQ ID NO: 34937 - DNA, 144 bp, Glycine max
atcttgaatctagaggaacatctcgaaaatgattgggcctctacatgcctaatacactggagaggcatttgacagcgcgttagccagtgagttgcatcataccacatatcatattaggtctccaatctttcataccatatttag

SEQ ID NO: 34938 - DNA, 361 bp, Glycine max
tttgagttatgtagttgggttctaagagttcaaataaagaatttcaaggagtgggtagaaccgcctactccttagagaaaattgttgaggagaaaataagtgactctaaattttctccagaatctcaaaaagaatggctgagtaaggaaaatagagtacaaaatggaggaaaatgtgaaaggtatataaacgaacagggtgtggcaaggaagaaacttgagaacgttggggtgggggtgcctgcgtttttaattttttttcccaataaaatggttcatttcaatccgattgttctctgtatttgagtttctgttgctaaatcaatcaaatttgtactttaagtacaattctaaatatatag

SEQ ID NO: 34939 - DNA, 325 bp, Glycine max
tatcttctcaagccctaatggttcgagaagtcattttcattggtggttcctcctcggtggatacttgtcgtagtgcctctgatagcgaatcctattcctcaaagaggttgagggcttcgcaccatattggtagaggaacctcccacctctacggagggtgcggcctttcgttgcttccctggtcagggagtctatctcgatcatggtgattctccctccttctactccaaagggagtaaggacaagcgatggggatgttagggcatctccccgcgtgcgacgtagccatagcattgggtcgccatcgtcccccctgtcgttgctg

SEQ ID NO: 34940 - DNA, 372 bp, Glycine max
  unsure (1)..(372): unsure at all n locations
tgccaggagcttggcttacaggtttgcattattgggttgtttgtgttgagtaggaaacaattcatgtagctgtgttataagggatcttatgatgaataatatccttgagaaaacaatttactgttgtgtggtttatgtaactgaccctatctaatgggataagagtttagctagtgccattgaggcatgtgcaaaacactggatttttttattacattctacaagcgggtcgtgcttatattgccaacaaggaaaaaatgtcaaagtatagctcttggatacagtaccacttcttccgagcacgantagcaaagttctggatgttgtaaacagaggccacatgtcacgggcgattgagtattattccacttt

SEQ ID NO: 34941 - DNA, 287 bp, Glycine max
  unsure (1)..(287): unsure at all n locations
agcttgtaaatcactngcacttgtccaacgctgtattgcttcacccaagacccttcgtcccaataatccttcatcacccacacgtcaaagcgcttctctgttcccctcacagggtaaacaaggaaccctattgaagcatattcttcaaagggtaccaaagttccaaacttttcatctgaaaaatcgcgaatttttggcacccttatcttcctaaaccattctttgaccattataaatgctaaaacaacatcttgtgttgcatcagactcttcaacaaaagccccacc

SEQ ID NO: 34942 - DNA, 240 bp, Glycine max
  unsure (1)..(240): unsure at all n locations
tatcagacacaaacgnactcttctgtattcattctcccacgatgtgtcattcgaaaagaacataccatgaccgaaaagagatctcatgacagcagataatcgtgagatagagacattcatgatagtaaaatgaccttttctgggagtttctgccgcatcgagatcaagaactacagggattggagcttgtggactccttaaatctctacgtttgctaaaacggagagcgttattatcaac

SEQ ID NO: 34943 - DNA, 348 bp, Glycine max
agctttcagacttgagctgattataagcaaaatgattcatagcggaaccataacaatgctactctaccctagctattgtacctatgtgttgcggaggaatatgaaatgacgatttcatgttatgcctgtgttgattttaggagcaatgttttaaaaattgagaaattaaaatcattgaacttgaaaattggaaaatgaaatcgagttagtttttaaaattttcaatttttagaattgaaaatttttggagaacaatttctagcagtttatagctgccaaactaaaaactaaacagaaaagtagtttgaggaacaagattagtcaaactttaattgaggaactaaaaat

SEQ ID NO: 34944 - DNA, 336 bp, Glycine max
acatgctgtgatcttgatctagaataaacagcgatatttatcacaataggtgcggtttcttggggagactttcaaagcttaatacctgtggttaaatgagggggagatcctgatcctgctcctactttgattcgcgtatagcccgaataacacactagagctgtgattattatctcaaaaaacgcacatattttcatcgctacgggcgccatatttttggttaatcgctagggcgttcctgatcctatctcttaccttgatgacacaactatggcgggatatgctgctggacatgttggccttagcaatccacacgatctattaacttagccttga

SEQ ID NO: 34945 - DNA, 355 bp, Glycine max
agcttgttcaacgaccggcatttgcaccgatcatgcaagtagtataaaacgataagcaaataccgagtatcgaactctcggggaacttgttttacttggtaaagctgtggtttagtaaatgagtgtcttgggatgaaagtttggtgtgtggtatggacaaatatgtaaactaaactattcaaaagcaaatcatgtgagtagtggtgtgtgatgacagatagacaacatgttgatctttctactgggtgactaatgttattaaggatgttctctacctaacaatgtttacatgttctatgttgtctcctggactactaaaccccgatgtctcatgcatgtttagcctaatcctaat

SEQ ID NO: 34946 - DNA, 358 bp, Glycine max
  unsure (1)..(358): unsure at all n locations
tgtgcatccaataccctgatgaggatgttttatatgttcttaaaactggactgattcatttgcttccaaagtttcatggccttgcaggtgaagacccgcacaaacatttgaaggaatttcatattgtctgctccaccatgaaacccccaaatgtccaagaggatcatatatttctgaaggcttttcctcattctttagagggagtggcaaaggactggttgtattaccttgctccacggtccatcacgagctgggatgaccttaagagagtattcttagaaaaanttttccctgcttccaataccacagccatcaggaaggatatctcaagtattaaacaactcggtggagagagcct

SEQ ID NO: 34947 - DNA, 350 bp, Glycine max
agcttttgatacaaagaagattaagaagttcaaagagattcaaggcttgtaaggattgtaatgaaatgattggaaaagtattaaagattattgaaatgcaaaacaaagccttgcttttatagactcttcatgtctggtcaagaagaccatttagaagagttaaaacttttagaaaaacttaaaatcaatttgaaaaagtcaaaaaccttttgaagagttacatcttttgatttatcagaaacagtcactggtaatcgattaccaaattagtgtaatcgattacacaaggcttttaagtgaaaggatgtgactcttcatatttgaatttgaatttcaacgttcaaggacac

SEQ ID NO: 34948 - DNA, 384 bp, Glycine max
ttaggatcaaactattttttctcgattgttcttcattcttcttcctctttttcacttttgtttttccattttcttggacaaaattttgtgccttttccattggtgatgatcatggaaggctaaacacttcatcaatccaaggatccactccaaccaaggctgaatttgagttctggtttagtatttctaatctttgtcaatgttcatctttctcttcaatcctattttcgattttcatgataatgattatgcttaagattaaaatggattaggttatggattcattttctaaatttgaaatttattcccagattgcttgaatgattttccaacctaatttgcaatctcgaacaatttagggattgattccattgaactatctct

SEQ ID NO: 34949 - DNA, 361 bp, Glycine max
  unsure (1)..(361): unsure at all n locations
agcttaggttattcttcatatatgaataacgaaagttattctccaccagggacctactgtccccaatggacctttctctgccttctaagattatgttccttctcttcacaaacatgcatgtagtactgcacacctttgttgctgtttgcaagccatctcagcatcctttctccaatgaccaccagtgaccaccgtcacctctccccagcgaccaccatgtcggaaatcccgtcatccaaagctgccacacgcgcctccatgcatgcccttcttctggcctgtgacagctttccggtgccgctcactcaccagcaaaccttntccgggccttccttgcctttgatgaacaatactagcccct

SEQ ID NO: 34950 - DNA, 392 bp, Glycine max
taagcttgcgcattgcaaattctgaccattgcccttatgagcctctgggaatagaggtggtccggcatggaaggcgcaattgatcgactagatcctgttggatgaacatgtgggtattgccactgtccaccactaccaccacatggtggccatcgagcaggcccaataaacgcaaagtttctgggggaaaaatgacgttttaaggagtttacacttatttgggtcgggcccgggttaagaggctccacacgatcaaccgggtcaaacgcgggcttgttggcactatatgaggagggggttgtcgccttcgtacatgattatcgtaaaaaccctaaaggctcaatggtggcctatatggtatttctcgctgcagacagaacaaagaccatgct

SEQ ID NO: 34951 - DNA, 147 bp, Glycine max
agctttcactatcacacatgtgatcattagcaacatttagtaaaaagttcctaagatcttttgacaacatttaaaaaatgttgccaaatatgaataaatgttactaatatgtttttgcaacattttatcgaatgttgtatataactc

SEQ ID NO: 34952 - DNA, 376 bp, Glycine max
tgtcactttatcgagtcacttttacagttttaagtctacttcaatgggtgtctttatagaacttgtcctttcttaatacacttaagcgaactcataaataggcattaattgaaaaggcttatgattcgtgtttagaaggtttgtaataattaacgcatcaagggttttggactcaacaaatttcccataacataaaatgttaaaacaattatcatagagacattggagaacattcaccatacaaggatataagcaaatatgaactaatcaaattgaatggtacacatactgaaataataacggactaaacaataaatatctaaacttcatataaccggctaaaattacctgctactacaagtcaattgtggtgatt

SEQ ID NO: 34953 - DNA, 157 bp, Glycine max
cctgcagctgccgctttactagttcatgtttcgtggttgaacagtgatcatgagaatacaccccatctggtaatcaccccactggtcgtaagaactgggaaataactagctagtttttatatgttggggagtttaaagcggtttttgtaagtggaaa

SEQ ID NO: 34954 - DNA, 195 bp, Glycine max
ggaatctggtactgagtacgaacttagttgcaactagtttacaatgcacacgctctatgcttgccatatataacagaagctatcgattatgttattggttaatgcactacttccgcgcattaacgtgagagggttcacgagcccactatttttctgcctagacttattttgaggactcagctttggttcatggtg

SEQ ID NO: 34955 - DNA, 330 bp, Glycine max
agctttttgaaggatcaagatgtgccttatgaatcctcccgtacttatgccaccagtacctggaaggcctctcattttgtacatgacaatcttagacgagtcaatggggtgtatgctggggcaacatgatgaatccggaaagaaagagcgcgctgtttactacctaagtaagaagttcacgacctgtgaaatgaattactccctgctcgaaagaacgtgttatgctctagtatgggcatcccatcgcctaaggcagtacatgctgagccatactacctggttgatatccaagatggacccggttaatacatctttgaaaagccagctctc

SEQ ID NO: 34956 - DNA, 362 bp, Glycine max
ttctcgctcagggatctgttttggcttcttctagaactcaccgcccgaggtcgcagggttgaaaaactcatgttgaacttttgtattgtatctcctcactgctcagagcttggtagctttttccttaatcttgaccatttcttggagttgttaagaagtttctttggtcattgtttggggagaacatatggaggcccatagtatactggggagttcctcttttcataagcccttatacttgttgattctagtcactaagccctgaggatgacaattttggctgcctttgcctactcgtcggtctgaggatgttcgatagaggtgacgaggtgtctaacgccttgcctcgtcgagaagtcctc

SEQ ID NO: 34957 - DNA, 342 bp, Glycine max
agcttatgttaagaaccacattttctttgttaacaaccatcattgcttatgaagaaagctaaaccaatattaacaacttcgattcctatttaacagcaccactggaactcaagtcacaagacttaatttcacaacattcacaagaggtcattgtagatagaggaatatttcaatcacaactaaacacgtgaaaaccttgacacaagcttaaattctcaaaacagagtgcctaaacaaacttattcatatttcagtcaaaacatattttaaagctgaatataaaattaatagccaaatttgaccacccataaaatcttttttcattaacatagccattgaaca

SEQ ID NO: 34958 - DNA, 305 bp, Glycine max
gacctatgaatctaagctgaatcaaaaataaagattttatagttttaaaactttaaacgggttggatgccacaatatgaggaaccatctgaaaggatgacctcttttagtatatatggctttggctagctggctaatgtgtgttgatttggcaacactgtcgcatcgtgcttcaccccatggaagagataatggaggtacaaacaaacgacataatggatatgggaatatgaagatgatgggaatacattaaagaggattaggataggggagatgggaaaaggaactattgttgttaacggggaa

SEQ ID NO: 34959 - DNA, 343 bp, Glycine max
agcttatatttattggagggttaataaaacaatccaaaatcatttgttcctttcaagtaacgaagaattctttttgcggcttttagatgaggagaggtaggagccttcataaagcgacacacaactcccaccgtatatagaatatcgggccttgtattggttagataccttagactccccacaagactcttgaagatcgtggagactaccttctctcctttatcaaactttgataacttcaagccaccttccataggtgtgttcacgggattgcaatcaaacatattaaaattctttcacacttcttttgtggaccctttcttgagagacaaaaataccattc

SEQ ID NO: 34960 - DNA, 290 bp, Glycine max
  unsure (1)..(290): unsure at all n locations
actgttgcagcctcttaactccatataggtcagatatctaggaaaaccaacggatggatggaaccggttgagtcgctcacatctttctccatttagagcaataaagatttatggcctcaccaaaattgggcaccttgattanaattttccccgtttacgacatccaacgtcttaaattgggtatcgggttgtgtagagagccaatagaaggagtcaagattagaaccacacttggatcataattattagttattcaaacgagaattgaataatcaaaaattatttgccta

SEQ ID NO: 34961 - DNA, 307 bp, Glycine max
  unsure (1)..(307): unsure at all n locations
tatatattacccacgcaacgatcccgcgggcacactccactgttgccattatcttttattcgtctgaggagggacttagcagttctctaacacaaaatgcgttgttaacttgtggcagacgtggacttgtttcttacaaacagccaaggaaggatgggcggatgagattgaaacctatgctttatggaatggacatgatctcactgcaggcaacgtgagtaatttacaagcaatatctcggctaggatacatacctcgctacgcacacatgggagaagaacaaaaaatgctatctttcatataaccn

SEQ ID NO: 34962 - DNA, 383 bp, Glycine max
cgacactatggaccactcacgctccgtcggactccatggacgagagcatgctttgtgcccgcgactgggccgaagcctcccgtgggagactgaggtcactatggctaccccctagagctacgataaacttatgacggacagactctctcttgctacccctcttggtctattgttaaagggcgctcgctggaatatcattaatttccgatatccccgctcactaacttagaacacaggtatgggctcacttgaactaaaccccgtcagattgaccctgctagctcgatttggacagcgagggctaacctgaaacgttgcctggcacgagaactcccttcgatgacgacttttaacttggcgagccaatctaaacctcgtatatg

SEQ ID NO: 34963 - DNA, 313 bp, Glycine max
tagcttgtttaccccatgttgtattttcttacaatagagctggtcataacaccactaattgttctccttttgaagttgtttatggttttaacccactaactcctcttgatcttttgcctatgcctaatgtttctgtttttaagcattaagaagggcaagcaaaggcggactatgtgaaaaagcttcatgaaagagtcaaagatcaaattgagaggaaaaataaaagctatgcttaacaagccaacaaagggagaaagaaggttgtcttcgaacccggagattgtgtttgggtgcacatgagataagaaaggtt

SEQ ID NO: 34964 - DNA, 372 bp, Glycine max
tgcgtaatccgtgaaattccgtaatgtggttttaaatcgaaaagaggtgtttttgcacaatccgtgagtttccgtaacttctttgaaagccaaaaaagagtaaatacataatccgtaaagattcgtaaccttgcggaaggaaaataagtatcgttacgatattcgtaaagtttcgtaacgttacggaaaaagaattacaaatgatataaaagggggtgcatttagtaaacagggggtgcaaatagcaccaggcccacttgggccctccagaagattcctccagaaggctgttgcttctggaggaagcaaccttgctcgcctgggcgagctgggcggcaagcttctcccctattttgctataaatagggggag

SEQ ID NO: 34965 - DNA, 352 bp, Glycine max
agcttcctcggggccatttcctgcgaaggcaaacatttggaaagttagttttaccaagaaatgctactcttaaaacaaaaatggcatacaacctcctccaataaacacaaacatcaatgtaaatttagagcaaacttatgcacatacttctttacgaacgttcacttgcacaagacattcttataactaagaaaaatgcacccatgtacaatcaaggcacctttgttacctagattatttatatgtacttccaaggtgtatttgctacctacatcacatgcacttccttggctaaatttacatacatgcatactcaaagcatttggggtacccaaaattgcacatgtgcaca

SEQ ID NO: 34966 - DNA, 385 bp, Glycine max
  unsure (1)..(385): unsure at all n locations
tcttttggaccttgaacaagcaattaacttctctttcagaaccatgctatgtgctcgcgactggtccctttcttcccttcgcaacttgagttcactattgctaccccatagagctccgcgaaatttattccgtccatactcttccttgcgagccctcttggtctcttgttcaagggctcttgcggtaatcgcattctcttcccgtaacccggcacactccttccgaacgtgtgtagcggccaacttgaacttctccttgcaagtttcgcctttcctaactcgcttttgagagcttggacttctttgtcctcttccggtgcttcaaaactcccttcgctgacgactnttaacttggcgagccaatctaaacctcgtatatgaactt

SEQ ID NO: 34967 - DNA, 310 bp, Glycine max
agcttcaagaaaaagatggcctcagcaaattccttatttccagaagggaattctatcaatagacctccaatctttaatggagagggttaccactactggaaaacccgaatgcaaatttttatcgaggcaatagatctaaatatctgggaagccattgaaatagggccttatatacccaccacagtagaaagagtttcaatagatggtagttcatcaagtgaaagcataaccatagaaaaacctagagatagatggtctgaagaggatagaaaacgagtacaatacaacctataagccaaaaacataataa

SEQ ID NO: 34968 - DNA, 381 bp, Glycine max
gcttgttgtttccccaagaactagtttttaactgtattgtagtctctcttttcaatcatggtcttgtatatgcaaaactcaaatctgagatgctcgttaatggatctaaactccgtttcacttgaaccaacataatgttggttgagattcatggtttgaatttatttctagaatgaaaaatttaaaaagaattataaatataaaattaaaacatcgattaattaagatattaaattttattgaaaaaattaaacaagttaggtatacatgaataatatctagaatattaatgattgtttctattactgtacctttataataaatagtcaaagacatctccaaaaaaatgtttttgatgaaaaacaatactactcattaaat

SEQ ID NO: 34969 - DNA, 355 bp, Glycine max
agctcggatttccttttagtttggaatctatccttcctaagatagagccaaacctagtcaccctcattaagaactagctcttttcttcctctattgcctttagttgaatacacctttgtttgattctctatttggttcttaaccctctcatgcatcttctttacaaattctgacctagattccccttctttatgtataaaagaagtgtccagtgggaggggaatgaggtctaacggtgttaggggattgaacccatagacaacctcaaaaggggactgcttggtggttctatgaacccccctgttgtaggcaaattctacatgaggaagatactcatcccaagacttatggttgc

SEQ ID NO: 34970 - DNA, 387 bp, Glycine max
  unsure (1)..(387): unsure at all n locations
tcgacattctctaattnttactatattctgtgtgcctatccatgtttttcgtctctgctgtcatttaattgaaacaaattataaaagatattctagaataaaacaactgattgtcgcatcaccatagttttatcttaaacattacatgctgcagtcatttcatgtttatttcatgcctatttgactgcttatgttttacagaccgtgtaatttccatgttatgttaagcttgattagcatcacagattagccatcttgttgtctggttttttcacattttattcaattatattaacaactttgttagatacttaactcaattctaatcttttgtcctctgcatttagttatttaagcctctatttctttgcaccatcaccaaatata

SEQ ID NO: 34971 - DNA, 358 bp, Glycine max
agcttataagaacaaaattgctttaatcatttccaaatatgcatgtgaattaggacgcatcaacaagaatcaagccaaggctattgtgcaagcaatcaatggggcaaaacacaccaaatgattataatgatggatggctcaaattctcacaaaggtaaaatcatcactttcaaaactatcatgacatgtagagaagaatcaaggatttcaagtcacaaaatgtcaagaacttttattttcaaaacaattacccatttatttcttgaacatatcctataattcaaagaaaaacatgcaaagtcgtgcgtgcacacgaaattgacccaaaatattaaactttaaatccgacgaaactaac

SEQ ID NO: 34972 - DNA, 339 bp, Glycine max
tccaaaagtgtagattccttctaaaaacattttacaagctgtcccctttatatatatagattccttttcagctcgcatggaactttgaataactatatttcatcaaacataatcaccaaagagacattcctaaaacgcacacagaaggtacatatggcataaaacctcagaatctgagctaaatgaatggcaattatattatagatgaatcctctgcaattgacactgattcactgaacaggaaacttaccttcatccctctcacactttccaatgtccacaagccccatggttggcccaatccctcccatagctccagcttcagtgaagtggtgattg

SEQ ID NO: 34973 - DNA, 342 bp, Glycine max
agcttctccaaaaaacagtgttatcagcatattgaataacattcacagaaactttgttcttccccaccagaaaacttctgaagctattttgggaaactgcttctctcatcagccctgtcaatccctcagccactaaatcaaagagaaaaggtgccaaagggtcaccttgtctcaatcctctttgggggttaaattctgaagttgggctgccattaacaagaatagaaatggaagccgaattaatgcaggcccttatccacctaatccatctctctcatggaaccccattctcttcatcatataaatgagaaattgccaagatacagaatcataagccttctc

SEQ ID NO: 34974 - DNA, 382 bp, Glycine max
  unsure (1)..(382): unsure at all n locations
tcttctttgcgtttctgcttcttcttcgatgtacgttttttcttcgcgtttcttcttcttccaccattgttgccggcgatggcggaaaccgctatcggaaagttgttgggctgtttacggatcacttgatccgtaaaagtaacagtttcattttaattgaaaaaataccaaatcaatggtntatttttaatcgtgtttgcttgccttattttgtttttggttgtttcaatattngtgaacttgaacattgtaattactgacatgctccccctttaattanctttttttggttgtttcttggacacattagaaaaaaatcttgtcccggttagcacctaatatccccttttggttgacatacatattagttaggatgctcccc

SEQ ID NO: 34975 - DNA, 310 bp, Glycine max
agcttgcatttgctccacctttgttcactatgcaactggactttcatgcttaaagcacactaacacgtgaattctatcatttttcattatcaaacaacgtgattttatttaacataacattatcatatcacactctttttatcgaacgaaatataccactcaacattcttttaaccacaaaaaatgctacgattatataggctggatccttcgatagctagataccatatttgtacgtgaatgtgtgggatctactactggatactgcggcccccacctttacttttctctccattttttgccttgcatt

SEQ ID NO: 34976 - DNA, 114 bp, Glycine max
actgttacgggagatgaggtctcactcatgggactctgtatcccgactacaggtgctatgttctgtctgggatctgaactacgtggaccttgttccctccataggctcgctggc

SEQ ID NO: 34977 - DNA, 336 bp, Glycine max
agcttgtcattttttcctatatgtgtttaaaatgggttaaattatttatatggtcctctaatttattttttagatttaattggatcttctaattttttttattcaatttgatcctctaatttttaaatcgatttaattcagtttttaagtctaaacgataagaaatcacactttatgatagttcaaaatcgtcactaaatgattttaaactgtcacaaaatacatagtttttacaaaaaaatgaatcaattctaaaaattggaagatcaaattgaactaaaaaaacactagaggaccaaatcgaattgtttttaaaaattagatgaccaaattaaa

SEQ ID NO: 34978 - DNA, 355 bp, Glycine max
  unsure (1)..(355): unsure at all n locations
tgtaccatgaacaaattatgttcatatgttacagctaaaccagcatggcctttggaatcgcaaatgcgttatataagagaaacaattctgttcaatgccatattagattagcagattaagatccgacttgtagcagataggaataactcacctggatctatgaatccctggggaatagatattaaaaatattaaggtaaaggcaaatgtgatagaagacaacatatccaagcggatacacaaccattccatggaccagcaatcatgaactatggccgaaaatatccagaangcagcttcatatgtgcctcctgaaatcttgactgctgacctaagcttctaatagttgaagtacc

SEQ ID NO: 34979 - DNA, 315 bp, Glycine max
tttaatatttccattatgcatgtgaattaagactctttaacaaaattcaagccaatgctattgggcaagcaatcaatggggcaaaacacaccaaatgattataatgatggatggctcaaattctcacaaaggtaaaatcatcacttttcaaaactatcatgacctgtatagaagaatcaacgatttcaagtcacaaaatgtccacaacttttattttcaaaacaatcacctatttatgtcttgaacatatcctataactcttagaaaaacatgcaataacgttcctcacacgaaattgtcccaaaatattaactt

SEQ ID NO: 34980 - DNA, 362 bp, Glycine max
cacccatgaatactctagcttccacattctctaaatattactatatgctgtgtgccatttatgtttatcgactatgctgtcatttaattgaaacaaattatagaggatattctagaataaaacaactgattgtcgcatcaccatacttttatcttaaacattacatgctgcagacatttcatgtttatttcatgcctatttgactgattatgttttacagaccgtgtaatttccatgttatgttaagcttgattagcattacagattaaccatcttggtgactggttttttcacatcttattcaattatatttaacaactttgtgagatacttaacttaatattaatcttttgtcctctgca

SEQ ID NO: 34981 - DNA, 343 bp, Glycine max
agctttatataccatataactttgttttactgtgcaatgttttgtgttgtgtatgaccatacaaccttattataatgaataaataagatcaataatgattacataggatcaatctaataacgactatatcactaattactatctaatcataataacatactaatatgtgatcttaacaattttcaaactcaagataaaaatctccaaaatgatttagtttatgcaaattgagttatttcaggaacacaactaacctttaggccacgatattcgaacttttgagtccatgatactattacataggatacacttgtccttgcacaatcttattttatgtattaat

SEQ ID NO: 34982 - DNA, 381 bp, Glycine max
tgaagagctacaccaccaaacttgtcgttctaacttttttcctctatgccctctttctttgtcttaacgtcttcttcacagaattaaatagaacaccgaacccccaatcccattcgttcccgctaaatccaacgaaaacccaatggtgggcccctctccctcccatggcaacaacctaaaattcctctgcagctacggcggcaaaatcctcccccgttttcccgacagcaagctccgttactttggcggacacaccgcgtcctcgccctccctcgctccgctcccttctccggtaaaaccaccaccttctcctcccttcttgttttcccttacattgacggcgtataactgtatttgctttggcatgcttcttttcataaa

SEQ ID NO: 34983 - DNA, 347 bp, Glycine max
agcttttcgaggaggtgagcttatttattagaggggtgtgtgtatttaagctctagcttctcaaggaagcttctcaaagaagcttctctaggaagtttctcaagaaagcttctcaaggaagcttctcaaagaagcttctcaaggaagtttctcagggaagcttcctaggctataaatagaagcatgtgtaacacttgttgttactttgatgaatgagagtcttgtgagacacaactcaaagttcaacttctctccctttcttcttccttcaatttcggtctcccccctctctctttctctccctatttcgtttcctccattgaaccatcctcttcaaacttattatc

SEQ ID NO: 34984 - DNA, 254 bp, Glycine max
ccctcaatttaatggattttcaaggtttgagaagtgaaaatgagaatggggtaaatttggagcaaactctcatctcacacaagtctctaacatcaatctacacttgctcaaactggttttacgcctaaaattctgtcggagtaaaaatccgttttctcaacacccaattttaccctaaaaatgacttttgccttcactttgcgcatttgtttctctctctgcacagcccaaacctttttataagtcctaaatga

SEQ ID NO: 34985 - DNA, 321 bp, Glycine max
agcttagctgccatgagtggctcttagctcaatgaaacctagtttaggatgcaaggaattcagcttagctgtcatgactggcgcttaactccatgaaccccaattctggccgcaaggaaatgagcttggcggcaactagtcgcgcttagccaaagaatacaatacgcttagcggttaggtcgtcgcttagccgaattcagatcgaattgaaattggcttagctcagtcttggccagcttagcgggccaaatcagcctaagatgcaagggttgagcgctaagcgcttgagactcgcggcttagcgcatgaccaaagatgcac

SEQ ID NO: 34986 - DNA, 254 bp, Glycine max
cgacacttagaacctcaagcttcaggctgctctattgctctaggatgctgctaggaaaggcaaatgtctgtatggtggtcagcagaggaacacaagccacaagccctggcgaaggtgaatatggtcatagtcatggccacttgggacacaatgttgaccacgcctacatggtgactccatgctggttaggttacaatgatgcgtgatgtggtcaggagctacctcatggccctcattatagactacgggacaat

SEQ ID NO: 34987 - DNA, 288 bp, Glycine max
ttgcttgaggaagaactttgtttgtaacggcctaaccaatactttgacttgacctcttgtcacccattaatgtgctacagaattccagggcaagagctgtcatatgcaagtcagaatcactgatacacaagcatcaaaagaaaatagaattaaccattccatatcacctatgccaatgtacagagagtatcttagtaagacaaacctaattagtcccgaccgttctacgataataaccttataagcacacaaacattcttttcaccataagcaactataagtgaattt

SEQ ID NO: 34988 - DNA, 247 bp, Glycine max
ctatgccctacatatctgtgattattgcagtgggagtttgtttcccaccatgatattatatactgcacgcatgggcgtagaattgccttgatgtcaggcatgtaaatttaaatggttttaacgagagaaccaatgtcatctccattacaagtctccaacttttcattagtataagagaatctcttcgcattggaatcgacactagcaacatataacttgtttatctttatgaacactgcacatataa

SEQ ID NO: 34989 - DNA, 353 bp, Glycine max
agcttgggaagaaaggagaatagctataaagacaaaaatagacagcttgttgaaggctgatttcatttgcgaagtgaattacaccaattggttagccaatgtggtcatggtaaagaaagcaactggaaaatggaagatgtgcatggattacaccaacctcaacaaagtgtgtcccaatgatgcctaccctttgcttagcattgacagactagttgatggggcatgtgggttcagggtgctcagtttcttagatgcctactcaggctataatcaaatcaagatgtatctacccaaccaagaaaagacaacatttgtcattgatagggctaattttttctataaggtaatgactt

SEQ ID NO: 34990 - DNA, 388 bp, Glycine max
gcttgaagtcttaactgaaaccctcagtaagtttccaacccatttatctactagtcaaccttcatcttcttttgttttccaggttgcaagttgtgctatttgtggtggagctcatgaatctggtcattgtatttccactaaagaacacaatcatgaagttaactatatgggaaatcaataaaggtagggttacagtcaaggtgcataatcaggtttcccgcatggtcctaattataatcaacaaggacaatggagatctcatctggcaaccaatacaacaaagaccagggtggaccttcaaacaggccaccacaacaagggccaaatctttatgagaggactacaaagctggaggagactctcgctcaatttatgcaagtcacaatgt

SEQ ID NO: 34991 - DNA, 342 bp, Glycine max
agcttttgaatcctagaaaatccttgattttgttggtttcctaaccccattacaagcctagaaagtccttcggcttcattttgtgtgttcattgatgtatgatgtgagatgaaatgcaaaggttgagacttgtgttagttgcttatgattgaatgagcctaaacacttgagcttgagtgaaacaatgactatgaggttttggttgatgatccttccttgatttctgccatccttactagcttatttcagttgtgactctaatttgtatgttcctatctttgaaaagctgcatgtttgtgaaaatcaattgattgaagcagtccatgatattcaattcatatg

SEQ ID NO: 34992 - DNA, 387 bp, Glycine max
tattggattatggggcacccgtcatatgtgttactaggtcgcgatcgggcgatggcacaaataaactatcccatttccacaagccaggcataagcacaccatccctagttgcccacctttaaattttagctcacgtgcacgtacgtagccttcttctcattcctctcagcaccgagtccccatcaacccctctaagctttcacaaaatccaaacaattcaatcccatttgtcatgaaactaccttacacaatgaaaaactggtggaggcagaatcttcacaattcaatcccattcaaattccacagagtttttcctaccctcatacctcagcaaaatcctcttcgttccaatttgttaaccattggatcgccttgaacattttattg

SEQ ID NO: 34993 - DNA, 360 bp, Glycine max
agctttgcttctacagtgactagttttcaaaaagagtcacaactttaaagtgactagagttcaaaagagttacaacttttaaagtgactagttttaaagaaattgcctagagtcacaaactttaacttgagtcatcaaatgactctaaatatgtgaccatggcacgaattttaaaaagagattcctttcattcaaaaactgatttcattcaattattctcaacatctttctatgagtttttgttcaatactttctttatcaagaaaagttcattggtcaaaaacttgtgctattcttcttcttctttccttctcactcttgcccaaagaattcaaagaactaaccatctgagaattcttt

SEQ ID NO: 34994 - DNA, 385 bp, Glycine max
  unsure (1)..(385): unsure at all n locations
tgtccatattttattccatatgcttgcgattaaatcaaagaaactgtttatactggcctctggtggttgaaaaggcataccctgcagtaatagatgatttagtaattcacaatttgttgtcataacattaccaataattagcatattttgtgaagaatcagaagactaactttctaatgaacttatctacggggaacaattctacaatatcaaactcatgtctcagactcagactgatctgctattgattacctagagcttttactaaccattttaagtaattagaaacaaaatattaaatgtatttatgtagtgatactgcagataaaagaactgttgtaaagtcttctttgtcgtcctgtccaacagttcanaataactatag

SEQ ID NO: 34995 - DNA, 355 bp, Glycine max
agcttgtggaagaatgtggatacctctgaaatattctggagatgtgtggaaccttctggaaccttatggaagagtatggaagggagtagaagagtgtagagactcctagaatgtgtggagcattctagagaattaatatccaccctaggatacaagtaatctccatcattcattgtggaggtggagtaatataaataagggtaggagtcttcattcctaaccatccaagacaaagagtgaattcacttcttagagtaagaaaaagcctctttgatagagaagataaatagcttggaaagtctctatcctcaagcttgagtgagccaccatagagtgagtcaattttgtaaacaca

SEQ ID NO: 34996 - DNA, 387 bp, Glycine max
tgatttgtgagttgattttagccttagtttcactttggttattagtcaattgatccaaggaaacttccaaagaaaaacgtccgattgatttttttgattattttattcaaagatattttgattattttattattatttttcaagatattttgattattttatcattattttgcttttttttggtttaatcgagattacagcgtgaatgatcggttagattttgttttaacagtgattaaacgagattacaacgcaaatgacggttgaaattcattttatcatttattaggtgagaatgacttaaataaatgtctaaaacacgtcaaaaggcggtacgaaaagtaaatgaaatgaaaataaaagtagacgaaacaaatggggaccacc

SEQ ID NO: 34997 - DNA, 353 bp, Glycine max
agcttgtacattccttttttctttcaattcaaaccctactttcatgtttttaaatattgatatttttattacatatatgtttcaaacaatccaaaccttcactatgcatcaagcacacaaaagtaagaaaatagccactgacccttttgcagccaagtcaacaatgtaacactggttggttacaatgaacttgttcattaccagcgccttccctgcaacgaccattaccatacatcagcactaaaccaagcttagatggtacccgcgacatgtcttcaacactacaccaagcttaacctaagtaagtaagtaagtgatcaacgtaccgtgggcaaagccctgatcttcacgaa

SEQ ID NO: 34998 - DNA, 368 bp, Glycine max
  unsure (1)..(368): unsure at all n locations
gagccaagcaattcttgagccctagccttatttggatgtgcttgaagcaattataaaagcaacggtgtcgcatctagtcatcgccactagaaaataaataccaacatcgacgatatttcaatcctctcccttcgtcacaaccttggtcctcactcggactcctttgcaatatatgtcgtatgaganaagataggtttagccacatgtatgagaacaaggtgcaggtgtatcatgtgttgttgggggtagtggagatgcacaaggttggatataccactaccccttgaaagagagtcaataatgacattgtattttgttcatttcaatgggcaaaaatgaccatcgtaacccacatcaaacaatagtat

SEQ ID NO: 34999 - DNA, 336 bp, Glycine max
agctttatgtttgggtttggtgtggagtatttgtggacatgggggtgtttgcattgataatttgaattaccagcctttcacttgtgctttgctggattttatcccagcatattgcaaattaaaagcacattatatagctttatttatataaactattgggcatatattccgatcaaatggaacttatggaaagaacacctcaactttatgctattgggattctgcaaaccctgaatgcatttaatttttgccttcattccataacaagaaagtttgctcaatgaatgtcccactaataggctaattacgtaaaataagaacgattatgttacgaat

SEQ ID NO: 35000 - DNA, 391 bp, Glycine max
atagcatactgaagcttatgacgacccgacaaatgttttgaatggttcacggagcgaccacttaacgcgcaagctatttcgaccccccaagacagtcgtcatcacactatacctaatgacacgatgttgtgtggctaccatgaacaacatgaggctgaaggtcttatgattcaaactccaactctcatagacgacgatgctcaacaacaggttgcgggcaatgcaactccatatcgggggacgacacctcacacgttgaatgtctcatggaggcaaaatcggcacttatgcttcccattgaaatgccactaatataaatataccctaatacatcgccaaccatctgtaagaacgcatgagaaaaccgtgacaccttattcacggattgtct

SEQ ID NO: 35001 - DNA, 387 bp, Glycine max
  unsure (1)..(387): unsure at all n locations
ctaagcttattggattatggggcacccgacatatgttgtactaggtcgcgancggtcgatggcacaaataaactatcccatttccacaagccaggcataagcacaccatccctagttgcccacctttaaattttagctcacgtgcacgtacgtagccttcttctcattcctctcagcaccgagtccccatcaacccctctaagctttcacaaaatccaaacaattcaatcccatttgtcatgaaactaccttacacaatgaaaaactggtggaggcagaatcttcacaattcaatcccattcaaattccacagagtttttcctaccctcatacctcagcaaaatcctcttcgttccaagttgttaaccattggatcgccttgaacat

SEQ ID NO: 35002 - DNA, 333 bp, Glycine max
agcttggcgtctcacagctctttcacgaatgatagcttgaagcttcactattcccttcaatgctctcaaagctttccttgcctgcaaaatcttaccagttagtgaatggtgtaaaagagtaaggtggcttcagttatttatacccactctaacttatctttcttttcccttaatcttttcttatttcatttcctctcattggtgttaaatttgtgaaatatgatataaaaaattaaaatctagtttctgttcagaagttaccatacttttgattttgggaaatcactactttgttaaatttgtgaaatatgtgacataaaaatctagtttctg

SEQ ID NO: 35003 - DNA, 374 bp, Glycine max
  unsure (1)..(374): unsure at all n locations
taagggaatactactggtgattttatggattaaacggagaaggccagggaggagtcgattattatcaataaagatgttgttggcaatgtttttaaagaaaatagaattctataagcgcgtattcaaagtgtgcataatcaattggagactcagcccacatctgctttgatacagttngaaaaatcattgcaagtcaagtatgatcaagttctttatcatgacgagatgctttggtttcaaaagacccgtgaaaatgggtgaagtttatcaacaaatataccaaattcttccatactcagactatcatcgggaggagaaaaatatggctacaagtttttttattgacaacgcttggtgcacagacacttctctta

SEQ ID NO: 35004 - DNA, 335 bp, Glycine max
agcttcaagaaaaagatggtttcttcaaacgccttatttcctgaagggaattctatcaatagacctccaatctttaatggagagggttaccatcactggaaaacccgaatgcaaatttttattgaggcaatagacctaaatatttgggaagccatagaaatagggccttatatacccaccatagtagaaagaattacaatagatggcagttcatcaagtgaaagtataactatagaaaaacctatagataaatggtctgaagaggatagaaaacgagtacaatacagattatagccaaaaacataataacatttgccctgtgaatggatgaatat

SEQ ID NO: 35005 - DNA, 366 bp, Glycine max
  unsure (1)..(366): unsure at all n locations
tgccttggttaaccttattacccaactggccctgagtcacaaatctgcacctatcaccagactctgtggtttatgcatcctttgccgaccaccacacaaacctttgacctttagggcaacaaactgaagcaatagaacagcctgaagctgatgttgcaaacatntacaacaaatctcctcaacctgaacagcataaacagcctcaacacaatgactatgacctttcccacaacaggtacactcccggatggaggaatcatcccaaccttagagggacgaatccttcacaacggctgcagcaacaacaatggacttattatcaaaatgctgctggcccatgcagaccatccattcctcagccgatcc

SEQ ID NO: 35006 - DNA, 322 bp, Glycine max
agctttgatgatgtggtctttaccgacgaaaggatcaaagtaggtctaaaaagaagcaaatctgatcatcatgctttgataaatgcaaaaaaaaactagggcaaatgaagagggtgagaatgagggagaagcccatgctgtgactgccattcctatacaaccaagtttcccaccaacccaacaatgtcattactcagccaataacaaaccttctccttacccactgcccagttatctacaaaggccatccctaaatcaaccacaaagtctgtctaccgcacttccaatgaccaacatcacctttagcacaatccaaaaacac

SEQ ID NO: 35007 - DNA, 373 bp, Glycine max
  unsure (1)..(373): unsure at all n locations
tcaacctgatcgctaagcgactacttattcttggctaagcatgacctattgtcgccaagcgcaattccttacggccataattgaggtcaatcaagctaagcgccaatcatggtagctaagcgagattcattgtggcaatgtgcgtgctaagtgagtccttatcanttaaanncatgcttttctgtacttaagatgcatcattttagctaagccagccagagtctgacttagcaagagttgcagctttcggatctgcaaacctcgctaagcggtctgatcctcgtgctaagccaagttgtgtgtaaaaaaaatgaatttgaatttgaaacgtcggctaagcatgcgtattcgttaagcgagccttgttgagaaa

SEQ ID NO: 35008 - DNA, 314 bp, Glycine max
tttcttgaaaatgaacaacggttgctgtcgatatattcaaatggtcataacttatcacaccaaagatcgattcaggcgcatgatatatcgagacgctcgaaattgaacaacgaaagctctcgagaaaatcaaatgggcataacttttcaaaaggaagttccgattcaggcgcataatatattgagaaggtcgaaattgaacaacagaagctctcgaggaattaaatggtcataacttgtaaacggaagtccgacttaggcgcataatatatccagacgctcgaaattgaacaacggaagctctcgtaaaattca

SEQ ID NO: 35009 - DNA, 371 bp, Glycine max
  unsure (1)..(371): unsure at all n locations
tgcattnggaattgcgaaagccccactctatcattaggattagtacctgacatctcaaacaaacaaatcaaacgtaataagacaattatagttgttgtttgaatacctcacccactcaagtgtatcacacaattatggcttttctctaatgaaacactcttgccttttaccactctaattccccttgagttcttaggcaattcaagagattatggccacaacaaagaacaattcaccaatatgtgtaggtaaggctagagagacaaggaaaaggttaaccaagaaaaaggctaacaatgtttttaggcacaaatgaaggaaataaaattcagaatttaggaattcaagtaacaatccttcatgcaaccaat

SEQ ID NO: 35010 - DNA, 315 bp, Glycine max
ttgcttttgtacccaccgtcactccatcgccgcacaaagttcccaggcctccgtcaccgccatcctttcacgtcacgcacaaggtcgtcataaatgaggtataaatgtgaaggaactattacttcataaatgttgattgaatccataatatctatcacattccctttccaagttagccttcctgatgttccatgcactaattttctcctttgcgggtgtaatactatgttttactaacaaggaaaaaattatgtaaatcaattataaatgtagtttaaagggattggtgcatcatttttaaagcatttgtagata

SEQ ID NO: 35011 - DNA, 369 bp, Glycine max
tataaactagtgaaagacactatataagcttataaaacatagtataattgaaacaaagtaactttttacatagcatttgaaacaaaaatgaagtcatgtaaccactctagcaagtaagaaaatatttaaaagattctataaagtatcaattatccaatcaattagatatttagcttcaatgcttactctgaggagacccttttccagtattaggatcatcctgaacagaatgatctagagcttcagaaacatcaccaactgctcaaactcgttttctagaacattgaagtcttcttccatgcctagatcaaaagtttccgagagcatattctccatatcatcattagtagagtcattggcaacttcttc

SEQ ID NO: 35012 - DNA, 288 bp, Glycine max
cgctaactgaagatcaatgacagcggaatgcacacggaggaacggtgattggacatgccacttcacggagaagaaagacaagaacaagttcaccaccatatgaagccatggataaaagcacgaaggttggagaatatgagcggagggagagggagagaacgggcacgaaacttatgcctccaatgaggcctacaaatcgaagctgagatcctcacatgatcaacgtagaaataacgcacactaaacgccgctatatatagcctaacggtcacatgaaactggagggaa

SEQ ID NO: 35013 - DNA, 186 bp, Glycine max
gctctgcctgcacatgcatttgggtttgccgaccacttctgacatgtttggtgaggcaagtctatgccgtggatctcgattttcacgattatgcccttacaaatgtgatgactactgcccttacacggtgtgggtagcattgagctcttgcggggcacgtgccattctcttcaatacaaatcacta

SEQ ID NO: 35014 - DNA, 348 bp, Glycine max
agcttctggtgggacatcttgacttgctttccaatctgacattcaccacagattctgccttcttctattttcagattggggatgcctttaacagcacctttgtcaatgattttcttcatgcctctcaagtgcagatgtccaaatctttgatgccatattctgacttcatcttctttggaggatagacatgtggaggagtagctggtttcttgaggtgtccataggtaacagttgtcctttgatctgctgcccttcattagaacttcactcttctcatttgtcaccaagcattctgacttttgtgaagttacattgaatccttcatcacacagctgactgatgctgatc

SEQ ID NO: 35015 - DNA, 322 bp, Glycine max
catgatgcttctgacatatggctctgggtggacatgcttttggttgtgcaagcgactactgacatgtcaagtgaggaaagtctatctattcgataactatagtcagttatatcctctgaagagtgcatttaaaacaaacattacattgtgagtctatgctatatgcgtgtgcggcgcacatacactactctttcatactagtcactcgtggactgggcacttctaaagaggtttcccgagagggagtgatgctgcataatggtgtgaaaatctatggaatgacttctactcccaccagttatactagagtctgccacctttt

SEQ ID NO: 35016 - DNA, 360 bp, Glycine max
agcccgttcttgatttttccttagttctttaacaagttttgaacaatatacttggccttcatttaactgtctttgggcttgacggccacgctcaacaaagtactttcgacacctactgtacgttgatttcaccaatgctgttatgggaatgttgctacaatcctttaaaaccttattgatacattctaagaggttcgttgtcatgtggccatatcgacgcccttctctatcgtaagccatcgtccatttttcctttgagatgcgatcaatccatgttgctatggctggactcagttcacaaattttttctaaattttgataaaaaaatgtgattgcatggagtgtaggctgcataaaatt

SEQ ID NO: 35017 - DNA, 390 bp, Glycine max
  unsure (1)..(390): unsure at all n locations
tatccttatggcctgcctccggacttcactctccgtgccaccccggattagttaagccaagccccttcttttgaggggcaactcccaccatatgaagagtatcccgggcaagacgatggggaaggagatacccatcttggccccctgatccacctcaaagatccgtccccgcatgaactaccctaancaaacatagtccgtcataccccggcctcacccacaccctaaaagaatctattccctttgcggaagataagggaaaatcgaggcgcttgaagaaaggttgagagcagtcgagggcctcggcaattagccattctcggatttagcggatttatgtctcgtgcccaacatcgtcatccctcccaagttcacagtaccggactttga

SEQ ID NO: 35018 - DNA, 359 bp, Glycine max
agcttttgaaatcaaactttgtcactagtaatcgattacaggaaactggtaaacgattaccagagagtaaaaactctggtaacttagaaaattttgagaaaagcttttcttgtaaaacaaaactgtgctatgtttggtttttgaaaaattcttttcaatacctcccttgggaaatcatcttctcttgaatcttgattcttcttgatgtcatttcttgaatcttcttgtgaaatcatcttctcttgaatcttgattcaatcttgatctttgaacttgttgactcaatcttgaaatcattctcttggactttttgtcatcatctttgtcatcatcaaaactacttgaatcaacttgattca

SEQ ID NO: 35019 - DNA, 390 bp, Glycine max
ttttctacaaccttttctccccctttggcttcatcaaatagccaaagaactcgaaaatcaacacagatatgacaaaggagtagaaaaatatataaatatcagagtataaaacacaagaagccaaactcacaaagaagaaataatcaaaccagaatccaaagaactgaaaatgtcaacaaccacaaaacatccaagactgaaatttaaaaaaaaaaaaaaccacaagataaataagcaaagtacttagcataataatgtaaatttaagaaactaaaagccaaaatacacggcttataaaagataaataatcaaaaactaaaatctaagaagacggaggtggtggtggaagatcgaaactctgacgaatgatccgacatcctcttaagctgg

SEQ ID NO: 35020 - DNA, 310 bp, Glycine max
  unsure (1)..(310): unsure at all n locations
agcttgattcgattaatcggttaacggagacgcttccttcccaatcgccactctatcctctccgatcccaaccctaaccctaaccctaacccggtatcgcatcgcgtctcttctaatctcttcctttctgcttatattttaagtgactgacacatcctcttcgtttttcaggctgttgaacaaccactgcaacgacgtacaatgccctgtttgcggccgcaaccttcccggtgacaaccaccacatcaactctcatctcggtatgtatgcacttgacgtgattcacatatagnatattatatattctctc

SEQ ID NO: 35021 - DNA, 373 bp, Glycine max
tgtcatgccctcgagcttggacaagtgtttttcatgatgcttctgtcaaattgctctgggtggacatgcttttggttttgcaagcgagttctgacatgttaggtgaggaaagtctatgtattggataactatgtccttttctaaccgttgaagagtgcattgaagacaaacattacattgagtgtcttgatataagcgtgtgcggcgcacatgcagtactcttacatacaagtcgctcgtggagtgggcacgtctatagatgtggtgcgagagtgactgaggctgcatcatggtgtgaataactatggaatgacttcgactaccgccaggtatcgaagagtctgccccctctttacatggagtgaacatttga

SEQ ID NO: 35022 - DNA, 367 bp, Glycine max
tgcggaagaattcaatgagtgaccgttgtttttgtacctctactatgctcagattttttctactgaaatctacttctgtattaccatggaaattgataacacctatgatatttgaacgtgtagtttcaaaggagtgattcatttgcacacgatttagtacttgctaaggagctggtgatagtgccccttacattatatgggttctgtacctcaactattggttctacagtatgtttcacatgtacttcttgatctaatttgaatcatctgattgctcgtgatgaatactacccttttcaatcactatccatggtcatggtaacctattctggttcaagcatataatacaattaaaacttggacactt

SEQ ID NO: 35023 - DNA, 305 bp, Glycine max
agcttataaatcaagtgcttataaatcaagtgatcaagtgatcattaattccaaaacatagggggagtatgaaatgagtgaatgtaacattatatcttgcatatactctgcttgtatcttgatttcaggaattaaattgtcatcataaaaaagggggagattgtagaagaagcaaagactttgactttgatgttttgatgatgccatatgatcatgaggttttgatatcttatgaaaatgcacttctcaagtttaattcaagacaaaaatccaagaatacaacatacaacatcaagaaaatctct

SEQ ID NO: 35024 - DNA, 317 bp, Glycine max
ccccttatgcacttgggcttctctcgaaatatctgaggaaaattagtcccgtgaagaaaatacaagccaccgcgctttcgtaacgttttcgtgagtaattacacgaagatttttgaccattcttcaaaatccattttgcgttcttcgttttcatcagccttcaacgggtaagttccttaaaccaagtttttcaattcattcatgtacccgcggtggtccacattttggatcatgtatgtgtattctcgttttcctttactttttataccctcttttggcgtgctgaagccaattatttaagtcatttctcgctaaat

SEQ ID NO: 35025 - DNA, 344 bp, Glycine max
agcttgagcttggcctttattttaaataagccaagtcgagacgagccttagataggccgagccgaaggccctcgacaagttgttcggctcatttccacccctaatgtccacatacccgtatctaatacccgatggttaaactttattatcccatctctgtacccgttggatatcgagtatcctccacacagtcctgtacccaattcaaattagaaaaataatttttttttgtaaagaaaatattaaaaatttgattttagaaaaaataaattgattgttaaacatttatttttaactacttatatattaataaatttattatagcgcatgtgtctaacaaaatc

SEQ ID NO: 35026 - DNA, 370 bp, Glycine max
  unsure (1)..(370): unsure at all n locations
tcatctaattggtcatacatatgaaccatgtgccgcagctctccaggcatagcccttactctgacccaggtcccaaaaagcctctatatgcaccacatgaacatttgttgcagtcttgttagaaaaaaagagtgcaatcgaccaggtgcaggagataagcacgagttgctacaatccatnatcgtgtttggcatctcatctcatagatctcccgaacctatgagaggcgtacatatgccccgtgcgctcgtattgttcggctctagcctcctcaccggacacctctagcaactgcatcaacaaaaataccgccttcttcacggaaagagcctcgaagctgtggaaggcgccactgattgctacatggatg

SEQ ID NO: 35027 - DNA, 332 bp, Glycine max
tatctttcatatgtgaaaatagtgtgcatccatttcccttagagtcctctcacggggtggagggtgtgccatgttcttataatgttcaatattagaatgttcaaaacaataatgctcaaaatgatggacaggatgctcaaaaggtactgaatgatgtctaactaatctatgaaaagtcctatttatctcaagagcaaagggttataagtcagatggattgcctctagtcatacactatattcagatgcacaactatttgccttcttatgccaataactaatgtggggttcaactaccactaccattaaatgatttcccaatgacttgaaaat

SEQ ID NO: 35028 - DNA, 216 bp, Glycine max
  unsure (1)..(216): unsure at all n locations
gctattgctcttattcatctttacttgggctatctcagaccttgtattcttgttgtctatgattttgcgtacacctgcttcaaagtgaagtgtgtagcctctctccatcatttggccaatgcttacaaaatattcttttaggcctgggaactagaaagacatcatngatggntgcgccgttttgatttgnctccaccatgatagtgcctttgcctt

SEQ ID NO: 35029 - DNA, 283 bp, Glycine max
ttggagatgatgcttattggaggaaaagaaataatggagagaatgagagataggggagcacgaaaatgaaggaataaaaagggagagaagttgaactttgagttgtgtctcacaagactctcattcatcaaagttacaacaagttgttacacatgcttctatttatagacttggtagcttccttgagaagctttcttaagaaaaattccttgagaagcttctttgaaaaaactttcttgagaagctagagcttagctacacacaccccactcataactaaacc

SEQ ID NO: 35030 - DNA, 367 bp, Glycine max
gtctcggggcttttactgtttaggcaaacttttggatggtgagtttttaccatgaaatgcctccctaaacacaaagatggcattcagacctctccattaaatacagacatcaacgtaggattagagcaagcttatgcgcaaacttcttatctaacgcctacttgcacaagacatgcttttgacttagaaaattgcacccatatgcaatctaacgccacttggttgactgtatcatttacatggacttcaacgtgtatctggtacctacatgacgcacatttcttatgctaattatacctacatgcatactctaagcactttggctatcataaattgcatacgtgcacatcttggtatttctaatacc

SEQ ID NO: 35031 - DNA, 296 bp, Glycine max
tagcttaacgcaacaaaacaacatgtgcttgctaagcgaacacatgcacattgagcgcatagcataatcagacaacaaacaacaacaaacatttgcacttaaatcaactaacacaaatattcatagagtcatgagcataaccaaaatcaacctaacatcaacacacaaaccaactaacacaattattaaacaagttacagaaaagaggagaaagacacaaaccaactaacacaattattaaacaagttacaaaaaagaggagaaaaagggtagaaatcctggggttgcctccacta

SEQ ID NO: 35032 - DNA, 354 bp, Glycine max
  unsure (1)..(354): unsure at all n locations
tgctctaaatttacattaatgtttgggtttattggaggaggttgtatgccatttttgttttaagagtagcattccttggtaaaactaactttccaaatgtttgccttcgcaggaaatggccccgaggaagcttgcctcatagaggtccaggaaggataaggcggncgaatggactacttccgctcctgagtatgacagtcaccgctttaggagcgctgtacactatcagcgcttcgaggccatcaaggatggtcgtttctccgggagcgacgcgtccagctcaaggacgacgagtatactgatttctangaggagattaggcgccggcggtggacatcactggttacccccatg

SEQ ID NO: 35033 - DNA, 452 bp, Glycine max
  unsure (1)..(452): unsure at all n locations
ctnnattctcttatgtccgattganttccgaatgatatcgagacgctccacgatgaaaatagaagctctaagctaattcaaacgactatgactttttactcggatgtccgattgagtctcttaatttattgcgagagccctcaatcggaaacgtatagttgtccctaattcaaatgattatcatatcttacttgacagtccgattgactggcgctacatatctagacgctcgagattgagaacataacatctacgccaatttcaacgacactcacttatatacggatgttcgacatgagttctgtagtccattgagatgctcctgattgaaaacggaagctcttancagatccaaatgacaagaactcttcatttcaatgaaccagcaaccctgacgtattcgagacacaaacaatgaaatataccttctaatcgagggacgagagtactcg

SEQ ID NO: 35034 - DNA, 88 bp, Glycine max
cgcttagaattgcatacgggcacctattctgaattcttacgctatccctatgtgtataacacaatccttcattcccaaccttacacac

SEQ ID NO: 35035 - DNA, 375 bp, Glycine max
actaagctgccgccagctcgccaggcagcaggtgcttctccaaacacatcctttggagaatctctggaggccaaggggcctggtgctatttgcacccctagttactaaatgcactccctcttttattttttgtattcttttccgaacgttacaaactttcgaattcgtacgatattattttcttcgcaaggtacgaatcttacggatatgattactcttttagctttcaaaagtacggaactccggattggctaaaccctttttgattctcacatacgcagctgccctttgattttgaacgctgggctcattattgatgtataagaatatcccaacaaataggttgacactaacatatgttatttggaggatttt

SEQ ID NO: 35036 - DNA, 66 bp, Glycine max
  unsure (1)..(66): unsure at all n locations
agctnttcgccaccaccacatgcgtaacagcacttacacactctctctctctctctctctctctct

SEQ ID NO: 35037 - DNA, 471 bp, Glycine max
  unsure (1)..(471): unsure at all n locations
gaacccacccatgcctctaactnttggacagatgtaagtatcaaaagatgttgatatttgcatatcatcaatatcaatcatgggagttatatatatctagttggtgcagtctgcagcactgccttttaccttattatgttctaaaatgcttccttatagatgaaaccatagatagaacatacttaattctttgatcctacaatccttttgatttaaaaatttaactataaaacatcttgatcccattgatttgattattcaattgatttaattattcatttgattagttgtaccaaattaaaaaattaaaagatcttcttaaatgtcttctctttcttcatcactgaaagtctaagaaggccatgtatgatttctggtatctaagtctttctatcatttggatcacatagctattactctgaatgatatgaagtcactgtttcattatatntgccaaacctcacattcgtt

SEQ ID NO: 35038 - DNA, 463 bp, Glycine max
  unsure (1)..(463): unsure at all n locations
agcttccttaagaagattcctaaagaagctagagcttagctacacatacctctctaatagctaagctcacctccttgagatgagaagctagaacttagctacacaccccctataatagctaagctcacccccatgacaaaaaatatgaaaatacaaaaaaaaaagtccttcctacaaagactactcaaaatgccccanaatacagggctaaaaccctatactactagaatggccaaaatacaaggcccaaacgaaggaaaaccctattctaatatttacaaagataagcgggcttatacttagcccgtgggctcgaaatctacccaatgcccttgcgggataggattgcataagataatacagccaaattcgcccgtttctcatttatggatggtttctcggggtataatcaaataaagatggcaccagaggatgtagagaagaccactttcgtcacccaatg

SEQ ID NO: 35039 - DNA, 414 bp, Glycine max
  unsure (1)..(414): unsure at all n locations
ctggaggtgctctgatactcacccacatggatggcgatgagctgcctcttgcccgtgaactccgatgtagttaaacgatattacgcttgaagtctgggggtgctctgatactcacccacatggatggcgaggaccgctgcatgtntttatttctgagttttttctcgttcttcttggtttcctctaggattcccattcactgtatttgtctcgtttctttgaaaaggaaaaatgggcgaggtttcagtcctccctttggtttcaaactttgtgttttaatttgatataacttgagccctcttcgctcggtgtatggtgtgcccccaaacacttatttaaaattgaatctaaccagccttcactacaataaaatgatcgcattagaaacattcatacatgcacatgcacattcat

SEQ ID NO: 35040 - DNA, 439 bp, Glycine max
  unsure (1)..(439): unsure at all n locations
gctttcttctccaagctatcttctatctcagttattgagtttctgtgagttattgagagngnttacgtgggtgggtgctacacttccattgttttgcttttgttgtgtggctttcataattcagctttcataattcattcttggtaagtgtttttttaaaataaaatttatatattctgatttataatttctgttcttaaattcttataataggttagttagtattaataggtattataaatatacgttaattaggattaatatatattgtaaggttagattagttactatgatgnttttaatttttatgtattaatagatatttgaagattaggttattcttaatagatatttaaaggttaggttagttagtttggtttgttgtatatacttttagatattatatatgtgatataatattattagtnttagaaatatt

SEQ ID NO: 35041 - DNA, 333 bp, Glycine max
  unsure (1)..(333): unsure at all n locations
tacactgttgtcccgatatcatgacatgctatagcagattctatgattgtttggncaaaattgctaagtagtcattgcgaataattatttacatctaacaatatccatgtatttttaattgctaatatgcctcttttaattttaattaacatgtatgttagtttattgtgccctatctacattgtgaaatgagtttgttggtaacgaaagtgactatgtcttaccgcatctccctttccctgtgtcttccaccgtcgatgctaccatttttgcctgagcgacgtcgtgttcttgttcgtgacctgcaatcaagtcgagctgatgaggtctatg

SEQ ID NO: 35042 - DNA, 401 bp, Glycine max
  unsure (1)..(401): unsure at all n locations
gtgactcgaccgacatcgtgatacgcgagcgtctcanaattcttctgaatctgtagatcctgaatgaagtgaagaagttgatgactacgtatcacaagttcgacctacaacttccagaagagatagttaactgcgtcgagcttctttgtaatgaagtgtgttgagaatcaaaataggatcaatttcagattatgtctttattatcatatctaaattataggaacgatatctcctatacttaattgtaattaatctatataaaggagcatcttctgtatactttaacacaataaatatccctcactttctctcatntttacatggtattagagctaggttgagggaatacaaaaattgtcctcactttatagcgccgacttttctgactacttcttcctttg

SEQ ID NO: 35043 - DNA, 57 bp, Glycine max
gagaggatgcttcaatggatgataagattaagagagagatagagagaggcggggggg

SEQ ID NO: 35044 - DNA, 520 bp, Glycine max
  unsure (1)..(520): unsure at all n locations
aggnagannnnaagtgaacttagacattacacacntgannaagcngcgncagtaccaagcagcaagggataagtccattctatttcttctgacgaatccactggacgccgcagaagctcactacactccttaacgaccaaccatcatataaccatatccttaaggaattttggagctcaggaattgttctgagaataaccgtggggggggtattgtttcatcggacaacatgttttgtggctatgcgttatgaatcatattgggccatacttgaacgccattgtatattggctaaaagtcggacatgctgaatgaaacattgtttctccaatgctgtagagtcaaacaataaatctgccagattattttcgattcgaagacgaaagcacttacgtgagtgaatagaaccttaatggacaagatganaaacctctggtctactctcatgttaaatatatcttacttctttcatttctaatcttgcctagagcacctatcccttgctctctattcttggatg

SEQ ID NO: 35045 - DNA, 491 bp, Glycine max
  unsure (1)..(491): unsure at all n locations
ttggtccttggcctcgagatccgtgatcctatcagtcgcctgcggctgcagcttgacagtgtngaagcgtttttcgttttggagggcgtgacaactacgatagactggtagtgacgatacgctgtacctgggctgctgacctctctataactaggggacgaacgccctcgatctcagtacacgatttttcgaagaagagaggagtgttcaccaacacgatctgctggtcgtcctgattggacgggtgagcaccctattttactctagagccggtatgctctngatggtatcaaggagatgcctattctgatggtcctattgaacagggtcgttagttggacaggcggacacatactcgcagtgtgctacgtgaataaatgatgccacattgtgggatctgccgacctctcattgtgggtctccgaggaatatagactatgggccaacatttgtggacctagacaccccggagacatatgtttcaataccgc

SEQ ID NO: 35046 - DNA, 165 bp, Glycine max
  unsure (1)..(165): unsure at all n locations
cactatgactctcagcttagagaccagccacgcaggtaagggtgctaacattcttagtcttcttcaaacaggttattaagatatctccagtcagatntgtaacaaattgaaaccaccctgttcactttcatagaaacaagtgagtgcatagaattcatacttata

SEQ ID NO: 35047 - DNA, 494 bp, Glycine max
  unsure (1)..(494): unsure at all n locations
atccttacagtcacctgcggcatgcaagctagtacgaatgtaagaaacatcttcttcgttcttggtgatctttgactccatctcattgaatcgcatgtccacttgtaactccaaggtatcaaacctttcaccaacaaaggtttgaaaaccatcaaacctgtccaaaatcttttgaagaagagaggaatcttctccaccatgtaagtgtccttcttcattgatgggttgagcaccctttntcacccaagagccatcatgctctttatggtaaccaaaggatgcaatcactgcagcacctattagaaaggatctcttgattggaacataaggttcataatcaagagggatgttgaagtgttgaagaaagagggtgactaggtgtggatatggcaatgaagcatttaatcgcaatgccttatgtatgcgatatcggactaattgtgcctaaccaattngtcggcctttatgtaaagcccacataacaataatatctt

SEQ ID NO: 35048 - DNA, 423 bp, Glycine max
  unsure (1)..(423): unsure at all n locations
gagccttgagggtaatgttctcaacaatatttgatttctccaaactgcttattaatatatctccattctgatttataatttattgattcagntctcttgactttcatgtgaacaggtgattgcagagtatttgtccttataagaagctgctggaataaaagagggattccaactgatggatacaagccataaaggcaagattaacgtcgatgaactgcgtgtaaggttgcataaactaagtcaccaaattcctgatggggatatccaaatacttatggatgctgtgagtatttttcactttatctggaaactcttcttttctgtttgttctacacttgatgtgtgaagaaataagtagtttggtctctttgttttcacaactttatgttcattgtaatatatcaaactaattaattgcaaact

SEQ ID NO: 35049 - DNA, 462 bp, Glycine max
  unsure (1)..(462): unsure at all n locations
agctntcaagtactgtaagccaatcatacaagttgtctgcacacatttgtacggcaaataccgtgggaccctcttaatggccacatcacaagatggaaatggtggcgtccttcctctagcattcacgatggttgaacgtgagacgttgacagcgtggtcatgatttttggcacacttgcgtgaacacgtcactgataaaaatggtatttgtctcatttctgatcgacacgcgagtataaagtccgctgtcgctaatgaagcacttggttggcaacctcctcacggttatcatgtctattgcgtgcgacacatagcaagcaacttcaatcgaaaattcaataacgccaaacaaaaagaaatgtttgcagaagtgggtaagaattcatatttaatggtcacgtttatttaacttccttatatacttaanatgggtattggataactaatttatgcagcctacac

SEQ ID NO: 35050 - DNA, 622 bp, Glycine max
  unsure (1)..(622): unsure at all n locations
ggtcctctctacctntnttcnacncnnncacctcncactatnntnttttttcatactccnntncaagnncnaagacgaggggatgaactttgatcnatcgatatacgcgacacctaaacactcgagcttgcgctcgaganataaatacacatgctgagactgttctgtgatcttaccntgtatctctgtaacacctcgaattatgacactagcacggacaaacattcatttcaactaatgggcacatagntgaactatgatattatgcttcagttagaagatgactttcaatcgatacttatagcgcacatctaattaatgacatatgaaatgcactatttatagagcaaaagagcaaaacactaagagaacgttaagagcgaatacgttacaatgaccctcatttgaacacaaactacgctatgaagtaacattctctctaatattatttagcattaggattgagatgtcacactcacgccaatttttcaaaggatcaagtactaaatacgataacctccaatcagcttatcatgtaagtacgcagagaatctctatcctatattatgctataaatatcactaacgattcgttcccgaacatataatttaacaatctgtcg

SEQ ID NO: 35051 - DNA, 208 bp, Glycine max
  unsure (1)..(208): unsure at all n locations
tatgttgntgtggatgatttctccagatttacctgggtcaactttatcagagagaaatcagacacctttgaagtattcaaagaagtgagtctaagacttcaaagagaaaaagactgtgtcatcaagagaattaggagtgatcatggcagagagnttgaaaacagcaagtttactgaattctgcacatctgagggcatcactcatgagt

SEQ ID NO: 35052 - DNA, 375 bp, Glycine max
  unsure (1)..(375): unsure at all n locations
ggaagatatataaatagcatgatatcatatattcttatgtgatttataatcatcaaactgaattatgtgtgctttatatcttgtccatgcttatagaagtaaacattgattcaaataacagttaatatatacagtcatcacaattaactaagccaagagtgggactgcatgtatacaattgaatacctctactgttaccagcattctcaccttccagcattttgccaaccccatnttgaaaatgttgtgagtcgtgtcctcctgcatgatcacaactatatttagataatgagaaaatatgtaactagcaaaatacatccttcttaataccaaacaaagtacacattctatctagaagaaagagatatgagacaa

SEQ ID NO: 35053 - DNA, 422 bp, Glycine max
  unsure (1)..(422): unsure at all n locations
atgagaagctctatatatagatcagcanactgaatacacattcggggaaattaatcccttctaatattggcttgttgtaagcgtgtcaaattaatctccaaaataacatggataatatcattntcaacaaagacaaattgattacttctacactttattttattttttaccagctatatacttcacatgttaatcatgttttttgatagtgacggaccaatcaaaagatgaatggatntatgggagacgaatttaatattcaaacgattcatcgtagggcagatcanacacgaaaaacacagtactatctttnggttctccgccacagcttgcttgaataattaatacatatacagtaacctcttatgttgccttgtatttaaaatacaaattatatatatatatatatatatatagagaga

SEQ ID NO: 35054 - DNA, 497 bp, Glycine max
  unsure (1)..(497): unsure at all n locations
tggatgaccttganccttgaancattgattacggaccttcaatctaagctcgactatacttgagcgtctttttcgttttacagtttacggtggcaatcaacacgacttccattatttaacgaactaccatgtgattaacggctaggacctgtgtgaattgtcgttagcacaggctcgattgtacgctcatgcgtgacatagtgagtccagattccatatataacttcactgttcgttagaataatacatttattacgttgaacctagcattgtttgaattcaccttatctatgtcaccgatcgattgctcatgatgtatccgaattatgatctaaatacatcactttgttatgactcttgtaaactgagttgagactatgctacgtatacgaagataacgttctctagaaataaatgctaactggttttaatcttaaccttggttgattacaaaatgtactaattgttatacttgcttgcgtgagattcaaaaattn

SEQ ID NO: 35055 - DNA, 462 bp, Glycine max
  unsure (1)..(462): unsure at all n locations
atgactctgacctgtgatctcttagncacctgcggcatgcaagcttgcttgtggagcttctatggaggctggatctttgagctttaatganggccttcaatggtgattttccaccatggagatgccacggaaggccaaggaaaagaggagtggggagacacccttcacttaggaattaacccttggagaaggaactttccccttcaaaaatggtcttggattaaaaggggatgcttttatgggaggaaagaaagagagaagggggagcacaaaatgaggaataaagaggagagagtggacttgagtggtctatagacttattatcaagtgcacagtgtaccatgctttattataactagactcttgaaacttttgaaaacttcttgaaagttttgaaaacttctgaaactaagttactacccccttatactaactactctgaaacaaactactcacatacct

SEQ ID NO: 35056 - DNA, 380 bp, Glycine max
  unsure (1)..(380): unsure at all n locations
ctggaatgttaggaagatatcaaagtaatccgggaatggaacattggaaagttgcaaagaaagttctgagatacttacagggaacgaaagatcacatgcttacatataagaggtcaaatcatattaaggtgattgagtattcagactcatactttgttggatgtgtggatataaaaaaatccactctgttctatgtctntcttttagccgaaggagcaatatcatggaagattgcaaagcaatcagttgttgttgcatctaccatggaagatgaatntgtagcctgttttaaggctacaatttaggctaattggctgcggaactttatttcagagcttggaattttcaatagtattgctattgtcataccctaatttcgt

SEQ ID NO: 35057 - DNA, 416 bp, Glycine max
  unsure (1)..(416): unsure at all n locations
tcatgtggagaggttaatgaaacaacgagatgatgcgctccatgataggttggatcaaatggagaatagagatcataatgaagaagaaaggaggagaagagggaatgatggtgttcctagacaaaaccgaattgatggtattaaactcaacattcctccatttaaaggaaagaatgatccggaggcctacttggagtgggagatgaaaatagagcatgttttctcatgcaacaactatgaggaggaccagaaggtgaagcttgccgccacagagttttccgactatgctcttgtgtggtggaacaagctacaaaaggagagagcaaganatgaagagccaatggttgatacatggacggagatgaaaaagatcatgaggaagcggtatgtgccggctagttactcaacggacttga

SEQ ID NO: 35058 - DNA, 439 bp, Glycine max
  unsure (1)..(439): unsure at all n locations
agctngcttagttcgcccatgaaattgnccaggtatgcatattttctttcttagtagaatttgtatttcacatcttattattaattgatatataaaggtacatgaacaattcagaatgttcttttaacatgtctaaattgttcatgtacctttatgtgatgaataatgaactattgagcattaatttcattaattttgattatttcttccatgtngtctgtactgaaggacttcaaaaggttagagaactaattgatatgggcacatcatttgatcatgcaaaaattggtaactagcatctaatgagggagggtcattcgcatcatagaaatgtgtgttgcttatatgccaaaaaagggattaaacaaactctgccatttagaatattgcgtggactcaagagtgatcgtacatttagttgctgagaggtaatagttat

SEQ ID NO: 35059 - DNA, 479 bp, Glycine max
  unsure (1)..(479): unsure at all n locations
agcttctaagttctaacagggtgatagagagcagaattgctgaatgtgaaccacaagtataaagttattataatacactgaagctccattaaaaattgaaccatgagtacataattattatactacattgcaactgcattaaacatgttattgttattaaccaatttcaagacctagaggaccccttcccttatttttgagaaaactaccttaatataatctacttctgtaattaactaaggagttgagagaatctatcctagagtcaccatttctccttttaagcagctcttgatgtcaaatgcccaggcttgctagattatattatgtcattntgtattggtttttcttcgaaaatttatgtggaacactctggtataaagtttagttggtttcagtctgagagacctggatttcaattcattacctncatggatngagtcnnnataaacaatttatacattntttctttcatttat

SEQ ID NO: 35060 - DNA, 106 bp, Glycine max
  unsure (1)..(106): unsure at all n locations
agagagtggctcggataagacgcttaaagaggaatcttcaatggaggaagagaatcacagagagagagggggaggaggggcnncntccttccctctcccctccctc

SEQ ID NO: 35061 - DNA, 428 bp, Glycine max
  unsure (1)..(428): unsure at all n locations
agctngagatgaggaagtgttgaagggcggaacttcctgcttttattgncgatctcagagnggnacctggagatatgtcgcgggggtcacgagaccttggggatgtcaggtggggtgctatttcccaaaaccaagcttgaccaatcccgacccagcccgggcatagtctgtcagtgagaacctgtgatgtacctaaacatgcgagttcctggcagtcaacagataaaaggaacaaacaccacaaagcaaggaggcttgtggtggctggccagctgtgaattgtgtgtgatatatgggttgcggcctctggtaatcgattaccaagggtgggtaatcgattacaaggcttataaatgaagacaggaggctaagatggtctctggtaatcgattaccacggngtgtaatctattaccaggctctgaaatg

SEQ ID NO: 35062 - DNA, 456 bp, Glycine max
  unsure (1)..(456): unsure at all n locations
tactaagctctgcttaggttttacgttttctgtataaggctattgtttttgttcttaatgcaattttctgttttctgcttctaattacaatttcgttcttgcttcttcttctactttcatttacgtttctgtctcatttacgtttctgtttcatttacatttatgtgcatttacgtttctgcttcatgtttcatttgcgttttctgtttgaatctatggaaggctagtttttctggtgttgtttccttttgaggacgaagcccaactctctttgaggtttcgtttgtaatgtggtttcctggcagttntcccttcaccagttatcccaaattcgtgaacattaatcagtgcacccttcgtgttcgattaattgcctctgagcctaacttgcgttcatgcttaatggacgaacggctaactggtgtatgtggtgcctaatcacgtattgacaaccct

SEQ ID NO: 35063 - DNA, 238 bp, Glycine max
  unsure (1)..(238): unsure at all n locations
aaatcactaacgtgcgcctagcggtccatacaagcgcatgagcacaaacaggtcacctanttaagcctgaaatcanaatttgtgaagagagtttggactgggatttagagctntgcatgtctagggtttctagagagagaaagctccaagttccagagagttntgagagattntgctgtgtgaagatctgcaaagaccagagcttgaaacaagagccggnttgagagcttgagatgag

SEQ ID NO: 35064 - DNA, 391 bp, Glycine max
  unsure (1)..(391): unsure at all n locations
gtctagagagttctagagagagaaaggtccaagttctagagagtntgagagatnttgttgtgtgaagatctgcaaagaccagagctcgaagaggaagccgtcctaagagcttgagatgagtttgtgagtgattgtgaggtcctagaggtggaggagacatccccacttcttgtatttctgcaatctttcattctcttctcttttgttgaaaggaagcctcccagttatggaaagctaaatcctctgttggatcttccttgtaggtacttgatgtaaatatctttntatctatttaatgatgttttgtgtgttcactatgctatcataacttcattntaccatgcttttgccttgatcacatagatgcatgtgttttaggatcatcaacagt

SEQ ID NO: 35065 - DNA, 311 bp, Glycine max
agaaaaagaggttgacgtctcgaatgtgctcacagattcgatcttcattcacgagcgctgtcgatctattacgggactcgatccaacatacgagcataaactcattgtcgctcgaatttgctcagagcttggagagtcaatctctagcgcctggatgtctaacggctctcagtcaaacatgcgagtgaaaagtcattgcagtttgtagtcgctcatagcttcaacattcaaatgcaggcgttctgatattatacaggactgaatgggatagccgagcacatagtaattgtcgtagaatttgcttagagctt

SEQ ID NO: 35066 - DNA, 239 bp, Glycine max
  unsure (1)..(239): unsure at all n locations
agtgatatacgaagctatatgtaaactggtcntctctcacacagtgctagcncgntatttgggtgggtatagggacaggttgctgacatatgatgatacataccaggtgatagctggcatgggtatgttttatggtggaattctttgtttggcactaatggcttctattgcccctgcgtatgacttaagtagttattactagggtattcatgccacaagctacatgatgttgccggatg

SEQ ID NO: 35067 - DNA, 340 bp, Glycine max
tcacacggaccgtcgattcaggcgcatataatatcgagacgctcgaaattgaacatcggaagctctcgacaaattccaatggtcataacttttcacaaggaaccccgattctagcgcatcacgtatcgagatactctgaattgaaaaccggaagctctcaagaaattcagatggtcataacttgtcacaccggagtcccattcagacgcataatatatcaagatgctcgaaattgaacaacgaatgctctcgagaaattcaaatggtcataacttgtcacacggaaatccgattcaggcgcataacatatccagacgctctaaattgaacaacccaagct

SEQ ID NO: 35068 - DNA, 150 bp, Glycine max
  unsure (1)..(150): unsure at all n locations
caacagaagctctcgaganattcttatggtctatatcttgtcacacgaagtccgattcaggtgcgtaatataccgagacgctcgaaattgaacaaccgaagctctcgagaaattcaaatgggcataacttatcacacggaagtccgattc

SEQ ID NO: 35069 - DNA, 480 bp, Glycine max
  unsure (1)..(480): unsure at all n locations
agctntgatggtgtcaagaagaaatcacatgtntttcatcatcataaagggggagaatgtgaatgtatgtatacatgattntgatgatgtcaaagaagaatctaacaaggctgcttcaaatgataagcanttgcttcaagaataattcaagattgcttcgaaagattgattganaatacaaaacaaagccttgcttttatagactcttcatgtctggtcaagagaaccattttgaagagttataacttttaaaaaaacttaaaaccaatttgaaaaagtcaaaaatcatttgaagagttacatcttttgatttattcagaaacaaccactggtaatcgattaccaaatcagtgtaatcgattacacaaagcttttagtgaaaggatgtgactcttcacatttngaattgaatttcaacgttcaaaggcactggtaatcgattaccanaacattgtaatcgattacaatttttttgaaatc

SEQ ID NO: 35070 - DNA, 418 bp, Glycine max
  unsure (1)..(418): unsure at all n locations
gctgaggtgtgttgcccaccatctnttcatagtagaatactggttatgtgtctactatcatcgncatcattnttttctccgtcattgaggtgccacttgagctgccaggtctctccacctttgggcgtattcttttgaaagattcgtgccccctttntgcacatgttctgtagttgcatcctatctgaagacattatactgacactgcctaacgaaggcaaccactaggtccttccaagaatggactcgggaaggttccaagttagtgtaccaggtaacaactaccccaataagactttcttggaaggaatgtatcagcaattcctcatcttttgtgtatgcccncatcttccgataatacatctttagatggttcttggggcaagtagtccccttgtacttgtcaaagtccagcacc

SEQ ID NO: 35071 - DNA, 435 bp, Glycine max
  unsure (1)..(435): unsure at all n locations
agctntntgaagtagaaacatgggaccaactcattttatttcanataaagggtgtatctagtcaaggtctgagagaccatacaagtttcctagcgatttctaattatgtgggccattaagtctatcatatgctgacaatagccgagaagcccatgaatctcttcgggggcggagtaggtgtccgccatcggctttggccttggctaacaagcggngaagttcttgactcccgttcaaggtaagagcaaaccgatccatccacatggttgcctcttggtgtaaaaagtcgatcacccttcctctagcctctttttccgcgtatacttgggcatactcgtccgcgatcctatgctcgtgagccatggctagacctaactcttcttggtacttggcaatgatagctagcatgctggtctccgtctcgcataaacgctg

SEQ ID NO: 35072 - DNA, 346 bp, Glycine max
agaatgtgaatgtatgtgtacatgatattgatgatgtcaaaagaagaatcaaacaaggctcattctgcttcaagattaatacaagattgtttcaacaaacaaagccttgattcaagatttcttctagatcaagccttgcctcacaatgaaaggtttcaagtcattcaaggcacatgtaatctattaccaatacatgtaatcgattaccaatgtgttgaaagtgtgtgattggttacacatcatatgtaatctattaccagagactcttaacattgagaatttaaattttaaatgaacggtcacaactgttcaagaataacaactgtgttatcaattacactaattc

SEQ ID NO: 35073 - DNA, 369 bp, Glycine max
  unsure (1)..(369): unsure at all n locations
agcttagctacacacacctctctaatagctaagtttacctncttgagatgagaagctagagcttagctacacaccccctataatagctaagctcacccccatgacaaaaaacatgaaaataccaaaaaaaagtccttactacaaagaatactcaaaatgccccgaaatacaaggctaaaaccctatactactagaatggccaaaatacaaggcccaaacgaaggaaaaagctattctaatatttacaaagaagagtagatccaacctttacccatgggctcaaaaatctaccctaaggttcatgagaatcctagggccttctttagtagctctagcccaagcctcttggagtcttctatccaataccct

SEQ ID NO: 35074 - DNA, 316 bp, Glycine max
  unsure (1)..(316): unsure at all n locations
gtggtgatcagagcacaagagctttatgtangtgctctcttaaacctccattaatttntgctttaccttctcttccattggtttttcttcatttntctccatgtatctcctcacatgtcttgtgataaatgttgttaacatgattctttagagtttgcaccgattaaacttgcaatagaagttagatttgattttctatggttcaaatntcttgttcttgttcttgaaccatgaattgtgttgagtttaggttcctttgagttttgtcttgttattttttgtggctgaaacctaaaccataaaattcttaccaaaa

SEQ ID NO: 35075 - DNA, 251 bp, Glycine max
  unsure (1)..(251): unsure at all n locations
cttcaacatttcaatttcgagcgtctcgatatatgacaggactcaatcagacatccgagtaaaaagttatggtcgttnggaatggctcagagcttcaacattcaatttcgagcgtctcgatatatgacgggactcaatgagacatccgagtaaaaagttattgtcgtttgaaatggctcagaggttcaacattcaatttcgagcgtctcgatatgtgacgagagtcaatcagacatccgagtaaaaagcta

SEQ ID NO: 35076 - DNA, 312 bp, Glycine max
  unsure (1)..(312): unsure at all n locations
attgacaataactntntactgggatgtctgtattgggtcccgtcatatatcgagacgctcgaaattgaatgttgaagccctgtgctaattcaaccgacaataactntttactcggatgtctgattgagtcccgtcatatatcgagacgcttgaaattgaatgttgaagctctgagccaattcaaacgacaataactctttactcggatgtctgattgagtcccgtcatataacgacacgctcgaaattgaatgttgaagctctcagccaattcatacaacaataacttnttactcagatgtctgattgagtc

SEQ ID NO: 35077 - DNA, 221 bp, Glycine max
  unsure (1)..(221): unsure at all n locations
acctttggtcctcctcatagttgttgcatgagaaaacatgctctattttcatcttccactccaagtaggcctttggatcattctttcctttaaagggaggaatgttgagtttaataccatcaattcggttttgtctaggaacaccatcattccctcttctcctcctttcttcttcattatgatctctngtatccatttgatccagtctctcatggagcgca

SEQ ID NO: 35078 - DNA, 188 bp, Glycine max
  unsure (1)..(188): unsure at all n locations
gacactaagctagaagtgcgaagtgtggagggggagacttccactcccattcttngacttagaganggaccnggagatatgncgcgggggttatgagacctngcggacgccacgaggggtgctattgcccaaaaccaacctagaccaatcctgacccaacccgggacatatcagtcagtgagaacttg

SEQ ID NO: 35079 - DNA, 407 bp, Glycine max
  unsure (1)..(407): unsure at all n locations
ccgcaaccaagttaggtaaatcattntaccttttacatacttatcaggtggagtttccccgagtaatgtttgacaagcaacacgtacatcgccaatgatgaaactggttaccagcaatccatcaatcttcaagtccaactgtaggaccacatcctgtaaggtaatggttgcctctccatgtggaaaatgaaatgtgtgtgtctcgattctccaacgttcaaccaacgcactaaccaaatgctggttaatatcaactnttccaacatttataatatgtctaaaaccagctaaattgattagattttntacccaattatctatttgatccaagtgagtaaaagcccaaacagaagtatacctcagacgaatgattctctcttggccttcccacacttgatttgaaatat

SEQ ID NO: 35080 - DNA, 424 bp, Glycine max
  unsure (1)..(424): unsure at all n locations
aagctggtactagtcatatatatgttacaaaacaacgaaagcaaaaattgaatctgtttattgcagatacaaaaatacttaaacaaacctaccaattaggggttttgcggctttttgcaaattccgcccatgtttctggatcaaggccatacttgactgtaggatcagatatttgctgacattcattgtcagcaaagacaaattttgaagtcaatgaagacttaaattacctccatcttgcttcaactgttgacatcaccttttttttgcattttcaccttcaaggatatcaaatttgcgctgcacaacaaaacgagttatgtaacagtatgtaaatgaatcctttaaaagtaacttaacaacaaaatcatgaatacaagtgtatntataattacttaccaaaatatctctccatattaagctc

SEQ ID NO: 35081 - DNA, 487 bp, Glycine max
  unsure (1)..(487): unsure at all n locations
agctggtctcagcgtttatgcaagatggagaccatcatgctatctatcatcgctaggtaccaagaagagttaggtctagccacggcccacgagcatagaatcgcggacgagtatgctcaagtatacgcgggaaaagaggccagaggaagggtgatcgactctttacaccaagaggcaaccatgtggatggatcggtttgctcttaccttgaacgggagtcaagaacttccccgcttgttagccaaggccaaggcgatggcagacacctactccgcccccgaagagattcatgggcttctcggctattgtcagcatatgatagacttaatggcccacataattagaaatcgttaggaaacttgtatggtccctcagaccttgactagatacgactttctttntgaaataaaatgagttggtcccatgtttctactccaaaaagcttgtgcaaatcaaatcactcctacatttcatctctagcatgcat

SEQ ID NO: 35082 - DNA, 481 bp, Glycine max
  unsure (1)..(481): unsure at all n locations
ggtgtgggttccactccagaatccaaatccaaaagcaaaaatattcattctttgatccatatgggctntattgngcttgtaacatggtcagggggtaagaaggctatgaaagaaaagatcaaagaggctcaaagagtgtttaagggttatattgagtaagaaccttgagatccttgtttgtacttctatttatttcaatgttttgagctaggctctactccatttgtcttaaacattaatccttattgcactttggtgccttacttgtaaaatttgaaggagttttgtctttttttgcttcacttagcctttggcgaatnttctttttgctntcttattctttagttgtttttttttcattattgcccaacctagaccttngtaggttctcaattgacagattangccaaatgaccctggctcttcacaatatttnttatgaaatacaactttaaaaagataagatgaggtcacatgattc

SEQ ID NO: 35083 - DNA, 479 bp, Glycine max
  unsure (1)..(479): unsure at all n locations
tcgggccatttcctgtgaaggcaatatattggaaagttagttttattagtgggacactactcttaaaacaagaatggcatacaacctcctcccataaatacaaacatcaatgtaaatctagagcaagcttatgcgcatgtttccttacgaacgttcacttgcggaagacatcctattaactaagaaaaatgcacccatatacaatcaaggtagcttcattacctagattatttacatgtacttccaaggtgtatttgttatttacatcacacacgcctccttggctgaatttacatacatgcatactcaaagcattttggggtaccaaaaactgcacatgcgctcatcttggtatttctaatacccctacatatacaaacttcacgatgaatcttgactgcctacacaataaggtgctacatttcatggcttttttcaagttttactacctaaagccgcatgcanatcaaacatatttt

SEQ ID NO: 35084 - DNA, 417 bp, Glycine max
  unsure (1)..(417): unsure at all n locations
atggacttaccttgaattaattcctttgaagttctttgagccttgngttcctttccttgntntgaagctcactacaagccttaagtgaaaaaccatgatatcaccatatccttaaggaattttggagctttggaattgttttgggaataagtgtggggggtttttgtttcattggataacatgttttgttggctatgtttcatgatgtattttggtccatacttgatgtacattggatattggttaaatgttggacatgctgaatgagatgctgtttctcaaaggctacagagcaacaaaaaataaacgataaagaaaaagagaagccataaatgtgagtgaataagatcttaaatggcanaagaatgatgagactctttggtctactctntatgnttaaaaactatctctatttct

SEQ ID NO: 35085 - DNA, 288 bp, Glycine max
tggcttattccctaggggacggcgcctcctctcacctgttctcctttgtcttccactgcatctccgtgatggaaaatcaccattacaggacctcatcgaacttaaaatccgccttcaggagatcccccacattcaaaatcccgtcagtgacctcgactgcgctccctatgatattacttagtgcgagagcctggacttgctagtgtgtggttgggctggccatgtactcctaggcgcccgacgaggtttttgatgtgcatggtgccacattgcatataggattgagtc

SEQ ID NO: 35086 - DNA, 331 bp, Glycine max
  unsure (1)..(331): unsure at all n locations
actctctctcaattcagcttctctgagatcactttcagtgctttgcaatttatcttgtgtaagatntaaatcatcccctcaaatttccaataggttntctttctcagcaagcttctcattcaaactgatagaagcatcttctaaatttttcttttcttctgtcactgcattcaaagaatcttctaattcctttcctctttcattagccgcttgcagagtagtttcgagggttgaggctcgtgcttgaattgcctcaagttctgatgtcagattagatacatcatcaaggtatttattggcttgcccttctgaagcaccacgcttctcttct

SEQ ID NO: 35087 - DNA, 153 bp, Glycine max
agcttgtagggttaaaggctcacgaatgtcacgtttatatgcaatctcatcagaacgcgcggctatacgatacatcgtgccacacgagaccttgatgaccataacgtcggctgcgtcttgtctttcatgccacttgtcgcatagcgatccatc

SEQ ID NO: 35088 - DNA, 332 bp, Glycine max
  unsure (1)..(332): unsure at all n locations
agagaggctcacaggtagcggtgaactgcgatatgaacttctctatataatttaggtgccctaagaaaccttggacttgcttttcggtgcgcagtttgggcatttcaaggatggccttcaccttgtcgagatcaacctctatccctttctggctcacgatgaagccgagcaattttcccgacttgaacaacttccacagtttctcgaacaacttccgaaagttgacgagttgttcctcctcggttctagacttggcaatcatgtcatccatgtagactntaatctctttgtgcatcatatcatggaataatgctaccatagctttgtgatag

SEQ ID NO: 35089 - DNA, 398 bp, Glycine max
  unsure (1)..(398): unsure at all n locations
agctnntgtaatactagaaacccatgtattgttgttatcccaacctcattacaagcctagaaagtccttcggattcattntgtgtgtttatttctgtttggtatgagattatatgcaaaggataggacttgtgttagttgtttataatggaatgagcctaaacacttgagcttgaatgaaacaatgattgttaaggctttggttgatgatccttccttgatatctatcactctcactagcttatttcagttctgactctaatgcatatgttcctatctttgaaaagtttcatgtntgttaaaagaaattgattgaagcattccatgatattcatttcatgtcttattatgtgtgttagtgttggttagtgtcctggtattntgtttagtgtgtgttct

SEQ ID NO: 35090 - DNA, 383 bp, Glycine max
  unsure (1)..(383): unsure at all n locations
aactacaaactaaactaaatattaacatgctaaatcgaatttgactaactcgacttattttcaatctttactcattttcaaccttgataaaatttgcctctattcctttacacgttggattactttggaatttaacaatagatacctgcccccggaaaattgtttgtgcttggaatttttatctctttgtccacacatgtgaattaaagcgtctattgagtagaattgggggtagaaatacacggngagagaaaataggtgaagagtttgggagagagggactagagaactaaagaatagacaacatattgacatggaaaagataccaaatgtttccctttgtcatgcaaaactgagcacgcgtactgatcagcatttccata

SEQ ID NO: 35091 - DNA, 293 bp, Glycine max
  unsure (1)..(293): unsure at all n locations
ttaaaaattagaggtaaaaaatacaattaaccattaatactatttcttttttgtctttaatttacttatttcttgattgaattgtctgatatttttcttttcattcagtagtcttattatcttatctcttacaactattctattattcttacttctctaggattgtttcatattctgaattcacaaataataaaatttgatatgttaattccgaccaaaagtatgatccacaatctactgccaaacctgtatctttatattatatactatcattcatgctcagngttaatata

SEQ ID NO: 35092 - DNA, 187 bp, Glycine max
agcttaagcgcatatctcgtctttgagagattttaatagtacatccattctaaacgatgcttggaacaatacgaggtctgggagattcgaactacatctcgtgtctaactgttgcatggaacgacaggagtgagttatagatcaaagaatacttgggtgctcttaatctcagcgagagatataccgt

SEQ ID NO: 35093 - DNA, 424 bp, Glycine max
  unsure (1)..(424): unsure at all n locations
gttgatttgccaccttaagagtccactgcaccttaccattccatcaccttacctgagacttttgatcttgatgattntgagctaccccagatatgaccattcttcaagggttaantccctaaatatatgattaatttgaagctttaactatggcttactgcagtgacatttttacttaagttggnntttatataattcaatttgcttcatttcattaacaccatctgtctgatttatctaatgttctttagatgactgatacaaatttataataatgacagaattttaagtgctgatatttatttgctgtgcttttcaaaatgctctatatctaatgtgatttatgtaagatgtgagataggatattgttataacggaaaattatatgtggaactgcagactatgtgacacatgtagtctagga

SEQ ID NO: 35094 - DNA, 244 bp, Glycine max
  unsure (1)..(244): unsure at all n locations
ttagaatcttggtcatagtttcaatcataatcagtggtgacctgtacagcttggaattggtaatacaaacagatatggcatcaaaagtttacttaatatcacagtttgcacatgttttctgacactattagcggtttaaaaaattcttgataaaaaattattgctttataaatcctctatctctctcttgngattntcaattcttttcctgctttcagaaatatgtataagctggcatttttta

SEQ ID NO: 35095 - DNA, 71 bp, Glycine max
tccatttgggtcctctgaagatacacttgacatcaaattggtctttcaaatatgtgtcatgaaaatgggtc

SEQ ID NO: 35096 - DNA, 478 bp, Glycine max
  unsure (1)..(478): unsure at all n locations
taacagaggcatgcaagcatgcctagttgccaatatatatcatcaaaattgtanatatatattatgacataactntttctcttgtggcaatgctcatatcaatttagattcttcttgctataacaacatactatgatcatgaaatatgaaaaatggatgtggaaaacggctntccttaatggtgagctaaaatatgtttccttaataaagtctacaagtttcaacaatacatttatggatngaaagaagtgtctagaatttggagcattcattntaacaagataattgaatngtttaatcttgttagctatgaagaagaactttgtgagtaaaaaaaggttactgggagcattacatttatatgtagatgacatataaaataatacacaatataatgaagaaagatntgactactaatatattatcaatgaaatatntaggagaaacaatattttaaaaataaagaattattgagata

SEQ ID NO: 35097 - DNA, 430 bp, Glycine max
  unsure (1)..(430): unsure at all n locations
ggttcttgattntttcgatgttctntaacaaccttaganaaattacttgtccttcatttaattgtctntgggcttgccgaccatgatcaacaaagtactttcgacatctactatatgttgatttcaccaacgctgttatgggtattttgcgacaatccttcaataccttatttacacattctgagaggttggttgttatgtgaccatatctacgtccttctttatcataagcaatggtctatttttcctttgaaatgcgatgaatccatgttgctatgcttagacttaattgacgaaatttttctataatttgatcaaatgtatgcttgcaaggagtgtagcctgcataaaattagttagcaacaacacatttaagtatatatgatacttaaattaacttcatattantaaataaatcttacccaatttc

SEQ ID NO: 35098 - DNA, 466 bp, Glycine max
  unsure (1)..(466): unsure at all n locations
catgcaagctntagcatgttgtgcaatgacaacatcatctatcataatgggaagtngtttaaaattncgccgcaaccaagttaggtaaatcattntaccttttacatacttatcaggtggagtttccccgagtaatgtttgacaagcaacacgtacatcgccaatgatgaaactggttaccagcaatccatcaatcttcaagtccaactgtaggaccacatcctgtaaggtaatggttgcctctccatgtggaaaatgaaatgtgtgtgtctcgattctccaacgttcaaccaacgcactaaccaaatgctggttaatatcaacttttccaacatttataatatgtctaaaaccagctaaattgattagaattcttacccaattatctatntgatccaagtgagtaaaagcccaaacagaagtatacctcagacgaatgattctctcttggccttcccacacttga

SEQ ID NO: 35099 - DNA, 296 bp, Glycine max
  unsure (1)..(296): unsure at all n locations
atatatatgttacaaaacaacgaaagcaanattgaatcgattattgcagatacaaaaatacttaaacaaacctaccaattaggggttttgcggcttattgcaaattccgcccatgtttctggatcaaggccatacttgactgtaggatcagatatttgctgacattcattgtcagccaagacaaattttgaagtcaatgaagacttaaattacctccatcttgcttcaactgttgacatcaccttttttctgcattttcaccttcaaggatatcaaatttgcgctgcacaacaaaa

SEQ ID NO: 35100 - DNA, 392 bp, Glycine max
  unsure (1)..(392): unsure at all n locations
acccatcacatgttgtctgtgtggcggntgggcgaaggngcacaacaagttttccacatccacaaatcgcgcataaacccaccatcctctgttgcccacctccaactgagctcacgtactcccacgtagcccatatcctcgtttttctcaaccccgggtctccattaatcctcccaagcttccccaacatccaggtaattcatcatccaaatcatcacaaattaacaaaccaagcaaaacagggcaaaggcagaaaactctgcccaaaactcanaccaaaatcacagctttttctcacttaaagaccccagtaacatttccttctgttccaattcattaaccgtggattgactcgaaaaatttactggaagtctctagtacatacgtctaca

SEQ ID NO: 35101 - DNA, 317 bp, Glycine max
  unsure (1)..(317): unsure at all n locations
agccttagtttcactntggttattattcaattcattcaaggaaactttcaaagaaaaacgtttgattganttttttgattattttattcaaatatatcttgattattttattattatcttttcaagatatttcgattattntattattattttttcaagatgtnttgactattttattattatttcgcttttttggtgtaaccgaggttacaacgtgaacgatcggctacattttgctttaatagtgattaagtgagattacaacgcaaatgatcggctgaaattcattctatcatttattagatgagaaaatgact

SEQ ID NO: 35102 - DNA, 410 bp, Glycine max
  unsure (1)..(410): unsure at all n locations
cacaaatggtttatatattntatttattagaactctaaatgatttatgaggaaatattttgatgcctaaatttaatttctatgaataaaaagaatgatttatgagaattggtgaccatgtntgattntgatattnttagnttttttggtatttattttttcttttaaattaatttaacatttttttgtgtttttgacgtttttatntattaattagtgtgtatgatttgaccaattctcacatatatgggactaacaaactagctaggctatgttatagcttcaattagttcaacccatttaagttgtgggtcattactggatgggcctaatcaaatgggttgatctagatacttaactttacgaatgagtaataagaacaacaacatcatctctagaatcaatggatag

SEQ ID NO: 35103 - DNA, 335 bp, Glycine max
tttcaggaggcatctcggagaggatctttttcgtgcatatttgcgcataatctcttgaactaagaagatgttgtccatcatctttttgttcttaatgaaggaagtttgagtttccccaataatagtctcaaacactgttgccatattacttcaagagaagttttcttagatacagggaaaaaggtctctctcgaattgtttcatctatgtgagagaattctttagcaacaagtcttgcgatatgtctctcaatgatcactggtgagtttctctttgatgatataactcgaaagaattcattaaccacctcacagatatcatcaccaatgatattc

SEQ ID NO: 35104 - DNA, 73 bp, Glycine max
  unsure (1)..(73): unsure at all n locations
agctgcatgatttacatctncctcttgctcatgtcaattcttcttgatatcatcaaaagcttcatgatttaca

SEQ ID NO: 35105 - DNA, 279 bp, Glycine max
agcaagctgcaacgataatacgttgaataccatcaactgagaaccctcaagaaaaaaatgctctgatgaggaataaggcagaaccggtcgactgaaagctgctttgacatggtcccgatagaggtctcaagtatacatgagactcgtgatggcaacaacggacacaagccttcaatgatctgatatatcctgaagaattttggtgcttatataactaatgttaggtctagatgaccactcgtctcatccaccttggattttgatgtataacaataacta

SEQ ID NO: 35106 - DNA, 470 bp, Glycine max
  unsure (1)..(470): unsure at all n locations
agcttgtctagttgccaataaatatcatcaaatgtgtaatatttattatgacataactttttctcttgtggcaatgctcatatcaatttagattcttcttgctataacaacatactatgatcatgaaatatgaaaaatggatgtggaaaacggctntccttaatggtgagctaaaatatgtttccttaataaagtctacaagtttcaacaatacatttatggattgaaagaagtgtctagaatttggagcattcattttaacaagataattgaattgtttaatcttgttagctatgaagaagaactntgtgagtaaaaaaaggttactgggagcattacatttatatgtagatgacatataaaataatacacaatataatgaagaaagatttgactactaatatattatcaatgaaatatntaggagaaaacaatatttaanaataaagaattattgagatagaattaga

SEQ ID NO: 35107 - DNA, 407 bp, Glycine max
agcttgacagacagccaatgtgccatcttgctttctgtccaattaatgataccaatggagaagacgacatggctgacaaaaacctgtgttggaagactaagaaacttatcgatgtttgataggctggaagaagaattcatgtgggaaggaggagaagagattaaaccaaagtatatcggtggagacatggtgtttctcatgggacttactaaagcaagagcataacaactatgcagagatgaagttgaaagtggattatcaatggagaaatggagcccgagtttaaatcctgaatttaggttggtatgggtgatatgttgggggattccgctctaaccaagggatgtggaaaacatcacgaagattgtgaaagtgattgggtaagtgttgggtgtggatgaagatgt

SEQ ID NO: 35108 - DNA, 105 bp, Glycine max
  unsure (1)..(105): unsure at all n locations
ataaaagtgtcgctccgccctgcccttatatcagaactgatggactcattagcattctgcnacatggaatcatcacaacggcatgatgaacctatatgtcactgt

SEQ ID NO: 35109 - DNA, 406 bp, Glycine max
  unsure (1)..(406): unsure at all n locations
tttcatgtatggccttgtaaataaactgttaatgggaagtgaattctaatctattccactttgaatgaaattgatggatcgtattgtggttagagtttaaactatttaaataagtacaaataattgtgataaatataaaaactttaaaatgtcacaaagattcaatgtgaaacagcgagaggttaaacaacattgacgagaaagaattggttgacattattcaagcttgtgagatgtcttttgttatgaattaagacaacacacntccttctctccgacttttacctagtgtgtcaagtgggaaaaaacaaanacactaactatagagaaattgaaagagaatatcgatgaacttatataaatactctnttctctaatagacaagagaacatgacagtataaatac

SEQ ID NO: 35110 - DNA, 259 bp, Glycine max
aactagttccgcctcggagtacgacagtcaccgctttatgagaattgtgcaccagcagcgcttctaagccatcaagggatggtcgtttctcccggagcgacgcgtccagctcaaggacgacgagtatactgattttcaggaggaaatagggcgccggcggtgggcaccactggttactcccatggccaagtttgatccacaaatagaccttgagttttatgccaatgcttggccaacagaggagggcgtgcgtgacatg

SEQ ID NO: 35111 - DNA, 423 bp, Glycine max
  unsure (1)..(423): unsure at all n locations
agctntacatggtgtttcgtttagactgaagatgtgttagagccttctagtagcaacccttgactcgttcatggnggatccgcagctacgacaacaaatttgtgtcagttggtgtcgtggatgagagagattgaanactgcaccattgccacgaatgagagagatcgacaaccgctacatcatcacgaacgagggtttttcaatcctgaactctttcgctcaattgtcgtcaacacaccacatcaaatcctagccaccaccatcaaaagcctactatgaacgagggagactgcaactgctccatgaccacaatctacggagaagggttttgaactttgattattataaaatcaaattaaaaattattggtgttttaaaaccatcagtatgtgaaaactagtaaaagtgacacatgcccctcac

SEQ ID NO: 35112 - DNA, 484 bp, Glycine max
  unsure (1)..(484): unsure at all n locations
tgaggaatcttaaggaattgttagagaagctgctattgctgtcagactacacatgtgagttcgcttagaggtaagggatgattntattgcaattggngttagagtgaatatgcatagggatccttagaggaatcaaatggggttaatattggggtgttttatgcantttaatttttcgtgtacaatgataactacgaattgctcatgtttgacgggtcaattgatgccctgtgtgaattgaatggtttaattgagtgtttggctttgaatgctagaaacctaanaatttangaattcttgattcttgcatgttttcttgaaattgattgangggttttgttcaccatgatgtgatcacatgttctatgctattaaccgaatgaataagtgaatgattatatgccttaaatgttggaagaaatgtatgggtganatatatatatatatatatatatatatatatatatatatatatatatatata

SEQ ID NO: 35113 - DNA, 481 bp, Glycine max
  unsure (1)..(481): unsure at all n locations
agcttccaagaatcaagatcaagattcaagactctatattcaagaatcaagagaagacttaatcaagataagtatgaaaaagaattttcaaaaaatgagtagcacatggattcttctcaaaatatgtttaccaaagagtttttactctctggtaatcgattaccagattgttgtaattgattaccagtaagcaaaatggttttcaaaaagctttcaactgaatttacaacattccaattgatttcaaaaagctgtaatcgattacaatgttttggtaatcgattaccagtgtgcttgaacgttgaaattcaaatttaaatgtgaagagtcacattctttcacaaaaaagctttgtgtaatcgattacactgatttggtaatcgattaccaatgattgtttctgaataaatcaaaaaatgtaactcttcanatggtttttgacttttttcaaatggttttaagtntttctaaaagtcataac

SEQ ID NO: 35114 - DNA, 363 bp, Glycine max
  unsure (1)..(363): unsure at all n locations
tacaagaaagtgtcattcatcggttcaaatctcagtagatcttgaagctggtaattatgctgatcacatgaaagtgctgtctgttgaaaagattgctcaggcaatcccccacatacacttgaactgctagactgatctttatcatgcagagatggttcaagctcaatntgattattgaatctttcttcaaagaaatccatgataaaaagattnttaggtgaattaaaaccttcagttgcacttattccccattttgaccaatagtccggtgaaggatgcctgtccaataaatcctgatctctgggaaccagattatcattaacgccgttcccataggcgcatccattatctattgtctgcaca

SEQ ID NO: 35115 - DNA, 475 bp, Glycine max
agctgggttcgaggtacttacccgttgaagatctattaacgatgaagaacgtatgaagaacgtcgaagaacggttgaaatctttgcgaaattcctcacggaaaacgttacggaaacgtttcggaagcgcctcggcttagattttcttcacggaaacaatttttccaagcaaattcgaaagagagagaagtgcctaaggggctgaaccccttccttcttcccttcctcccctatttatagcaaaataggggaggtagttgccgcccagctcgcccaggcgagctcagctcgcccaggcgagcagggttgcttcctccagaagcaaccgccttctggaggaatattctggagggcccaagtgggcctgggtgctatttgcacccccatttttactaagtacaccccctctgctgtttttttttgggattctttttcgaaagtacggaacttacaatttgaacgatactgttttttcg

SEQ ID NO: 35116 - DNA, 399 bp, Glycine max
  unsure (1)..(399): unsure at all n locations
cgatagaggctgagtggttgacttttcaagaggacgggcccatcataaaaacaaacccgcttgccaatcatggagggggggtggttaatgccattgaggtgagaaggtcacaccggcccaagcttttgaaggacgtcacgacccccagaaagtttatctacaaagccttgcagaatgcgggcatgattccctgcagcgggcacaaagaagattnttgcttaatgcatccgggtgtactccatggcatggaaacatgttcggtagttagagatctatttcaacagatgatagaccaatgccgactntatgtcggcagtgagagggaggaggaacaacatgtatacatacagtctgcagatgaagaaggacctataaagcctaaacccttggtaatacact

SEQ ID NO: 35117 - DNA, 487 bp, Glycine max
  unsure (1)..(487): unsure at all n locations
agcttaataaatctatatatggtttaaaacaagctttcttgttcttggtaccttaagttttatgggataatttcttcatttggttttgatgaaaaccccatggatcaatgcatataccacaaggtcagttggagtaaaatatttttttttttatatatgtagatgatattttacttgcagccaataacatgaggtgaaacaatttctctctaagaattttgacatgaaggatatgggtgatgcatcttatgtcatcggcattaagattcataaagatagaccttgatgtattttaggtctattacaggaaacctatattaacaaaattttagagattntggatgaaagattgttcaccaagtgttgctcccattgtgaaggggtgataagtttaattgaaccaattctcanagaatgactntgagagggaacaaatgaaaaatattccttatngctttgttgntggaagtctcatgtatactcaagt

SEQ ID NO: 35118 - DNA, 508 bp, Glycine max
  unsure (1)..(508): unsure at all n locations
cttggacanaatggatgagtaggaaagaagtccatgatatgcttattgaagagtttcaaggttgtttatatttaccacttcatctaactatgatccttctaatgtcgtgtctgcgattagacagaagttggctttatcttcctcttttgcttcttcaacggacaatgtgtgacaccctctacccctcacatatatactaacaaaggaataaaaattcaaatattaattaaaagtatttttttaaaaacatttttaaatacaagccttccaaagggataaaaggttcacaatcactttcttttacatcatattcaaacttgtccaaataaataataaagtcatcggctcgaacaaggccgtctgagacttcatacaattaatataaaaccctataccccaatgtcacatcctattagagcgttgtgtctcgacgtccttcagcaaaatattccttatagcagttcacctagtcatctgctcctncgaacacagagttcaagatcatcac

SEQ ID NO: 35119 - DNA, 502 bp, Glycine max
  unsure (1)..(502): unsure at all n locations
atccttaagtcacctgcggcatgcaagcttagcgtaacatcaagcttcatcttacagatagtaggtcaggcttagcgcacttccaagaattcaaaagccgtaagagattggcgcttagcgcctcctggcctgctaagcccagcttaaaaactcaagttatagaatggatctgggacttatcgtaggatagtgcacttagtgctgctacaataaaatatttcttgagaaaaagtggcacttagcgcatcatccacgctaagctcactggttaaagttcaattaccgtgaagatgtggggcttagcgcagtgatgtgcgctttgctgaactattcagccaaccaatcaggggtctatgcgcttagcgctagcaagctcggcttagcgcgtgaagactgagtgcttagcgcaaggtctgcgcttagcagatagacaattgggcaaaatttctaagtctgtttctgtctatctcttcacacaagcttanaacccccttgtcattac

SEQ ID NO: 35120 - DNA, 427 bp, Glycine max
  unsure (1)..(427): unsure at all n locations
tgtaggattatggggtacccatcacatgtggtactatgtggtggtcgggcgatggtgcacaacaagttntccacatccacaatgcgcgcataaacccaccatcccctgttgcccacctccaactgagctcacgtactcccacgtagcccatatcctcgtttctctcaacaccgggtccccatcaatcctcccaagcttccacaacatccaagcaaaacagcattcaaaccgcacaagctatcgcagccaagcaaaacagagcaaaggcagaaaactctgccaaaacaccaaccaaatcacagtttttctcacttaaagaccccagtaacaatcccttcaatccaattcgttaaccgttggatcgactcngaaaatttactggaagtctctagtacatatgcctacattgtgaccgttgggatctact

SEQ ID NO: 35121 - DNA, 474 bp, Glycine max
  unsure (1)..(474): unsure at all n locations
agcttctatataagctngaaccatttatcaatatttacaagttgagttntatttagaaaattagagtttatctcttttatcttagtgagagtgattctcctaagttcttgagtgattcaagaacaccctggttgtagcaaaggactttcacaacctttgtgtgttgccctcgcccagaaagagtgattctttccttcctttcatcttcaaccttgttctttcaaaccacaattccagaaaatccacttctatccagaattatctcatggccataactcccattntacccactcaaattaagtgattcttgagcctaaattgaatttcaaaacaatacctttcacctcattntggaatcacctcatttgaagccttgtagcttgagttattgtcatttctatatttttggccagccaccacttaacttatgttttaccatnccattcatnncatttatgccaagaaccaccttat

SEQ ID NO: 35122 - DNA, 443 bp, Glycine max
  unsure (1)..(443): unsure at all n locations
ctcagcttaactcatgaagaagtctcaaatctcctatcatataattagatgctcctatatcaataattcacaccgtgtttttacctatcattctttctatggtgcttcccttatgattgttcagaagattcaccagagtttgccactactcactgctcaaacctgtcagtccgcccttgtgtgtatccatcgcttatagaatcgntcctccattggaatgaccattttggatacccaaccacctgaaaacagtttgtggcatcatgtcttgttcggttgcagtgcccacaaaccgtggacttgtcttttgcatctncacgccctcttgtccttccaccaatttgcacagccagaacaacaacttcccctcgttcctccttggttctggagattgccttcacacgtctntcttgtatgagagtagcatatactctgttaaatga

SEQ ID NO: 35123 - DNA, 422 bp, Glycine max
acttttactcggatgttgatgcgatccgtacggggcggatcacctgacacaggctgtcgcagcagggaagacgccacgctccagggatggaagccgaggagcggaatacaccgacccccgcgcatgaagatgaggcgggcccgacggccgaaagacaacctcggaaactgagaggccgactgcaccaatgacccggacacgaagaaccgcaagcgggcggaaggccgcagggtccgctatcggagcaagcacgcgcagagagggggcggaccacaagaaaacaaaactgggcgccaaaccgccggggcaagtacgcacggaccaaaaacattcacccagcgagacgggcacaaatggtagggaccgcaaccacgaacggacggacacgctctcgcgcgggccacaccgcatcgatggtcccg

SEQ ID NO: 35124 - DNA, 220 bp, Glycine max
tgagaagtgaaatgtacaatgatgtatatttggagcatactctcacctcacacaagtctataacatcaatctaaacttgctcaaactggatttacacctaaaatttcaccgaatcaatatgtgtctcttcaacacccagaattgccctagaaatggctctttgtacactctggacatatgtttctccctctatcacagcctactctttctaataagccct

SEQ ID NO: 35125 - DNA, 595 bp, Glycine max
  unsure (1)..(595): unsure at all n locations
cccagccctcatctttatctactgcgcacccggacaattatcaacacacatccnccaaaacncaacnaaggtataaagtatcacatctgacacggtaacnnacagcgccngcagcangcaaccaaccancggcggacaacagttgctcctatcganacatttattgacacgaaancgaagccttcaatgtgcactgtccgtgtgcgactcacgtctctctatccatgaatacaactgcgcggatcccaatggtaaaggcgtgcgcaactgaatctcgaaccacgcatctcaccagcacgatgatcgaacggtgaatgagcccgcgatcatagacctccgatgaaaggtatgactcgctgaggaaacagacaaatcgacgacgcgaaggacagtgctctaagcgtcaacagtttgacgcaagtcccaacggagaaaatgctcagaaactacgtcccgaccaggtgctgcgagttccgacgatccaacggatacagaatcctggatcctcgggttcactacaatagagctgagcgaatgccgcataacacaacgcggcgggagggaaagagaaacgaatcgatagacgacgagcccg

SEQ ID NO: 35126 - DNA, 394 bp, Glycine max
tgaaagttatagtactaccaaaatatacattccaccatcttatctcaatatatcctcagttatgtgtctgagttagaagccggccaagagtcctattctactacactattctcaagttgatcatcatcaccatgtcagcttccgtcaactatcttcaccaacctctgatcctaagcacacaaccaccatcagtttaaacactgccaaccacccaactaagtcagagaaccaaaccatgaacctaaggaagaacatataaatgttgctgaagacgaataacatctacaacaacgaacagtgaggatagcaacaacaggtggttcagcaacacctagaacaacaaaagtggattgaagactctgctttgacctatgacagattcatgatccaacct

SEQ ID NO: 35127 - DNA, 537 bp, Glycine max
  unsure (1)..(537): unsure at all n locations
tgttttacgcctgtacatcgtaaacccctgaaaaccccccnnnctntgacaatngcagaaacaaggaaagagccttttgttatttaatgccttttttaccngcagacgtatcgaatgaatatagtaccaacttgaaagagtaacagaagctcgtataattccaaagtacttaggtgtgtgcactacaatacctgaacatattggtgtataacgtccagcatatgatcatgatactatttcgttgatcgatagaatgctcactgctagatgtatcacacaacacaaccactagtgatatatcgacgcatgaatcgtagcactaacatgcgagctaacatatgcttccaagaaagtaccatgtgatttgggttggtctgtatgacacaccaacgtgctataatgcaatgagctgatatcaagctcgccattaaaatgantcgtataattaaggcttgttaacttgaacagtgggggacacgttttatcaattaatgtgctaataaattccactttaagaatcttacaagaaatattccc

SEQ ID NO: 35128 - DNA, 408 bp, Glycine max
atcctctgagtcacctgctgcatgcaagcttccagaattttatcattattaagactcagatcaagaataagagaagacttataagatagtatgaaaaagattttcaaaaatgagtacacatggattttctataatatgtttaccaaagatttttactctctggaatcgattaccagattgttgaattgattaccagtagcaaaatggttttcaaaagctttcaactgaattacaacattcaattgattcaaaaagctgaatcgatacaatgttttggaatcgataccagtgtgcttgaacgtgaattaaattaaatgtgaaagtcacatttttacaaaaagcttgtgaatcattacactgttggaatcgataccatgattgttctgataatcaaaatgtactttcaat

SEQ ID NO: 35129 - DNA, 346 bp, Glycine max
  unsure (1)..(346): unsure at all n locations
ttatatggatcaaagtcaaataataaaagataggacaggggattaagagacattatatcaaacaagataagaacatgaaacctcaacattataagaaaaattggctcaaaactagttatgacttccagccacagtaaaccaaccacagattcttaaaaactacaaaattcacacataaacagccataataatccaaaatactaacactcaaaaaagtgaaagaagtataccctattgatgcttatctgcaaaaaagagagaaaacccagtttcccagtttcctatcgatgaaatcaaaatggatgataatatgtannagtggattgatagcacattagcaatgaat

SEQ ID NO: 35130 - DNA, 416 bp, Glycine max
  unsure (1)..(416): unsure at all n locations
agctngagatgatgttttgttgaagggtgaaatctttctgcttttattggtgaccacagagtggtacctggagatatgtcgcggnggtcaggagaccttgtggacgtcaggtggggtgctattgcccaaaaccaagcttgaccaatcccgacccaacccgggcatagttggtcagtgagaacctgtgatgtacctaagcaggcgagctcctggcagtcaacagataaaaggaacaaagaccacaaagcaaggaggcttgtggtggctggccagctgtgaaacttgattgatatgtgagatatggtctctggtaatcgattaccaagggtgggtagtcgattacaaggcttaaaaatgaagacaggagactaagatggtctttggtaatcgattaccacggggtgtaatcgattacc

SEQ ID NO: 35131 - DNA, 479 bp, Glycine max
  unsure (1)..(479): unsure at all n locations
tcttgaatgggatcagtatattcattggcacagattaaaggatgaagacgtggttcgtgatatctnttggtgtcaccctaatgtagtgaagttagtcaacacatgtaatttggtggttttgatagacagtacctacaaaacaaacaggtacagacttccactgctcgantttgttggggtgacaccaattgggatgacattctctgccagttttgcatatctggagggtgaacgtcttaataatgtggtttgggctttagaacgcttccaaggtatatntttaaggcgtgatgtcctccctaaagttattatcactaacagagacatagatntgatgaatgcagtgaaaacttgatttcctgagtgtacaaatattgtgtgcagctttcacantaacaagaatgtgaacgccaaatgtacatcgttaattggtctaagaaatgcttgagaatatgtcatggatgtctggggaactcttg

SEQ ID NO: 35132 - DNA, 52 bp, Glycine max
  unsure (1)..(52): unsure at all n locations
agcttngcatttttggggtctcccaagccactttgttttgcatttgatttca

SEQ ID NO: 35133 - DNA, 416 bp, Glycine max
  unsure (1)..(416): unsure at all n locations
gtggtaatcagagcacaagagcttcaagttgccatatagggaattggaaggaggattggtgccatcccttgaagaatttgagtcaagaagcaaggggccaaccaccttatgagctatnggactaagaagcactccaaattgggtgaatcaccaaagagagaaaaaccaccaaaattgaggacctttttgcaattctgtaattgacaatttactttactttcattgcttatcaaatttgtaacaaaaaggcctttcattggaagtaagtagggagcctccaatagggcaccctacttacctctgagtgaataaatttaggcaattttcccttatgattgtgagtgttttgttgggaaccttaaaagtggtcatccaaacactcataggatatccctagattacatatctcgcttact

SEQ ID NO: 35134 - DNA, 463 bp, Glycine max
  unsure (1)..(463): unsure at all n locations
agctataaatatatntacatgtatcaaatatatatataatttataataacaataataataaatgtatcattagataaatatttatntaaatatatatatatatatatatatatatatatatatatatatatatatatatatataagcacataaaataattaaatgtactaaaaacattaacatgaatatactaaaatataaatgtaagtttaataatatatatatatatagaagtaattttacatgtatatatataatttgaatgattaaatgcattaaatataaaataataagaacatgctaaatatatccttagataaaaataaaatatatatgtataatatatgtacataacaaccaaaagtttatatacatatatacatatatcctaaatgcattccaacgaagccatgaaaacccaacaatgagaaacgaaaagtttgatctcagcactacacgatta

SEQ ID NO: 35135 - DNA, 427 bp, Glycine max
  unsure (1)..(427): unsure at all n locations
tcctcggtgccattcctgcgaagggcaaacattggaaagttagttntagtgggacattactcttaaagcaaaaatggcatgtaacctcctcccatcaatacaaacatcaatgtaaatttagagcaagcttatgcgcatatttccctacgaacgttcacttgcacaagacatcctattaactaagaaaaatgcacccatatacaatcaaggtagcttccttacctagattatttacatgtacttccaaagtgtatttgttatttacatcatacacgccatcttgtcaaaatttacacacatgcatactcaaagcatttcggggtaccaaaaattgcacatgcgctcatcttggtatttctaatatctatacatatacaaacttcatgatgaatcttgactatctacacaataaagggctacatntcat

SEQ ID NO: 35136 - DNA, 435 bp, Glycine max
  unsure (1)..(435): unsure at all n locations
agctnganatgaggaagtgtggaaaggtgagactttctacttttattcgttgaccacagagtgatacctggagatatgtcgcgggggtcaggagaccttggtgacgtcaggtggggtgctattgcccaaaaccaagcttgaccaatcccgacccaacccgggcatagtcagtcagtgagaacctgtgatgtacctaaacaggcgagctcttggcagtcaaccgataaaagaacaaagaccacaaagcaaggaggcttatgtggtggctggccagctgtgaatcttgagtgatatatgggatatggcctctggtaatcgattaccaagggtgggtaatcgattacaaggcttaaaaacgagatcaggaagctaagagggcttatggtaatcgattacaaaggggcgtaatcgattaccaggcttagaaataggact

SEQ ID NO: 35137 - DNA, 247 bp, Glycine max
  unsure (1)..(247): unsure at all n locations
ttatgtcaatacatcaaaatcttatgttntacttgtgtcatcatgtaatgcttcctctactattgattccataaaacagaanaaaaaacactaaaaaatgaaacctaatatcatcaacaacataaaccaaaatttttggctgctggttntgtgcccattccccacatttgatcttcgatgatccaatctacaaatctcccccccgccccccataaaaatgaantaaagaaagaaaataaaagaaact

SEQ ID NO: 35138 - DNA, 468 bp, Glycine max
  unsure (1)..(468): unsure at all n locations
ctcataactgaagaacttacagcagattttgtgtattttcgcgcacagttagtaccatttcctttgaacagcccacgaaaaccttcagttctccatatatattttagaccttgaattgttccattgtatttaatgctgtgtggattctgaacctgtaaatggcagaggcacatcacatcgcacatatgatatcgatacacccaaccacaaaagaaccaacaaaaaaggtagcttgtcagatgcactttttttctttataacaagaataaatgatagctaaatccacatttaaaggtaaacaactatatggggattaacctgtagcaaaatcttcaagcgttccagtggagcaactgctgttcgtgatctgcatatatacaaaaaagggtcaaatcaattaaaactcgacataatgcaaaanaggatgttgaaattatcagtaagaaatagtttccaggaaaattggat

SEQ ID NO: 35139 - DNA, 412 bp, Glycine max
  unsure (1)..(412): unsure at all n locations
ggagtaagcctctccgagagagaagataaatagcttgggaagtctntatcctcaagtttgagtgagccaccgtagagtaagtcaatcccaagacaagagtgaatccacttcttagagtgagaaagagtctctttgagagagaagataaatagctgggaaagtctctatcctcaagcttgagtgagtcaccatagagtgaatcaattntgtaaacacatccttgtaaccctactatcactttgtatagtggaagaatctccatattggagaattataatcgtgtgctcccattactacctttaattactaagtgcctatcttaatttcaggaagcgggaaagtccgagttttcccaacatgatgtgaatcatctaaagaatctgacaaagaatntntgtccttctcttttaat

SEQ ID NO: 35140 - DNA, 451 bp, Glycine max
  unsure (1)..(451): unsure at all n locations
tactaagcttcttagaaaacgtggcattgtgcgcaatacacaatgccctgtttaccacaacaaaatggtatatcagaaaggtgtaatagaactttaatggatatggttgagtatgttaatcaatttgaatttactcgtatctttgtggatgtatgccttgaaaactgtcatgtaattgttgaatagggttcctagtaaggcagttccaaagacacctttgaaactctggacaaataggacacctagtataaggcacttgcatgtttcgggttgtcaggcagaaataaggatttataatccgcaagaaagaaaattggatgcaagaacaatcaatggatattttattggttatccagaanaatcaaaggagtatatgttntattgtcctaatcatagtatgagaattgtcgaaactagaaatccaaggttcattgaaaatggtgaaatcagt

SEQ ID NO: 35141 - DNA, 475 bp, Glycine max
  unsure (1)..(475): unsure at all n locations
agcttgagatgaggaagngctgaagtgtgattacttcctgcttttattggtgaccacagagtggtacctggagatatgtcgcgggggtcaggagaccttgnggacgtcaggtggggtgctattgcccaaaaccaagcttgaccaatcccgacccaacccgggcatagtcggtcagtgagaacctgtgatgtacctaagcaagcgagctcctggcagtcaacagataaaaggaacaaagaccacaaagcaaggaggcttgtggtggctggccagctgtgaaacttgattgatatgtgagatatgggctctggtaatcgattaccaaggtgggtaatcgattacaaggcttaaaaatgaagacaggagactaggatggtctctggtaatcgattagcacggggtgtaatcgattaccaggctttgaaacaaggtcaggaaactaggggagcttctggtaatcaattaccaggggatg

SEQ ID NO: 35142 - DNA, 444 bp, Glycine max
  unsure (1)..(444): unsure at all n locations
cgcccagtgagtcgtttgtctcttctcacgcttagcgatcccatctcactaagccaaatttcactaactcacgcttagcgagccaatctcgctaagtgagccttcagaatctgaaacatccatgagcctttaaaaacactgaagatggcagaaactagggagagatgagttgaaaaatagagccaagagagaagcccaagcgacagaaacgaagcctccaagagagtttaggttagtggagtgagattagggttctagaggttgaaggagacatcctcaaccattcttagccatttccttacctcaaaatctatcctttgtgctgaaagttcattacttgtaatggaaggctaaacctcttgttggggagttctgctaaacctttgatgtaatanctcattactatctatntaatgttgttttatgtgtcattgctctatctat

SEQ ID NO: 35143 - DNA, 443 bp, Glycine max
  unsure (1)..(443): unsure at all n locations
agctnntatatagaattagagcttcgatctattttgagatcccatctgatgttgctaatagctttggcgcttaacatgaggttgctactgtgcaaagagagagagtggggaccaaaaacactttttgcagcaaatcttcagagaagtacaatctgctagtgtcgtctactgctcaagctgacttttagtgtacaaatcanaagaaaagttaacaacataagacaaaaggatttaagaatgtcgagacaagacaatttanatcttctttcttgtgcgctatggcacgagtttcttactgaacttatggacattacttcctaatgatggtttttagtacttgaggatcatgtaattggtccattgctttngaatngtgagccaagtgctaaagcacttgtcttcttaagactggaggatgaagtagtatcgtccaatgattgata

SEQ ID NO: 35144 - DNA, 439 bp, Glycine max
  unsure (1)..(439): unsure at all n locations
gcttacaatagagctgttcatatcaccactaattgttctcctnttgaagtatgttatggttttaacccactaactcctcttgatcttttgcctatgcctaatgtttctgtttttaagcataaagaaggtcaagcaaaggcggactatgtgaagaagcttcatgagagagtcaaagatcaaattgagaggaaaaataaaagctatgctaaacaagccaacaaagggcgaaagaaggttgtcttcgaacccggagattgngtttgggtgcacatgagaaaagaaaggtttccggaacaaaggaaatcaaagcttcaaccaaggtgagatggaccatttcaaatgctnganagaatcaatgacaatgcttacaaagttgagctgcccggtgagtataatgttagttccaccttcaatgtctctgattnatctctttttgatg

SEQ ID NO: 35145 - DNA, 486 bp, Glycine max
  unsure (1)..(486): unsure at all n locations
agcttcttctgagttntcagcagtttttgatagtaaacaattagaacaaaacaaattgatgcaacgntaaccatataactttgcaaccagagtttcaacagcaatcattacctcctcttgtaaacttggaaaatgattatagataaagcaatagcgcaactctttgtcctggaagaaaaaatatcaagcggattaaaagagccctcagtatggcaagcagtaacttcatgcttgttactctactcaaaagagcactcaaaatctcttaatcaaattcaagtcgtataaaatatgctaagattattccataagaaaaactcaatatactcgcaatcatatacctgatggccaataacaacaggtgcattttggagtataaaatgcaagaaaatatctgctctcttcaggatctgggagaagtcttncacaggagaggactgcctttcaatggttgctattctttcatgcaacttttcttcaagtatc

SEQ ID NO: 35146 - DNA, 362 bp, Glycine max
  unsure (1)..(362): unsure at all n locations
tttgcactcataattgaggcgaaagaatgtnggaagttggagccatgaaagtatcctttcaaagagatcttcattaaggtcatccagagaaaaggtgttgaagagtacatgatctccattttctggtgattntctcttcaagcttacacttacacgctgatcattacattccattgatgaacaatctgtggagaaacaacaaagaaataagatgttaccaagcaatcaacttttccatttccaaatcctatatagtagtactaaatcactaatctcagaagccaaaaaaagggaatgaagatttccaaattgaaccatatattaaaaaaaananaagtggccttgaattagctaataatcta

SEQ ID NO: 35147 - DNA, 428 bp, Glycine max
  unsure (1)..(428): unsure at all n locations
agctttctattctgtatattctatctagattattttttctctctcttccataacctanattcaacagttaattctatatattattcttctataccagacaaagaacatggactntagatttctctaggacatactccaacaaatcattggtcgtggttttgtttgtgttgtctctttaaacttgacacctgcagctatatattctcatatggccacatagctagagattgttgttaagacttgttagtaaatttaataaatgttagattagcagagagcatgtcctcaaatgtcaatctatatgttttagaaatggtgaanagggggaaaacagtaagacagattaaaacagtttgtgaatagaaaggaatatcagattntgcaaaaattatntatactgcctcgggcatggcattagcgaagttatc

SEQ ID NO: 35148 - DNA, 390 bp, Glycine max
  unsure (1)..(390): unsure at all n locations
aatttagattctatgtctagaaatctagtgtctgtgtccagaatcagtgattatgtgttatctaatgagctggttagcatggcactagcaatggtggcagaagacaagcaaattaaccgtgttcttgaggaattatttgcagaggaggtatcagtgggttgaacttattattattgattgctttattctgaagaaatttctatggtaaaattacatataggttgacttatggcaggggaacgagatgtgtacgaaagcagcagagttgtatttatttgacaaggaagaagtgtgtntctatgatataatgattangggtcgtacaagaaacgagattgttatctgctatcgcctggctaaccaagatcgagctattatcaacccttctca

SEQ ID NO: 35149 - DNA, 486 bp, Glycine max
  unsure (1)..(486): unsure at all n locations
agcttgccacccagctcgcccaggcgatcaggtttacttcctccagaagcaacagccttctggaggaatcttctggagggcccaagtgggcctgtgtgctatttgcacccccatttttactaagtacaccccttgccttnttttttgtgattcttttttcgtaaagttacggaaacttacgaatttcgtaacgatacttgttttctttccgtaatggtacggaaccttgcggattacataatcatcccctttttgacttatggaatgttacggaacctcactaattgtgcaacgatgcttccatttgattttcggtgtatcacggaaccttacggattgtgcatcaatattttcttttgctttctggcatgtcccgaaatctcacaaatggcctaatgatgggtgccaagcacctcacaaggactaaacanaagtagcatgtcatcaagcaaaggtccccggacgaaattagggatgacacataat

SEQ ID NO: 35150 - DNA, 365 bp, Glycine max
  unsure (1)..(365): unsure at all n locations
catgatgagttttancatgttggngaggtttccccttaaggccaacacttggtttgggctgcaccatgttttccttgtgcctagatagtgtgaaaatgtcggtcaccatgtacatgtgtatgttgaataggtagctaaatgctttgcaaatgtgcatatatgttgaaaatggaacgaatatgcatctcacagtaggaacatatgatatgaaattgcctttcaagaatgtgaatgagtagtacaaaaattatttttccaatgaaggtgcgatatgaatcttntttcaaatgagtgtaagcatgtgcgaatataatatgaagttgcctctcaaatgtatgaacatgtatgtgaatgaaatgcgaaca

SEQ ID NO: 35151 - DNA, 423 bp, Glycine max
  unsure (1)..(423): unsure at all n locations
gagaagatatcataccgcangttngtaagtttaaatatatgggatccatactacaaaatgatggggaaaataatgaggatgtcacacagagaatgcaagcaagatggctgaaatggagaaatgcatcaaggttatntgtgattgcaaagtacccaccaaacttaaaggcttaatttatcgtattgctatacatccactatgctctatggtagtgaatgttangctttaaagggacagcaaaagaaaaatgtgagtgtggaagaaatgagaatctgataaaaaaaaatacaaggagagaaaaacctgtatgatttctcttgggagaataagaacgaaaataaacaaaatgagaagaaaaggaatgaagcagtgggaaaaatntcaagggtttctgataccatgttagtaaacatgattcaattg

SEQ ID NO: 35152 - DNA, 348 bp, Glycine max
  unsure (1)..(348): unsure at all n locations
cgtcaaggcaccagattgggacactgctggtcaagaaaggtctctcattntctactatgcattcagtttcttcaaaatgaattgctttctattattatgtgttttatgtgccacaatgtcactatgcttgtgttgagctataattatcatttttctattgatcatgattgagaatgcaaccaagatctgagaagtagtggttaagatctgaatagatattttcagaatcgagataaaataaagcagcatggttttttactataattaagccaaaagttgcatgtgggtgaattatggatttatggtccttcaagtaaattattaatcatcaaatatttatcatttgat

SEQ ID NO: 35153 - DNA, 474 bp, Glycine max
  unsure (1)..(474): unsure at all n locations
agcttgcggatttgttcttcgttggcgaaatgttcaaagngggtctgaaaagaggcaaatatgatcatcatgctttgataaatgaaaaaactagggcaaatgaagagggtgagaaatagggagaaacccatgctgtgactatcattcctatacgcccaagtttccgaccaacccaacaatgtcattactcagccaataacaacccttctccttacccaccacccagttatccacaaaggccatccctaaatcaaccacaaaacccgcctaccacacaatcaatgctaaacaccacctttagcacaaagcaagacaccaaccaaggaaggaattntgcagcaaaaagcctgtggaattcaccccaattctagtgtcctatgctaacttgctcccttatctacttgataatgcaatggtagccataacccctgctaggtttcctcaacccctcatttttcgaggatacaactagag

SEQ ID NO: 35154 - DNA, 331 bp, Glycine max
  unsure (1)..(331): unsure at all n locations
atgttcatccctcctggtaattcgagaatcacttgaaataagtgaaaaaaattgtttccatgaagaanatccaagccgaggcgcttccgtaacgttttcgtgggtgatttcgcgaagatattcaaccattntttgacgttcttcgtcgttcttcagtcttcaaccagtaagttcccgaaatcgaactcttcaattcattctatgtatccttagtggtcctcatttgcttcgggtgcttntatttttatttcatttactgtccgtacccctcttgacgtgctttagtcatttacttaagtcattttctagcctaaatcaaaaaataaataaa

SEQ ID NO: 35155 - DNA, 454 bp, Glycine max
  unsure (1)..(454): unsure at all n locations
tcgaaagactgganagccagttctaaatgaactccctcttgcgggccttcccacataagggccatagagggattgggcagctcaaccaagatggctttcttcgcttggataccaatgacccagagccctttcactacgaaattcaacttttgggtgagtgtagagggaaccactcccaccgagtggatccacggacgccccaacagacagcttgagggggtgttaatatccattatttggaaggtaacttgacaggtgtgaaggcctatctgtactgggagggcgatctctcccctaacctctcggggagtgccgttgtaagcacgaaccaccactgaacctccctctatggcggaagactccattggcaatttttcaaaatgccttacgcatcatcgtcaaaatgctatcttctcgttctgacacttgcattcgtttgtcttacacatgcccg

SEQ ID NO: 35156 - DNA, 283 bp, Glycine max
  unsure (1)..(283): unsure at all n locations
cctgtctgatgcagtagtaatgatggcctgagttatgtttgtgaactgttatctaaccttgaatgggtnngggcaaagacaacggcggcataactagcctgatcaatgccaaaggaaatcttgggaagtatggtttatgctataaacccactcaggcagatataaagagaatcatcgcgagaaggaagagcggcgtgcaaagctctcagtagagacaagaaagtgaatgaagtttcgcctgccacataagtataagctctataagcgccggtcttggagacta

SEQ ID NO: 35157 - DNA, 471 bp, Glycine max
  unsure (1)..(471): unsure at all n locations
ctgcagcttccaagtttttggtttctgaccttttaacttgtgctattcattcttttcatctcttctccctttgccaaaaagaattcgccatggattaaccgcctgaattctttttgtgtctctcttctccttttccaaagaacgaaggaataaccggctgaattcttttgtgtctccttctcccttgccanagaattcaaaacgacacagtctgagaattcttttgattcttccctttcccttatacaaaagtattcaaaggactaaccgcctgagaattcttttgtatccccacaaagtatcaaaggtttaaccgcctgagatctttgtcttaacacattggagggtacatcctttgtggtacaagtaaagggtacatctacttgggtttgactgagaacaagagagggtacatctcttgtggatcagttctagtggagggtacatccacgagggtttcaaagagaacac

SEQ ID NO: 35158 - DNA, 506 bp, Glycine max
  unsure (1)..(506): unsure at all n locations
actaagcttatctccaggcatagaatgattgcacttctggctctatcattcatctttgatttctcttttgagcttagagattcaaacatcctttcttctcctttaagagcttctgcacaaccatgttgaatcaagattgcttccatcttgattctccataacccgaagtcattttcccctgaaaacttctcaatatcgtactttgttgttcccatctttcttgatcttgatcttgtccccacagacggcgccacttgttgtggtcttctatcaatttcgcttctcttagaacctgcacaagatcaaaaactagaaaacagaaaacaagcacagcaaagcaagaacctaaagatntacaccagatttaatgttgttcggtaatgtgcctacatccacnggaaatgcagctcatcatcatcacattgatcatgaaattacaagtntaatacaagcaacaactagctttgatctctctggggtcttctttctttcaaaacctctctcaa

SEQ ID NO: 35159 - DNA, 490 bp, Glycine max
  unsure (1)..(490): unsure at all n locations
agtcacctgcggcatgcaagctngcttgctaagggtatgtatattngctgtctatggcatctagaagtttatttangagtgtaataattctgttcaagttatggtcaaaagacttcatagctgtagcgcactgcagcaatntatcgagaagagtaagatggatgaaatgcaaatattngntaatattttcttataattcctttttgacaatttaaaagaaaaaaaatccacatgtgtngactgtgacagaagagtggttatgtgtttagttaacattaaagcattaggataaattcaaattgaatccttaacagaaataatttttaatcatatttttacttgatcaatttctagattagtttttcagatgaactggagggggaaaaatgttgacttatatattntttcattaaagcaaaaatatcttcttctcaattatcaaaaatgagattcngnggaacgatgttntaaaaccttaaaagtaaaaact

SEQ ID NO: 35160 - DNA, 475 bp, Glycine max
  unsure (1)..(475): unsure at all n locations
tatcagatcctgaaatacccnctcaccactgagtctgcctgattaagattgaggacaacaacactttggttttcattgtcgacctgcgtgccgacaagaagaagatcaaggatgcggtgaagaaaatgtatgacatccaggccaaaaaagtgaacaccttgatcaggtgagcatctatgcaatgattgcagttttgatagtaatgatttcatattgcattattgctgatgaaatttgttgattggtagtgatttccgtattcacttagtggtataaggtattgatgttgttgtgaaattgatgcatgatgtcatgatgtcacatgacgtcacatgtaatttctagttttgatatctttntgaagaccctgttatgttgatgcatgatgtcatgatgtcacatgtaaattctagtcctgtctgtacactctagctnttttntcctacctttaaacataatggaatagtcctgttct

SEQ ID NO: 35161 - DNA, 499 bp, Glycine max
  unsure (1)..(499): unsure at all n locations
agtcacctgaggcatgcaagcttatcaacatcaaacttggagaaagagttcttgtggtctttacatgagaagcaatcaagtataatgttacttccttcactaaagcggtgatccatctccacacatattntatcaatggcaacataaaaaatctttgcacggaatgatgaaaataatgatagtcctccttctgctcttgacgaccccgaactgtatttcgtcatccatatttggtaccagaatacttttagcaacacaaaatccttggacatcggcaaaaaaattattccagccactctctctcattgtgcccaaccgagctttgacaacatcaactaattccatggcattcacaatattaagatcttttctttgcaatatatttgaaagctcatttgtttctatgacctggacacgcacaatctcatttgggtaaactcattaaccacatttatgtggcggtctaattcggcttcttggtgacaacattcacattctc

SEQ ID NO: 35162 - DNA, 375 bp, Glycine max
  unsure (1)..(375): unsure at all n locations
tgggcttactattctcatccnatctcatcaatacattaaagttatatgattngacttntgcactgatggaagggaataccactatctactcgaatacccctaacaagcttgtaggagctgtcggtaaataaaggtcctcaccatccatttcaattttctccaactccctaccacatatggtaaaaataaacattaacttctatcaaagacacattgaaaatttaacataaaaatccacaataaaaataagccttcagacattnggccagtacctccggataccagctcggcgttcttctttagggagtggaaatagtacaccagagatggatgtaactttgtcaaagaaatcaaactctctnttaaatatgtcaa

SEQ ID NO: 35163 - DNA, 248 bp, Glycine max
  unsure (1)..(248): unsure at all n locations
accggatgtaagatacatcttcttcaatcttaattatttcttgctncatttcattgaagcgcatatccacttgcagttccaaagtatcaaacctctcaccaaccaagggttgaagaccatcaaacctttcccatatcttagaaagaagagatgaatcttcttcctcatgtccttcttcaaccacaattctagcacccttctttatccaagatccatcatgctctttacatatccaaggatgctatgac

SEQ ID NO: 35164 - DNA, 395 bp, Glycine max
  unsure (1)..(395): unsure at all n locations
actccatcattaggattattacctgacatctcaaacaaacaaatcaaacgtaacaagacaattatagttgctgtttgaatacctcacccactcaanggtatcacacaatgatggcttttctctaatgaaacactctttccttttaccactctaattccccttgagttcttaggcaattcaagagattatggccacaacaaagaacaactcaccaatatgtgtaaggtaaggctagagagacaaggaaaaggttaaccaagaaaaggctaacaatgtntttaggcacaaatgaaggacataaaattcagaatttaggaattcaagtaacaatcctccatgcaaccaatatattaccttaaagagatttttttaaagttcttcaagcatgaaccatt

SEQ ID NO: 35165 - DNA, 483 bp, Glycine max
  unsure (1)..(483): unsure at all n locations
gatcttgagcaacagccgcctgcangctgcagctataaaacaaatgcctatttattctctttatgcatgtgaattangacgcatcaacaagaatcaagccaaggctattgtgcaagcaatcaatggngcaaaacacaccaaatgattataatgatggatggctcaaattctcaaaaaggtaaaatcatcactttcaaattgagctttcaaaactatcatgacatgtagagaagaatcaaggatttcaagtcacaaaatgtcaagaacttttattttcaaaacaattacccatttcttgaacatatcctataattcaaagaanaacatgcaaagtcgtacgtgcacatgaaattgacccaaaatattaaactgaaaatccgacgaaactaacaacattaacaaattaacacaactaacaaattaacaaaaccaacaaaactagccaaaccaaagaacacttcccccccatacttaaacaacaca

SEQ ID NO: 35166 - DNA, 494 bp, Glycine max
  unsure (1)..(494): unsure at all n locations
tcagatttactttcagtcatctcattcaagactttgtttgcattctttatcttgccatcttgngacaacctgcacaaaattgaattaaatttaacaactccagggcacaattaatcccttagcctccatcattcctttcattnttagagctttatctagatgatttgtacatgacaaatacatatttgagcaacattagttcactagatgtcattatgtccttccttcatcctgataacatagtccttcaggctggtcatgtcatcaccactcttagtggagtgatacctcagcaattcagctagctntgtcttgttntgagaatccacatcaagaccaagtttaaggttgttagagaaggcttcataaaacttgttatagtcttacaaggctagtaaccttgatggtaacaagtacgtcattggcatgactatagtttttcaacatggtagtatactagtatgtctaatgcctcatggaanttcagtgatatt

SEQ ID NO: 35167 - DNA, 232 bp, Glycine max
  unsure (1)..(232): unsure at all n locations
gtctatcatatgctgacaatagccgagaagcccatgaatcttttcggggcagagtangtgtctgccatcgccttggccttgctaacaatcggngaagttcttgactcccgttcaaggtaagagcanaccgatccatccacatggttgcctcttggtgtaaagagtcgatcacccttcctctagcctctttntccgcgtatacttgggcatattcgtccgcaatcctatgctc

SEQ ID NO: 35168 - DNA, 455 bp, Glycine max
  unsure (1)..(455): unsure at all n locations
agcttcaatgcgagaagacantacttttggctaggaacccaaaattggttntagagtcagaaaagcatgaaaattaggacttgcttgtgagagtttttactcgaatttgggctgccccatgatcgatactttgcacctaagtgacgtgggaaatgcttttcaatggtatgtggatatatgtggggcatgaaattccttgccaagtgtgaatgattattttcctaaatggatgtatgatagcatggaattcccttntgaatgcaagtatgtgcaggatgtaattagctntccaatatgcagaaacaataaaatttgtatgatatatattccaaatgtgtgtagttagtttgaatagcaagtatttaggatataactaagtgtgagttttgacgcaatgccttgggcgtgagaatgtatgttcttttcaaatgcatatatatgtatgacaattagaa

SEQ ID NO: 35169 - DNA, 475 bp, Glycine max
  unsure (1)..(475): unsure at all n locations
agcttcaagccaaggccagactcttgttcatgctgagtcttctcaagaaaaaaatgccaaacttccccaaaaaatctgatttcaagcttaaataggtgggttggtttgtgcacgcgcgcttagcgcanatctgaatcgcttagcgcgcataagtgaattttgtcttagcgcgcttctctcgcttagcggatgagctgaagtagtgcgcttgatgacctgnagcggtgcgctcagcgagcctgacagctcatcttcttctggattcttcctcgcgcttagccactgagtgtcgcgcttagcgaatgctcgctaagccagaagattggcttagcaagaaggtgaaaacaacacttttgccaatttgcctaatgaacctgaaattgagagaaaatgattattaaacacttataaaagaagtataaattatctattacctatatntaacagaaagtacttataatattacaaaacaact

SEQ ID NO: 35170 - DNA, 458 bp, Glycine max
  unsure (1)..(458): unsure at all n locations
tgagaactatataacagcaccaaggtctatgttattctctctcctctcttctctcctctctctcctctcctctctctctttntcgttttagttttagagtgctactctcaatttgttttagtttcttttttgttntggagaataattctagtcttcttcgtttctactacaatttcgttttctattgattaatggaaggctaagtctccagcgttgttttctcttgaggatcaagcacagatctctttgaggttctattattactattaaattctgataagtttttcctcttcaccaattactctgtatttgttgctattaattcatgcatgcttagtgcttgattaattgtctctgcgcttaatntacattcatgcttaatggatcgttatcattaattggtgtatgtgttgcttaatcatataatgaatgccttatgttaaattcgcttagtaatt

SEQ ID NO: 35171 - DNA, 486 bp, Glycine max
  unsure (1)..(486): unsure at all n locations
caagctttagatcctatgtttaattttttaatgtttttgngtctatagtagnatttagtaagtattctcttcttgataaatagattntttaaagtatttttctgatcttgttgttcttgcagtcaacttgataacaatgactttggtggaaataacattccagaatcttatggcaatatctcaaaattgtcaaaattgtaagtgcattttgtgattccatgtttggatgtatgatgccaattacaagtagtggagcttaggtgtttgagcctttattttaatgtatggtgtgaaataccagtctacatgcgattcttgtatatagatctttcaattggagaaaaacattgtaaggagattaaaaataaaggtcaaaacatttaagtacaattataaatattgtttctcataaatgatatttaaacagttcaccactttgtatatcatanaagaatgtcgtacacaccttanttatttcattaattc

SEQ ID NO: 35172 - DNA, 328 bp, Glycine max
  unsure (1)..(328): unsure at all n locations
agcacaaatacagtttaaccatgaaacccaaccatcatctgctgttgacccttcgtccgtatatttctaagtgtaaagcaaataagcaagctatacaaaaaagccaacccttaccaactccttcaacattcacgtaagtcctgtatcatcatatcaatcgatctcctttccttcacanagagatcgaanacaatcataacgtaaacaattcaaacaagccctgngattcatctcccattcacaataagagaattttcttcctttccctttcgcattaatccatgcncaagctctatgtnttgccagatcccatgcngncacacaacac

SEQ ID NO: 35173 - DNA, 322 bp, Glycine max
  unsure (1)..(322): unsure at all n locations
ctgcagcttgaaagcacatgattttgacaaacttttaccaagagtnttactctctggtaatcgattaccatattgttgtaatcgattactagtagcaaaatgagtttgaaaaagttttcaaactgaatttacaacgttccaaatattttcaaaaggctgtaatcgattacaatggtntggtaatcgattaccagtgtccttgaacgttgaaattcaaatttaaaaatgaagagtcacattgtttcactcaaaaactttgtgtaatcgattacacttanttggtaatcgattaccagtgactgtttctaaaagggttttaagt

SEQ ID NO: 35174 - DNA, 388 bp, Glycine max
  unsure (1)..(388): unsure at all n locations
aaacttaaaatatggggtttataagacatcatttctactaataatgatnataaacataatagaagagagagatccaaggaacatactactaagactaaaatatgcttgcgagcctaatatatatccaactttatttttaaggatcggtctgttatctctgtcactaaaaattttctactaattggtgacgtggtcgttaactctttaaaaatatgagttgtgatgattttaaaacggcccatattatcttcgaaatttaaattacaatcttgggtaacaaatgtcagaatcaattaatcatgaacaaaaagctctgggtggttaatgagagatagaaaatcatcatacatgaaaaagcttatcacacctcctataaaccattcaacaa

SEQ ID NO: 35175 - DNA, 539 bp, Glycine max
  unsure (1)..(539): unsure at all n locations
ttgtcccctgacnctcatgaanncccatgtagnacccgnngatccntagagtcgacctgcggcatgcaagcttctgttctgaatntcaagcttctcganactctacgcgacacaatcggaccttcgagtaaaaaggtaatggcatttcatttttctcagaacctctattctgaatttcaagcgtcttgatacactacgcgacaccatcggacattcgaagtaaaaggtattggtatttgattttgctcagagcttctgttcggaatttcgaggatctcgatatactacgggacacaatcgggcattcgaataaaaaggtattgtcgtttgattttgctcagagcctcaattccgaatttcgagcgtctccatatattacgggattcattcggacatccgagtaaaaagttattgtcgtctgatttagctcagagcttctgttctgaatttcgagcgtctcgatacactacgggatacaatcggacattcgaggaaaaagttattgtcgttgattctggtcagagcttctattctgattn

SEQ ID NO: 35176 - DNA, 317 bp, Glycine max
actcggatgtccgattgtgtcccgtagtatatcgagacgctcgaaattcagaatagaagctctgagcaaaatcaatcgacaataacattttactcggatgtccgattgtgtcccgttgtatattgagacgctcgatattcaaaatagaagctctgagcaaaatctaacgacaataactttttactcggatgtccgattgtgtcccgctgcatatcgagacgctcgaaattcagaacagaagctctgagcaaaatcaatcgacaataactatttactcggatgttcgattgagtcccgatgtatatcgagacgcttga

SEQ ID NO: 35177 - DNA, 466 bp, Glycine max
  unsure (1)..(466): unsure at all n locations
agctnntattttaatggttaaactntgaacctatgtagtcacgctntttttctctaaatgataaatggatacgattcttgcttaatttaccttcatatattaagttaaaatatatttntgaaaagtccttaaccttttaacaattttctgaaaaaaaggctttactattctaatgtaaatttgtaacttattgtataaattttttataanacanaatgacacacattgatcgatgacattgatgtgaagtttaaaataatttagttttttttctaatttattatttggttntaatttagtctttttttaattntggtttctaatttttaaaaacgatttaatttggttctctaattntggtagggtggaattggttctctaacttttagaaaatgattttnttggaaatgtgtatttggtagcattttagaatcattcaatgatgatcttgaactattataaaata

SEQ ID NO: 35178 - DNA, 429 bp, Glycine max
ttctcataagcttgaaatctcaatttctgaaattcatgaagttggagcttcctgtgttccctagctacattgagatcaaaatttagaaacttcaatgcccagtaagctttgtgctccaactcaacaggtaagtgacaagattttccatagaaccaatggaagggagtgagtcctataggagctctgtatgctatttcatatgcccacagagctccatctaatgaccgagcaactgttttctctaggatcttcttgacttccttgttagaaacttcaacttgcccattggtctgggaatggtaaggtgaggctatcatgcgtctgacactatagtgttggagaactttcttgagttggacattacagaaatgagatccttcgtcatttatcagtacccttggtgtgccaaacattgaaaatatgttttct

SEQ ID NO: 35179 - DNA, 364 bp, Glycine max
  unsure (1)..(364): unsure at all n locations
ttaagaaggaaagaaaggggacaacctcaaatncagtaatacttcctcaccattctccatgaaaacatagtcaaaaccaacacaaatgaggatntgcacatatatccattgtgggtcaacacaaggaaaagaaaaaaaggagagatagagagctcaccatctaacaatggagtcaaaagatcaaggaagagggaataacacttgtcttgaaggaaggttgtgacaccctctacccctcacatatatactaacaaaggaataaatattcaaatataaattaaaagtatattttaaaacattntttttcgaaacaagtcttccaaaggggaaaaggctcacattcactntcttctacatcatattc

SEQ ID NO: 35180 - DNA, 404 bp, Glycine max
agctgggttcgaggtacttacccgttgaagatctttaactttgaagaacgaatgaagaacgtcgaagaacggttgaaatctttgcgaaattcctcacggaaaacgttacggaaacgtttcggaagcgcctcggcttagattttcttcacggaaacaatttttccaagcaaattcgaaagagagagaagtgcctaaggggctgaaccccttccttcttcccttcctcccctatttatagcaaaataggggaggtagttgccgcccagctcgcccaggcgagctcagctcgcccaggcgagcagggttgcttcctccagaagcaaccgccttctggaggaatattctggagggcccaagtgggcctgggtgctatttgcacccccatttttactaagtacaccccc

SEQ ID NO: 35181 - DNA, 259 bp, Glycine max
  unsure (1)..(259): unsure at all n locations
cgatagaggctgggtggttgacttttcaaagaggacgggccatcataanatcaaacccgcttgccaatcatggagggggggtggttnatgccatnnangtgaaaaagggacacagacccaaacttatgaatgacgtcacgacccaccaaaggtttatctacaaagccttgctaaacgcggccatgattcccttgcttgtgcacaaagaagatttgtgtttaatgcatcccggtgttctccatggcatggaatacatgtt

SEQ ID NO: 35182 - DNA, 481 bp, Glycine max
  unsure (1)..(481): unsure at all n locations
tgtgaggtacttacccgttgaagactgaagaaatctaagaacgattgatgaatctctgaagaacggtcgagaatcttcgtgtaattactcacggaaacgttacggaagcgccttggcttggattntcttcacggaaataattctcctcagcaaattcgaaagagagagaagggcctaaggagctgaaccctgttcttcttcacttcttcccctatttatagcanaataggggagaagcttgccgcccagctcgcccaggcgagcaaggttgcttcctccagaagcaacagccttctggaggaatcttttggagggcccaagtgggacctgatgctatttgcaccccactttatactaaatgcaccccctttctattgttntgtaattctttgtccgtaacgttacgaaactttatgaatttcgtaacgatacttattttcctttcgcaaggctacgaatccttacggattatgtatttact

SEQ ID NO: 35183 - DNA, 198 bp, Glycine max
aacaccttgcgccacaaagagaaaattaaaaggttaaggattaggactaaaggacataaaataagtctgttgccattcataagtgcgtcttgacgactggggtgtatccttcccggctaatcactccaccttactaaagtcgaatcgcttttcggtttcactttctaatacgtgtgactcccgatcttctgacaccat

SEQ ID NO: 35184 - DNA, 209 bp, Glycine max
ggtgtcacagccgatgagctattctcttgtctaacctcattgcaaatcattgtctcatacgcaataatacttaccatggtacaaccagtcgttacaggagcgatattgtaaaaaaattgcgcctcccttgcactcaatggattttcagcttatattgttttgcttaatgaaccacaaaaccgttgataagtgaactcactggtctcccg

SEQ ID NO: 35185 - DNA, 227 bp, Glycine max
agatcaccattcatgaacgccgttttcacatacatttgatgcagctcaagatcaaaatgagctactaatgccagaattactcgaagagagtctttcttagatacagggaataaggtctctctgtaattgattccatctctgtgagtcgaatctttagcaacaagtcttgctttatgtctctcaatggtgccttctgagtctttctttgttgagaagacccatctaca

SEQ ID NO: 35186 - DNA, 469 bp, Glycine max
  unsure (1)..(469): unsure at all n locations
agctaacaagccggtgtgacaagcttatcaagtttatataacataagaagcctgtgtcattattatctaaaatagctctataaaaagcttaagtttgacctttataataaacaagacaagtcaaaccaagtattatatatgtcgagcaaaaggcccttgacaagcggcgtgactcatatccatcccaaatgtgcaccaataatatgttttaatctagcatttattcccaccgaaataactagcccgacctacgctaatctttcaaccgtgctacaataatggcatttatttacactgcactaactactccgacgtcaatccttcaactgtgtatcaataatatgtnttaatttagcatttatatattctcacaaaccatttatcttccaaacctatccaagctggtgaccttcctcatctcaaacttttgcatctatgcccacatgaataggagtattatattcaagta

SEQ ID NO: 35187 - DNA, 373 bp, Glycine max
  unsure (1)..(373): unsure at all n locations
tagagaagtactgagcaccgcccaattcgtccaacttttcattaattgtcggaatcggaaaccggtcacgaaccgtgacggcgttaagggctctgtaatcaacgcagaatctccaagagccgtctgtcttgcggacgagaagaacggnggatgaaaaaggacttgtacttggtctgatgagtcctttttgtaacatatcattgacttgctgctcgatctccttcttctggtaatggggatatctatacggatggacattcacgggattggtgtggggaaggaggtggatatggtggtcggtgtcacgggtaggaggtaagccggaggggttctgaaatanggtcgagaaacgtgtaagtaaggcttggatttc

SEQ ID NO: 35188 - DNA, 254 bp, Glycine max
  unsure (1)..(254): unsure at all n locations
ctctcaagttggtttctttgtcattgctagctatcaagatgaagctatcctcacctaatcgccaaaatctatttccttaacaattggcatataactaatcagcanattatagaccatacattaagatatgaaataaattttagtattcagtagaagatacttgccaggatctatgccatcaagtattggagctccaaacacaggagccaatatagtcacaccttttattgtaatggttntgcagtcatatggat

SEQ ID NO: 35189 - DNA, 321 bp, Glycine max
atatatcgaaaaactattaagagaaaaaatattaatgacaataataattcttttaaaaaaattataaattgtaaataaatttattactataaattaaattaataatttttttaatcttaataaattagattattagatcttacaacattaacataaaaagttatataaaactaccgccaagtattagttagataatgaattgaactctaatcaatcatacaacgtatcatgtataaatgattaaaatttaaagttattatagtgatagaaaagaagtatacacttggacttttctatttataattctctatttaagtttta

SEQ ID NO: 35190 - DNA, 479 bp, Glycine max
  unsure (1)..(479): unsure at all n locations
agcttccacaatatccaagcaattcaatttccatatatcatgaactaccctaaaccaagaaaatagagtagaggcagaaaactctacccaaaacacattcaaatatcacaactttccttactcatataccccagtaacattntcttcattctgattcgttaatcggtggatcgccttgaaaatnttactggaggttaatagtacataaatctacatnttgaccgttgggatctgttagaaaattatctagaacccaatatgttctacctttcccataaccagcaatgcacaagcatttttctgcatacataaaaaatctgctacacaattcaacaacattnttctgcacaatagggcagatttcgaaatccatcttgcccacantccaatttgctcannatggattctacaagtcctaaatcatgcataaatcatatntaaactaanaacaagcttcagatcaaggtaaatcanaatct

SEQ ID NO: 35191 - DNA, 354 bp, Glycine max
  unsure (1)..(354): unsure at all n locations
gaatcagaaatctgtacctgtcgcaagggtttgtggtttgtgctcctctgctgaccaccatacagacctttgcccttccatgcagcaacctggagcaattgagcaacctgaagcttatgctgcaaatatttacaatagacctcctcaacctcagccgcaaaatcaaccacagcagagcaattatgacctctccagcaacagatacaatcctggatggaggaatcaccctaacctcagatggtccagccctcagcaacaacaacagcagcctgctcctttctttcaaaatgctgctggcccaagcagaccatacattcctncaccaatccaacaacagcaacaaccccagaaaca

SEQ ID NO: 35192 - DNA, 450 bp, Glycine max
  unsure (1)..(450): unsure at all n locations
agcttatntaacataaatattanaactaccattatctngattataaagttntttttaaaaaaaaactatttgatcaaaagttttgatttaataaattattaattaagtaatatatgacttataagttaggatttatattttttattcattttatcctattaattttntaaaaataacttgtaccttccgataattatgatatctattttaaataaattacatgtacacattttgtttttttttttatcaaatttactttacttaataatgaatttattaaaattttaatcattaaatatacatgcaaacatataaatgttttttacatcagtattttatgtactatatagctaattaatcaaataattttaatcaatgttntgaatttaatcactaattttcaatttatacctccagactttttaactcattntnntttataaaaaaaat

SEQ ID NO: 35193 - DNA, 477 bp, Glycine max
  unsure (1)..(477): unsure at all n locations
agctggtgaagttcgttgaaaactatgggatgtttggtctgggttacgagcctacacatgccgacaagagaagggtcgccttagaaaggagagaaagaagcctatcccatttacaagggcggngactgtagatggagagggtccttatctgccacattagcaagagctttatcaacgcgaggtggatgcatgagaatcangttgttgtgctagacgaagaaaccaactaagagcagccaagttgggtgcagccgtgctccccgggttttgaattaaagaattggtggatcatggagtgacccgagatttcagtgttaaatccagtgtaatccagtagtttgaaccctattgctgggcctaggctntagggtctacttcttttgttgggcatacctcttgctntaatgttcccgcaatattaaatatacgaacccttttattgatatgctctctctcgcactttcgtccatttcattc

SEQ ID NO: 35194 - DNA, 217 bp, Glycine max
ggaccccatttctaccaactacaagacctaataaaactatattatctacacaagaggtacacttctctatatttgcatagagggagttcttcctaaagactgaaagaacttgcctgagatgtcctaagtgatcatctaggctcctactgtacactaaaatatcatcaaaataaacaactggcaatctacttatgaaatcccttaagacatgatgcat

SEQ ID NO: 35195 - DNA, 385 bp, Glycine max
caccaactaatgttccactgattcttacgaatataaaacgcatttactactctgacatcagtggtggtacacgtaataataataataatcacagaaaccatcagttgaaaatcgatggacgtaataataataatagtataacataaagaaagtcaacaacatatgaattcattcaaataaggtggagaaagcaacataaaattaatataataatgagaaacttcttataacaattcaacaaagagataatcttcacgatcgtagccatttcttatccacacgcaaagctatccagaatctcagatctgggaaattgacatccttccgatcgaaagcacttgctttcatttccaaaagtaataaaaaaagaataacaatctttgca

SEQ ID NO: 35196 - DNA, 473 bp, Glycine max
  unsure (1)..(473): unsure at all n locations
agcttgaaatatttattggtatatttcgcctgttccattangctctngatgtctttagaggttacttcctcgttgacatcttttgtcttgaatggaattgccatgacaggtttattgttactgtctttgatatttggtagttgatattgtgttgcgggaggtaattccgattggattaactcaccatccttaacttgccaatttgttatgacnattgttgttggatcacctatgatgtcttgtttccaagggtaatctatatcctttctgatggcataagcatgaaaccaatcaaagaaaaggacattaattntgactcgttcgacaaattcgtagaacnttgtcttggattgntttctgtntgtacccttgtaatgttggaaaaaccatctcctttgagggtcattctccggagaatagaaatctttcctaanggtttccttatcaatgctaaagntgtcagataacatcat

SEQ ID NO: 35197 - DNA, 227 bp, Glycine max
tttttaacaaaaaatatgacatatggttataaaaaccatttcatacactctgcaaaaccatttcatacagtatttgtagtgtactctcaatggaaatacacttatgagataacctctaatctttttttatcagtgaaaaactcttttaaaaagggtaaaccaaaagatagaaactccaaggaccttataagtccaatcagctgagcccactgagcatcaacagtact

SEQ ID NO: 35198 - DNA, 255 bp, Glycine max
  unsure (1)..(255): unsure at all n locations
tatatcaccaaaggtttaggccttccaaaacttctctcatccacggactgcatacatatatgttgctcttctcctccctcatcactgacttccagtcggccttgatctatcattcgctgcaacaattcctctactgccagacatgtttccttgctatatagctcatcgggatgcaacaagcaagagtcctctntatgcccaccgtggggaatcacaccccctttttgtagggcctcaaagataaacttcctaggg

SEQ ID NO: 35199 - DNA, 361 bp, Glycine max
  unsure (1)..(361): unsure at all n locations
cttctctctctctggaaataactgagggaaaatagttccgtgaagaanatccaagccgaggcgcttccgtaacgtttccgtgagtaattacgcgaagattctcgatcattcttcanaattcatcgttcgttcttcgttttcttcagtcttcaacggggtaagtacctcanaccaagcttttcaattcattctatgtacccgtggtggtccacantttggttcatgtatntttattctcgttntcatttgctttntatacccncttttgacgtgcttaagccatntatntaagtcatntctcgcgtaatctaaaaataaaataaatttccaccgatcgtttgaattgatcatcccgtaattt

SEQ ID NO: 35200 - DNA, 544 bp, Glycine max
  unsure (1)..(544): unsure at all n locations
nccgcttatnactattcttgatcncgagncacgccgctgcagctagggatatagtatnnagaaacngggccttctcgatttcntaanacncnangaanggacananangcctaangannncgagngctcagctattcnngctagncgaatccatgaatattctttanggctttataagactaangagtctaagagtttaggtattcagcttaccatatacttgaaatactttgagagggcttatangcctaatgattctgagtgctcaggtattcgacctagtcaaatacctgaatactnttgagaggctttatangcctaaggattctaagcattcaagtatttggcctagccggatacctgaatacttttaagaaggttgtttanatcttaaaggatnganggtattttggatatcngtatgctgatactttatagatacaagcaaatactgaataagaaatanaggtttataacctaaacttcttataactaatagtttataagctaactgcttttataaagctttacaagctgctagttt

SEQ ID NO: 35201 - DNA, 282 bp, Glycine max
  unsure (1)..(282): unsure at all n locations
tatatatgggtctctatgtgacaaganannattaattaatccatgatatatngntnttttatctagttcttagtcatgcaaaagtgttcaaaactcanacttagttcttaaaatgaaaagtgtatccaagatctaggacttttccatctaacactttgtatgaaatacaaccctaaatcactgcaaattacaattccctatagaaaaagtgaaaaaaacaattatttgcagcannaaattataggtctgctaatgacataagttggtctatataccaccata

SEQ ID NO: 35202 - DNA, 156 bp, Glycine max
  unsure (1)..(156): unsure at all n locations
ataaaaaaacaccccgccttgcactatcgcagactgntttgtgcttgagcaactgccacatggaagcatcacaaccgcatatgaacctgatgccaacggataccactttggcctgggaaaatattccattggagacgagcagaaaaatgcttttcn

SEQ ID NO: 35203 - DNA, 217 bp, Glycine max
  unsure (1)..(217): unsure at all n locations
gctttatggaggtgatcttgagctcaatggtccctnattggtgattctccaccatggagatgtagcggaagataaaagagaagaggtgagaggaggcgccatccattatggaataagccatggaataaggagtttcaccaccaagagaatgccttggataagaagcttagagaggaagtttcaatggaggaaaagaaagagagaggggggggggggg

SEQ ID NO: 35204 - DNA, 394 bp, Glycine max
  unsure (1)..(394): unsure at all n locations
gctcggatcctcgagactaaccatgagtganatggtggatacagaggtttcgtatctttacctcanaacattcaagtntagttaatgttgttgtgagtatgcacgtaacttgcggatgctaagaaggccctttacctactgtcgatggttatcatggtggctaaggccaaatgggcctatagaatggatgagtggctgattccctatataggttaaggtctatgcaagccttaccaaggtaagtcactactcacactcatccattgttgataaaaccacacttcttccacaggattaattcgagtctcctctaatgtgcatatcatagactgtgaccatgttaacggatgtactcggattaatcactcacaggtgaaatatccatggagacgag

SEQ ID NO: 35205 - DNA, 368 bp, Glycine max
  unsure (1)..(368): unsure at all n locations
catcacttgtcctaagggattaatcacaaaatcatattctataccttcacattaatcacatgttcataacaaaacatctcaagtacaacacaacatctctcacacacaattcattatccaccatcacgtagcangtcacaatgatcattacacagacgttatgcaacatatatactaagactcaatcctatattgaatgtggtatcttgtcagtgaaaaataacactagggcacctaggagtacataataaaatacaccacacaatgggtaagcaggtcactcttattaaaagaaatcataaggtgatcaattatggttattctggttagcgtgaatgctctaacgatatgagatcaacatagattta

SEQ ID NO: 35206 - DNA, 324 bp, Glycine max
  unsure (1)..(324): unsure at all n locations
acatcatgtatgagattcatttactaccaaatatcaatatgttatccagatacaaacataaaatgacacgttcattattattaaattgtttcacatacacacatttatcactatcattaatttgaaaatcatacaaaagaataacttaatcaaacttttgtgtcaatgctntggagcttgtttcaaaccatacaaagatttaacaatttaatttttaaggaaaaagaatttcacagaaagtcacatctctagactccataatagtaccattagaaattgcagatacttctgaattaataactaagaatctataagtagtattat

SEQ ID NO: 35207 - DNA, 606 bp, Glycine max
  unsure (1)..(606): unsure at all n locations
ncggaaatgtnncgtttgacatcgnancnngcngagcannanagncgacctgcnggcatgcaanngcttcacaaanggtcaagaaaaaaagtttanatttttttttctncaaagccnngagagaaggagnctcaagaccctaatatggaacttggaataagatgaaaatggtggtctcttccttcttgaaggtcttgagaaagaagaagaanatgaaggttcaagttttggtttttgaagaggaaatggtgataatagatatttttgtttatctttttttttacttggncaataaagtcataaggctttagtagttagttttatggttcatcaaaataaggcttatttgcctaaactttatgataaagttatcacattcaaatctcanattcttatgtaactgatagagggatatttttaatggttctattgtggaanagtctatttaaagggcttgcaacagtaatacaaanacacacttcacccatatcttttcttcattctctcttcatagttacctctattttagtctcanactataataatggtagcagagattagagacctatagacctagagtgtcacgtgggcaactcatcttctttt

SEQ ID NO: 35208 - DNA, 324 bp, Glycine max
  unsure (1)..(324): unsure at all n locations
tttataaatagagtggtcttgagntccttctnttttattagttactcaaaattcctgaattacatcacatacttaatagcctcttctctacatatntatcttgttgaatgcaattcttcagcatgtcttcagaaaaagtgcaaattgaattttcaaaaaccagttcaagatgctgcagactcaaaaatatcatgtagcttattgaatgtggaagatgggatagatgatgaagcatgtgaattagtcagtggagtggagctctcacttgaggagggtgatgaaaatatccgtgcttatctgttcaaggcagtaaaaaataacaat

SEQ ID NO: 35209 - DNA, 209 bp, Glycine max
  unsure (1)..(209): unsure at all n locations
aagcttccaacgtgtcataccctaatttcgtccggagacctctgcttgatgacatgcgactcttctttggtccttgtgaggtgcttggcacccatcattangaagattgtgaaattccgggacatgccgaantaacaaaagaaaatattgatgcacaatccgtaaggttccgtgacacaccggaaatcaaatggaagcatcgttgcaca

SEQ ID NO: 35210 - DNA, 438 bp, Glycine max
  unsure (1)..(438): unsure at all n locations
gctcgaggaatatggngtacccatcacatgtggtactatgtggcggtctggcgatggtgcacaacaagttntcaacatccacaaatcgcgcataaacccaccatccnctgttgcccacctccaactgagctcacgtactcccacgtagcccatatcctcgtttctctcaacaccgggtccgcatcaatcctctgaagcttccccaacatccaagtaattcaaaattcaaacagcacagactatcacaaccaagataacagggcaaacgcagaatactctgcccanaacaccaaccaaaatcacagctnttctcacttaaagaccccagtaacatttccttcgttccaattcgttaaccggtggatcgactcgaannatttactggaagtctctagtacataaacccacattntgacgcgtgggatctactatgaaaca

SEQ ID NO: 35211 - DNA, 249 bp, Glycine max
  unsure (1)..(249): unsure at all n locations
caataacagttatgaaaacaatgcacggattctaaagtgcaacacttagcagaaaggtcagattgtaaagttcatatagcagaagagtctactcttgaaatataattntattctcatcaaacgttatgtgaatcaaacaaagtaaacaactgtgtgaagtatgtcaaagttgaaatttgtaaaacaacatgtgtgcacaaacttttaacaccaaataatatagaaatgactctaagagcccatactcat

SEQ ID NO: 35212 - DNA, 361 bp, Glycine max
  unsure (1)..(361): unsure at all n locations
atggaanaacgagagtgtgtaatgagttttgttttttgtcttgtatgaacatcctttagtaaaatgaacatttctctctatatgattaactttggattgtgagtcatagcttatccaaaactagacatacatgactntntatactggtaaagtttatagaaaattttatatgataagtataagttatgcaatagttntataaatattctatagaaggaaaaaaaaacgtaaacttgagtattaatataaatctttaatcagataaatatatntatgtataaatatggtttgcgttggattagacttgaatttacaatgaaatccacaatctgattttattcacaacacatgggttattaaa

SEQ ID NO: 35213 - DNA, 585 bp, Glycine max
  unsure (1)..(585): unsure at all n locations
aggcacccttatngtttagtcctagancgtcgaacnctgagncatnagncgnctgcggcatgccaagcccaagttgcatatcgactacagacttctgcatttatagacattagacccgcgcggagagcgacagaagaactagaccaccactctcgcacaggcgtacatttcttattcatggccagctgggttactaggttgaccaacgcatcaagtcttccttcaagctttgtatttctagaagatgaagacgaacccgcggccacctcatggactcctctaaagacaataacagcatttcttgcactgaattgtggggagtagaagccatcttctcaatcaaatactagcttctgcacgggcatatcaccaagagctccgccactggcagcatcaatcagtctcctctccatggtgctccagtcctcatagaagcattgaggatgagttgcgaaagatctgatggtgagggcatctttcacacagtttcttgaatgcttccagtactatacaagcttcgtcctaattggctgtgcctaaaagtctattgatgcatggcccgatgcagagaaatttctacacacg

SEQ ID NO: 35214 - DNA, 290 bp, Glycine max
  unsure (1)..(290): unsure at all n locations
acacttagaaatgtatttaagaatctatttgtaataatttaatatcaagatagaggtgataatatgtatattacgttntataagaatttgaatctaacttggtttatatgataaaatgcacatattgagttggatgtgattctaactctaacgacttggttgtgaaataaagtgatatcacgatgatataaataattagcagacaactattgttaaattatgaatggaacggagtattaaaaaaattattaaaaaatgttagacaaattatatttgttgatctaaatatg

SEQ ID NO: 35215 - DNA, 497 bp, Glycine max
  unsure (1)..(497): unsure at all n locations
nnttctatacacgtgacatcccatgtctngcacanatcagactaagctgtctggggaatcactgcggcccccncctatagttctttttaagggangggggccagttctctaatgtgcaaatcaaagctcaaatcaaatgctcaatatatgctccgatcacgatgtcaaatcccataacaaatgcacagattcacctttaggaatgctaaatgatcacagtataaatgtgcctacatatctataaatgcctattatctcagatcaaaggatgtagtcaatggattcctctagtatacctacattagcatgccacactagatgcttgcatgtaataacgtgtaggttgagcatactacctcaatgaatcaatgacttgaattgtgacaccgtttaatgtgtagatgcacaaaatttgacaaattcaagctacgataactaactgttgtagagacattgataactgagataaacttgcaaatgtttttgcatgaactacg

SEQ ID NO: 35216 - DNA, 583 bp, Glycine max
  unsure (1)..(583): unsure at all n locations
cgcnnattaaccctangacatgatatccagctgatacncgngatcctctgagtcacctgcggcatgcaagcctatgcngcananatttataatagtatctctcattctcagcagcanaatcaaccacagcagaacaatgatgacctctccagcaacagatacaaccctggatggaagaatcaccctaatctcagatggtctaaccctcagcaacaacaatagcagcctgctcctttgcttcaaaatgttgntggcccaagcagaccgtacattccttcaccaatcccacaacagcaacagccccagaaacagccaacaagtgaggcccctccacaaccttccctcgaagaacttgtgaggcanatgactatgcagaacatgcagtntcaacaagagaccagagctttcatttatagcttgacttatcagataagacaagtatctacacaatngaataacaaaagtcccgaattttacaagctacttcttaagcggcacaatccaaaatgtaatgcacttcttgtgtccggaagcaggcaagacccacccgacacctctcttttgaggacctgcaactcacttn

SEQ ID NO: 35217 - DNA, 367 bp, Glycine max
  unsure (1)..(367): unsure at all n locations
caccctctctagggttgtgagtaccatcatctttttcagtatttacaagcaaaagagactcctccaactctcgagatatgtcataacttcattntactcccagtccccactctccagacaatattgttatcaaaccatgaatctgtaacatcctccctacaaacctgcgctaaatattgccaccatgtagaatctattatggacctcctcttaataggaagttgatatgtgtccctatattnggacatcaacactctntgctacaacaagcttcgagagttacttaatcttcacttacacttttcngagaggtcacattaaataactgaaaatcattttatgcccaaccctacatgtagtaactcat

SEQ ID NO: 35218 - DNA, 324 bp, Glycine max
  unsure (1)..(324): unsure at all n locations
tcgncgtgcacgacaattagtgtcgaacagatcaattcggctatcgagaatcacaatgttagcgaatgatagtccccgaatgaaattagggtctaacaggtggtgattccatggttgggatgaaaaagatgatggaactcaataaatcaaaacgggtgaattggnttttaaaacaaaaattacctttaaaaatagaagtacaaaaaaaagtattgtatgaatngtatcacaaacacaaatatgaatcanatgtaatcgatacttaatcaatccttccttaaacatggtccttcattaacatcctttctttcacaattattaaac

SEQ ID NO: 35219 - DNA, 372 bp, Glycine max
  unsure (1)..(372): unsure at all n locations
gaagaagaagaagttcatagagattcaagggcttgtttatgattgtattataaagatgtgattagacaagattgattgaatgaatgattgacaagcaaatcaaagcctttgtttcataaactcttcatgtttggccaagaggaccatttagaagagttataactcttagaanaacttanaaccaatttgaaaaagtcaaaaaccttttgaagagttacatanttttgattattcagaaacaaatcactggtaatcaattaccaaatcagtgtaatcgattacacaaggctnttatgtgaaaggatgtgactcttcacattttgaattgaatttcaacgttcaaaggcactggtaatcgattaccaaaacatt

SEQ ID NO: 35220 - DNA, 302 bp, Glycine max
  unsure (1)..(302): unsure at all n locations
tgtgcatcttagtacatttaatatttgtattgcatcatgcattatcatggtttatgtgaagaaaagtttctatgttagaaaantttcttcagaggcaaaaactctctgttntaatngattacanaagtgtcataatcacatacaacaagttgtttgaagcttgtanggttgagtctcatatcggtttaatcgattacagtagtctcataatcaattacactattattcgagacaatgagtgatttattcaggaatctttgctnntaatcgataccaagtggatttaatcaatacttctctct

SEQ ID NO: 35221 - DNA, 508 bp, Glycine max
  unsure (1)..(508): unsure at all n locations
attgtttctctggacaatttgcattctggatctctatganaacctcaagggattggttagtagctntatcctcactccattattagtcttacccctttatggtaagtagctntattctcaataatgcctattatacctcacaattactacttagatgacaaaaccactatatataaatgtacaaaatgaaaatcatagaggcatcaaaaagaggactactatttactacgacaaatcactccatgaattgcacaaaatgaaatgaaacgaanaccacattacaagtttagccacaaagagaatctaagaacaaatctggttcgagatgcggtggcggtgacacgatggcaagcacgcaacgacgaggtgggcaaagagagcttctcaacaataaagtgaaggcccatgagaagggtacaaaagtagcatgaagagtanggcgccaaaaaaaagatataatgtaaaagagcactcgtttattaaaacatgtatatgattgcacatcatt

SEQ ID NO: 35222 - DNA, 258 bp, Glycine max
  unsure (1)..(258): unsure at all n locations
gaagctcactacaagccttaagtgaanaaccatgatatcaccatatccttaagggaatttggagctttggaattgttntgggaataagtgtggnggggtttttgtttcattggataactngtnnttgtggctatacttcatgatgtattttgngccatacttgatgtacattgtatattggttaaatgttggacatgctgaatgaaatgttgtttctcanaggatatagagtaaaaaaaaacgaanaagaaaaaaaag

SEQ ID NO: 35223 - DNA, 397 bp, Glycine max
  unsure (1)..(397): unsure at all n locations
cacctcctccatttcatccactctacttgaattctagtcgcgcattagttaaaaaggtgtatattttgacaacatagaggagaaataataatcaagggaatagtcattctattttcaaaataataattgttacagctgtcatgaattacaagtagttagttagagggggtaagaaaataaataggaaagactgacagagggaggagaataataaatgtaagaagagttggcctctcaaagagccaagttaggattgatgcacctcttgctacttcatatatttcatttaacttaaaaatctggatcgttntagtacctctggtacttattaatgaatatatntatattnntggctgataaaaanaaatatatttcatttaactttcacttaaaagtc

SEQ ID NO: 35224 - DNA, 292 bp, Glycine max
  unsure (1)..(292): unsure at all n locations
ctcctctaatgactatggcatcatttctggcgctaaactgctgggaaattggaagccatcttctcaattaaattttggctttagcaggagtcatgtctccaagggctccaccactggcagcatctatcatacttctctccatattactgagtccttcataanaatatnggagaagaagctgctctgaaatctgatggtggnggcaactggcacatagtttcttaaatctctcacagtactcatacaggctctctccacntgagtgtctaatacctgagatatccttcctgat

SEQ ID NO: 35225 - DNA, 347 bp, Glycine max
  unsure (1)..(347): unsure at all n locations
acgttatattatattcctagcaacgtaacgtanagagtaagatcattcagttcagattctaagattaccttccagtctcacttaaaatccaatttcatgatactagtgatcaactagaatcaagcattatgagtaaaatgaaattaccaatagcaagtagaaaatattaatacacacataatatcacaaaggacccataagggtacaaagattacatccaatccttaagaaaaactaatcgattgttggcagggcacaagactaacaagagaagtggcataagaaatgatccacagtcataattctgcagtgccttggcttcactttccttttctccttcttcttct

SEQ ID NO: 35226 - DNA, 355 bp, Glycine max
  unsure (1)..(355): unsure at all n locations
cgaatatatcgagacgctcgaaattgaatgtggaagctctgagccaattcaaacgacaataactgtttactgggatgtctaattgacgcccgtaatatatcgacatgctcgaaattgaatgttgaagctctgagcacaatcaaacgacaatatacttttactcggatgcctgattgagtcctgtcatatatcgacacgctcgaaattgaatgttgaagctctgagccaattcaaacgacaataactctntacatggatgtctgattgagtcctcgcatatatcgagacgctcgaaattgaatggtgaagctctgagccaattcaaacgacaataactttttactcggatgtctga

SEQ ID NO: 35227 - DNA, 323 bp, Glycine max
  unsure (1)..(323): unsure at all n locations
gcgtctcgatatattacgggcctcaatctacatttgattttaanagtatngncgnnnngaattgctcagagcttcaacattcaattccgagcgtctcgatatatgacgggactcaatcagacatccgagtaaaaagtcgttgtcgtttgaattggctcagagcttcaacattcaatttcgagcgtctcgatatgtgacgagagtcaatcagacatccgagtaaaaagttattgtcgtttgaattggctcagagcttccacattcaatttcgagcgtctcgatatattacgggcctcaatcagacatccgagtaataagttatt

SEQ ID NO: 35228 - DNA, 354 bp, Glycine max
  unsure (1)..(354): unsure at all n locations
attacacanaaataacaccatctaagcaaacttaatacttctatagtcatgaccttntatctaagtaaattattatatttatttctcctaatgatatagagatttctccattcccatctccacaatcaatttcccttcctccggtttcctanactggacaccctggcttttatggctactacaagggtgtataatctagtatacttcctatatgtgaaaataaaccacttccacccaaaggtcttgacaaaataaaagtatcctctaaccccgcaacccccacccaccttctaacanactcaaatgccagaatctttcttcccctctcatagtactctttgatatacccgatca

SEQ ID NO: 35229 - DNA, 263 bp, Glycine max
  unsure (1)..(263): unsure at all n locations
tattgacgtgccttagctcatcatactcttttcagactttgatggctatggactcgaacttctctatgactacacgggctctttcaagctntgcctttaaggcttggacctcatcactgtcttccgaagctttaacctcattgtctctcacagactttagatatgtgagccaatccaatacttgtgtccggactcttagccacttatgatagccgacgatgatcccattactgccttccctaagctctctgtgctttcttcac

SEQ ID NO: 35230 - DNA, 575 bp, Glycine max
  unsure (1)..(575): unsure at all n locations
ctcgctgatgtcctangncatcgacnncttgatacnctcagncacctgaggcatgcaagctcaagtgaaccaagggaanaaattagncgttcaccgatgttcaaacccgaaagggaagcctangatagaatanggtatcattataaggaaacaaagagaagcatgtatattagaggttgtatctcgaaactcaaattataagagtcttctgcaagacacgaaatgactcataggcatgtttcttcataccaatcactacttcatgccttgctactgactatgagccaaaagtataattgttattgttaaatatttatagtaataacttctctaataataatactcattacaaacaaaataacataaaactatttatatatcacaacaccaaccaaagtatgaccaccgcttgctatgatgaaagcaatgcaacaacctatgtactcntaagtggccccatgatgtcgagagaaaatatctctaggcgagtgagcagaacagacngagtctgcatattacatgatggccaagtgcatgtggcatgttacacaatatgtgagccaacacgaattgag

SEQ ID NO: 35231 - DNA, 193 bp, Glycine max
aagctctgaaagaactacaaacacaacacacctatggtgataaaaatcgctattcttgtagacataataatcaaagctatagcgagttgtttgaccttctctgcgaaacatataagacatgcaagataagtttaagcgcagcatcatcatgaagctttgaagagatcaatataatgcaaccgtactataaaaa

SEQ ID NO: 35232 - DNA, 286 bp, Glycine max
ggcgcaaacagtaatcccaataataaaataggatatgaacccaggtgttctgagtgctaatgagtattcgaacattggactttattgtgggaacaagttgatcttatatgcctgtgtggatttgcctcttgcattctggatatgcttctacagcgatggtgaaaacggtgacacaacacggtacaattaacatgtcatcttattataataatcatatatatagttgtcataaaacaatatgtatctattataagcttatatatatttatcaccaccgataaatgat

SEQ ID NO: 35233 - DNA, 315 bp, Glycine max
  unsure (1)..(315): unsure at all n locations
tttctgggaaacaggacctgctattaaaattcgacttcctttgaggaagcatagagaacctgaagaaacgaaatccaaatctaaattacaattgcggtcttcttctggaagtgtgggggcaattgcagattccttcactaaaactacccttgcaagtgatcctcagtcacaatgtctcaggattacagagccaaaacgggttcttggaaactctgattctatacatggcanagctatgctgaattcagttcatggagatgctgtggtcactaagaataatcttgtaagtgatcgtcagtcacaacaacgtctgat

SEQ ID NO: 35234 - DNA, 305 bp, Glycine max
ttattattattattattattattattattattattaccaaatactccaatatttctatgataaaagcaaatgcactgtgacaattaaaaagttacctttcttataaaatatgatttttctatgagtctagcatattctgattaatatataggaaaaaataaagaaatattagtcaattcaattgaaaactgatgaagaccataattttattttttggaaaacacatgaattgtccatgtcattggtcaaaaaaacccaagaagaaaaaactaaaacaaagaaattgatgatgaacaagtcaagtc

SEQ ID NO: 35235 - DNA, 387 bp, Glycine max
  unsure (1)..(387): unsure at all n locations
ctcttaaaacgaanatggcatacaacctcctccaatacaaacatcaatgtaaatntagagcaaactcatgtacatacttccttacgaacattcactcgcacgagatattcttctaactaaggaaaagaatacacccatgcacaatcaaggcatcctcgttacctagaccacatacatgcacctcctttgcaagatttacatacatgcatactcaaggtattttggctaccaaagattgcacacgtgcacattcgggtatttctagtacccatacatacaccaatttcataaggaatntcggccatctacaccataaggtattacatttcatgctctnttcaagtgttcgctacctaaagccgcatgcaaagtcaagtatattttctt

SEQ ID NO: 35236 - DNA, 423 bp, Glycine max
  unsure (1)..(423): unsure at all n locations
gctctacatgtctagagatntctagagagaganaggtccaagttccttatagtttgagatttgctatgcgaagacttgtagagaaccgagcttgaagaggaagtcatcctgagagcatgagatgagtctgtgagtgattatgaggttctagaggtggatgagacatcctcactgcttgtatttcttcaatccttcatttttctcttttttttgttgtaaaggaagcttcccagttatggagagctaaatcctctgttggttcttccttataggtacttgatgtaaatacctgtatatctatttaatgatgtttngtatgttcagtgtgctatcaaaacttcattctagcatgcctttgccttaatcacgtagatgcatatgtgcctgtaggatcattcaatattggaaactggtctgattctt

SEQ ID NO: 35237 - DNA, 383 bp, Glycine max
  unsure (1)..(383): unsure at all n locations
catgtggactaggtggcggttgggcgtatggtgcacaacaagtttccacatccacaatgcgcgcataaacccaccatccnctggtgcccacctccaactaagctcacgtactcccacgtagcccatatcctcgtttctctcaacatcgggtccccatcaatccttccaagcttccacaacatccaagcaaaacannaatcaaacagcacaagctatcacagccaagtaaaacagggcaaaggcagaaaactctgctcaacacaccaaccaaaatcacagctnttctcactcaaagaccccagtaacaattccttcgatccaattcgttaaccggtggatcgactccaaaatnttactggaagtctatagtacataagcctaca

SEQ ID NO: 35238 - DNA, 582 bp, Glycine max
  unsure (1)..(582): unsure at all n locations
aggcacacttcttgagnnnntttagttctgantgnctgattantctatagacgancngcacgcatgcaagctncagacttcaatttcgagcgncnncaaaganatcnggactttatcagattttcgagcaagaagaganngggcgcngaatgagctganagctcaagaattctatttcgatcgtcccggtatgttacgggactcaatcagatatgcgagtaaaaaggtattgtcgttcgaattaactgtgaggtgcataattcaatttctagcgtctgaaacgattaccggacgcaatcatacttccatggcaaatgttattgtnttgtgacttcctcacagcctcacaattcaaatgtgagcgtgtccaatattactggactctattcgacacttgtcanaaattattgtcctcgaatctgctgaagcttgacaccaattctcagcgtcaaataatctgggagcgactcacactcgacctaatatcttttctgtgtttgtgctcagtgcaactcatattgtctgttcagtttcgtcggagtcacctctcgatatctttttctcctaccgtctcgctcgact

SEQ ID NO: 35239 - DNA, 138 bp, Glycine max
  unsure (1)..(138): unsure at all n locations
tactcgatgtctgataagtcctgataatatctttacgtctcgaaattaatgttgaagctctcagcanattcaaacgacaataactntntactcggatgtctgattgagtctcgtaatatatcgagacgctcgaaattg

SEQ ID NO: 35240 - DNA, 543 bp, Glycine max
  unsure (1)..(543): unsure at all n locations
acaacctgaagtgctatgtctgatctcgagcaccgccgctgcaagctgaatcttatacaacagagaagcncagacattatatgtttgatcaagngagctcacagagctacacgagcgtgcgggagatcgaaaatcaaaaactncactgcccagnaagctatgtgctccaactcaacaggccagagacaagatttccatacaccaataggaagggagtgagtcctataagagctctgtctgctatttcatatgcccacagacatccatctaaagaccgagcaactgatatatctaagatctgttgacatccgtgtagaaacttcaactgcccattggtctgtgaatggaaggcgaggctatatgcctctgacactatagcgtggagagctctttgagcggacatcaaccaatgatatctttttattattacaccctagggtgcgaaatttaaaattttttattgaagaaaaaaaaattaatctcgtgaaaaaaaatacttaccctcgtactttccaccaaaaagttccttggataaaagaaacg

SEQ ID NO: 35241 - DNA, 570 bp, Glycine max
  unsure (1)..(570): unsure at all n locations
atgtgcctcgacntcgacctctatactcagctcggngattacagagaccgtagggtgactgcctacccagcaggttattgtctaccatacccctagaacacaactctgccgacactgctgctgagtcgcacacctctccgacgtgtgtcctcacgtggaacagactgaagcgatagatcgacctctcactctttctcgatgcgatcacaatacatctgctagggcttaacactagtctcgaacgcaagctgtgcggcctaatcctctcacatatatacgtgcgagggcttcacaactccagtatcaactacaggcatattttcagacatgttttgtcccaacaagacttcacattgggacaccgctctcatctcctctcttctacatcatattcgccccttgtaccaacaaactagtgaggcatctgcgctcctatctgtggcaactagtgtgtcatgatatgcaacctgcccccatgcccatactatccatcgtcggacttacgtcttcaccgacgatctcacgatgtcactaccattgctccctacacagatcctacttctgaccatt

SEQ ID NO: 35242 - DNA, 200 bp, Glycine max
  unsure (1)..(200): unsure at all n locations
cgcttgctccgaaagtataggtcaccaataactgccttataaaaatagggcccgcactttcgctcatcgcaaagctgatggagtcggtggagataatgcaacatggaagcctcacgagcgggttgacaacctgaattgaggcgcgtctttctttgtttttgcggtatatatgccgtcgtataccgagcnctatgtggcct

SEQ ID NO: 35243 - DNA, 353 bp, Glycine max
  unsure (1)..(353): unsure at all n locations
catctcccactccaagtaggcctccggatcattctttcctttacatggaggaatgttgagtttaataccatcaattcggttttgtctaggaacaccatcattccctcttctnctcctttcttcttcattatgatctctattctccatttgattcaacctctcatggagcgcatcatctcgttgtttcattaacctctccaaatgttgcatcaaagcttgcatttggaattgcgaaagccccactccatcattaggattagtacctgacatctcanacaaacaaatcaaacgtaacaagacaattatagttgctgttngaatacctcacccactcaagtgtatcacacaattat

SEQ ID NO: 35244 - DNA, 212 bp, Glycine max
gataaccataaagcctttacatcattatcactctatacaagtgcaagaatagagctatacttaactcacaggcaagtttgggacatcctctgggaaacctacactactgctgattacacctcatctgctagtgacaaatcatatcacaccctttttgattacacttaacatatttgaacgcagctctgtcgtatatgccttatgccacaggt

SEQ ID NO: 35245 - DNA, 341 bp, Glycine max
attataaattaaagattgattagactctatataattcaaacttcaaagaacatgcaagttaataacatttttaaaaaaaatataaagaggcttatataaaagataaaaacaataattgaatcttatttcatcatataatagaaatattctaactttgtttagagttaatcaaactaaaacatttgttaaggtatatgataattgtggtgttgatcacaagttcgaataaaaaagtatatgaaatatgtcttattaaattaacttactatatatgcagtaaaaaaattaacttaatattgaacaatagagttatgagatatgtagttacgtacaatgtgcat

SEQ ID NO: 35246 - DNA, 348 bp, Glycine max
  unsure (1)..(348): unsure at all n locations
aataatgtgtactatacatgcaagacaataacaagttcacgtaaccaaactaaagtaaactgatcataagttacctcatcaccctcatctgcatatggcgtgttctcatacatagcacgagaatctggttgctgtgcagagacattttcattgaccatgctttgagcagtcaaaagctctaatctttgtgtctggacctcaagctttcaggacaactccttgtttatttccttcattcaggagaagaaacagcatatattgcatggntagattaagatgcaatctgttagaaacccaatcacagataagagaaaacagtagtgtcaaacaatcactactaatgaattg

SEQ ID NO: 35247 - DNA, 300 bp, Glycine max
tatcttatatgtagcatcttaatacgttcatcatcatgtttagtgtgaagaatattatctaataagctatagaggtttcttcaagacgcaaaaactctatgttttaatcgattacaggtccatcgtaatggattacaacaagttgtctgaagcttgaagagttgattctcgtatcggctcaatcgattattgatatctcataattgattacactgtgtgttgagacaatgactgatttattcagaagtctctgctttaatccattaccaagtggtttcatcgactacttctttctcgctt

SEQ ID NO: 35248 - DNA, 329 bp, Glycine max
  unsure (1)..(329): unsure at all n locations
tcacctttcctccttctccattacgctgcctttgatcttcaagaagtaaaggacttcattgatgaagatacaaggcctacaagctctacatggagctaaatcatgtggtatcaaagcatcttcatctaggggattntcttttgttttctctatcttttgttcaatcaattcactttaattcctttctttatcgtcttatccatgtatctcttccattgtggatnnggtgctgctagagtagataaaaaacataaaccgattaaatcttagatctacacttgttcttgcatttctatggttcannaattataaatctactattaaatcat

SEQ ID NO: 35249 - DNA, 614 bp, Glycine max
  unsure (1)..(614): unsure at all n locations
ccgacgctactaagctgatgantgcatttgtctngcgcacanncanacncaagctctaacccccttctaaatgatagactcagaatttagtanaagaagttgtcttcaannnaananngnnctntaaacatgccagacgnaaatgatttgcgtaaaataaatgagataagggaagagataatgcacacacagctttatactggttcggcaaagtccattgcctacgtccagtccccaagaaaccctcttgagaatttccactatctttggtaaactccttttacaatgtatgaaccacacaaggacaatccttcccttgtgtttagaattccttataacttaagagaccctcggtcccttaaacaatctctctgtataagaagaaagaaaaggaatcttctctcgaagagaagatattacaattgaagccatggatgaactcttaatggatgtgcgagtgttgtcccacgagattctttngagagagcatttggggcatgaagtctcttataatatctctctcattgctttnntgagtagacacacacatatatatatgcccttcgtgcctntcaaantgggtnagaaagacgtgtcttttttaaangctcttn

SEQ ID NO: 35250 - DNA, 258 bp, Glycine max
  unsure (1)..(258): unsure at all n locations
tgtcattaacaaaataaccaaatattataaatcttatgttcaggatctttcattcatccaacctactangataacataannngaagtgtgacantatggcatngactgcaatgacactacatcagaatgctataaccatgtgcaaacactagagagatcctacagttaagtgtaatttctgattaaagatctaataagagtcaatactcaataaaccactactaaccttacatccaagcaatcatgaatcaccactca

SEQ ID NO: 35251 - DNA, 300 bp, Glycine max
  unsure (1)..(300): unsure at all n locations
gaagctagagctttgttacacatacttctctaatagcanagctcacctccttaagatgagaaaatagagcttagctacacacccnctataataactaagctcacccncatggcaaaatacatgaaaatacaaaaaaaaatccctactacaaagactactcanaatacctcanaatacaaggctaaaaccctatactactagaatggccaaaatacaaggcctaaacgaaggaaaaacctattctaatatttacaaagataagcgggctcatacttagcccatgggctcgaaattcaccct

SEQ ID NO: 35252 - DNA, 264 bp, Glycine max
  unsure (1)..(264): unsure at all n locations
gattcactagatagataacaagattcttatggtaacaaagaaagaaggattcctccataaaaaccatgttgatgtggaatcgaaaagacaacttctgaagcagcaaatgctctntgataatcaccaaagagatattcaagtanggagcaactaagataatattaatattcttaactttgcaatgttntagtattatcattaaaatattacctcttgtgtttttataggaactaaagcatataattcacactgttgcaacctacc

SEQ ID NO: 35253 - DNA, 315 bp, Glycine max
  unsure (1)..(315): unsure at all n locations
ggtacgaccatgcgctcctgatttccagctgggaaatnggcgagtggaggaacgccccggcatttacgcaacgagcataatgtaaacctttacggttttaaaagctctatagttgggcctaggctttatagtatttcctattagtaaggatttgtgctcttgtttgtgaattataatacagagatctttcttcatctgttcctggtctctacccattctcatatcattgcatgtctacttctttttctgaaacggcagatccgatgacgagccccccgaatgtactaatacctgtgacccgcctatcgacttcga

SEQ ID NO: 35254 - DNA, 559 bp, Glycine max
  unsure (1)..(559): unsure at all n locations
ccccatatccttcgacttcgatctctaagcaccgcggctgcaagctgccttggtttagacatgatgatacatgatttgngacttgtatgattcgattgggcannaatggatgaaggcaagagtggttttcgaaatctgcactttatgcnagaattttgctgttgaaatgtgcagcanaatttttgtataagtgcagaaaaatgcttgtgtatggctggttgtgaaaaggtaatacatatgggagtcttgatatttactanncagatcccacggtcaaaatgtagacttatgtcctanagacttcccagtaaaatttcgagtcgatccaacggttaacgaattggaacgaaggaaatgttactggggtatttgtatgtgaaaagctgtgattttgagttgtgtttgggtagaagtntctgcttttgcctgtttgctngntttgtagccatgatgatgatgtgaatacctgatgtgnggaacttggaggatgtgggaccgcgttaaggaccagataggctactggatactgactcattgaggggcataggatgtgctaact

SEQ ID NO: 35255 - DNA, 501 bp, Glycine max
  unsure (1)..(501): unsure at all n locations
atcattagtaatctctnttcttttgtaaagtttaatcttaatcgatcattagcatcgtcaagttgtcttttaaaatcattgaaagttaataaaaccaatgcataactgattntatcaccatcaaagtcacttgaaatcgttcaaggtccaacaccttaatgaccctcttttgttcttattaaaaaagaatcttgcaaaagcataaaaaataattngacacacagactttctcactntaaagaactacctangtctgaattcctcatctcacctaaggatatgtaggagcgagggcagcacccttgttaaccccaaaaaataaaanaaatctaanaagggaagatacacnaatttgaagtcatgtntngcacanctcgataaagggtcgtgtccctcatgacnggcatgtggngtgctaataccttccccatacgtaaacaaactccgaacccctattttcaaatctaaacctctttttggtttctacatttcctgataacg

SEQ ID NO: 35256 - DNA, 299 bp, Glycine max
  unsure (1)..(299): unsure at all n locations
cacttctctctcttttcgaattgcttaggaaaattgtttccgtgaagaaaatccaagccgaggcgcttccataacgtttccgtgagggatttcgcgaaggttntcgaccgttcttcgacgttcttcattngttcnttcatcgtcttcagtcttncaacggtaagtacctcanaccaagcttttcaattcattctatatacccgtggtggtccacattnggtttcatgtatttttattctcgtttcatttactttntatacccncttttgatgtacttaagccattttatttaagtcatt

SEQ ID NO: 35257 - DNA, 278 bp, Glycine max
  unsure (1)..(278): unsure at all n locations
ttctaaatgatctagctcttcttgcattgttttatctctagtactcattaaacataacatcatctatgtgttttggctttgattatgagagntaatgtgtatgcttgagagaagtccttctctagaatttgtccttangatcactaatgatctanngaattggataatggttccttagcanatgcatagttggttctctgatttcttcagatngatcatccattggtgagttggatgcatgttngtcttaactggacatagcaacaaatttcacaata

SEQ ID NO: 35258 - DNA, 328 bp, Glycine max
  unsure (1)..(328): unsure at all n locations
gtcacaagnggcgcaatatctcctcggacacgcattcatcattctcaccgaccaccggagcttgtaagacttaatgactcaagttgttcaaaccctggagcaacactactacttggcgaagctggtgggatatgactatcaaattaaattcaagagtggacactcaagtgtcatagcggatgccctattgcgcattactcctgcacctgactccacatgtttggtcctccatgttcctcagctagatntcatgaatcagttgcgtgaatcattacaagctagcgagacattntaggagaagctacattccatacaagctagtcccact

SEQ ID NO: 35259 - DNA, 462 bp, Glycine max
  unsure (1)..(462): unsure at all n locations
ctcacattcactntcttctacatcatattcaatcttgtccaaataaataataaagtcatctcgactcaagatagtcatataagtctcatacaattaatatataacctatatcctaatgtcacatcctatcagagcgtggtgttcccgtgtcctctagcatgaggttcttcatagtcatccacctattcatctgctcccccgaacacaaagttcaagatcatcacaggatccaaacacaaacaacaaaccgggagtgagttattacattgctaactactagagataaacaacacaacatatagtagccaaatacaatntacttaacatatctcacattatttcatcactttgtcattcatcaatcacactnttcatccatcaatcacacctttcaatcatcaatcattatacacaggaatcacacactctgatcaagacataataacacatcaatntcataat

SEQ ID NO: 35260 - DNA, 295 bp, Glycine max
  unsure (1)..(295): unsure at all n locations
ataaaggtagtagtgccatgttttcaaagcccgtactaaggcatacaactccttatcataagttgaatagttaagggtaggaccacttaacttttcactaaaataagcaattggatggccttcttgcatcaacacagccccaatcccaacatttgaagcatcacactcaatttcaaaagatttttgaaagtttggcaacgcaagtatggnggcattagttagcttttgcttaagaacattgaaagcttcttcttgtttctcttcccattngaaaccaacatttttcttgagcact

SEQ ID NO: 35261 - DNA, 218 bp, Glycine max
  unsure (1)..(218): unsure at all n locations
ctctgagcaaattcaaacgacaataacattntactcggatgtccaattgaatcccataatatattgagacgctcgaaatttanaacagaagctctaagcaaattcaaacgacaataacattttactcggatgtgctattgagtcccgtaatatatcgagacactcaaaatttaaaacagaagctcatagaaaattctaacgacaataacattntactc

SEQ ID NO: 35262 - DNA, 352 bp, Glycine max
  unsure (1)..(352): unsure at all n locations
gagaatgtgaatgtatgtatacatgnatttgatgatgtcaaagaagaatctaacaaggctgcttcaaatgataagcanttgcttcaagaataatttaagaatgcttcaacaaacaaagccttgtttcaagattcactaaagaccaagcctttgccttaaacaaagtgctttcaagacatgtaaggctctggtaatcgattaccaggaactgtaatcgattaccagaagacagggttgagaaaatagttgtgaaaaaggttntgaatntgaattttcaacatgtaatngattaccatatgtctgtaatcgattaccagcaacgaaactttggaaattcanattcaaaagtcat

SEQ ID NO: 35263 - DNA, 372 bp, Glycine max
  unsure (1)..(372): unsure at all n locations
tttcaccatggagatgcagcggaaggcaaaggcgaagaggataggggaggcaccatccactatggaataagccaaggaagaaggagcttcaccaccaagaattgccttggataagaagcttgaagaggatgctntaatggaggaaaagaaagagagaaggggggagcacganattgaaggaataaaagagggaaagaagtggaactttgaagtgtatctcataaaactttcattcatcanagttacaacaagtgttacacatgcttctatntatagactaggtagcttccttgagaagctntcttgagaaaacttccttgagaagcttctttgagaaaatntccgtgagaagctagagcttagctacacaca

SEQ ID NO: 35264 - DNA, 487 bp, Glycine max
  unsure (1)..(487): unsure at all n locations
gagcgggatgggatatgactttcgagnnctgnacctctgagtcacctgaggcatgcaagctntcatttntcaattngaccatctctatatagttttcggacttttccggacgcncgngnagaaacatatcgggcaagcaattctctcacagcttcggatcaaaattttgagcgtcttgatatactacaggactcattatactccgataaaagtatgtcgtagatttgaacgagcttcgtttcaatttggacatttggataatcgaaactcagcggcatccgaaaaaagaattgcgttgatttctaaagttccggttaatcgagcgtcagaaatacgacgtaccgatccgggataagtttgatttaattgccaactcagctaattgggcgtggtttacccgtaacggctggaaaaattttggtaaatccaaactcccctattgagcccaataaccgcccccccccccataattggcatattccatatc

SEQ ID NO: 35265 - DNA, 289 bp, Glycine max
  unsure (1)..(289): unsure at all n locations
gatatatcgagacgctcaaaattgagatccgaagctctgagacaatagaaccgacaataactntatacacggatgtccgagagagtcccgtgatatatcgagacgctccaaattgaaaacgggaactcttagaaaattcaaacgacaataactacttactcggatgcgcgacagagagaagcaatatatcgagagatgctccaaattgattacgaaagcgcggagcacatgcaaacgacaataactttttactcaggtgtctgagtgagtcccgaaatatatcgagacg

SEQ ID NO: 35266 - DNA, 242 bp, Glycine max
atcatcatgcatagataaatgcaaaaactagggcaaatgaagagggtgagaatgagggagactcccatgttgtgactgccattcctatacggccaagtttcccaccaacccaacaatgtcattactcatccaataacaacccttcttcttacccgacacccacgtatccataaaagccattcctaaatcaaccacacaacccgcgtaccacacaaccgatgctaaacaccatctttagcacg

SEQ ID NO: 35267 - DNA, 450 bp, Glycine max
  unsure (1)..(450): unsure at all n locations
atagaagcatgtgtaacacttgttgtaactntgaggaatgagagtcttgtgagacacaactcanagttcaacttctctccctttntcctccttcaatttcgtgctcccccctctctctttcttttcctccatataagcatcctctccaagcttcttatccaaggctcatcttgggggtgaagctccttcttccatggcttattccctagtggatggcgcctcttctcacctcttctcctttgtcttccgctgcatctccatggtggaaaatcaccattaaaggacctcattgaagctcanagatccagcctccatagaagccccacaagcaagtttccatcacatactgacacaagcaagcaacataatgggtcgacaatagtgaggcttaatgaagaatattctatcccnttgaataatcccccataagtacttgattcatggtcgggt

SEQ ID NO: 35268 - DNA, 318 bp, Glycine max
  unsure (1)..(318): unsure at all n locations
atgangacaaanagctcanaagtcaagatcacttcatgataacaaagatgatgacattcaagaatgagttcaagattgagtcaagaacacttcaaggatcaagaggaaatttgatttcaagaatcaagattcaagattcaaagattcaagactcanagattcaagaatcaagagaagacttaatcaagataagtattaaaaagtttttcacaacattgaatagcataagaagtttttacaaaatcattaccagagagttntactctttggtatatcgataccagantatagtaatcgattaccaatggttttaaaacg

SEQ ID NO: 35269 - DNA, 353 bp, Glycine max
  unsure (1)..(353): unsure at all n locations
tatgaacaagacatgtacactgtgaacttgaaatcaaatgattntatttgatctataaaantattttcattcgtatgatattntgatttgtgcactaacagatctgatctctatccctgtctgcattntgtagtcattgttgaacttattaattntcttgtggttagggtaatcatcctaaggatgggcagcctgtcatattaaagcttgcaagagctgggctttgtgttagacatcgngcgcacggtgcttctgttcctaaggtatgattgtaggtttaaacattntctaattntagatatttntcattccatatctgccaccatagcaacatagttagtagttaagcatgt

SEQ ID NO: 35270 - DNA, 510 bp, Glycine max
  unsure (1)..(510): unsure at all n locations
gagtctttctatggcttctaatcttgcaactggagcatatgtttcttcataatctataccttcttcttgatagtatccttttgcaactaatctagccttattcctaatgattatgccatgttcatctaacttattcctaaatacccattntattcctatgatggggtagttntcaagtttctttactacttcccacacattgcttctttcaaactaatttaattcttcttgcatatcaactatccaatgatcatctattatggcttcatttatttttttaggttcaaccatagacacaaaattcatattattgcataagtctgtaagagaatgtctagttgttaccccttatgagatatcacaaataatgttgtcaaagcgatgatctcttgaagctcttcattctcttggaagttcatcatttgacttgacttcttctcgaggaacatcattgcttccttttccttgtnctctagaatcttgtcataaatatgcattngtctaaagatg

SEQ ID NO: 35271 - DNA, 419 bp, Glycine max
  unsure (1)..(419): unsure at all n locations
ctcccagatagtgaatatgtgatctatggtgttctcttcacaggccacttgatcaacatgcccaacaagtgatatcaaatgataccaacaggtcacttgtctttgattgattacttttgatggttgttttctacttgagtttagattgtccttgatgattgattgattntttttattgatgtgtgtgtttttgcttgattgatgttcaatgtttgttactttgattgattgattatattntatatttgattacttgtctttgataattgcttntgtattggtgtttgctattgattgagcttgattgatgtgttattgtactcgtttatgcttgattaatattgaatgagtgtttaatgccttttggatcacttgattctatacattacaacaagtggaacatttttctctcttatcat

SEQ ID NO: 35272 - DNA, 301 bp, Glycine max
  unsure (1)..(301): unsure at all n locations
ggcaaaaagctcanaagtcaagatcacttcatgataacaaagatgatgacattcaagaatgagttcaagattgagtcaagaacacttcaaggatcaagaggaaatttgatttcaagattcaagatttaagaataatcaagatcaagattcaagactcaaagattcaagaatcaagagaagacttaatcaatataagtattaaaaagttnttcanaacattgagtagcacaagaagttttcacaaaatcattaccaaagaagtttactctctggtaatcgattaccagaatatagtaatcaa

SEQ ID NO: 35273 - DNA, 270 bp, Glycine max
  unsure (1)..(270): unsure at all n locations
agctagngaagaagaatgtggcatatacctgcgaaagctcaagttgagagtacaagatgaagaaatagacttcaatgtgtgtgaaaccaagcatcaatccaataaagataattcatgctttatggtggacattatagacaaagtctgttccacttctaagtagcagcttgctcatgcaacttcatgtttttttttaaaaaaagatcacagcctaacatggcaggaggcttgcataaaggaactttaagcctaatcaanaagtttggtatg

SEQ ID NO: 35274 - DNA, 393 bp, Glycine max
  unsure (1)..(393): unsure at all n locations
gctcgaaccagcagcanagaatgacactcaacccatttttttgttcaattgcctgctgacaacaancntaatagctaaaataccgtacatcagctctgaaaaaatcaatttcttaagaggataagtcataagtgagtggctaattagtttagtctagggtatagagagagctctcaaaataggataaatcaaaagaggataaaaggataagtcataagtgatttacttgtgaattttaattgtgattaacaagaggataagatgtaatagtagtgaaaatgactaaggagacttgtatgcatacaatatacattgataaactataaaaatttcctggctaacagctatcttgctatagcaacttggaattcaagtgaattgcatatgctcttt

SEQ ID NO: 35275 - DNA, 595 bp, Glycine max
  unsure (1)..(595): unsure at all n locations
aggggtatacnnnnnnnnactatacctcgacnttcngatctctgagtcacctgcggcatgcaagctagacctanaggtgatggaccttttagggtcttgatatttataataacaatgcctataggtnggacctcctagaagagtatggagttaacaccactttttaacattctgatttaattcctttgcangtagagctaatactgangaggaggaataaacagaattgaggtcaaatccttttcaaggggaggggatgatgcaatccttcctangaanggaccaatcaccagagccatgagcaagagacttcaagaggattgngctagagctgattaagaangccttatgtttctcatgaacctcanggtagatttaagagcccatgggccaaacgtggttccacnttttctctataatatttagaataggtcttcttctttttggtctcgtattttgcccatttanngttgtaggtatctacaaataagtgcccctaccctatagtaaagtacctactatatatggttaacctcgatttatgcatttgagtgtctttgagtaggacttttttgttttcatgtatttgcatggn

SEQ ID NO: 35276 - DNA, 365 bp, Glycine max
  unsure (1)..(365): unsure at all n locations
agctagaagtgagaaagtgtggaagagtcagtctttttatctttattcgttgtatatagagnggtacctgaagatatgtcacggnggtcaggagaccttgnggacgtcaggtggggtgctattgcccaaaaccaagcttgaccaatcccgacccaacccgggcatcgattacacagtgtaaattgcaggtttccatgttctgaagctgtgtaactcgagtttggcctctggtaatcgattaccaatgttgtgtaatcgattaccagagaagaaaacccttgaggcataccttttaactacatgtagcggttatgggactcattgtgttgtacacgtagttagaattctcatgaaagagtctaccc

SEQ ID NO: 35277 - DNA, 350 bp, Glycine max
  unsure (1)..(350): unsure at all n locations
tgcacttctctctctnntcgaattgcttggaaaaattgtttccgtgaagaanatccaagccgaggcgcttccgaaacgtttccgtaacgtttccgtgaggaatttcgcgaaggtttcgaccgttcttcgacgttcttcattcgttcttcatcgttcttcgatcttcaacgggtaagtacctcgaaccaagcttttcgattcattctatgtacccgtggtggtccacattgtgtttcgtggtattttattctcgtttcatttactntntatacccnnctttgacgtgcttaagccattntatttaagtcatttctcgcttaacctaaaaataaaataaatttccaccgatc

SEQ ID NO: 35278 - DNA, 323 bp, Glycine max
  unsure (1)..(323): unsure at all n locations
atctctgagtcacctgcggcatgcaagcttctcggctcatgctgagaacgcctctagtncatctcccgttcatcctaaggcacccacccagagggaagctccncaagttccaactccgaacgcgactcgaccggccggtaattccaacacaacaaggaacttccctccgaggccgttgccggaattcaccccgctcccaatgacgtacgaagatcttctaccatccctcatcgccaatcatttggccgtggtaactcccggaagggtcctcgaaccccctttcccgaagtggtatgaccctaatgcaacttgcaagtaccatg

SEQ ID NO: 35279 - DNA, 306 bp, Glycine max
  unsure (1)..(306): unsure at all n locations
gcggagattacgtcatcttccacgctcacaagaactgncntattattattgagtcacgctgacgggcggaaatacccgagtggttatccgtataaacattctttnttgttgtctgtaagacgaanagcctgatagcaagcagagactaacgtcgttttctgcgcccttcgtcaatcgcggccgacaagtcccgttgacacgcggagatttacgtcatcttccgcgcacacaagatctgtcatactgacatttgagtcacgtcgacgggcggaaatacccaagtggttatccgtataaactttcttt

SEQ ID NO: 35280 - DNA, 351 bp, Glycine max
  unsure (1)..(351): unsure at all n locations
attncatcgccattataactatangatgattatgtttgcatcattgacaagctaacaaggacaatgttgtataaaccccacacttagccactcacttaacaaatacagagattgagctgattntgcctataccatcaaaaacttaacaaggaaagctctctctgtaccctagactaagtcactcacttatgacttatcctctgtngaaagctctctctgtaccctagactgagctgattagccactcacttatgacttatcctctttgaaaacattctcttgtctagtacctaaagttggtccccgtaaatgcatgacattgtgttagctactggagncatcatgttcaat

SEQ ID NO: 35281 - DNA, 344 bp, Glycine max
atcagtagagatgttgaagttgatgagtacgcttcttggaattgtgatgaagaaaaagtggagaagaacgttcttatacccgctcaactacctcaagaagaagctgaggaagaagacccaggtgaaccaccttcacctccaccacaacaacaagatcaagaactatcatcaccagagtctactccaagacgaggtatcttcctttggtggacatatatgaaacctgtaacttggccatacttgaacttggaagctttgaggaagcgtcaaagtaggaagtatgggtcaaggcaatggaagaagagatacaaatgatctgagaaaataacacatgggagttaata

SEQ ID NO: 35282 - DNA, 256 bp, Glycine max
  unsure (1)..(256): unsure at all n locations
atctgcattctgagtttctttatatggactttcaattcatattttgaatcatccagtgatcagtacagcagtgtcacccccaactccagttggtgactatgatattgggctcgaacaactcgtntcaatgtctacagatcagaatatctatgctttacatgaatatggaggggcaagtcttcaacatggtgtgtgagtgcttatagaaatgttgaagtgatttgagtcgctaatacaatatagtgatatcttgttc

SEQ ID NO: 35283 - DNA, 426 bp, Glycine max
  unsure (1)..(426): unsure at all n locations
ccttctttcctccacttattctcatgggtgattggctcgtgcaatccttgagtacaaatggtcttccatcataggcttccaataggaaataatttatgcggttaacttgaacatatctccatcatgagtgacacctccctccatcttaaatcacataggataatagctccccttgaaccaggcgagctntgataccactgttgggaaacaccaacactatttccctctctatagactcagaataggcacttagcagaaataganaaaataagaatagagagtagaagaatgacaccaaatatttttaacgtggaaaactctttcaatgtanaaggtaaaaactacgagaccaagccagcanatatctccactggtaaagtagaatacaatgactctctcatacaagacatatctttaatctcactc

SEQ ID NO: 35284 - DNA, 323 bp, Glycine max
  unsure (1)..(323): unsure at all n locations
acgagctacactgacatagaanatgtaaagaagactgagaatctaattacactaattatctttgctgcaaagggttgtcttacacacaagttttgtgcaaagacagtttatgcattgcaaagcattggtttcttatatgaatcgtggccgtctcatagtttcgtgttaaaaagaagtgtgtgcagaatggcataaatctggttaaagccttttctttttatttattattcttgcttatcttttaattctagttgtgaaaatagcatttattcttaatttaatctctgaactgttttgagttttaattctttaaactattattt

SEQ ID NO: 35285 - DNA, 441 bp, Glycine max
  unsure (1)..(441): unsure at all n locations
tatgaatgatgctctcctacaacctaagacaaggtagaaggagataaactgtataggctcaaggttcaatcaaacaatcatactttcagctcataatgggtgcaagggataaatcaatcatgcacaaggtaagctntttagctaagtggctatcttcaatcaaaacatggccttcatccttttcaaactcatgtattcattccatactcaaagattcatgcaaaaaccattacttactgctaatcgttctctcacaattaaagatcacactctcaccgggttgcgattaatgcattccttcacaatcaacctgacanaagcaactaacattttagtcataatcctaattccatgttctttctcttctaataactgcatgctcattcaagtcatatgatctgtgcatttcagttcactcacatcatacaatngatcactgaa

SEQ ID NO: 35286 - DNA, 438 bp, Glycine max
  unsure (1)..(438): unsure at all n locations
atcctctgagtcacctgcggctgcaagctacaactntatcttccacaattttgctcttttacttgttatnnatatnnttctaattaatatctaacagaggcctcttctatatagatatctacatgtccatctattatcgaacctacgatagaaacaagaactaaaatgggaatatcccaacgaaatagtcttaaaattagtaggcacaacaatctaactagcatcatggattggagtttgacccccanaagactccaaatcgggccaccgaacaaatagcacagggtggttaaaaagatcccgaatgaaaatagagacttatatctattgtagtaagttccaccttttagtgattgtagtaactctggtttaatagtcgttagaatgtctctntcatattgagggaatttatctaatggcattcaatcacagaatcca

SEQ ID NO: 35287 - DNA, 183 bp, Glycine max
  unsure (1)..(183): unsure at all n locations
ttctgnctaataatattcccctcggaagtaaatcttataatgtttgatttgattattcccttggaagcaacccattcattaatcaaaatccacctttatgagaaatggggcttctaaaatctgtcctattntcaaaatactaaaccaaaaaacaaaaagcatgccttgtgtcgcaacgtgccc

SEQ ID NO: 35288 - DNA, 579 bp, Glycine max
  unsure (1)..(579): unsure at all n locations
cggnnatganccgtgacctagttcattgcatcancnganncnntgagncacctgcggcatgcaagctngaatccaanctattcttctctcatatgaacctantctacttcacannancacanataancgaaacatgcccaatntacattgtcaaaatcatcttttgaagtcaaccttagaaacaaaagcattacctcatacttctntgaactcttaatagagaactnttaccatacgaattttctaatatctgtcactaaanatagtgaaatattattangaagacacanataacagatattgagaanaatactcatacanaaaatatataattcattcattggtttgttannataatgagtaaaagtattttcgtggtgcattggaccgtcttgcaatcttctagctcggacgtaaacaaatgaatatattatatattatatatatcattaacggagttatnccgttgtatggttctgcatctcatcgagatatactacaaacgacagtttatagtcattgtctataatggggcggagtagaganctctatttattttctctgatttaagtataaaag

SEQ ID NO: 35289 - DNA, 481 bp, Glycine max
  unsure (1)..(481): unsure at all n locations
ccacgcgntttggcctgtgccatgatnctgctgaacncgcgatccttgagtcacctgccgcatgcaagctgncgnnagntgtttatcttttctnaatctctgacgaactatcaagcttgaattcgactttattatctttaattcgctctaaagaagatcggcaatctgtgctaatgcacttaatctgtaaagatatacagattatgtgtcagtattttcggcagatgtctgacatcgatccacatcgtgatcctgagcttcaatctcattgacatttatcttccttggcattggcagccatctgattcttgactacgtggactatgtgcacactccacttcttcatgctaaggctatgttaacanaattaccatcttttagctcataagctacctacacttctatggaactaactttatatgtgaaaaactccattctatgtgaactcctctctttttagataactgtgaatttgcctcaa

SEQ ID NO: 35290 - DNA, 345 bp, Glycine max
  unsure (1)..(345): unsure at all n locations
agcccttcctccattgagcttangtaagtgacctccatttcaactctaaacatgattnntcacttcatttgttgctctattctcacttgcagtttcaaaaccttatttttcactcttgaaggttggaaacttgaatctaaacctccttcattattccttctaaatttgtgcaactctagaaccatgttcttgttgttgaacttccttgaacatgttgctttgaaattntcaagcttngttgtcatgttctaaattgtacgttgagcctatttccttgagtattttatgccaaanatgagtatttcccatgttaaaacatannattatccttaaaataaacttaaa

SEQ ID NO: 35291 - DNA, 268 bp, Glycine max
  unsure (1)..(268): unsure at all n locations
acttaaatcccagggctgctcgtttatctgcttgcatgtctgagaagaatttttcaactccatttgcacattcatcaccttgctcctttctgcagccaaaacacaactttctataaaccagtttctgtaactggttgaaaatactaatttattggtaacaataattttatgctcaatntaatgacctaaagaatggaaggatacattgnttganatgtgatatacaatagtagtatcaggaagatctgaaccatgattagcatctact

SEQ ID NO: 35292 - DNA, 336 bp, Glycine max
  unsure (1)..(336): unsure at all n locations
atagagatgaatgactcgagcatacttatgctatgcatggaaaatgtaattatgagattgagatgcccaaagaaacctcgtttcctagttagccatgcattaggtaccatgtccaatcattnttgttttttaagagaaaccggcttatgatcccaccatggttggctcatggtacctaacacatgcatctaagagtgtagtgtaaactntcatgcttccctttntttgttntgntntgcagaggaaagcgcaaggatcatgcatgagtaaagatgaaaataaaaggtatgcanaaagcatgttagatgcagatgcatggaaatgaaatgacttatg

SEQ ID NO: 35293 - DNA, 342 bp, Glycine max
  unsure (1)..(342): unsure at all n locations
acaagaaatgtcatgatcatcaatcaatttcctgtacacagttaaaatttcaattactagaataattaattaaactcaattgcttgttacatgaaaattaactggcaaagtaaacgccttatcgtgtgtgtatgtcagtatgtgtgttgcgtgagatttctgcacatataaacagcgtttacacatataaaaaccgttatctagtaatggattcataaaaattgtgttagaattgccaatgaagagctgaatcatcatgttagaattgcacacgaaagtaattatttacagttaaagtngtccatgttcactngtatataacttcttatttgtgtaatcttt

SEQ ID NO: 35294 - DNA, 299 bp, Glycine max
  unsure (1)..(299): unsure at all n locations
tatgcgggccatcatcgatgagtgcaaagagaagctaaatctagcggcgactcacgagcaaaggctagaagatgagtacgccaagatatcagcagaaagggaagcaagggaaagggtaattgattcgttgcaccaagaggcaacaatgaggatggaccgatntgctcttactttgaacaggagtcaagaacttccccgattgctagccaaagcaatggcggacacctactccgcccncgaggagatccacggacttctcagctattgtcagcatatgatagacttaatggaccatatga

SEQ ID NO: 35295 - DNA, 411 bp, Glycine max
  unsure (1)..(411): unsure at all n locations
ctcctctntcagaaccattctatgtgctctcgactggtccctttcttcccttcgcaacttgagttcattattgctaccccatagagcntccgcgaaattgttccggccatactcttccttgcgagccctcttggtctctcgttcaagggctcttgcggtaattgcattctcttcccgtaacccggcacactccttccgaacgtgtgtggcagccaacttgaacttctccttggcgagttgtgcctttccttaactcgctttgagagcttggacttcttcgtcctcttccggtgcttcaaaattctcttcgctgacgactnttaacttggcgagccaatctaaacctcgtatgcgaactntcagccattcgtggtacccaccaatgatgccattacgaatgcctctaagctc

SEQ ID NO: 35296 - DNA, 570 bp, Glycine max
  unsure (1)..(570): unsure at all n locations
aatctatatctgagctcgacctagcgaccgagctcagctagaataggaccataacaggagctttagggttagatttatcaancaaccccacaaactggagaggagagcacttacctgtgaatacacagctacattatcattataggctgcaccagcagctacaactgtaacaatctatctatgacatatgttgactcacttgtggcacaagagatccattatgttctggcctgagagatatagtactgtcttgaagttatgattntgcagaataagtggcgtgacagaacagggaatacataggttctttggatacctcaattctgtatctaccatcatgctgataggcgatgggaagcgtgcgtgaccctagagctaccactagcatgttcattataccgctcaagatcattgtatgctcagcttcgtgatggattctgcattgtgggagggaagccatatatggagcaggcctgtgcccacaggacatccctattatataccatggttgattcgangacaactcttcttactcaagaagaatgtgacatgttccagagggattctagn

SEQ ID NO: 35297 - DNA, 75 bp, Glycine max
tcagcattacattgatacatgggtgaaggactcacgacgagaagcacactcaggagcttacttgaatcaatatgt

SEQ ID NO: 35298 - DNA, 336 bp, Glycine max
  unsure (1)..(336): unsure at all n locations
ctgcagcttagataactctaatccaacnngcgctttcgccttctcctcttacgcgagaagggattgagcttacgccagcgtacgctgagcctagatgaaacaattgttgcacttaacgcactgatctacgctaacacgcggcttgatttgtgccttggagattctttatcacgctaacacgctgatctgcgcttacggggatgccgctaccactgatgagctaatcaactgtactttacacttatgactacctatttcacctgaatgccatattatattaatcatggcattttaagacagcttcctaacaattattcaaatcctcaaatcctaatg

SEQ ID NO: 35299 - DNA, 217 bp, Glycine max
  unsure (1)..(217): unsure at all n locations
ttcatatgtacctttatgtttaagcattccatcctacanagtagaaaataaaataataaanaaattggacaaaatataaaggagaagtttcatatagtcttagagctaacttcactagacaaataacacccgtgaaagagagaaaatgaaaacttatattgtattcttgcagagaaatttaattatataaaaggaatcanaataaaagtataatata

SEQ ID NO: 35300 - DNA, 339 bp, Glycine max
  unsure (1)..(339): unsure at all n locations
ctaganatagaaggtatgatcaaaagagtattccttataaaatatatctggatatgagtcatccaactatagagtattagcattgctaagaataagaaatcacaaacaaccatactatctatgcaattaaggcagaacaccatactacaagcatacacnagaatatatggttcctataaccagtatataacatacatatatgaataaagaattgaatagttactaaggatgtatntaacaaatcacaagtntcaacaatcccgtntatgataacacactaanggaaaaaagggatagccacacatttaacacatcgataaacacacttatcacaacaca

SEQ ID NO: 35301 - DNA, 452 bp, Glycine max
  unsure (1)..(452): unsure at all n locations
aatcttagtccatatcatatatcttgtgcatcatgcgttatcatgattaaatgagaataaatatttctaagttagaanagtttcttcagaaggcaaaactggttttaatcgattacacctttatcgtaatcgattacacaagttgtctgaaacttgcagagttatgtctcatatcggtttaatcgattacaaccttctcataatccattacacaattagtttgtgacaatgactaatatattcacgagtgtctgttgtaatcaattaccatgtgatataatcgattatttctctctctataagttgttcagaagtgaacaataacactctaatcgattactttgagtattcttcttgagctgtgtcaggttgtgggagaacacttgatcgataaaaagatatataatcaatacttcatttgataatcaataccttgagagttatcaatacat

SEQ ID NO: 35302 - DNA, 380 bp, Glycine max
  unsure (1)..(380): unsure at all n locations
agcttcgtccgcagatccctctggaagtctatgctttaactanacaacattatcatcacaacatcttcagaaaaccaaaaccccataatccatccctggtaatgtagctattcagtcctgcttctatcaagttctaaggcaacagtacatttcccaacgctaaagtcacctaactatacacacaaatgagtgatcagaccaagagcatgcagaaattaagcatngaaagaagcattgaacacataaaacaccattaattagatattaaagtaattacattagttgttccttagaaatccccaacaagtgtgtttagctagtcgttacagaacaagcctaacacaaatgagattgagagtacataataattgttccttaca

SEQ ID NO: 35303 - DNA, 388 bp, Glycine max
  unsure (1)..(388): unsure at all n locations
gctctgactngagtcatcaagagattataaatatgtgaccttgtacatttgtttcaataatataattaacatcatctctcanacatctttcaatcaatctttcaatatctntctacagaattntcagattcatttctcttcatctttctaaaagttttttatcaacactttctcttccaagaaaagttctttgttcaaaaacttgtgctattcatctttttcattctcttctccctttgccaaaagaacgaaggactaatcacctgaattcttttgtgtctctcttctcccttacaaaagattcaaaggactaaccacctgataattctttggattcttcccttccccttaaacaaaatatttcaaaggactaaccgcctaagatatc

SEQ ID NO: 35304 - DNA, 274 bp, Glycine max
  unsure (1)..(274): unsure at all n locations
aaaagttgacatcggcattttgaatgtaatatcatccttaatgtttccttgatcgtagacaccaattagagtccagtctataatttccatggaaatgttgtgggcccacattgcttctacagaacttggtgcaagacatttacactcgaataaaatctcagcttcattccattcgtgctctganaatattccctccgctctgcattctagatcacaccagagtatcgggtcccatgttctanatatgtaattacatgaagaactaaattgcata

SEQ ID NO: 35305 - DNA, 431 bp, Glycine max
  unsure (1)..(431): unsure at all n locations
atccaaccagtcagaccgatccaaccggaaccaagtgatataattgggttgatttagttattggactggccatacatctagtcttattggacccgaccgatttggagtaaacctggtaacccaggtttttaaaatcagtttcacataaaagaaaaataaaaaaatgctccaaaacacttcaaaaaaaaaaaaatccgagacttgtataattgtgttattgaatattatctgtagacttatgttatcaattctaatatttcaattgttattttagattctggaatatgaatagaattttcttaagcaaataatggtgagtatatacttatatataatagatacatgtatacatttaaatgtgctaatatatattaaatngggtcaattattggacataccgatgaaccagtaaccaatcgacccatcactaa

SEQ ID NO: 35306 - DNA, 342 bp, Glycine max
  unsure (1)..(342): unsure at all n locations
taatacttttataacttaaattgcatataaccttaaagttcttgagtatctatttaattatttgtagaaatatttcagcattccgaatgattaatacggaattgaaaaaagaacaganaacaaaaatagaatgacaacaggaaatcacgacatctcttataatacaactgagaaacttcaaagttgacaatttcaaatttcaaaaaacacattgttcctccaatgctatntgagagaaaccacctttcctaatagctccagagatgtaanaattacaaaacactggcaatgaatacatagtattcatagaataattaatctctctagagtaaacaatgatgc

SEQ ID NO: 35307 - DNA, 277 bp, Glycine max
  unsure (1)..(277): unsure at all n locations
ggtgcaaaacgattctccacatccacaaatcacgtataacccaccatcccctgttgcccacctccaactgagctcacgtactcccacgtagcccttatcctcattcctctcaacgccgagtccccatcaatcctcccaagcttccacaacatccaagtaattccacatccaatcatcatggactaacaaaatcaagcaaaacagggaaaaggcagaanactctgcccaaaacacaactcanaatcacagcttttcacatacaaataccccagtaaca

SEQ ID NO: 35308 - DNA, 579 bp, Glycine max
  unsure (1)..(579): unsure at all n locations
ntgccttanccttgacctacttnttttgacncggaccntaagcaccgcggctgcagctgctananncanattttanatctttgnngttttcttancnngannnnngagagaaaanttatgcaatttctctgcatnaaagtttctttgctcggcctattaatttggattattgcgcaactagcataattagcgggaaatacagcggttgcaattcgtggaggtggagcaaaagccaagcttctgaaagattcgngagctaacanagtcatggactatcatactaaagattgtaaaagtgtatggtttgtaaatcctttgattctttntagagttccttcaaccataactgcttttattgaaacagttatgttaaaaaaatcattataacctagttaaccatttagatggttgacgtgtgctttgattcaaaatattctttcactgacagcngggctcgtcgtattaattctctctctttattgtgtaagaaattcaatattttatcatatacgatatcatatatgtttacggcgaacctacaatgccattcatgaaatacacattacatatgtattctgg

SEQ ID NO: 35309 - DNA, 208 bp, Glycine max
tatgcactccctccgacatactatactattctaattcctagatgcattagattattcttatcgatatatccgtactagacgattcttctctcaaacattaatgatacacaattaggtgaatacagacataagataaagggaatcttgaaatgatagtacaaccaattgacaaatctaatctgattaactaagtcaactattctgctta

SEQ ID NO: 35310 - DNA, 411 bp, Glycine max
  unsure (1)..(411): unsure at all n locations
agcttcaagtagaaactatctactactattgnntcttcttacaaccttanatcatgcaagacanagagntttcccttgtctcanaatatgggtgagtagtagtgactcactctgtacaccgtttgcgcttctcttcgcttatggaatctatggagagggagtgaaccttacacagctcatggaatccatgtggagattcacatgtgactttactgtanaaggccttctttctttatattctttaacaaaataatattaaaatctatctacaaatcaaatacacctaagattgctgtgcttcttacatatatattatgtatggaaacagaaatatacaaggaacaatattcttactatcccagacctactccctaaaaatgcaagagtctaccacatattaatacataacat

SEQ ID NO: 35311 - DNA, 258 bp, Glycine max
  unsure (1)..(258): unsure at all n locations
cttccttcccgcgatgcttcttttcatgtccgcctgagtgggcttatagcctaaaccatacttcccacgatttccttgggtatttatcaggctacgttatgccgccgtgttttttcctaaacccatcccgggttcataaccgttccccaacataactcgggccatcattaccgctgcatcggacagacaaggctgcccaaagagggagtccacggaggaaatgctgaccacctcanaagactggaaagcagtttctaa

SEQ ID NO: 35312 - DNA, 214 bp, Glycine max
atcttcagggactacaatgactacacataattgagtccagaaatcataatgtgagtaatgtgtgaagttcaagaactaaaatgacaacccatgattacgtttagaagacaaataaccagttaacttattgacacatgacaatcacgtagatgatatgtgacatacacgtgtatgacacatggcaactatcagtaaccatgtcatcactgaaaat

SEQ ID NO: 35313 - DNA, 278 bp, Glycine max
  unsure (1)..(278): unsure at all n locations
aagagctgaaagatatcaactcgaccacggctgaagcgttagagcgggacacaaatatgtcttgaaatgaagaatggagaatgaacaagctccgacgggctctatggngcaccactaatgagctcaagcttataaaggctgatagggacacatcaccgatggaaagtatggtgctacacgataagttaaaggcttgtcaatggtcgaatagaactctgacagaatagttgagcacaacagaagagaatatgttgataatcattgatcaatataacgag

SEQ ID NO: 35314 - DNA, 278 bp, Glycine max
  unsure (1)..(278): unsure at all n locations
ctgcagcttaatgttaacgtataagcctaatatattataatctaattttcactactgaatgaaattanacttagcacttcatacanaatattgaaacctccgtcattgggctaatctttgtggcaacttaaagttaaatntaaacaaaccattaaacttgttaaggactcaaatcagaaataattaactcatgtaatcgatattgaaataatantaatttcgtaactatctcaaacacacctaactctgtatttccatttcccaccaaaacgttcaat

SEQ ID NO: 35315 - DNA, 271 bp, Glycine max
  unsure (1)..(271): unsure at all n locations
cttcttgaggaagattcttgagcgcacccncaattgataagttcacccacctccagggttgcttactgattaagtttcctaagtgcacccncaattgattagttaaccaccaccttccagagtgttctagatgaagtttcctgagcgcacccctcangttngataagtgcacccctcggagttgcttactacttaagtttccttaacgcacccctaattgataagttcacccncttccaaggttgcttactgattaagttttctgagcaca

SEQ ID NO: 35316 - DNA, 391 bp, Glycine max
  unsure (1)..(391): unsure at all n locations
accaatctcaatctgcatacattatggaatttatagttttcaatgacagtactgtagagtgaacttgaagctgacacacaaatgcactgttactgccaaatggtttaaggaaatgtttgacttccaaaatgttcctttaaaggttatgtactngaggcgcaaggaaaggngaagccatattctcttcctatcataggagagaataagtccaaatcacatgagattctgtttttntggatgtgggtttcgccaagaatggacatgtaacttctgattctcactacatatcagatgaaatatgttattgtggaataacattcacaatacagtgaggaactagaaccaccaaatcaactcaagggtatttcatcaattcaaaattatacatata

SEQ ID NO: 35317 - DNA, 428 bp, Glycine max
  unsure (1)..(428): unsure at all n locations
cgtgagggatgcgcttagcaagtgttggtgtgcaagatgtggtgcttagcctgcataccctngctaagcccaatttaaaaacattntcatacagagaagactntntaggtctcgcgagacttactcgcttagcaagaatacaaaacaggaagtgcacgcttagcaagtaatctcgcactaagcccaattagcataaaaattctgacagagagatcattgggcttagcgcgtanganaaatgctatgtgcacgcttagcgcgcaacaacataattganacatagcctaattcaacaacaacaaccagcgtacctaataatggaattgaacttgatcaattatctanatgacatgtattaagctagcaagttcanaanatcgcggcacagggatcaagcaccagatcacanaaaatatcacacaaagtat

SEQ ID NO: 35318 - DNA, 394 bp, Glycine max
  unsure (1)..(394): unsure at all n locations
tgcctgcaaaatttatctaacctcattgtaatttaattntaattattcttgttaagttcaactaagttaaagccatggtttagttagtatgattgtttcttttttccctatttccaatgatactgaccctggatctttccttgatctagttccaaatcagatgttgtgtctgaaatttcaggatcgaagttctcttcgctaagtatcaccaggtgagtctttagtatcttagtctgggttaggcaacatctgtggaaatggcctgcatatgaagaatggccaccctatacattgcttatatttctcgtctaaggagttgggctaccagtgtgtgtgttatgatatgacagatgctccaagtacttctatttgttaggactattatatataatgt

SEQ ID NO: 35319 - DNA, 312 bp, Glycine max
  unsure (1)..(312): unsure at all n locations
gctcanaggtcaaaaacacttcatgataacaaagatgatgatctcaagaatcaaagaatgagttcaagatgttcaagattgaatcaagaacacttcaaggttcaagaggaaacttgatttcaagaatcaagattcaagattcaaggttcaagtttccaagaatcaagatcaagattcaagactcaagattcaagaatcaagagaagaattaatcaagataagtatgannaagtttttcanaaactgagtagcacatgtgattttctcanaacatgtttaccaaagagtntttactctctggtaatcgattac

SEQ ID NO: 35320 - DNA, 375 bp, Glycine max
  unsure (1)..(375): unsure at all n locations
gacagatgtaatttctttgttattattggatttgtggtgatgttggcaacatactgttgcttgcttgcttgtgattnttcataataaagatagactttcgtatgctttctctcggttttggaagacaaatgtgattttttcttgtttatagaagggtttgtggaattactctttaaagtttgaaatgaagtcttcttcgttcaaaagaacatttttgtgttacttcctatatatttattgcggtatctttgttgtttactggattaatttgttgcgttgctggaatcaactgtngcttaccaattattttgactggccttctcttgtntattttttatcatgataaaattagaaaaatgacctgagcaagagatt

SEQ ID NO: 35321 - DNA, 343 bp, Glycine max
  unsure (1)..(343): unsure at all n locations
gatctctgatgttaggataaatatctcctttcattggatganagtatgaaatgttgggtcttattcctctccatagttcataataagtctttctaatcaatggtgccatctatattatgttttgaacatagcaagctatgtttaccgcttctccctagaagtttttaggaagtgagttttcacaaagcatggtcctagccatttcttgcagagttntattnttcctttcaactacccgattttgttgaggtgttctcggtgaagagaagttaaggaagataccattcttttcatagaatgatntanactcaacattctcaaactcaatttcatgatcactcct

SEQ ID NO: 35322 - DNA, 335 bp, Glycine max
  unsure (1)..(335): unsure at all n locations
gcttattctgaaactggncaagntgtatctcctttgatagttccaattatnggaaagnagtaatcactaaccagttcttcatatcatgattgntcaaaattcacaaatcanacaaggagaaaggcataagcaagcagacctgctcaggattntcagggtcatggccaagagtaccagattctccataaccaaatgaatacgcatcaccgctatcagacactacanaagtagtgtaatctcctgcagcaacatgaactgctnntgacattttcagctcctccaccaccttangtactaatgcacattcttcattttcatgacccaagcagccatga

SEQ ID NO: 35323 - DNA, 310 bp, Glycine max
  unsure (1)..(310): unsure at all n locations
tcaatggcactgcctgaagaatcagagacaacttctatgtgattccagtactcgacgcattgatgattgggatcctcagcttcaatggcctgganaagtntttcagaattgattaaaacatcattagtcagaacataataagctacattaaactagttcaagacaactggctaaagataagatccgaattccaaactgtatgactataaatctatattaganaaagaataaaccaacaagggtgtgaatagcttacactttcatgagtntgcattacctgaataatggatggtgaaaggaatccaaacat

SEQ ID NO: 35324 - DNA, 377 bp, Glycine max
  unsure (1)..(377): unsure at all n locations
cttcatgataggtagaaatagaatgctagcgaaccagcttacaaacagaccaaattgtattgacaatgcgtaaccatgctctctgtcaactaaatttacaagagcaccagtgacaaagctctcaatgaatgatataactattacttactctgcaaagcaatactagacgtggaaattatggcttgaattgcaacattgtccagtgtaatgctcctacctttagactacacacatgaaaatagatgtctccatgaactatctcacaataataccatccctagagatagagaataacggaactcacgtatatatgtgcaagtttattgaacaatagccaatcgaaatggttaagaatacagggngatgaattatataca

SEQ ID NO: 35325 - DNA, 281 bp, Glycine max
  unsure (1)..(281): unsure at all n locations
aaaaacaactaacgcatgtgggatggcatgntgcttacaatctgcgataactgtagtaaaaacaatcttctttaaaagaccctttgaccttaaaattcgaagtggaacgtgctgcatcagtggatgcacactgattattatatctggctgatattacattaggccttgggcaacctcgctgtaaaaagagaaaagatattttaactatgacatgtgatgttacattggtattgagaagagatacgcatgcacaataaagtattctctgaaccatggaatgc

SEQ ID NO: 35326 - DNA, 373 bp, Glycine max
  unsure (1)..(373): unsure at all n locations
aattacttaaaggatgtttctgaatgtgaaccatatactaagtcatgcaatctatacagacacagattgagatgagtctaagaatatatgaaatatccaagaatggattcaccatattaganacacacctggatttctggatcagcaacaacatactgcttcaggagtctatcaccaaatgcacgtgaaacagcaagaactccaccaactctccaagttcctgtaaacatagtgtttagaatttccatagtgacaaacaagatgaatcttataataaatcaaataacanacagctaactagaagataaccttaccagcccacataacanagccacctgcatcttcaatccttcgcctctcatcagttngatct

SEQ ID NO: 35327 - DNA, 263 bp, Glycine max
  unsure (1)..(263): unsure at all n locations
aacgaaaacgatgaagaaactgtcacagaatcgatcacagaaacgtctcagaagcgctacggaagcgtcatggcttggattntttccttccttcttcttctcctcactaattataaagaaagttgtaaggctaatgcctagcggtaatttcttttgatgtaatatcaaattaattgttataaaaactctcttgactaaaaataatgtagcttgagttgctatatatatatatgtatatatatatatatatatatatatatata

SEQ ID NO: 35328 - DNA, 350 bp, Glycine max
  unsure (1)..(350): unsure at all n locations
ctaaataactaataactaaattgttcatgaatttcagaaattaaaacaaatttcttttaacatcctgctcatcctgtggctgatcttcatttaaatccaacactggagcagcaggtacattctgaagaatgggctgctctagctccattgctggtactgatggcatagtgtcctcagatataggtgcaagggatggctctggcatgggatctggtgaagatacctcctcctgagccatagatgtatctgcagcaattgaagagggctgatgtgtcattattttctcctatntcttaaccctccttgtcaccattgtaattactgattagccttaattgtcaaataattat

SEQ ID NO: 35329 - DNA, 274 bp, Glycine max
  unsure (1)..(274): unsure at all n locations
ccttatngctaatgattatgccatgttcatctaacttattcctaagtacccattttattcctatgatgggagagatttcaggtctcgttactagcgcccacacattggttctttcagactaatttaattcttcttgcatagcaactatccaatgatcatctattatggctccatctatgtttgtaggttcacccatagacaccaaattcatactatagcataagtctgtaagagaatggctaatcgttaccccttatgagatatcacaaataat

SEQ ID NO: 35330 - DNA, 298 bp, Glycine max
  unsure (1)..(298): unsure at all n locations
atgatgacaaaaagcccaagagaatgatntcaagattgagtcaagaacaattcccaagagaatgatttcaagattgagtcaagaacaattcaagaatcaagagaaagattcaagagaagtttcaagttttcaagaatcaagaaaagactcaatcaagataagtactaaaaagtttttcaaaacattgagtagcacatgaatntttcacanaaccttntaccanagagtttttactcttctggtaatcgatgccagtttattgtaatcgattccagtagcanagattgttttcaaaaag

SEQ ID NO: 35331 - DNA, 583 bp, Glycine max
  unsure (1)..(583): unsure at all n locations
cgggattgggccctgaaatgattccatcgcatacncgngatcctctgagtcgacctgcggcatgcaagcttgtangaatatggngtactcatcacatgtggttcnangtggcngnncggcgatggtngcacaacaagtttccacatncacaatgcgcgcatanacccaccatcccctggtgccacctncaacttgagctcacgtactccacgtagcccatatnctcgtttctctcaacaccgggtccccatcaaatcctctcaagcttccacaacatccaagcanaacaacnatcaaacagcataagctatcacagccaagcaaaagcagagcagaggcagaaaactctgctcanacaccaaccanaatcacagcttttctcacttaaagaccacagtaacaantccttcgatccaattcgtaaccggtggacgactcaanatttactggaagttatagtgctaagcctacatgtgaccgtngggactactgcaaagataagaactcatttgtctacttttcacagccacccacacagcatttttgacacagtaaatctgtggcctatttgacacaaaatgat

SEQ ID NO: 35332 - DNA, 354 bp, Glycine max
  unsure (1)..(354): unsure at all n locations
acattggcacatcagccacaatgcctattatgggaaaagagccctagaagcagcaaagaggagcagcttgtgcattgaagcctaggctntgtcatttgagagagattattgagtagagagtgagtgtgagatgctgagaagaggaggaggaatcccccttcttgtgtaagaaactatcattctttgtttttaatctcatttattgttagggtttctttgtaatggctggataaacaccctagttggggatttctaatgaatagtggatgtaaatacctaatatctaattgattgtgttntctgtgttcaatgcttccttcaatgctngatgttngcatgcttttggtctgatca

SEQ ID NO: 35333 - DNA, 574 bp, Glycine max
  unsure (1)..(574): unsure at all n locations
cctctttctggcctgttcctgtcncngaccctgagcaccgccgctgcagctagcctagggnagacttgatttatatgattatgacaccganganccaatangagcctatttggatgacggccacagtggcttctganatctgcactntatgcagaattgtgctgaggaaatgcgcacataatcttgcctaactgcataaaaatgcttatgtatgggtggctgcggaaagggtantgcacatggggttctggacattttatagtagtacccaccggccagacggtaggctnatgtactagagactccctatatatatatcgagtcgatccacgtgtaacgactcgcacagaagaagaggcttccgggatattgtctgtgagaagctgtgaatatggttgggtgtcaagcanagttatctgcccttgcccatgttatgcttggatatgctaggttgcgaagatgggatggtgaatntcctggatcttgggaacctngngagggatgatggagaccctgcgatgataggacgaggactanggctacgttggagacattagctcagttgacgcaaccc

SEQ ID NO: 35334 - DNA, 330 bp, Glycine max
  unsure (1)..(330): unsure at all n locations
tatgatgagtctaatgccattcttccaaggaaggatcttttagatgatatttcagattccttagaagatacacatattcatggaaatgactctaaagataaagatgaaagaagcaatgacgattctcaagataatgaagttagagcacataatgaacttccaagagaatggaaagcctcaagagatcatccnctcgacaacattattggtgatatatcaaaaggggtaacaactagacattctcttagagattatgcaatatatggctcttgtatctatgatngaacctataaatataaaagaagccatagtagatgataactggatcat

SEQ ID NO: 35335 - DNA, 422 bp, Glycine max
  unsure (1)..(422): unsure at all n locations
atgtctgactcgacctagcactgcgctgaagctgccgaatattgatgggngangtttattctgtttgtcctttgcggagagaggacagaggtgaanaggagctgaattctttggtgcagaccatggaaagcagacgttggatgattcgtaattctgaactgtgagaatgcagatacgaataacacaaatataattgatgagaatgaagggacgtggaacacggcaattgcttggtcatatgacggcttatgttatgattcttggccgtcaatatatagtgtcattcttacaacaagccacttgcctagtttaacgtgtctcccgctttgagaattgtttgtcctggtgctcgcggtatactaatcaaactttttttttgttgcaccctcccttctgccacaaatcttttttttcccaattct

SEQ ID NO: 35336 - DNA, 483 bp, Glycine max
  unsure (1)..(483): unsure at all n locations
atacttcaaggaaattaagttctgaagaatagtacttgtttctgccttatcactntntgccaagcgcttttcaatttcagcaaggaattctttgacactagttatatcatctgaaatagtacccctaaagacctcaagaatgccacgcttaatgatcataagactcatgccggttgagtgatccgtatgagaagggggtttctcaatccttaatgcaaagtctagatccatgcaaccaagaacaatttgcatgttctctttgccactccttacaattgtaccatcaagaaccgaaaccaaattcagaatatcagatatagaaacagcaactggaaagaaaaaaataatacaataagctcacagaacaatcatcaatggcattaaataatgggataatccatctcaagatatctactggcaccataatatctatcaagtctttggataatggtataantgctagtgaaatccttgtataatgtc

SEQ ID NO: 35337 - DNA, 299 bp, Glycine max
  unsure (1)..(299): unsure at all n locations
gatggcttcttcccattccaagcttcaattggagtcttatcttntacagacttagttggacattctgtgagtatgtaaacagcagtgtagactgcttcagcccagaatgtgttaggtagtcccttttccttgagcatcgatctagccatttccataactatgcgattctttctctcggantaatccatttgttgagaagaatatgcgactgtaagttatcgctcaatgccttcatcctcacaaaatctttcaaacttgcgagaggtgtactctttgtcgcgaacacttcttaagtactt

SEQ ID NO: 35338 - DNA, 465 bp, Glycine max
  unsure (1)..(465): unsure at all n locations
aagctcatgtcattcaaagagactatgtcgacctanatgaagactgatcttgcattgtttatctaattgtattcattatgcgaatataattgttgtaagccattaaaggataattattaagtactcattgcgttaagaaaaaaattagttagtgcaaccaaaatcaattacgcatgtacgatacattgttgtcataattgacaacacttaatgatatgcatgtgtattaaagtttgagcgtgacacaacattgactgacttgacaacacantttgatgcacgacattggtttagtaggaaacataaacacgtaacatgttcacgcgtgtctatttttntgtaaaanaaagtgaagcaatctatcgttgagaaccatgtatatatatgagacacganaaatgctaataaatcacacattgccatgctttcacatactctccaaattgatacacaaagtatgacatt

SEQ ID NO: 35339 - DNA, 408 bp, Glycine max
  unsure (1)..(408): unsure at all n locations
acacaacacatgagcaagaagaaaagatgaaaaagaaagaacaaaagaacacttgtagactctaggaagaagaatcanaataagccctcttttatctcaatatgtctcaagcaaaatgggaggaaatggccaagttttggcttttaaaaactattctaagataaggttgtggctttggaccaaaagaaaattgaatgtggagatcttatnctcttgttaagtgtaatttggaatgactaattgacatanaattgactagagatcagacaatttccaacataaccagccataccctnntagggtaagttntactttngaaatttagccagatatggctaaagtanggttaaaccaaaaaatggaaatttctattttntctaaaatggataaatcctatcctaatcccct

SEQ ID NO: 35340 - DNA, 465 bp, Glycine max
  unsure (1)..(465): unsure at all n locations
ctgtcgcaacgtgcccttttgcgggcgatttaatgttatgctcacgggtgtgctttccanaggaggaaaggtgcgcggagtcgtcaccaacgtttatttgtggaaaacatcgggaaaaccgaaggaaactggtcaaaatgaaaattctaagttcgagagttgtatttacgcttgaggaaggtattagcacctctcacgtttgtctcanaggacaacaacctattnttgctcctacgtaccctccatcgaagaggaaatcagacctancgtagttctttttatgcgtgaatcaagtgattctttntacttgaaaggtgatcattttaaggcgttggaccttaaaaatgatccattttacttggtaagaaactganatgataaactttcaaaaccctatttttgtggacgagcttgactangcgagtngatttagccttagtttcacttaattatagtcagttcaat

SEQ ID NO: 35341 - DNA, 407 bp, Glycine max
  unsure (1)..(407): unsure at all n locations
ctagcacctagctagtatcaggtaggaaaccttagagtgaaatcgttagaatcccttgaacctaagtgagagttatgaatcaggtatatcggagtaagaaagatcgtgtcgagggaagaaacctagatccgaagataggtaaatcatgtattctcgagagtcacgtgtggactaggatttgtagagtgttgaagtctcanaacttatacctcttttcttgaatcgtcccatgttaaaaaaaaagtcggccatgtggccaatcgtgttaccttgtgtatggttgttcatttcagattctcatcagtgtctcttatgatattacccaacttcaaaatagtatgtcattcgcattctattatcattgangatgcactcgtggaagaaaactcgacttatgaaatactatc

SEQ ID NO: 35342 - DNA, 310 bp, Glycine max
  unsure (1)..(310): unsure at all n locations
gctcgccaggtagtcgtggacctgaaggcccgactgaaggagtcagtgtccaggttgtatgattccgagttatgggcatccaaggagagggaggctaactaggagttcgaataggagttgctagtatacaagaaggaggttgtcgagtagcatgaaaaagggttgcacaaggctgttaggcaggccgggttcttcgtcaaggaccttgtcttggctctntntaaccctntctagcacgtgaatgatggtgttctacttatcaaggaagatataactgctgaggaggagacgagcaaggagtatgatgttg

SEQ ID NO: 35343 - DNA, 278 bp, Glycine max
actagaataatcgatatgtactcatagataaagagctgaattaattatgatcaagcaaggtctgagaatgagactatctctgtgaaataatgtcattcaagggtggagattaatttacaatagtaaattatcgagcaatcctaaatgtgtattgtgctacgttcatgataaatgaaaatacaaaatttagtctctgagaatgtccaaaatgcgataaatatatctgggccgttaacttccgcttgataccgataataacataatagtttacgtgacac

SEQ ID NO: 35344 - DNA, 280 bp, Glycine max
cactcacatccatagttcataaggagtctgtgtaatcattggtctcatcaatattctgtactgaatatagcaagttgcgtgtactgctttcgctcacaagtgtttacggagctttcacaaagcatggtcctagtcatttcttgtagagttctactttttctttgaactactccattatgtcgaggtgttctcactgaacagaagtcgtggaatataccattctttcacataatgattagactcaacattctcaaactcagttcacgaatacttctgatag

SEQ ID NO: 35345 - DNA, 258 bp, Glycine max
  unsure (1)..(258): unsure at all n locations
agagaagttgaactttgagttgtgtctcacaagactctcattcatcanagttacaaaaagtgttacacatgcttctatntatagactaggtatcttccttgagaagctttcttaagaaaacttccttgagaagcttctttgagaaaacttccttgagaagctagagcttagctacacacacccatctaaaaactaagctcacctccttgacaaaatacatgaaaatacaaaanaaagtccctactacaaagactactc

SEQ ID NO: 35346 - DNA, 569 bp, Glycine max
  unsure (1)..(569): unsure at all n locations
ntgaaatgatgancttcgaannctgctccntcaagncacctgaggcatgcaagctaaggctaanggggccancacntattatagtgtcanatgtttatgcnaacagaggnagcactnnaagaactactagtaaacattagagctgacataactatcacactataaatagtgaagagcgccaacgatcgcatgtgcagtcgtcacaatccggctcaagttatagatatcattagttaaaatagtaatatacatagctaacagcaccaataaaggaagtatgaaatatgtttataagacaagaatataaaatatatcagttcgggtttgcttatgagtataactcttacaaggaagtaacaaaaaaaatcgctgtagtaggatcatgaatataacctgattgttgcatgaaacatggggaggagttgagacgctcaccgacactgtggggcttcacanacgatgtctacaactatagtctagggaaacgacatccagctagctacatctggatgaaggaaatctttgcgagaaaaaaaattggtgatttgtttacaatataattggggggg

SEQ ID NO: 35347 - DNA, 410 bp, Glycine max
  unsure (1)..(410): unsure at all n locations
atacaattaanactttctcatagtcaagaatgttaaatgaatatttgataggcgattttttttttagtttcctaaaaantttagattgagaaatttagtttctcatgtttagtacctattttagaaaataacattcctatgaaagaaggttgtttgggaaaaaaaattagctagtctttggtaaaagcttttccatgagggagatgaaatctaattttttcgagttaaatatctttctaattgcaataaaaatatcatcaaccaaatagaatttagaaatcataactctaagaatttataattctgaggaattatgattctcggacaaaatanaactttttttcctcaccttctggtaaanagttacaaacctgagtaaaatcattcttatganacatactttcttgtga

SEQ ID NO: 35348 - DNA, 260 bp, Glycine max
  unsure (1)..(260): unsure at all n locations
cgctcggtccttgtaccaagtcttatgaatgacaagatagcatatagatgccgtcatgataccacgtgttctgacgtaccaggcgactctctcaggcgtagttgtactttgaactgtatcaaatatggatcagcacgctacaccacaaaagaaagttgatgtttctncattgatgatctatccacatcctaaagaacgggagactaattgatagtgtataagcggccttgcatacacctcccggacaatgtattggactg

SEQ ID NO: 35349 - DNA, 320 bp, Glycine max
  unsure (1)..(320): unsure at all n locations
gagacaaanatgtggtgacgcttgaatactattattattgtgatgcttctgttcaactgctttctaacattaatactagttgttggaaatttctagtttggtatacaaagttctactcttactacctatggttactttggatggagtggttgactataaatgtgtacgntagaagtccttagttgttaaaactatgaaatagtcaggaaaatgttcatggtgccgagaaattagtctaactctagaataaatgctaaacttatactttctcacactatnttatcaacgaatcttttactattagatggagctcacatact

SEQ ID NO: 35350 - DNA, 465 bp, Glycine max
  unsure (1)..(465): unsure at all n locations
atatgtcctctnccctcggcgggggattcttcttcttgcaattgctatatagttgtggcagggatattattgaccagccctccgaaaccttctaccgagatgtcttgggccacgtgggactcgttcagaacttttactagcacagcccgatgaggctcggagctcatgagtaactccaacagcgagaccctggccggggttntgttgagctgttcgataactctgaattcgctttgctgaattatatggaggaactcactagcttcctctagtgacacctcctttgtaccatcctttntctccggaagacctttcgtcggaatatctntattcgaagtgaggggtgcttcatcatcttgttcctccaccacttttgctntccncttgacgttcgcgggttggactggcaggtccgcgggtgcgaacacacgaccgctacggggtacaccactcagtcccgtgata

SEQ ID NO: 35351 - DNA, 263 bp, Glycine max
  unsure (1)..(263): unsure at all n locations
tcttcaagaagagagccttccncaacagctaatttcaatcattatgcattgtattaattcagtccaatctaatctattgtggaatggtcataaggttgcccctttcttacctcaatgtggctcgagacaaggagatcccatgtctccgtatatttctgtgacgtgtatggataagccatctcatataatcctttaagctcttcatgcaagtcaatggaagcctatgagagctggtcgaaatggaccattcatttcacacttaa

SEQ ID NO: 35352 - DNA, 99 bp, Glycine max
  unsure (1)..(99): unsure at all n locations
tattactagctcatttgaattctntagttcctgaatgtacaacctctcaaattgtgcttgttcccctctttgagaatgaggaggatcttcataggactt

SEQ ID NO: 35353 - DNA, 488 bp, Glycine max
  unsure (1)..(488): unsure at all n locations
tattccatatgtgcgagagaannaggacgcatcaacaagaatcaagccaaggctatggtgcaggccatcaagcgggcaacacaaaccatatgatgataaagatggatggctcagantctcacaaaggacacatcctaactatcaaatcgagcgtatcgagctgtcatgacttgttgagaagaatcaaggacttgaagtcaaaaaatgtcaagaactcttagaatcagaacaaggacccattacttgagcatatcctataattcaaagataaacatgcacagtcgtacgcgcacacatcatcgacccataatactatacatggacctcgcgacacgaacaccctctacacattacacgactaccaaattgacatgagcatctagacgagccgactcaagacacgtcccccgtacttaacacacagtgcctcgtgtcctcatttagatttaacattaacacacgagacccggagggtcttacacaacagg

SEQ ID NO: 35354 - DNA, 416 bp, Glycine max
  unsure (1)..(416): unsure at all n locations
ctcttagcctctctcttggcttgcctgttgtgtctctctttctcacagcctcanacgctntgcaaaatggcgaccaactcgttaggccaaagccttgtaagccatccacaaggaccacaactacgataaattcgtgttcaaatgattacacagcagcttctgtgtctcactcttactctcaccctttctcacacaaccaaagttgctcactcacccgaaattcaaccgagaaatttgagtattcacacagcanagatgatcaaatntggcattgtggagaggggactaatggctcggttcatagcatgttcaagccaattggagatggagttgctgtggccaattattccttcatgcaagggaatagtcagtataacgctactagttcagataaccaatcttntttcccttcagaa

SEQ ID NO: 35355 - DNA, 606 bp, Glycine max
  unsure (1)..(606): unsure at all n locations
agggcgtgtttttttttcttgagcancncanccnttgagacaccngcggcattaagctctcacaagactcncacanaaaccancaattgnctataacnaacaaaacnacccancagagcncccagaaccncagacccacgacaaccaaaggagaaagaaagccacccaaaccngaannnncgaaggcccactcgnagccacgcacttcacggcccnganaanngcccccnttcgcgaattggggcagaaatgatggccaaaggttgaagctttgcttgagcttcaatggagaatgaagaagaagaaaatggcaacgtgagggagagagagagctgtctgananagtgtggnggctgagtgaagagagagancagctttttggttttaaataaaagggttttctctttttctattattttattcaagctctgccacatgtccctatttgagtggagcanaagggcccactttctctttttactgtgacccacacttcagccacaaagtgagaaaaatctgaccttttgaacgctaanatcctgcctcngtttgcgtgccatttctcttggttcagtttctcgcgtttctctgcgtccgcgggggcgn

SEQ ID NO: 35356 - DNA, 422 bp, Glycine max
  unsure (1)..(422): unsure at all n locations
ntgagacttgaanacanngacttgtaccttcacacccttgagattggnattcgcagtgaaggttttatgtggatccgaactaatgtggctaatttgatcattccactatggcgacctggaaaacttgggctaattaacatggtgatgataatggagaaacccatgctgtgactgccattccttccgaccaatttttccccactccaacaatatttttactcatccaataacaaaccttttctttacccaccacccgagtatccacaaaagccctccttaaatctccacatagggtgtttctcgtctctctatgacaacaccaccttttccgaaacctaatactcaaccataaggaattttgctgccaaactcttctgggttaccccaatacagtgtcttgctgctctggccatatcattgcg

SEQ ID NO: 35357 - DNA, 396 bp, Glycine max
  unsure (1)..(396): unsure at all n locations
agctngacaaccggctcgttaagtatttaattctttaagaccctaataactattatctataccatgtttgtggcattatgaatgacaggatgtagttacatatagtgcttacagagtacactcgcatgtgagaaattttcaaaatgaaatagacttaagttgaaaggatagatgcaccagattaatacttccaacgagagatatgttgtgcaaagacattctcagacaattgaaaatatttattcgactatattagtataaatcatctctaatccatatatntgttaatattatgtcctctttattcgatttctcttgagagactctgtgctgcaataatttgaattcaatatgattctgtgtatcagatcattctcggatatgtacaatactcat

SEQ ID NO: 35358 - DNA, 431 bp, Glycine max
ccgttgagcccgtcattgtctcactcgagcatctaggagacactatctagtactgatgcttgagatagaacaacgggagcatataagatttattggtggtcataggaagttcacacagctgtcctatacgtggacgtcatgtgacgggacgcacatgctcgcacagctgatgctctcaaaacatgttgagggccatcaccttaccgtcgcatattcccacctgtgacgtataccatatagacgctcaagcttgaaaagacgaagcgttgaacggagaaacttggtgctatctttgtacaccactgagcgattcctggacatatctcgtctagacgctgagaccttgacgacggcaagtgtcgagatattggacaggacctatctttgcacatcgccgtccgatcccggcatatactgtttaaaaaacccgg

SEQ ID NO: 35359 - DNA, 373 bp, Glycine max
accatattactttacctgcccagcacgggcatattagtgaaattttgagccatatggacacgtcatgggacaataaggacgcgcgacatggacgctagatcacaaacccgttgactataaaggtaccatacactggtacaaaacaaagatagtgatgtaacgagttaaccaaagcgcagaacgagatacgctggagagcgaaaatgctattgaaatccagcaatttgccaggatattggtgaataggctgagcaagagagatctcagctataagggcgaagactaggccttgcccaagattggcgtgagtcgatataaaaatactaagcgcactctatcattgggcgtgacgtacctttgctgaggacaaatg

SEQ ID NO: 35360 - DNA, 133 bp, Glycine max
gtgccattcctggcttgaccaatctccacccaacccagccatatcttgtctgagacaacctgtgacgttcctcttcacgagacctcatgtctgcccacaggtcatccatacgactaccacaaagcctggatgc

SEQ ID NO: 35361 - DNA, 282 bp, Glycine max
tgaacctacaacagtcccagaattctgacaatctgccttctaaagctgcccaaaatcccaaaaatgtcagtgccatttcattgaggtccggaaaacagtgtcaaggaccttaatccgtagcaccttccttatctgcaaatgaacctgccaaacttcactctactccagaaaaaggtgatgactaaaatttacctaacaatttctgtgcaagtgaatcttctctcacaggtaatactgatttgcaaaagcagcacattccccctcttccattcccttcaagag

SEQ ID NO: 35362 - DNA, 540 bp, Glycine max
  unsure (1)..(540): unsure at all n locations
ctctctcgttgcgctccataatcctcatattcgacngnagcatcaattcgtattctcctnactctattactncacagagctgctgtaccgatctacagtagangnnggtgnnngnngcgcgttgaggccctggtactacctatgngacaccatagaaactcaagctttgagcctattcaaacgacatattctttgttctcggatgttctgatgagtcctgctatataacgagacgctcgatattgataattgaacctctgcggccattcaaacgacaataatctttttctcggatgtttgactgagactcgtattatattcagacgctcgatactgaatgttgaagctctgagccaatctaaatcgacaatacctgagtatctcgtatgaccgaatgattccactcatatatcgagacgctcgaaatcgatgttgaacctccgagccactccaacgaacataatctttgtctcgatagatgattgaggcccgtatatataccgactctcacattgaaggtggatactctcacaattcccc

SEQ ID NO: 35363 - DNA, 251 bp, Glycine max
aacagaataatctacaaatgccttttaattgtgtgttgaaaaagcataacaagactttctgtgattggtttaaaagatacaaacttgcagatgagaatgcttcataaacattaagaaagctagccgatgggcctaaaagatatgttatatactggcaaggatacaacataaacaagcattcattttacacaaacgcacaagatgaccaaagtacaatgcagaacaactgggtcaccctaagggttgaatct

SEQ ID NO: 35364 - DNA, 114 bp, Glycine max
  unsure (1)..(114): unsure at all n locations
tactactacaatcgattcttgttttagttgtgcttctcatcaaataatcaccgtactgttatttatttccgtctntatgtgattaattaatacataaaaacgcacgtggtaaaa

SEQ ID NO: 35365 - DNA, 378 bp, Glycine max
tgcacaccaagtattccatctatggttgttttaccgattcacatcctcagacaatggggaaaggtaactgttattgatgtcaaacacaacctcttggcataagcggttgaaaaggtctgcaacttcagcatcactaccaagccaatgctcaattatgccacgataatgaaggtaccccacatcctctggggagttaatcaagttgtccatgaagataacataggatgtaatgtcattgctgcaatcaagatgacactgctcaaaggcaatcaggttgaggaacaaagacttggtaccgtcgtggatcaagagccgtggtattcgcagtttgccatccttaaatttgatgtcccagaagcgatcggtcttttttttttt

SEQ ID NO: 35366 - DNA, 388 bp, Glycine max
gagatcatcaccgctgtttaggcgattaggaagaagcatagatactgtttcagaatttgctctgctttccttaaactttattatttgacatgatatagtcttgcttctattcggtacctagtttatggtttctttcaagcagtattattgatgagtgtgcagtcttttgagtaagctgcatatatttacctctctataagcatcttcttccctttttacttcgctacttaattgaggttttagtatacttgatgttgtctatgtgttttcagtttttgtcattaattggtttctgttacagatatcttcttagaagaagtgcattggagctctttctggtgaaccgttccaacttcttctttgactttggggtattaattccctaata

SEQ ID NO: 35367 - DNA, 500 bp, Glycine max
  unsure (1)..(500): unsure at all n locations
aaatgagaaaccaagttgggtgaaagtgaggcgcaaccattatattggacttgaagggggttatataggcacataagtgagaaaaactaattgatataagaaactagctagaagggaaattagaaaagtgatcgatatagctgtgaatttgtgtttgtatgtggccacatgagagagagagcaatgatgacattggagtcatcatgattacaaagggcagcaatagatgagaggaaggaagaaaagaaaagagggggtgggaatggtgaagaagaaaaacgcttcttctctttgtttaatttcttgggcctctttgatgcctagttagtctatcatgctcaaacttgngtagtgggtaacgtagagatgaggagtggaaacaaaactatagtaatacactactccacccaaccttttttttaatatattaaaggggataattaatcagaatatactntntaatggctggttaactatagatanatatataaatgaaagta

SEQ ID NO: 35368 - DNA, 404 bp, Glycine max
cgatggccagcagggagatcatcaccgctgtctaggcgattaggaagaagcaaagatactgtttcagaatttgctctgctttccttaaactttattatttgacatgatatagtcttgcttctatttggtacctagtttatggtttctttcaagcagtattattgatgagtgtgcagtcttttgagtaagctgcatatatttacctctctataagcatcttcttccctttttacttcgctacttaattgaggttttagtatacttgatgttgtctatgtgttttcagtttttgtcattaattggtttctgttacagatatcttcttagaagaagtgcattggagctctttctggtgaaccgttccaacttcttctttgactttggggtattaattccctaatatg

SEQ ID NO: 35369 - DNA, 322 bp, Glycine max
aattatgatctaggctttgttggggtatctgagcttgatggtacaacagacctcttaattcccaaaaaatgctctacctgaatcaattaaacaaaaaactttagcagacaaatgcaaagctattccacaaaagccactattctatagcttaaacacgtcctacattacctttcgatcaccaagttaaacattattaacattaaacattaaacatagatacttacttcttagcatgccaaaatcactctttgccataatcaaggtaaatatctatataataggttcttaatgcagccataagtcaactctcttacatcatcta

SEQ ID NO: 35370 - DNA, 455 bp, Glycine max
  unsure (1)..(455): unsure at all n locations
nttggagcctttagnanccnggngattgatngcctcgcagcactangagacactagagaatcctgaagctgagcattttgtaaaccattggtgaaatatttgttttacgtcacaaactctcaacttattggactcggtttggcatataaaaacggcttttaccaatgccaatatattcgaagaagcctattgaacctcaagagactaaatccagatgtacactaacccaccgtccttgcttcatgggtgggcaggggcacctaatatactgtgctgaccctgaatacgcaagtgagtcacaaagactcgtgggcacaactacctagtcagaactctacgtcaaagctttagttgacgctctggccaaactatgtgtcgggccgcccctcacatcggaagaagatattacggtgaaaaattatctcgaccaaatggtacgttttagacacattgta

SEQ ID NO: 35371 - DNA, 504 bp, Glycine max
gcaccccactcctcttagcgcttactgcatcgatgttattaaccctctaatctgtcgatcagagtgtactatagatggttggcctctgaacctcgttgcctctggaatctaaacctcagcgtgacgttggcatctagggtatctctttttggtgccgacgaatatgtcacgggttctgtggagactcaaggtttccacaggtctctattaccgtcttggagagcgctcctcctgtcgaatctaccactcatctgctacttatatgtcttctgaattttaattactctgttctttggacttttcaattggtgtctgaattcgagtttgttcacgcgacaattgtttcgaaaatctagcgtcggtccaatgttctgttttatcattttcttactaatgctccctaattgttccttactccttcgctgttgtacgcaactcgtctcttcctctgaacgccctggatgatcgaacctcgtgcgtgtttatatcgccttcgcacgctcc

SEQ ID NO: 35372 - DNA, 590 bp, Glycine max
  unsure (1)..(590): unsure at all n locations
ngcgtttgttngcttgacnncnganccnntgagacaccngcggcatgtgagctccgtgaagcgttctgtaacacccagnnnnaatagngtgtatcncccgcggnaaggannngacaagaaacagatgaaacacgagcatcacaccaagaacgcgagggcnagggagacaancaacacagaaaanggacaancacannannacaagnnnccttatccttcaccatgctatgccagatgtcagatgatcctcataagtcgactttatttatatatatcacaggaaatgagatatatacctgtatgatgcaaactatctaaagcaccattttggattctgcggaggtgattaatgaacatgagattaaagtatgtcttgcttcanagaaagtgctaccctttctagttaattataccggatctgctatgactagagagacttctgatgatgatgatagctcatttaatctactcanttatgaagtgggtttggccacctggatagctgtatgtgaacagtatgagatcactgaccttgtgtctttgactcagcagaactatactatggggaatgaggacaggcgtgcttgttt

SEQ ID NO: 35373 - DNA, 361 bp, Glycine max
ctaaaaccaagttcgatggtagtacgagccttttatcggtagtttttgggaggtgatgggggaaatcggcatcctcattcagataggcccccacacttgcaatgtggtttttcaagtgatggacataaatcccgcctacagctgccttttggggagaccttggattcacgcgctaggagtggtcccttcgacactcaaccaaaaattgaaattcgcggttggcggactcttattgatagtgtcaggtgaagaagatatgttggtgagctggccctcctccgcgccatatgttgaagtataggaagaatcattggaaacaacttttccatccttctaggtggtgagttgtcctcttgggaaa

SEQ ID NO: 35374 - DNA, 379 bp, Glycine max
  unsure (1)..(379): unsure at all n locations
tatattggacttgaaggggcttatataggcacatacgtgataaaaactacttgatataacaaactagctcgaagggaagattgaanagtgatcgatatacctgtgatattgtgtttgtatgtggccacatgagagagagagcaatgatgacattggagtcatcatgattacaaagggcagcaatagatgagaggaaggaagaaaagaaaagacgtggtgggaatggtgaagaagaacaacgcttcttctcttcggtacattctcggccgctntgattgcctagttagactatcatgctcaaacttgaggagtggtaactgatagatgaggagtggacacatactatattatacactactcacccaccttctgttatata

SEQ ID NO: 35375 - DNA, 311 bp, Glycine max
atgaaccgaattcggtcaatctgagaaacaggacctgctattaaaatgcgactatctttgacgaagcatatagaacctgaagaaacgaaatccaagactaaagtacaatcgggggcttcttctggaagtgtggagcgcaattgcagatcccttcactaaaactaccctcgcaagtgatcctgaggcacaatgtctcaggatgacagagccgaaacgggttcttgggaactctgattctagacatggcaaagctatgctgaattcaagtcatggagatgctgtggtcactaagaataatctttgtagtgatc

SEQ ID NO: 35376 - DNA, 549 bp, Glycine max
  unsure (1)..(549): unsure at all n locations
gccgcattgancccatgtagaccccgcgatcttgagttgtctcatgctgcacgctgnaaagccttctgatctgatatacgtttctgactctatggcatgagaagcaatgctatagatggacctnctgctagttggtatcaaagagtagcttanacacttgtgcttgagtgaaacagttgctgagagactgtggtttgagctactttcctttgatcctgtcttatgattaacttcatctaactgtactagtcacattntggtctcctctttgtctacctgcatattctgggaaaacatgtgataggtacacattgcttcatcttttacatcatgcaatcaataaatgttaatgcatacacctttgaacatatacactgcatggtttaccactagatgacgagtgagttgttctctattgctagatgacaagccaaactatatattgtgggagtcgatagtcatgaatacgactcactcttgtgcataaacttgtggtatcgtatcaacgttctcgattatagtccgtgtgtagtatatacgaacttctgg

SEQ ID NO: 35377 - DNA, 323 bp, Glycine max
  unsure (1)..(323): unsure at all n locations
ntggaaggcctaaacctttggtgatatatttcaccaagggcgcagcttcgcaaaaaccccgacacccttcggcagctaaacctgtccctttcccataccaaaatagccacacaatcccatggaagtacacaccttcgaacaaaaaggaagaagaagccaccgacatcagttcattgtcggccaaggtaaccaatatcacggggctgagcggtgtgacccacagcggtcgcgtgttcgtgccccccgacctaccaattcagcccacgaacgtcaagggtaaggcaaaggtaatggaagaacaagatgataaaacgcccctcact

SEQ ID NO: 35378 - DNA, 327 bp, Glycine max
ttgacgtattgaatttaggggttttttcttcaatggtgcagaggaatatgtgatgggttctgcggagagtcagggtttcataggtgtggatgagcgttctggagagtgcttctcctgttgaatctatcactcattttgaagttttttgttttttgaattttaattactctgttctttggattttcagattggtgtatgaaatttgagtttgttcatggaagaatcgttttgaatatcgattgtccgttgaatgtcttgtttttcatttattagcaatgctgctaatgtttcattatcctttgcttttgttgaatagttttcatttgt

SEQ ID NO: 35379 - DNA, 530 bp, Glycine max
  unsure (1)..(530): unsure at all n locations
ccgcattaaaccctgagactcgcgacccaagatgacctcgatgaacctcgcngaaggcttcacggcaatgatcaagagggntgaaacaggcacatcttttatcttgcttagatacaaaccggcaaataaagagggtgaggatgaatgacaaacccatgctatgactgccattcctatacagccaagnttaccacccacccaacaatgtcattactcagccaataacagaccttctgccttcccaccactcaattatccacaaaggccatgcctatatcaaccacaaagcctgtctaccacacaaccaatgctaaacaccacctttagtacgagccaaaacaccaaccaataatgaatttngtagcanaaagcctgtatgattcacctcagaattcagtgtcatatgctaaacttgctctcgtatctactcgataaatcaatggtagcccatacccctgctaggttccttaatctcatttttccaggatcgacttgatgcacatgtcatatatagagagcctgggcgtccn

SEQ ID NO: 35380 - DNA, 282 bp, Glycine max
tcagggaaggacttgatttttacctttattagacaatagcaatacaatactgacatggctcctgacagaacccacctgcacaatatgagcaagcgggagcatgagtcctttaaggaatacgcccaacagtggagagacttggccgcacaagtggcgccctccatggcggaaagagaaatgataactacgatagtggacgtgctgccagagttctactatgaaaagttggtgggtgacatgccctgaagcttcgcatatttagtatttgagggtgagaggatt

SEQ ID NO: 35381 - DNA, 319 bp, Glycine max
  unsure (1)..(319): unsure at all n locations
gcatgggcagttatgtctccgcatngatnggtaaatctgttcctcanattcctgnaaaatgcaaagaaccaggtacattcagcataccttgtattatatggaatagtaagtntgacaatgccatgctagatttangagcctctgntagtgttatgcctctgtcgaattttaattctctatctctaggtcccttgcagtcaactgatgtggtaattcatttagctaatagaagtgttgtctatcctgttggtttcatagaagatgtcttacgtagagttggtgaactgattctccctgttgtttttatatcttgaatatg

SEQ ID NO: 35382 - DNA, 282 bp, Glycine max
tcctcgtggcttctttgaacgatttctattgagcttctttgagaagctagatctttatctacccacacctctctattaataaaattaacctccttgaagataattacggataaaaaataacacaaagaatataatcgaacatcaaacataattactaataatatatagatatatatcagggtgttacacatgctacctaacttctcataagtcggggtagcataaatgtgtgtacggataacacttgggtgtatccacatgtcatcgaacttgatcatctct

SEQ ID NO: 35383 - DNA, 137 bp, Glycine max
tctgatttaggattatacgttcttctgcttgtacgctattgtattaggcctcaacgcaactttctgttgtctgcctgtaataacaatttcacgattgcttctacttctactttcattgacgtatctgactcattaac

SEQ ID NO: 35384 - DNA, 365 bp, Glycine max
  unsure (1)..(365): unsure at all n locations
agtttgatgactccaagatgatacaaanagccgaagagaatgagttcatgattgaatcaagaacacttcaagaatcaagagagaataagttcaagattgaatcaagaacgcttcaagaatcaagaggaaatttgatttcaagattcaagactcaagaacagactcaatctagataagtactaaaaagtttttcaaaacattgagtagcacatgaattttttacaaaaccttttaccaaagagttgttactctctagtaatcgattaccagtagcanagattgttttcaaaaagctttcaactgaatctacaacgttccgattgatttcaaaatggtgtaatcgattacaatgatttggtaatcga

SEQ ID NO: 35385 - DNA, 382 bp, Glycine max
ctccgaccgaacaccgtttggtttctatcctggcccaagtttatcgagggctgaagcactggttccgcttccctaactgcattggaggcggttgccgtggcattatcctctagagttttctggagttttagcatggcctccgtgatagaagccatttgatcttttaaggccgatagatcggccttcatctgctcttgcacgccctcttcattatccatttttctggattgagtgttataggggtgcctttgtgcattcttagttatggtgaactccctaaagaaacatacaacggtgagtatgccaccaaaacatgaatatgcaaatgaatgatcggagcacttggatccaccccaaggtttttttagataatgtgatgagt

SEQ ID NO: 35386 - DNA, 325 bp, Glycine max
  unsure (1)..(325): unsure at all n locations
atcttacacgatttccatttctcctgtgtgataagaaaatatattatatagtattccaattggcacttgttattttctacaaaagtaggtgagatctgctagtgctaatgatatattcactatgtatagaactatgttatttatgaattggccacaagctcttaccttacaactgtcaatgtaatgtggctcattggatatttatatgcactttcgtgccactgtcagtctgttatactagattaccttgccagcaagactatntgttcagatgatttggtagttgtctcaccagatgttggcggtgttgccagagcacgtgctt

SEQ ID NO: 35387 - DNA, 372 bp, Glycine max
  unsure (1)..(372): unsure at all n locations
aatgtccgattcggngacataactcatctagacgctctaaattgaacaacgcaagctctcgagaaattcgaatggtcataacttttcacacggatgtccgattcggggacataactcatctagacgctcgaaagtgaacaacggaagctctcgagaaattcgaatggtcataatatttcactcggatgtccgattcgaggacataatatatcgagatggtcaaaattgaacaacggaaactgtcgacatattcgaatggtcataacttttcacacagatgtctgattcggggacataactcatctagatgctcgaaattgaacaacggaagctctcgagaaattataatggtcataacttttcacaccgatg

SEQ ID NO: 35388 - DNA, 363 bp, Glycine max
tatacttgcctctagacgtattattttatttggataaaacctctaactcttatcataaactttgccggtaatctcagctctatcacatccattaagttcaaatagttttattgcacatttgaatatatgttagataatttaaactcatgtaaaaatgtttgtgaaccaccaagcgtgtgaactagagtagggttgttttattaatggttttgaatttgactacatgtcattgcattaaatatttgacagaaatttttattgttcaccatagttttatccgccttgaatataatttactctaatagaaaatatacctgtaggctaaaaaaataactaacatatctaaataattttagataaaca

SEQ ID NO: 35389 - DNA, 573 bp, Glycine max
  unsure (1)..(573): unsure at all n locations
atgancccgtgagacccgngatcctctgagtcgcctgccgcatttgagctcctttagacacgcgagcctcatgatgatgacgttcgtagngcccnncaaggaggtttgatgatgaccaaagatgtgtgacttgacgccgtagagaacgagttcttgattgtatctacaacacttcacgaatccagagagaataagttctcgattgagtccagagcgcttccagattcaagaggaaatttgattttagcatcttgagtctgaccagactcaatcttgagaagtactcacgagattttcataacattgtgtagcacatgaattntntacaaaaccttttaccgaagagtttttactctctagtaatcgattaccagtcgcaaagatcgttacgaaattctctcactgactccacacgttccgagtgattcaaaaagtggtattcattccactgattgggaaacgatacctgcgttgtgactaaagactcttttatttgtgagcccacgtcctcacaacccttaggagaaccacacgatgtgtgttctttccccagagtgttgaaacacaacgacg

SEQ ID NO: 35390 - DNA, 460 bp, Glycine max
  unsure (1)..(460): unsure at all n locations
tggcacgtgtnnnnttgagatcctcgagcttctangngcattgaagcattcgatatcctgcgtgacagtacctaatactcgagctcgggaatgtatattctgccgaaaccgactttatcgcgtcacttaaacactggaaccgcgaacgtaagcttcttggatggatattccgaggcatcctcctctatagcatattggattgctagcaatgacaaattgcaggcaggacactcacttttgggggacattggaaagggcatacttttatgggggacgacctcataaagaaacctatcactggatacattcttggagatgaaacatagaccgctgctgcatctgatgaattggctggataactggctctcttcatctgacgctatgacttcctgcttcacaagatcaatgggatctcgtgaatgcaccccggatttgatttactgagagtaacccttatgcc

SEQ ID NO: 35391 - DNA, 235 bp, Glycine max
  unsure (1)..(235): unsure at all n locations
aatgaatacattgaatttatctggcactgctatatgtgcattatcgtcatcaatgttatctctctccaagcttacatnattanggttaagtgactacacagtgattcanagacttagtcttcattcanaatttctgagagaacttaatctcaatggttggtcatctctaaaggaaatctcagtggaataagaggaaatgaataccattgaattatctggcaccactatatgcgca

SEQ ID NO: 35392 - DNA, 276 bp, Glycine max
gtaagttgtaatatttgatgaatctatactacctaaatgtcttactaagtttattatattcagattgagttgtgcttgatgttatcatgaggtcaaagaagttaaaaaattaaatatttttatattccaaactcagtgatctgtatcatgcaagttttgtagtttttgtgtcatattttggaaccttttccttttccattcatgaatagaacttggatatatctgatgtctttgttctacacaatgttgatgagcctaccgtgtgaagtttgaatg

SEQ ID NO: 35393 - DNA, 158 bp, Glycine max
  unsure (1)..(158): unsure at all n locations
tgctgttgaaaggcactaatacccggcttaaataattacgccacaccctgccactctcgcaagagtggaggcatgtattatctatcttgctgcactgaagcaccttcacacggctgtgatcaccttgagtcacanacgcctcaccacttgtatcatcg

SEQ ID NO: 35394 - DNA, 265 bp, Glycine max
  unsure (1)..(265): unsure at all n locations
gaatatatcgagacgctcgaaatngcataccgaagctctgagacgactcaaacgactataactatttactccgatgtctgatgtgagcccggaatatgtcgagacgctcgaaagtgaataccgaagctttgagcagtatcaaacgacactaacattttactcggatgtctgactgagtcccggaacatatcgagacgctcgaaatggattatcgaagctctgagcagcgttatacgaggataaccttttactctgatgtctgatt

SEQ ID NO: 35395 - DNA, 248 bp, Glycine max
ccttatgatatcaaacataaattgggataaggtcatatcgtaaccgatgctctctctccgcgtcatgcattactttctatgcttgaaacaaaatagactggtcttgattgtctgaaaaacatgtatgaaaatgatgaaacttttggagagatttttaataattgcgaagacaatttacaacatggtttctttagacatgagggcttccttttcacagaaaacaaattgtgtgcgcctaaatgttctac

SEQ ID NO: 35396 - DNA, 348 bp, Glycine max
  unsure (1)..(348): unsure at all n locations
ccctgaaatcaagaaacacatacacattctttttcctagttgatcactcacctaattctccatattctccccctttggttttgagtttaagcttcacttgaaattaagttatttagttatgtgagttcttgatttaatccctatcttctctcctattttctcttccccttttggatcaacaaaaagccaaagtgcgtaacaaatataatacatacataaatgattaatcatacacaagacatttattatagaaatccaaaccaatcatgaagcgagaacatgaataacccaaattcaaacataaaccgcatattcttataacatanatcatagatgttcagtcatact

SEQ ID NO: 35397 - DNA, 449 bp, Glycine max
  unsure (1)..(449): unsure at all n locations
tgacacgctnnnntttgaacccttgacttcanngactttgagacctcgagcacgtaagagacactatagaagcgcaagctacgtgtttcgatcaaagtatgcgaatatttattaccagtgactatttctgatcaatcaaaagatgccactcttctttccggctgtgactttgccgattggatgtacgcccccgtatttacacaactctcataaagtggccttttgacgagacacgagcagtatactaaggcccaggcttgataggcattccttatgagaacgctctgtctcactttactttgaacatataatcctaacaagcctcttaatctgatgcacgtctctacccattctcgttcataagcttgtttatttttctttccataaaagcctgcgccatgaaattttctcctatagtctgccttcggagaaacaactttcaatgaaga

SEQ ID NO: 35398 - DNA, 496 bp, Glycine max
  unsure (1)..(496): unsure at all n locations
tttccacccacacctgacctactttctctcctactnttctttnacnaactntaatgttgtgcgngctggagccgtggagacnnnncatgatgcatgatgactccttgaatccaagagcactataaaacttaacttgatcaatacggctgttataaaagttagacaatatcagcagacctgccatagctcttcatcccttattcccggcttcgaaaaagacagttcatatgtatactcttgactttttaattgcatgatgatttcttgcactactatccttcgtttaaggtaatactgttagagacactgtctgatacaaaatatgagtaccactttacttcttaatgacctgatattttccttctcagaagtgtctgtccttagaaatatatctatttgaaacactttggataccattcaaattatgagtttctctctgaaattaaaacattagttgatctccctcggaattaacttcccccttatatatcctatc

SEQ ID NO: 35399 - DNA, 369 bp, Glycine max
taacaaaaggcatgcgaagtgggtggaattcctagagcaattcccttatgttatcaaacataaaaagggaaaaggtaatattgtagctgatgctctttctcggcgtcatgcattactttctatgcttgaaacaaaattgattggtcttgaatgtttgaaaaacatgtatgaaaatgatgaaacttttggagaaatttttaaaaattgtgaaaaaattttagaaaatggtttctttagacatgaaggcttccttttcaaagaaaacaaattgtgtgtgcctaaatgttctactagaaatttgcttgtttgtgaagcatatgaaggaggtttaatggggcattttggggtccaaaagactctagaaacatt

SEQ ID NO: 35400 - DNA, 234 bp, Glycine max
atgaggaagtgcggaagggtgagacttccttcttttattgttgaccacagagtggtacctggagatatgtcgtgggggtcaggagaccttggggacgtcaggtggggtgctattgcccaaaaccaagcttgaccaatcccgacccaacccgggcatagtcagtcagtgagaacctgtgatgtacctaaacaggtgaactcctggcagtcaacagataaaagaaacgaagaccac

SEQ ID NO: 35401 - DNA, 353 bp, Glycine max
  unsure (1)..(353): unsure at all n locations
acanaactagtaacaatgctctgggtcatacacccacatcactacatgaaagagctgagagcantttggattntacaaaggaacgtcatttggaaattccgaccacgccaatgtgaccagggttcagtgttatgaaaataacatgcatttcatgagaggataacgtttacaaagtctctttctctaaggttnttcaaaggaagtataagacatgcaatgacggttccaaagtcagaaaagatgcaaagataagatggaactaacaagaaacaagcatagaaccatggttacctcgaaagaaaacgaaaggtcagattanggttttcgttctctacccaaaccgcaagccaagt

SEQ ID NO: 35402 - DNA, 346 bp, Glycine max
  unsure (1)..(346): unsure at all n locations
gctctcgagaaatacttatggtcataactnttcactcggattgccgattcaggtgcataacatatcgagacgctcaanattgaacaacagaagctctcgagaaattcaaatggtcataagttttcacatggatatccgattctgtgttataatatatcgagacggtcgaaattgaacaacgactcgagaaattcaaatggtcataacttttcactcggatgttcgattcaggcgcataacatatcgagacactcggaattgaacaatggaagctctcgagaaatacaaatggtcatagactttcactcggatggccgattaaggcgcatcacatatcgagacgctc

SEQ ID NO: 35403 - DNA, 284 bp, Glycine max
gttcctctccccatttgaaacctgcatttttcttgagcactcgattgggaggtgctgccaatgagctaacgttgttcacaaactttatatggaaactggctaagccatgaaaactcctcacctgggtcacagacttacgtgtaggccagtcttgaatagccctaaccttgatcttatgaacttgcactccttttgaactcacaccaaagccaagagacacaacatggttagtacataggatgcattggtcaagattggcatacaatggttcttttctaagcaca

SEQ ID NO: 35404 - DNA, 408 bp, Glycine max
  unsure (1)..(408): unsure at all n locations
tgagctcattcattcttgcacctgnganantagtgtgtgaatagatgaatctatgagtgatgtgatccttattaggggaggatcacttgatataggtcacggaatcggatgacgccacttccaaagatggaagataagtcaggggtagaccccataagggttcaaccttgataagtctggaattggtttgacaaggaatcaagagaaaagatctcacaaatacacaaggtattttctgaaaaaatgcccaaaagtcgtcttccttcaaatgagttgaatacatatagtgtagcattaaattactgaattaactggaattggtgcaactganaaggcatangattcaaccaccaattttattaattacaattacaaatagaaaatattggatatggaccttcaaaatag

SEQ ID NO: 35405 - DNA, 288 bp, Glycine max
  unsure (1)..(288): unsure at all n locations
cagagtggtacctggagatatgtcgcgtgggtcatgagaccttgtggacgtcaggtggtgtgctattgcccaaaaccaaacttgaccaatcccgacccaacccgggcatagtcggtcagtgagaacctgtgatgtacctatgcaggcgagctcctggcagtcaacagataaaaggaacaaagaccacatagcatggaggcttgtggtagttggccagctgtgaaactngactgatatgtgagatatggtctctggtaatcgattaccaagggtggggtaatcgataca

SEQ ID NO: 35406 - DNA, 383 bp, Glycine max
ctgatgcaacatttggagaggttaatgaatcttcgagatgatgcgctccatgagaggttggatcaaatggagaatagagatcataatgaagaagaaaggaggagaagagggaatgatggtgttcctagacaaaaccgaattgatggtattaaactcaacattcctccatttaaaggaaagaatgatccagaggcctacttggagtgggagatgaaaatagagcatgttttctcatgcaacaactatgaggaggaccagaaggtgaagcttgccgccacggagttttccgactatgctcttgtgtggtggaacaagctacaaaaggagagagcaagaaatgaagagccaatggttgatacatggacggagatgaaaaagatcat

SEQ ID NO: 35407 - DNA, 457 bp, Glycine max
  unsure (1)..(457): unsure at all n locations
tagtccatggacctctcttcaaccaaccttatcacaacaaggcttgtcttccattttgtaaccttcaccttttccaaatcaagaaattatcccttgaggttaataagtgtgacaacatataaaggaggacacttaaataacgagctcatttattggtcaagcanagatgcggncagttcattcagacatttaaaataaaacaatgtgtcctatgatagggtgacaaatgattggatggaaagcactttatttgaaagctacgacagcatgaagggggtgtcattataaaatgatggccaccaccacccttattgaacanaaggaagagttctcttcactagagatttttcatgaagaaaaagaacagacggagtcacctttttganaattcattattgtgccaaatctctcttgtgaactctccgtgaaatttgagtggagggacccgtgcccaagg

SEQ ID NO: 35408 - DNA, 336 bp, Glycine max
atcttaagacactcagctgcacttctacgcatgttagatagtgagtccttccatgttagctagttgtgtcacttagcttgaagagtgaacactgtttggaagacctttgtggacttgtggagatctcatggttgactttgatggattttaaatggtgagtggcttttctctgagcatcggtactattgacaagtgttctgtgatgtctacctggtcatgcttggtagctatctggaatcatagcctgacttttgtagcttggtataatttaccaagatcttatgtgactttcttctttatcattgcaatagaagagcttatgattacattgtaatc

SEQ ID NO: 35409 - DNA, 264 bp, Glycine max
ttaatgcacttgtgaatagaaactgagtcttgcattctcttggctaatatctagggcttgaatcaagtagctatgtatcatacattttaagcaagagaactaccgcatgcagctatccagatgacattgagacttgtggtaatggttcgtacactattatcttggccctctctaatccttgtaagtacaattcaaagtcagctgaagaatgaatgtcctcctctgttccactgtgtgagtctgcatcattccccattgttgctg

SEQ ID NO: 35410 - DNA, 256 bp, Glycine max
tcttttatagacctgtatcgatcgtcttttttggccgactccgactgtcattcttgtccatcaagatccgtgaataatattctttctgccgaggtgggctaatgcttttctggccgaataaatccgatcatgccagtttcgggcgaaacgaaacatatgttgagcttgagctaaaaaacctaaccgacctacattgtaagttttctatgcgacacccaaccatgaaaacttgccctggcgaaaaaaaacattattg

SEQ ID NO: 35411 - DNA, 136 bp, Glycine max
ctattattttatttaagcaatgccacatgtctctatttgagtggagccaaaaggcccactttcccttttgattgtgacccatactcagccacaaaagtgagaaaaacctgacctttgaaacgctaaaatccttcct

SEQ ID NO: 35412 - DNA, 371 bp, Glycine max
  unsure (1)..(371): unsure at all n locations
tcatccataaatcatactggagggcctattttcttgaggttattttcgaggaatgagattcattttcattcaaaaggcataaacagaaaaaccaacaagttacaatttcaagaatcaagggagataaacataacanttttaagatgaaattattggaggaaggtaattggaatttacaagttaatgctaaccttatttgtgatgagatgtcttaaaagattaggaaggtttctagagcagtctttggagctttgggctaagatataagaaatcttggtggttgaatgaaagtattcnggacaaggtaagaaacaaaaaatgctaaaaaatggtcaaggcatgaaatgcgagaaatgagatgagttattaat

SEQ ID NO: 35413 - DNA, 553 bp, Glycine max
  unsure (1)..(553): unsure at all n locations
ttaaggccccttgannnnncccnnnnannnnnnnattgaaaccgatcgtagacccgcgatccttagagtcacctgcacgcatgcaagcttaatanatctatatatggggttaaacaagctttccgtcagtggtaccttaagtttcatgggataatttcttcattttgtntttgatgaaaaccccatggatcaatgcatataccacaaggttagtgggagtaaaatatgctttcttggtntatatgtagatgaatatttacttgcagccaacgatcggggtttgctacatgaggtgaaacaatttctctctaagaattttgacatgaaggatatgggtgatgcatcttaagtcattcgcattaagattcatagagatagatctcgaggtattntaggtctatcacaggaaacctatattaacanaattctatagagattcggatgaaaagatgtcaccaagtgttgctccattgtgaaggtgataggttaattngaacaatgtcaanaatgactttggaggggacaatgaaacattctatgcttcagtgtgaag

SEQ ID NO: 35414 - DNA, 365 bp, Glycine max
  unsure (1)..(365): unsure at all n locations
nttgtgtgaaaggatgtgtctcttcacatttgaatttgaatttcaatgttcaaaggtactggtaatcggttaccaaaacattgtaatcgattacagctttttgaaaataattggaacattataaattcaatttgaaaactttttcaaaataattttgctactggtaatcgattacaataatctggtaatcaattaccagagagtaaaaactctttggtaaaaggttttgtgaaaaatccatgtgctactcagtttttgaaaaanacctttcatacttatcttgattaagctttctcttgattcttgaatattgagtcttgaatcttgattattcttgattcttgattcttgaacacttgaaactt

SEQ ID NO: 35415 - DNA, 448 bp, Glycine max
  unsure (1)..(448): unsure at all n locations
tgagctctgatctaccaccaccacaaccaccatcatttttattttctattattttaatattattagtactttgatttctagccgtgtatttggctatattattatgacatttgaacaatttagtatttcttttatttgcatggtatgactgaacaattatgaattatgttatatgactatgtggttntttatatatttgatctattcatgtttcttgcttcatgattggtgtatactctntaatgaatgccttgtgtatgattagtagtgtatgtatgtntttcacttgttacgcaccttggctttttgttgatgccaaagggggagagaaatanggattaaatcaagaactcacataagtaattaacttaatttcaaagtgaagcttacactcacaaacaaagggggagaatatggaaaatatggaaaaataagtgagtgatcgact

SEQ ID NO: 35416 - DNA, 314 bp, Glycine max
gaatcctcaagcttcatgatgatgatgaatgcaaaaagattcttgttgctctgttgataaccaagacgatgacctagagcgctggagaatgatctctagattgagtcatgaacaactcccatgagaatgattttaagattgagtcaagaacaattcaagaatcttgagaaatttgatttctagattcaagaatcgagtttcaagattcaagactcaagattcaagaatcaagataagaactaataagtttttcaaaacattgagtagcacatgaagttttcacacaagtctttaccaaagagttgttactctct

SEQ ID NO: 35417 - DNA, 561 bp, Glycine max
  unsure (1)..(561): unsure at all n locations
tctccaccccttactcaccgctctcaagacccccccccacncagcagagctgatcatgagcncggaccttaancgaccgagcagtgaaccatgtagacccggaccttaagcacttctgctcagcctctcaggaaggaagacgccgtattgacattatgaaacaatgctgtgtaggggcaaggctctcccagtgacactatagtattccattccctttacgcatacacctagccatatacaacanggatctgtatctcctgtttgccaagccattatgttgaggagtatacggagctatacctgatgtcaaattcttgaggtcacaaaatctctgaactccataaacaataccacgccctccatcattctaggatcattaactaagtgacaggcctgtaactgattgaaaattgacaaaagagaacactgccctttccttcaacaatgatcaaatctttggtaatcatctcaacgccgaatcctataccctacggatgagacaagggtcaacgactctaaggctacctacacgttgtacgtcttggggcctggcctgaagcg

SEQ ID NO: 35418 - DNA, 511 bp, Glycine max
  unsure (1)..(511): unsure at all n locations
ccgccggccacctcactgnttatnacctcgtctacttactatttcctcgataacacagctaagcgactacancacnagngctctnnnnnnnnncgattgagccctcgagaacgacgngacancannaaaacccaagcntnacgatgatgatgaaacaagatcgatgctttgttgtttgatgataacacagatgatgactaaacgctcaagagaatagattcaatattgacctcccaacacttccccttagacatacttcacaatgactcaccaccgtcccccaattccaacataaatttgctctccatattctcgaatctctcctcaacattctatactcctgatgctacactcaagataggaactaacacgctcgtcaaaacattgacacccacatgaacctctcactaaacggtttacacaatagatttactctttggagatcattaccaatgactgtaaacgaataccaggactaagtcggttggaaagaccgcaacgagaatgacgg

SEQ ID NO: 35419 - DNA, 188 bp, Glycine max
  unsure (1)..(188): unsure at all n locations
cctcttcaccgagtgtatatttgagtnggaggatatataattattngtttagtgataggaagaaactaataataagtagtagccaataatccctctgccaataataataataataataagtagccaataacattaaaaaaattacaaaaaacagtagtcaacaggaagatatgcacagactacaaaca

SEQ ID NO: 35420 - DNA, 200 bp, Glycine max
gctaaattttagtttagtgaagggtcaatttttttaagttatgagccatgtatggcgttttaaaaatgataaatagaacatgctgaataactatgcaaatgccggtggtgcatctagcatgaatgcgctatgaactatgactgcccaatagagggaaaggacttgttacgtacctccttataaataccagatatttacat

SEQ ID NO: 35421 - DNA, 335 bp, Glycine max
tctcaatgaagctacctagtctataaatatattcatgtgtaacacttgttgtaactttgatgaatgagagtcttgtgagacatacttcaaagttccacttctatccctcttttattccttcaatttcgtgctcccccctctctctttctctccctctttcttttcctccattgaagcatccttccaagcttcttatccaaggctcatcttggtggtgaagctccttcttccatggcttattccctagtggatggcacctcctctcacctcttctcatttgtcttccgctgcatctccatggtggaatatcaccattaaaggacctcattgaagct

SEQ ID NO: 35422 - DNA, 666 bp, Glycine max
  unsure (1)..(666): unsure at all n locations
tcgttaccgccagtgcncgctactcgactactctgtacangcganactgtacannnacnnannnnncnnnacatggcagagcgttgaatccattgagacnccnagatcctntanagnagaactgcacgcatgtgagctccattggantgcccacatatgagaacagtatatcttgaattggcntgtaatcagcatatatagacgcatatatctgtaatctagtcacaacataagcgtgtgtggagacatatacccacacaaacatgggaatcactacgtgaaagctcatgaatgcatatacctaccacgtactgtatgctatatttgaatagccaatacatagaagggtaacaagaagatatacatcccatcttaactctgatatcatgcanaaaaaccaacatttcaattatatgttatgctaccacacaactaataaataagaaaaataaaatgtaaaaaagagctactgttaagttctacacacagtataacagagagagaaataatgcacgctatctgtcaacgatatgtatacaatctttatcgagcaattaaacacgaccctactgaatccccctaccagagacgattgtggacaattggctgaccacatattcagtataaaaaagacgtgtgagatcttgtggcgccccatgcattgtg

SEQ ID NO: 35423 - DNA, 345 bp, Glycine max
tcatgatgatgatgaatcaatattgattatgttgttttgatgataacaaagatgatgacttaaagcccaagagaatgatttcaagattgagtcaagaacaattcccaagagaatgatttcaagattgagtcaagaacaattcaagaatcaagagaaatttgatttcaagattcaagaatcaagtttcaagattcaagactcaagattcaagaatcaagataagaactaaaaagtttttcaaaacattgagtagcacatgaagttttcacaaaagtttttaccaaagagtttttactctctggtaatcgattaccagcttactgtaatcgataaccagtacaaagt

SEQ ID NO: 35424 - DNA, 356 bp, Glycine max
  unsure (1)..(356): unsure at all n locations
atcctcagagtcacctgcggcattaagctctatgaaagctcgccgctggagctgacccatctatngccctaactctcttagactggtgatccctangctcttgaccttgactggatagaacctctttttaagtgaaggctnttgacttgatcccatgttttaccaaagtgaaacaaaacccaatgcgaattacaactccgacatctattatgggtgaaatggatgattgcctgaagaaatgcgtgtgatacatatgtaagttatgaatacggcggtccgggaaagtgtctccttcttagatacaacgtcttggggtcgcagagtgcccaacgtatgtatttaagaaggtgacatgg

SEQ ID NO: 35425 - DNA, 527 bp, Glycine max
  unsure (1)..(527): unsure at all n locations
cccaggaagggagcantccaaaaagagtgggttgtgatttgtgtgcnnctgctcggctcccctccagaaaagagaagagggagagagatagaggccctcntntncccnntcnncnccctcnnnntcncttnnnntcctcntnctttcctnntttncncttccttgctcgaggtttccttctgggtcctgatcgacaaaccctcgattattctgtctttaatgactgtggaagcctcgcggaaatacggtatatattcactaaagaagggacagaacaccatgttggtgattagtcgatcttacatagccaatgtgtcccaccagcccaacgtcgcccctgcttatccaatatcaacccttctcattatcccccttcccttctaccaagaacacccaatccttaataaccgccacccctcacttagccacagaacccgcttggtgcacctctgatactatacaccacccttggcatgagccacaacactttccacggaatggaattccccacccagaagccctggggc

SEQ ID NO: 35426 - DNA, 316 bp, Glycine max
  unsure (1)..(316): unsure at all n locations
tcacatcttttgatagcatgcattgtgtaagcgattacatgattatggttatcgattaccagngacaatgtatgaatataatgtcaagagatgtagctcttgacagtgatctnctcaaggttataactcttccaatggttttcttgaccagacatgatgaatgtctataaaagccatgaccttcgtacttgcatgcaataaatcttcgttgaacaacttnttgagagacctttacatctgtactacctttccaattctttcctactcatctttcttattcttcctcttcttccttttacaaaaatctttctaagtt

SEQ ID NO: 35427 - DNA, 365 bp, Glycine max
tggagaggatgcttcaatggaggaaaagattgagggagagatagagagaggggggagcacgaaattgaaaacagaaaatggcagagaagtcgaactttgagttgtgtctcacaagactctcattcatcaaagttacaacaagtgttacacatgcttctatttatagactaggtagcttccttgagaagctttcttgagaaaacttccttgagaaacttctttgaaaaaacttccttgagaagctaaagcttagctatacatacccctctcataactaagctcacctccttgagaagctttcttatgaagattcctaaagaagctagagcttagctacacatacctctctaatagctaaactcacc

SEQ ID NO: 35428 - DNA, 274 bp, Glycine max
aatcacgtccttgtaaaactgtgttgagtgaccgtggtagattggtcaaaggtctacaacgatgtcacatttaaagacgggcgcgcatcgccgttgaacgccgacaaagatcgacgtaaaacgggttttttctagcagcggttccaactgaatcatgcctctaaattaaaaacaaacgtgtatcgcgattaaagaaggtgagtgtttaataaaaatcgtggtatatatatatatatgtatgtatgtacatacacatatatatatatatatatat

SEQ ID NO: 35429 - DNA, 194 bp, Glycine max
  unsure (1)..(194): unsure at all n locations
tcactagttcatcaaacatcacataaagattcantcatcatacaccatcatcataacaagtcaatcaatcattatcatcatcatcatgattcaaccatcaaacatcatcatcatcagtttatcagaggtagacttgactaaatggagattttcatcacatgagcgattaacccgagtgcattattaacatagtc

SEQ ID NO: 35430 - DNA, 313 bp, Glycine max
  unsure (1)..(313): unsure at all n locations
ntgccgatttagtttttctcggcaaaaggttcgtagtgggtctgaaaagaagaaaatttgattattctgctttaatgaatgggaagcctggggaaaatggagagaataagaaggagggaggaacccatgttgtgatagtcgttctcacatagccaaatttcccaccagctcaacaatgtcaatacttagccaatatcaacccttctcattatccaccatcctatcaaccaagaacacccaatcatcaataaaggccacccctaaattagccacagaacccgcttgctgcacatctgatactagacaccaccct

SEQ ID NO: 35431 - DNA, 482 bp, Glycine max
  unsure (1)..(482): unsure at all n locations
tgagctcggtatcaaagcgctnntttcagcatttgctctccacccttctcggggttcttagcagggttnttttaccagtaccttctctctccaatattggcttgatatacattactttaagaattaatttctaaattacaccatcttctatagcaaagtcgggttctgacatcccaacttgatttttttttatcattctacacattcttctctcatgtgtttcttanaatacactactttataaattaattctcaaactagatcactttcaacaaattcacgagaatcgggttcggacttcccttttttatttataaaaaactctatatattattaaaattaaatattatattatataaacataattttaattaatntaaaatttagttatctattaaagtgaattatggaacattattttactaattaattctggtattaagtaaataatattattaaatttaagtatttttgtatattat

SEQ ID NO: 35432 - DNA, 399 bp, Glycine max
tcaactacggccatgacgtcagccccgtctttgaatcacgtccttctaaaacggtgtttagtgaccgtcgtagattggtcaaaggtctacaacgatgtcgcatttaaagacgggcgtgcatcgtcgttgaacgccgacaaggatcgacgtaaaacggcttttttctagcagtggtcccaactgaatcatgcctctaaattaaaaacaaatgtgtattgttattaaaaaatataaatgtttaataaaaatagtttatatatatatatatatatatatatatatatatatatatatatatatatatatatatatagtttataaactagttgattttaatttcaattctaattttagcaccatatatttcaatctatatatgttaatattaaaaattaaaag

SEQ ID NO: 35433 - DNA, 445 bp, Glycine max
  unsure (1)..(445): unsure at all n locations
gtgtntagtctgaattggggttgagtacttaccctnttctgctctcctaacctcgtatggtatttctcacagactaatttgtccccacactcatcatcaaaatggtgtggttgaaagaaaacacagacatatagttgatctgggccttaccttgntacatcatgcatctttacccttatagttntgggactatgctgttactactgttttctatctaattaatagacttcctaccacttccctcaactntgctattccctttgtcactcttttcaacaaggatcctgatttccaattccttaaaacttttggctgtgccttttttttcttttgttagaccttatcatactcanaaacttaattnntcgtctcaagagtgtctgttnggngtactcctcatctcataaaggtttcaaatgtttgtcttcaactggcagaatttata

SEQ ID NO: 35434 - DNA, 118 bp, Glycine max
acctaatataaatgccaacaagagtaagtcccactaccataacaagctaaagacataactatgagcaccaaagcgtatattcaaaggatttctgattattcgacttggacaagcacct

SEQ ID NO: 35435 - DNA, 326 bp, Glycine max
  unsure (1)..(326): unsure at all n locations
agctctggagaaccacgccaatcagaatgctagactatatatagatgggaatagaggtaacaatggcggtaatgactgaccgaggcagaaccgggttgagggagtaaagctcaatgttcctcccttcaaaggtagaagtgatccagatgcctacctgcaatgactacactgatgcgcagaaagtcaagctagcagcagctgaattctccgactatgccctttgttggtggcataaataccaaagagaaatgttgagagaggaacagtgagaggtagatacatggactgagatganaagggtgatgagaaaaaggtatgtgcccact

SEQ ID NO: 35436 - DNA, 438 bp, Glycine max
  unsure (1)..(438): unsure at all n locations
gacccatgtattctgcaacatttccactaccattgngtcctagggaagtagtggaaagtatttctacaagagattgttgcaatgcttccatgccttgatttanagcatcctcagcctgctgggaagactgttgtagattacaaattcccatcaactgctgatcttgtaatggctcaaggtggttcttgatgatctgaaacccanaatacaagaaacgagtcaaaaacaaacaaattatgtacacaagtgaagttaattactatcattntagaatgtggattngacctaactcgaccccaaaaattagattataaggtgagagttacacctcacttatatgctctgtcttgatcttatctcttctcaatataggacttggatttctttcaatatacctcttcacacttagcaccctttggatttgatgcgtgaataaca

SEQ ID NO: 35437 - DNA, 219 bp, Glycine max
tcagcttgagccattcaacgacatacttttttcggatgtctgattgagtcccgcaatataaccagacgctccaaattgactgtcgaatctctgacctaattcagactacgataactttgttgttggatgtctgattgagcccgctaacctatcgacaccctccaaattgaatgttgaatctctgagccaattcaaacgacaataacattttacttacat

SEQ ID NO: 35438 - DNA, 412 bp, Glycine max
  unsure (1)..(412): unsure at all n locations
ttgtgtgcaagctgtcctcaccaccacatttctgagcaactccttcttcaatatttctatgagggacttagcaacatggagaggagtatgattgatgctgccagtggtggagctcttggtgatatgacccttggtgaggctaggaatttgattgagaagatgacttccaactcctaacaattcagtgcaataaatgatgctattgttcttagaggagtccgtgaggtggccacagattcatcttcatctactgaaaataaaaagcttgaaggaaaactngatgccttggtcaacctagtaactcagtttgcatgaatcaganatctacacctgttgcaagagtctgtgatctatgttcttctgcagatcaccatacaaatctttatccttctttgcagcaatctggagtcaa

SEQ ID NO: 35439 - DNA, 357 bp, Glycine max
aaccataaccggtgcgagtgtgatcctatactgtgagtgaacgactagctttaagtaatagtctttgcgtcaatctctaaattttagaatgaaatgtatgaatgaggacatgatgaaggccatgattgtgtatatacaagccaattatccaaaaagcttaccttgaatgataattgtatcatttgcaccctttgtgagcaaaattacattttcaaaattgaaccttgaactcgaatgaatatctcctgataccatgtttagattctaggagagcagatagttcaaggaaaattaccccaaatttatgggaattgattgggatgtaaagtaaaaggtaaagcatcagcacacacaaca

SEQ ID NO: 35440 - DNA, 239 bp, Glycine max
gatcgaacttgaaggaacaaagggctgcacccacatcttatttaaagactgacgttctgggtcgaaccactccaactacgttcctaatataactgctttcttgaggcagtgggactaccttaacaatgtctctacattactatcagctccgaagcgtatttacaaaggattgcagattatttgacatggcctatcaacatgtatagccgtatgaatagctaatcatctgcctatataag

SEQ ID NO: 35441 - DNA, 574 bp, Glycine max
  unsure (1)..(574): unsure at all n locations
atgantcatttgacncgngatcctctnagncaccngcngcngtgancccattgcgacgcgngatccttaagtcaccttctgcatgcaacttggggtggagancatgacnaanaccttttcatgngctgcgaacaaggctgttatggagaattgcactanacaattactacgccatggctcaagctcctgggtggaggacgcatgagcgaacacgcaactcatggggctccgaaatatgatcgagaatggagaattgcactaagcacatatacggcgcatggctctcacacttattgggtggaggacgcatgaacgaanacgccatacatggtgctctcaacaagggttgaggatggagaattccactaagcaatcactacgcatggctctaatctcctgtgtggagaacgcatgaacaacaatgcatatcatggtgctccgaanaagggtaaaggatggagaattgactaagcatcactcccatggctcaactcgtggggaaggaccatgaacaaacaccattctggngctccaatagggtgaggatgggagttcactaagcatcatatgcttn

SEQ ID NO: 35442 - DNA, 370 bp, Glycine max
tttcggcctgatgagggatcgattgtttagtattttatgctacaacataaaacacaagagcacgattgattagagatatatatttctttgcatcagcttgtttgttagaaaaacccaacatttctacctactgttgtcattttatttacctttcattttatagttttagcataaaagtttagtttaaattctgtttgaaattatcactcatacatgttctctcaacaatgcttcgattctgaacttaatttaggctaacattagttccctgtgttcgatactcggattcatccggtttaaattttaaatacttgatgatccggtgcactttcccggtaacccccatttgaattttcctgagacataaatg

SEQ ID NO: 35443 - DNA, 537 bp, Glycine max
  unsure (1)..(537): unsure at all n locations
gttggcnccatttgagacncgngatcctctgagtgacctcatgcatgcaccttctggtggacatctngactagctatcaatctgacattcaccacacactctgccttcttctattgtataattgggaatgctctaacagcaccttnggccatgaatgatcttcttgcctattaagagcagacgtccaaatgttggaggcgctaatgggactacgtgtgtcttggaggatagacatgcggaggagcaactggcttcttgaggctgccataggtagcacgtggcctttgatctgctgcccttcattagaactgcactcttctcatttgtcaccaggcattctgactttgtgaaggttacattgaatccttcatcacaccagtgactgatgctgatcaagattgcagacaggcccttcatcaacatactctgtcagactangaagtcatcatgactagctttccattccaatgacttaccttagagcatcgtcaatgtccatagctgtgagcatgctcatgtcccatgaatcttactctg

SEQ ID NO: 35444 - DNA, 322 bp, Glycine max
  unsure (1)..(322): unsure at all n locations
ttgagccaattcaaacgacaataactntttttcggatgtttgattgagtcccgtaatataacgagacgctcgaaattgaatgttgaagctctgagctaattcaaacgacaataacttttttctcggatgtctgattgagtcccttaacatatcgagaccctcgaaattgaatgttgaatctctgagccaattcaaacgacaataactttttacttagatgtttgattgagtgccgtaacatatagagacgctcgaaattgaatgttgaagctctaagccaattcaaactacaataactttttactcggaagttaattgagtt

SEQ ID NO: 35445 - DNA, 210 bp, Glycine max
  unsure (1)..(210): unsure at all n locations
ttttgactaacaattattctttgaccgtaatatcgagattcttaatacttctatacaatttactggaaaaactattttgttggtagtctctcaatctacagaaaanacagatgcaatgaaaactctcttatctanatactcatatagtaaatagctttgacactgtctttacttccaaactattacttcagaaaatatctttttgttgtc

SEQ ID NO: 35446 - DNA, 343 bp, Glycine max
gaattactgtcaagaaccaattctcaaatggagttatatgtgatacatgtcacatatgccctcatgcaagtgccctacgagactgaagcatggacaaaaaacaagcccaactagcgctgaaatttttaaattaattatgaagaatgagaacaataaggattaaactaaccactttgtcataaacctctacctctcctaaaataggtatatgaaggcccatgagtaattttatgcctctcaatcattaaggtgcgggtatatatatatatatataaagttattgaagatttcagttacaatctaatgccccatcaacttcagcaaacttaatagccgtcattaa

SEQ ID NO: 35447 - DNA, 192 bp, Glycine max
cagccattggctctatacaatttttagatgattgaacccgaaattattccaaaattctcaatcatcttgtctggcatcatacacagttatagatcatacacagactaaactcttgtcaactgcttgaaaaatcatggctactaattttaaagacttactactagctggaaccattttattttgattgactct

SEQ ID NO: 35448 - DNA, 174 bp, Glycine max
tcactacgcatatagaattattacaagcaatggccgtcgatctcaggtgtgagaccggaaaaggacagtagggtctcccagccttacggtctgtagcgaataagatcctgagagaaggcgacccttagaccaagctcggaaaacctattctagaatgcctttggacattcatga

SEQ ID NO: 35449 - DNA, 369 bp, Glycine max
ttagaccaaagcaactcaatttctaggtatctaaaaccccacaatttagtggattttcaaggtttgagaagtgaaaatgacaatggggtaactttggagcaaactctcatctcaaacaattctataacattaatctaaactctctcaaactgtttttacgacgaaaactctaccgaatcaaaatttgactcctcaacacccaatttaccctagaaatggctcttgccttcactttggtcactcattttcctcctttgcacagcccaagctttcccacagtcctaaatgacatttcaaactaggattaactcactctaacctccaattaccactaaatccagatttggcttttcaaatcctcaaagcatc

SEQ ID NO: 35450 - DNA, 308 bp, Glycine max
  unsure (1)..(308): unsure at all n locations
aaagtgtattatttatcaaatcacagccttgctttatagactcttcatgtntgtccaagaggaccatttaaaagagttataacttctagaanaacttanaaccaatttgaaaaagtcaaaaaaccatttgaagagttacatcttttgatttattcagaaacaatcactggtaatcgattaccanatcaatgtaatctgatacacaaagcttttatgtgaaaggatgtgagtcttcacatttgaatttgaatttcaacgttcaaaggcactggtaatcgattaccanaacattgaatcaatacagcttt

SEQ ID NO: 35451 - DNA, 376 bp, Glycine max
tccctttatctctaacaagctactctagttatctaatttaaaccaaattagattttcactatgcatatagaattcttacaagcaatcacaatcaatctcagttcttaacccagaaaaggagactaaggttcccaaccttagggtcttttgtgaataagagcctaagagaaacctacccttagaccaaactaggaaaacctattttagaatgccttcagaaattcatgtgtatgctaacaacatgtaaaacacacaaaaaacatgagtcaaagagcgacacaacctaatcaatcacacgcaagaacctttgcttgagtgaatgagtctcttcttgatctcacaagtaattgaaaaattactttttaccatgagagat

SEQ ID NO: 35452 - DNA, 369 bp, Glycine max
  unsure (1)..(369): unsure at all n locations
cgtgattcttaattatattaaagagttaaaanaatatatgagattaataaaattagagaatattatgatatatatttttagttaccatgtaggtacttaaataaattagaagcttaaggtagttgaacatgttgtgaattattctgaagttaaatntgtgtgttggtggtggttttgtttcgttatgtacgttcattaaaaaatgagaaaattaattagtagtcttagaataaattaaaaacactgtgaataaataattattatatctaagttatataatacacataaattaaaacagtacggtgatggagatgagagacatagagacatacataataaacataacataatttaacaagaaatacgaga

SEQ ID NO: 35453 - DNA, 427 bp, Glycine max
  unsure (1)..(427): unsure at all n locations
ntgaacctganaccanggattgagacttcgactcttncggctgtctgaactcagctggtttttgcctccagctcctgatggttctacgctgaccacgagagttgctctttattagccgacgatcctctgctaattgcctcacgagaggatatccgaaccgttcctgtagcgcctcagggtgtattgatatactgggccaactattccacgctttgtcgaaagatataatagtgcctattgggctgaaccactgtcggttctattccctgccttattaacttctggattagggaggccgtattcagcaagcgtttgcagtctataaatgaataaatctcttcacttgagcctgtatctacagattgtggtcattgcagcatttaatgcttgcatggacgcacatactttgtcatgctatgaaaccacg

SEQ ID NO: 35454 - DNA, 370 bp, Glycine max
  unsure (1)..(370): unsure at all n locations
tcactatgaatgacaaattccttgngataaaggtagtgttgccatgttntcaaagcccgtactaaggcatacaactccttatcataagttgaatagttaagggtaggaccacttaactnttcactaaaataagcaattggatggccttcttgcatcaacacagccccaatcccaacatttgaagcatcacactcaatttcaaaagatttttgaaagtttggcaacgcaagtatggnggcattagttagcttttgcttaagaacattgaaagcttcttcttgtttctctccccatttgannaccaacattttcttgagcacttcattgagaggtgctgccaatgtgctaaaatccttcacaaatcgtctat

SEQ ID NO: 35455 - DNA, 250 bp, Glycine max
gagaagagaaaaacgatggatcgcatttatacaagcggcgaggatgtcttctgcacctatagaacctcacaatcactcacagactcatctgatgctctcaggatgactccctcttcaagctcgattctctgcaggtcttcgcacaatataatctcaaaactctctggaacttggacctttctcactctataaatctctagacatgcagaagcttcaagaaaaggccacactcgcttctaaaatttgattt

SEQ ID NO: 35456 - DNA, 141 bp, Glycine max
gtaacaatactctctaagggctaccgtgtctacgacttgtctactaagacactgcgcatcagtcgagatgttgaagttgatgaatatgcttcatgcagttgtgatgaagagaaagtggacaacatcgttgttatagtcgct

SEQ ID NO: 35457 - DNA, 146 bp, Glycine max
tcttggctcaatatacattcatgcctacttggaacatggacctgtaccactatatacacatgcacacatgctgagacttctagaacctgtccatctacctactataagatgaatcctggcttcctacggaggaaggggctgcactt

SEQ ID NO: 35458 - DNA, 333 bp, Glycine max
  unsure (1)..(333): unsure at all n locations
gcgcatattatatcgagacgctcaaattaaccaacggaagctctcgagatattcanatggtcataacttttaactcggaggtccgattcaggcgcataatatatcgagacgctgcgaaatgaacaacggaagctctcgagaaattcacatggtcataacttttcactcggatgtcagatcaggcgcataatatatcgagacgctcagaattaacaacggaagctctcgagaaatccaatggcataactttcactgggatgccgttcacgccataatacatgagacctcatattgacaacggagctctcataaatcaatggcatactttcactc

SEQ ID NO: 35459 - DNA, 316 bp, Glycine max
cgcgggtctgggagacaaaggtcttgtgttcgcgatatgcgaagattatgttccgagtactttggatttggtacgaccatgccctcctgatttccagctgggaaattggcgagtggaggaacgccccggcatttacgcaacgagcataatgtaaacctttacggttttaaaagctctatagttgggcctaggctttagagtttttccttttgttaaggctttgtgtcttttgattgtgaatttataatacaaggatctttcttcatctggtcctgggctctacccattctcattcatttgcatgtttacttctttt

SEQ ID NO: 35460 - DNA, 436 bp, Glycine max
  unsure (1)..(436): unsure at all n locations
ttgaaccctgactaccanggcctgagcatcgactctttgcgccgtctgatctcagctntactttgtctcgcggatgcagtgctggtgtctctcgagacgctgagacttgctatacattcgcacaatgctgcgctcttggttgtgttacgtgaggatatcactggctgatcatgtaaggattcaaggggttctgagagattgggctaactgtacgacaggtggtggaaaatactaatacattgcgtgcgactgagacaatgtgagttcatccccacgtcttcttagcttctgggatatgacagcctccttgaacaggtgatttgcagatctaccataggaaggaccttctctagcacctgcgtttttagactgtggttattgcagcctttagtgctcgcatcggatgcacatccattttcgtgccacgagaccactn

SEQ ID NO: 35461 - DNA, 360 bp, Glycine max
tggttcgaggtacttacccattgaagatctatgaacgatgaagaacgaatgaagaacgtcgaagaacggttgaaacctttgcgaaattcctcacgaaaaacgttacggaaacgtttcggaagcgcctcggcttagattttcttcacggaaacaatttttccaagcaaattcgaaagagagagaagtgcctaaggggctgaaccccttccttcttcatttcctcccctatttatagcaaaataggggaggtggttgccgcccagctcgcccaggcgagctcagctcgcccaggcgagccaggttgctttccccagaagcaacagccttctggaggaatattctggagggcccaagtgggtc

SEQ ID NO: 35462 - DNA, 377 bp, Glycine max
tcctttacataaagagaagagaaaaatgattgattgaagaaatacaagcggtgaggatgtctcctccacctctagaacctcacaatcactcacagactcatctcatgctctcaggatgacttcctcttcaagctcgattctctgcaggtcttcgcacaataaaatctcaaaactctctggaacttggacctttctcactctagaaatctctagacatgcagaagcttcaagaaaaggccaaactcccttctaaaatttgatttcaggcttaaataggtggctttgtttgtgcttgcgcgcttagcgcaactttgaaccgcttagcgcgcattagtgaattttggcttagcgcgtgcttttctcactcaatggatgga

SEQ ID NO: 35463 - DNA, 337 bp, Glycine max
  unsure (1)..(337): unsure at all n locations
cctccattaattttagctttaccttctgctccattgttgtatcttcattnttcttcatgtatctcctcacatgtcttgattagaatatagntaacatgattctttttataatttccaccaattaaacttgctatagaagctagatttgattttctatggttcaacattcttgttctttgtcttgaccatgaatngtgttgagtttaggttcctctgagttatgctttctattttgtggctgaacataaaccataaaattcttacaaaagattaaagtatataaaacctcaaaatctaaatgacatgtcactcatgtagtttgcatagagtctgttac

SEQ ID NO: 35464 - DNA, 379 bp, Glycine max
tatgcgcatatttccctacgaacgttcacttgcacaagacatcctattaactaagaaaaatgcacccatatacaatcaaggtagcttcattacctagattatttacatgtacttccaaggtgtatttgttatttacatcacacacgcctccttggctaaatttacatacatgcatactcaaagcatttcggggtaccaaaaattgcacatgcgctcatcttggtatttctaatacctatacatatacaaactttatgatgaatcttgactacctacgcaataaggtgctacatttcatgtttttttttttttttttcaagtttttgctacctaaagccacatgcaaattcaagcatattttcctttgctgactaaaatt

SEQ ID NO: 35465 - DNA, 359 bp, Glycine max
tcaagctgtgaggacctgtatatccttgtttccttacaagaatgtctgggcttggaagttgcaaagtccagcaagggcgatgaaatgactcaccgaaaatatgccctttgtctattagaggatactggttttcttggctgcaaaccatcctcccttccaatggatccaaatttaaagctcaacatgcccagaggtgatttactgcccaatccctcaatgtacatgcgtatacttggtcagctcatgtacctaactatttcaaggccggatattacatttgttgttaacaagctaagccagtacatgcaacatctcaagacacctcatgtagatgttgcgatcatctgctacaatatatc

SEQ ID NO: 35466 - DNA, 190 bp, Glycine max
gatgattaacggacgaaggtcgtctaagagcggttgaaacgtttgcgaacttcctcatctagaacgttgccgaaacgttgatgaagcgcctcgtctgatatcttcttcacggaagcaattattccgagctcatgcttatgagatagaagtgactaaagggctgaagcccttccttcttcatttcctcccc

SEQ ID NO: 35467 - DNA, 415 bp, Glycine max
  unsure (1)..(415): unsure at all n locations
cccttgcacattatgatccctggagcacctaagtgacactatcgaatactcatgcttccttgacaacgtgaactctctcaagtatttctgaacatctnacattaacgctccccaatccagacaaggaatccctattgactaacaacatcagcgcctcattctactgagtttatgatatttactataacgaactcattccttgtgatttttacacacactcttactcgaaggcattattggatcgcaaagatgaacatgcacacatattgtgatggctgatgactgcccaagctcttaccttatgttgagtcattgcatcctgcgcgggaaagtgcgacattgaggcttttttaagtcttggcccatttgttctaaaacgcatctcaattcagactaataccgttgttaaaaattg

SEQ ID NO: 35468 - DNA, 342 bp, Glycine max
  unsure (1)..(342): unsure at all n locations
atgagttgcgagttgcatacaggttgttgatgctatttttctcgcgagaattcgtgaactcgtttgggttatttggtatgaaagggatcaatgggtttttaatagaaggaaattcctctttagtatactctggagaaggcttagtcctttttagatccttcttatcanattgattgaaggcctanacagttatctgaatcttggagaacgcccctaaagggaatcattaaggctagttttgatgcttccccaaagcaaaatagaggaacgggtcttgtngtcattnttagggatcacggtgggaaagttctggttgcgggttctttgttaatacccgtttgt

SEQ ID NO: 35469 - DNA, 379 bp, Glycine max
  unsure (1)..(379): unsure at all n locations
actctagaggctcagaccacctatgtgctggaaactctgcaaacttagctctttttgatgtaacgatcctaaactatctatttaacatgatactgatattattattctttaccatgcttaattacatgtttgtggctcgatcatccatcgacatgaacagtcttacgacttaggcattggacactgtttatatgctatgaacttaggatagacatctacgcgatatatgtctctggatacacgcgtataatttaaacggtttatgcgtctctattgagatgcaaattatttaatataattattcagggatnaagagtgatattaagtcaatgacgactctttcactcgaatgatcatagtcttaagctgttaatacatg

SEQ ID NO: 35470 - DNA, 457 bp, Glycine max
  unsure (1)..(457): unsure at all n locations
atccttaagcaccgcggctgcaagctgagaaatcttgagatgtttgtctnttcatgcccaactcctttgagtggcgtttgtactggttgttatattgaatgttgcatcttttgtgcatcatgcatcatcatgaataagtgagaagaaaattttctaagttagaaaagtttcttcataaggcaaaactctctgttataatcaattacgcttaggatgtttaattatccacggtaagtgcactgatgattccatgtctcatacttcatattgcatggaaatagtataaactntgtcagcaagtatttgtaattnttcatgaggcaaaatacttgtacttgngggcatgtcatnntggttttaactcccttgtgacttanngctgatcaccattggggggggagttgtctttgcacgacagggtgacctcgacacttgctgcctaggttttctaagtgag

SEQ ID NO: 35471 - DNA, 231 bp, Glycine max
gcttgccatccagctcgcctaggcgagctaagtttgcttctccttaaggccgtgccttctggggaactttctggaaggcccaagagggcctgggtgctatttgcaccccctgtttactaaatacacccctagctttttttgctgatatttttccgtaacgatatggaattttacgaaatacgtaacgatacttgttttctttccgtaatgacacgaacccttatggattat

SEQ ID NO: 35472 - DNA, 287 bp, Glycine max
  unsure (1)..(287): unsure at all n locations
gaagcgactaacactggcgcttatctcgaagacacagaaaacattntgttctacagagtatgcttagcgcacagctacagctagcctaagtctacaattatcaaaaccgcaaaggattggagcttagcgcagcatggtggcgcttagcttatcctcaacataaagacactcaggcttagtgcacatggcgcgcgtagcctgactacaaatacttanaatatagaaagggagtggagcttatcgcatcaaggcgcttatctcaacacacaacaaggggttagcgcaca

SEQ ID NO: 35473 - DNA, 339 bp, Glycine max
  unsure (1)..(339): unsure at all n locations
ttccncccgatgattntaggggagacaaacgtgttcttcctcaaagcactgcgtaacatcccacacattgtctcagttggaagtcctcctcttaattcgaacaggcttgcccttacaactaggtcttctactggcagaggttctggcagaccagaaggtcttgggtttcaacaactttccctaaaaaagttctctccttctagtttattgagtgcggctaagctgcggagagatggccctctatgtctcatgacagaacataaggaagccatttggagtatatattctgcgacaactaagccagatacttctatcttaaataggcttatagatgctggg

SEQ ID NO: 35474 - DNA, 350 bp, Glycine max
  unsure (1)..(350): unsure at all n locations
agcttatctcctaatgcacctattccattcctcccatggtcatcatcaccataaacagcaataacctctctccagccaaagtagttaacagagtctgctattgcagtcatttcataaatgtcactaaaagcagctctaataaagaatgggaattgaagtgaagaaagagtatggtcagtggctgtaaatgatagtagaggaactnggagctcgttcgctatatgagatatgacatgagctgttgtagacgtctggggaccgattatagccacagtttgtgtgccatgagctgcaggctatacacacaatttatgtaaccaagagaataatctgcaaactttgagaacttg

SEQ ID NO: 35475 - DNA, 319 bp, Glycine max
tctcaagaattttgttgggtgtaacctttgctttttgtcgtgcattgcttttctaaatccagttataagaaaatttgggtgagggttgagaccttacttttcatcacgagagagtaggtcgttgaagtcagccatgatacaccacgggagagtgttgtcacacgaaagggttcttaaaaaattccaagagtccctccgacgagttctgtaaagatagccgcaataactagtaaagcgccaactagggctaccaatcacagagatcccaacgttgatgaagttttgtgagtagtttatgagcaaacaatcaaatgggtac

SEQ ID NO: 35476 - DNA, 366 bp, Glycine max
ctgacaatgtgctggaatgcatccaaagatggctatgaacatatattcatttcaaaagcacgtttaaaagactatgaacatatatttattatattttaacgggcaatattacttaataattgattaattcctattaggaggaaatcaaacttcagacgttgacattcaaacacgtttaaaagactatgaacatatgttcatttcataagcacaaatggtatctggtaatgcactgaaatttctaatgtagttgctgaattttcttatgtgcatatattttttatgctttatgcagggtaaaagtgtgtgttcagtaagtgtgatgactagtacttggtggactgtgttttaagctgtctatttatg

SEQ ID NO: 35477 - DNA, 372 bp, Glycine max
  unsure (1)..(372): unsure at all n locations
agctgtagaanatcttgaagatgtgttgtgtttctcttgcccaactcctttgagtggcgtntgtactggttgatatattgaatgttgcatcttgtgtgcatcatgcatcatcatgaataagtgagaagaaaattttctaagttagaatagtctcttcataaggcaaaactctctgttataatcaattacgcttaggatgtntaattatccacggtaagtgcactgatgattccatgtctcatacttcatattgcatggaaatagtataaactctgtcagcaagtatttgtaatttttcatgaggcaaaatacttgtacttgagggcatgtcatttggtttttaactcccttgagacttatgctgatcaccat

SEQ ID NO: 35478 - DNA, 312 bp, Glycine max
tgggaggattgatggggacccggtgttgatagaaacgaggatatgggctacgtgggagtacgtgagctcagttggaggtgggcaacaggggatggtgggtttatgcgcgcattgtggatgtgggaaaactcgttgtgcaccatcgcccgaccgccacctagtaccacatgtgatgggtaccccataatcctacaagcttgagatgaggaagtgttgaagggtgaaacttcctgcttttattggtgaccacagagtggtacctggagatatgtcgcgggggtcaagagaccttggggacgtcaggtggggtgc

SEQ ID NO: 35479 - DNA, 353 bp, Glycine max
  unsure (1)..(353): unsure at all n locations
agttggtcatatgaagcgactaacactggcgcttagctcgaagacacagaannacattttttctacagagtaggcttagcgcacagctacagttagcctaagtctaacaatttcaaaaccgcaaaggattggagcttagcgcagcatgttggcacttagctcagcctcaacagaaagacactcangcttagcgcacatggcgcgcttagcctgactacaaaaacttaaaagatagaaagggattggagcttagcgcagcaaggcgcttagctcaacacacaacaagggcttagcgcacagacgcgcttagccttattccanaggtagagaaatagaacctaagtgatgcaatc

SEQ ID NO: 35480 - DNA, 355 bp, Glycine max
tgccacccagctcgcctaggcgagctaggttgcttcctccagaaagcggtgccttctggggaactttctggaaggcccaagtgggcctggttgctatttgcaccccctgtttactaaatacaccccttgctttttttgctgttatttttccgtaacgttatggaattttacgaattacgtaacgatacttgttttctttccgtaatgtcacgaaaccttatggattatgtaatcatcccttctttggcttccgggatgttacagaactttacggattgcacattaacacttccttttgacttccggcatgtcacggaacttcatggattgtgcaacaatgctttcttttgacttt

SEQ ID NO: 35481 - DNA, 245 bp, Glycine max
aagcactgcggaacatcccacgcgatatcacaaactggaatcctcctcttaattcgcacacgcttgccctatcaactacgtcttctactggcagaagatctggctaaccataaggtcttggtttctcacgcctgtccctaaagaagtgctgtacttctaggttattgaaagccgttaggctgctgagagatggccctatatgtctcatgacagaacatacagaagccatggggagtattattctg

SEQ ID NO: 35482 - DNA, 346 bp, Glycine max
  unsure (1)..(346): unsure at all n locations
gacccccttgngatacaccatgttcataagagtcagcataaaccttcaacacgtcatcctttagtgatggcaaaacttttatagaacttaagttaaagtatatggactcgactcttgtactatcagcagtactactacttcttaatctactctcctgaactntcaacaagcatatattttcacataggttatgttgaacactcttaagcccacctaacttggttaatccccctcatatngaatctctctcaagaacacttcaatctcttaccagtatgatctctccattacattaccataacactattgatctcatctttcattacactggtgaaatataatattg

SEQ ID NO: 35483 - DNA, 374 bp, Glycine max
aactcggcttctcaatgtgccactaaatatatggttatatccagagatgtgaaattctttgagaatatattcgctttcgaaaaccaacaatccatcaacagtgacagagagatgatcgacccctatgtcactcctaatctgatcacctccaataactcagatgacacaaatatcacatctatcacagaaacaccacaacatactccataacctgctcagttagatactgctacaactattcaacttgaaattcctattgaagaacccctaaaaaggtctaccagggtttcaaaccctctcagacatatcattaattatcattgctagaatgggacccacattaataaagtcacctaccctatatagaattactt

SEQ ID NO: 35484 - DNA, 450 bp, Glycine max
atgaaactactagatgatgcgcttcatgagagggtggatcaaatggagaatagagatcattatgaagaagaaaggatgagaagagggaatgatagtggttctagacaaaaccgaattgatggtattaaactcaacattcctccatttaaaggaaagaatgatccggaggcctacgttgagtgtgagatgaaaataaagcatgttttctcatgcaacaactatgatgaggaccagaaggtgaagctttgccgccacggagtttccgactatgctcttgtgtggtggaacaagctacgaaatgagagagcaagatatgaagagccaatggttgatacatggacggagatgaaaaagatcatgatgaagcggtatggttcggctagttacttcagggacttgaaattcaagctccaaaactaaccaaggcaacatggggtgaggagatttaag

SEQ ID NO: 35485 - DNA, 369 bp, Glycine max
  unsure (1)..(369): unsure at all n locations
agattgcacaacgtgaagtctatcacgaggtatctggtcggacataaagatttcacacagctgtccgattcgtggacatcatgtgttgagacgctcatgctcgcactgcggatgctgtaaaacatgttgatggccatcaccctaccgtcacatgttcccacctgtgacgtggtccctatagacgctcgagcttgaaatgacgaagctctcaacggagaanaatgcgtgtttctttgcacgccactgagcgattcctggacatatctcatgtagacgctgagaccttgacgacgaagctgtcgagatattgcctggacctaacttgtccactgctgatcgattccggcatatactgtctcagacaatcgg

SEQ ID NO: 35486 - DNA, 355 bp, Glycine max
  unsure (1)..(355): unsure at all n locations
acactctaaatataagtccaattaatcaacatgatgaagcacagtttcttcacaaataatccaaagctcttcatgaaataaaaaaaaaattacagctagaaataaactatggaaattgctttgcaccttgatccagacaacnaggccatgggattcactgccaataaatttcagtccatagaatgctttctgactgcactgcttcctaagctctcaagccaccaacaccgtttcagacccaccttgagctcctgtgagagctatgtaattattggttaaaatgaatataactcaacatgtantttattatnggtcanaatgaatataacttcataaacgatatgcacatcaatct

SEQ ID NO: 35487 - DNA, 367 bp, Glycine max
gcttgtataatcttagatcgatgtgtgagatttagtttctaagtggaatctttcttgcgagaagaaaaactgatatctgcacagttgaatcacagacccattttctataaagtccagtagtagctggaagaagataaatctaatggtgtagttggtctagcacacgctatgtttgaagtccaatgaggaactaataggttattgaaatccattagtttgctagtctagttgtgaattggttgtgttagtgaaatctcatctttaagggtgaagactatgcctagcccaagattgcggtgaatcaatataaaaatcctttgtgcactctttcattttcctttcctttcctttgcttaggacaaatctg

SEQ ID NO: 35488 - DNA, 386 bp, Glycine max
agctttaaaatttgaattaaaacgttcaaaaactgctggtaatcgattaccatatatgtgtaatcgattacacagtgcaaattttgaattcaaattttaatagctattgtaaatcagttttggccactggtaatcgattacatcctctggtaatcgattaccagagagtaaatttgttgaaaaagactttttaacttaaatttcttggccaaaccttttgctacttcaattggaattcccttcctattcaatataccctttctaagactagaggcttgtcttgatcatccatcttgaatatctttaatttctttgtcttgaataaagctttgagacgcatgtgaacctttggcatcatcaaaacattcagcttgatcctttgtcta

SEQ ID NO: 35489 - DNA, 344 bp, Glycine max
  unsure (1)..(344): unsure at all n locations
agaatgaagctctgataccacttgttggacaagtggcctcagatatcttaagaagggggggttgaattaagatattacaaattatttccccanttaaaaattctatttaactttctattcaagttataaattcccttaataatgaatntcttaaatattaattcaaatagaacaagttgaatatgaatataaaacaataataaataaagggagttaagggaagagaaagtgcanacctcagattatactggttgggccacacccttgtgcctacgtccagtccccaagcaacccgcttgagagttccactatcttgtaaattccttttataagttctaaacaca

SEQ ID NO: 35490 - DNA, 395 bp, Glycine max
agcttaacaaggctctctatggctaagttctaattctccaaggcagcggattcacaggttaaaatctactatacttgagcatggcttaggaacagacaggtgacatgcttctctgttcatctacacacatcaagagcatactgtctatcttttagtctatgtggatgatatcatcatcacaaacagttttgtctatcttagtcggcagctaactttcaaactaaacattgccttgtctcataagaaactgtgtcatttggactattgtttgggactagagatcaaatatcatgcttataattctatactattgactcatagcgattatattcatgatttacttcacaaaactcatatggctgaagcacattctattttctctcccatggttccta

SEQ ID NO: 35491 - DNA, 530 bp, Glycine max
  unsure (1)..(530): unsure at all n locations
ngcgatgaatcgtcctatgcagcacgtgcanttnaagcctatgctcggaggatgcgtccgcgatgctagaccgcgtcattcatctatatcggttgagctcgaagtcaggcttaatacgtaacaactatctggttattaggtaatatgattttaatgatttgtgacaaccatgtgagctcatgaataagattggatgatctgagtgattgttgtgtggtacaccattaatctctgagtatttgctgaatgatgatgtaactgatcgtgttataaatatggactaacaataacctattaagcctgaacatgtgagataactctattttacttgagaaatggtcactaagatgtgtaacactatgatttattttaatgtttagattaattcgaagtttagcgttgaagttacattaagaacacatcctcacattctttagatatatatttttgctacgccttccggaccaggttttgctttgaacacggtcatcctagttgatctaatacgttgtaaatgtgtcttctcttcg

SEQ ID NO: 35492 - DNA, 413 bp, Glycine max
agcttgaaggtaaactagatgccttggttaacctggtaacctagctggccttgaataaaaaatctgcacttgttgccacactctgtggtttatgctcctctgccgaccaccacacagacctttgcccttctgtgcagcaatctgaagcaattgaacagcctgaagcttatgctgcaaacatctacaatagacctcctcaacctcagcagcaaaatcagccacaacagaacaattatgacctctccagcaacaggtacaatcccgggtggaagaatcatcccaaccttagatggtcgagtcctccacaacagcagcaacaacaacaaccttattttcaaaatgctgctggcccaagcagaccatacgttgctccaccaatccagcagtaacaacaacaacagcaaccgcaatag

SEQ ID NO: 35493 - DNA, 507 bp, Glycine max
  unsure (1)..(507): unsure at all n locations
agagtgagtatggagtgctgggaccctanggtaggaattgtgcataaaaatgaaaaaaaattgtgacttatgataatagggtagcgaagttcacgaccagcctatgaatttcatgttgcccgtgaaataatttcaaacagggcaacaaagatcacatccagcccgtgaaacactttcagacatgacaacaaagatcacaaccaacctgtgaattctctattgcccgtgaaccaatgtagaactcccaaaattcaaagatcacaaccagctcgtgaattccccgcttcttgtgaataaactttggtgctttctgacactagtcactaaagttcataggtagcccatgaaattgagtntactcatgaaacacctacaataatttntattntgctagggtctagacttatattgacccattagtntaaatgagactgttaggcatagtaaacaattaaactagcttttgagtcaacatagaatttgttataattatcttagattacaaca

SEQ ID NO: 35494 - DNA, 405 bp, Glycine max
  unsure (1)..(405): unsure at all n locations
agctntgtggatttggtctttgccggcgtaaggatcaaagtgggtctggaaagaggcaaatctgatcatcctactttgatgaatgcgaaaattggggcaaatgaagagggtgagaatgaaggagaaacccatgctgcgactgccgttcctacatggaaaatcccccaccagctcaacaacatcattactcagccaatatcagcccttctcattacccacaacccagtccatccctaaatcaaccacaaagcctgtctatcgcacgcccaatgcccaaacaccacctttagcgaaaaccaaaaaggaattttgcaacaaaaagcctgtaggattcaccccaaattccagtgtcatatgctaacttgcttccatatctacttgataatacaatggtagcagtaaccc

SEQ ID NO: 35495 - DNA, 435 bp, Glycine max
  unsure (1)..(435): unsure at all n locations
tatccttatggcttacctccggaattcactccccgtgccaccccggatgatntaagccaagcccctactttcgaggggcagctcccaccttatgacgactatcccgggcaagacgatgaggaaggagatacctatctcggtcccctgctccacctcaaagatccgtccccccatgaattaccccaaccaaacatagtccgccatatcccgacttcacccacacccgtaaaagaatctgttcccttcgtggaagataagggaaagattaatgcgctcgaagagaggttgagagcattcganggcctctacaattacccattctcggatctagcggacttatgtctcgtacccaatatcgtcatacctcccaagttcaaagtaccggactctgatatgtacaaatggacaacatgtcctatagggcatcttctgatg

SEQ ID NO: 35496 - DNA, 417 bp, Glycine max
  unsure (1)..(417): unsure at all n locations
agcttcttatccaaggcactctcttggtggtgaagctcctccttccatgacttattccctagtgcatggcgcctcctctcacctcttctcctttatcttccgttgcatctccatagttgaaaatcaccattgaaggacctcattgaagctcaaagatccagtctccatagaagcttctcaagcaagcttccattataataaccctaatggatgacaaccatacatgtgtcacaatctaggattttaggaaatttaaataaaatcaaataacatcaaaaggataatatctaaattgcctaatatataaaagccatctatttgggcctcctaggcctatcctatcattgccgacaaattcagttggacctttccctcaaggttcgtagaagaaattggacttgtcgaanaagaaaacat

SEQ ID NO: 35497 - DNA, 343 bp, Glycine max
  unsure (1)..(343): unsure at all n locations
agtcagtcttcttacctttgttgttgaccacagagtggtacctggagatatgtcgcgggggtcaggagaccttggggacgtcaggtggggtgctattgcccaaaaccaagcttgaccaatcccgacccaacccgggcatagtcagtcagtgagaacctgtgacgtacctaaacaggcgagctcctggcagtcaaccaataaaagaataaagtccacaaagcaaggaggcttgtgtggcggctggccagctatgaatcttgagtggtatctggaatntggcctctggtaatcgattaccaagggtgtataatcgattacaaggcttaaaaatggagacaggatg

SEQ ID NO: 35498 - DNA, 407 bp, Glycine max
agcttgttctgagccagtaatgcttcatgtgaagtgtgctcaagcatacttttctttgcaagaatgtaagatctatcctaaagaactggatggtcacttgctgccatgttttcaattagctccatagcttcatcaggtgtttttaaatttatcttaccaccaatggaagtgtctagaagtttctttgagtgaggtcgtaagccattagtaaatatattcagttgtattggctcattgaatccatgcattgcagtccgacggagtaaattgcagaagcgatctatagcttcgctgagtgattcatctggaaactaatgtatgaagaaatctcagccttgccttatgctgtcttggattctagaaattatttcttcaagaatttctccataatctcttaccatgttctc

SEQ ID NO: 35499 - DNA, 328 bp, Glycine max
  unsure (1)..(328): unsure at all n locations
ttgatgttgttcggatgggccatggagtggtaaacacctcttcttctttcctttgaactccattattttttctcatagatcacccatgggagctcatgaaanagctttgattttatgtttttgatntggcttgtgggtgtttttgggttttgggtgatgttgttgtgatgagcttgctgttggagtggaggaaaactcctccttggacccaaaactcattccttntctcctcttctttttcacaaagtcctncttttgcttctatagaggtaagggaacctttaatttggtttgattaatgttgtgtgattatacttggaatgatgat

SEQ ID NO: 35500 - DNA, 354 bp, Glycine max
gaacaagctacaaatggagagagcaagaaatgaagagccaatggttgatacatggacggagatgaataagatcatgaggaagcggtatgttccggctagttactcaagggacttgaaattcaagctccaaaaactaacccaaggcaacaagggggttgaggagtatttcaaggaaatggatgtgctcatgattcaagcaaatattgaagaagatgaggaggtaactatggctcgatttcttaatggtttgactaatgatatccgtgatattgttgagctgcaggagtttgttgaaatggatgatttgcttcacaaagcaatccaagtggagcaacaattaaaaaggaagggagt

SEQ ID NO: 35501 - DNA, 167 bp, Glycine max
  unsure (1)..(167): unsure at all n locations
acccggtgtcgagagaaactaggatatgggctatgtgggagtacatgagctcatatggaggtgggcaacangggatggtgggcttatgctcgcattgtggatttggaatactagttgggcaccatcgtccgaccgccaccttgtaccacatgtgatgggttccccat

SEQ ID NO: 35502 - DNA, 408 bp, Glycine max
tgcggatttggtctttgccggctttattgtatgtggtactacggggcagacgcacgatggagcacaacaagtttttcacatccacaaaagcgcgcataaacccaccatcccctgttgcccaccttcaactgagctcacgtactcccacgtagcccatatcctcgttcctctcaacaccgagttcccattaatcctcccaagctttcccaacatccaagtaatacaacattcagacagcacaaattatcacagccaagcaaaacagggcaaaggcagaaaactctgcccaaaacaccaaccaaaatcacagcttttctcacttaaagaccccaataataattccttcgttccaattcgttaaccgttggatcgactcgaaaattttactggaagtctctagtacataat

SEQ ID NO: 35503 - DNA, 442 bp, Glycine max
  unsure (1)..(442): unsure at all n locations
ggacactatgatactaagctttagatnttctatattccttaaggtttgttagagcttatttatatgcgtgagggtccacaactaaccacaagtggttagcttctactactagccctaactaactaaacaacatctaactacccttcccgccaacgaatcactagaacagcttttacccacgccctcttatcctaactgggagatatcccaatgcttaggtagctgcttcattcgtctcgaacgcctttggtgcatggcttcgtcttctacgttcatatcatccccccgttcttcagacaaaaccttgtcctcaagggtgtggtgttccttgagatgttgccaatcttaccacgaggcgtcctctcgggaagaaccttcccactgcaccagcaccatacgtcggagcccatcatcggagggaactaactttgagtcaatgaca

SEQ ID NO: 35504 - DNA, 403 bp, Glycine max
agcttcgaagcaccgagagagaccagtctttaatcgagggcatgatattggaagatgtcataccctaatttcattcggggaccatctgtttgttgggatgtgaccctcgtttgaccacttcgaggtacttgacacccattgttaggcaatccgtgaagttccgtgacatgccggaaatcaaaagaaagcattgttgcacaatctgtgaagttctgtgacatgccggaagtcaaaaggaagcattgttgcacaatttgtgaagttccgtaacatcctggaagccaaagaaaggatgattatgtaatttgtaaggtttcgtaacaacacggaaagaaaacaagtatcgttacgtaattcgtaaagttccgtaatgttacgaaaaaagaatcagcaaaaaggggca

SEQ ID NO: 35505 - DNA, 476 bp, Glycine max
  unsure (1)..(476): unsure at all n locations
gcttctagccaatggacttaccttgaattaattccttngatagcctctttgagccttgtttccctttccttgttttgaagctcactacaagccttaaatgaaaaaccatgatatcaccatatccttaaggaattttggagctttggaattgttttgggaataagtgtggggggttttgtttcataggataacttgttttgttggctatgcttcatgatgtattttgggccatacctgatgtacattgtatattggttaaatgttggacatgctgaatgaaatgttgtttctcaaaggctatagagtaaaaaaaaattgaaaaagaaaaagaaaagcaataaagtttatggaataagatcttaaatgacaaaagaatgatgaaactcttggttctactctntatgtntaaattntatctntacttctttnntttttcttaatatgaacttatttcccattgctcctctattcctttg

SEQ ID NO: 35506 - DNA, 410 bp, Glycine max
agcttcttagtctcgactgatgaagatgaattcgtggttacttcatgcactcctctaatgacaatagcatcacttccggcactaaattgctgggagtttgaagccatcttctcaattaaatttctggcttcagaaggggtcatgtctccaagggctccaccactggcaacatctatcatacttctctccatgttactgagtccttcataaaaatattggagaagaaggtgctcagaaatctggtggtgaaggcaactggcacataatttcttaaatctctcccagtattcatataagctctctccactgagttgcctaatttttgaaatatcttttctgatggtcgtggtcttggaagtagggaaaaatttttctaagaaatctctcttgaggtcatcccagctcgtgat

SEQ ID NO: 35507 - DNA, 405 bp, Glycine max
  unsure (1)..(405): unsure at all n locations
agaatggtgaagccatgtcgcattaacaaacatgaatatgaaatgcctaccacgtgcaccatgtntgaaattgaaacaaagaatttgaagggttaatacacaataaaaaaaaataacaagaagccaagcataatcatatgctaaacttttattaaaagataagctaagggatcaccattcaccaatggagtactttgcatattgggtactgtatgtaaaagtcttgaacgctctagtaattaaatgaaacgtcttgaaggctctaataattaaatgaaactntacatattgtgtactggcatgtcccgccattcttataggcggcatgcttcagaacgtcgccattcttatttgctgcatgcttcatgtccctctantttcaatggcggtatagactttatgtca

SEQ ID NO: 35508 - DNA, 126 bp, Glycine max
agatgctctaggatatgacgtcttcatggaggaaatgagggctaaaagctatgctttgagacctttggaagagacgcttatagctttttccatcttgaccaccaatgtttggctgtggtacaattg

SEQ ID NO: 35509 - DNA, 321 bp, Glycine max
  unsure (1)..(321): unsure at all n locations
ataacgtgctttggtgcatacacatttccggtcaccacaacnaatggtgttcagaaagcgaaatataacctaatggatatggttaggagtatgttaatcaattagactntatccgtatacttgtggatgtataccttgaaaactgccatgtagttgtgaacagggtttctagtaaggtagttccaaagacaccttttgagctgtaacaaatatgatacctactataacgcacctgcatgtttggggttgccaggcagatataaggatttataatccgcaagagagataattggatgcaagaacaatcagtggatatttcat

SEQ ID NO: 35510 - DNA, 390 bp, Glycine max
agcttattcaaccaacggttgattcatgttatggcagcaaaaagggagaaccattgtatggtgattcatgcctaagtgagaatgaaattttgggtattcataaagaggaagaaggtaccgaaaccaggtttacagatagaagcccaagggcagatgagaggtccagcaaacaacgttggttggtggtagctaacaggttgcctgtgtctgctgttaaggagggtgtggagtcatatcgccttgagatcagtgtaggcgggctagtcagtgcacttctaggcaagaaaattttgtcaccttgcattaattgtttctttggtgtgttgtgtaatttcgttattatgaagtttgaattggaactcagctatgctaattagttgcctttcttga

SEQ ID NO: 35511 - DNA, 467 bp, Glycine max
  unsure (1)..(467): unsure at all n locations
tctataaattacagttgtcatctatgcanntttcatacttgaaattgttctatgattnttntattgttaatactaatttagtgtgtgaaatggaacacccttcattaaaataatcaaccctataacaccattaatcttgacttctttatatcaagaacacactaaaagaaaaatgctcataaaagaattataccgcagaagtgttgaaaaggtacgtcacctcttgaatttgacttcttcgatatttttgcctcaacaaaaaaatttcactttcttccttcttctcaatccttaaacaacttactaatatcaagagagacgttttatntgtgttattctagaaaaatgaattgtctatccttgtatttgtacgtaatgtgaaattatatctttcgagaattgttaaccaatctttctgtatctctatntntattatcgttatccacgctaatatattatcatactaa

SEQ ID NO: 35512 - DNA, 410 bp, Glycine max
agcttcaaagttatatttgaagaaaattgttgcttgatcaaagatgcaaaaggaaaagacgtattcagggtgaaaatgagggctaaaagctatgctctaaatctaatggaggagaagcaaatagctttttcaagcatgaccaccaatgttgaactatggcacaaaaggctcagacacttccatcttgctagacttttatacatgcaaaaacatgtcttggtgaaaggtgtgtcaatgcttgaagacaagttagccgattgcatggcttgccaatatggtaagctagtcagaaaaccatttcctcaatcaacttggagagaaactcaaaagctgcaattagttcacacagatgttgggggacctcagagagtatcatctttaaatgcattggtggagaatcaaagtgatta

SEQ ID NO: 35513 - DNA, 322 bp, Glycine max
  unsure (1)..(322): unsure at all n locations
tagaatggctagacatgatacatgtcagggcttggtntggttcaattgataaagggatgccccacattatttccatgacacaaatgcaaaaatgatgatttggaatatttatgcataactggtcatgcatgcacctatgcgaacgctcaagtgtcaaatatttatggacatgtgatgctacggctaaagattcatttgctactattttgcaacccaatgtttccaaaatatgttcttttatccatttgtgcattcatccaagtccatttcgggcgttcgggaaaattcacagcatcacccttaggtgtcacacatttgtttt

SEQ ID NO: 35514 - DNA, 390 bp, Glycine max
agcttggaaaaaatctaacagacttagcctaatgtttataagaatcactgttgcagacagtattaagataactctccctaagaccgataatgctaaagagtttatggggttagtgggagagcgctctcaaacaattgataaatctcttgttgggacattaatgagtacattgaccaccatgaagtttgatgtttcacgtactatgcctgaacgtgtcattgagatgacaaacattgtaacaagacttaaaaccttggaaataactgtgaataagaacttccttgttcagtttattttgaactcattaccatctgagtatggtccgttccaaatgagctataataccatgaaagataaatggaatgtgcatgaattgcacagtatgttagt

SEQ ID NO: 35515 - DNA, 203 bp, Glycine max
ctcttcatatacaattatcttatgtgcacgttaaactcttacggttcaatcaacaacgaaattgacgtcttaggggcagtagttaattatatacctactaactcaccaaacatttctttttcttttcgttattaccttccagaaattgtatggtgaaagaagcacttgatgtgaattcttataactctcacttgcaggatgag

SEQ ID NO: 35516 - DNA, 158 bp, Glycine max
ctttggtagtacgcgactatgtcaattatcaagtatgatagaataatatacatatcagctatctcacccatttattttcatatacatgctgaaaaccaccattaaaaggtacaaaattcactcaaatgagtccatcttcctctccttctttccattcg

SEQ ID NO: 35517 - DNA, 412 bp, Glycine max
  unsure (1)..(412): unsure at all n locations
agcttggagaggatgcttcaatggaggattagatagagggagagaaagagagaggggggagcacgaaattgaaggaataaaagagggagagaagtggaactttgaagtatgtctcataagactctcattcatcaaagttacaacaagtgttacacatgcttctatttatagactaggtagcttccttgagaagctttcttgagaaaacttccttgagaagcttctttgagaaaacttccttgagaagctagagcttagctacacacacccctctcataactaagctcacctccttgagaagcttccttaagaagattcctaaagaagctagagcttagctacacatacctctctaatagctaagctcaccttcttgagatgagaagctagagnctagctacacaccccctat

SEQ ID NO: 35518 - DNA, 386 bp, Glycine max
  unsure (1)..(386): unsure at all n locations
ctgacagccaatgggtgagtccagtttaagtggttcctaagaagacatgcctcacagtgattaagaatgagaagaatgagcttatccccacaagagtgcagaacagctggcgagtctgcattggttataggaggctgaaccaggtgaccagaaaatatcattttcccctgccattcattgatcaaatgcttgagcgcttggcaagtaagtctcattactattttcttgatggtttttctggttatttacaaattcatattgctcctgaggatcaaganaagaccatattcacctgttcctttagcactttttcctataagaggatgccctttggcctatgcaacgcccctgataccttctagtgatgtatgcttagcattttcagt

SEQ ID NO: 35519 - DNA, 417 bp, Glycine max
agcttggagaggatgcttcaatggaggttaagaaagagggagagaaagagagaggggggagcacgaaattgaaggaataaaagagggagagaagtggaactttgaagtatgtctcataagactctcattcatcaaagttacaacaagtgttacacatgcttctatttatagactaggtagcttccttgagaagctttcttgagaaaacttccttgagaagcttctttgagaaaacttccttgagaagctagagcttagctacacacacccctctcataactaagctcacctccttgagaagcttccttaagaagattcctaaagaagctagagcttagctacacatacctctctaatagctaagctcacctccttgagatgagaagctagagcttagctacacaccctctataatag

SEQ ID NO: 35520 - DNA, 387 bp, Glycine max
  unsure (1)..(387): unsure at all n locations
tcttctaccccatttctgacagccaatgggtgagtccagtttaagtggttcctaagaagacatgcctcacagtgattaagaatgagaagaatgagcttatccccacaagagtgcagaacagctggcgagtctgcattggttataggaggctgaaccangtgaccagaaaatatcattttcccctgccattcattgatcaaatgcttgagcgctcggcaagtaagtctcattacctatttcttgatggtgtttctggttatttacaaattcatattgctcctgaggatcaagaaaagaccatattcacctgttcctttagcactatttcctataagaggatgccctttggcctatgcaacgcccctgataccttctagtgatgtatgc

SEQ ID NO: 35521 - DNA, 393 bp, Glycine max
agcttgtttgagaagagcgaggtttaacttaatgatatgtctgtgttttctttccacatcagcattttgatgatgtgtgtgagggcaaattatcctgtgaatgatcccatgggtttgaaaaaatgagataagaggtctaaattcacctccccaatctgtttgaacactcttaattttggtatcaaattggagttcagtcatggttttaaattggtaaaaaacagaaaatgtttctgatttatttttaagagaatagatccaagtgaacttagaataggcatcaacaaagctgatataataagagaaaccatttgtggcacaaatcactgtatatagttcaagagagcagatatacagttgaaatcatggtagtctatgtgactttcacataac

SEQ ID NO: 35522 - DNA, 396 bp, Glycine max
cctcatgttaaactcctacttcatgcccttaaatcattgaagacatgtgctccaacccctacaacaacttatgggataggagaatcatgaagaggggcatcaaccaagtggagaaggataaatcccaaactgagttggaaaaacatatgcatgctttgagattaatgattgagacactcctaagagcctaagctcaagtcctcatcactacatctaaaatagcaataaacaccctaaaatggggggttgaataatgtgtatatcaaagatataaacttttgcaatataaaggtggatatagatagcaatatatgtgtgtgtgtgtggcaagtcgtccactaaagatacaacttatatttaatgaagatcaatatagtcgtctagtgactagataaa

SEQ ID NO: 35523 - DNA, 402 bp, Glycine max
agcttggaaacatcagccacccttttgttttcgcttctcaacgtgatgacggtgctgctgctgcttgcaccctcctcctgactgacatcaacaaaagaagtcttaatccttttgaaagttggtagtttctctatagcagcccacttggactgaagctccttatcttcctccacaaaggaatctgcatctctctcaaaggtcaacacatgaccttgagttcttcctcttggagttaactccattggaagaattgaacttagctttgcttgaagcagtagctattattgctggagctgttaagcctcaagctcctcacaatcactgatatgatctcagaagttgccaatgattgttacagattgtggggggatgcatggaagggagaaagaaaagtcttcactc

SEQ ID NO: 35524 - DNA, 368 bp, Glycine max
  unsure (1)..(368): unsure at all n locations
agagagagccttattagagaagnttagttctattgatctntaaanatttgctcagntagaagtgttagagagaagtntagttgaatgcaaaaggtgagggaaagaccttgccgccaacttcagaatcgaagtcgtacttgtcaagagcagcagtgaagtcttcgatggtgaatgaaacaccttccattggagcattgcggcatctctcgtaggcttcttcgaagagtttcttaagcctcgctctctctttgttctgcgcattggctattgctattgagttcgcaatggtaattgaaacgcgcttttgggattgttgggtccaaagagaaggtttggagaagagagaagaagatgagagtggggagcac

SEQ ID NO: 35525 - DNA, 372 bp, Glycine max
gatttgtagcctcaaaacatgctataaattcagctttcatggtagatgcaacaacaattgatgcatacagaatcgctatcatttgttttcggtccatatcatttctaggacattgtgtgagactaaatgtggctcttttctaaacgggaataggtgatgaatacctttccatcatgaatctctctagtactttattgatatgttttttgagataagcctaacaatccttatgatctattatggaatatttatatccatatcacatagcttgcctctctctttttcttttcctccattgaagcttcctctctaaacttcttatccaaggcaccctcttggaggtgaagctccttctttcatggcttattccct

SEQ ID NO: 35526 - DNA, 401 bp, Glycine max
cattttaataagtgttagaacaaaaaatgttcttataagtcacatgtatagtaatgttaacaaacttaacatacatattagattgtaattacatgatgatataaaattattttatactattaatatataacctattttttcaaataaaattatcatactttaatgtaatcaaatgattattatgatgagaaaactaatataaaataaccctctttaatatgaaattaaccatttcacttacaagaattgatattataataatatattattatataacagtgaaataaaatacaatattgaaaaggtgataacaaaaaggtgtattcttaaatttgttaaaaaaatataaagtaaatcatattcataaattaattttaggtctagacgatcccatgatcact

SEQ ID NO: 35527 - DNA, 407 bp, Glycine max
agcttaaagcttgaaattgttcatcaacatctttaacaaacaacttgagatccactgcttcttctccactcgtgattaaaattgttgtaagaattgtgttagaagtgatcataaatagacaaataaatatcctcacataaacactctctcatgtgtttacactcaacaaaaaaattttcacttgtgtttcactctttttggctttttccctcaaatagtctcaccactcttgcattttaccactcaacttctccttatgagctcttaagtaagaacctttggggttgactatacacgacaagacacaacaagggatcaatgataacttagtgaataagaacaaacaaaggacgagaaacaagggatttaagaaaagttttattttcaacttgtaaacaaatgtaaaa

SEQ ID NO: 35528 - DNA, 336 bp, Glycine max
  unsure (1)..(336): unsure at all n locations
gctttggtcatgaactnttcttgaaagagaaagtatcgaacatataaatttataaagatgaagtgaaatgaatcagaatgttctgtaaaaaaaaacgttattgaaatttatgccatggtcacatatttataatcatttgatgactcaagcntaaagttgtgactctttcgcaatttctttaaaactagtcaccttttaaaaaatgtgacccttttgaaaactagtcacttaaaaagttgtgacttttgagaaaatcttcagaaataagtcactctaagaattgtgactcgtggaaatatatttttcgaaatcagtcattgataatcgattaccatc

SEQ ID NO: 35529 - DNA, 414 bp, Glycine max
  unsure (1)..(414): unsure at all n locations
agcttnttttttcatcatgtagatatctttcatttggttttgatatcgagaatagaataattaataccggaataaatgcaatcaatagagttgtaaagagatttgttagttatgtcgtgaaattatgttaaccgtaactgagagttgtttctgtcaatcaccaattggtatagaaaaatatgtacgatggatcataaaacttccaataaaaaatattgatccattctatttagcccattaaactttaattttatatgtggatggttaggttggatatacatttggatgatttgggtagctaatggataaatgggcttagtttctaccttcacttaaatgtttgtactgaactttgcttagcatgtgatgcagctattataagttaaatcttttgcactcctgaaggagcagcag

SEQ ID NO: 35530 - DNA, 436 bp, Glycine max
  unsure (1)..(436): unsure at all n locations
ttgaactcctccaacccttgacctgacttcttggaaagccttttcacagcaaactcttggccatccttcagtcttccctgctaaccaaattgttagaaatatttcgagttatgaaaacaaacatctatagttggttttccatatcaccttgtacacaggtgcaaagccaccttcttccaatatgttactctcagtgaagttntcagtggctctttctatgatggggaaatcaaatgtggacaaatcaatgccttcttttctcagttttcgtttgaaatggttcctataaattattcttgctacctctgataggtttgaagataacaatagagaatcactatgacactcacaatgtgcacgtatgattcataaacctactatcatatattagatgttatcaatatccaagacaaaaattacctggctttctgagtat

SEQ ID NO: 35531 - DNA, 404 bp, Glycine max
  unsure (1)..(404): unsure at all n locations
agcttgtaggattatagttgtacttatcatatgtggtactaagtggcggacgggtgatggtgcacaacaagtttttcacatccacaaatcgcgcataaacccaccattcccttgtgcccacctccaactgagctcacgtactcccacgtaacccatatcctcgtttctctcaacaccgggtccccatcaatccttccaagcttccctaacatccaagtaattcaacattcaaacaacacaaactatcacaaccaataaaacagggcaaaggcagaaaactctgcccaaaacaccaaccaaaatcacagctttttctcacttaaagaccccagtaacctttcctttgttccaattcgttaaccgttggatcgactcgaaaattntactggaagtctctagtacat

SEQ ID NO: 35532 - DNA, 357 bp, Glycine max
  unsure (1)..(357): unsure at all n locations
gcttgataacctagccctatgcaaatggagctttaggtgatcatgatttccatgtattatggatttcaggttatatcaaatggatgtgaagagcacttttctcaatggatacattgaagaagagatatatgtagaccaacctctatgttttgtagacttcanacatctaatcatgtgtacaagctgaaaatggctcggtattgtttaaaacaagaacctacatcttggtttgaaagaatgagcagatttctaattaagaaatcatttgtaagaggtcaagttgacacaacatttgttatcaagagatcaaataatgagtggttgattgtgcatatttatgttgaagacataatcttt

SEQ ID NO: 35533 - DNA, 391 bp, Glycine max
  unsure (1)..(391): unsure at all n locations
agcttgcattttaaaatgtgctactttttttaacatcntaaaaaatggtagaaactatttaaaaaaactagtttaccaaacaaacaaatactatgttaggcaaaactagttgaaaagttagctaaaaacttgaaagctatcttattgaatcataagtattgataaaattatctactgaagtagttggaaaatataaaattaataaaaatatttttttaccttaaatagaaaatatttaaaggaaatctaataaatatttaaggacaaaaaaataaatataaaaagttagaaggtaacattttaataaaagtcacttccaataacgtttataaaaatggtagaaactattanaaaaaacttatttactacatagttgaataaacttttcaac

SEQ ID NO: 35534 - DNA, 415 bp, Glycine max
  unsure (1)..(415): unsure at all n locations
gaaatgatattctcaccttgaatttttatgcccattgcttagcatgaaggagtctaagagcttcagcttccctcggctttgaattaccttgaaagactaatgattntagctttataaattctccaacatggtttctaatacacagcccaacaccaaaacactaatggtcattaaaaattgtgacatcaatattgcatttgaggaatgattgacaaggcttctcctgatgttggaccatattattattagttggttgatgggcaattgattcgaacaaaccgccattcatggaggtattgttgagcttgagaaactaaaatttttggatgaacatcaacatcttcctagatcttatcatttatcctcctctaaatgcaccatagagtcaaagctaaagactcattctcataatcaa

SEQ ID NO: 35535 - DNA, 332 bp, Glycine max
agcttacaacgcaagttttgttgtgagcatcagtgagctgggggaatatgattcactcatgcagaatgtacgtcaattttgtttttattatacttactctgaactttgtggctattcccttttgtattttactgaactgctacatagtagtggaagaagtagaattactaggaaaatgctagcaatatggtgtttgataccctcttttaaacacactattattgattcaattttattggaaatcacaatatattgtccatcatacgttttttgttgaaatcagtccatgtcataattttatactttaaactcagttttaacttattttaaag

SEQ ID NO: 35536 - DNA, 478 bp, Glycine max
  unsure (1)..(478): unsure at all n locations
tgctgatgatgctngatgaaatgaataaaatatacttgtcatgacttggattgaactattcaagtctgcattataataagtatgtattggcaatataagaattgtcaatgcatntgatacctctcaacgagtctctcattntttatcacttctagtgaggcaattgcaactgcactggccagtggatgtccacctaacgtactgtgaacaatcactganaagaagaaagcttcaacattattagtcttagctttcatactctaataacattgaatcgtattgtacttaatgaaattatcggcttattacataaacaagatatgaatgcacaacacaaagcaaaatttccagagttcacaaatgatggaatcttttatataaaaaaattcaattgaaagtcttaacgaaaattcattaataaaaactgaggctttgaatagtcgtcgcctgagacttcatcaatggaatatttacatcc

SEQ ID NO: 35537 - DNA, 219 bp, Glycine max
agctttgcataatgagaatctgtccttcaaacaagctttgcaatttgacatctgaagtttgggagctctgggcagatgggtctgtgatcgaggcccgacccgaatcaaataaacatgataatgcagtaactaagaagtgatcttaggtcctttcccaacgagcaatgataaaccaaattgtcataatatacttgcaataacagtaacgattgggggggg

SEQ ID NO: 35538 - DNA, 348 bp, Glycine max
  unsure (1)..(348): unsure at all n locations
gtgatgaggtacaagccctaaaggcaaagcttgaaagatccctggtcgtcaaagagaagttcaagtccatagccatcaaagtctgaaaagagtatgatgaactaagggatgtcaatatggccaccgatgaagccttggaatgagaaaccaagaaggcccgaaaggaagaacacgaccaaagcaaagttttgaggggctttatagggcagcaatagtgagctcaagctctgaagaggtgaaaggaatcatcacgggtcaaaggcatgatcttgaaggacgagctaaaggttngccttatgtcgaaaagaaatttgtcccaacagttaagcgagactgaagggaatatgt

SEQ ID NO: 35539 - DNA, 287 bp, Glycine max
agcttcttcaaacttttccttaagctcttcaaacttttgtccttgggttgttccatgttgttgctccccctatctctaacaatctccccctttttggttttgatgatgccaaactttaactatgacattgagtacattttgagagtcttgagatggattggaaacatgaacttagtcttatcctgaaaaagacttaacacttaataaaaaattaattcatcatcatcatcatagatataaccttataaaatgtgatgctcaaaatgttgtgcaatatgtatgccatg

SEQ ID NO: 35540 - DNA, 406 bp, Glycine max
  unsure (1)..(406): unsure at all n locations
acttagtcagtttaagatctcttataactatcagaaggaggagaaatggtctcttaatgagctcatctcatactgtgtgcaagaagaggaaaggttgaaacaagaaaggactgaaagtgttcatgttgtaagtacctctaaagacaagggcaaaagaaaaaagaactaaggagtccatccaacacaaaagaaacaaaatcaaggtgacaactgtttcttttgcaataagcctgaacatgtaaagaagaaatgtacctaatatcatgcttggcgtgcaaagaaagagttgcctaagctaccagaagccaatngattctgaaagatggatatacgttggagatggtaagtcggtggaggtggaagatatanggcattntagaaatatattaaatatgtactcatttta

SEQ ID NO: 35541 - DNA, 412 bp, Glycine max
  unsure (1)..(412): unsure at all n locations
agcttccacaacatccaagcaattcaactttccatacatcatgaaatatcaaaaccaaggaaaatagggcagaggcagaaaactctgcccaacacaaaccaatatcacaacttttctcacttaaataccccagtaacattctcttcgttccaattcgttaaccattggatcgactcgaaaattttactggaagtctctagcacataagtctacattgtgaccgttgggatctgctagaaaacatccagaacccaatctgtactactctttccacaaccagcaaatacacaacattttatgcacaaagccaaaattctgctgcacatatttgacagcaaaattctgcataaagtgcagattttcgaaatcacatttgccctcantccaattttcccaaattgaatcctacaag

SEQ ID NO: 35542 - DNA, 374 bp, Glycine max
  unsure (1)..(374): unsure at all n locations
cccttaggcacttctctctctttcgaatatgctagganaaattgtttccgtgaagaanatccaagccgaggcgcttccaaaacgttttcgtaacggtttcgtgaggaatatctcgaccattcttcgacgttcttcattcgttcttcatcgttcttcgatcttcaacgggtaagtacctcgaaccaagcttttcgattcattctatgtacccgtggtggtccacattgtgtntcgtgtatttttattctcgtttcattactttctatacccgcttgtgacgtgctgaagccattttatctaagtcatttctcgctaaactaaaataagataatttccaccgtcgcctgagtgtattatcgtaactcggttaaatg

SEQ ID NO: 35543 - DNA, 403 bp, Glycine max
agctttaagtcaaaaagccttgtttaatggtctggtaatcgattaccgttccctgtaatcgattacattagaacacaaaggttgtaatcaattaccagaaggcttcaatagttacaggatactcctgtaattgattacaagggtatgtaatcgattacacattgtccctgtctataaatatcgtgttttgcacataaccctcttatgcaaaacctttccccacttgagtgacggcacaagctcttcctaaaacttcaaattcttgtatcttcctcatttcttcaccaaatcacttcaaacaaatcccaatcttcatcattttcaattctctttcaaacccactgatcaaaatctgttgtagcatcttcaaatggcacagtcatcaaagaagcacaaaggatct

SEQ ID NO: 35544 - DNA, 387 bp, Glycine max
agcttttcgattcattctatgtgcccgtagtggtccacattgggtttcgagcatttttattctcgttttgtttactttttataccccctgttgacgtgcttaagccattttacttaaatcatttctcgcttaacttacaaataaaataaatttccaccgaacgtttgaattgtattatccattaacttcggttaaaataaattccgaccgttcggtcgtgccgtaaccacgttggaaatcaaaaagaggtgaaaaataatataataatcaaaaagacatcttttagtaaaataaagcggaaaatcaagtggacgttttctttttgggatttctcattcttaatcgaatggattaataactaaagtgaaactaaaggctaaaatcaat

SEQ ID NO: 35545 - DNA, 435 bp, Glycine max
  unsure (1)..(435): unsure at all n locations
ctaagcttcctcgggccattcctgcgaaggcaaacattnggatagttatgttttaccaagaaatgctacccttaaaacagaaatggcatacaaccccctccaataaatacaaacatcaatgtaaatttagagcaagcttatgcgcatacttctttacgaacgttcacttgcacaagacattcttataactaagaaaaatgcacccatatacaatcaaggcaccttcgttacctagattatttacatgtacttccaaggtgtatttgttacctacatcacacacatttnctttgctaaattcacatacatgcatactctaagcactntggctatcaaaaattgcatacgtgcacatcttggtatttctaatacctatacatacacaaacttcatgatgaatcttgactatctacacaataaggtgctatatttcat

SEQ ID NO: 35546 - DNA, 325 bp, Glycine max
agcttctagccaaatggacttaccttgtattaatttccttgatagcccttttgagccttgtttccctttccttgttttgaagctcactacaagccttaagtgaaaaaccatgatatcaccatatccttaaagaattttggagctttggaattgttttgggaataagtgtggggggtttttgtttcattggacaatttgttttgatggctatgcgggatgatgtattttgggccatacttgatgtacattgtatattggttaaatgttggacatgctgaatgaaatgtcgtctctcataggctatataatataaaaaataaaattt

SEQ ID NO: 35547 - DNA, 432 bp, Glycine max
  unsure (1)..(432): unsure at all n locations
taagctaaagtatgcncgagtcattcatccctatgagatgttgttgtagtattggcgatcagaatngccattccttggattacggngttgaaccaagctcatgcttttacaaaaaggttcatcaagtcaagttgaaatatggaagtaaccgtcttgcaaaattggggcaaaagatgaatcgagtcacatcactgcttcgtttactgccaaacatatntaggattggttatgtccttgttacttccagtttcaccttgacaaagatgtcatggaccatgttgaaaatctaaattgattcaaccccatatcctgcgtaaaaattcgcaatacttcaactgtacatcattcgcatacatccatgcttttcattggttgcatngctcattgcattctttcgttgaaaaataaaataaaataaaatgaacttaatca

SEQ ID NO: 35548 - DNA, 389 bp, Glycine max
agcttcatacagattaccatccgtatgcttcttacagattggtaatttgtatgaagattatggattgacaatccatatgtttcttacggattggtaatctgtaagaagcatacggattgtcatttcgtaatcttcatacggattgtcattccgtaatcttcatacagattaccaatcagtatgcttattttaaatttattttttatttatataactttattttattgtttaattagaaaaaaatggaattgataattaaaaaacttttaaatagatatagctagaatattcatttgatagttgtagtgtgtatagtttgaaagtgatattaatgtgaaaagaatcgaacataattaattttttcgttttaattgatgtttatataaaaa

SEQ ID NO: 35549 - DNA, 434 bp, Glycine max
  unsure (1)..(434): unsure at all n locations
aagttacttaattatatgagttcttgatttatatcgcaactttctctccccctttggcatcaacaaaaagccaaagtgcgtatagagacataaaatcatacattcactcataatcatccaaacaaggaagacaataatgcatacataaactaagcaagtatgataataattcattcataaactataatataatgtcagataatttagagagtcatccaagataactaaattagaaagtaacatactaataagtgtttcaaaaacatagtcataagacatcaaaacataaaacaaatcatttgtctaagtcactagcatctagaagtcctaattctcttctaatggtgtagaaagaaatcttgngtagtggttttgtgaagatgtctaccagttggnttttggtatctacaaattctagaacacagtcacctttt

SEQ ID NO: 35550 - DNA, 374 bp, Glycine max
agcttctcaaggaagttttctcattaaagcttctcaaggaagctacctagtctataaatagaagcatgtgtaacacttgttataactttgatgaatgagagtcttgtgagacatacatcaaagttccacttctatacctcttttattccttcaatttcgtgctcccccctctctctttctctccctctttcttttcctccattgaagcatcctctccaggcttcttatccaaggctcatcttggtggtgaagctccttcttccatggcttattccttaatggatggcgcctcctctcacctattttcctttgtcttccgctgcatctccatggtggaaaatcaccattaaaggacccaattgaagctcaaagat

SEQ ID NO: 35551 - DNA, 409 bp, Glycine max
  unsure (1)..(409): unsure at all n locations
tcccgacccaacccgggcatagtcagtcagtgagaacctattatgtacctaaacaggcgagctcctggcagtcaatagataataggaacaaagaccacaaagcaaggaggcttgtgtggtggctggccacctgtgaatcttgtgtgatatatgggttagtaatcgattaccaagggtgggtaattgattacaagggctataaatgaagacaggagactaagatggtctctggtaatcgattaccacggtgtgtaattgattaccacgcttgaaaacgaagtcaggaagctatgagggcttctggtaatcgactaccaatgnggtgtaatctattaccaggcttataaatgaaggcagcaatgttgtggatgcctctggtaatcgattaccactctgtgtaatcgattac

SEQ ID NO: 35552 - DNA, 405 bp, Glycine max
agcttgttcaatacaaaattaattttctattctgcagctaaaaatgtgtatatttactttaacttgttttaaaaaataattatttattgtttagtcagagaatatacttacaaaagagttctaatttctaaagcatattaagaattcaagaatcctcaacaaactttatgtaacgcgatttgaacgaataatgtatttcacgagtttgtcctcaaatgattctcgtgtttttcagggagtggcgtgcatgatgcccctctcaatgtatagagaggtggtactaatgaataatgataccttagtcatgtgtgagaaggatccaaaatctcactataaccttagtcacgcatgatgttcctctcactgtagagagggctgataccaatgatgccttactcacatggg

SEQ ID NO: 35553 - DNA, 113 bp, Glycine max
aacacgagggtggggtgagtgtcatggcgaccacgacagtctgagcgtggctatgcaagactcatcgtctggggtcagggacaatgccagtgaccatgactgcctgagggtgt

SEQ ID NO: 35554 - DNA, 400 bp, Glycine max
  unsure (1)..(400): unsure at all n locations
agcttgagtttactagtattctgttcatatccactcaattattttatcactactaaaaacaagatatgttcctttcatagtggccaactgctttatgttttcacacatcagaaaaatgtatgttttctctcttgttctatattcttccccttctaccccaaacttttgaaccccgttgtcataccctaattttgcctgngagtacttgcggtcggtccttgaaccttgtttgctccctttgaaaccctcgaaacaagcatcgttgcgtaatccgtaaactttcacaacatttcggaaggaaaaacatgtgtcattgtataatctgtaaagttccacaacgtttcggaaagaaatcaataaaaaaacaccaaggnggtgtacttagtgaaaaggggggtgc

SEQ ID NO: 35555 - DNA, 490 bp, Glycine max
  unsure (1)..(490): unsure at all n locations
tccatcaagatgagtggagggagagggagagaaatagcatgatattatatgcctcaaatgaggtctgaacattgaagcataattctcaaatgatcaaagttgaaaataatacacacatatgatctctatttatagcctaagtgtcacacaaaattagagggaaatttgaatttctattcaaatnttacttgaattggaaattgaatttgtggagccaaaatttcactaattatgattattaaattttagctatgattcagcccacaaattcaagatcaagtccaagattctccactaagtgtgcttaggtgtcatgaggcatgtatagcatgaaggacatgcacaaagtgtgactatatgatgtggcaatggtgtgtagcaagcaaatgctcacctnctcctctaaaatataattggattgngcttcttccaattaaaataaattaattcccaacacacatcanatttcacttaatgatgcgaattataa

SEQ ID NO: 35556 - DNA, 366 bp, Glycine max
ttaccacaatccatcgaatatttcaaggcagcccctcctccccgcacagacccaaacataacccgagaagaagcccatacctccataacgaccacggggatgcaaaaacagctacactcccaacctcacgataatggtgaaaaccctgaataccttaaggggaaagactgagacgatgggactcacaggaaagaagcccaaatcaaggccttgcatccctagaggggccagacaaaacagcggacaatgcttaattgccacaagacagatcatcctaagaaagactgtccccaccagattcaaaagacatattaggacgtcaccgacgtagaacaaccctcgtaacgttatgagagtgcacatgcc

SEQ ID NO: 35557 - DNA, 399 bp, Glycine max
  unsure (1)..(399): unsure at all n locations
agctntgttcaaattctggtaagagctatgaaccgctgttttctctggaatgtagacttgttttaatttatttttctggtgagagacttgcctggaaaagcaatggtcttaataaagtgattaatatacttttccatgatcagtatgaaatccagatttgattctttgttaaccagtgacaggtgagagactttgagcgaaatggattgaacctcacagcaagcaaaagagaagagttgcagcgtctaagggatcagattgatgaattaagctttaaatatatccaaaatctcaatgatgatagcaggtttattctcttcaccaaggcagagttagctggattgcctccagagtttctcaaggcttagcatgattattcctcccttcaattaagagaat

SEQ ID NO: 35558 - DNA, 531 bp, Glycine max
  unsure (1)..(531): unsure at all n locations
aaaanacacncctgtcatgctcccantacgncactaagantctgngctttgcttgatataatatctatgacgaactacaaccctcagtatgagtatgtccatttattgctaccaagcgatgatcatctatctctccacgagagcatgtttaatgctgtgccacatcattaccctcagaattaaacctacaatcacaaagtacaagtctaacagactcttgcactcaatccaaattggtgttgttgatttnttcctggactttctgctctgtaaattactcctctctgtcactgaacctgaaggttgcatgtgcatcactgtcataagatggtgatggcttcttgcttcaagaactagacttttgtatcatacttgattgctctttaggttgaatacgtagcttgtaaattgattagggtgaatctcactgccctcttcactaagtggttggatgatgggtgcgacttatattcgttttagcacacctcaatgtactcacggtggttagtaattatggcgccgcgtacaacc

SEQ ID NO: 35559 - DNA, 408 bp, Glycine max
agcttgctttgaaaatttccctcaccctatgccttacaaactacaatggttgagtgagaattgggagttagttgtaaatagacaagttttgatatgcttctccattggaaaatatgttgatgagatattgtttgatgttgtccctatggaagctagccatcttttacttggaagaccttggcaatatgatagggatgttgtccataatggggtcacaaacaatttttcatttgtacataaagggcaaaaggttagccttacacctttgtctccaagtgaggttgtaaggatcaaataaaaatgatagtgaaaagagaacaagagagaaaagaagagaaaaacaaaattgatgaaaagagatagaaacatgaaataagcgaaaagaaagaaaataatggagataaagaa

SEQ ID NO: 35560 - DNA, 514 bp, Glycine max
  unsure (1)..(514): unsure at all n locations
tctcgtggcttcctctatctgcgaggaagaaaataaaaatgcataatttgtgtntgtgtattagttgtcgaagtggcaaagattttccacattcaaagtcttcgaagacttggtgaagacggaggaaatcgatcaacagtggaaagggacggctgtangtagtatcgaaatggaatccctaatgtaatttcacggaaataaagcaaaggcggttctctcaaaacccgtcgttgaattttttcttataattacaaaaataccaccctggtatattctaagaacggttttgataaccgccttataatntacattgtaaaaaattattctcagttntataattacaagtttgccaccgcaccattttttaatggcggtccaaataaccgacttaaaaagtgcgtcgtaaaaaagcactcttctagtagtgtctaaataaaggaaatanatcttttacaataagtttattttgaacttatcattaaacctacatttaatgttattttgattgtaaatt

SEQ ID NO: 35561 - DNA, 413 bp, Glycine max
  unsure (1)..(413): unsure at all n locations
agcttcccgtatccgtacttggaaggatctgattactgccttcctaaggcagtatcagtacaattctgatatggctcccgatcgcactcaactgcagaatatattcaagaaagagggtgaaacctttaaagaatatgtgcagcggtggagggatttggcggcacaagtagctcctcccatggttgagagagagatgatcaccatgatggtagacactctgccagtgttctactatgagaagctagtaggttacatgccgtccagctttgcggatctagtatttgccggggaaagaatcgaggtaggattgaaaagaggaaagtttgattatgtttcctccacaaatgcgaatgccaaaagaatcggngcaacaggggcaaaaaggaaggaaggagatgcccatgccgtctctt

SEQ ID NO: 35562 - DNA, 363 bp, Glycine max
  unsure (1)..(363): unsure at all n locations
gatgatgcactccatgagagggtggatcaaatggagaacagagatcataatgaagaataaagaaggagaagagggaatgatggtgttcctagacaaaactgaattgatggtattaaactcaacattcctccctttaaaggaaagaatgatccagaggcctacttggagtgggagatgaaaatagagcatgtnttctcatgcaacaactatgaggaggaccaaaatgtgaagcttgccgccacagagttttctgactatgctcatgtgtggtggaacaagctacaaaaagagagagcaagaaacgaagagccaattgttgatacatgggcggagatgaaaaggatcatgatgaagcggtatgtg

SEQ ID NO: 35563 - DNA, 403 bp, Glycine max
agcttgtctctacaaaagaaagaaacattatttttagtagattcattgcagataattctttgcagtgatcaagaataattatgaaccaatcaatcaacaagcataaattgaaaattggtcccacattctaaaaatggtcatctcagtgcttcagaaaaatttcccaaaagaaatagaaagtacaaaatcatacataaaagcttagaagcaaagtttgagggttttatcttacttttgatatcctgtgtccacacctttgctggggatgaaccaatttcttcatctccctgagttttattccaattggcactttctttcttcaaattttctggggatgaaccaatttcttcaagctcgctcaacaaatattcagcattgacgtaatggcattccctccgagtct

SEQ ID NO: 35564 - DNA, 294 bp, Glycine max
  unsure (1)..(294): unsure at all n locations
gtttggcaacaaaatattatcataaataaaaaataggaacatttaaaaatttatgaaggtgtatttaacatttgaaaaaaaaactctatgaataaaagaaagaaaatatttntgggtgaactataaaattccttagtggagtccaaggattaatttttaaggtagtgagatccttatttaagaaattgacatatctcgtcatatatatatgtatatattttttacatatgaagcttaatngaaccctaacaacatatataacgatgaagattattatcaatgtaacaccatgtt

SEQ ID NO: 35565 - DNA, 391 bp, Glycine max
agctgtgaggattttcaaacgacaatatctttttactcggatgtctgattaagtcccgtaatatatcgagacgctctaaattgaatgttgaagctctgaccaaattcaaacgacgataaatttttactcggatgtctgattgagtcctgttatatatcgagactctcgaaattaaatgttgaagctctaagcaaattcaaacgacaataactttttactcggatgtctgattgagccccgtaatacatcgagacgctcgaaatttattgttgaagctctcagcatattcaaacgacaataacattttactcggatgtctgattgagtcccgtattacatcgagacgctcaaaattgaatgttgatgctctcagcaaattcaaacgacaata

SEQ ID NO: 35566 - DNA, 348 bp, Glycine max
ttacagatagagggcccaataggtggctagaaccacagcgttgctagcagagatctatgtcattacagacaacaccattatcgtcacccaacgcatcattaagaagcttccaatagaggccaacattaggctcacaaattgcaagtccacccttcgaaagactccaccctacacccttgcaaatctggatgtcgatgtataggcatccatcggaggaagagacagtggagcacagtgtcagggttgagccaattgaagaggtggaaggaccgacttgatgaggaggaagtcattgtctgagtcctagatttggaaggagagagaaagaggcgaagcgagcaacttgtc

SEQ ID NO: 35567 - DNA, 350 bp, Glycine max
  unsure (1)..(350): unsure at all n locations
gctgcttcaattactaaagattgtagcgtgtgattcacacattacgaataaatcacaataaattctgtgtgttacctaggagtgggattntcttgaacaatattttcctttgatttgaccctgttattcacatctgattgtgtaattggctctcactttgctcttcaagacacaaaaaatgtttcacttctttcaagatggatggcgaatgactctctacatctcggaagtggatggcctaaaattctatctattcatcaaccatnacattgatagagtgtcagaactggcacatgacattctaaaaggtttgtctgtatagttctgtgattgtgataacttccaaatgc

SEQ ID NO: 35568 - DNA, 410 bp, Glycine max
agcttataagaacgaaattgcctaaatcattttcaaatatgcatgtgaattaggaagcatcaacaagaatcaagtcaaggctattgtgcaagcaatcaatggggcaaaacacaccaaaagattatgatgatggatggctcaaattctcacaaaggtaaacttatcactttcaaattgagctttcaaaactatcatgacatgtaaaggaaaaacaaggatttcaagtcacaaaatgtcaagagacttttattttcaaaacaattacacattacttgaacatatcctacaattcaaagacaaacatgcaaatttaacacaacaaaattaacaaatttaaactagaacccaacaaaattaaactaatttaacacaactaacaaaacaaaaaccaaagaacccccccccccccg

SEQ ID NO: 35569 - DNA, 351 bp, Glycine max
  unsure (1)..(351): unsure at all n locations
tgctggatggcttacgtntcaagaggatagtccatatgtaaggactaatccacttgctaatcatggaagctcggcggtgaacacggtggaagaatggaatcctcaagagttgaagtagataggggatgtgttgacttccaagcagttcatattggaggcattgcacgaggctagtgtaattaaccttggtggtaacaagggagacccatgcttgttgcatctcagggcgtcccacgatgtagaaagttgcccaatacctgaggagttactgcagggactaaagagtatgggtcaatttgaaatccacggtgccaaaaaggaggaagcggaggtattcatgcagtccagtga

SEQ ID NO: 35570 - DNA, 301 bp, Glycine max
aaacagaagaacactaccaaaagacctggaagaaacagcaatgtgacaccccccaaaacaattgctatctttgctccctcgctcattttcctgtatgatagaacactaggtctctctgagactgttagtggagacaatgtggtattaggggaaactgaagaacattgtttcaaaggtgctccacataacatcaaattacctctaaatgaggaggcatggaacttatggagacctgaaggaatagagccattcaagtagttgaagctcaaatccaaatccttaaggctaggaaggttaacat

SEQ ID NO: 35571 - DNA, 242 bp, Glycine max
ttaagaaattaaaaatattcttttattaaaacatgtcaaattattatattcatcagcttgtgatatcttcttatagactacacaataaatattgtgtatttttaatttcttaaacaatgccttagaatgataggtatctatactccatccttaaagaggaaaaatgtatgtttagactctgtgctgtgcggcaaatgtgtcggggacagccattgcaggtgttgcgccacccttgtccacaa

SEQ ID NO: 35572 - DNA, 401 bp, Glycine max
tgccagcttgcttgtggggcttcaatgtgtgttgtatctttgagcttcaatggggtcctttaatggtgattttccactatggagatgcaccggaagacaaaggaaaagaggtaagagaaggcgccattcattaaggaataagccatggaagaaggagcttcaccaccaagatgagccttggataagaagcttggagatgatgcttcaatggaggaaaagaaagacagaaggggcggggggagcacgaaattgaaggaataaaagagggagagaagtggaactttgaagtgtgtctcataagactttcattcatcaaagttacaacaagtgttacacatgcttctatttatagactaagtagctttcttgagaagctttcttgagaaaactttcttgagaag

SEQ ID NO: 35573 - DNA, 275 bp, Glycine max
caacggcggcatatctagcctgataaatgccaaaggaaatcgtgggaagtatgggttaggctataagccctcccaggcagatataaagagaagcatcgcgggaaagacgagcggtagtctaagctcgcgggtgagacaagaaagtgaaagaagcccaccctgccacataagtaggagctttataagcgtgggtctgggggacgaacgtcaagtggtcgcgatataccaagatgatgtttcgagtacattggatttggtacgatcatgccctcctg

SEQ ID NO: 35574 - DNA, 413 bp, Glycine max
agcttgaccaagcagtgaacatgtgaacaccaccaagaatagtggcacattccacactttgagcttgttgaagctcatgacaacaacaaacaatgaataataattattaataattagtcgaggtgtcaaaattgattaagttgatggagcaacccaaataatttattatatccatttcatggtaaatatattatttttgagatgtccatttgaggaggtgattataaagtgcagtgatcatgataaaggaattggattaaaatgtaagtgattgccattgttttgaaatgtatatacttctagttctaacaaataccttaagcctagattaagtggctcatcaagctgatagaaaacacgtgtgttatcatgttgagtctatgtttgtaaaaacaatttaagtctgtcttaac

SEQ ID NO: 35575 - DNA, 434 bp, Glycine max
  unsure (1)..(434): unsure at all n locations
ggaagaattgagtctcgtatcagtttaatcaattaatgatatctcgtnatcgattatgaaaaaagatgatggaactcaaataaccaagatggggagtgaattggttttcaaacaaaaatatacttttaaaaaatagagttgcagcagaaaacttttctatgtagatcatatcacaaaacaaataagaatcgaatgtaatcaatacttattcattccttccttacacatgattgttggaccagcagcctcaataacttaagagggatagtggtagaatgcagaagaagcaacaatcaacttaataatattctgtagacatgcaagacaaaattgattgcacaaaataataataatgggagagagaatcaacacagcttatctggtcgacaagttatgctatgtcatactaagcacctacttaaatttcttctttt

SEQ ID NO: 35576 - DNA, 262 bp, Glycine max
cgcttcacaactagctttctatgcgtcactatcttactcttgactgggagctcaaaataagtgtatagaactaaaaattcaacgatgtatttctctgttggagggaaagcacacccaactcagattggttcgctgttgatgtccaccccgacccatgcatgtgagtggaagctgtattagcagggtgatttgttgtgttttgtgaaaactgcgaatttcattttgtaattgtccgaatgggtacaaagctggctttattggc

SEQ ID NO: 35577 - DNA, 307 bp, Glycine max
tgaataatctgtcattatagaaaacaaataaggtacacgaaccttacaatttcaccattggtgtttcttctcccctttcaatcctacattggatctcatgactaccttgagacatcttacatgacattcgcaccatgtttcagaatataatgcttcagctgtattcaaatttcaaaagcatatacttgtggattacctctttgtaaacatcaattggaagaggcaatctaagatatgcaatccattctttagtaaattttagcttcatcttattggcaactatggctgctgacgatacctatatatg

SEQ ID NO: 35578 - DNA, 365 bp, Glycine max
tttttagcaaaaaagaggttgagcaagattttagagggtgaagtgattcaaactaggttgacaagtttttaaaggttaaggggaatatggtgtgcaccccccacggacccaaacccctggcacaaacaaaggtgaaaggcccttccttggatctaaaaactaaaagaagctcgcctatcctaaaattggggggcgagtctcaccaacaaaatccaatatctttcatgaccaatccaaactaaaataattaaagctcaaacaccaataaaaaaacatttccctttaatttttataaaacaaaaaaatcatatattcttaaagaaaatacacatgttagcaaaaagatccacatatataatctctca

SEQ ID NO: 35579 - DNA, 329 bp, Glycine max
  unsure (1)..(329): unsure at all n locations
tgatgctaaggcaaatgagtgcatataccttggttcacgattagatgaacttggattcagactatgggatcctataaataagaaannatgttgaagtagagatgtgatgttcttcaaagatcagacaatacatgatatccaacgatttgagaagccaaagcccatactgagaaacttaaggggagagactcttctaagagaggtagaactcactcagatgatagaaaccaatcatgtggagcaaccttctcagatagaacaacttgaccagatggagcagagttaaagggagcatccaactcatatgatggaagaatcaacaatggaga

SEQ ID NO: 35580 - DNA, 402 bp, Glycine max
agcttaggaacccaaactttttagcttcaatgcaagaaaacatactcatgactaggaacccaaaatttggttttagaattagaaaagcatgaaaatagggacttgcttgtaagaatttgggctgccccatgattggtactttgcacctaagtaacgtgggaaatgcttttcaatggtgtgtagatatatgtgtaaatataaggggcataaaattcctcgcgaagtatgaataattgttttcctaaatgaatgtatgatagcgtggaatgcctttttgaatgcaaatatgtgcaagatgtaattagctttccaatatgcatataaataaatatgagtgaaacaataaaaattcgtatggaagtgtgttttctttttcagaatgtatataggtgtatggcaatt

SEQ ID NO: 35581 - DNA, 398 bp, Glycine max
agcttagccctagaggggatggaccttttcaggttttggagaggatcaataacaatgcctataggttggacctcccagaagagtatggagtcagcaccacttttaacatttctgatttaattccttttgcaagtggagctgatattgaggagaaggaactaacagatttgaggtcaaatcctcttcaaggggaaggggatgatgcaatcctccctaggaagggaccagtcactagaaccatgagcaagatgctccaagaagattgggctagagcaactaaaaaaggccctagggttctcatgaacctcagggtagaattctgagcctatgggccaaggttgggtccaattatctttgtgcatattagactaggatgtcattatatttggtacttgtat

SEQ ID NO: 35582 - DNA, 380 bp, Glycine max
agcttctagtgtaagtaggggcactttctagttgtcatgatttgacaacacttaaaaccattatgaggaacctttacaatgggcattctaaagaaccataagaataaccattctaatgtttgctgagaatgattccacacttggatgaattcccttgatgaagttcggattgatatctcattttgatgtagtgcaacttcatcattcttaacactttttcacaaatcaaaagcattctgaagttgattacttcaaaaggatctagtggaagttcagttgttggtgtgttagtgttttgtccaaggttagactgagtagtattctttagtctttcattatgatgcttttcataaatattttcatggataacttcttcattc

SEQ ID NO: 35583 - DNA, 293 bp, Glycine max
  unsure (1)..(293): unsure at all n locations
ctaagctntcattactcctcatgcttctcaccatgtctaataaggtttgatttcttcgttctgccacaccattctgatctggagaaccaagcatagtgtattgtgcaacaatcccatgttcttgaagaaatgtcgcaaatgaacctggtgcttgtgcattctctgtgtatctacaatagtacttcccacctctatctgatctcacgatcttaatttggtttccacactgtttctcaacttcagcccttaaaactttaaaggcatctaaagcttctgatgtaatcctatcccac

SEQ ID NO: 35584 - DNA, 409 bp, Glycine max
gagctttaccgagtgtctgaaagcctcatctatggttgagaaccactccctatctccacacatgtgattgctagcaccggagtcaagaaaccaagtctcttcttgttgcaagttgtcagcttcgacaagagacatgaacagcatctcttgttcttcatgaatctcagcataggtagccctctccttccatcttgcgcattcctattggaagcgtcctaatttgtggcacttaaagcactccactgtggctttgattgagactgccttcctctgcctctgcctcgaccccgaccaaagcctctacctctgcctgtacctccattctgttcttcatgcgagaccttcaatgcttgctcataccttgtgtaccaccatgagaatacattctttgttcatgaaccaaaaggct

SEQ ID NO: 35585 - DNA, 323 bp, Glycine max
  unsure (1)..(323): unsure at all n locations
agagaatcatatatcacttctaatctcatgtgtgagagtggaagttatgatgaaatttgtatggagtatgagcatcaaattattgacattttactaaacgatggtgtcaatgaactagtggagctctcatatcgagaatnatgttatgttgatgggtagggagtataaacacataaattatattgctatattttctatgacgaaagnctataatatatgatattctatttctatcctaatatcgatataaaatatttatcaattttatcaataattaatctctgtcgataaacttaacgaatcaccttcgatgtaatatttct

SEQ ID NO: 35586 - DNA, 391 bp, Glycine max
agcttgtgccatagtttatagagacttgtctttcactcccaattgctctgtagaaattagaagcatattttcattctctttgacatcaaatgctgtataagagtcttccctgcccctgaatgatttggagtaagtctcaacatgtacagatttaaagatcaagagtcccaagcgattctcttcaatggcataataacaattttccaatttcatctgaagctctcttaattcttgttctttggtggccagtgtagacttgaaagtaacaatatctgcttccatctttgccacttgatcaccacattgagattctttagacttgagaattgaggcacacgttttatgcaccttttccaaccgtctaagcttggtgcggagctttgatgtcaat

SEQ ID NO: 35587 - DNA, 369 bp, Glycine max
  unsure (1)..(369): unsure at all n locations
tgacttgaaaggaacagtagaagtggatcaaatgcaagctataatgatggcactagagggtcgagcttctgcttggtttcaatagtgggaaaattacaacccaattacttcttgtgagaanattaaggtaacagtagtaaagagattccaacccttaatattcaaaaatccattatgaaatccgtctaggtctgaaacagagttagtagtagaattttttgaaagtnttgaaagatattcacgagcttttatgggaattgagcaagaacttttcatgtgcatnttcttgtactgattaaaggaggaatacgagtggaggtgacactgtatgagccacgttctctcataattgataaagaagtcgttgat

SEQ ID NO: 35588 - DNA, 400 bp, Glycine max
  unsure (1)..(400): unsure at all n locations
gctttgcaggcctgattctaaagatcatagagaaagaagactaatgtgaattaaggggtgcacctaattgggacactctcctacaaattgatgaagatactttgaggccaacttgaagaatcactttggaaggtccaattataagacaaaaatatccatggactgagttgatcaattttggtggactattaatattgggcggattacataataattaagcccaacatgttgataactgttatttataggtatattttgggattaaattatatatgaattggataattttctctcctatttattcctttattgggcaaataattattattttaacatcatttaaagtttttgtgcagaaaatactaaaagttgatgaacttatgatngctagtaagtaaag

SEQ ID NO: 35589 - DNA, 383 bp, Glycine max
  unsure (1)..(383): unsure at all n locations
agctgaattcgtggccttntatttaaagaaaaaacaataaaccactaaaacacatgctntgtttacttaattntataaacacaattntacatgtatcattagttaagagttatcaattttttcaattatcaaaatttataaattaaaataaaatatctaatatttaaatatgtttaatatttaatttacatgtatttatttttattagaaaatttcattgtaatataaattaatacattattaaatataaaaaaaattatttttattttattataatttaaaaaagttacataaaataatatatagattatctttctaaaaaatattatatgtaatgtatacatatcatgtaaacttaaaataatatctatataaaaaaatga

SEQ ID NO: 35590 - DNA, 524 bp, Glycine max
  unsure (1)..(524): unsure at all n locations
aactgacgctcactcgacgtagtantacaaatgattgatgaattagaattattattcnncctccagaaaagagaattgatcgtcattgcccnacanncnatacttaacgacgactgcggcatgcagctatatatagcggaaccttaattataaaccaaagtgagttaattccaaaaaattagagatttatccctttctaccttaagggagaggggataccacctcaaaatcttggagggatccagaaacaccctggctgtatcaaaggacattcacaacctttgcgggaagccctacctggaaagagagaatctttccttcctttcacctacacccttgttctgtcaaaccacaattccaaaaaaccccctctgcgccagaataaacggggggcctaacctccgaatttaacccccaataaaagggatctgggacccatgtgatttaaaaaaagacccctaccccgctgtggagaaccatctaggagccccctagctcaggtattccacatcataaatgggccg

SEQ ID NO: 35591 - DNA, 323 bp, Glycine max
tgaacaacggaagctctcgagaaaatcgatttggcttttattctcacacagatgtccgattctgggagataatatatcgagacgcacgatattgtacaacggaagctctcgagagatttgaatggtcataacatctcactcggatgtgcgatccggggacatatattatcgagacgctcgatattgaacaacccgagctctcgacaaattataatggtcgtaactttttacacgaatgttcgagttcgggacataacttatctagacgctcgaaattgaacacccgaagctctcgacaaattggaatggtcatacttctcaca

SEQ ID NO: 35592 - DNA, 415 bp, Glycine max
agcttgctgcctcatgaggaatgccttgcgcttagatagcatgaaaaaacccttcgataatatgtatgtatgtaaatatgcagcttgaaatgccttgcaaaatgttgaataaaaggccttgcaaaatatgaatatatatagcatgaacatgccttgcatagtatgaatatatatatagcatgaagtgccttacaaagtgttttggatgggtagcgtaaaagtgtttttcaaaatatttgtatttatgagtaggtagcaaaagaagccttccaaaaaaatgtgtatatatataggatgcagcatgaaaaggtttgtcaaaaaatgtgtacatggatgtgtgtcgtaaagtgcctttcaccaaatttttatgtgtgcaaatgcatatgtgtcataaaatagcacggccccaatatga

SEQ ID NO: 35593 - DNA, 399 bp, Glycine max
  unsure (1)..(399): unsure at all n locations
atcctgactcaccatanaccttgactccaggtgagaatgtcaatccttaccttcggaagcgaaaagaatagaagggaaatttccaatcaaagaaaaggaaagaaggaagatttccaatcaaagagaaagcaaaaaaagaaaagaaggaaaattcccaatcaaagagtgggagaaagcaaaaagaaaagaaagaaaattcccaatcaaagaatgggagaaagaaaaaagagaaaaggaggaaagaaagctcctgatcaaggatcgaaagaaaacagaagatatgtgcagagaagtctttggaccggacaatatctgaacaatacagaattgtcaccaaatgaacaaaaagggaaggaaaggaaaccacgacctaaaatggtcttcttcctttgataccaa

SEQ ID NO: 35594 - DNA, 341 bp, Glycine max
  unsure (1)..(341): unsure at all n locations
agcttaataaatctatatatggtttagatcacgcctcccatcagtggtaccttaagtttcatgggataatttcttcatttgggtttgatgaaaaccccatggatcaatgcatataccacacggtcaatgggagtaaaatatgttttcgtattttatatgtagatgatattttacttgcagccaatgatcggagtttgctacatgaagtgaaacaatttctctctaacaantttgacatgaaggatatgggtgatatcttatgtcatcgacattaagattcatagagatagaccttgaggtattttgggtctatcataggaagcctatattaacaaaattct

SEQ ID NO: 35595 - DNA, 497 bp, Glycine max
  unsure (1)..(497): unsure at all n locations
gtatttgtcatattgaagtatacgacatgtacatgaatctaaaagagtcaaacactatgtataaaacanaagaaatgtgtgaagtgcgtagcatacctaaaggtacatttccatcaatggaaggtgagaggaaaaaaaatggtgagaaattttttagcggtcacacaattgaaggtttatctttaaccgccacaattttaaagaaaattgtagaaaaaaagcagaacaaatagaatcttaattttcataaattagtcaatgcaacatatagatttggcttctctgttgctccttttcaagttatccttgngctgttattcanaacgacgtataacagttgtgttaatatttaattatgattcatatttaacaatcatgaacataatatccgttctaaggaacagtacaggaacaacagagtagacaagtcatggaacatataccctcgctttactctccttacttttaaatgaaacacctaacccatgccatcatat

SEQ ID NO: 35596 - DNA, 399 bp, Glycine max
agcttgtattaacataaaggtgtacaaatcattccctagacttttgagaggcttggattctcccacaacaatctgaattctgtctcaaatcacaagataaaatctcactatgaaccccttttcttatttatagccaacatgccttgtttctccaattatctcagtcctgaactagctaactaactaactatggtggttacctatcacatgatctcccctcatccattgttactaaccgtgatcaatgtgactaagagtagtttttttggaggagttgtttcataaggcaagtacccaactccggataaacactgcttatcatcatgaaacaaactggcagccgaggtggtaaatgttagaaaaataaaataaaaatgaaagaatataaatacgaagaag

SEQ ID NO: 35597 - DNA, 319 bp, Glycine max
taggggcagctacgcacaagtgctatgcccatgatcgatcaatcattatctcgcgttcggctaaagacgttaaagaggcgctccaaggaggcagcctactatctctaatttcgctcttcaaaaatcctgcttcttgcttgtttggtttcttgaattcacctaagtgtatatgcaactataggattttaggaaatatatacataacaaggaataatacaattttgcaaatgtttttgttcttttgcaaaaaacaaactattaattaactcgcctgtgcgagccgagcttgcctgggcaagcatgtctgatgagagtttta

SEQ ID NO: 35598 - DNA, 409 bp, Glycine max
agcttcattcctttttcactcatgtgtccaagtctttgatgccacaaggttaaattattgacagcctgaataactgctatcatatcctcatctgcaattatgtaaagagatcctcgcttctttccacgagccataacgagattgccttttgttaccttccaagttccatctccaaaagtggtgtaatgcccctcatcatccaactgccctatagatattagatttctctttaagacaggaatatgtctgacattgtgcaatgtccataggaatccattggaggtcttaatgtcaatatcacctcttccaacaatgtcaagagattttccatctgcaaggtaaactttcccaaatcttccagaagtatagttagacaataaatctttagagggagtggtgtgaaacgacc

SEQ ID NO: 35599 - DNA, 394 bp, Glycine max
  unsure (1)..(394): unsure at all n locations
gtttgatgatgtataatagcccaaaagaacccaaaagaatgatttcaagattgagtcaacaagttcaagatcaagattgatttcaagattcaagaaaagacatcaagaagaatcaagagaagatgaattcaagattcaagagaagaaatcatgaagcaacaagtcaagacttcacaagggaagtattgaaaaggattttttaaaaaccaaacatagcacaattttgtttacaaaaagagttttctcaaanttttctaagttaccaaagtatttactctctggtgatcgattaccagtgatagaatttgatttcaaaaagcttttaactggaattgtaacgttccaaatattttttaaatgatgtaatcgattacaatatattgggtatcgatta

SEQ ID NO: 35600 - DNA, 338 bp, Glycine max
agcttctaaactttgtacaagaatgaagctctgataccacttgttagacaagtggcctcagatatcttaagaagggggggggttgaattaagatattccatactctttcttctaattaaaaatctatcttactttttacttaagttatgaattcccttaatgacaatcttcttaaatattaattcatatgaaccaacttgaatatgaatataacgcaataataaataaaggagattaacggaagagaacatgcaaactcagttttatactgcttccgccacacccttgtgcctacgtccagtccccaagcaacccgcttgagagttccactaacttgt

SEQ ID NO: 35601 - DNA, 387 bp, Glycine max
gcttggagtttcaagtgccaattcgtcttcttcttttgtccagtcttcttctggcttcaattcattagtgggctttccttctgtgtccagcatcttgtgatgttcccagcctttgatgatagctttccaggttctgctatccactgatttgaggaaggccaccatccttgctttccagtattcatagttggttccatccagaattggtggtctgttcactggtcctccttctttctccatgttcatcagaatttatctccctagatctcactcactgagttcgagtgcccgctctgataccaatagaaattctgataccaatgccagatgtcgtacaggatgtcacgacatcacgcttcagaacatgcatattatgtttgagagtat

SEQ ID NO: 35602 - DNA, 409 bp, Glycine max
agcttcacctctactgagtgtcatggtgggtaacggccaacatttaaactgtgaccaactttgtgaaggtgttccggtgctaattcatgacacgttattcatggtagacttacacctccttcctctgagcgatgcaaatgtggtgttaagagtccagtggctcaaggctttatgccccattctcactgattataacaccttctccatgaaatttttcatgatggctagctagttgagctaaagcgtgaagacgcatctaccttgcaccttctctaccatcctcagctttgttgttttcttcgaaaggatgtcaccataaagcttccttcaaacccaaactcttcaccttttccctccgaaatccaacctctcctcacaaaatttaactccttgtttcattcacctcaat

SEQ ID NO: 35603 - DNA, 255 bp, Glycine max
  unsure (1)..(255): unsure at all n locations
gtggtacctggagatatgtcgcgggggtcaggagaccttggtgacgtcatgtggngtgctattgcccaaaaccaagcttgaccaatcccgacccaaccccggcatagtctgtcagtgagaacctgtgatgtacctaaacaggcgaacttctggctgtcaacagattaaatgaacaaagacctcatagcatgggggcttgtggtggctggccagctgtgaatattgtgtgatatgtggattatggcctctggtaat

SEQ ID NO: 35604 - DNA, 412 bp, Glycine max
agctttagggcatatggaaaacttatttattgtcttgtttggttgtaagaaaggaaagggaagaagtgaaattgaattagagagagaaaataaaagtaggataaatatacaagaatataatgaagtaacggaaaatacttaaataaaattttttggtaaaaaaaaaaggaagagaaattaatattaaagaaatgacttatttattaggattagtatttactatttgctattagtattgttttaaataatcttagtatatatagaattcattttatgtacaagacatttgtttgttccaatacctacacaatagttataccctatcatattaaatttattcattgtcagcctaccattagatgtagactaccatattaaagttataagttcttaaatataacttactaatact

SEQ ID NO: 35605 - DNA, 162 bp, Glycine max
catcgccacaactgcgacaataagacccaaatagaaaaaagtatcatagccaacagagacttgagatagactagtaatcaacataacaggaatagtatattataagcacttaagaagaaaggcggagaagtcctggaaacagacataaaatcaaatcttttc

SEQ ID NO: 35606 - DNA, 414 bp, Glycine max
  unsure (1)..(414): unsure at all n locations
agcttgaaaaccgaaaaagccactactatggatgatgtttctttggcttccctccaagaggtaaaatatgatatggtgtttctttccttcacccttgagagaaaaaaaaattgtctattgcttgagtgtctttgattctcagtggtatacactctgcatttggtattaatttttatatgagaatacagattgcgactggcttttgatgaattatttcatatttgtgctccgtattcctgatatttgaaataggaactaatgatagcaaatttctatgaacaggcaatgttgcacttttggctctgatgaagtaactacagaatgaccatcttagacgaccaatcaacccacttactgtattacatgatgtataatngtacatacggntngtatacacaggatttttttatgata

SEQ ID NO: 35607 - DNA, 311 bp, Glycine max
cgatattactgcgtcagctccggcgtccacctctgaatggaagagaaaggagttcctccattaccaagttcctgttgtttgatattataagccgcgtcgtcgtccatatcgtggaggatgaccatgtcttctccccagtatgcaggtttcacattcgctccgaacatcccctgcatctcctcctccaccctttcaaacattccaatgttttttaaacgacccacccagactttgtcaagcccatttgatttctcctttctcgtttgaataagtatggactctacaacgttccccaacgtgatcccctgtat

SEQ ID NO: 35608 - DNA, 405 bp, Glycine max
  unsure (1)..(405): unsure at all n locations
agcttgtgcaaatcaaatcactcctacatctcatctctagcatgcattttctttctttacccactcctcacgtttggttttttagggaaaacactataactaaacgcgccgcaagggatccctatcgcaccagatccaaatctagaacgatgggtgatcaagaggagacacaggaacagatgaaagccgacatgtcggctctgaaagaacaaatggcctccatgatggaggccatgttaggtatgaagcagctcatagagaagaacgcggccaccgccgccgctgtcagttcggctgccgaagcagacccgactcccttggcaactacgcaccatcctccctcanacatagtaggacggngaagggacgcactgngacacgatggcagccctcacctgggataca

SEQ ID NO: 35609 - DNA, 377 bp, Glycine max
  unsure (1)..(377): unsure at all n locations
acaaggcagccgtatgaactagttccgctccggagtatgacagtcaccgctttatgagcgctgtacaccagcagcgcttcgaggccatcaagggatggtcgtttctccgggagcgacgcgtccagctcanggacgacgagtatactgatttccaggaggaaatagggcgccggcggtgggcaccactggttactcccatggccaagtttgatccagaaatagtccttgagttntatgccaatgcttggccaacagaggagggcgtgcgtgacatgagatcctgtgtaaggggtcagtggatcccgtttgatgccgacgctatcggccaactcctangatattcgttggtgttggaagagggccaggaatgtgagtat

SEQ ID NO: 35610 - DNA, 405 bp, Glycine max
agcttaaaaaaaacaaaactctgacttagtagtgcgtatggtatctttacacacaattaattcagagaaatgaagcagctccaagaccttaccactagaatagaaataatcaggcagctggaaagcctttgcaagccaatccagaacaatcgtctcaagttcagttgcagcaggagaagttatccagctgaaacccacgatgttaagacccgcactgagcatctctcctagaaacccagcaatgctactgttggaaggaaaatacgcaaaataatttgggctttgccagtgcgtcacccctggcagtattttttcctgcacatctacaatatggcaaacactatcaagctagcattgctcaaacaactctacaaactacaagataacgaaactgcaactactaca

SEQ ID NO: 35611 - DNA, 387 bp, Glycine max
  unsure (1)..(387): unsure at all n locations
ngtgataaggacaactacatggaccaaataaatagttaaccttaatgaaacaaaagatgtgatgtannatttgttgttagatattcacgaacgaatttgattacttatagtcaaatattntagtctttgtcatctactcatcataaatactaaatggcatgtgcttattctttctagcatctcttttaaggaaaatatggagattggtgagaaccaaagaggatgatgagaaaaatgctntatctctaccaaggttttcacataaggtcgtgatcatcttatttgtagttggcatcttataatngcttggccatccactatgccgatntcaacccaaaaattctccaacaatagcaattgaatacttgtgtggtgtgcctaaagtct

SEQ ID NO: 35612 - DNA, 176 bp, Glycine max
  unsure (1)..(176): unsure at all n locations
aaagttagtcatattcaccgactaacatactccttcaaatttatagnnttggttgttctcaagcaaaaagagaacagttcacttgtcctcaagtgacaacaacatgcagtgactatgtacaaaggtgtatgctacaaaatgtactgattgcatgattagagatagagtaaatgccc

SEQ ID NO: 35613 - DNA, 406 bp, Glycine max
agctttaaacacaaacactatgttatgatcaaaaagaagatatccaatatagattgggtttacagacaaattgtcccagagaagaatacacctgtccttgtaatattccacactaaccgctactcagtgtataccaccgacgatagaaaacattaaacaccccatttgttacatcacttgtttaaaatttaaaaacgcaacagaacggtaagcgtgaaatggaaactgatgaaactcggaacaagttcgggaacaaaataaagatataaacaaacaattgcttactaataaaggtgatatgtacatatagcatggtatctaatccttgttactaccgctcccaaaggtttagcctaagaattctttcatatgctaactaaacaaacaaaaggggaagactcggaca

SEQ ID NO: 35614 - DNA, 368 bp, Glycine max
  unsure (1)..(368): unsure at all n locations
gctgagctantgcatgctcttacgtggataaaggagcataatcttcagaacattgatgttgagaagaatgcaaaagtaatagtggagactttatacaataattcctctggcaattctgatttacaagttttaatcaataaatttaaaaggattcttcttatgtttccaaacttattggtgaattatgttctaaaactagttaatcatgtggcccgcacattatttagggtgtcaagattgtatgctagcatgtnttcaatcaacctcctaaatatattttttcttttattatgaatgaaataccataattgtcttccttaanaaaatcgagtgtaatcatcaaaaagtgtgataaaataaaaataaaa

SEQ ID NO: 35615 - DNA, 415 bp, Glycine max
agcttagaaaagatctaacaaactcagtttaatgttcatgagaatgattgttgcaaacagtattaagacaactctccctacagctgaaagtgctaaaggatttatgggattagtcgaagagcgctcttaaacaactgataagtcttttgctggaacattaatgagtacactcatcaccatgaagtttgatggttcacgtactatgtatgatgtgacaccctctacccctcacatatatactaataaggaataaacaaattcaaatattaattaaaagtatttttaaaacatttttttttctttcaaaggggaaaaaggttcacattcattgtcttttacatcatattcaaacttggccaaataaataataaagtattctcgactcaacaaggtcgcctaagcttcatacaattaa

SEQ ID NO: 35616 - DNA, 272 bp, Glycine max
  unsure (1)..(272): unsure at all n locations
atggtgaagttgaagctcgttgggtttgntatagtggatcggaaaggggagaacgagagtnttataagaggaaagactgtgtcacgtgggttactcagaanaaaggaaaggtttctaattcaaagggtaactaaaattgaaagaaacattttaaaaacttaaaataaaacttcttaaatataatgtattaaaacaacataacatgaaatatgatggattaaaagcaacgttaagccaataatcttccatactaatacatactttcnttttgc

SEQ ID NO: 35617 - DNA, 395 bp, Glycine max
agcttggatttccttttagtagggaatctatccttcctaagatggagccaaacccagtcaccctcattaagaactagctcttttcttcctctattgcctttagttgaatacacctttgtttggttctctatttggttcttaaccctctcatgcaacttctttacaaactctgacctagattccccttctttatgtatataagaagtgtccagtgggaggggaatgaggtctaatggtgttaggggattaaacccatagacaacctctaaaggggactgcttcgtggttctatgaaccccctgttgtaggaaaattctacatgagaaagatactcatcccaagacttatggttgcctttcagaagagcccttaaaagggtgcataaagacctattc

SEQ ID NO: 35618 - DNA, 358 bp, Glycine max
  unsure (1)..(358): unsure at all n locations
ggcaagaattggcccactagaggccaatcatgagtgtcaagctgttcattaagcaagtggcctggcccggagctcgaccttttttngttagtgataatggaagctctacagcccaggcacctcagcagaaaaagccagaagacaatcaatcatctgaagccactgttcctggagctttngatgttgcagaaggtagatcacaaatgagatttgaggaggctgcttatcctgaaccagtaccagtaccagctgatccaccatctctagtggtggatccatcttctcccgcgccagaagcagctctcccatctacacctattattatatccgatgaccctacagtgcgaacacctgaatg

SEQ ID NO: 35619 - DNA, 429 bp, Glycine max
  unsure (1)..(429): unsure at all n locations
gctggcgtaatctcttgctgaccttacacttgaaaatcaatgatttccgttntggactcaagaagacccatgagtttagcataacaccatttaagtatgaaaacgtgactgatattcctgaagctatagactggagggaaaaaggagctgttactccaatcaaagaccaaggtcaatgtggtaagatcaagaagatcatataagtgcttttttgtgctccatcacattatcattactggctctcctcggattaattatgtgtgtcttttgaaatatttctgaatctcgaattatttaattcggcaccttaatcattttatctattaatctatcaacctacaatatattaattactcctctctattatgtatttactgccacaatacatttatggaataaacatattttagtgatacatataagattcat

SEQ ID NO: 35620 - DNA, 409 bp, Glycine max
agcttgtcaacccctttatgcaatgaaaaacaagttgatgaatccaagcaatcacaagcaagatggtcttgactaaatgcaaaagtaaacagaaaaacaattaaattaaaaaaaactaaaggaaaagttgggttgcctcccagtaagtgcttctttaatgtcattagcttgacaagtcaaatgcctttaaggtggcatgaaggtcacatagaacacatcttccttgcagtttcgccttttagctagaaattccatgaactttatgtattttggaagcacattccaattcattgcaatagaggtgtcggtgatcaaggaaggaatgacacttaaggttttcttatgttctccctacctttcttccttgacaatcagttgacgaggaaaggtattgatttggagaatactt

SEQ ID NO: 35621 - DNA, 430 bp, Glycine max
  unsure (1)..(430): unsure at all n locations
gtctaacagttgtgtgagaccaagaccagcatgttagccattatcaacaagtaccaagaagagttaaatctagcaacggcccacgagcacaaagtggcggacgagtatgcccgagtgtacgcgaaaaaggaggctagaggaagggtaattgactccttacatcaagaggcaacaatatggatggacagatttgctcttactttaaacgggagtcaagaacttccccgattgttggccaaggccaaagcaatggcggacacctactccgcccccgaggagatccacgaacttctcagctattgtcagcatatgatagacttaatggcccatataattaggaactgctaggaagnttgtattgtcactcagatcttgactagttataactttctgaataaaatgaagttatcccacgtgtttactccaaaaa

SEQ ID NO: 35622 - DNA, 407 bp, Glycine max
agctttgtgtaatcgattacactgattttttaattgattaccagtgatagtttctgaacaaatcaaaagatgtaactcttcaaatagtttttgactttttcaaattggttttaagtttttctaaaagtgataactcttctaatggttctcttgaccagacatgaagagtctataaaagcaaggctttgttttgcatttcacaactattaaatcaatcaatctatctatcaatcttttccaattcattctttacacaaacaattttttccacattgatttctaagtctctttgaacttcttcttcttccttgtgccaaaaagctttccaaagttttatggttttctaaaccttgaaaacttttgctattcattcttttcattctcttctacctttgccaaaaagaatt

SEQ ID NO: 35623 - DNA, 462 bp, Glycine max
  unsure (1)..(462): unsure at all n locations
gctttcgattcattctatgtacccgtggtggtccacattgtgttttgtgtatttctattctcgtttcatttactttntataccccctcttgacgtgcttaagccattttacttaagtcatttctcgcttaacttaaaaataaaataaatttccaccgaacgtctgaattgtattatccgttaactttggttaaaatgaattccgaccattcggtcgtgccgtaaccacgttggaaatcaaaaagagataaaataataatataaataacaaaaaatataccttttagtaaaataaagcggaaaatcaattggacatcttctctttgggatctctcattcttaatngaattgactaataactaatgtgaaactaaagctaaaatcaactcgcctagtcaagctcgtccacaanaatagggttttgaagtttgtcattccatttctcactaagtaaaatggatca

SEQ ID NO: 35624 - DNA, 401 bp, Glycine max
agcttctcccctattttgctatgaagagggggagaagtgaataagaaacgggttcagccccttaggcgcttctctctgtctcgaaatatgcgaggagggacagatccgtgaagaaaatccaagccgaggcgcttgcgcttcgtttgcgtgagtaattgcgcgactattctctgccgttattcaagattgatgggtcgatattcgttctcttcagtcttctacgggtgagaacctcaaaccaagctctgcaattcattctatgtacccgaggagggccgaatttcgattcatggatcattgattctcgggttcatttactttttatacccccttttgacgtgcttaagccatttatctaagtgatttctcgcttaatctattaataaaataaattatcaccg

SEQ ID NO: 35625 - DNA, 308 bp, Glycine max
  unsure (1)..(308): unsure at all n locations
tatgttctaagagagcattcatccatagatcaactctntccataattatttctgatgtgccatcattntcttctattntctaaaccctttttgcaccattntaattattgattggtcttaattgtcaattaattaagcagttgtattatttgggctcatttaactaatttgatgtttttaatctaatttcacgaattaatgaaacattgggcttaatccggattttagttgtggacttgaagagggcaaataaagcagcgcttaccttagttaatttctaattaggaaattttcgcaatttattttat

SEQ ID NO: 35626 - DNA, 407 bp, Glycine max
agcttacttttgtgcaactgtttgtgcattataccaccaaagatcaaattctttatattgaatcatcccataaatagtcatttgggccttcctaaggtgattggttagacagagcggtctttttaaaattttttttttttttatctccaatgtactgaaaaaaataaaagcacttgtaatctaatgaggggtgcaacaattcaaattctaatgaggggttttaaattttgcagtaatacagtgttagccttttttgtcctgtgtgtgggtacattacccttataattttttattgatttggtaggaggattttttgtactttgtttctaaaagctctactgaattgtgtgtgcctcactgcctcatgattgcaggattataggaatattgaacgagtaattcggatt

SEQ ID NO: 35627 - DNA, 414 bp, Glycine max
gtcctcaaatccctcttggtggactagacttagaccaaacatcattattgtaacaacatatttaaaaccaaaacttaatccgaagatccctcatttaagactaagtttcaatcctacttcattcaagttctaaggcaacggtacattttccaatgctaaagtcacctaactatgcacacaagtggttgatcagaccaagagcatacagaatttaagcactaaaagaagcattgaacacaagaaacacaatcaattagatattaaagtaattacatcaactgttctttacaaatccccaacaagggtgtttagccagccattacagaaaaaccctaacaataatgagattactaaacctaggtatctcttcagaagctgctcctcttactgcctgtagagctctattcccaaaat

SEQ ID NO: 35628 - DNA, 418 bp, Glycine max
agcttccttttaatgcgtcacgtctaaaaccaatttcgatggtagtacgagcctttgacggtagtcggcgggaggtgataggggaaatcgacatccccattcagataggcccccacacttgcaatgtggtttttcaagtgatggacataaatctcgcctacaactgccttttggggagacccaggattcacgcgctaggagtggtcccttcgacgcttcaccaaaaattgaaattcgcggttggtggactcttggtgatagtgtcaagcgaagaagatatgttggtgagctgcccctcctccgcaccatatgtagaagcagcggaggaatcattggaaacaactttccaatccttcgaggtggtgagttgtgcctctgtggaaacgagtccgttgctaccttgccctctattgcggac

SEQ ID NO: 35629 - DNA, 332 bp, Glycine max
  unsure (1)..(332): unsure at all n locations
cgcctctacagggactccagtttacttaattcattcggataaaggttatcattntaatatttatgtacaaatttaatcgaatgtcattggttttggttcaattaacctaagataacttaaagtaaaagaatcgtaaaaataacgaatttacaaaaataacggaaattatgggaatatcgaaaataacagaattcagtgcgtcggaaatacgtaaattatggaaacaataatcataactttaattaattaaaaaaaataggaatggatttcattggttatacccttagtatgctaataagatngacatatataaatcattttctaacattact

SEQ ID NO: 35630 - DNA, 140 bp, Glycine max
ttgatgatatctaggctgaacgaaaatttatatttgaatcgcaccttgcaatttgcttttcgaaagagattgccattgttatggcatgcccccttttatattgttaaattcgtcttataattgttgtggcagcgttttcg

SEQ ID NO: 35631 - DNA, 405 bp, Glycine max
  unsure (1)..(405): unsure at all n locations
agctataaacatatctctgatcatacaattgattaatactttgnctacaaagacaatctatttttataatttttatgcttcaaaagaaattaatctttcattattaattaaaggatattttgataataaaaaaattatgttaactaattcaagggtatttaatatgtatgcatctaaaaagattcaaaatgaataagagataaaagtattatatatcatgacattaaaaaaaaagaataataatttgatagtagtagtattttattaagaatgcaaatggggggatggaagagaaagaggagttgctgtatttagaaatgggggatagggagatgcatgaactgaagtgacagagacagagacaagatagaaatagtaaagggctccaaaaaagagattcttttg

SEQ ID NO: 35632 - DNA, 391 bp, Glycine max
  unsure (1)..(391): unsure at all n locations
ctcagctaatcatagattcatatttcatggctactagtaatttctattactggtcacaattatctcatttcattccctacttggctatagtgatagatcacgcgacaaatattgngaggctaattntgagccacgttntcttcttctgtcttgatgccaaaaagtcaggactcaaaactcgtatgagtcgccacgttaatcgccaataaagtccatgcaagtatcatagataccaatcctatcataataataatactattaatcccgtgaaacgacatggctctgtcgtcgttgcatgtgctcgcaaccaccgtttttatttcattcctttggttntgcccggtgcggtgggcgccgagatttcccatattcccgttaccgtacccacaat

SEQ ID NO: 35633 - DNA, 380 bp, Glycine max
agcttgcaaacaagctgcttgttgtaatcttcaaagcccggtggttgagtcatgaagacttcctcctgaaggatgccattgaggaaggcattattcacatcaagctgctggagtttccacttatgagtaatagcaagagtcagaagaattctgacagtaacaagcttgattataggtgagaaggtctcattgtaatcatacccaagtctttgatgaaagcctttgacaacaaacctgactttatatttgttaactggacgatcagggttttcattgaccctgaagacccatttgcaaccaatgggagacctgtatggaggtaaaaagtggcatgaagcttttcccaaagatgccatgtcgttttgtcttctactatatga

SEQ ID NO: 35634 - DNA, 420 bp, Glycine max
  unsure (1)..(420): unsure at all n locations
gtgctnttctcattcttagaagcttagtctcgatgatgtctggcatactctntgagggggatcatagacttctacagcaagagcttcctaatcaattgcatcctcaacatcaaaatccacctcttcaatgataggttacacatgatgagtaaagataaatctggagtgagttagaccacaacaaaatagatgtggtggtcaggcacaatgtcaaaatccttcttccacccgccatcactttgacatgcaaaacctatctttgtcactgacataatctcttaacccaattttggacatcactatgttgaagagaaaactatatatgagtctgcacatacaagtgaggtttgtagtcctcaagaaattgacattnntcttcttatttggtggatctatatgggtttaccatanaacatgata

SEQ ID NO: 35635 - DNA, 405 bp, Glycine max
  unsure (1)..(405): unsure at all n locations
agcttataaattagctttggaagctgttttttgtacagnacacacacgcacacacacatggtagcaaggactccattgcacttgaagaagttaagtccaatctctattctagagagctttgactaaaggcatttgggaatggtgatgaagcctttatgtttggattattggtgacaaattctgctaaaggatagaagaataagaaaggaaaaggtggcaagaagaggaaaattgatcctaggacatctgcaattacaacaaagaaccgggtcattggaagcgagactatctaaagaaagcaaagcaagattctattgctgctcttgtttagaatgactcctcatcgggaagtgatttagttttggttggtggtgaacaagtataacaacactctgaacaatgggt

SEQ ID NO: 35636 - DNA, 466 bp, Glycine max
  unsure (1)..(466): unsure at all n locations
cattctatgcacncttaggggtccattcttgctttgtatgttttcatcttcattcttctactttcggtattcttttccttcattttaagcgagttacaattgatcgtttaagtcgtaacctcacttaattaatgtttaaatgaatttcaaccgatcgtttatgttgtaatctcatttaatcgcctttataataaaattcaaccaatcgttcatgccgtaagctcggttaaatcacaaaataataaaataagtgtcaaccggacattntactctgaaagtccttcttaatgaggtgagaaataaccaagtgaaactaaggctaaaatcaactcacaaatcaagcatttgcccacaaaaaggtcatttgattaccgtttaaggtccaacaccttaacggtgccgttttacttttatcagtgataatgaatcgcttanaagtataaaatcaacccctcgcataactttc

SEQ ID NO: 35637 - DNA, 402 bp, Glycine max
agcttcttatccaaggctcatcttggtggtgaagctccttcttccatggcttattccctagtagatggcgcctcctctcacctcttctcctttgtcttccgctgcatctccatggtggaaaatcaccattaaaggacctcattgaagctcaaagatctaacctccatagaagccccacaagcaagcttccatcacagttggaagcaatagagggaatgcactagctatgacggtaggacgagagtgagatagagtagtgtgggcatgacagagcttgcaacagactttagaggtcacggcatactgaagggcgagactgagtaaattaaaggcacatatgtattcgatcaaagagtgaaaagtgaaaattaaagtaattaacaatctaatgacttcaaagat

SEQ ID NO: 35638 - DNA, 450 bp, Glycine max
  unsure (1)..(450): unsure at all n locations
atataaacattatatcgagtgtatactcactatcacactacattcagaatatagtttaactctttttagtggacaagtttagaatgatgtatggtttttggactctattatatgggttttatctctcagntattttcttttcttttctttgaagcttaggtatgaaaaaggttgtaaaagtttggattaatttttttggcagccccatgacaaanaattgtagagcaagatatgaaggcagagtaattagagaaactagcaaaactagaagaatggtgtaagcaagttcttattattactttcttgataagggtatgcattttgccagtatttntaagtacatatctttnttatactaaagaaaaaattaaaactgtaaattattgatttctttatattcgaaagtgtgctaacatggtaattttcttgacttgttttacatggatgtta

SEQ ID NO: 35639 - DNA, 390 bp, Glycine max
agctttatttaatgattgttattttttggctatagataatatatttttggaggcaaataatgaagggctactttaatgcatcttcacatgccattggatttccataaattccaaaatcatgtatgcagagactagagctttacatcagtgggtaaactcacctttaaatctgctacatgttgcttagtcaggcggtggaagaaaacctccataagtaagtcagttgtttgccttcaaaaggtggagggggaacaaaaaccattttatcaagcaaaaaattatcccttacctttcgagacatgacaagaaaatacgtgaggatcactttcaggctctctaagaatcttttgattaggatattcttattttcctcctaaaaaatcccaaact

SEQ ID NO: 35640 - DNA, 316 bp, Glycine max
  unsure (1)..(316): unsure at all n locations
tatgacaccaaatagaacgctaattgtactaaatcatgtnttcgtgcncncatacaaatactactaataccaagcagggccactagtaatcagactaaaggacaacaaagttggaccattataatcaagtgcatagcatttgaatttcttctgcttactaaagcaagtatgaatatgaaatttgcatctcaacattgtaacacgttcttaatggaggatgaattcctgagattgaggctcactcaggttaaaacatgttaaaaaaattagaccaaatgttacaccagaaatagaatctaagatacatgagagcact

SEQ ID NO: 35641 - DNA, 409 bp, Glycine max
agctttgtgtaatcgattacactgatttggtaatcgattaccagtgatagtttctgaacaaatcaaaagatgtaactcttcaaatagtttttgactttttcaaattggttttaagtttttctaaaagtgataactcttctaatggttctcttgaccagacatgaagagtctataaaagcaaggctttgttttgcatttcacaactattaaatcaatcaatctatctatcaatcttttccaattcattctttacacaaacaattttttccacattgatttctaagtctctttgaacttcttcttcttccttgtgccaaaaagctttccaaagttttatggttttctaaaccttgaaaacttttgctattcattcttttcattctcttctacctttgccaaaaagaattcg

SEQ ID NO: 35642 - DNA, 443 bp, Glycine max
  unsure (1)..(443): unsure at all n locations
tcgattcattctatgtacccgtggtggtccacattgtgttttgtgtatttctattctcgtttcatttactttttatacccnctcttgacgtgcttaagccattntacttaagtcatttctcgcttaacttaaaaataaaataaatntccaccgaacgtttgaattgtattatccgttaactttggttaaaatgaattccgaccattcggtcgtgccgtaaccacgttggaaatcaaaaagagataaaataataatataaataacaaaaaatataccttttagtaaaataaagcggaaaatcaattggacattgtctctttgggatttctcattcttaattgaattgactaataactaaggtgaaactaaagctaagatcaactcgcctagtcaagctcgtccacaaaaataaggtgttgaagtttgtcatttcaatntctcac

SEQ ID NO: 35643 - DNA, 408 bp, Glycine max
  unsure (1)..(408): unsure at all n locations
agcttttggtatttatagttcttcaacaagtgtttgttgtctctaaacgaattgatttcttcacttgagcttgcgtctaaagattgtggccattggagcatttaatacttccattaaatgcacgtactccttaatactagaaaatcactctagttagctttcgtgtagaagacttgtaggaatcatcttctttttcatcagagcatgcctttcatagtagagcatgtcttttgatgtcatttggcaacttttacaccttaaacttcatttattcttcataggattcaacaaaaaagaaacacatttttcaaggacttaaacgaaaaaaaaaattgtagggacaaaaatgaaaaaaatgctaaatagaagggacgaanaatgtatttaaatctatctaaaaagattaat

SEQ ID NO: 35644 - DNA, 370 bp, Glycine max
  unsure (1)..(370): unsure at all n locations
tgatgtgtcattattntctcctatntcttaatcgttttttgtcaccatttaattactgattagccttaattgtcaaattaattatgcagttttatcaattgggcctacttgactaatattgtgtntttaatttaatttcaggagaattataagaaattggacttgaatccggaattgggcttggacttgaagagaacagacaattttattttatcaaatcttatcttatccagatattattccatctagattttatttcgtccagattttatttcatccaatcttagcttatcttgtccagaatttattttatatcgtttatgagcttggacttaatatagatatgttagcttcggggctgaggacctat

SEQ ID NO: 35645 - DNA, 413 bp, Glycine max
agctttagtcaaacagaataatccgaaaatgtcttagaattgggcgttgaaaaagcataacaagactttctgtgattggtttaaagatacaatctttgcagatgagaatgcttcagaaacattaagaaagctagcatatgggcctaaaagtacaatgcagaacagcggggtcatcctaagggctgaatctcaacactttgcaagtgtcaatgacgccaatccctgtgtagcttcaatcccttactttgggttcattgatgaaatttgggagcttaactatgtgaaatttatgatatgtgttttcaaatgtaaatgggttgacagcaacatcggtgtacgcaccgatgatataggatttacgttggtagacctaaagaaacttggttaccacaatgaccctttcatcatggcag

SEQ ID NO: 35646 - DNA, 411 bp, Glycine max
  unsure (1)..(411): unsure at all n locations
ctcaaagaagcttctcaaggaagttttctcaagaaagcttctcaaggaagctacctagtctataaatagaagcatgtgtaacacttgttgtaactntgatgaatgagagtcttgtgagacatacttcaaagttccacttctatnacctatttattccttcaatttcgtgctcccccctctctctttctctccctctntcttttcctccattgaagcatcctctccaagcttcttatccaaggctcatcttggtggtgaagctccttcttccatggcttattccttaatggatggcgcctcctctcacctattntcctttgtcttccgctgcatctccatggtgganaatcaccattaaaggaccccattgaagctcanagatccagccctcatagaagccctacaagcaag

SEQ ID NO: 35647 - DNA, 410 bp, Glycine max
agcttgttagagctatcatcacatgacatttattggcacagaataagttgcttgtaagcaacttgagattttaacagaaacacttggtaagttgcaaactaaactgtctattggtaagcctacacattcttctgttttgtaggttacaggttgtaccatctgtggtgaggctcatgaaacaggccaatgtattcccattgaagaaaacactcaaaaagttcattatatgggaaatcaatagagataaggatatattcaaggaggattctcaagcttccagcagggtccttataaccaacaaggacagtggagatcacaccctggcaatcaatggactagggtggaccttctaacaggccaatccaacaagggcctaacatctttcagaggactactaagctggaggagac

SEQ ID NO: 35648 - DNA, 374 bp, Glycine max
gtctggcaacctagtaactcagcttgtcatttatcacaaatctgcatctgcacctgttgcaagagtctgtggtctatgttcttctgcagatcaccatacagatctttgtctttctttgcagctatctggagtcaatgaacaacctgaagtctatgttgcaaacatttataatagaccccatcagcaacaaaaccaacaacaacagactaattatgatctttcaagcgacagatacaatccaagttggaggaatcatccaaatctgagatgggcaagtcctccacaacaacaacagctggtcccttctttccagaatggtgctggtccaagaaagccatatgttgctcctccaatgcagcaacaacaaagacaac

SEQ ID NO: 35649 - DNA, 409 bp, Glycine max
  unsure (1)..(409): unsure at all n locations
agctttactatgcaaggtttattctatgaaaattccttcatctaacttagcatcaaactttcctaagttttcttttccattgtttaatacaaagcatttgcaaccaaaaacatgaaggtgtgaaatgttaggttttctaccatgaaacaattcatatggagttttctttaaaatgggtcttattaaagccctattcatgatatagcatgcaatattaacggcttcagcccaaaatttttttgaaagaggagtgtcatttaataaggttctagcaatttcttccaaagatctatttttcctttcaacaactccattttgttgaggggttctaggtgcacaaaagttatgttcaatgccatgtttatcacanaataattcaaattctttattttcaaattcacccccatga

SEQ ID NO: 35650 - DNA, 531 bp, Glycine max
  unsure (1)..(531): unsure at all n locations
atggtttgaacccatggactttgttccccttgctatttcngacnctcnnngctgctcacgcttgcataagtggtgatcagagcacacgagcttcttgtaagtgcttcttatacctgcattaatttatntctttaccttctcttccattggtggtgcttcaattttctccatgtatctgctcacatgtcttggtctatatggttttaacatgaatctttagagtcccacccgttaaactcgctatataaggtagatttgatttctatggctcaaattcttgttcttgtctcgaaccatgaatatgttgagtttacgttcttcgagttttggcttggtattttgtgtggctgaacctaaaccataaattctacagaaatatttaagtgaagacaccgcntgatntagagtgactgttacctatgtaggttggatacagtcatgtctgtcatgaactggccatagaattctatgtgcgctgattaattctggttcttgctacccattgtcatgaggatgaatatcttacctttc

SEQ ID NO: 35651 - DNA, 402 bp, Glycine max
  unsure (1)..(402): unsure at all n locations
agcttctcaaggaggtgagcttatttatgagaggggtgtgtgtagctaagctctagcttcccaaggaatttttctcanagaagtttctcaagttttctcaagaaagcttctcaaggaagctacctagtctataaatagaagcatgtgtaacacttgttgtaactttgatgaatgagagtcttctgagacacaactcaaagttcaacttctctccctttttcttccttaaattttgtgctcccccctctctctttctctccctctttcttttcctccattgaagcatcctctccaagcttcttatccaaggctcatcttggtggtgaagctccttcttccatggcttattccctagtggatggcgcctcctctcacctcttctcctttgtctttcgctgcatc

SEQ ID NO: 35652 - DNA, 286 bp, Glycine max
caccatggagatgcagcggaagacaaacgaatataggtgagaggaggcgccatccattatagaataagccatggaagaaagagctctaccaccaagatgagccttggataataagcctggagaggatgcttcattggaggaacagaaagatggagagatagagagaggggggagcacgaaatcgaaggaataaacaaggtatatacgtggaactttgatgtatgtctcacaagactctcattcattaaagatataacaagtgttacacatgctgttatttatatac

SEQ ID NO: 35653 - DNA, 356 bp, Glycine max
  unsure (1)..(356): unsure at all n locations
aacatcagaccacttccatggtgttgtatctacttcacaaggacttgatggggcctatgcatgttgaaagccttggaggaaagaggtacgcctatgtcggtgtggatgagccctccatacttacctgtgtcaacttatatcaaagaaacatccgactcccttgaaggattcaaagagttgagtctaagacttcaaagacaaaaagactgtgttatcaagagaatctggagtgaccatggcagagagtttgaaaacaacaagtttactgaattctgcacatctgaaggcatcactcatgagttctctgtcaccattacaccacaacaaaatggcatagtngaaaggaaaaacaggac

SEQ ID NO: 35654 - DNA, 354 bp, Glycine max
tacctcgaacccaacagtgacaatggcatcgagactggaagtgatatcagtcacaatggcgtgcagacttgatagctttgtcgtacctcaagtcaccactaaatgtacctagggttaaccgaaatgacacagctaagttacaatgaagatatgaagctgaatatatgaagcttagacgaaatatacctttataggttacacggagaggaagaaagtgcgagcaaaaaataggtatgttacacgcgaggttacacagagaagaagagcacgagctaactaggtcgcgtttgacataatttaaaatataagtgcaacatcgatttccaatacacaactgatgttaacaaaatgatg

SEQ ID NO: 35655 - DNA, 503 bp, Glycine max
  unsure (1)..(503): unsure at all n locations
aggaatactcagatatcataacacacgaaacgaacttagacacacaacaacagagattgatcatcatgcagcccccnnaannnacgcgcagganaaannagaagaaagagaggcattattttagganaaacaggacaaagcaacggagacgaatagcacacccgacaacgcaaccaaccaaggaaacgaatagggggagaacgagggacaagcccagggcgggaaagagaagcacgaacagcggaggggcccaccgaacgaggcaaaggtaaacacccaggcaagaacacaccgaaccacaacccagccggccagcctaccacgagagcagagcccgaaagacagacaacaagagacaggcaaccgcgcggacaatgacgaacaccaccgggagcgcagaccaaaaacaccaaccaagagacgcagggagcagcgagaaagacggtagaacgcaccccaaacaacagcggctaagcggaccggcgcccaacgcgaggtgaaag

SEQ ID NO: 35656 - DNA, 385 bp, Glycine max
  unsure (1)..(385): unsure at all n locations
catgtatacgatctcctctctcttttatatatntagttgcttaaggcattgcagacaatgattattacattgtctatgcttttggcaaaagcatatatatataactcaagctatttggttagtagctagtaacagatactatatatgcagcttcagttgtattttgaatggcactttcttagtttctctgaaaatttcattggttttagggtccaatgccatgtagttgattgcctacactgtcggttcattgtgctgagatatcaacacctatantttttattcatttatcaattgtatatgagctttataacgaactanngtttgacataaatttagtatcatgttgaaaaagaaagtctagtttctcgcgttgaatgttatg

SEQ ID NO: 35657 - DNA, 413 bp, Glycine max
  unsure (1)..(413): unsure at all n locations
agcttaaaagacacttattgttgatatgacgaagtcaatggagaaaccaagaaacattttgctaactttgaaggagcacaatgccaatagttgtacaaccataaaacaaatatacaatgcaagaagtgcataccgtttttccataagaggaagagatactgaaatgcaacatctaatgaagcttcttgaacgagatcagtatattcaatggcatagattaaaggatgaagacttggttcatgatatgttttggtgtcaccctgatgcagtgaagttagtcaatgcatgtatgtaatttggtgtttttgatagacactacctacaaaacaaacaggtatagactcccactgctcgatnttgttggggtgacaccaactgggacgacattttctgctggttttgcatatttggag

SEQ ID NO: 35658 - DNA, 230 bp, Glycine max
agttgcacgtgtgaccacaaagggtagctgtgctgcacctgtatgcacaatgattacctaaagagccttatgatgttgatgtggatctaatggggttgatcaaagctgaagatgaaattactttgctagtggccttgggaaaaatgtacaacaattcatccaccattcacaatgttcgttatgcagatgacgttgttagggtgaatgttgtcacatattaccaccctgac

SEQ ID NO: 35659 - DNA, 265 bp, Glycine max
gggggtcaagagaccttggggacgtcaagtggggtgctattgtccaaaaccaagcttgaccaatcccgacccaacccgggcatattctgtcagtgagaacatgtgacgtacctaagcaggcgagctcctggcagtcaacagataaaaggaaaacaagaccacacaccaaggaggcttgtggtggctggccatctgtgaattttgtgtaatatgtggattgtggcctctggtaatacattaccaccggtgggtagtcgattacaag

SEQ ID NO: 35660 - DNA, 213 bp, Glycine max
  unsure (1)..(213): unsure at all n locations
atgctatgtgctcgcgactggtccctttcttcctacncaacctgagtacactatcgctaccccataaagctcctggaaatttgttccggccatactcattcttgcgagcctctctggtctcttgttcaatggctctcgctgtaattgcattctctttccgtaacccggcgcacttcttgcgaacgtgtgttgcgtgcaacatgaacttcttct

SEQ ID NO: 35661 - DNA, 401 bp, Glycine max
agcttcccactagcccaataatgtcatctctcagccaatatcggcccttctccttacccaccacccagtcatccacaaaggctatccctaaatcatccacaaagtttgctggccgcacatccaatagccaagcgcaaaccaaaacaccaaccaagaaatgaattttgcagcgaaaaagcctatagaattcaccccaattccaatgtcctatgctgatttgctcccatatctacttgataattcaatggttgccataacccaagccaaggttcctcaacctccatttttccaaggatacgactcgaacacaacatgtgcttatcatggaggggccccggggcattccattgagcaatgtatgaccctgaagcgtaaggtgcaaggtctaatagatgcgggct

SEQ ID NO: 35662 - DNA, 394 bp, Glycine max
agcttctactataaacaaaagaagaagataaaagaaaaaaaaaataggattccattgtatcagatacttccaaagcaatgtaagaccttaattcctcgttacatatgaaaactaaaagaaaaatgagtgtttctataaattatggttgaaagttaaaccttaaccttttggcatttacctttttcacacgcacatatccctctactctacatccacctgctgatggcgctggcctttttgcattgtctgaagcatttgatttatcctccagagctagcttttgagattctgttgggagagatgtgactaaatcctccataaactgaaggcagaaagtgatgcttaattacataaaaaaaaaaaaaagcatcaagtctactgattcaaattatgc

SEQ ID NO: 35663 - DNA, 380 bp, Glycine max
  unsure (1)..(380): unsure at all n locations
gatgttgtcgagananaatcacatgtntttcatcatcaatttggggagaatgtgaatgtatgtatacatgantttgatgatgtcaaaagaagaatcaaacaacgctcattcttgttcaagattaatacaagattgtgtcaacaaacaaagccttgattgaagatttcttcaagatcaagccttgcctcacaatgaaaggtttcaagtcattcaaggcacatgtaatcgattaccaatggtttgaaagtgtgtaatcgattacacatcatatgtaatcgattaccagagactctgaacgttgggaattcaaattttaaatgaaaggtcacaactattcaagaaaaacaactgtgtaatcgattacactaattctgtaatct

SEQ ID NO: 35664 - DNA, 325 bp, Glycine max
  unsure (1)..(325): unsure at all n locations
tgtccaggtgtgataagtcccttcttctctgcatcagcaatcatactataggcaatcctacatatataatgtatatcataggaacaaatcacanagttattccaagacatgtaaaagcaagaaccaaactcatatgatagtagctaggatgaaagaaaccanaatcattancctgtctttacactagagcatggctccatcaattccagtttggcagcaacccgggcaacagaaaccgctgcgatttattcacaatactattggtgtttgcaatcacctcataaacaaacaaatgcatagtatgtattctattaaaacactgaat

SEQ ID NO: 35665 - DNA, 359 bp, Glycine max
  unsure (1)..(359): unsure at all n locations
acactctcatctcatgtatggaatattcatatncattactcactacatgcaatatctgcatgcagcacgcttagttatcacaccttctttccctaggtcttcttaaagtagtacaagttggtaattcttcacatcattactccaacagttcattgnggcttcaatgggcacttcaaatcttaagaatcccttaccaagctgtggtcaaaatctgttccttccaaagcatgttgtgttattgctgagtttcttcctgggggaacattgaaacaatacttgtctaataataggcagaacaaactttcatataaggttgtgattcagctggctttatacctctctagaaggtgagtcacatt

SEQ ID NO: 35666 - DNA, 235 bp, Glycine max
  unsure (1)..(235): unsure at all n locations
ccatcaccttgaggtctggcgagcaaatagacatccctccaccagtagcagcacttgcacctgaacctgtcaagcttcattctacacctgaaaaataggatgagctaactgcacagaggagaaagcttcctgatcatgatggagctaacacaaattatcatgcaggaggaccttcatctagtagttctgacttgcagcagcctcctatccctcttncattctcacctagagcaat

SEQ ID NO: 35667 - DNA, 465 bp, Glycine max
  unsure (1)..(465): unsure at all n locations
tgaacatacagcagaattaacagctgtgttgggaaaggacaatattgactcatgaatattgtatcctttaactctagagggttgggtagaggtgtcaagtggtcagccatcatataaatgaccttgaccaacaatcttgatgttctatgtatgcaacaaacaaagatcgaagccattgattggaggatatgtcagtatttatgggctgactgttatgttgcctcggaatgtgccccttcaattaatcccactctatttgtaataagcaatcagcagacctcctcaattaattctatggggaattntgtggaagagagatgggaatggaagctaacatggagaatgaacgtgtgtgaccatgacattgacatggtagctgaatttatatctgacatcgagtcacacaacatccatcactacagcagggatgtcctttgtnggaagtctgatcctaatggcctatat

SEQ ID NO: 35668 - DNA, 324 bp, Glycine max
  unsure (1)..(324): unsure at all n locations
agtgccctgattcaagtcaagaggtgtggcatcatagtagcattatctgtacgtagcgaacttacatcaatcactacggaatgctcatcttggactacaagattctggtatggcatggtgtataaagaggaacgcaaaataataagggcatagctaaaacctactccaacaataactaatgccaatttaatcttcaagagttgtactattagacatcccatgaaataataaaataaatgcacttcacatccacactcagtntgccttgacaggctgagggacaccatatcacaggcagcagaagaaatcaagctatatgcatct

SEQ ID NO: 35669 - DNA, 507 bp, Glycine max
  unsure (1)..(507): unsure at all n locations
gtcgtgagatcaaaacttatcttggttattgatttattaaagccatgagtgatggattcatgagattgattaatcatctttggttntttntataaactctntattaaaatggctttattctaaaacaaattaattataaaagtctattttgaccaaagtctcaggtgtaacattccactgccgttacanttttgcttgagctaaaattattattgcgttaagggtaaatgtctacaaaaggtcgaatttcttgaataagactccaaatgatttctaaatcaaattatacatggtatactatacatacaaatcatttgacagccaanaaaacattaaaagcatcaaccacttaaacaaaacactcaatcaaagtaaagtntatggtaattatataaatcaatgatctaactntgagaagaagaaatgaagaaaggataaaactntagtttcaagatgagagtttatctcactcaatagtagctcacacctctatattatcatccaatc

SEQ ID NO: 35670 - DNA, 307 bp, Glycine max
  unsure (1)..(307): unsure at all n locations
tgagtcaacggagcggctatctgagcattaattttgacgaaacggcggtagaacccggttaggcccaagaaaccgcgtagggccttagttgttgtcggaggcggccagtggagcatagcttgtatcttataagaatcgggctcgacacctcgacgtgaaacaaaatggcccaagtattcaatccttcgttgaccaaagatacacttggaagctntcaaacggaaatcagcttgttgcagagtacgcaggacgcaatccaaatggttgacgtgggattggaggtcactgctatatactaaaatgtcat

SEQ ID NO: 35671 - DNA, 330 bp, Glycine max
  unsure (1)..(330): unsure at all n locations
tgggagagtgttaaaacacatttctgtgagtgccttattttatgcctggtcttccagcttcatgatcaagtattaagcgatgcgctagcatatttgaatattatgtaccatattgaattgtccttctctatttaagttactatgactaaagaatttgttgtggtgcatcaagcataattgcagatgtagtcttctatctatggactcctgtaagaccagttcaataatggtgtgagaaattcaacagagccttggtgcttatggctatgtagagaggggatatatgggatcaanggtttaaaagacggttcgtaactgcaattgtagtcg

SEQ ID NO: 35672 - DNA, 597 bp, Glycine max
  unsure (1)..(597): unsure at all n locations
ttaaaccctcgaacttcatatccnctgagtgacctgacgcatgcaagctactgctntggccgctcctcacggacgcanacattaccattattgtggttcttgtgatattgcaaaccggaaaaatacaatgatatcttgcctatgtagaatgattganagtaaaacatctcatgtgtatgaaacgtgtgtagatctctcttaaatataactgacaatagatgcctctcaatataacaggcgacagacgtgggcatatgcattctacgtngatgttaggatctgcctcangaggttcacatatcatacatggagcatagctttatcagaacggcacgctcaattgtcctaatacgatgcctaataatggcgcattaaggaggatgagatcttcctgatactgaactctgtcatcggctctatgtgaaaaccatagactatgccgatagagcatcacttcgtgttccacaacataggatccatctatatcatcgagacacgaatgaggtgatgttgtatccttcgatgtcacctcctgaaacactctattggaagctatgttcatctaatatacgttgcctcaccactatnatcatagcg

SEQ ID NO: 35673 - DNA, 258 bp, Glycine max
tgtcaacatgactatggtagaagcattagagcaggaaacaaaaagggcccgaaatgaagagtggagcaggaacaaatattgaggggctctatggtgtagcagcactgagctcaagcttataatggctgagagggatgagtcaagggtgaaaagcatggtgtttgatgataatttaaaggcttgtcaaatgtctaagagaagtttgacggaatagctaagcacaacggaagagagtatgttgaacattatcgatcaata

SEQ ID NO: 35674 - DNA, 255 bp, Glycine max
caacgccgagcatataagcatgattgattaaacaaacatgcttatctacattcagcttgttggtagaaagacccaacactcttacctactgttgtcaatcttatttacttgcattttactgttgtggccttgacttagttaattctgctaaaccctcattatcaatgttctttcacatcgcttattctaattaaccctgctaactagcccctgagttgaactcgattcatcgttaatttaatctgacccccggcg

SEQ ID NO: 35675 - DNA, 309 bp, Glycine max
tgcagaagaacatataccacaaactcttgtaagaagtgcagatctcttattcatggcaagctgagttattaggttgaccaaggcatccagttttccctcaagctttttatattcatcagatgaagatgaatctgtggccacctcatggactcctctaaagacactagcatcatttcttgcactgaattgttgggagttggaagccatcttctcaatcaaattcctagcctcaataggggtcatatcaccaagagctccaccactgacagcatcaatcatactcctctccatgttgccaagtccctcata

SEQ ID NO: 35676 - DNA, 278 bp, Glycine max
  unsure (1)..(278): unsure at all n locations
cagatgctgcggcaggctcacgttccttcaatgcagactaattaccaaacccagcagcagcaacgtgaatattctcaacagccacggaattgtcaatcacagcagcaacaacatgcagcaatgtcattacacgagtatttcaagtctccagaggtcattcaggtattttctatatgtaattcatttgtgggaggatgcataccatgcataatttctgtttagccagatggacacttgattactactatnttaatgttaatcatatactcttctgaact

SEQ ID NO: 35677 - DNA, 208 bp, Glycine max
aatatgcaataaaagatggccttttgttctggaagaagcgcgcttgtttaccatttaatgaacatctcatcacggaagtgctgaacgagtttcattcatcaaaagtatggtgggcatgtaagagaatcaaagactatgggccgaatagcttctccatttttctggcctggcatgccacaaaacattcgacgatctgtgcgtgtgtgtc

SEQ ID NO: 35678 - DNA, 350 bp, Glycine max
  unsure (1)..(350): unsure at all n locations
tgatatatgtcagggtttgtttctcggttctaggataaaggagatgtcctacattatttccatgatacacatgcaacaatgatgattangaaattntatgcaaaactggtcatgcatgcacccatgtggacactcaagcatcaagtttttatggtcatgtgacactanggctcangattntatttccctantttaagtcaacccagtatttccaaaatatgttcttctattcaattgtgcattcatccgagtctatcttgngtgttcgaaaaactattcacagcatttacccttcaaatgtgtacacacanttttttcannaaaactggttaagatcagtaaaatctttc

SEQ ID NO: 35679 - DNA, 426 bp, Glycine max
ccttaccaccaacacaacagccattaaatttttgctaaatggctgaaacacattactcgcgtaacacacaactacgctgagcgagttcgtaaacattcgctcattcatcagcaaagatgaactcgcttagtgggatagggccgactcagcgagttcatctggaaagcccaatattcatcaaaaagtgatgaactcgcttaacgcagcaaggcacgcttagtgcgttatcgccatttacaaacaagtggggtttttcaggccctgaacgaggccgtattggcctcacacctaccagatatgtacaatgacaacttgaatgtatgacgacccacactatctactacactacctagcactgcgcaacagaaacaagcttatgaaagacaagtaacaccgagcttaacaaatctaaacacggtaggaggg

SEQ ID NO: 35680 - DNA, 310 bp, Glycine max
  unsure (1)..(310): unsure at all n locations
atattctcaacagtcacatgtttgtacttggttcttgaatggccatcaaaagcttatatatatgtgacttgagacacgaatttgctaagagattntcagaacaaaaaggtcttatcctcttaaaaagcaaaatcgttntatcctcttacaaattccttggctaaaacacttgtgattcagtaaggaattatntgagtgctcaaattgttcaatctatctctttcaagagagatttcttcttttcttcttcttcattctgaanagggattaagagaccgagggtctctttgtgtgaaagaattctaaacac

SEQ ID NO: 35681 - DNA, 576 bp, Glycine max
  unsure (1)..(576): unsure at all n locations
acggggnaaattatgacttgcatcatcgacacangcgcacananaanactcaagctcgagctcntagaagactagcntacncanngacagctataatctctatcttgtcagaggacacagctagagagctcttatagttcatagaatgagaatcggacgcttgatgagctactttcatatcgtgtgcctctacgagagagaaagctgtagctgcgacttctgactgatatgtgctcgtagtagctagttcactctagatgaccatggctagacacatcatatctagggacccacgaatttagctagttcgggtcctacacttctcaagatatatcaaggtgacaactgattattctgtgtgagctttgacatgcatgatatattgtactgcatatcatgtttggcatgcatcgaatcagttgctaatctccctaactactcgatctaagaaaaatgtaggacttcggcctttatataaatgactagttttatgattaaaaccattgtcgtcagtttatcggattgtttggttcttgactataggatttgtcttgaacacagattctgcgatagtcg

SEQ ID NO: 35682 - DNA, 315 bp, Glycine max
  unsure (1)..(315): unsure at all n locations
ggctacctcacgatatcgtctcctttcattattggcggaccacctgggccgccagatccctccaccttttgtgcatgtctttgaaagatccgtcaccctctctgcacatgttctgtagctgcatgctattcagaaccatatcanaattgtactgatactgcctaacaaaggcnaccattangtccttccaagaatggactcacgaaggttccaagttagtgtaccatgtaacagctaccccagtaagactttcttggaaggaatgtatcagcaattcctcatctttcgcgtattgccgcatcttctaacaataca

SEQ ID NO: 35683 - DNA, 544 bp, Glycine max
  unsure (1)..(544): unsure at all n locations
cgaggatganccgtgtcattggtacagtgagacccgagatcctctgagtcacctgcggcatgcaagctagcctgagagaggttctataaggatatagcggtcgaacgaaccactcacgctctcgagtatgacagcaccgctttggaggctgacaccacacgctttaggccataggggtggtcatatattcggtagcgactcatacaacttcaggacgatgagtataccgatttccactaagagatattacgtcggcagtggacattacttgttaccctcatgagcaagttcaacccagacatagtcctttaatttatgcctatgcttggcctacggaggagggcatgcgcgatatgagatcctgggtgaggagtcangcgatcccgttctatgcagatgctatcaacacattcctgtgttatctttacacttgcataaggcattattgctactactgacctagatgactggtccaatgttngattagcagcattgctactgctggctaccggcgtaattgcccgctgttcgggtggagagcaan

SEQ ID NO: 35684 - DNA, 260 bp, Glycine max
  unsure (1)..(260): unsure at all n locations
ttcacagtntagtcagtntaagatctctgtataatttcagaaggagaaatggtctcttaatgagctcatttcatactgtgtgcaagaagaggaaaggctgaagcaagagaggactgaaagtgctcatgttgcaagtacctctaaagacaagggcagaagaagaagaactaaggagcccaagaataaagctgttaagggtccaacacacaagaaatataatcaatgtgacaactgtttctttngtagtaagcttagacatg

SEQ ID NO: 35685 - DNA, 320 bp, Glycine max
  unsure (1)..(320): unsure at all n locations
gcacctgagctgcagcttggtggcacactcaattcggagttttatgaatatacgcattgaatcgatacaggtattggtaatcgattacaggcccaataagccttctggtaatcgattacaggatgttgtaatcgattacaggctgcctgttcatgtgtaatcgattacactggatggtaatcgattaccagagcctatcctaggctagtttctaagagaatatctatatttatgctcaaatacatcctatatgtctaattntcactactaatacactaaattcaatcattcaattactatatacacaagaaatcataaat

SEQ ID NO: 35686 - DNA, 438 bp, Glycine max
  unsure (1)..(438): unsure at all n locations
cactcctacatntcatctctagcatgcatntttctttctttatccactcctcancgttggtttntagggaaaaacaccataactaaacgcgccgcaagggatccctatcgcaccagatccaaatctagaacgatgggtgatcaagaggagacgcangaacagatgaaagccgacatgtcggctctgaaagaacaaatggcctncatgatggaggccatgttaagtatgaagcagctcatagagaagaacgcggccaccgccgccgctgtcagttcggctgccgaagcagacccgactctcttggcaactacgcaccatcctccctcaaacatagtaggacggggaagggacacactgnggcacgatggcagccctcacctgggatacaaccgagcggcttacccttatgggattgccgccaactattcaccacccgtc

SEQ ID NO: 35687 - DNA, 375 bp, Glycine max
  unsure (1)..(375): unsure at all n locations
agacgctcaagaagctcagctgagactaacataattcaatgattctcgttaaaggtagacatttggcttggtgagacttcaccttcatagatcacatgtaaaacaatgatctcaattctgtgagatctttagacgctccgacattgtgcttcatacggctcacaattagttacttacacgaacgccctgatagtatcgcgactcgtttcaagccatttggcacaatgtcaccacttgttatgctatcttctgttttctttcaatttatcatatactactgctcaacgtgattctacgatcaatcttatgattatctacaagatcactattggcaacggatgtagatggcgaanaatgtataaccttaatcattat

SEQ ID NO: 35688 - DNA, 421 bp, Glycine max
  unsure (1)..(421): unsure at all n locations
agctntntcgctgcanaattccttccttgggtggtattttggttctttctaaaggangggnacgcattggaagtgcgctaggtaggctctatggttgattatagggatggcctttgtggataactgggtggtaggtaagaagaacggttgctattggctaagtaatgacattgttgggttgatgggaaacttggtcgtatacgaatggcagtcacagcatgggtttctccctcatcctcaccctcttcatttgccccacttttcttattcatcanagcacgatgattaaatttgcctcttttcagacctacttcgatcctttcgctggcaaagaccaaatctgtaaaacttgaaggtgtgtaacccaccatctttcatagtagaacaccagctacgtgtctactataattgcgataatctc

SEQ ID NO: 35689 - DNA, 395 bp, Glycine max
  unsure (1)..(395): unsure at all n locations
actaacttatactgagtttcgtccacagatccctcttgtaagactagactcagctcaagcagcttatgaaagtttagcctaatttagcctaagcttcatctgtagatccctcttgtaagactaagttttgatcctgcttcaatcaagttctaaggcaacaatacatttcccaatgctaaagtcacctaactatgcacacaaatggatgatcaggccaaaagcatacaaacattaagcattgaaggaagcattgaacacaaaacataatcaattagatattaagtatttacatcagttgttcattagaaatccccaactagggtgtttagacagtcattacaaagaaaccctaacaataaacgagaataanagtagagaatgatagttccttacac

SEQ ID NO: 35690 - DNA, 272 bp, Glycine max
  unsure (1)..(272): unsure at all n locations
agagaagnacaacaccaattcaaaattaacagatgctatttgtaatcacaaaactacatgactaatgtctttttatttgcccggcggaagtatatatttgtattaattgagtaccagaggctctaagtttacaattaagggtgccaaacacaaggttccgatatcatacttgaagtagtctagataggaaccagtgcttggaaatctatataacagattctgtgcaattactgtaatgtgtaatcctactataacaaataagacctaatcta

SEQ ID NO: 35691 - DNA, 368 bp, Glycine max
  unsure (1)..(368): unsure at all n locations
agagaagggtnggaattccttactgagtagacacggcatgcaagtgaggggagggaatgggatttctgatttgatgtggttatattaaagcggaggctaattccanaattgtccacataaaacagcaccaaatagcatggttccagaaccaaggcaggtatttgtactcatgcacactataccaaaagagatgaccattatttcaatcanaagcgggcgcagatgaaaactacagatgtgactagaatatgattattntcaatgattaatctacattagccttccaaaataatgacctcattcaaaaaagtttcaaatcagtgaaatcatatcaaacttagttctatttgcagacataacatacaaag

SEQ ID NO: 35692 - DNA, 361 bp, Glycine max
  unsure (1)..(361): unsure at all n locations
gcaagcttcagaatatgtacaagtaccagaatgttgcacatatttcctttattntctcaaagatataagccgcatcttgaatgtttccagcgtctaaacttgcttgcatcaagccagtgtaggtcactaccagtggtttatttgcaactntacatatcttgtctatctgtcaaaaagatgaacgatacctttggtgatcaagccttataaaagtgtataaatacccttctacactataacttattttcataataaccagggcactntgaaccanaagaatntattcaacanagaattaacagtcaacactaatccaatcaatttatgtcaatggaagcgatgataatctagtttagacttc

SEQ ID NO: 35693 - DNA, 437 bp, Glycine max
  unsure (1)..(437): unsure at all n locations
ttagttgtacctcgctgatttagtatatacctgaatatataatatttcttttgagctgcagatgttctagaggaagaagctgtatgggtcttaagcctacaatttagatntaaacaagttacagtaccttgtggtagatntactangttcaatctgatatggaaccaatttttttctttatacattacagttgttntgtgggggtggngttagttctagttcatattcattntgtgtttaatgaattanacaaattacagtaccttgtggtagatntactangttcagtctgatatggaaccgattnttttctttatacattacagttgttttgtgggggtagggttagttctagtaccatattcatttgtgttaatgattatgtatatcgcaatagttattttataatttcccgtgtacttgatgttatttacata

SEQ ID NO: 35694 - DNA, 232 bp, Glycine max
  unsure (1)..(232): unsure at all n locations
gtgtaaaacatcgtatacaaaagtgagatagttattgagttaataacccacatgaaatgatagtaggtacttttggttggttatgattttggtgtattgaatgcaaaatatgttatctaaaacgggtggtaaaaaatcatcttagaanattgattgtttaagttgataatgacttcaaagacgattcttgaatcctcataaaatgtgttataaaatcaatttagaagctcta

SEQ ID NO: 35695 - DNA, 327 bp, Glycine max
  unsure (1)..(327): unsure at all n locations
atgcgattcgngaacatctcgaattcattgaggtgatcgttaattgttcctcgttgctggagtttgaaaatcgctccctgatggtcgttgtaatacgacggagcgaagcaagattcaggagctngaagcatgatggaccatgatgttaggaagccattncctcgacatccattaataccaggataaagcaggtccatccatatagaacgaagtgactgtaagtcgttctgcatctggaacacattgataatcaaagaactgtgtaattntganaatccacccaagtggatcctgaccatcaaagcgtggaacgtttagcttcatatg

SEQ ID NO: 35696 - DNA, 276 bp, Glycine max
tctcacctcttttcctttgtcttccgctgcatctccatggtggaaaatcaccattaaaggaccccattgaagctcaaagatccagcctccatagaagccccacaagcaagctttcatcatcaacagtccttatatttagtaaatcatttagcttaatcatgtgttagaagtagacagagaagcgatgtaactcgatccatcttctggccccaactttgcaagctagttacttccatactttgacctgacctgatgaaactttccttataacatgta

SEQ ID NO: 35697 - DNA, 297 bp, Glycine max
ttaggacgcatcaacaagaatcaagccaaggctattgtgcaagcaatcaagggagcacaacacaccaaatgattataatgatggatggctcaaattctcacaaaggtaaaatcatcactgtcaaattgagtgttcacaactatcatgacatgtagagaagaatcaaggatttcaagtcacaaaatgtcaagaacttttattttcaaaacaattacccatttcttgaacatatactataattcacagaataacatgcaacagtcgacgtgcacacaaaattgacccaaaatattaaac

SEQ ID NO: 35698 - DNA, 371 bp, Glycine max
  unsure (1)..(371): unsure at all n locations
gcccacttcatcattatgtatttgttttgtcatctcanacaaacaaatcaaacataacaatacaattatagttgttgtttgaatacctcacccactcaagtgtatcacacaattatggcttttctctaatgaaacactcttgccttttaccactctaattccccttgagttattaggcaattcaagagattatggccacaacaaagaacaattcaccaatatgtgtaagggaaggctagagagacaaggaaaaggttaaccaagaaaaaggctaacaatgtttntaggcacaaatgaaggaaataaaattcagaatntaggaattcaagtaacaatccttcatgctaccaatatattaccttaaatatata

SEQ ID NO: 35699 - DNA, 295 bp, Glycine max
  unsure (1)..(295): unsure at all n locations
atatacgacctttgattggctgcttcgagacacttggcgtcctttgttgcacaatgaatgaagtcccgagacgtgtcagaaatcaaaaggaggcaggcttgcgcaatccgtgaaattccgtaatgtggcggaaatcgaaaagaggtgtttttgcgcaatccgtaagtttccgtaacttcttcgaaagctaaaaaagagtaaatacataatccataaggattcgtaaccttgcggaagagaaataggtatcgctactanattcgtcaagtttcgtaacgttacggaaaaagaatac

SEQ ID NO: 35700 - DNA, 328 bp, Glycine max
  unsure (1)..(328): unsure at all n locations
cagctcgagaataagcttcttcgcgtngaagaatgngatctgcatgcattatatacacataagtctcattcttcaacgccagaaacacgtaacccacgtgtcttttgcatgggcccacttgtttctaacggtggaggtgaacatgataatgatgatagtggttgcatgagttggctcgactcgcaaccgagtcgaaccgttgtgtttttaagccttggaagctacggaaggttctcgaagagtcagataagggagatagcgttagggttagagaggagtggacaaaggtttttgtgggttatgaggaacccatatgagaagaagtgaa

SEQ ID NO: 35701 - DNA, 293 bp, Glycine max
  unsure (1)..(293): unsure at all n locations
ccatgttctcagaatgttcanaatcagaatgctcagaatcagaatgctcaaaattataatgctcaaaatcaaggtgttcaaaatcaccaataacagaatgcacagattcaccaataatggaatgctcaggatgatcaaaaggtataaaatgatgtctaactaatctatgagatgtcctatctatctcangatcaaagggttgtaagtcagatggattgcctctagtcatacactacattcagcatgcacaactagttgccttgtcatgtaaataaaggtgtangtttgaacta

SEQ ID NO: 35702 - DNA, 339 bp, Glycine max
  unsure (1)..(339): unsure at all n locations
aagagggagagaagtggaactntgaagtgtgtctcataagactatcattcatcaaagttacaacaagtgttacacatgcttctatgtatagactaggtagcttccttgagaaaacttccatgagaagcttctgtgagaaaactttcttgataagctagagcttagctacacatacccctctcataactaagctcacctcttggagaagattcctaaagaagctagagcttagctacacatacctctctaatagctaagctcagcttctctagatgagaagctagagcttagctacacacccnctataatagctaagctcaccctatgacagaatacatg

SEQ ID NO: 35703 - DNA, 177 bp, Glycine max
tcttagccacttatgatagccgccgacgatcccattactgcttaccctaagctctctatgctttcttcacgccgcatcccatgccttgcgaactacttggagtaccctcgcattgtgtgcactgaaaccccgtgcgatgaaaggagtgatgctttcctctgatggcactcctctcat

SEQ ID NO: 35704 - DNA, 334 bp, Glycine max
  unsure (1)..(334): unsure at all n locations
tctacttcaaaaacccttgaactacttcacattgatttattntgtccctctagaactataagtttaggtgaaaattactatggctntgtaatagtagatgattactcaatgttcacatgggctntatttttgaaaaccaaaatgaagctttngatgcttttcgcanacttgccaagatgattcanaatgaaaaaggtcttaacattgtttcacttagaagtgatcatagaggtgaatttcanaatgagttctttgaaatctttttgaagaaatgtaattaccataatatttctgaccaaaacacctaacagaatgggtttggaaggaaaataat

SEQ ID NO: 35705 - DNA, 304 bp, Glycine max
  unsure (1)..(304): unsure at all n locations
aagagcaccaaggactgagttctangtgatcaaattgattctatgaaataatatctgggtagggctgctgttcagactatatgctgttgtacaaaatgacaattcctaattgagctttatagagtagaatattgcttgatctatctttctgacaaaagttattgtacctagatgataataaacttagatgttgccaaagtcaatttttggcggctgaattttttataacagccagaattttgataatgtataactgtgggacatgagtatcatcataggatatttggaagctatgacatctaca

SEQ ID NO: 35706 - DNA, 251 bp, Glycine max
  unsure (1)..(251): unsure at all n locations
agatgtgggagccaatccaatccttgtgtgcggactctcagccacttatgatagccgccgatgatcccattactgcttcccctaagctctctgtcctttcttcatgccgcatcccatgccttgcgaactccttggagtaccctcgcgttgtggtcactgaaaccccgtgcgatgaaaggcgtgatgctgtcgtctgatggcactcctctcatggnggagccaagctgtcttatggcgaggacgggattata

SEQ ID NO: 35707 - DNA, 184 bp, Glycine max
  unsure (1)..(184): unsure at all n locations
gcttgaagtgcgtagccaccatctgttcatagagagtatcgattatgtgtctatcatttctatcatcgnctccctttccatcattgggggtaccacctgagccgccagatccctccacctattgggcgtgttctttgaaagatccagtccccttgttgcaaatgttctgtagttgcatcctatc

SEQ ID NO: 35708 - DNA, 130 bp, Glycine max
acaacttgagcttctacatatcacctccgttcagacattgtaggtctaatgcatgtgtcattgtcatcatgaccatcgaaactaactctttgtgtgcatgcgtctaaacattaaaatcttatcattacga

SEQ ID NO: 35709 - DNA, 266 bp, Glycine max
taccctcggaagcaaaaaaagaatagaggggaaatttcccatcaaagaaaaagagaaggaatatttccaatgaaagcaaaaaaagaaaagaaggaaaattccccaatcaaagagtgggagaaagcaaaaaaagaaaagaaggaacattccccaatcaaagagtgggagaaagcaaaaagaaaagaaaggaatattcccaatcaaagaatgagagaaagttaaaaaggaagaagaagaaggaaagaaagctcctgatcagggatcga

SEQ ID NO: 35710 - DNA, 516 bp, Glycine max
  unsure (1)..(516): unsure at all n locations
gctgcctgccctgattattgagggactcatggcactatgaattatatatttcttgtgataaaggtagngttgccatgttttcaaagcccgtactaaggcatacaactccttatcataagttgaatagttaagggtaggaccacttaacttttcactaaaataagcaattggatggccttcttgcatcaacacagccccaatcccaacatttgaagcatcacactcaatttcaaaagattnttgaaagtttggcaacgcaagtatgggtgcattagttagctnttccttaagaacattgaaagcttcttcttgtttctctccccatttgaaaccagcatttntcttgagcacttcattgagaggtgctgccaatgtgctaaaatccttcacanattgtctataanaactngctaagccatganaactcctcacctcggtcacggacttangtgtangccattcttgaatagcccctaaccttctctcatcaactngcactccttttgaactcacaac

SEQ ID NO: 35711 - DNA, 241 bp, Glycine max
  unsure (1)..(241): unsure at all n locations
accacccatcatatctgccagaaccccatacccacgaaatntaagagagaaagaaggccacccatacctggattttcgaagtcccactcgtagccacgcactgcacgactccganaatgctctcctttcacgatacggagcagatatgagcaccaaaggttggagctttgttggggtttcaatggtggatgggagataagaacaataaggctgcgtgagagagagggagagctgactaaaa

SEQ ID NO: 35712 - DNA, 387 bp, Glycine max
  unsure (1)..(387): unsure at all n locations
aatcttctggagggcccaagtgggcctggttgctatttgcacccncatctttactaaatacacccnctgcctttnnttggtgaatctttcttcgtaaagttacggaaacttacgaatctcgtaacgatacttgttttctttccgtaatgttacggaaccttgcggattacataatcatacgctttattgacttacggaatgttacggaacctcactaattgtgcaacgatgcttccatctgatntccgatgtgtcacggaaccttacggattgtgcatcaatattctcttttgatttccggcacgtcacagaatatcacaaattgcctaatgatgggtgccaagcacctcaaaatgaccaaacacaatgtgcatgccaccaagcaca

SEQ ID NO: 35713 - DNA, 184 bp, Glycine max
  unsure (1)..(184): unsure at all n locations
atcaaatggagaatagagatcgtaatgaagaagaaaggaggataagagggaatgatggcgctcctacacaaaaccggattgatggtattaaactcaacattcctccattntaaggagagaatgatccggaggcctacttgtagtgggagatgacaatagagcagtgtttctcatgcaacaacta

SEQ ID NO: 35714 - DNA, 393 bp, Glycine max
  unsure (1)..(393): unsure at all n locations
gctctcatatgttatgcgtctgaatcggacatgcgagcgacanattttgatcatttttatttgccgagagccttcggtgatcaatatctagcatatcgatacgctatgtgcctgaatcggacatgcgagtgaaaagctatgaccattagaatttctcgagagcttacgttgtacaatntatagcgtgtcgatacgctatgcgcctgcatcgaacatgcgagtgagaagatatgagcattatactttctcgagagagtgccgctggtcaattcctagcgtctcgatatgctatgtgcccgaatcggacatgcgcatganaagtatgaccatgttaatntctcgagagcatctgatgatcatgtctagcgtctcatactctatgcgcctgaatcg

SEQ ID NO: 35715 - DNA, 139 bp, Glycine max
  unsure (1)..(139): unsure at all n locations
gactcctctaagaacaataacatcatttcttgcactgaattgttgggagttggaagccatcttctcaatcaaattcctagcttcagcaggggccatatcaccaagagctncaccactggcagcatcaatcatactcctc

SEQ ID NO: 35716 - DNA, 565 bp, Glycine max
  unsure (1)..(565): unsure at all n locations
nttgccctgaatcgctgatagcgcacataatactcagctgcgccaggtaccaaaaggggttcactactattcctaattaatcgtatgggaataaaattctactcatttgttactaaacagataatccatcatgaataattaatagctaattgtcaaaaagaacattcttgacattaacatggcagcttcaatcatacatatncagtctcaagtcttattgatcatgtggtgaaagcataggtataatgagcatgaattctgtaagtcaataaaagaacatgtttggtcgtaccaataatgttgaaaaccacgtttactggtggctcacagtatcattgatgcaataccaatgttgtaaagggtgagggatagctgattngaattttgtatagctaatggtgatcattcacatatgaatgaaagtaaatattatncccttcatgcttcatttgctagcttacgccacacatgtgtttattatatattcaaaaccagtgctagaaccgctactaccaagcttgtgctcagaatggcatttctttgacttctgagataaaatatgaag

SEQ ID NO: 35717 - DNA, 223 bp, Glycine max
atctcttttatcttagtgagagcgattctcctaaattcttgagtgattcaagaacaccctggctgtatcaaaggactttcacaacctttgtgtgttgccctcgctggaaagagagagtctttccttcctatcatctacacccttgttctttcaaaccacaattccagaaaatccacctctgcccaaaagtatctcgtgaccataactcccatttcacacactc

SEQ ID NO: 35718 - DNA, 297 bp, Glycine max
  unsure (1)..(297): unsure at all n locations
tagcctgtcgacatattatgcgccagaatagaacatccgtgtgaaaagataagaccatttgaatttctcaagaacttccgttgttcaatttcgagcttcttgacatattatgtgcccgaatcggatatccgtgtgaanaagtatgacactctgaattcgcgatagttccgatgttaattcgagcgttcgatatatataccctgatcggcatccggtgaaagtatgaccttgaattcacagagcttcgtgtgattacgagcgtgtcattgtgatccctgatcgactccggtgaaagta

SEQ ID NO: 35719 - DNA, 210 bp, Glycine max
  unsure (1)..(210): unsure at all n locations
atatagcatgaggtgaatcaaattattatttntctggcttccatttgtgaaatgctatacaatatattcaactattactaagctaagctatagttgtttcacactattacggagcttgaatttgaagacttatgaattatctgctatactttgttcccgtaagttgtcatgacacacatgccagcattatctacacttttaatgtgcata

SEQ ID NO: 35720 - DNA, 351 bp, Glycine max
  unsure (1)..(351): unsure at all n locations
aaccattatatttatggcttttgattgtgatgaatgataatataaataagttgagtctttgtttaccaatggttaacaagttggtgcaccccagcatcattggagcaaacatgggccttggcaagctgccacatccaattagtagtagcatcaacaggaggtgtaaccacgcgctntgaccgggaattaggtccagcatgagggaggctaagttctatagccacaggcttgagagtgccacgtggtgtcaagaaaaagatggtgcgtgtggcatatgatttcctaccatcaagggcattgatcccttctaagaaaggtagatatatatcatgataatcaatcataaacagc

SEQ ID NO: 35721 - DNA, 163 bp, Glycine max
  unsure (1)..(163): unsure at all n locations
aatttatgatgcctcaagagtatatgttaaggaaatgatcatcacggcaccctcaaattctattgatgtctgcatgtgttgcgctacgactggntctccttttatatctacccttgagatgcgacccttgaatatctcaatgcatgccacagattttgaggac

SEQ ID NO: 35722 - DNA, 348 bp, Glycine max
  unsure (1)..(348): unsure at all n locations
attatttcatcgntntagttgaaattactacatggtcgcacgtaacacgtaatcacaatagccaccgaatggcaaaccaaacctttggtgtaggaaagcacattgtgaattgatctcttcaaaactaaatatatccncaccagcctagctaacatncaatgttacagattggtacaaaggttcgcgcatgccattcttgttcaatcaccaaaagctagatcctggccccatttctatcttctcatgtgatactagtggaaagtgaacatgcactagcatttgccctacaagattcttcaagctaatccatntanggatcttatacctatatcataccatgtcactata

SEQ ID NO: 35723 - DNA, 180 bp, Glycine max
  unsure (1)..(180): unsure at all n locations
tgacactcaccgtggacaggctgatgtgtttggtttgtgtaacaggttgtgattaatggagcaaccaaggaaataggaaaggtagcagttgtggcagcgactaatgcatgtataatataggtagcangaacggtggatacttgtcatattgcggaaaacattataaaggggttttttctt

SEQ ID NO: 35724 - DNA, 354 bp, Glycine max
  unsure (1)..(354): unsure at all n locations
gaccatcaatgacctgaattntcttgatcattaacgagttattctcattgagagctgtgactaagttcctcctttcttctaaactagccttgaactgtatctccaacttagtataccttgatctccaatggcgaatagtagcagcaggcccatagagttaaacctcagtagaatccagactattgttggacccaacatagtccatcatctcttagtcaaccttcgtgagcaagatatctatggtaatgaactcaaaccccttgatatcaacattcagtagcgaggaagatcatgagtcacaatcacatgatcaacctgacatagaggactcggatgatattggatcaccatacc

SEQ ID NO: 35725 - DNA, 310 bp, Glycine max
  unsure (1)..(310): unsure at all n locations
atgacaaaaagctcanaagtcaagaacacttcatgataacaaagatgatgatctcaagaatcaaagaatgagttcaagattggaatcaagaatcaagtttaagattcaagttccaagaatcaagatcaatattcaagactaaagattcaagaatcaagagaagactcaatcaagataagtattaaaaagtttttttaataactgagtagcacatgatattttctcacaaaccttntaccanagagtttttactctctggtaatcgattaccagattgttgtaatcgattactagcagcaaaatgggtttc

SEQ ID NO: 35726 - DNA, 307 bp, Glycine max
  unsure (1)..(307): unsure at all n locations
acagagatctgtatggtgatctgcaaatgaacattgacccacactctngcaacaggtgcagatgcatatttctgattcatggcaagttgagttactacgttggccaaggcatcaagttttccctcaagctttttattttcagcagatgaagatgaatctgtggccacctcatggactcctttgaggacaatagcatcatttcttgcactgaattgttgggagttggaagccatcttctcaatcaaattcctagcctcaacatgagtcatatctccaagagctccaccactggctgcagtaatcatac

SEQ ID NO: 35727 - DNA, 342 bp, Glycine max
  unsure (1)..(342): unsure at all n locations
atatttgaagggtcatgactnttcaaattgaatntcaagaattccgttgctggtaatcaattacacatcaatggtaattgattacacattcaaaattcaaatttcaaacccttttagaagatgaattgcaaacttgtcttctgataatcgattacattgcctggtaattgattaccagagccttgacatgttggaaaaaatgtgttntgaggcaaaagctgatcttgaatgaatcttgaagcaatgcttaacctttgaatgttngttgaagtgatcttgannagcaaccttgttgattattctttgacatcatcaaaataatgtattcatacattcacaatc

SEQ ID NO: 35728 - DNA, 310 bp, Glycine max
  unsure (1)..(310): unsure at all n locations
gcgtcggattgaaccgtcacaaatgcgttccctctaatgggttntntggttcattggaggttctctgccgacaaaactgtgatctccacggttctagacatcccaatagatgtatgtataagatatcanannattgatttntaaatgaatctcaatacttgaaagaacatcaacgtatcanaggactagtcttgaactctcaataagataccttagtgaagaaagacaaaagggtatacgagagatgtgggaatgttggagatttcaatgttgaatggaagaggagaagggagatgaaagtgttaaatat

SEQ ID NO: 35729 - DNA, 369 bp, Glycine max
  unsure (1)..(369): unsure at all n locations
actcagagtgtaaaaaaaaatattacatctgtctatgccatctgtatngaatccacttattcctgcattgttcacctgcacatgtatantgaaaattttattgctatggtgaactcattgagaattttcaacatcaccaatataagtcatgacagggtttggtactaagagtctaaactctgaatcaggttggtgtgagccagatcacgctgagctcaatgatnttgcagatcaatcaattatgaacaccattccaagataaactacaaatatattgctagcttgtagaattatgaanaccattccaagataaactacagatatattgttcatcctaggaagacttattaggggaacagatggagaatt

SEQ ID NO: 35730 - DNA, 250 bp, Glycine max
  unsure (1)..(250): unsure at all n locations
gaaagaactacaaacaagacgcacctgttgtgataaaaatcgctgcttttcttgagataaaaatcacagctntagtgttctttgggcttctatgcgaaacaatgtatgagaaggatcatgaacacccaaacaattaaccaagaaaattaagctttgaaagaactacaaagaanacgcacttgttgtgataaaaatcgctgcttttcttgagataaaaatcacagctttagtgtgttcttcgggcttctat

SEQ ID NO: 35731 - DNA, 334 bp, Glycine max
  unsure (1)..(334): unsure at all n locations
gttcacattcttggtctttctttgtctaacatacacacttactcaaactcatgaaaagaaacacaaatttcatcacaatcatgcattcaatccaaaatcaaaccatacaccaattgtcacaaaaagataaaagtgttctacttccatatcatcaaaatcaagtcatactgttccatatgcttcagaaggagcaaaccaattacccataaataaaacttgcagtgtatataaacatagaagagatactatactgaaaccataattataataacaataaaccaaaagaaaacanaaagcatcatcaggaatcaacaatgtcaacagtgtctacact

SEQ ID NO: 35732 - DNA, 387 bp, Glycine max
  unsure (1)..(387): unsure at all n locations
aaccttgtatttggctatatgtattatggtattgaacaatntactatttccttatttgcatggtatgtttgaacaaatattaagtatgttatttgactatgtggattttatagttaatctattcatgattattgcttcatggttcttgcttcattaattggttgatagtttttccatgaatgttgtatggatgtttagttatatgtgaatacttcanatntgatatgaactntggcattntgttgatgccaaagggggagggtaatagggattaaatcaagaactcacatgagtaatctactntaatttaagagaagcataaattcanaaacaaagggggagaatntatgtgagtgatcgactaggaaaaaagtgtgtatgtatgtt

SEQ ID NO: 35733 - DNA, 173 bp, Glycine max
  unsure (1)..(173): unsure at all n locations
ggtacctggagatatgtcgcggnggtcaagagaccttggggacgtcaggtggggtgctattgcccaaaaccaagcttgaccaatcccgacccaacccgggcataatcggtcagtgagaacctgtgatgtacctaagcaggcgagctcctggcagtccacagataaaaggaaaa

SEQ ID NO: 35734 - DNA, 467 bp, Glycine max
  unsure (1)..(467): unsure at all n locations
aactacaaaaaccaaaatcctttggtccttcaacccttgaggaattttcttttgtgaaagcctcaatttaattttattaaatgtnttgcattcctatntgaaaatacttctttaaatcccttgaaaagtgactcatcacctataaacaaagggtggttagaatataaaacttcacattcctcattacaacaggttaggatagaaacaagagtatntttcctttgctntatctttctctctctattctttctctttcaactctntcttttaactnnttttctctcgaaaatctttctctctncaatttttttctcttaaatctttctctctcaaatctttctcaattatttntctgtcaactctttntctcttaacttcttttctttctcttttgacttctcacttttcttgtcattcttntcttttcatatgtgtgtcaccttgacttctagagtagaacaacatta

SEQ ID NO: 35735 - DNA, 402 bp, Glycine max
  unsure (1)..(402): unsure at all n locations
gcttctttgagaaaacttccttgagaagctagagtttatctacacacacncttctcataactaagctcacctccttgagaagcttccttaagaagattcctaaagaagctagagcttagctacacatacctctctaatagctaagctcacctccttgagatgagaagctagagcttagctacacacccnctataatagctaagctcacccncatgacaaanaacatganaataaaaaanaagtccttattacaaagacaactcanaatgccccgaaatacaaggctaaaaccctatactactagaatggccaaaatacaaggcctagacgaaggannaacctattctaatatttacaaagataagcgggctcatacttagcccatgggctcganatctaccc

SEQ ID NO: 35736 - DNA, 429 bp, Glycine max
  unsure (1)..(429): unsure at all n locations
gtgcttgttttgagctagtaatgcatcttgagatgtgagctcaagaagactcttctttgtaggtttgtaagctcattcgtgaaggatggcatgatcactgatngccatattntccattaactccatagcttcatcaagggtctttaatttaatttttctgccagcggatgcatcaagaagctccttggaatggngtcgcaagccatcaatgaatatatntagctgaacaggctcactgaacccgtgagtaggagtctttnggagtaaaacatggaagcggtcaagagcttcacttaatgattcatcanggaatngatggaatgatgagatntccacctttcctttagcaatcttggactcttgaaaaatatntatttangaaaaatctcaccatatcnttccattgtcagcaagcctgtaatcgtcatt

SEQ ID NO: 35737 - DNA, 450 bp, Glycine max
  unsure (1)..(450): unsure at all n locations
ttattattttctgtctgaatcagacatnccgagaaaaaggtactgtagtttgaagntgctcaaagctaaggcattcaagtncgagcgtctcgatatactacgagactcaatcagacatccgagttaaaaggtattggcggttgaatttgctcaaagcttcgggattcaatttcgagcctctcgatatattacaggactncatcagacacctcgagtaaaaaagtattgtcgnttgatttgctcagagcttcacattcaatttcagcgttcgatttttacggactaatcggatgtcgaacaaaagtattgtcgttgaattgccagagctcgattaattcagcgctgatatatacggatgaacaacttcagaaagtatgtcgtgaatgccaaactcgattcattgaccctgaaatacggaccacaacatcagaaagtttgcgtgattgtaat

SEQ ID NO: 35738 - DNA, 333 bp, Glycine max
  unsure (1)..(333): unsure at all n locations
agtgagctgcccagtgagtataatgttagttccaccttcaatgtctctgatttatctctttttgatgcagatggagaatccgatttgaggacaaatccttctcaagagggagagaatgatgaggacatgttcaagaacaanggcaaggatccacttgaaggacttggaggacctatgacaagggctagagcaaggaaagccaaggaagctcttcaacaagtgttgtccatactatttgaatacaagcccaagtttcaaggagaaaagtccaagggtgtgagttgtatcatggcccanatggaggagaactaaatgacaccactctgtctcaat

SEQ ID NO: 35739 - DNA, 252 bp, Glycine max
aacatcaattggaacttgagatttcaattgaacgatcccaagttaaactttggtatagttccagcaaaaggagcttacaaaaacaaatcattggcaacaagcttaacttgttatctggtcatgggtggcacttcactcgactcgaagctgtctggttagttgccaataaaatgtattctagttcaattgttatagcactatctttcggattaatagtgcagcaggtataaataacataatattatgtgcata

SEQ ID NO: 35740 - DNA, 396 bp, Glycine max
  unsure (1)..(396): unsure at all n locations
aatgctcacgcttctcacaatacattactcttcaaagagaaagagcctacgcacgggcaaaatagttntaccgctagttttctacatgacacaaaggtagatagactgctataaagaatatgcttaagtaactggtataaaggagaaaaggaaacttaatttaagatgaagatatatagttcttacattaaattcnnttatctttattattgcatagtttatgttagaaaatgtaaaacagctgcgcacattaaatagccgataaaatgtgagttgagccaataaaactagaataatatgnttttgctcgattnggttccagctcatggnggcatgcatgcntgcaatgggttcctgactcanaagttcgaaaatanatatcatanataactatta

SEQ ID NO: 35741 - DNA, 272 bp, Glycine max
  unsure (1)..(272): unsure at all n locations
gagacgtaaaaacaaaatgataacggaaaattttctcagcttgaatccctgaacaatcaatattaggtaagaaaaccagcatgtattcctcatttgtagactggagctttggattatttctagacactaaaatatattgtgaatcatgtaagtttttccttcttcaagtactttccaaaaagtgctgacatattttttcttgatagatgcatgaattgtatcactcaacatataaaaataaacaaatgttagtccaatntaaattagaaaat

SEQ ID NO: 35742 - DNA, 573 bp, Glycine max
  unsure (1)..(573): unsure at all n locations
atttgaatgttncttgatcatctattagcgacacttgatactaaagctgtggctgctgtctcgtagttccgcgagctgggttttttagtgaggggagagannccggngtccttaacccttgatgactttcttctgtgaaagctcaatttacatcttattacatgtctgcattcctatttgaaaatacttctttaaatcccttgaaaatcactcattacctataaacaaangcggggtagaatatttaacattacatactctcttacaacaggttatgatagacacaagagtattatcctcngctctaatcttctctcactattcattctctttcaactcatactagtaacatttcttcttttaaaaacttctctctcaaatatattcacgtaaatcataatctctccaaactttctcaataatacatctagcatctctttgtcactctacctcttttcttctcctttgaatctcactatctagctcgtcttacctatcatatgaattcccctggctcctctattaaacaacatatagatctatctctataacgctcgattgcttgaatcctcg

SEQ ID NO: 35743 - DNA, 253 bp, Glycine max
gaagttctagataaataaaacaggccaaacacaaatatttgtttgatgaggaagagcttatatgactattaaaggatgaaatcaccatgattgcaatttaatacatggccaggacctatttaaactatataatgtccaatccactgaaaaaaaaaaaaggatcagttatggaaggatggagggtgagaccaagaacccatgataatatgacctgcccaatgtctgtctctcgttcgcggtgcctttgacatga

SEQ ID NO: 35744 - DNA, 286 bp, Glycine max
  unsure (1)..(286): unsure at all n locations
agagaggaaatatgtcagtttagagactacatnatttttttgttagattgctaataanactacaagatttgaagacatgaagtttgatttgaagtgttcactatctcattatttgcataaaaaactctctttgcaaattcttgtgaagattagaaagtctgtctcaaaactatgttcatatcaagagataacactacgtgttgaatattcttattcttttgttagacgatagagcgtcagtcattgtgtaatcaaaccaacaaatcttcttatatttgttagactc

SEQ ID NO: 35745 - DNA, 277 bp, Glycine max
  unsure (1)..(277): unsure at all n locations
tctgnntcctacgtctctagcccattctcatnccatttgcatggtntaaacttctttatgtnnttaaagcggcagaatctgatgaaacgtgtcccttgaagggtactaatacctggngaacccacctatcatacatcgagccaggggaacgaatcatacggaagatgaagagaacgaggatgtgggacttcccccggagttagaaaggatagtcgcccatgagggccaagaaatggtgcctcatcangaagaaacagagctagtaaacttgggaact

SEQ ID NO: 35746 - DNA, 389 bp, Glycine max
  unsure (1)..(389): unsure at all n locations
ctaagctgatcaacaatcttaattttccatccactcttatatacaattgttcattcaaatcatnggcagacactcatttcatacaaaaaaatccactgcatatcattntcaaccagttcactgttcaaacaagctnttatacaaacaatcaactcanagtactgaaatttaaataactgaaatntaaagaactgaaacagaaacactgaaatntaaatgactgaacataaatcataaaataactcanaatactaaaatgttcaaaatgcactaatttaaatgtcctgctcttgtggttgctcctatgcatgctcattgagatccaacaccggagcagctggtgaatcctaagggataggctgctctagctcagatggtatggcatcatc

SEQ ID NO: 35747 - DNA, 306 bp, Glycine max
  unsure (1)..(306): unsure at all n locations
agcttgcttctacaaatccgaaatcatctgttcattttccgacattgctattacactggaatatgaagaaccatgaatttacataattaagctccaagatttcttcaatgaatccaaagtaaggcatggaagttacacgggaattgtcaagtgttgacattcaacccttagactaaccccgatggttttcattgtagtcttttctatagaagcanagcctttgtctttgatgtnttgatgatgatcgtgatgatttgatganaatgcacttctcaagtttaattcaagacaatgatcctagaatac

SEQ ID NO: 35748 - DNA, 279 bp, Glycine max
  unsure (1)..(279): unsure at all n locations
gctgtgcatgactctcggcatgacatcagcgacagctcttgttatagcatttggcccgatgtggccaaacacttacagatacattaatgccctattatttctcaccctcgacgntatctactattggcgaacgtaggtaattggggcagtgataatgttgatgattcctccaaagccttccacacagatatcttgngctacatgggcttcattcaagattgtgaccaaaagcgcccgatgaggctcagaattcatgggtagttccaacagggagaccct

SEQ ID NO: 35749 - DNA, 288 bp, Glycine max
gacaagaagtttaatgagtgtatgagcaactcaggattcaacagatgtgacatggaccattgctgctatgttaagaaatatactaatagttatgttatccttgtcgtgtatgttgatgacatgttgattgcaggatctagtatggcagaaattaacaagttgaagcagcagttggcagaaaactttgaaatgaaggatcttggtccagctaaacaaatccttggtatgagaattcttagaaacagatcagaaggaattttgaagctgtctcaggagaaatatatacac

SEQ ID NO: 35750 - DNA, 254 bp, Glycine max
  unsure (1)..(254): unsure at all n locations
agatatttgttacatatcggattcaactntccgaaatataaaggggaggttgtttgattcttatggaatgtagaaagaaacatctcaatttgattgcatcgttgacgttttcaacgtgaaactgggccagctaatacgacaagtntgtgaaaatacaaagtcngggttgctgtttgcaaccctcatttgtactctattcacattatatatcgcttgaaagttaaatattatactaattctattatagaaacaac

SEQ ID NO: 35751 - DNA, 538 bp, Glycine max
  unsure (1)..(538): unsure at all n locations
nttatccgtagacnttcgancncagagncacctgaggatgcagctatgagctaatgcaggcatgganacaatttatgtgtatctatanatcaacacgggcagcgaagaagnnatgatgntaagtngcttgatacgaacaaaaatagtacagttattatcaagtgtgtgatgggtgctaanggtcctatttatgaaagaatgtatgtgtgtattgaggcatgtaagaatgccttngcaacaacttctataccattaattggattagatggttgctttttacaaggtgattatggtggtcaattgttgacaattgtangtaaatatggcaataacctaatgctacctatattgcatatgcaatagtggagtcaaaatctacaaactcacagtcatggtttttgggtttgtgctgcagatctaatgagatcagagaaaaatggctttattttaatcagcaagggaattatatactgacacgtgttgataagcactctcatgaattttggataaaacattttctaccatgacagcagcatag

SEQ ID NO: 35752 - DNA, 200 bp, Glycine max
  unsure (1)..(200): unsure at all n locations
gcagataaatgtacatgctatatattctatccaacgtatatgatggtgtagaacaagaaanaaaatacaaaattcattagtagaccatcttattgtattagagtaaattgatgttatataatgtctacaataatgattntntatattatataacaaaaaaggcgacctcacaacgacctcatgccgagtatcttcctatg

SEQ ID NO: 35753 - DNA, 240 bp, Glycine max
tatcgacattggctttagtaagagcatgacattcaattgctagcgtgccgacatatacctggactacagctgacgtcctagtatacagttatcgcctgtccaagatgctcagagccttcgtaacaatttaaagcgtctaacctattacctgagtcaataacacatccgcatcaatagagattgtggacagacttcgctgcatcaattgagtgcatgcgagatggttcattcttggggaaa

SEQ ID NO: 35754 - DNA, 250 bp, Glycine max
cgagcaaaatagaatcctgaggttccgagctaattcaaacgataataactgtttactcagacgtttgattgagtcccgcaatatatctagacgctcgaaattcaattctgaacctgagagcgacatgaaacgagaataatgctttactcggatgtctgattgagtcccgtgatatatcgagacgctgtaaattgaatgttgaagctccgaccaaattcaaacgacgataacattttactcggatgtctga

SEQ ID NO: 35755 - DNA, 356 bp, Glycine max
  unsure (1)..(356): unsure at all n locations
tcatcatgcttagacgaatgagataactggtgctaataaagagggtgatgatgagggagaaacccatgctgggactgccattcctgtacggacaagtttcccaccaacccaacaatatctctactcagccaataacaaactttctccttacccaccacccagttatccacaaaggccatccctaaatctaccacacagtctgtctagcgcactatcaatgacgaacaccacctttagcacanaccaaaaacaccaaccaagaagtgaatnttgcagcgagaaagcctgtagaaatcaccccaattccagtgtcctatgctgactngctctcatatctacttcgatattcaatggta

SEQ ID NO: 35756 - DNA, 428 bp, Glycine max
  unsure (1)..(428): unsure at all n locations
ttctcttgagctaatgtctaatgtttatggtcgttggagcatttaatgcttacattaaatgcatgtattttttcatgttgaaacaccattctggttggcttttgtgttgagcactatagtagaaaccacttcctttgactaaaggaaaatatcacaagaaggggtatngaattgtgatttatatttttttgtttaaatccttttacaatcaaaccaagtttcctccgaaaaaaaactctgaaaatagatacaaattttaaaaacacatcaaatgatgaaaatgatttgccaagccaagaattttaaatgataaatgaaatcaaacctaggcaataaagcaaaaaaaaaaaagacaaccaagagtatactagttgctctccataaacatgccagtcttacaaagtcactacttacagtacaagatatgt

SEQ ID NO: 35757 - DNA, 281 bp, Glycine max
  unsure (1)..(281): unsure at all n locations
ttaatcaaatataatgggtagcttngctgcatgacaatgtgtggggggtgaattatgtattgtgtactgtaggcacaacctagcgcgtgaaagatgaatttacctttgagctcaagatccttatgaacttcttaatggtaacttcttacgtgcacttgctgcattttgtgatggcttacatgcctgggagacattgaagaacagagcatctgacttagatctcatattaacagacatggatctgccatcagtatatggagtttcacttcttactttaatca

SEQ ID NO: 35758 - DNA, 464 bp, Glycine max
  unsure (1)..(464): unsure at all n locations
ctaagctagacactgggtgaatcagaagagaaacatcctatccttnnggcactagtgtttgatgatattatagattagattaacaacatcgagttggagtaaatcgacggttctccaaggagtgaatagagggaattgcaactgctaactccaggtaatgtgactctgctgcctcccctgaaattggaatctggtttgccatcacagttgtaggctcgtagcttatcatgatcttggtaaagttgttcaacgtgaacttagttactggtggttaagtacgatcaaccacggtgcatagttgctacaacttgcaactagtgaacagagattaagggacaggaaattggtttgaaagaanaacaatattcttctattggttttctcgaatgatttgactataacaataaatagtaaatttatcttatactgataaaatagtgaatgctatcttattatcattgatc

SEQ ID NO: 35759 - DNA, 350 bp, Glycine max
acaacaagtttttccacatccacaaatcgcgcataaacccaccatgccctgttgcccacctccaactgagctcacgtactcccacgtagcccatatgctcgtgtctctcaacaccgggtccccatcaatcctcccaagcttccgcaacatccaagtaatacaacattaaaacagcacaaactatcacagccaagataatagggcatatgcagaaaactctgcccaataaagcaaccataatcacaactgtttctcacttaaagaccccagtaacatgtcctttggttcaattcggtaaccggtggatcgactcataacttatacgtgcgagctctagtacataaatctac

SEQ ID NO: 35760 - DNA, 297 bp, Glycine max
  unsure (1)..(297): unsure at all n locations
gaggaaaacttcctctccctcgtttttatatttgcangagcatgggtgctcgcccacgcgagctcacctgtacattnttttanggaagacataagcatggccctctacgggtcggcgttcgcttactctaacccactcatgcgcnaatacgcatcaattatttattttaaagacacaccagtcataattactatgaatttaaaggatactacgctcctttgcaacgacgttatccatctgtccagagctggcggaagggacgacaatctgtcagtcatgatcctaccctctacttgc

SEQ ID NO: 35761 - DNA, 294 bp, Glycine max
  unsure (1)..(294): unsure at all n locations
aagatcaaccatcaattcttcctagcataagttatgctgccaaaataatatccatcaatactccaggcccaacattttttatttctctaataagctgtcaatgattgctaattcttcccgccataaatgtatgtaatctaactattggttaattattcacagaaagcttgtcagtgatagaatcatgagcaaaggtgacaatagattcaaaaaatntataactcacttaanaaagaacctaatgcactgtaactntntcataataatacctcaagttacctgagacttccaaca

SEQ ID NO: 35762 - DNA, 411 bp, Glycine max
  unsure (1)..(411): unsure at all n locations
atttatactcaacatagttttttacctactnttttttccaggagaagtaatcaaattcattgaataaataatattacccataaaaaaccaaaaagtataatttatatttagttaaaacatagatgttgtgtaaaacttaaaattattcctgaaaatccacaatattatgtgagaatatgtaacattatcttatagtgtcaatattataataaactcttgggttaaaaattaaaatctttacatctcatgctatccagaaataactataaattaaaataggagaaataaacaaaatgtaataaacaaaatactcttcagtatatgtgtctctcattcataaatcggggtgagaaaccaaactatacaacacataaataaaaatattcagttgtgcataacatattgcatata

SEQ ID NO: 35763 - DNA, 369 bp, Glycine max
  unsure (1)..(369): unsure at all n locations
tctaagcaccgcagctgcagctatgctttacgaanagggcatttttcattttgtatatggaagaaccatctttccaaaattgggccaagagatggatcgtgttacatcggtgcttcatctactgccaaacacatttaggactgttgatgtccttgtttccagtttcgccttgaccaagatgtcatggaccatgttgaaaatctaaattgattctaccccatgtcctgcgtaaaaattcgcaatacttcaattgtgtattattcacatacatccatgcttttcattggttgcattgctcattgcattctttccttgaaaccataacataataatactataataaaataaaataacatgaaaatgaactta

SEQ ID NO: 35764 - DNA, 329 bp, Glycine max
  unsure (1)..(329): unsure at all n locations
gtgctcgcgactggtctctntcttcccttcgcaactggagttcactattgctaccccatagagcntccgcgaaattgttccggccatactcttccttgcgagccctcttggtctcttgttcgagggctcttgcagtaattgcattctcttcccgtaacccggcgcactcctcccgaacgtgtgtagcagccaacttgaacttctccttggcgaagtttgcctttcctaactcgctnttgagagcttggacttcttcgtcctcttccggtgcttcaaaattntcttcgctgacgactnttaactnggcgagccaatctaaacctcgtatg

SEQ ID NO: 35765 - DNA, 250 bp, Glycine max
acttcatagattctcgaatacactcatgactgaagcatatccagagtatttaccaaagaaactgtgatactcaaatcaacataatatgaggagtgttaacgtttaagcataaagataatcttgatcacttcatagacccaataagtatctatctggtaactgcggactaacctcccctttacatgtcatgtgaaactatagggaaagatcgagtatgtcaagttgtctaagtggccactccacatgtcgt

SEQ ID NO: 35766 - DNA, 524 bp, Glycine max
  unsure (1)..(524): unsure at all n locations
cgctttgggccttatcnttctctgcgacccnananacncagctgaggggctggnagtcacncttatccacatatgttggtatcttcttatggagcaccaacgcgcctcacgatatcactatcacagatgctattggagtgtcgccatatacaaaaccatggttgtggtatggccctgaaccgctattaaatggtatctagctatttgaggcatgcctgtactgcctctttgtgagaataaaccattctggattgtatcttgtgagaagaagacatttcttgaggtattaaccttctaaactagtaatccatgatgaacatggaaaagtgagtgtctgctttctgaaaatgtaatgggccgggaaaaaatgactaaatttcactttcaactgccacttttatcatggtataacgcctatatgccgatgtattctactggctataataggttgagcgtataagttttacaaacaacatgtcaagcattttttagagatggcagctactttatctggctgatgggcg

SEQ ID NO: 35767 - DNA, 260 bp, Glycine max
actccttcatttcttggatttcattctatcaatactagaacatcaacagtatagatgcatgagacgcatatcctgtgatacatatacaacaacaacaatcactggtagtgatgagttgtatacgcactacaacaaattacaaatatccaatttatgttgctccgtttgtcacgattaactgtgttatacagatagactgtatacaaagtaataggatttcttatttcctttctgcctcttatcagatgcttcatttggag

SEQ ID NO: 35768 - DNA, 236 bp, Glycine max
  unsure (1)..(236): unsure at all n locations
gcattctttacactgcattctaagcacccacgganttgagtaaaaaatatgccctatacccgggttcatgggaatataaggagtggaggtgaatctataatcatgctatgtctccgactggcttgataatagtgaaacctcgtctagagctatctctctatataatgtgttgtcgctggtattccataccgccacaatattattatcttgagtgatgatacctctagaaaacagtc

SEQ ID NO: 35769 - DNA, 294 bp, Glycine max
  unsure (1)..(294): unsure at all n locations
aaacgtgatgcctaatagcagtntggagaaattaccattcaattcttcccacttaaagccaagttcaatggtggttcgtgccttctacggcacccgccgagaggttaggggaaagatcgatctcccagtacaaataggccctcacacctgtcaagtcaccttccacataatggatattaaccccccctacagctgtctgtttgggcgcccgtggatccactcagtgngagttgttccctctacactccaccaaaagttgaaattcgtagtggaggggcatttggtcatcgtgtc

SEQ ID NO: 35770 - DNA, 331 bp, Glycine max
  unsure (1)..(331): unsure at all n locations
atgcactgacttctgccatatgacgaccagaacatcatgctcatgttcgtgttgctagagccagtgtcacgatcaaacactactttggaccggcttcaagggctcccgcacctcttcgtccatggctcctgaagacctagagcaactgatataaaagatcatataccagctggaggagccgatcacagaanaagtgactcaacaattaatgttgtccttcagccaaatgcagtcacagatgcaatcatagggactctcattgcctccaggtgttgaggttggttattttgctactcatgtcagcacaaaataaagttgtgtcgatcccttc

SEQ ID NO: 35771 - DNA, 440 bp, Glycine max
  unsure (1)..(440): unsure at all n locations
ctttcttgatgataatggttactagacttactctttgctctatctgtcccaagtgagattcgaatacgagaattccatgagagtcttgttttgaagtcatcatctgagtggagtgcatcatacaatgattactgtagtactcatagatntagaagcctttgatcatgctctgaacaatatccaacaagctcaacaacattngcatgccgtattctgtcaatattatntatcaattcaataaattcatcatccttctggtgtgcagaggctctcttgcccaacttgtctgcataacaaataccatcttcaataactaaagctacaaaataactatatattcttcanaatcaaatntctgatgtgatcaagatcagtaaataacaacaatagaagaaacttcanactaggaataaacacttcaattntctcaatagtcacag

SEQ ID NO: 35772 - DNA, 372 bp, Glycine max
  unsure (1)..(372): unsure at all n locations
tttttcagggtgtgtttactggtaaatgtgggacaagtttagaccatggtgtagtggttgttggatatggctctgaaaatggtgtggattactggctggtgaggaattcatggngcactggatggngtgaggatggctatttcaagatgcagcgcaacgtgagaacctccacgggcaagtgtggaattacaatggaggcctcctaccctgtgaagaatggtctaaactctgcagttcctaattcagtttatgaaagcactganggtgtatgtagcagtgcttgatataaccttcatcgntatttatgaccttcgaatttggaaagaggaacacgtgctgaagtngcaagaaagtgatgtttctgtatatctt

SEQ ID NO: 35773 - DNA, 434 bp, Glycine max
  unsure (1)..(434): unsure at all n locations
ctaagctcttaataccttctctgttggtcctanngtgcaggaattatattcttttatccactatngngaaanaacacacatatatngataagaaaacactccacanaacanaaggcaacaccataagattaaaaggaaaagaccacacaaatttgtttaacatggttcaagcccttattcctatatccacacaatttattntgttaatgtggttcaagatttcatccatacnatttaccaactcgaattgtttaatgtgattcaagctttcatccctatataaacaacctcacaataagttnttagcacaaacttacaaaccttccctctacatgacccnctctntcacttanggtggtgaaccctttntcgggatgggtgcttcttcttctcatataaagactctctatntatatacttaacatcctattctt

SEQ ID NO: 35774 - DNA, 321 bp, Glycine max
  unsure (1)..(321): unsure at all n locations
atcaagttccctattctttctatgatagtatgcatgatgcaatatgaaactggcttttattctcttctagaagggtacattactccaaatcanatctcatttgtacagcatcacttcaatcacatgtctctntattctcttggtaagttacagacagaatggagaaaattaagagactctntctttagtcagaaatggtggctaccaagagaaaatatcttgttaattgngataaattntgcaagcctaaaatggcagggcctacatcgcctgctctccgtggaataatgntagttggatcttactagntataagtgaata

SEQ ID NO: 35775 - DNA, 429 bp, Glycine max
  unsure (1)..(429): unsure at all n locations
tatgattatacactngagtcttggaatatatctgctgctgtaacatgtgttcattcttgttcatgtctttttcagaattttgagaaatatgttaagaattgngttgcaatttgtgcgccattccagggtaagtaattcttttctatatttataagaagtatggaattataattaagggtatttgatgaatgattcttttagcatttcaatgatgggtctattaattntttcttccatgtntaatatattggaagaaggcattgtcatcttttcttcatacgctaaagtagttgatggaaaataaatgtgcataaagcatgattntcatatatcaaanaagaagtgttagatcatacactgtcattcactnntgatgtgaccaaatatgatttgaactttaatagctntnngtgccttcacgtatcatct

SEQ ID NO: 35776 - DNA, 280 bp, Glycine max
  unsure (1)..(280): unsure at all n locations
aacgacagtcgcagcatgggtttctccttcattctcaccctgttcatttaccccagttttctcattcctctaagcaagatgattaaatttgcctctnttcatacccgctgtgatcctttacccgacgaagaccaaatacgcatagcttataggtgtgtagtccaccatttttgtatagtacaatactggtaatgtgtctactatcattgtcatcattnttttccgacattgacgtgccacttgagctgtcaggtctcatcacctttgggcggattgtttg

SEQ ID NO: 35777 - DNA, 437 bp, Glycine max
  unsure (1)..(437): unsure at all n locations
atttcgggttcctgtaactntccaaataatgtagcaaaagacatgttagttaaatctcgtgactcggtaatggatgttaccttangttgtcattctctgcttaaacatctcaatactctatttatgtgatcttcanttggaanaaatatccctaaagatgcaagatgaattattatatgtgtaaacctctcttgcatgtcttgtatactttcatttgaattcattctaaataattcatactcatgagttaaagtatntatcctagatcttcttacatttgttgtgccctcatgtgttacttgtagggtatcccacatttcttttgcactnttataatttgataccctanagtacttatccattcctaaggcagaatgtaatatatnntttagctttaagttgtatggactaatctctttcttcttcactcattcttc

SEQ ID NO: 35778 - DNA, 264 bp, Glycine max
  unsure (1)..(264): unsure at all n locations
tcagtactgttgaaagttntaaactcagcaatttaccttgattataaggcttctganatggtcctacgtctcatcaagcaacaatactgcttatggttgattgcatgcctattgctaattntgtggcattttttatttgtcacggtaagatacattatctcaacagttggcaatttgtatattntgtcattccaattatgaatattctcaacgtgtattttccacatgcaatatttcctcacaagtgtggccatctatatctac

SEQ ID NO: 35779 - DNA, 435 bp, Glycine max
  unsure (1)..(435): unsure at all n locations
atgcgtcaactggctaatanggttgagcatctgaactcatggaattctgatgatatagttccaaaacaagaagagaaccaggtgtcaaccatgtccagcttatctcttgaatttgagttgcccccgatctttgtatgaattggcctttgagccatcaaaaactgttaaatttaaggtatagcttttcttggcttcccttttcatgacttaatttatcttttcagtacatcaatgaggcgagactgcattcttgtttccataaatgaattttgtagggttntggtctagattcanngctttatgttatacatcacgtactctgggtggtgtaaatntaaattaactccaagaagcaataatgatcagagatnnttgttccatattggaattcactatggattatatatcataaccatgcacacaacatanatctga

SEQ ID NO: 35780 - DNA, 386 bp, Glycine max
  unsure (1)..(386): unsure at all n locations
cttgcagataatagcctcanaagttgattattatgacttanaattaaaggttgcaccattacactgtcataccatntaaccacaacacanaatctaatacaaagtcacactaaacttgagttacacaacatttgcttaagacactaagtataaacattgcatgaagtatagatgcattcagtgtaaaactgaaacctcgtgggtgataagcattaatgcatcanaatatctgttgaatntacttagccatacaacaatcaagtatttattcaatgagtaacacctaactcttacactatcaatacnaatttgcacacaagaactaacaaacacatgtagtcttaaactggaactgcaganataaatcatatctaaagaactcatgt

SEQ ID NO: 35781 - DNA, 368 bp, Glycine max
  unsure (1)..(368): unsure at all n locations
agacaaatcgcatgaataattgagccaaactgtattagcagtacagttgcacaatcaatttacaaaactctactgtctgaaaattctgatcatatataatataacatacctaanatgttgggtgtaaaatattcctacttcctacaaagccattgcatcttccanaaccgtgcatgacataatataaatcccctaatataggtgctcatttgtttctagtcaacccaagcaaaaaccgagaaccctntcctaaacatagtgcatgatggtctacacatcccttagagattagaagtgtgtgccagaactcgagctgttctgggaatcataagatctctgacatttcggcatgctttcaattcaacatc

SEQ ID NO: 35782 - DNA, 155 bp, Glycine max
agataaaggagaagaggtgagaggaggcgtcatcccctatggaataaaccatggaaggaggatcttcaccaccaagagagtgccttctataagaagcttgaagaggaagctcctatggaggaaaagaatgagagagagatagacggcgggggggg

SEQ ID NO: 35783 - DNA, 267 bp, Glycine max
  unsure (1)..(267): unsure at all n locations
agatattatcatataatgttagagggttgggtaatccaatcaagtggaagaatataagaaaccttgtggcaaggaaaggcgtgcaaatgttgtttatccaagaaaccaaaaaagaggaagtgttaagagaactcttaagatgttcaatgggtatactcaccatctggaggtgcctcggcggggcttctatgtctttggaactcacaatctttctctatgtcatcttccttctttggagaggactttgtangggtgaaaggggtatgt

SEQ ID NO: 35784 - DNA, 345 bp, Glycine max
  unsure (1)..(345): unsure at all n locations
ataattgtattttaattccatataacagcgcaatgcatgtatggctagctactatccatcaattatggcgaaggtctccaagtatatatttttagatcaagagtacaacacgttcacttggactcggtttcagtggacgaggatatatacttttagaataagtcatatcatttgtggcaacgcatatgtataaatatttacataatacacttgtcacgtattctttggaccatacgggtgatcatatccattagaatagagaacaaaatttaagagtggtactttagtggtattttgtaatcacattaaactnttattttgatactcacatactaagcaataata

SEQ ID NO: 35785 - DNA, 394 bp, Glycine max
  unsure (1)..(394): unsure at all n locations
gctcatgtagaganatactntaatgcccatatctttcttgtgtcaattgttgctagcggtnttgcctctctgtctttctctctataatacgctccctgcatacctttgtcctcccaagtgacaagttccaactgcagataaatatttgcttctaacaaatacccctataaattattgttttccttacattanggtaacccataagaatagggatggaatctttgagattaaagttgttaccctcacaaatatggaagtgagcatggttacttttttttttttttttaaatgtggacatgaagatgagtaccgtagcattctctacccaaattctattcactgtcatccttagtcctaacattacatacnttttttcccccttcaaatgataaaa

SEQ ID NO: 35786 - DNA, 251 bp, Glycine max
  unsure (1)..(251): unsure at all n locations
cgaccacgancaacaaagnactttcggcacctactatatgttgatttcaccaatgctgctatcggtatgttgcgacaatccttcaataccttatttatacattcagagaggttggttgtcatgtggccatattgacgtccttatgtatcataagccatggtccctttgtctttgaaatgcgatcaatccatagtgctatggctggactcagttgacgaaatctttctaaattntgataaaaaaaaaatatg

SEQ ID NO: 35787 - DNA, 290 bp, Glycine max
  unsure (1)..(290): unsure at all n locations
gctctagcttctcaaggaagtcttctcaaagaagattctcaaggaagtcttctcaagaaagcttctcaaggaagctacctagtctataaatagaagcatgtgtaacacttattgtaactgtgatgaatgggagtcttgtgagacatacttcanagttccacttctctacctctgttattccttcaatgtcgtactcccccctctctctatctctcagatgtgccatcattatcttctattntctaaaccctngttgcaccattttaattactgattggtcttaattgtca

SEQ ID NO: 35788 - DNA, 341 bp, Glycine max
  unsure (1)..(341): unsure at all n locations
cacgcgcgctaagngcgctatccactttctctgagctagngggnngtgcgctaagcgcgcctacaaaggcccaaagtccacttcagcagctataaacagagagccagtccaagggaaacaagagaacaccaccacagaatcccctctgtgggaaatcattntctctctttctttcatttactccctttctttcaccccccctcattgtaaaaagccctgaatggccatagtggctaaacccttagttagggcctgacagcctagaagccaatgcgatgtatgatgtactcttcactatctatcaatgcaataccaggttnttctttgctattttcttttct

SEQ ID NO: 35789 - DNA, 454 bp, Glycine max
  unsure (1)..(454): unsure at all n locations
tgaatatgatgtagaagaaagtgaatgtgaaccttttacccctttgaaagacttgtatttaaaaatgttttaaaatacttttaattaatatataaagtattattcctttattagtatatatgtgaggggctgagagtgtcacaataacaagggagctattactaagaattaataaaggaccacaaaatntgaatgataaacaatacagcatgtttaaaaaatttaatatactattattatattcttatctaatatttaagaatattactataatctacacccatgcattaagtataaagtaagtttatattattattcactcatatatcatcattnaatataattttaagataaatattagtagtattatagatgaataaataatattgaatgaagtttaaaattgattacactgtattatatacttatattttattaatacaaacatacttta

SEQ ID NO: 35790 - DNA, 187 bp, Glycine max
  unsure (1)..(187): unsure at all n locations
tatcttatacgactagattaatgagctcacttcatctattattgagctanacctcctangaatacgtctactcagagaaaacttcacagagaatctactcacatagagacaaattacattgcaactcaatgcacaatgcaatttttgcatatatgaaaatctagctctgacagtttctatttctcta

SEQ ID NO: 35791 - DNA, 320 bp, Glycine max
  unsure (1)..(320): unsure at all n locations
gcaagaattaagaaaaaaaatgatcaagattcaatacaatgattaatccannatggttgtattaatcgntgtattcaatctcaaacggggaactatggttcgctcacaatgcagaaaatgttaatattaaacaatactcatatatgaacaacaagtgtaataatgacataagtgtcagaatgacatacatacctcanaagacgctagtaacaaaagctgaatatggtgccggcagngataattatatgaagttatcttcactcaatcaaaaaagaaatcagtagcgcttaacttctatgtcagtcaagttataatatcta

SEQ ID NO: 35792 - DNA, 561 bp, Glycine max
  unsure (1)..(561): unsure at all n locations
ntggcttgacttggancctgaacncngacgaagaccaccggacgatgcagctattaggcaccgctgaaaagtttgtgtgtttgnaacagcacgagaaagagaaaattctctcacatgtagctatctaactcctgcgtataccaaaagctatgttaccacagagtttattgagtgcttgtacacagttggaccgcgaagcagtcaaacaccgcgttcgagattcattttcacatatgtccaccgctgggattactcagaaatgcctgaggacagagaaacgttcctcgcatacagacagagaaatggatgctcanatcccttctgctactctctaatgcttgagaacgctagcataacaactagagctaacgtctgaggaaacttaggaaacagatagagatgccactactgctgtcggaatacacactggaagtcactctgatgtangggatgagcttatggcactggggtatgaatgaacatatgtgtgattcttagaagatccanntggattaccacagtacaccgtgtgtgtctctgtcntgtctcctaagcgacatg

SEQ ID NO: 35793 - DNA, 296 bp, Glycine max
  unsure (1)..(296): unsure at all n locations
tgacatcggcaganatgcacttgagaagagaaaggagcctatgctctacttgtgatgacaagttntcccctagccatcgttgtcctaataagcaatattttgttccacagtgggaagaagaggatgaacctgcattacaaccagatccaccagacgaggttgagacagctggtgacgcctagttgcaagatcatcatttgtcttataatgctntaaaaggctcatcaagtcttggaacaatgaagtttcaaggatcaataaatggattgcgagtgcacgatctactagataatggg

SEQ ID NO: 35794 - DNA, 264 bp, Glycine max
  unsure (1)..(264): unsure at all n locations
caatcctataacgcaacgtggcggacaaaagtggacagttaacttgaatgaccattattgtcaatgcggaaagtattctgcacttcactattcatgttcacacattattgctgctttgtggtacgtcagcatcaactacttncaatatgaagatngtgttacacaaatgagcacatcttataagcatactccgcacaatggtggccccttggaaatgaagcgacaatntctccttctgatgactcatggacactaatacttgat

SEQ ID NO: 35795 - DNA, 371 bp, Glycine max
  unsure (1)..(371): unsure at all n locations
tctttaacggagagggttaccactactgganaacccgaatgcaaattttcattgaggcaatagacttaaacatttgggaagccatagaaataaggccttatatacccaccatagtagaaagaaccacaatagatggaagcacaacaatagaanaacctagagatagatggttngaagaagatagaagacgagtacaatataacttataagccaaaaacataattacatctgccctgtgaatggacaaatattntanggtttcaaattgtaagagtgctaaggaaatgtgggacactctacaagtaacacatgaaggcacaacacatggtaaaagatctaggatanacacattaactcatgaatatgaacta

SEQ ID NO: 35796 - DNA, 268 bp, Glycine max
  unsure (1)..(268): unsure at all n locations
agagttagaacaacatganaattatgattgtcttgtgagagtttttgctcgaatttgggttgccccatgtttgatactttacatagaggtagcatggaaaacaccttgcaatagtgtgtatacataggttaatataagaagtatgaaatccctagcaaagggcgaatgattgtcttcctagatgaatgtatgatagtgtggaatgccttttttgaatgcaaatatgtgcaggatgtaattagttttccaatatgcatataaataaata

SEQ ID NO: 35797 - DNA, 390 bp, Glycine max
  unsure (1)..(390): unsure at all n locations
gcccactccatcattaggattagtatctgacatcttanacaaacaaatcaaacgtaacaagacaattatagttgctgtttgaatacctcacccactcaagtgtatcacacaattatggcttttctctaatgaaacactcttgccttttaccactctaattccccttgagttcttaggcaattcaagagaatatggccacaacanagaacaattcaccaatatgtgtaaggtaaggctagacaaggaaaaggttaaccaagataaaggctaacaatgtttttaggcacaaatgaaggaaacaaaattcagaatntaggaattcaagtaacaatccttcatgcaaccaatatattaccttaaagagttttttttttaagttcttcaagcatg

SEQ ID NO: 35798 - DNA, 141 bp, Glycine max
  unsure (1)..(141): unsure at all n locations
ttaattgcgccccgaactgccctcgtccacgtctgatgaaatcatgagcattctgccaatggaaacatacaaaccgatgataacctggacgcatcggataaacctgtcgctgcgttatatatgcatgtgagacgtagcaan

SEQ ID NO: 35799 - DNA, 377 bp, Glycine max
  unsure (1)..(377): unsure at all n locations
ataatattagtgcatattaattattaaaacataaaatttgaattatatatatatatatatatatatatatatatatatatatatattgtattcgatcacaagagtgaatgcttagaccaaagtttaaagccagaattttctaacgtgtgggctaatcatataatatcaactcctaatcagggttcgatgttgtcatataattaanaagatactcataagttggtctgtatgtaaaaggagaaattaataaaaatttctcttgacataactagaaagagaagaaaagaccctaagaaattaataattaatcatatcggtatctataatcttacatgtgtaattatttattatttaaaagtattctttttatcaatttt

SEQ ID NO: 35800 - DNA, 342 bp, Glycine max
  unsure (1)..(342): unsure at all n locations
tccaatttggncccaaagtcatgtctccaatatgatccattgcgataaaatcttgcttattntatgtaaaaatatacatcatagattatatattnttgaaacctgtcttggtccattagtcttaatcattnttgccttttattntttgtattcatacttcaacaaaaagataaaacaagaattaatntgctaatttctttttgctattatatnttgaattaattgtntttaattcttttttgctaaaatcaaagtactaataacatanaagtagtgagtagttattaagagagagtgatagaagtttaanaactgataaaatgtaaaaatgtctaanatttg

SEQ ID NO: 35801 - DNA, 299 bp, Glycine max
  unsure (1)..(299): unsure at all n locations
atttttattaaagatctttgaatgttgtaaaanattatgactatgagtgtaagtttttggtacatgtcaattcattagtctttgagttagaaatttattgatttccaccctgtgcgaactcagcatttgttataaaatgtttaaaattcaaagagaaagcatctgtttttattttttattaaatttgcttcacaaccccttgcaaactcagcaggttgcaaaccaanatgcattcatgtgatatagtgcaatccaacaacaacaacatcccgtaaagttcaaaaagctaggcacagtca

SEQ ID NO: 35802 - DNA, 271 bp, Glycine max
  unsure (1)..(271): unsure at all n locations
gatcaggagaagacggccttcacatgcccttttggcgtctntgcttacagacgaatgtcattagggttatgtaatgcacttgccacatttcagaggtgcatgttggccattnttgtagatatggtggagaaaattatcaacgtattcatggatgagttcttgatanttgggaaagtgtcatttcatggttcgagaaggcatagtcttgggccacaaactntcagcccgaggaattgaggtagacctggccaagaatgatgtcattgagaaa

SEQ ID NO: 35803 - DNA, 311 bp, Glycine max
  unsure (1)..(311): unsure at all n locations
aactacttcaaaaccagtttgaaattagttntggctcanaaattagttttggttgaaaactgaattgggaccacaaccagtttgaaactggttcgaccaaaaccaaaccagttttaaaatataaaggtagtttagttttgaaatccaattcatataattggttggacttgaaatattcagttatacttaatatttctactatcactagtgaaaagatcaaattgattttattctaaaatgttgcaagtcaaatgagttctgagattangcctagtggtagaaacaaagtttctctaatcatctacattcat

SEQ ID NO: 35804 - DNA, 398 bp, Glycine max
  unsure (1)..(398): unsure at all n locations
atttgccaacaagttagtgtttaaattggagaatggattcttctgattgaattttcacttaattttttttaggcgaaaatctccaccaacaaaatcccatgtccncgttttttattaattttttttcattattcttaattaaggactgaaattntactggacaaatgtcaaataagagaatccaatcccatttaaatgggaattgctacacgcatcatttgttgtgctggtacacccagcataatatatgtaattctcatattgntcttttgtaattggttatggatcaaactccctaagccaatatagttagcaatcatgacttctattaattgactaataactaatatgtataaatataatgcttatattacactaactctatgatactatgcatg

SEQ ID NO: 35805 - DNA, 254 bp, Glycine max
  unsure (1)..(254): unsure at all n locations
tttttgatgatgacaatccctgaaatcaagacaaactatatacaagatgatagcacgttcacacaacccttactccccctatcttttggcatgtatgcctaacttttcttaatgataaattactaattgatttctgacccaagctctctcaagttctcttcccctttggcaacatcaaaaagaactaaacaatacaaacaaaatccaaacaaagccaaacattataccanaaataaatccacacaatgtcataa

SEQ ID NO: 35806 - DNA, 431 bp, Glycine max
  unsure (1)..(431): unsure at all n locations
ttactcttatgaatgatgctctcctacaacctaagacaaggtagaaggagataaactgtacaggctcaaggttcaatcaaacaatcatactttcaactcataatgggtgcaagggataaaacaatcatgcacaaggtaagctntttagctaagtggctatcttcaatcaaaacatggccttcgtcatcttcaatttcacgcattcattccatactctgagattcatgcaaaaataattactcaatgttagtcgttctctcacaattaaagatcacactctcaccgggttgtagctaatgcgttccttcacaatctacttgacaaaccaactaacattntcagtcatgatcctaattccatgttctttctcttctaatgactgcatgctcattaaggcatatgatctacgcatttcaattcactcacatcat

SEQ ID NO: 35807 - DNA, 395 bp, Glycine max
  unsure (1)..(395): unsure at all n locations
taactaataatagatatccacaatccanaactagggactgcatggatggttaaagtactaaaagataatcattgcatttagtattttacattggacaatgtcttgaacaatcaaactagtatgtgtgaagcaatcagttnttccaaaaacactgaattgatgacaaaggccttcccccacaatttactagattggtctcaaatgactaatggctaatatatttctcttttacaatgtatactccatactaagcaccaacagctactntactgcaggataaggaatgcatcgaccacgaaagacaaaagaatntgaaccatanaanaacaagcaactacantgtaattatattctccatttttttataatgaatgggtcagaactgctagtatatt

SEQ ID NO: 35808 - DNA, 418 bp, Glycine max
  unsure (1)..(418): unsure at all n locations
tctaagcacctgccgctgcagctgtttttcaataaaaaaggcgttgagatttttctntctgtatgggaaaagaaaagaaaatntaagatacaaaccattaaaaaaaaaaagaataaacttcccaagtcatctcaagtaatgcagcaataattaaatgtatcggcttttccggtcactcgttagttatgagaaatgaatgtctagcgtcaacattgacaagataattggttgaacatattcaaattaatcatcgctaatcaacgaatcaattattgtcatcgtcatgaatggcaatgagctgtttatagttcatggaaaatgaaatacanaactgatgctaagtttacctctctttttgtttggagtgaacgttccncttgcttatttcacatacgagatcagtttacataacagagct

SEQ ID NO: 35809 - DNA, 386 bp, Glycine max
  unsure (1)..(386): unsure at all n locations
ctaagctcctcagctnggncacgaaccgaccgtacgcaatattatggttcatctctctccaaatacaccttctggtataaagataatattaaaaattcacattcttatctatcaattcaatggagcttctcaatctcagctcaagttaccaagccgaactcggcttcagcaatgtattaagttcattgggttcaagtcttcaagatcattgctagtgactcccaatcctttatagggtttggcgcatgtggaacattcttaagctttnttttaagaaagtataataaaacataaaaatatatagtgtatgaatggataanagtatgcaaacttaagtntaggttacttaatgaatttgcanaagcaatccacatctcacctttaat

SEQ ID NO: 35810 - DNA, 584 bp, Glycine max
  unsure (1)..(584): unsure at all n locations
nttaaacccttgnacattgaatatcgtgcatacncgngatcctctgagtcgacctgcggcatgcaagctngaagggagcagcatgtcgcagtctatantgatggttggtgggatggagagcggcggngtcagggcctgtggcggaacaagctcacatggtanggatgcgacagatgcttattaccagaacatgattgaagcaaacacccagtaatgctctattgctagtaaactatgctacgaatctgaaggaggaagattattgggtcgagcttaaacttgcaccggagcgtgaactgtttctctaccatgatgaccaagagctgatacctgatagagagacacaaagctactcacttagatactggactaccataaaggaaggaagataacacattgataccaagcctttccgggagagtatctactctagtaaagactaccnctcatcatcgcttggttgattacatatacccgcttgagcatgacatgcggcgctacagttacaataagtttgtgtgattcccgcaagctaacactatatgatgagccccaacctcatcagatacacacaagtgaaaccg

SEQ ID NO: 35811 - DNA, 293 bp, Glycine max
  unsure (1)..(293): unsure at all n locations
gtcctcggcaagctcatcgtcgctgctcttcgtaagggaatgtacatgtggctncaactngattctcctccttttccttccttccaattcggtcctctctctctccttaaaccctagctagcttcctcgttntctctttctcttttaactccaaatatgcaacttatgagtttctacttctatctgtctcangtatggctggtgctatatacattaaaggagctgcagtaacaaactataaaaggtgaggcatattatgtgctatgaataactaatactatctattatactga

SEQ ID NO: 35812 - DNA, 303 bp, Glycine max
  unsure (1)..(303): unsure at all n locations
agcttcaatggtaatgtcacatcatataatctcatatccatatcanantatggagatcgcggtttggtattgtaagtgacatcctgcgccacagtgggtttgattgngatgacactaagcacatgatcacagttgagaatgaanatacttggaatgaatattgcactataagtattctntaatgtattgctatttgttattcanagcagaatggattcgactntctctttttttccaatcgcataaatcgactaaaccgtttcgattcaagatgcttcanaactgggatgatatagtggattt

SEQ ID NO: 35813 - DNA, 258 bp, Glycine max
ctaagcttaactataactgtgcctcacagatccatacatgatctacatagtattccttgtgagatcaaagcaaggacaaatcaactggacctcctccagatggaggtccaatgatcctatcaacaaatggacttgcctatgcctatggctctacctctggctgagcctatataggttgttgtcgttagtcactacagacgcaattagtctctaacacctctatgtagcgtcatccccttcatgcgatgatcccttata

SEQ ID NO: 35814 - DNA, 210 bp, Glycine max
  unsure (1)..(210): unsure at all n locations
catcgntctggtaaatagaaatctatcttaacttataaggtgtttggtaggtaagaanttgaaagcttggaagcaatgcctactccatgctgaattttcttataatanggtattaagctntactacttattctccttttgagggtagttaccggttctagtccactgccctttcttaattntgtaccttgcctaacacttctgctttgat

SEQ ID NO: 35815 - DNA, 163 bp, Glycine max
  unsure (1)..(163): unsure at all n locations
aatgaaagtctactttttttttcacgcacgttaagcccaagctacttaactttatataaaanaaataataaattattggaaaaaggatgattntgctgaattgatactgatagactttcgttgcgtatagaagaagtgtgaattgaaaaattctttcttcaac

SEQ ID NO: 35816 - DNA, 153 bp, Glycine max
  unsure (1)..(153): unsure at all n locations
ccgatcatgattcggtcanggaactangttgatgggtcagtggttgaactgaacgtgggtcgctagccgaactggtatatattaaatatttaaaatttatagtaaatatatcatatantaaatacttcttttggatctatatcataaaatttt

SEQ ID NO: 35817 - DNA, 307 bp, Glycine max
  unsure (1)..(307): unsure at all n locations
cttctgctttattgttaccacatagtggtacctggagatatgtncgcggggtcaggagaaccttgggacgtcaggtggngtgctattgcccaaaaccaagcttgaccaatcccgactcaacccgggcatagtcggtcagtgagaacctgtgatgtacctaaacaggcgagctcctggcagtcaacagataanaggaacaaagaccacaaagcaaggaggcttgtggtggctggccagttgtgaaacttgatngatatgtgagatatggtctctggtaatcgattaccaagggtgggtaatcgattac

SEQ ID NO: 35818 - DNA, 420 bp, Glycine max
gctaacagattctcgggaggtatagcagcacgatttgtgttgtttgatcattctagaagcttaagggcagtgatgtagtcatgccacatgccgctaggattgttagttagctattacgtaactaactgcatgtataaaagccaagttcaaacctgtgagaggaatatatgaataatattctccttctgtgcttagattctctctctctcctttccctctagaatattctgtcacgagaaaaggttcttcctaacattggtgctttcattgtatcctctccgccatggctgaagctacactatcgaaaacaagcatggagcgttgggaagatgcgtttgcaaaactatctgcatccatgacttcaaagttcgatgaacttctcaatcgtatgaatcaattagaaaactcccacaccaacac

SEQ ID NO: 35819 - DNA, 435 bp, Glycine max
  unsure (1)..(435): unsure at all n locations
gctcctcgggaccatntcctgcgaagggcaaacattggaaagatagttttaccatgtgatgctactctnaaaacanagatggcatacaacctcctacaataaacacaaacatcaatgtgaatntagagcaaactcatgcacatacttacttacgaacattcactcgcacaagatattcttgtgactaagaaaaatgcacaatcgaggcaccttcgttacctatattatgtatatgtacttccaacgtgtatatgctatctacatcacatgcactgcctttgctgaatgtacatacatgcctactcatagcatattggctaccaaaatntgcacacgtgcacatgctggtatttctaatacctatgcatatacaaactgtgtgatgaatctcggctacctacacagtaaggtgctacatttcatgctntattcaag

SEQ ID NO: 35820 - DNA, 294 bp, Glycine max
  unsure (1)..(294): unsure at all n locations
ttctggaggaatcttctggagggcccaagtgggcctggttgctatntgcacccccatgtttaataaatgcacccacccttctatatttttggtaattctttgtctgtaacgttacgaaactttacgaatttcgtaacgatacttatttcccttccgcaaggctacgaatccttacagatttatgtatttactctttgttagctatcgaagaagttacggaaactcacagattgcgcanaaacacctctnttcgacttccgccacattacggaatttcacggatcgcgcaagcct

SEQ ID NO: 35821 - DNA, 300 bp, Glycine max
  unsure (1)..(300): unsure at all n locations
agcacanaccacagacccttgcgacaggtacagatntctgattcaaggccaggtgggttaccaagttgaccaacgcatccagtttgccttcaagcttcttagtttcagatgatgcagatgggttngtagctacctcatgcactcctctaatgactatggcatcatttctggcactaaactgctgggagttggaggccatcttctcaattaaatatctggcttcagcaggagtcatgtctccaagggctccaccactggcagcatctatcatacttctctccatattactgagtccttcat

SEQ ID NO: 35822 - DNA, 377 bp, Glycine max
  unsure (1)..(377): unsure at all n locations
agcaccgcagctgcagcttacaagtttctgagccctcttatcattctatgttttaacctccattntcaactctaagcttgattntcatttcattttcttgctctattctcacatgtagtttctaaatcttatttttgcactcttgaaggttggaaacttgaatctaaactccgccattcttccctctaaatttcatggagactacaagaggtagggaggggtctccatctcttgaaccctatgtttgatgttaaacttccttgaacatgttgctgtcttgaaatatttgtgcttgcttccctattatggatctatgtgttgagctatattacttgagttctttaagccaaaaatgagttctatgaatgttagaactt

SEQ ID NO: 35823 - DNA, 387 bp, Glycine max
  unsure (1)..(387): unsure at all n locations
gcttcacanaagtcttcacanataatcatcacacagcaganacctagctagactttccatcatatctcccaaaaccccataccctcgaaaatcaaaggagaaagaagtccacccaaacctgaattttcgaagtcccactcgtagccacgcacttcacgaccccgaaaatgccctcctttcgcgatttgnggcagaaatgatggccaaaggttgaagctctgcttggagcttcaatggagaatgaagaagaagaaaatggcaacgtgagggagagagagagttgtctganaagtgtggnggctgagtgaagagagagaaaagctntntggttntaaataanagggttttctctttttctatttatttatntaagcaatgccacatgtc

SEQ ID NO: 35824 - DNA, 419 bp, Glycine max
  unsure (1)..(419): unsure at all n locations
atccttaagcacctgcggctgcagcttagccttgagagatttgagtgattgntatgttttagaggtggaggagacatccccaccactttgtaatcttacttatccttccaaaacctgttcttgggctgaaaggtgctaacttgcaatggaaggctaactctctcgttgggggtttctgctgaactttgatgtaaaatcctttactatctatttaaagctgttattatgtgtttattgcttctatttgcacttaattcttgcatgcttgtggcttgatcacccatttgtacgtaaagttaggaattttggcattggaaagtgttntaaatccttataactggatagagcangctagagaactgtatgtctggacagggagtgcagagaattagttatatatgccatattctaatgcaact

SEQ ID NO: 35825 - DNA, 195 bp, Glycine max
ggggcatgccctattcagatcagtgtagtcagtgcacattcgtcatttgccattcatctttgtgaccatgacaacattgacgagccaggtagaaaacctgacatctatgataaagtgtgcatgaaggagcttttcgacttcttctttgaaggctatacgtcagtcttctgccatcttctttttcttctgtgatat

SEQ ID NO: 35826 - DNA, 437 bp, Glycine max
  unsure (1)..(437): unsure at all n locations
agcttccaggctcagtttatacttcactgttcttnttatttggttagtgcttcngctnttaatttctaggaccctctctatatctgaccattctttgttgatcaattttgattagtcaaatgttgaaatttgaaatgttgatcaattacggcagtgctattttctgactatattgagaaatngttgtttagtttggaatcactatatccatgccataaccaattttcatatggcatatagctaattattttaatgtaagagaaagacttgataaaatntagctagatgtcatatttgaagattaaccaagataataaacacatgatagtttcggattatacaatgatgtctctcccctccttccaaaccaacaaataattattgtacaataatgcaactactacatgttcatggtccctgactagttttacatgata

SEQ ID NO: 35827 - DNA, 303 bp, Glycine max
  unsure (1)..(303): unsure at all n locations
gagaacanaagtactacgagtatattntagcttaactccatttggtggtataaaatcgnttacatgtgtaccatatatatatgaaaacttttgatcaagaggctgcatattatatgggagggtaatatgaagagctggtattgaacagcatacaacattcattcatatatacccgcaatcaaactaattgaaaggaaacctaagaaacanattgcaatgacagaacctgaattgatcgatcgaattccttganattaaaccgagatttcaatctctcctaagaaagataaagtattaacatct

SEQ ID NO: 35828 - DNA, 246 bp, Glycine max
gaggctaagatgagactactgaggtggcataaatgaggctgaaacaaaagagtacaacgctcactgaagaatgattcaacagtttttggtttggggagctatcaagagcatttagagggttggagagctcttacttgttctctatgacttccctaccaactctcatcattttgtgcatcatttggtcttaattcttcttcttcttgtagttatataatcagttctatacatattgggatgtgatgt

SEQ ID NO: 35829 - DNA, 562 bp, Glycine max
  unsure (1)..(562): unsure at all n locations
atgggatttngcttgatcattgaacangcacacananganacncaagcgtgtgggagcataataccatgcacagancgagctcttatactttctgctaagnaancgccaacacgcggcaatgtgtactactagatcctgcattatcctgcacaacagctaaacttcattgcctcaacaagacacgcactacgcgacccctatatctatccaaatgaatgcttttgtgccttaatgaatgccaaaggcgagagctcctgctggagcgttcaatcagaatggagagaaggagcaagtgctcgagacgtagatacatacatgtgtgactattgtggtgatgaaaaatagaggataactcctggctcaaaattcaacggtgtcacttatccataagtcattcacaaatgcccatgcaccatctcagggacaaatgggccgctgcactcttgctgttcaatgctacaccgtagcagactattttcctctagcctgactcagatacgaggtgcctctctgtcactgatagaattcaccctcggcagctccaaccgagggtttgaatgt

SEQ ID NO: 35830 - DNA, 255 bp, Glycine max
agagaagttgaactctgagttgcgactcacacgactctaattcatcacagttacggtacgtgtgacacatgcttctatttatagactaggtagcttccttgagaagagatcttgagacaacttgcgtgagaagcgttttggagaaaactgcattgagaagctagagcttatctacacataccccgctgataactaagctcacctccttgagaagctctcttaagaggatatctaacgaagctacagcttagctac

SEQ ID NO: 35831 - DNA, 370 bp, Glycine max
  unsure (1)..(370): unsure at all n locations
ctctgaattcacaacgtgcgcttagctctatcctctctcttatcgcgattaagngaatntgagcttagcgccagtcgtgcgctgagcctggctgaagacaactgttgtgcatagtgcacagatctcgcgcttagcgcgcggccttgatattgatgctctgtcagattcttctgtcgcgctaagcgcgctgaagctacgcttataggtggatgtgcgcttagcccactgatgagctaagttcaattgtcacttttagcacttcatgacttagcctctgtgtcacctgaaattgcacatatttcatcattaaatccaatggacatattctagagcagctntaacaatataacaagatgtattacaaaataac

SEQ ID NO: 35832 - DNA, 295 bp, Glycine max
  unsure (1)..(295): unsure at all n locations
agtcacctgcggcatgcaagcttccttatgataagtgagtcttgctaccatctttttatcaactatntacatgagtgctntgaggaagtctcgagctanaatatcctatntttgattggggctggggttcaagaattaaaatttgtttttgtttagtaagttcaattgcaccttttctcttcaacattgctctttgaggactataatctcattaacatgatcttgtttatcatggacatctatatgaaatcagttgtttgagggctataatctcattaacatgatcttatttgat

SEQ ID NO: 35833 - DNA, 265 bp, Glycine max
  unsure (1)..(265): unsure at all n locations
tctatggaggctagatcttcgagcttcaatgatgctctttatgtgtgattntccaccatggagatgcaacggaagataaatgagatgaggtgagaggaggcgccatccactatggaataagccatagaagaaggagcttcaccaccaagagagtgccttggataaaaagcttagagaggatgcttcaatggaggagaagaaagagatagagaaagagagaggtgggatcacgacattgaatgaggaaaagaggaacaatctagtg

SEQ ID NO: 35834 - DNA, 338 bp, Glycine max
  unsure (1)..(338): unsure at all n locations
agcttgagtcaatanaatcagaatattcaaattattatatgtgtaanangcataggtgaaatacagacattatacagttgcaatgacctgtcaaagtcgatacacactcgattccagcaaggagaatatgctgattacattgggctaatccaataccttntacatagtaaagaacataatgatgctgaagcataaaaaaatgcaatacgcctctgacactcttgctaaaacaatggttttaattgaattgtaaattaataaattatggacttatctatttggatatattggaatggaaaacggtcttttttaatttaccacaattatcttggtatcaa

SEQ ID NO: 35835 - DNA, 302 bp, Glycine max
  unsure (1)..(302): unsure at all n locations
agctngctctanattacattgatgtttgtatntatgggaggaggntacatgccatatttgctttaagagtaatgtcccactgaaactaactctccaaatgtttgccttcgcaggaatggcaccgaggaagcttgcctcatagaggtccaggagagacaaggcggncgaaggaactagttccgccccggagtacgacagtcaccgctttaagagcgttgtacaccagcagcgtttcgaagccatcaagggatggtcgtttctccgagagcgacgcgtncagctcatggaggacgagtatactg

SEQ ID NO: 35836 - DNA, 266 bp, Glycine max
  unsure (1)..(266): unsure at all n locations
atgttctcagaatattcataatcggaatgctcannattataatgctcagaatcaccaataacagaatccttatgatgctcaaaaggtactaaatgatgtctaactaatctataaaatgtcctatctatctcangatcaaaaggttgtaagtaagatggatttcctctagtcatacactaaattcagcatgcacaattagttgccttcttatgcaagtaacagtgtaggtttgaactacagctgccatcaaatgatgtccaaatgac

SEQ ID NO: 35837 - DNA, 261 bp, Glycine max
  unsure (1)..(261): unsure at all n locations
atctctgagtcacctgccgcatgcaagcttgtccatgtcaagagccaacaccaagttgctgtatgttttacaaaagctcttccaggaccaattatnggtaaagtcattgccaagttgggaataattaacatctattcgccaactcgagggaggtatcacaattctgttgtaaatatagctctatttagttataattatctgtcaaactattatgacatatatacacgtagctagttactatgtagttagttaggtactctt

SEQ ID NO: 35838 - DNA, 245 bp, Glycine max
ccatggtgaataagcaatttcaaacttcataaggcacccatcatactattcctcagaaggacaatcaaccaaactccgccaggcttccatgacatacttccatgcattcatttacataaccaggtgatctacaactacgtcttcatattattatcaatttgaaactgacacgaccagttggtacactcatggaatacagttctcacgacatttatcaatgttagatctttgtcggtaacaataac

SEQ ID NO: 35839 - DNA, 420 bp, Glycine max
  unsure (1)..(420): unsure at all n locations
gtgtggtggtcggcagaggagcataaaccacagagtctggcaacaagtgcaaatttttgattcatggccagttgagttaccaggttaaccaaggcatctagtttacctttaagcttcttagtctcacctgatgaagatgaattcgtggctactttatgcactgctctaatgacaatagcatcactcctggcactaaattgctggtagtttgaagccatcttctcaattaaatttctggcttcagcaggggtcatgtctccaagagctccaccactggcagcatctatcatactcctctccatgttattgagtccttcataaaaatattggaggagaagctgctcanaaatctagtggtgagggcaactggcacatagtttcttatatctcttccagtattcatacaagctctctccactg

SEQ ID NO: 35840 - DNA, 268 bp, Glycine max
  unsure (1)..(268): unsure at all n locations
gcttctgtgggacatcttgacttgctntccaatctgacattcaccatatattctgccttcttctattttcagattgggaatgcctctaacagcacctatgtcaatgatnttcttcatgcctcttaagtgcagatgtcctaatctgtgatgccatattttgacttcatcttctttggagaatagacatgtggaggagtaactggtttcttgaggtgtccataggtagcagttgtcctttgatctgctgcccttcattagaacttcactc

SEQ ID NO: 35841 - DNA, 512 bp, Glycine max
  unsure (1)..(512): unsure at all n locations
agctngaaacatgctatnngttttcactaagaatcttgtgccatggcttgataattgagtgccctctatgattatttaactttntgataaacaaagaatattntaaaatagacttaattacacttagtttggactgagtgtaatttttgcccctcaagtttttttttctcgtgccaattaaaatgaagcaaattaggttctactattagatttctgttactatcaaaacccttaaattctaaatttctactcagtaattgattaaattattttaaaccttttcattgaaaaactcaccaactaaaacatcaaatttcacccaacatcagtaaaaaaaatctcaaatttttcccacttgagatcataatctatcatatgaaattcttaatatcttataaaananaaccccactaaattatgacttctaacactttaaatatattattagtcctcacatgtttgaaataaaaataataagaaattggtcttaattgagtcaatgcatcatgttg

SEQ ID NO: 35842 - DNA, 434 bp, Glycine max
ctaagcttctagagaagtggtccttgatatagtattgaagtctgtatgagttttctagtgaatttatccttgctgccaattgaatatcagcacaaggtatgagtgtttgtgctttgtacacgcccatgatcgacgggatcttgcccaacgagtgtgttagattaggtacttggcagtttggattatcagatgcaattatacaaagatactaaattaatcttacttaaggggttcacaagtttcaaaatttgcctagttgtaccttgtggcaattaatctcacatggctattaattattattgtgtgatctgtctagccaactacacctaatggaacaagactgtgttggtgctgtaattgtaaaacatcatcattaattgccatcttacatggttacatgtccaagattggtgttatgtatcttgaactatatg

SEQ ID NO: 35843 - DNA, 489 bp, Glycine max
  unsure (1)..(489): unsure at all n locations
atattcattatgtatcatatatatcaataaaggtgattattattactattgttattggtgtcttatttgtatattatttatattttaaatttaattaatgttgtacgtaacgtaaaaataattatgaaacacacttaagtgaacctgttntatcatctataataaggttttgttatctcaaaccatgatagcanaatgaggaagacatacacctacggccaattgactctaaacctcatgaaagactataccatatataaaagagaggataaagattcatctgcttcatgttgtttatnttttattcttcattnttaattatgataataataatgaggttagttcatattttcaataaacattacaatgttttgagacaagaaatacacaatttacatcaatattatatgttattgataatataaacataaatgtattctcaccttctaacttacaaatgttattaatgtgggtttatatgaactctgc

SEQ ID NO: 35844 - DNA, 375 bp, Glycine max
  unsure (1)..(375): unsure at all n locations
tgaganagcaaaccatctgaatgtgaatatggtaaagagcttcataataaaatgcatatgatatatgagcttcaagagaatatgaaagacctgagacagataaaataaatgtctcaccagttgtgaactagagctgctttattctcgttcagaaaactgtgacatgatgcaattttgaacttcacctgttaaatagatccaaatgagatctttatacaaacctggacatgccaaaccttgaaagcacatcacgtcaatccaatccaacattcatgaatcaaagagaaacaacacacacgcagttacctcattctcattgttcattgacccattgcaggaattcggagacgaagaatcggtcgatgacaatgatat

SEQ ID NO: 35845 - DNA, 433 bp, Glycine max
agcttctacttatatggcagggcgggcttccttcactttcttgtctccaacgcgagctatgaccaccgctcttccttcccgcgatgcttctctttatatccgcttgagtgggtttatagcctaaaccatatttcccacgatttcctttggcatttatcaagctagttatgccaccgttgtctttgcctaaacccattccgggttcataaccgttccccaacataacacgggccatcattactgctgcatcggataggcaagcttgcccagagaaggagtccacggaggaaatgcttaccacctcaaaagactgtgaagcggtttctagtgactcctctgcggcctccacataaggcatagaggatgggcagctcaccaagatgtcttcctctcctgacacgatgaccaaatgaccctccactacgaatttaac

SEQ ID NO: 35846 - DNA, 437 bp, Glycine max
  unsure (1)..(437): unsure at all n locations
cttggttagacatgatggggtcatgattgngacttgtatgattcaatttgggcaaaattggatgagggaaagagtggttttcanaatctgcactttatgcagaattntgctgttagaatgtgcagcagaaatttgtataagtgcagaaaaatacttgtgtatggctggttgtgaaaagggtagtacatgtggggttctggacattttctagtggatcccaactntcaaaatgtagacttatgtactagagacttccagtaaaagtttcgagtcgatccaacggttaacgatttggaacgaagagcatgttactggggtaattgaatgtgaaaagctgtgatgttggtttgtgttttgggcagagttttctgcctttgccctatattcttggctgtgttagtttgtgatgattgaatgtggaattacttggatgttgt

SEQ ID NO: 35847 - DNA, 401 bp, Glycine max
  unsure (1)..(401): unsure at all n locations
agcaaacacatagaaacaagaattcactatcttatggatcaagtgaacacagagaaactgacagtggagtactgctacacatttgatcaacttgctgatattttaaccaaacccctcacaggggagaggtttaaaatgttaaggggcataattggctcgatgaacttatgagatcataattaacggagggtgtgagagcttactctatgtttgtgtggggtagaattgtttgtgcttngaatataagagagagtaacagaatgttaaaattctggtataagtactagcctaagtgtgaacggctattactctgtttgtgcttgtataanagggcatacatacatcttaataaagaggatctattcattctatcgatttcagtctctagtgctattcatagt

SEQ ID NO: 35848 - DNA, 401 bp, Glycine max
  unsure (1)..(401): unsure at all n locations
agtcgtataaagtgactatcatggacccactctgcatgtctgttaattcaccatgcgatatccatgtcatgtaanttttcttaatcccatcatactatagatggtcgtatatgtcgtccagtatttgtcgccttccgttcaaacaattgatacaagttcatctgatcgacttctttctgaagcaaattgcaagaactactcgacgccttgctcatattctgggttgatgtgactntcattcatccaacttcgatccatctaagtaataactccgtgatactcacaaagttattcgatgcatganaatctncacattttattataggtgtggccctatcccattcaggaagaccgtantttatgggtagcttatacgtcangggttaattctatttgtaaat

SEQ ID NO: 35849 - DNA, 552 bp, Glycine max
  unsure (1)..(552): unsure at all n locations
actgtctatgaccgtcacctacacgtggcggatgtactatngatggtcgcaggcttctcggcgaganaagaggtgccacaccaccttnttagatgcgacttccactttcccgcgagactgactaggaagaattcangcgccccaagctctgaattccaccatatcgtgagtcgtgactcccgaatatatatattgtgaaaaaagaaaccttattgacagaacatataatgcagcctctattattgtccaacccgaaggtgtgttggaagattcacgtcggaatccaacgactgagcttgctttactctcattgtcatgtatatgacacgtgagaactgtgaacgcacacagcgccatgagtatgtgtctttatcagagcacaaggtgaccactgctatagaccactacatctgttgctngcttctatagtcagaacttcaatttatacatcaacgaatcacattccgtacatgaacagccagcactctatggactncgatgactttacttatacgagttgaccacaggcgcacatttataactaaacatccg

SEQ ID NO: 35850 - DNA, 351 bp, Glycine max
  unsure (1)..(351): unsure at all n locations
gcttaacattcaatgtcgagcatctctatatattactggactcaatcagacatccgtgtaaaaagttgttgttgtttgaattagctcagagcttcaacattcaattntgagcgtctcgatgtatgacgggactcaatcatacatccgagtaaaaagttattgtcgtttgaatttgctcagagcttccacatttaattatgagcgtctcgatatattacgagactctatcagacatctgagtaaaaccgttattgccgttcgaatttgctcagaggttcaacattcaatttcgagcgtcttgatatatgactggactcaatcagacattcgagtgataaagtattggcgttt

SEQ ID NO: 35851 - DNA, 432 bp, Glycine max
  unsure (1)..(432): unsure at all n locations
cgacaataactntntactcggatgtttgatattgtcccgtgatataacgagacgctcganattgaatgttgaagctctgagctaattcaaacgacaataactntntactcggatgtctgattgagtcctgtcatatatcgagacgctcgaaattgaatgttgaagctctgagccaattcaaacgacaataactttttacacggatgtctgattgagtcccgtcatatatcgagacgctcgaaattgaatgttgaatctctgagccaattcaaacgacaataactntntactcggatgtctgattgagtcccgtaatatatcgagacgctcagaaatgaatgttgaagctctgaggaaattcaaacgacaataactntntactcggatgtctggatgagtcctgtcatatatcgagacgctcganattgaatg

SEQ ID NO: 35852 - DNA, 441 bp, Glycine max
  unsure (1)..(441): unsure at all n locations
caagcttctccccattntcttataaatagggggagatgtgaagagaaatntcgttcagccctcctggtaattcagaatcacttaaaattagtgagaaaaattggttccgtgaagaaaatccaagccgaggcgcttccgtaacgtttccgtgggtgatttcgcgaaggttttcgaccattcttcgacgttcttcattcgttcttcggtcttcaaccggtaagttccctagatcgaacttttcaattcattctatgcacccttagtggttctcattgttnttacgtgctttcatttacatttttcgtttactttccgtaccccctnttgacgtgcttaagccatttatttaagtcatttctcgcttaaatctaaaaataaaataaatttccatcgatcgttngaattgtatcatccgttaatttcggttaaaatgaattccga

SEQ ID NO: 35853 - DNA, 513 bp, Glycine max
  unsure (1)..(513): unsure at all n locations
atgctgcanacatctacaacagaacaattatgacctctctagcatcaggtacaatcccgggtggaggaatcatcccaaccttagatggtcgaatccttcacaacaacagcaacaacaaccttattttcaaaatgctgttggcccaagcagaccatgcgttcctccactaatctagcagcaacaacagcaacagcaacagccccaaaaataacaaatagttgaggcccctccgcaaccttcccttgaagaacttgtgaggaaaatggctatgcaaaacatgcagtntcaacaagagactagagcctccattcagagcttaaccaatcagatggaacaattggctacacagttaaatcaacaacagtcccagaattctgacagattaccttctcaatctatccagaatcccanaaatgtgagtgacatttcattgaggtcgggaaaatagtgtcaaggacctcaaccagtagcatcttcctcatccacaaatgaacctgcccaacctcactctac

SEQ ID NO: 35854 - DNA, 402 bp, Glycine max
  unsure (1)..(402): unsure at all n locations
agcttgagccaanatcctgactcaccataaaccttgtacccaggtgagaatgccaatccttaccctcggaagcaaaaaaagaatagaggggaaatttccgatcaaagaaaaagagaaggaaaatttccaatgaaagcaaaaaagaaatgaaggaaaattccccaatcaaagagtgggagaaagcaaaaaaaggaaaagaaggaaaattccccaatcaaagagtgggagaaagcaaaaagaaaagaaaggaaaattcccaatcaaagaatgggaganagtaaaaaaggaagaagaagaaggaaagaaagctcctgatcaaggatcgaaagaaaccagaagaaatgtgcagagaggtctntggaccatacaatatctgaacagtacagaattgtcaccaaatga

SEQ ID NO: 35855 - DNA, 231 bp, Glycine max
tgctaccacctcgaatgactggaaagcggtttctaatgactcctctgcggcctccacataaggcatagaggatgggcagctcaccaagatgtcttcctcgcctgatacgatgaccagatgcccttccactacgaatttcaacttttggtggagtgtagagggaacaactcccaccgagtggatccacggtcgccccaacagacagctgtagggggggtaagatccattatt

SEQ ID NO: 35856 - DNA, 426 bp, Glycine max
  unsure (1)..(426): unsure at all n locations
agcttgtcctgctctccatgcatatataacaggttattggataaacgaagaaacggtgacggttgtcccanaagtttaattatgattgattcaaaagaggagaatctagctactcctttgatgtaaaccaaacgtacataaaaactataccgttatatagatatatgagttagataaaaaaaatggttgcatgtgcaataagacttcaagtttaaaaatacctgattgtataatgaaaccggactttaacgaccanaaanaaaaaactaactccaatatgctttataactaattaaaggctaccaaaaaacaaactgaatgctaattgagaagagtacaaatacacatatggaaaatgaataacatggatataattatatactaagggaaccagtatagtgaatggatttttactactccgtgatt

SEQ ID NO: 35857 - DNA, 295 bp, Glycine max
  unsure (1)..(295): unsure at all n locations
tacaagacctgatgaactgatattcaatggattntctctttcaataccaagtggcactaccgcagctntggtaggacaaagtgggagtgggaaatccacgggtgttagtttgatagagagaatttatgatccacagtctggtgcagtgcttattgatggtatcaacctcagagaatttcaactgatatggatcagacagaaaattggcctagtcagccaggaaccagttctctttacttgtagcattaaagagaatattgcctatggcaaggatggtgcaactgatgaagaaatc

SEQ ID NO: 35858 - DNA, 464 bp, Glycine max
  unsure (1)..(464): unsure at all n locations
aagcttctatccaggctcatctnggtggtgaagctccttcttccatggcttattccctagtggatggtgcctcctctcacctcttctcctttgtcttccgctgcatctccattgtggaaaatcaccattaaaggacctcattgaagctcaaagatccagccaccatagaagctccacaagcaagctntcatcagtaagttccactacacccttgagctttagcgccactagtttctaatcactgctctggtggatgtcatcattttcgtagtgcacataattggaataattatctttaggaagctataaatagggtgctagtgtctgtatctttaagctntntcttagttatgaatttgagagcactctgagggttttcagagttntgaagcatggacaactccgtaaggacaaatcgtgatcatcgntctntccttattggtatgtctatgtctatttcatat

SEQ ID NO: 35859 - DNA, 494 bp, Glycine max
  unsure (1)..(494): unsure at all n locations
tacgagcgtctccatatattatctgtcctcaatccgacatcggagtaaaaagttatggtcgttagaatctgctcagagcttctgttctgaatnntgagagtctcgatatactacggaacacaatcggacatctcagtaaaaagttatggtcgtttggaattgctcagagcttctgttcttaattacgagagtctcgantatatacgggattcattcggacatccaagtaaaaagttattgccgtnntgaattgctcaaagcattcgttgtcaattacgagcgtctagatatattacgggattcattcggacatccgagtaaaaagttattggtcttttattttgctcagagcttctgttttcaatttcgagcatcttgatatattacaggactcaatcggacatccgagtcanaagttattgtcgtttgaatatgctatgagctntcgcgttccattacgagcatctcaatatgctacgggacacaattggaca

SEQ ID NO: 35860 - DNA, 262 bp, Glycine max
  unsure (1)..(262): unsure at all n locations
tggtcataacgtntcactcggatgtcggattctagcgcataatatatcgagacgctcgaaattgaataatggaagctattgagcaattccaatggtcataactcttaactcggaagtccgattgaggcacataatatattgagacgctcgaaatggaacaacggaagctctcgagaaatncaaatggtcataacttttaactcggaggtcggatagagacgcataatatatcgagacgctcgaaaatgaacaatggaagctc

SEQ ID NO: 35861 - DNA, 257 bp, Glycine max
  unsure (1)..(257): unsure at all n locations
gacaatgcttacaaagtagagctgtccggtgagtataatgttagttccaccttcaatgtctttgatttacctctttctgatgcacatgtagaatccgatttgaggacaaattcttctcaagagggagagaatgatgaggacatgaccaagagcattggcaaggatccacttgaaggactcggaggacctatgacangggctagagcacggaaagccaaggaagctcttcaacaagtgctgtccatactatgtgaata

SEQ ID NO: 35862 - DNA, 430 bp, Glycine max
  unsure (1)..(430): unsure at all n locations
catgatacatgtcagggtttggtttggttcaaggataaaagggatgccccacattatttccatgacacaaatgcaaaaatgatgaattggaaattttatgcaaaactggtcatgcatgcacctatgtggacgctcaagtgtcaaatttttatggtcatgtgatgctaaggctcangattcatttcctctantttaaatcaacccaatgtttccaaaatatgttctnttatcaatttgtgcattcatcctagtccatttcgggcgtccggngaaatttcacagcattcacccttcaggtgtagacacattnttcaaaaattggttatgatcaatgtaatttttcaaagaaaaagtggaaatcatctcttttcanaagcatgtcgggttttagctagacaacttaatttctctttnntccacctttttctta

SEQ ID NO: 35863 - DNA, 410 bp, Glycine max
  unsure (1)..(410): unsure at all n locations
ctttctccaccactggtcatccacanactgataggaactaagcttcttttctccaccactaagactccatgagtattgtcatgccctaatttcgtccggggactattgcttgatggcatgcaacctttgattgaccgcttcaaagtacttaacaccctttgttgcacaatatgtgaagtctcgagacgcgccggaaatcaaaagaaagcatggttacgcgatccgtgaaattccgtaatgggcggaaaccaaaaggaagtattgttatgcaatccgtgagtttccataacttcttcgaaagctaanaaagagtaaatatatgatccataaggttttgtagccttacagaaagaacataagtatcgttacaaaattcgtanagtttcgtaaccgtacggaaaaagaatcac

SEQ ID NO: 35864 - DNA, 249 bp, Glycine max
  unsure (1)..(249): unsure at all n locations
tgcactctcacccatctccattacaagcctttcttcttcctgaacacacatggtcattaattcattgatagaccatttatctttatgtgtgttgtaggaaatcttanatggcccatattcatgcggaagggtgttcaaaatgaaatgcactatgaaggactcatacatatcaacctctagtttcttaagttgagctgaaatatctcgcatnttcatgatgtactcacgcacacctttcacactggtgag

SEQ ID NO: 35865 - DNA, 426 bp, Glycine max
  unsure (1)..(426): unsure at all n locations
cggcggatcaattgatccgtaagtgctttacggatcaacttgattcttaagtcttanaaaacaacttgcggatcaacttgatccataagaagcttgcggatcagcttgatccgtaaaaaatntatggatcagctcgattcgtaaaagacttacggatcaacttgatccgtaagtcttaaaaattaacttacgtactcaattgatccgtaagaagcttgcagattatctatatcaactgcggatcaactaaaacctatgcgaatcaacttattgcatatgcggatcaacttgaatgaactgggtgcacaaaaatcattttaaaaatacacaagagtattttcacctcttcactttaagtgttgggtgcacctagcaacatccgcgtgctaataatgctatgtggtagtaatatntaatccctatccc

SEQ ID NO: 35866 - DNA, 475 bp, Glycine max
  unsure (1)..(475): unsure at all n locations
gcatccgcacctggaaggatctaattactaccttccttaggcagtatcagtacagctctgacatggctcctgatcgaactcaactgcaaaacatgagtaaacaggaacacgagtcttttaaagaatacgctcagcgttggagggacctagtagcgcaagtagcccctcccatggtcaagagagaaatggctactatgatagtagataccttacgtgtattctactatgagaaattagtgggctacatgctctctagcttcgtggacttagttntcgcggaagaaaggattgaggtgggtttgaagaggggaaagtttgattacgtctccccagtaggtgccagcggtaggagtgtcggaacaactggtgcaaagaagaaagagggagatgcccataccgtcacttcaacacctgcgtggcccaagccaccacanaccctcgacggtacccaccaatacgcacaacatcacccgag

SEQ ID NO: 35867 - DNA, 271 bp, Glycine max
  unsure (1)..(271): unsure at all n locations
tgtatggtttccttgaacctcagtgtatactttacgcataggacaaacgccaagaatgtaaacaatacattcaaacatgggtcaaggaatcacaacgacaagtgtacctaggagcttatcagaatcagtaagtccacttgatgttgaacaatgtnttgaaaatacattataattgcgtaactaatgttttttgtcttcagggcacattggcaacttattgttctatgtccacaggataatattgtgtgttggttatgttccctgcgtaaaa

SEQ ID NO: 35868 - DNA, 375 bp, Glycine max
cccaactggccttgaatcagaaaattgtacctgtcgcaaggggttgtggtttgtgctcctctgctgaccaccatacagacctttgcccttccatgcagcaacctggagcaattgagcaacctgaagcttatgctgcaaatatttacaatagacctcctcaacctcagcagcaaaatcaaccacagcagagcaattatgacctctccagcaacagatacaatcctggatggaggaatcaccctaacctcagatggtccagccctcagcaacaacaacagcagcctgctcattccttccaaaatgctgctggcccaagcagaccatacattcctccaccaatccaacaacagcaacaaccccagaaatagccaacag

SEQ ID NO: 35869 - DNA, 374 bp, Glycine max
  unsure (1)..(374): unsure at all n locations
aaagcattcaagtgtacaccagaggcagagacaacatttgttcaattgcagaaagtcatgacttcagctccagtgttagctcttcctaatttccagctgcccttcattctggaaactaatgcttccgacactagtattggagcagtattacatcagaatggccatccaatagcataattttccaagaaacttgcacctagagtgcanaagaaaatctgactaattagagagatgttagcaattgttgaagctatagctaagttcagacactacttgctgggacacanaattattatcaaaactgataaaanaagctngagaatcattgatggaacaaccctacagacacctgaacaacagcagtggttacacag

SEQ ID NO: 35870 - DNA, 452 bp, Glycine max
  unsure (1)..(452): unsure at all n locations
tctctaagcaccgcggctgcagctgagctntaatgcatggcttgttatatgttatatgtggcacttcttgctgcatgtgtacgtaggggtttgaaggttctatctgccacggcggctggtgccagagctgatccaacaagaatacgcattgccgatctaagagagtcaactaatgatccattatctcgagctgtaatgttcctttgcatgcctttttttatttgtattctctagagcttaaaccatatatattaattggtatggcacttcaacactaattctcactccctcctgtagatgtacatccaaatatcctaattatcccaatagcatactgatgtattgcttttccacaccacgtgctaattacaatttacagacttaagtgcanatacttatataaaggtgcactcgtgtgcaccanaatagactaataatttttaaagactact

SEQ ID NO: 35871 - DNA, 66 bp, Glycine max
atatactgtaagagtcatggattaatgcatattttttttatgacagataactttacgatatcttcg

SEQ ID NO: 35872 - DNA, 462 bp, Glycine max
  unsure (1)..(462): unsure at all n locations
agcttgaatgttgatgaaaaaatgtttttgagcaatggtgtaaataaatatgaatcagatgctatcttctttttcctcatgtgcatctgctacatctgctctgtctctatgtcctttatcatagaacggcactttattccttggtttgactcgttttctacatttcacttgatactacaggtagttatgatatcttcgttggccatggttatgtcatttgtaataaatgaactgatgtatattgatattctcagcagcaacttaaagcccttggaacattcgtgatctctaaccataattcagaaataaaaatgattatattctactntaaaatgtgctaactnntttctgtttgaagtatggttntatttctgattctctcantttgttatttcgttcgataatagatatatacatgctgatctgcatggagcttctagtacaggtatcaagaatcacaag

SEQ ID NO: 35873 - DNA, 433 bp, Glycine max
  unsure (1)..(433): unsure at all n locations
ggggcacccgtcatatgtggtactaggtggcgatcgggcgatggcacaaatcaactatcccatntccacaagccaggcataagcacaccatcctcagttgcccacctttaaatttagctcacgtgcacgcacgtagccttctcctcgttcctctcagcctgggtccacatcagccccgccaagctttcacaatatccaaacaattcaattccatttgtcatgaaactaccctaaaccaagagaaacagagtggaggcagaaantcttgcacaagattcattcgaattccacagttnttcctactcacatacctcagtaacatcctctttgttccgattcgtaaaccataggatcgcctcgaaaatntaactgagggttcctaatacatannatctaagtttgaccggtgggatctagaacacgagatatgcta

SEQ ID NO: 35874 - DNA, 396 bp, Glycine max
  unsure (1)..(396): unsure at all n locations
aaatcaccttntgctcaggacaaccctccacaaagaaaatgacacgtctgtttatgtgaagagagggtataaacttgacttttctcttactattttcactttgaccgattataactgaacattgcactgtgagttttcttttgttaacctataaaaaaattattgttggtaaggcttttaagataatctatataggtcaacaaacttattgttggcacctaaaaaactattaatgatttattagttaataatttntattaactgattaacaattaactaaaatgatcataaatcagccttggattgcatagtagaattggcttcggatttatgataaatgagctaacttcttaatactaaatggattaattcgtgaagataattgaatattatgat

SEQ ID NO: 35875 - DNA, 324 bp, Glycine max
  unsure (1)..(324): unsure at all n locations
ctgcacaagccaaatgagatagttgaatacctgcacagttgngatgaaattntaaattggcatcatccttgaggctgctcatatctctggaaaagtactccaaacaaagtacaaacagatcaggggagagaggatccccttgtctaagacctcgctgccctttgaagtggccataaatggatccattgactgtcacactaaagaaagtgaaagaaacacattccatgatccaagtacagaactgtgcggngaagccaatggacttaagcatccaatccaagaattcccaggaaatggaatcataagctttatgcaagtcaattt

SEQ ID NO: 35876 - DNA, 292 bp, Glycine max
  unsure (1)..(292): unsure at all n locations
agctttngctgcannaattccttttgttggtgtttttttatggttgtgctaaaggtggtcttcgtcattggaagtgcggtagacaggctatgtggttgatttagggatggcctttgtggataattgggtggtggggtaaggaggaggtttgttattggctgagcaatgacattgttgggttgcggggaaacttggccgtataggaatgatactcacagcatgggtttcttcctctctctcaccctcttcatttgccccagttttctcagtcgtcctattaggatgatcaaat

SEQ ID NO: 35877 - DNA, 324 bp, Glycine max
  unsure (1)..(324): unsure at all n locations
agatcatgcatacctttctatggctaatataccattatnttcacaattatcatacttcaagtagccaactccctagaatttataagagatcagtccgtgaacaacagtgactccttcgttcacagaacaataaatcaaaatacataccactattctaatcaaaagacttataagagaagttgtttcaaccaaatcaaatcaataacaattcacaactcttctacaacagaatgaaaatgaataaataaaagaatcttatatatcatgctgtgctntcacgctcttcttatcccaacatattaatagagganaacccagaaacat

SEQ ID NO: 35878 - DNA, 470 bp, Glycine max
  unsure (1)..(470): unsure at all n locations
agcttaagctccttcaactgcacaaggctcttaatatttgaagagtattcttgtggaaccttcacccgacgaagacactggcaaaaacttatcttctccttcttggacaaagtgtggcaggctgtgggcaagtaaattatcttcccatcagaccttggatgcaactgtgctcttatacccatatcagctagatcttgacgggtattcaagccatcattcgtcttgccttgaatgttaaggagcgtcccaatcacactgtcacaaacanttttctccacatgcataacatcaatacaatgtctaacgtcaagatcacaccagtacggaagatcaaagaaaatggacctcttcttccatatgcaactctgactnttatccttcttttgggtctgtccaaatacagtgttcaggtgttgaacccgctgatatacctgctcaccagtgaacattatcggcgcaatatcatgctc

SEQ ID NO: 35879 - DNA, 329 bp, Glycine max
  unsure (1)..(329): unsure at all n locations
gccaagcccctactttngaggggcaactcccgccttatgacgactatcccgggcaagacgatgaggaaggagatacccatcttggccccctgctccacctcaaagatccgtccccacatgaactaccccaaccgaacatagtccgccatatcccggcctcacccacacctgtaaaagaatatgttcccttcgcggaagataagggaaagaatgaggtgcttgaagagaggttaagagcagttgagggccttggcaattacccattatcggatnntggcggattatgtctcgtgcccaacatcgtcatccctcccaagttcanagtacca

SEQ ID NO: 35880 - DNA, 324 bp, Glycine max
  unsure (1)..(324): unsure at all n locations
aatcatcgtnggtgagcactgctgtacctacattgtgtgtgctctcctctcttttgttntctttattacatactcctagtcctagtatatgtcaccgataaaactgagagcatctttatctctctttccctggctacacacaggttacaaaaacaatttgattattctaagtttcgataattaattctaatgaccttacttgtattaaataatagcgtttaagtgagagggttagtctaaagaaactaaaataaaatctgctaattttcaacgaagtaatataacatttatcatctattgcaacaaaataatgattaaaacata

SEQ ID NO: 35881 - DNA, 427 bp, Glycine max
  unsure (1)..(427): unsure at all n locations
tacagtgtcatataagccttgagtctcacaatgtttggccaacgacgagtttccaagtagtccgagataaaatcatatccacgatgatcatcactttgtatagtgagccagttgcagtggaagactttgatgtctcgagagttaacgctacacacaatcttcaactcggtgaaatgatacgtgtaccgttcctgcacaagcttgctgatattggtggtggagaagcatgtgattacgagtaggctcaaagtcgtggcgtacaagtactagtttgtgattaattatcaatggaaaactctaaatcaataatctcgtaatcgacgtactagtttgtggtcaaatcaaacatagacttgtcattntggaatcgaatctgtaccattaaggacatgacctgngatcgttctatcgttcaatagtacgtcct

SEQ ID NO: 35882 - DNA, 464 bp, Glycine max
  unsure (1)..(464): unsure at all n locations
actttggatcttgatgtatagatcacagtcctataatgtaacttgaataaanaagttcattgtaaacagttgaaccatttctagctagagaacttgattatctttgattcactgggttcactcgagcagagttggctttaacattttacaaagtcttcaagccattgttgacaatgaaattaatatccagtagatgatcaaatctttcaacatttttatcagtacaaatattggcttcacgtgaatatctttatatatataaagtagatgtgcgggcatatatgtaaaatcaagtttccttccttgtttagtctctatttagtaaaatggatctcatatttcttaatanaaatgaaatataaaactataatatatggctataatgacaaatttaagagtgtcttcttttacagtgttactttatcaattgacgtacgttaaatagtgtaacatcgatcatgtct

SEQ ID NO: 35883 - DNA, 272 bp, Glycine max
ctcacacggtttctgtgtatctataccagcagcacaaatacagtttaaccatgatacccaaccatcatctgctgttgacccttcgtgcgtatatttctaagtgtaaagcaaataagcaagctatacaaaaaagccaacccttaccaactccttcaacattcacgtaagtcctgtatcatcatataaatcgatctcctttcctacacaaagagatcgatactgtcgttacgttaaacaattcaaacaagccctgcgattcatactccattcac

SEQ ID NO: 35884 - DNA, 194 bp, Glycine max
ggatccctccgacaatgattcttaacaggtctaaaccgcaagcaatacttgaatttaatggatgccccacgcttttcttaaagacatcattctccaaatcaatgcttgtctctaccattcttgggacaaacaaagttctttctggtttctattccagctttgatcctaagggggcataattattccccccctgc

SEQ ID NO: 35885 - DNA, 293 bp, Glycine max
cggcaacggaagacgagggtcaaattatgcagcgacaccacgagacaggaaaacgggcaagacacgccaaaaaggaaaccagtgtacagcatccaaccgcagagcccacacccagcaagcagagcaaaaagcaacctccccgacaccaccagaacccaaggcaccaaaacaacccagagcgcacccctacaagcaaaacgctggccaaccagacacaccagaggggcgggcgaaagccggaaaccccaaccggccagcgcagcccaaacacaaaacaaggaccaacaacaaga

SEQ ID NO: 35886 - DNA, 379 bp, Glycine max
  unsure (1)..(379): unsure at all n locations
atggctaatgttgtctctagaatctttccattggatttaatgatgaaatatgtgcattctcaggtgaaaaagaggctaagttttgaattgcaaaaagtagcagttgggctaagcgcttattcaccgctaagtacagcttcagagcacttagcacaaaggggaatctggcatagcatcagcatcaaagccatgcgctaagcgcagcaggtgccttcagccaggctaagcgcgagactggcgctaagctcaattccacttacttgcgataagcgcanaggtggcgttaagcgcaacatcgcaatttcagagcctatttaaagccagttntgtgcagaattagggtacaatgcccagggcacagaatcccacagcagccaca

SEQ ID NO: 35887 - DNA, 654 bp, Glycine max
  unsure (1)..(654): unsure at all n locations
cccgcgccactcacaacctctcnctctatatntanntatanntaatgannnntntcagtgccactcgacanctcacccaccacggagcgncgtgaggagatggaccccatcgatacgccgacactatannatactcaagctctgaaggtgcatagaccaccatacgttataggagagtgacgatattgtgtctaccatcacgaacatcggctgcctcgacatcatgggaggtaccacctgtgccgacagatacctacacctgttgagcgtgttcttcgatagagccagccgccacttcgcaaatgaagcatcgctgcatcctatccggaaccacctcacaaccgtcgaataccgccacgaacagcaaccacaaagaccttacatgaatggactctgcaagacttcaaggaagtaggacgacagaacacgtacgcgagactgacggactaggacggaaagatcgacaatcccgcatcctcggataaccccacagcacctcacaaacatagctaagtgtacgaggacaagacgcacctagacgtgtcaagtcctcaccacgactcggtaggagacgagtaggtacagtcacaacttcggacaacaccgatatatgtagactcggacggacagccgactaatgcagaccgcgccacg

SEQ ID NO: 35888 - DNA, 472 bp, Glycine max
agcttcctttagtgcgtcacatataaagccgagctctatggtggtgcgagcctttgatggtactcggcgggaagtaatggcggaaatcgacattcccattcagataggcccccacacttgcaatgtggtgtttcaagtaatggatataaatcctgcctatagctgcctcttgggaagaccttggattcatgccctgggagtagtcctatcaacgcttcaccagaaattgaagtttgccgtgggtggacttttagtgattgtgtcgggtgaagaggatatgttagtgagctgcccctcctccgcaccgtacgtagaagcagcggaagaatcgttagaaacaactttccaatcctttgaggtggtgagctgcgcctctgtggaaccaagtccgtcgctaccttctctctccaaagcggccataatggtggcgcgtgttattgctcaggaacggattgagccccgaatgggtcta

SEQ ID NO: 35889 - DNA, 382 bp, Glycine max
  unsure (1)..(382): unsure at all n locations
aagctaggagcctanactngtaacttcaatgcaaggaaacatgcttatggttatgaatccaaaatctggttctaggattagagaagcatganaatagggacttgtttgtaagaatttgggctgccccatgattggcactttgcacctaagtaacgtgggagatgcttttcaatggtgtgtaggtatatgtgtaaatatatatggcatanaaatatgttgcanagtgtgtaaatatatatgtcataaaaatatgttgcacagtgtgtaaatatatatgtcataaaaatatgttgcaaagtgtgtgaatatatggcatacaaataccttgcaaagtgaatgaatagtaaaacatgcctttcacaatatgtatatntgtggatag

SEQ ID NO: 35890 - DNA, 418 bp, Glycine max
  unsure (1)..(418): unsure at all n locations
tgcattgncactgatagtccctatcgccataatgtattacctaagaggatgatatctctataagccagtaaggttacataaaaccacgcttgggaattgtcactagaaggggacttttggatcatttccattagattcctcaattatgggcacatagaacactcaccttggcatattccttgattgcatcatgcctttcttcacggcatcataatgaacatatcgttcctcgcatgttcagttatcatattcaagcatcatatttttgcattgcttcatcatgcatatgcattcaacatactttttgttcgaccaactgcataccttttcgtttcatgatcgctcatgcatgatccttgcattttctctacaaacacagaaagcacgatatagcacaaacattgcatattcacataca

SEQ ID NO: 35891 - DNA, 203 bp, Glycine max
ttatcagtcaccaaacccggataattggtattggaaagaattcattgtttcattctcaatgtttccaaaaatccctttgttgtgttatgatccactcaaaagtatgtctcaaaaacaccgcttgttgattctttccaaagcatgttatgtccaataaaatatttatgtttaagttcaatacaagatctatatttattctacac

SEQ ID NO: 35892 - DNA, 654 bp, Glycine max
  unsure (1)..(654): unsure at all n locations
cagtgtcttactntcnctantttcgcgtaatcgatctagatattcttttaataactactgtatcttaactcatcatgacattnactcatatgttagttacagttgtgaccattgaacccccggacctcacacattcctgtggcatgctgtcatgtgtgattctacactcgaatatttactttactgcgacttgcacacaaccagtgttcattggaatcaatttatcagatggcggcctaagacgcctgcgtccacaatatgacaattcctgatgctggacgtctgcaatctgacagaatttcctaatgtctagagaaacccatcataagtaacatgcttataccgtataagccatatattcacggatctacacaactctgcgatttgcaacttaactctctctatcaattaaatcttagtcccaatatagccagccgtatacaacgatctgtgcagagctctaggtccaagatgagctatttgacattaccgataatcatcttcgatggaagcttacagactcacggtgcgtgccactaattggattattaagcctgaactgcgacttactatcctcacgaacaggaatcgtctgcatgacacagttctcgtatttccacacacattgatgcgattatcacatgttttgactcg

SEQ ID NO: 35893 - DNA, 541 bp, Glycine max
  unsure (1)..(541): unsure at all n locations
tatttatgtcgcagtataggcgacactatagatctcaagctgttattagttacaacctntagtggtaactcaatagctcaagttttatgataatgggtcaattgagatgaaattagaactgtcgacgttatattcaacaatttgaatcctacatgtgtcccatcctagaatatatatatataatgggcgctcttgtgtaatcatatttttgaaaaaaagaataattgaagatccggtgttaccaagtttaaattttctaaatattgtttcctggagtcaagttattttttattttgaattatcagtaatagacattactgacaagactaaatgttggctttgaataaatgtgaggacacaaaaataaatgtcgtatatgaattgttcatttaaatcatggttaaagatgagacaattattgttcagagaactctcctaaaagtttacttagtttctatttagagggggtccatagacagtaagggactttcttttttcttataaacaatatgttatccatctcacccggcgtaaagatctt

SEQ ID NO: 35894 - DNA, 232 bp, Glycine max
  unsure (1)..(232): unsure at all n locations
actcgcagatcttgcacgttctatggtgcgcgttaatctatctgcatctgagattcttaagctatcagagcaaatcattgctaactcaaacaaggtccataattctgttgcgtcggtgcctctcgacaaggtattatcgatttgcatctctatgcttcagtggatactgatctcattatttaccgaantaatatttctaccaataaaaagcattgtctcatttgttaagaaa

SEQ ID NO: 35895 - DNA, 305 bp, Glycine max
gataaacggaatagtggatataaaccatagatcaacaaataacaaaacagtggctatcatcatgcactaagacgaagtagttgtcacagaaataattccactaccaatctagaggaaagtggtgagctacaaatatacataaactattctgaccgcccgcctataatttcttggaatacaaaagaacaagcatcaatcagaatcacaaaattctgaatcatagacctgtagatccctcattgactagaaatatagccaatgtagtcctcataatgctaaggcatgcttcacgttacatgctaatt

SEQ ID NO: 35896 - DNA, 267 bp, Glycine max
ataaaaaggatgggaagaaaagtaaaaaagaaaagtggtggctgaccgaacggaaaccatacgaagaaaagaaagagttgattaagggaaaagagaggaagagagagaaaagaaaaaaggagggagacagaaaggaatagaaaaaaggagaggaaagaaggaaagaagaaggaaggaagaagaaaaagagaggggaaagtgggagagaaaaaaaaggggagaagaaagagggaaagagggggaaaagagatagaaaggagaaaggga

SEQ ID NO: 35897 - DNA, 473 bp, Glycine max
agcttccttaagaagattactaaagattctagagcttatctacacatacctctctaatagctaagctcacctccttgagatgagaagctagagcttagctacacaccccctatgataggtgagctcacccccatgacaaaaaacatgagaataataaaaaaaaagtgcttattacaaagacaactcataatgccccgaaatacaaggctaaaaccctatactactagaatggccaaaatacaaggtctagacgaaggaaaaacctattctaatatttacaaagataagcgggctcatacttagcccatgggctcgaaatctaccctaaggctcatgagaaccctagggcctttccttggatctctagcccaatctacttggagtcttctagccaatgctattgcggggtaggatagcatcattccctccaccttggaaaggaattgacctcacatcccgaggttcttcatact

SEQ ID NO: 35898 - DNA, 155 bp, Glycine max
gacccggtgttgagagatacgaggatatgttctacatgggagtacgtgagctcagttggaggtgggcaacatgggatggtcgggttatgcgcacattgtggatgacgaagagcttgtgtgcaccatcgaccgaccggcgcctagtaccacatgtg

SEQ ID NO: 35899 - DNA, 439 bp, Glycine max
  unsure (1)..(439): unsure at all n locations
agctngcttctacaatctcttcctctttgatgattataaccctganatcaagagacacatacacacacgttttgctagtcgatctctcacttaatactccatattctccccctatgttattgagattatgctgcacttgaaattaagataataacttatgtgagttcttgattcaatctctatttctctccacctgtggcattaacaagaagcctgagtgcgtgacaagtataagacaaacatatactattaatcattcacaaggcatacattgaagaatataaaccaatcatgaagcatgacacaagaatagatcacgtatataaacaccacatagccatataatataattcataagttgtcattttaaccatgtcaataaagaaatactatatcatccaaatgtcataataatatatattattctgataagtcacta

SEQ ID NO: 35900 - DNA, 205 bp, Glycine max
tctgagtcacctgcggcatgcaagcttatgtcatcttcaagatgcatgatacgggagttcattgcatcgaagcgatcgctgacaaaagctcaaagatcccgtagctcagtgaggacgtcatttaataaggaagaggaagtatcacgttgcggtggtggagaaggtgtgcgttcatcatgaatgggaggtggcaggtcttgcttac

SEQ ID NO: 35901 - DNA, 517 bp, Glycine max
  unsure (1)..(517): unsure at all n locations
ctaagctccttaaaagatcctaagaagctgagatagctaccatactttttaatagctaagctcatctccttgagatgaaaagctagagcttagctacacacccnctataatagctaagctcacccncatgacaaanaaaaaacatganaatacaaaaaaaatagtccttactacaaagactactcaaaatgccccgaaatacaaggctaaaaccctatactactagaatggccaaaatacaaggcacaaacgaaggaaaaacctattctaatatttacaaagataagcgggctcatacttagcccatggactcaaaatataccctaaggctcatgagaaccctanggccttcccttggatctctagcccaatctacttggagtcttctacccaatgcccttgcgggataggattgcatcattccctccaccttggaaaggatttgacctcaaatcccgaggttcttcatactctggggctcttcctcaacacctgaaaaagaacaaaacatatatat

SEQ ID NO: 35902 - DNA, 441 bp, Glycine max
  unsure (1)..(441): unsure at all n locations
agcntgagacttatcatgaccaaatctctggtatatcgcctctaccttaagcaagcattgtattcatttaagatgctagaaaatataacggtagaagaatagtcagatgtctntaataaattgattcttgatcttgaaaacattgatgttactattaaggatgaagatcaggcattactgttattgtgtgctctacctaagaccttngctcatttcanagaaacacttctctatgaaagagattctcttactcttgttgaagtccaatcagccttgaactctaaggaattaaacgaaagaaatgaacaaaggccttctgtacatggngatggactcatagttcgtggaagacagtataagaaggatgataagacaaaagggaaaagatccaagtcacaaactcgatctggatctaatgtaccagacattagatgttatcac

SEQ ID NO: 35903 - DNA, 467 bp, Glycine max
  unsure (1)..(467): unsure at all n locations
gctgttcaaagaccctaatggcttcttgattaggccagtatttgtgtgggcatgatcaaatgcccaaggttgagataaataaacatgtggcatcaaatttctaaaagagagtgatgactcataattgagatgatttgaaaagtggtctcaggtgatgtgtgagaaatggtttatccacttaattttgagtggatgattagatatctcatttggcgattctgagataccatgtgttaggaagattcatgaaattctattcagatagganagctcagatgatagaaggagaagagggatatcacacaaaattgttaagtttattgtgaataacaatntataatgaaagtgttcatagcactctttgaacctaanatacgtatctccttataaaagagacaacaactaatttgtctaaccgaaaatggttacaacananaacaattacagttacaacacaacatatgtta

SEQ ID NO: 35904 - DNA, 394 bp, Glycine max
  unsure (1)..(394): unsure at all n locations
acaccatttcctagttaaccatgcattnatgtaccatgttcaattatttgttntgttgntgtgtgtttttttttagaaatgggtttatgatcccaacatggttggctcatggtgcctaacacatgcaactaagaatgtagtgtgaagtttcacgcttccccttttttgcttttgtttgtagaggaaaacgcaaggatgagcaaacatgaaaacaaatggtatgcaattttgtagatcaaaaagtttgttgaacgcatatgcatgatgatgccatgactcatgcaaaatgtgaggctggaatatgataacggacaaatgcaggaacgatatgttcattatgatgttatgaagagatgcttatgcgatgcatgatatgaatgctatttacggacac

SEQ ID NO: 35905 - DNA, 454 bp, Glycine max
  unsure (1)..(454): unsure at all n locations
ctcagctatgctgatacatctacatagacctcctcaacctgagcagcattatcagccacaacagaacaattatgacctctccagcaacaggtacaatcccaagtggaggaatcatcccaaccttagatggttgaatccttcacaacaacagcaacaacaacaacaaccttattnttagaatgttgctggcccaagcagaccatacgttcctccaccaatccagcaacaacaacaacaacaacaacaaccccagatacaacaaacaattgaggctcctcagcaaccttcccttgaagaacttgtgaggcaaatgactatgcacaacatgcagtttcaacaagagaccagagcctccattcagagcttaactaatcatatgggacaattggctacacagctaaatcaacaacagtcccagaattatgacagaataccttctcaatctatctagaat

SEQ ID NO: 35906 - DNA, 451 bp, Glycine max
  unsure (1)..(451): unsure at all n locations
acaatttctctagaaaacagaaggaggacatatatgacttagggaaaaagtatcatgtaaagttaaacaagataaggacctttgtagcctaacttgttaatttaatgattttttcccagtgagtttatgatatgaatttttcatttgagctatgcttgnngggattttttccttcatagattaaggacttanaatattccaatgaagcctaactaaactgcatttttgtgaatttgaaaacaacttatattatctccatatgaaatagtaaagttttcccatttagttatatgggatattcttcaattgagcattgtggttcaatggaattatcttttcctagaatcccanagtggtaaaaatgcttcggaaagagactcatctaagaaaagctgttgaaggtgaagtaaacaatctgaagaatcaagtggctgaactaaaaaagtcagag

SEQ ID NO: 35907 - DNA, 470 bp, Glycine max
  unsure (1)..(470): unsure at all n locations
gcacttcttgcattgtaaatttgctctattgtggtgtaactgttggcattgtgttccttcaacgttagcaagatgttttttggtttcaccatcgactttgtcatatcagcaataattttcttttcatccttagtcaatcgcccagcgtatggatgtccaactaaggactnggccaattcatgattgtgaatcccacagatcaactttactatccaaccttcccctccatgcactggtgtcccacgaaacctgaagggacaaccacatttcctactcccagtgtctcttctaacgaatactttattcctacacttgtacataccactactttcacacccaactaacacaaatgaacttcttcctctgctaccggtatctgtgtcagacctcataatcactacaacacatccattgtcatgggcaactgtccgagcccatacaaaacatcatctcgagtaccagatacctac

SEQ ID NO: 35908 - DNA, 236 bp, Glycine max
ctgttggcctagtacatttgacaatcctcatgctcgatatcttatattaacttgttgcttatgtgcgttattatcattataaggcgagcccaaatttttgttgcatcgatttcttctatgaaatacaccggtcctccattattgatatagccgtgcactatacttaggagaattgacctttcaacttttattatctgtttctgtatcctcaccttacaatgcttactgtaacgtgc

SEQ ID NO: 35909 - DNA, 213 bp, Glycine max
tctacccaacgccatctccttttttcacttctgacaactctccatacagaacctatgatgcatacctgcgtccttgttctctctcccatcttctagttgcaaaactgtgcagctcctccccgttcaactactagtagtgccccattattttcactgacgatcactctggtgaataaacaactatatatatatatatatatacactcacacaca

SEQ ID NO: 35910 - DNA, 579 bp, Glycine max
  unsure (1)..(579): unsure at all n locations
ttaaattgaaacccttgaaacccgngatcctctagagtcacctgcggcatgcaagctnttntgtgaagggtataattactgttaataatgttggctatgcnntttctgactttctcctcacctgagtgaagaagattcacgttattattattattaattgattgccacttttcgctttatctttatgcacgtaattctgtgccaccaataatggacttaacctaatatctacatttccttccccaccatcaccacctaacccttcaagccgttctcgaagagaanaatatatataccaacccttcttaaacttatttctagagggacacttaatatttaaatatgtctaaattgacgtttctgttcttgttattaaataattaatcgtacatcaaataattaaccagagtttctcattcatatatgatgataaattaagctcgacaatatatatatatatatatatatatatatatatatatatatatatatatatatatatattagagggatacatatcaatgatggcgatgagagatgcgttctccaatcggtgcgaaacctatccatgatatgatg

SEQ ID NO: 35911 - DNA, 363 bp, Glycine max
  unsure (1)..(363): unsure at all n locations
taatactaaaaaattaaaagaatgtaactcaattgattgagtaaagtgcatgagttattataaattattgatacctatccttaatatttatgaatgaaaaaaatatgtaattacatatttaacatccaactcttattattgtgtgaataatatcctttaaattttatttgtatgaatcttattatctaaatattntatgtttcattcattntactgatgttaatgtgacactaaaaaaatntatttgtataaaatagtgtcgttntattaccaacaacatgataataaaatgtgtaaaattaagaacttagaataataaaattcactggaaaagaactttggatgatgaaatcataacatgat

SEQ ID NO: 35912 - DNA, 492 bp, Glycine max
  unsure (1)..(492): unsure at all n locations
gcttataatgttaagctttgtcttatgttgttcatgctgctccccttatctctatcacatttctcttaaactgatttagctcttcatgcattgccatcaaccagtgttcattacacaaagcttcatcaatgtttcttggttcaacctgagaaacaaaatccatgtttttacacaaaatcctgagtctagaacgagtagagacaccctntgatatttctcctattatgttatccaaagagaggtctttctgagttctccattctctaggaaattctttaggcgttctacttgagatctctntgctttcttcaagttctttagaattgatatcatcttcaagagcataatcattntcctgaaaagcttcatcttcttattctannaaaatatcttgaacaatagagttaatttcatcacatactacatgaacatattcttccacacttagagttatcctattaaatactctatatgctntactattcaatgaat

SEQ ID NO: 35913 - DNA, 474 bp, Glycine max
  unsure (1)..(474): unsure at all n locations
tctacttatgtggcagggcgggcttccttcactttcttgtctccttctcgagctttgaccactgctcttccttcccgcgatgcttcttttcatgtccgcctgagtgggcttatagcctaaaccatacttcccacgatttccttgggcatttatcaggctagttatgccgccgttgtctttgcctaaacccattctgggttcataaccgttccccaacataactcgggccatcattactgctgcatcggatagacaaggctgcccagagaaggagtccacggaggaaatgctgaccacctcacaagactggaaagtggtttctaacgattcttctgcggcttccacataaggcatagaggatgggcagcttaccaagatgtcttcctcgcctgacacgatgaccaagtgcccctccactacgaatatcaactnttggtggagtgtagagggcacaactcccactgagtggatcca

SEQ ID NO: 35914 - DNA, 383 bp, Glycine max
  unsure (1)..(383): unsure at all n locations
agcttaatangtccatctatggattgttatatgccttctcgccagtggtattaaaattatcatgaggtcatttcttcattcagctatgaagagaatgtcatggatcactgtatataccacaaggtcagtgggagtaagatttgtttccttgtattatatatagatgatattcttcttgcgactaatgataagggtatgctatatgaggtgaaacaatntatctcaaagaactttgatatgaatgatatgggagaagcatcttatgtcataggcatataaatccatagagaaagatctcgaggcatttacgcttgtctcaagaaacctatatcaacaaaattttatagagaattaatatgaaagatngttcaccaagtgtatct

SEQ ID NO: 35915 - DNA, 327 bp, Glycine max
  unsure (1)..(327): unsure at all n locations
ctctgagatcgcacactgcgcttagcgccaccctcatgcttatcgcgggtaagtgtatacgggcttagcgtcagttgtgcgctgagcctgtatgaacgcacctgctgcgcttaacgcactgagcgcttagcacgcggctttgatattgatgctctaccagattcttctttgcgctaagcatgctgaatgtaacgacccgcctcgtcgctacgatatcaccactctaataatnggaaaataaaatgttttttctctcttctatgaagactccacttattttgcttatgaaaatcatagtgaatctgaatttcacaaatatatatatgc

SEQ ID NO: 35916 - DNA, 474 bp, Glycine max
  unsure (1)..(474): unsure at all n locations
tctgagtcacctgccgcatgcaagctntactcttagcataactgttgtataacgcttgttaattgtttattatgaaatttatgtgttattatgtcttcatcggagtatgtgattcttgtgtaatgtgattgatgattgaaaagtgaattttaaatgacaaagtggtggaattacgtgagttatgtttaaataagttatatctcatttatatgatatgtatatctagttgtcttatttctctattagttaggaatgtgataactcactccccgtgtgttgtttgtgtttggatcctatgatgatctttaaccttgtgttcggnggagtagatggctaggtgaattgctttaaggaaccttgtgctgaaggacgtcgggacacattgtcttgataggatgtgacattgtgacataagtttctatattatntgcatgatgttagtctattttattctacctcactgatttgacaaaa

SEQ ID NO: 35917 - DNA, 149 bp, Glycine max
agaagctttcttgagaatattcctaaagaagctagagcttatctacacacacctctctaatagctaagatcacctccttgagatgagaaactagagctctgctacacaccccctataatagctaagctcacccccatgacaaaatacat

SEQ ID NO: 35918 - DNA, 403 bp, Glycine max
  unsure (1)..(403): unsure at all n locations
gaccctcctattctaagcagagattcactctaccccttcactgaaaccccattacacatagcctccttgcttggacatttagagttttgtcagattcttcttcagaatagtcccaatttagccactgaattggactcaaaagggcgttgttctcttcatcttggctcagctaaagggcacactgaaatcgtgaaagcgctattgaggacataaccagaaatgagtatggtgcgcgacanagatgcgatgcttccattccatattgctgcaattagagggcgcgtgggagccatcaaagagttgatcgaagagaagccaaactccattcaagagatgataganagtgatgatgggtctgttctgcacttgtgcgntcgctataaccatctccaggctctgaatt

SEQ ID NO: 35919 - DNA, 421 bp, Glycine max
  unsure (1)..(421): unsure at all n locations
gccgtgagaaacatggtgtttcacttgtgaaattgaatgtgaaatgggcctctgatgtgtatgatcctatacctacattattatcacacactgttagaagcaacaagaagcagcagaaatccaggaagaagaagcctgactagaagaatggaaagaagggtcataagggaaattcatctcgagggggcagcaacaaagataagcaggttcgcaagctaggtgggacttctggtttgtgctacaagtcaatggattcttgtgataaagtgcttggagcttctactgaattagatgctcttgaagttcgaagccaggattcatactgtgtgaactagcttcctgaaanatagttactgaagtcactacttcggtgagaacactatgatgaatactctgaatgctttctatttcctgatgacat

SEQ ID NO: 35920 - DNA, 359 bp, Glycine max
  unsure (1)..(359): unsure at all n locations
agcttcccagatccgatcatggaaggacttggcatcttccttcattangcagtaccagtacaatacggatatggatcccgatcggaaccagcttcagtgtatgactaatcgagagcatgagtccattaatgaatatgcccacagatggagagatcatccagcccaagtcgtatcgtccatgacgaaaagggagatgatcacaattatggtagatacgttacccacgttctacttatgataagctgatacgctacatgccagttaactatgcggatctcgtcttcgccggagaaaggaatgagtctggactacgataaggctagttcgaatatgctttcaatgtgtgcaccaacaacaac

SEQ ID NO: 35921 - DNA, 410 bp, Glycine max
  unsure (1)..(410): unsure at all n locations
gtttctagagagagaaaggtccatgttccttatagtntgagagaatttgttgtgtgaagacctgcagagaatcgagcttgaagaggaagccgtcctaagagcttgagatgagtttgtgagtgattgtgaggttctagaggtggaggagaaatcctcaccacttgtatttcttcaatccttcatctttctcttctatttgttgtanaggaagtttcccagttatggagagctaaatcctctgttggctcttccttgtaggtacttgatgtaaatatcttcttttntatctatctaatgatgttttgtgtgttcactgtgctatcagaaacttcattctaccatgctttcccttgatcacatagatgcatgtgtntntaggatccttcaacagtggatactggtctattctt

SEQ ID NO: 35922 - DNA, 349 bp, Glycine max
  unsure (1)..(349): unsure at all n locations
gtcgtcattgtaagacaaagagactatggtgtgcactngtgtgatcgaaagagatgttggagatgtcacagaagcggttataaaagggcttcctcttgagagaaagaaccttaggttggaggagggaatgtccaaagtgacactgaggtcactgtatgatgagatttcacgggttatgctgattgagtgtgttngagtggaagagattgtgatatctggcacaaaagattggacataagtgctgtggtgaagaggagaagagggtatgacgctgatagtgaagagttcgatgttttgacgaggtaagggtgaatgtactcatctngagacccgtttggaataacaaagt

SEQ ID NO: 35923 - DNA, 324 bp, Glycine max
  unsure (1)..(324): unsure at all n locations
aattaaaccagaatnttgaaatgcttgaaagtaatcaaatacttcatcatcaaagaaagctaagtctacgaacttatggtcgataatggaatgagaagtgaaaagagaattgtaccggatacgttgttcttccgaggaaaacaacgtatgagatgatatggagggaggaanttgagatgtctgcgctttggatgttccatggcttccaattccaatggttgtggatgaagtcgcaacctcctttcgcttcttcgattgttctaccatttggaagtggttttggaagttntaattggtggagatgaaaaagaatgacaaatgatg

SEQ ID NO: 35924 - DNA, 476 bp, Glycine max
  unsure (1)..(476): unsure at all n locations
tcaactcctctgtcagaaccatgctatgtgctcgcgactggtctctntcttcccttcgcaacttgagttcactattgctaccacatatagctccgcgaaatttgttccggccatactcttccttgcgagccctcttggtctctcgttcaagggctcttgcggtaattgcattctcttcccgtaacccggcacactccttccgaacgtgtgtagcagccaacttgaacttctccttggcgagtattgcctttcctaactcgcttttgagagcttggacttcctcgtactcttccggtgcttcaaaattctcttcgctgacgactcttaacttggcgagccaatctaaacctcgtatgcgaactntcagccattcgtggtacccaccaatgatgccattacgaatgcctctaagctcttgatctttccttaacggngtttcccatgccttatggattctctgtatagtcttggaattt

SEQ ID NO: 35925 - DNA, 357 bp, Glycine max
tactttcatcaacatgaatgaaagcaactcggagtgcctcattcctgataacaaagacaaaatcttaatgttatgtaatttatagcaaaaaatgttgggaaaagatggaaacagacaaacagtaatcaagatatcctctatttattttggtgaacaacgatcgcactgagattagaacctatgaccaaatgaattctacccaaaaccctccaccacatattaatcttagaaattgggctttaaggcttaactcaatcccacacaaccggtttgtaggtgaggactgcccaaccaccctatttaagccatatcttatagtccatatgaggctaaaccaacacccttgatgctgcaact

SEQ ID NO: 35926 - DNA, 405 bp, Glycine max
  unsure (1)..(405): unsure at all n locations
gatgtnggacagtattcataagctcatggcgattatgtcctaataatgaagtaccaggtgggcattcatgcacagcatattgaaagatccatctcatgcagctaatagggaatactatccatagcacgaatatcgcaacatacatagacctgattcgtcatggaacatatcaaaacaaacgggcatatgcatatataaagtaatagtaatactggaatcttattacaatctctatatacaaaaatctaaatatatgatggcagaagtgcttatgatggtgatggtgtaacaccacaatatatatcttctattatattatgtaaacaagtaatgaaaatgtgtttatgatattatattaatagatattttggtgtatagcgtgtcatagacagtgcatgcctatat

SEQ ID NO: 35927 - DNA, 479 bp, Glycine max
  unsure (1)..(479): unsure at all n locations
tgataactgagaaagaatggtataaatttctcccaagagaaatagctcataaaatccttacaactcaatttcattatataccacatgaatcctgtaagattntttaaaatatccttttagtccactttgggatcatgaagttcttcatgatcgaaggggtggagaactcggtaataacataaagagattataaaanatagagtataagtgatatgaaataaaaccaattcctatacacaacttcagcagcgacgaccaaacttgaaaacgttgtccaattatgcctccaggaacaggctacttctccaattactcacccataactccaatgcgcctaggtntggtagtagtacatgtgtttaagagggacatgagatnttgatagtataatatttcatggatagaatccaagtatagatctcactggagaagaattatttatgaatgaacagaatgtatcggtgttgttgtaaataact

SEQ ID NO: 35928 - DNA, 424 bp, Glycine max
  unsure (1)..(424): unsure at all n locations
taattaatattcgaattttcattcctttattaatatatatgtgaggggtagagggtgtcacatgtggatgcaaagagaaatttgtggaacttgataagaaggtgaaaggaaatgtttcttttggagattcttccaaggtgcaaatccaaggaaaaggtaccattttaatttctttaaaagatggtgctcacaaattaatcacggatgtttactatgttcctaaactaaaaagcaatattttgagtttgggacaacttgttgaaaaggggtatgaaattcatatgaaagattgttgtttatggcttcgagataaaaattctaattngattgccaaggtgtttatgtcaagaaatagaatgttcactttgaacattataaccaatgaagcacaatgtttgaaggctagcataaaagatgaatcatg

SEQ ID NO: 35929 - DNA, 503 bp, Glycine max
  unsure (1)..(503): unsure at all n locations
cgcttaatngttntgtaacatgaccaaattgaactatatcatgtttgtgatattaagaattgtgttagaccaatttaatcaatgcatcaacgtataaatgctttcataaaacatgaaaatggttttatgcatgaaaagctggaaacatcattctcagtattagctttctaagcacaacattatgaacaacaacatactgagtattgtatctgcataacataaattgagttttcataataatagtattttgaaaaattcttttatttaagaaatcaacttctgaacataagcaaatgttcattgacattaggttctcataatcctatcaaacatttaataatgagtgttatgaataaccacctagagagattagctatctaagtgcttgaacctctatgtcaattctttctaaatatcaaggtaatcttgagtataagtccatacaggttaaagtgtcaggaaaagatgacaattcaatctctttcttgtaacgctatcatcac

SEQ ID NO: 35930 - DNA, 336 bp, Glycine max
  unsure (1)..(336): unsure at all n locations
aatctaaagatgtaactcttcaaaaaggttttgactttttcaaatgggttttaagtttttctaaaagttataactcttctgaatggccttcttgaccagacatgaagagtctataaaagcaaggcnnttgtttgaattntcaaattaattcattctatcaatcaatcttttccaattcattctttacacaagcaagttttccacattaattgctgagtctctgtgaacttcttcttcttcttcttcttcttcttcctttttccaaaagctttccaaagttntctgtgttttctaaaccttgaaaacttgtgctatttcatcctttcattctcttct

SEQ ID NO: 35931 - DNA, 180 bp, Glycine max
  unsure (1)..(180): unsure at all n locations
gaggatgctntaatggatgataagaaataaagaaagggggagcacgaaattgaaggaataaaagagggagagaagtggaactttgaagtgtatctcataagactttcattcatcaaagttacaacaagtggtacacatgcttctatatatagactaggtagcttccttgagaagctttct

SEQ ID NO: 35932 - DNA, 607 bp, Glycine max
  unsure (1)..(607): unsure at all n locations
atgtgcaatgaacgccatcatatangcgacactataganntactcaagctcgaantatacaataacactntntgcccaaccatgaagtccttcttaattatcatgctatcatggaacttcttggtcttttctttgtagaacttggcattctcatacgcttctaggcggatctcatctaactcactcagttgcaactttctttcctcgccagcttgatccatagagaagttgcaggtcttcactgcccagtatgctntgtgctcaatctcaactggaagatgacatgcctttccaaagacaacccgataaggagacattcctatgggtgctttgtaggtagtcctatgtgcccaaagagcatcatctagcctggtactccaatctttcctgcttggctgcacaatcttctctaanattctcttgatctccctggtagaaaattctgcctatccattggttnnggggtggtatggtgtggataccctgtgtaccaacccgtactttttaagtcaggcatgccattgattgtnggananatggggtcctgatcactaacgatngctttatgtactccanactcgcataacagattagatctgacataacg

SEQ ID NO: 35933 - DNA, 618 bp, Glycine max
  unsure (1)..(618): unsure at all n locations
acatttcatcttcttacaatttaaaatattttcaagaatgttccttaatcagtgcaaggtattgacctagactctcgacctggaccttaactcgactgaggcatgcaactcgaatgaggaaggagagaanggttataacttttgctattattgtagaccactagagggtaccaggagatatgtcgtggtggtcaacacaccttggtgacgttatgaggtgtgctattgcccaaaaccaagcttgaccaatcccgatccaccccgggcatagtcggtcagtgagaacctgcgatgtacctaaacaggcgagctgctggctgtcaacagataataggaatcaatactctcaagcaaggaggctcgtggtggctggccagctgagaaacttgttcgatgtgtgacgtatggcctctggtaatcgatatccaatggtgtgtaatgcgattcaaggcttaaatatgaatacaggatgactaagatggtcttagtaatacataccatgggatgtaatcgataaccacgcttgaacacaaatcacgaactatatggacctctggaaacgaaatcatctggtcatcattcacaaaggaaggtgactgtaattacatactagattcn

SEQ ID NO: 35934 - DNA, 383 bp, Glycine max
  unsure (1)..(383): unsure at all n locations
gtatgagaataagttcctgagtggatatttgatgcaatcctcccatggagggngcccatcaccagagtcatggttaagagactccaggaagattgtgccagggatgcaagagaatgccttanggttctcatgagccttagggtagctnttgggcccatgggttaagtatgtgcccacttatctttgttcatattagattatggtttcattatttttttgggccttgatttanggcaccacagtgtagggagggtaccccataagtttagggtaccctagtaatgtaggaattttcagcccttgtattttagggctcacagactaagttttgtatcagggatagtttcgtaattcacatgcattaagtgcactatttgatgtgt

SEQ ID NO: 35935 - DNA, 389 bp, Glycine max
  unsure (1)..(389): unsure at all n locations
gcagcttaacattcaatttcgagcgtctctatatgttattagagtcaataagacatccgagtaaaaagttattgtcgtttgaatntgcatagaggttcaacattcaatttcgagcgtctcgatatgtgacgagactcaattatacatccgagtaaaacgttattgtcgttggaatctgctcggagcttcaacattcaatcttgagcgtctcgatatattacgagactatatcagacatctcagtaaaaagttattgtcgtttgaatacgctcagaggttcaacatatcaattcgagcgtctcgatatattacgggcctcaatcagacatccgagtaaaaagttattgtcgtttgaattggctcagagcttcaacattcaattcgagcgt

SEQ ID NO: 35936 - DNA, 432 bp, Glycine max
  unsure (1)..(432): unsure at all n locations
tagagccaattcagacgacaataacttcttactcggatgtctgattgagtcccgtcatatatcgagacgctcgagatttaatgttgaagctcttagccaattcaaacgacaataactttttactcgaatgtctgattgagtcctgtaatataacgagacgctcgaaattgaatgttgaagctctgagccaattcaaacgacaataactttntactcggatgtctgattgagtcccgtcatatattgagacgctcgaaattgaatgttgaatctctgagccaattcaaacgacaataactttntactcggatgtctgattgagtcccgtaatatatcgagacgctcaaaattgaatgttgaagctctgagccaattcaaacgaacaataacttttactcggatgtctgattgagtcccgtcatatatcgagac

SEQ ID NO: 35937 - DNA, 530 bp, Glycine max
  unsure (1)..(530): unsure at all n locations
cacgcacttgaaactttaaaacatgcaacatcngacctctgagncacctgccgcatgcatgcttactcaagnggtaaacagagcttatgagcttcattttngtgctacttaaaccaccattaattttatgcgttaccttctattccatcgttgttccatcattatttctccacgaatttcctcacatgtatagtgataaaatgttattaacatgatttctattcagtttccaccgattaaactttctatacaatccagatcagatattcttggctcacattactagatgttgttcctgaaccatgaactatgtcgactacacgctccattgaatttcgcctgctaatactgtgctgaaacctaaccataaatcttacataaattatatatagaaaacccttaaatctaatgacttgccacctattgaacttgtcataaatcatctaatactgaactgtacataaattctatgttctgatttatttttgtttttacacaccatttcatcgtgaagaatatttaccattacn

SEQ ID NO: 35938 - DNA, 452 bp, Glycine max
  unsure (1)..(452): unsure at all n locations
ctaagcttctataaggantgtattcaaagcctctctcatgatgccaggaatgttcttatccactatattaaagagcataggagccaaagggtctccatgtctcaatcctctagaggggactatatcctttgtaggactcccattaactaacattgagatagtatctgagtgaagacatgcagagatccactatctccatttaaagcagagacctatcctgtccatcatgttatccaagaatgcccaggatattgaatcatatactttgtctaaatccactttaagaatcatagcaggcttctttctctgagtagcttcatccaccacctcattgagaatgagaattccatggagaatgtgcctatgtcttatgagagttgctacctttcatcaataacccatccgcagagcctcaacaatttggcagagtgtgctatacttatacatgcccc

SEQ ID NO: 35939 - DNA, 478 bp, Glycine max
  unsure (1)..(478): unsure at all n locations
agctngtccttcacggagaacatgatatcactgacttgttctactacattgcctataattgacagcaagatgaccaaaataaaagccacagacatattcaatgactcaaatgtcatatttccttttctatggaagactntcaaatctcccattaatcacattctgttatatagcatgggtcaatggggacaggacatgtattccttttgtcctcttctctcatcacccaaaagatattttaaattatgattgtaaaacaaatagaatagtagtcatttagtaatatgctataatgtttttcggtgtgacacctttgtgccattattgaatactatgattacaagagtgtaaagccttaaaacactcattgttgtttctcgccatatcttanataccagcgttccaccaccaacattatctcagtccataatcttttgattcacttaagttagagccactnttatttatttcaattatc

SEQ ID NO: 35940 - DNA, 180 bp, Glycine max
  unsure (1)..(180): unsure at all n locations
atactcagccggtattaggcctcatgagctctctcatattcagcagctcactnggattagctcgggtggcttcccttttagatactcgggtgtacccctcatatcctctagattaaatgtatgtcattatgctcccttgctttccaacactactggcctcgttcaggaatggagcacgaa

SEQ ID NO: 35941 - DNA, 653 bp, Glycine max
  unsure (1)..(653): unsure at all n locations
acctcgatgtaacctntctacttcatattgctgngtaacttgtaaatactcataccntattnanttnctttaacacatgatgntaatgtggnagttgaaaccctcganttgcactncattgcgnacaccgngacactatagagangacctgcaggcctgcatgctcggacatcacaagttgtttagcacaaatactcttcatccatcncagaaagcaagatgagtactctgtgccttaatgtgtgcggagcactcagacgaagaacaacagaatcattgttaagtcgaaccaaatggaacacatgtgcaaacggaagtgaacactcgaacatgataattgaacacatgaagatgtaattgatgcaatgaataattctgaaacacaagctagccaaacaaattcaaacaaggtcaaatctatacattcgtgagtataagcttatgggatacacgttcatttcagactttaaaggctctttacactgacaaaatataccttgtctatagataactgcactgaattgcaacacaaaaatatctgtatcgcaataaagtgagttgcgcaacacaaaaggtagacattggctgggtgcgctgaaaacccaattatgtgatcacgtaaactgactatttgttgtttggaacacaaaccn

SEQ ID NO: 35942 - DNA, 433 bp, Glycine max
  unsure (1)..(433): unsure at all n locations
gagcttgaagagtgaaatacacaaaggctaagaacagagcacaggagcttaaagagtgaaatacaagggtgtgtcttccaagggaggaaaacgcgcggagtctccaccaacgtttatttatggaaaacatcggaaaaaccggaacgtgtggtctacatactntaagtgtgaaaggttcgagagttgtttttacgcacagggaaggtattagcaccccacacatccgtcacaagggacgacaacctctaatcgagtgttcaagacatgacttcaaaattatgtattcttgcgtttctttttaatgtgtctagcctttataggccttgtgtatttttatcttttgtggtcgacaaggtgttcctgcgctctacgattcctcaattgaacgaggagatagacctacgagtctttctaaaactgacattggatagtg

SEQ ID NO: 35943 - DNA, 111 bp, Glycine max
aatacaccgcctctgccctcatgcagtctgtgaatatatacctatctgctacatgaatcatcacaacgcatgataactgaatcccggcgtttacacattgtgcttgttttt

SEQ ID NO: 35944 - DNA, 414 bp, Glycine max
  unsure (1)..(414): unsure at all n locations
agcttcaatgttcctcctgatccctcatccggaagtgttgccagtataacctttcccattcggttagagaagaatgcacggttagagccatccggatgagccaccatgttgagataagatccattaccaattctctcaaggcacaagccgtgaggaggactaatagaggtcctcagtttattcagtgaaacaggttccccttcaaagcacactgatgaattatcagatgctccaccanatgcagtgcanaagtctgtttgtactgccataaatcagagagtatggagcattgctgtgagctggtgctcctgcttgaccttgtaatgaaggggcaaatggagaattcactatagatacatcattgcatgtgtcccatacttgagagcaaaaatcttccacttctgtctttgattg

SEQ ID NO: 35945 - DNA, 362 bp, Glycine max
  unsure (1)..(362): unsure at all n locations
ctccaactcaagatcattagaatgcttcanacactaaaactcaaacctgcccaaaacttgcttccttggagagattccgcaaacgatatttcaagcacaataggtggtgcaagataaatgagtaactgagtgagcgcatggcatgaggctacagaaagaaattactttacactcaaaccaccacagcttgaccagtaatttcatcatgaagctgaagcgagccatctttcatcaaatttaggctcanactctngaatctctcccttgaatattgcctagatgctntcctccagtcagttccagttttcatcatcgccacaaactcctcataactgatgcgaccatcctgtgaagtgaaaaca

SEQ ID NO: 35946 - DNA, 420 bp, Glycine max
  unsure (1)..(420): unsure at all n locations
ctcgtgcgcttagcgcagttatgaaccgcttagcgcgcattagtgaatttaagcttagcgcaacttttctcggtcagcggatggactgaagcggtgcccttagcgagatgacccttcgctcagcgagtatgcacaactcatcctccttacaaattcttcctcgtgctcagccgagaagtgtngcgctcagcggatggctcgctaagccaatcttttggcttagcgagagggtgaaatcaacacttcaaaactttcctaattaacctanaattgagagacatatgattatntaacacacanaatggaagtactaagtatttattacctatctttgacaaaaagtattacaacactacaaaatactcatanatgggagggagttgatacacattacacaagntttatacacagaagttagtc

SEQ ID NO: 35947 - DNA, 189 bp, Glycine max
tcttttcttatacaaatacctagatttatccatgaaattaattttttaatcttaatgaacgtgccaactaagttgtgagtcttttatagtttttactctactctaagtcatctaagttctctttgagcctagcttgtgtctatgaccttttcattgccttaattgctgagtaatccttgaaaaattgtc

SEQ ID NO: 35948 - DNA, 497 bp, Glycine max
  unsure (1)..(497): unsure at all n locations
agctngatgtcattcanaacacactatgtagacctatatgaagactaaacattcattgtttatttatttgtattcattatgcgatataattcgttgtaacccgtcactaaccaattaatattatcaactactcgtttggttaagcaaggaaattgttggtccaacaaaaatcatttacgcgtacaacatacatcattgtcataattgacaacacataatgacatgcatgcgtgttacagtttgagcgtgacaacacattggttgacttcagtacacattttgaaactagcagtcgctcaacaacacattggttgacttgactacacattagcgacaacacattggctgacttgactacacatttacgcgtgtctatttttnntgtaaacaaagtaaacaaaggctcggtcacaaccatctatatatatggcagactaggctactaaatcacacattatcttgctntcaaataatctcccaactgatacacaaactat

SEQ ID NO: 35949 - DNA, 499 bp, Glycine max
  unsure (1)..(499): unsure at all n locations
gctgctgaataatagcannaaattcagagtaattagtgaagaggatttactgatcataatntaacagtaataatataacctcaaagagaactatgcttgatcctcaagagaaaacaacgttggggacttagccttcaattaatcaaatagataacaaaattatagattgaagaacaaaattntatggctaaaacaaaaagtcagaactggaattgcaaaaaatgaaaataaaggagaaagagaagagagggagagagataagagagggctaaactagaaccttggtgctgttatatagttntctagccccaaaacttacaaatatgttntaaatccaagcccataaataaaatacaatcaaatctagataagataagatctagatgaaataatatctagatgagatcaaatctaaataatatctagataagataagaatctaatttgtagaataaaagagtctgtcctcttcaagtccaagcccaattctggattcaag

SEQ ID NO: 35950 - DNA, 504 bp, Glycine max
  unsure (1)..(504): unsure at all n locations
agctcgagcttctcatatcaaggaggtgatcttagttattatatgggtgtgtgtagctaagcactggcttctcaaggaagtttctcaaggaggcgagcttagtaattagaggggtatgtgtagctagttctagcttctcgaggaagcttctcaaggaagcctctcaaagaagtttctcaaggaagctccttaaacctccattaattnttagctttaccttatccattgtgctaaatgttgataacatgattttttagaatttccaccgattaaactngctatagaagctagattngattttcaatgattcaaatttgttgttcttgttcttgaaccgttaattgtgttgagcttacgtttcattgacgtttatttcgctatnttttgtggctgaaacctaaaccatataattcttacaanaacattaaattataagacaacctcacaaatctatagtgacatgtntacctattgtagttntgtcatagaagtcatgtccagtca

SEQ ID NO: 35951 - DNA, 442 bp, Glycine max
  unsure (1)..(442): unsure at all n locations
atcttctaaggaagtttctgaaggaggtgagcttagttattagaggggtgtgggtagctaagctctagcttctcaaggaagttttctcaaagaaacttctcaaggaagttttctcaacaaagcttctcaaggaagctacctagtctataaatagaagcatgtgtaacacttgttgtaactttgatgaatgagaatcttgtgagacacaactcanagttcaacttctctcccccttttcctccnttcaatttgcgctcccccctctctttcttttcctccattgaagcatcctctccaagcttcttatccaaggcacattcttggtggggaagctccttcttccatggcttattccctagtggatggtgcttgctctcacctcttctcctttgtcttccgctgcatctccatggtggaaaatcaccattgaaggacctcattg

SEQ ID NO: 35952 - DNA, 504 bp, Glycine max
  unsure (1)..(504): unsure at all n locations
gtcacctgcggcatgcacgcttctcaaagaacttgcgtaatcgantacggatagttggtatttgattaaaacggagagnttatggtctaacgaagtttctaactntagaaacaatctccctacctttacatgatgatgcatgatgtacatatggatagattaagactaagatgcaacaatcaatacaaatgccactcaatgaatatggcatgtaaaaagacaaaactcttcangcttcanagcttaatattcatgttgctccccctatctctaacaccttatacccttatgaaagaagaattttttaaaaatgatgttgaaaatctacattcaacaatggttntcataaaaatgatgttgaaaagttacattcacagacgaatttcaaagaactgatgttgagactnggcacttatttgcanaaatgcaactgtgtttacttcaacgatgttnttctataaaccgatgttgttgaacattgagaaagattttttttctatagtg

SEQ ID NO: 35953 - DNA, 140 bp, Glycine max
atattcgtattaataagtgaaaatccaataggtcacacgaagtgctattaaaaatcatgtatacaaaaagatagagttcccatggctcacaatatctatgtgcccataatacataacagaatattggatttatactcttt

SEQ ID NO: 35954 - DNA, 452 bp, Glycine max
  unsure (1)..(452): unsure at all n locations
tcggtctgacgatgtatcgatgtttantaatntaggctacaacatagaacacaagagcatgattggttagagaaatatatttatatgcataatcttgtntgttagaaagacccaacatttctacctactgttgtgacttttactgaccttgcattntatagtttttagcataaaggtttagtttaaattctggttaaaattatcaatcatacatgttctctcaacaatgcttcatttctgaacttaactcangctaacattagttccttgtgttcgatactcagattcatccgttntaatntttaaatacttgacgatctgatgcactttccggcaaaccggaattcccttgaatatatntgtacgaagaanaagtggaacananagtaaccgtatggaaaatgcaacatgtggaaatgctaacaagtgtctttttacaatggagaaaatgt

SEQ ID NO: 35955 - DNA, 378 bp, Glycine max
  unsure (1)..(378): unsure at all n locations
gtcttagaaactaatagagatgccgctatcactaccgttttacacatgttagcccgcttacaggtaagggatgagttttatcgcaattgggtcaaaatgaacacgtgtagggatccttagaggattaaattcggtttattntgacgaaccaattgatgttctgacgcgaattggttgataaacttgagtgctcttggtgttttcatgtttttgacgtatgattntgattcattgattttaatatgattgtgtggaattgtttgaggtgttntactccccaagttatgagaagaaatttgataaattgtatattgagattatgaaatgatgattcaatgtgagtagcacanattgacatgtatgagtgggagaacatgt

SEQ ID NO: 35956 - DNA, 512 bp, Glycine max
  unsure (1)..(512): unsure at all n locations
agcttcctataaaacctcaagagaatactatgtactataaacgaacagaagaaaatgaatacagcgagaacatattcatattctntgctaatatttattgatgaggggattacagatgaaaaatcgaggttgccagtaattcatcgataataatgaattacaatagactnttttccattgcctacagtttttggcccaccgtaatagtaccaatttttcttggtttgtggtaaacataaacaaacaaaagaattcgtttcacacgttgtagtttttgaactcatcacanaaacaaaagataaaagttagttctatttagtttttaataaaaaaaattgagaaccaaagagacaaagatttgaatgaagaatatgttaatntaaagagaaaaaagatgcacgatgaaatagaggagattcaatttattcatcaaccaatataaaactagtacattatcaatatttctttataccacttggaatcaatatanaactgataacttcgtaacattt

SEQ ID NO: 35957 - DNA, 134 bp, Glycine max
  unsure (1)..(134): unsure at all n locations
ttatataaaggattgtcgtaaaattttgcgatggaattgtagataaatttatttcgagaaaggtatctatggcctcaataatncttggtttttaattaattatttcatacctcaattctttttctcttcattat

SEQ ID NO: 35958 - DNA, 359 bp, Glycine max
  unsure (1)..(359): unsure at all n locations
nngctttaantagtttatcaactagttttaagaatcttattttggttaaagtagcttattaagttgtgaaagaagcttataaggtccccaaaatttaataaaataagtgtgtatagcaaacaagttatagaggagcttgttttggtcaaagtataaggtagtcaaagtagcttataactaactagaatgtgttaattacacttgttgttaacgagaatataatcanatgagaaacgttcttgagagtgtaacaatgagaacatagatatacttattcattttaggaaaaaagagcattaaactttcttaaactntgtttgctattaggggtgggtaagaaggtcggcccaccacgcata

SEQ ID NO: 35959 - DNA, 353 bp, Glycine max
  unsure (1)..(353): unsure at all n locations
ggaganaagggtggtggatgatgaaactgacgacaaacatcatctggatgaagtcctaaggatactatctaaaacaaaaaaccgatgcctcaatcagagaaaaatgtagttgtcacttacttgctctggtgacctctgtctctgcagaaaattacattagacgatgttaatcaattcttcttcatcatgatcatttcgattagcatgaacgtcgccagcttcttcgtctccgacaacgttacgagtgatttgagcggtcaaaggactaacatatgtgtccatgtatgaatcattatcttctacattaacaccaactgttntgtgctgcagaaccacgcaccacctttcatcac

SEQ ID NO: 35960 - DNA, 413 bp, Glycine max
  unsure (1)..(413): unsure at all n locations
agctngcactcaatggtagttactattttatagatgttaacattacaaaaattgaattaaggaactttagaatagggagactatggccccaacgacatctacaaaatatggtcacactgtatgaccactaagggaaaagctatatgtctctgcagtgtgcacataacgaccatcatgaaagccacatggaaactgtaccatgccgccttctctttgtgtgatacaatatggtaacatatatatggacaaaatgcaattataagttctcccaatcagtgatgcaatgcaaacatttatatgtaactgatattattatgtaactataacatattatagtatcttaccgtaagttgttccttttgacaaggttcttttggcagatcctgggccatcagtgacagacaagctatatg

SEQ ID NO: 35961 - DNA, 393 bp, Glycine max
  unsure (1)..(393): unsure at all n locations
aagcttcttaggattggatgtgttctctatcacgcaagaatgcatggtttctatcatccatattcccaatcaataccatgtctttntcaggggtcttcaattatatttccccctctacaaaagcatctaaaagttgcttggattgtggccttaacccatcaatgaaaatattgagctggattggttctgaaaatccatgagtagacatctttcttagtaacccacgaaatctttccaaagcctcactcaaggactcgtctggaaattgatgaaaggatgagatggtatcttttccttcagcaatcttggactntggggagtatatcttcaagaatttttccaccacttcatctcaagtcttaagattgctcaccttaaatgaatggagccatc

SEQ ID NO: 35962 - DNA, 552 bp, Glycine max
  unsure (1)..(552): unsure at all n locations
attgcnacttgagacntttggaacncgagatctcagagtcacctgcggcatgcaagcttatacaacgccaacaccacacgttgccaatatgttaatgttntacctcncgtcggcgaacacacttatagttgagagagaatactcactcttgtctgtagctgccttatgacatctctgttcatgatattcatttgttcttttcataaagaatctgtaaacaatatcgttggggatctgattcactcaattagccacaagtttaatgatacactaactcgagaattgtggaggacaccccgttcaataatatgcctgatcagatatgcgcgtgttcattataatgggattcactattgcttatacagaacatcacacagttacatgcgaagcgtagttatattaacactactgacatcatactatctcgcgcatcattttatactttagtaacatctaatggtaatcacttctttttgggtggcagagccatgatctcactattaacgtaactataatactgtctgttgtaacggattattttatcactaagct

SEQ ID NO: 35963 - DNA, 216 bp, Glycine max
attgtattatgcctcttcaatatgacgatatatcacagaattgaaaatgcaatcaatatgaatctataatcctaacacattaggaaaatctattacacgagtgacactctttaatagcatgagacattatactctgaataaacaaggaggtctgaaataaataataactctgatttactcactaaaacagcgtccaatactatacaaaatattaca

SEQ ID NO: 35964 - DNA, 134 bp, Glycine max
cgcgcgcacacaaatttgttgatttcagagggccacttgtacctagaaaaatttgtaagaatattttatctgggaaactttatgcggatcaaggtcaaggggtctgaggcaaggatgatatccggggtgggact

SEQ ID NO: 35965 - DNA, 266 bp, Glycine max
ttgtgcctgctgcctcctattgtcttaaaagctggtttaaatatttgtacggtgaaatctttggcatatcagtggaaactccttatgcgagtcacctaaagtcaaactgactgcccagatgcaattcaatgcggcatgatacttcttttcttttaccccagtctgtctaaagaaaaaatgttgtgcttggttatcgatagatctagtagattatataggattgaatggtgtgccgtagccgaggtaatgcaaagtagttctttgtt

SEQ ID NO: 35966 - DNA, 354 bp, Glycine max
  unsure (1)..(354): unsure at all n locations
tccgctactaacatnttttgcgcctctgtagtaagaaagagtganagaagaaaaagaaatgaaagacactgtgcatgttctcgaaagagaatttcaaggacgagaaatatttaagagacttccaattgacaaattaagccaaataaccctcacttttcacaaaaaatttatgataagatgtggtcgcatgcatgtctgtatttagcatttactaatttgagaaaaagtcaataaaattttattcatcgcttatgacacccccactaaacgtatagaacgtgaaattttgattgggcagacttggagatcaactttggatcacaggtcacataagcaaacaaaccaacgtcgcac

SEQ ID NO: 35967 - DNA, 360 bp, Glycine max
  unsure (1)..(360): unsure at all n locations
aaatgagagtgctcanatagattctaaagatggtagtcactanggtctctggggctgaagcagatagggaatgtgtcaacctccaaacggttcatattggaagcattgcgcgcggctggtatgattaaccttgatgatgactaaggagattcttgttaaatgcatccaaggacatcgcatgatgtggagacatgtcaaatagcgaaggagctactacaagaaatgatgaacagggggcagattgaagtctacagtgcgaagaaagaggaaagagatgtatgcattcagtcagatgacaganacccgagtaaaagtgataaggcagtgccatggaaatatgccgcaccatggtccgatgga

SEQ ID NO: 35968 - DNA, 457 bp, Glycine max
  unsure (1)..(457): unsure at all n locations
ccctctatcctagccctcttttcactntttctttatggaatgtaagaacctaagaatgacaattgtgtccatcatagttaaatagattaatgaagtgataggaagagatataatattaaaaatatataatttcgattcttttatttctgtagaatgtttacagatatgcaaaagagttcagcctgtcatcttggattctcacattaagaggaaatattctctcatttccgaataattaaaaattatgtaggttactttaccaaaatttaagttgtattattcctttgaaccaagtttaattattgtcacttaatttntcatatttatcacatatgttcaagattcacaatatcaaattcaagacccactcttgatttcttttgcatggaaaccagtatctagcaagggttcattcatgaacctattacattataaatggctataaatttacacaaat

SEQ ID NO: 35969 - DNA, 430 bp, Glycine max
  unsure (1)..(430): unsure at all n locations
ctaagcttctatgatattgggtgctatanaagaagacatagatcctgcattgtatttctttctttactgtccctactggatccaagttcacaatattcctataggtttcatgtatgatattgttggacaaaaccttggtaatttcatcaaagaatttatggaatatgacgataaaaataatgcgaactatctttgtttcttcatgcgcatatgcgttctcatggatgtccataatcctatcaagaaatccaaaataatcaagggcaggaggaggagtgaatggagtcttttttttttttttttttttcaagtatgaagtgctgggatcttactgctaattgtgtgaattgatagacacactggtgagttctattggaataatctatcattgcctaacgataaccatacttgcggttggatccacacttga

SEQ ID NO: 35970 - DNA, 377 bp, Glycine max
  unsure (1)..(377): unsure at all n locations
ctggtgagagcggaccttttactattgtttatgactagctgngagtaataatctttgtatggatctctgaatattataatgaaatgtataaatgatgacatgatgaatgccatgatagtacatacacaatgccttttgaccatgaagcttatattangtgattattgcgtgcttctcatcctgtataggctgaatgaatttggcatgaattgaaccctgaacataaataattatctcctgataccttgtttacatctatgaagcatatggtcaagaaaattactctaatgtggggagaaattgaaagatgaaagagaggttatcttaccacacacaatagtgttgtaaaaaaatgaagaaaataatttgtgtcaata

SEQ ID NO: 35971 - DNA, 589 bp, Glycine max
  unsure (1)..(589): unsure at all n locations
cttaatatgtgaatataaacgtccagacactgctaggaagcggagtattatatgagcngaagncgaccacaccagcgcatgcagattgaatccaacatctcatataccacgtctcgtaaagtcagcgttgggccaactgcgtacaacgagtgacatctctactggtgaatcagattagccacaagagtaagattctgtcgaaacaagacctctccaacgtcaaatttcgtcggccagaaccatgtgctactctcagagtggaantgcccatcgctatgcatacatagccctntgctaaggagctcaagagactcgtcttagatcataccatcattgaatatactntaatctcatgtgcctcgacataaagatccgagacacatgttgaaactgtggcatcatcaaaacattcagcttgatcctgtgacacaaatggtagctgaaggccacaactaatgtataggcccagacgtaaaatagttcgtagtaataatgttatgcgatncacttacgctcacaccgagacaacgcacatgccacgctatcttttgataaacacactaacgcagtgggcacgcatcatctatcg

SEQ ID NO: 35972 - DNA, 464 bp, Glycine max
  unsure (1)..(464): unsure at all n locations
agtcacctgccgcatgcaagctntacaatgngttagcaatcttggtatgtgttatttttgatatggattccaattgtattgtagacatgattaacggcaacaagattagttggatagttaagaaagaagggaagaagaaaaaagttacaggttcgatccctcctactaacaaaaaactaacaattaacattttccgataaaaaaataattaatggcaaccaaagtgatngctttgatcttggtttatattagttgattgtaaatagatccttttccattttacaaactttatagttgagtttgtgaggagataaactaatggagttgttcaatattgatcaagctgggctctagtattatcattcatcatattcccaatgtattcatcagttaattatcaatgaaatggtttgagttggtttctgtcaaaaaatatatcgaagtttaaaaattataaagtatat

SEQ ID NO: 35973 - DNA, 429 bp, Glycine max
  unsure (1)..(429): unsure at all n locations
tgcagactaagtgctcaccaacactanataagaatccctcaggttgtttcatgtaaacctcttcttctatatcaccattcaggaacaccgttgtgacatccatttgatgcagctcaagatcaaaatgagctactaatgccaaaattactctaagaaagtctttcttatatacaggggaaaaagtctttgtgtaatcgattccttctctgtggtgaatcctttagcaacaagtcttgccttatgtctctcaatgttgccttctgagtctttctttgctttgaagatccatctacatccgatggctnttacaccaataggcaactcaacgagatcccaaactcggttagatgccatagaatccatctcatccctcatagcattataccacagatttgattccttacaactcatggcttgtgacaacgtctc

SEQ ID NO: 35974 - DNA, 403 bp, Glycine max
  unsure (1)..(403): unsure at all n locations
gctattgngtgtcgttgggtttataagattaagtatcatgctgatggctccgttgaacgatataatgctcgacttgtagccaaggggtatactcaaatggaaggataggatttccttgatactttatctccagttgcgaagctcacagcagtccgattattgctagcatcggctgctattcatggttggcaccttcgtcagctcgatgtaacaatgcagtccttcatgtgagaataaatgaataagtctatatgcatctgcctccatgaatgcaactctcacaccttaatcaagtttgtcgattacaacgatcactatatggtttgaaacatgctacacgacagcggtatcatcgcttgtcctcatttcttttactcatgggtcactcaagcttaactgatca

SEQ ID NO: 35975 - DNA, 341 bp, Glycine max
  unsure (1)..(341): unsure at all n locations
tgtcacatcagataatgtcaataactgtatcaaattatgttgatcgnggtatggtattgtaagtgacatccttggctatagtagatttgattgggatggcactaagcacatgatcacaattgagaatgaaaatgctcggaatgaatattgcactgtaagtattctttaatatgttgctatttgttattcaaagtatattggatttgactgtttcttcttttttttttcattcgcataaatcggctaaaccgtttcgattcaaggtgcttcanaattgggatgatatagtggatatgtgtgctaaagatacagccaccggtcatggagctgatgaagtgatg

SEQ ID NO: 35976 - DNA, 392 bp, Glycine max
  unsure (1)..(392): unsure at all n locations
cttagactttctagctntgggagccaagtcatcccttgcggtctagacttcaaccacttgtgatagccgccaatgacgccattgctacttcccttaatctctatatcttgtcttcctactctatttcatgctttatggatttgttgaagtatcttcccattatgttcattgaaacctcgcgcgatgaaagtggtgatgatttcctccgacggaacacctctcagagggtagcctaacttatctatggccaacacaagattataattaatacaacctctcatccgcatcgaggggacatttatgaatgcctcacatgagcataacactcctgccccttcttctttccactgtgggaaccaactaatggacgctcccatcatgctcgctaagag

SEQ ID NO: 35977 - DNA, 293 bp, Glycine max
tccatcttgtgtcctgtcataccctaatttcgtccggggacctttgcttgatgacatgcaacttttgtttggtccttgtgaggagcttgacactcatcattatgcaatttgtgaaattccgggacatgccaaaaaacaaaagacaatattgatgcacaatccgtaaagttccgtgacacaccggaaatcatatgggagcatcgttgcacaattagtgaggttccgtaacattccgtaagtcaaaaaaggggatgattatgtaatccgcaaggttccgtaacattacggaaaga

SEQ ID NO: 35978 - DNA, 269 bp, Glycine max
  unsure (1)..(269): unsure at all n locations
gctgtcctggttagacatgattgtacatgtatttgacttgtggattcaattgggcaaanatggatgagggcaagtctgatttcgaanatctgcactntatgcagaattttgctgtcaaatatgtgcagctgaattttgtgcttgtgcacaaaatgttgtgtatttgctggttctggaaagagtactatagattgggttttggatgttttctagcagatcccaacgatcacaatgtagacttatgtgctagagacttccagtaaaatttt

SEQ ID NO: 35979 - DNA, 250 bp, Glycine max
  unsure (1)..(250): unsure at all n locations
attcctattctactntatcccgctgtgtcattatcaaaagatgcgggtccaaaaagataaaggaaatgaattggccatcactgtcaaccttcagtggatggaggttgagtgataggaggtggtgactntggtggcgaaggcagaggcacaagcacatgatcaataggtatagcaacctctgatgcaggaatcatttgtgcaagaacctcaggatgaggttgcacaacagtggtcggtgttggtggaggtg

SEQ ID NO: 35980 - DNA, 425 bp, Glycine max
  unsure (1)..(425): unsure at all n locations
atcctctgagtcacctgccgcatgcaagcttananatcagaatacacaatactcttcacctattcgacatancaattttggatgaaattcactaccggaagccattcacccatacaggtaaccaaattcactttcagtgtatgaaattgataaatgatgacgatgtcaacacaatgttaatgtgtaatgatcaattttcttgtgttggtccgattgagttattatgcaccgttggaagaacaccatatggaataatatacttacttcatacacactatgccccgtactcatgacgcgatcttgtattacaacgggatatggaacatgccactgcagaacaaatttgttggatgcctgttcacatgataaaatcctatgaaattctaactcctgancatgtaccatcgatgaactgaatgattaat

SEQ ID NO: 35981 - DNA, 435 bp, Glycine max
  unsure (1)..(435): unsure at all n locations
tctgacagtaggacanagaagaaaattcttcagattgtcggcgagttctataggcagtttaaatctgacttgactaggaaataggcacttgcagtcgacaaggacggtgcggacaacattgtctgtgaaaaatatggcattagcaaggagaaatggactcagttntgtcagacccgtagagacccctcatgggaggtatgtactttgtcattntagttgttttccacaacaaaatcacttcttataatttattgtaataatcattntcattaatgttaaacttttgcaagatgtacggaaaaaggcacaggcctcccagaagcaaaacactggtccccacgtattgtcttataggggttatgaatatttagaagaaaagctcatggctgagaagacaaagaanagactggaagaagctgcccagtctggaagcac

SEQ ID NO: 35982 - DNA, 354 bp, Glycine max
  unsure (1)..(354): unsure at all n locations
agctngtgctgcattctacttcagctctttcatatgtctaataacctcaccaagtaatgatgctttgtccatctatatgttcaaaagtgaaaatgagaaactgcacaatttaaacaatgaatgaaatctaacattgtttacttctactgacatcagaaattataaatcaaactataagcacaactaagttggattgataatatcaagttcctctcgctctcttttaggaaagaaaactcatattgaatccttggcaatcaaagcaacaaatcaactactaccaactagcatagttacattcataaatttcaagtacccaacacttcatttatacatgttgagatggtcatggaa

SEQ ID NO: 35983 - DNA, 416 bp, Glycine max
atggctcgtgttatttgtgttgactgaagaccattatttgtgtatatatatagttcgtaagattctgtggaaacccaattcccagagaaagtgactgtcaatggatggagggcatacgcatgagatatcacatggtgttgtcttcggtccaactatgaaggataagttgtgaagacttgcgtaaccccaccttatcatacattaattggtcagcataaagcctccacatgtaaccaaatgagacgtgcctcagtgaaacgtaacgtctattcaagcattatttggtattccatatttatgtaaacatgctctgggcatgttctggaaggtaatttctggctgatgaattataatgcagcggatagcgagaggtcatatatcattttaattatttctgatgcctgacatcctattta

SEQ ID NO: 35984 - DNA, 293 bp, Glycine max
agcttccatcaagtggtaatcagagcttatagcttttagttgtgctccttaaacctccattaatgttgttgctgtaccttctcttccattgctgtttcttcattattttctccatgtatcttctaacatgtattgtgctaaatgttgataacatgattctttagagtatccactgattaaacttgttatatatgctatattgattttgtatggcaaatttcttgttcttgttcttgaaccatgaatcgtgttgagtttaggttcctatgagatttgtcttgatattatttgtg

SEQ ID NO: 35985 - DNA, 344 bp, Glycine max
agagacagtgactggtttttgattgtagttttaaaaagctggaaagcattcacaactctcatttgagaagatatccatatctatgaattctgggtctataatggaacgagaggaaaagagatatgtgtaccgtatatgctgttcttctgatgaaaacaatgatccatacggaatgaaagaaggaattggcgtttcctgtgacccggaatgccgtcgactccgactcaaagttccctttcgcttcttcgatggttccaccatatgaagagatgtttcatgatttcaatcgattcaaatgaaagagagtggaaaaagaagaagtttgggcttagtgggagtgattt

SEQ ID NO: 35986 - DNA, 357 bp, Glycine max
  unsure (1)..(357): unsure at all n locations
tcaagctttgaaaagtgtngttattcaccttttcgctaaactaatttgctggcttagcgagcgtacgctaagcgcaacactcatgggctaatcacgaggaagactctgaaagaagatgagttgtacaggttcactaagtacaccacttcatctcaataagtgcaccactttagttcatctgctaagcgagaaaggcacacgctaagccagaattcactaatgtgcgctaaacggttcatgagtgcgctaagcgcacgagcacgaacaagaccacctatttaagcctgagatcagattttagagagggactttggactgtgaattaaagcttcgcatgtctagagtttctatagagag

SEQ ID NO: 35987 - DNA, 376 bp, Glycine max
  unsure (1)..(376): unsure at all n locations
tctctcgctaagcttccaatacttagaggaatntctgtatattntgtgccgctaagcgtagcctctaatgagcttagcgcatatccttgcggcagatgtttagcttagcgggcactgtccagctaagccaattctgcanaagctgaatttctacaacttccgctaagcggctccatgtctcgctaagcggccagcgtctntcttatgtttatttctcagctttgatctttaataaattcagtcctgatcaattgcttggttcctttatatgcagatggcctctcgaaaacgtaagagtagtgattctaggccacacgatcagaatgacaacacgagattccttcagaggaagcctggaaccaatatatcaataata

SEQ ID NO: 35988 - DNA, 154 bp, Glycine max
  unsure (1)..(154): unsure at all n locations
gggacgacgtacctacatatgaggtgtntccatgtgaatccctcctatgttgagaccgtagatcccttcctgaagttctctcatgacgtactctgcctgttggctatttaggcattagagtaggggtgttattaactctcttttaatagctcgc

SEQ ID NO: 35989 - DNA, 436 bp, Glycine max
  unsure (1)..(436): unsure at all n locations
tctcaggaggtgagcttagttatgagaggcgtgtgtgtatctaatctctagcttctcaaggaagntttctcaaagaagcttctcaaggaagttttctcaagagagcttctcaaggaagctacctagtctataaatagaagcatgtgtaacacttattgtaactttgatgaatgatagtcttatgagacacacttcagagttctacttctccccctcttttattccttcaatgtcgtgctcacccctctctctntctctcactctttcttttcctgcattgaagcatccttccaagcttcttatccaaggctcatcttggtggtgaagcttcttcttccatggcttattccctagtggatggcgcctcccttctcctcttctcctatgccttccgctgcatctccatgggtgaaaatcaccatcgaatgacctcatt

SEQ ID NO: 35990 - DNA, 534 bp, Glycine max
  unsure (1)..(534): unsure at all n locations
ntgacaccttgaancttagatacttcgagtcacctgaggcatgcacgcgttgagcagattcaaagactgaaacatgttactccgacgttctatcgtgtcccgtcacacatcgagacgctcgaagttgaacacataagctcgtatcaatgttggcctacaataccttcttactcagatgtccgatgatggtccgtcgtggatccactccctcgcaaaggaattcggcagctcggctctgattacaacgacgaccacattagtctccgatgtccgactgtgtgctctaatatatggcgacgctctcactcgaaattaaatactctggcacattctcggacaatgcctattactcagacgccgaactatcccgtatctatcatgactctcaaattgaaccgaccttgtggagatcaacgacatttccttcactccgtgtcgaggtggccctctcttggagaactctgatgtgcaggagcgtttgctctcaacgcataatgttctcggttggcgatggctcttattaaaggagcatcg

SEQ ID NO: 35991 - DNA, 345 bp, Glycine max
  unsure (1)..(345): unsure at all n locations
ctcagcttctgtttcaatgtcgagcttcacgatatactacgggtcacattctgacnttcgagtnaaaagttattgtcattatagatttctcggagcttccgttntcaattacgagcggctcgatatattacgggactgaatcagacatccgaggaaaacgtntttgtcgttagaatattctcagagctgttgttttcaatatcaagcgtctcgttatattacgggacttaattgtacatctgagttaaaatttaatggggtttgaatttgctacgagcttctgttttcagatacgagcgcctcgatatactacgggacacagtcggacatccgagatatcagcta

SEQ ID NO: 35992 - DNA, 317 bp, Glycine max
actataggaatgtgagcagaatgcatatgaatgcaaagagtgagaactatgctttgtatgagtgaaaaggttactgcccaaggcaatcgtgccttattatctatagcagtttcttatgactcgcttagctcacagtcacgcttagcgagaacaaatgacgtgtgagctttatagggacatacgcttagcgcgtctgctcgctaagcctacatcaccatattaacaatatatagaagtgtttgggattagtgcgaagatatgcgcttagcgcattctgaagctctgattggtcctataactctctcttatcgagccga

SEQ ID NO: 35993 - DNA, 510 bp, Glycine max
  unsure (1)..(510): unsure at all n locations
agcntgcaggtttctagactctaagctactntattatcaaatttaaaactacttcaaaaccagtttgaaatntagtttggctcanaaattagttntggttgaaaactgaattgggaccacaaccagtttgaaactggttcgaccaaaaccaaaccagttntaaaatataaaggtagtttagttttgaaatccaattcatataattggttggacttgaaatattcagttatacttaatatttctactatcactagtgaaaagatcaaattgattntattctaaaatgttgcaagtcaaatgagttctgagattaggcctagtggtagaaacaaagtttctctaatcatctacattcatctttcagttnttccaagcaaagcttttgatgtagttntaatgcatatattggaagtgctacagaataaagtatcatgaggtttattttctcaatntatatngagaatactntatgggtctagatcctaactccatctntgctcactaatattc

SEQ ID NO: 35994 - DNA, 320 bp, Glycine max
agcttccatcaatgaataacaactaataatgcacctgacctcatctatcaaatgcaatatggtatcattcattagaaaatagcctaagcgtatccgcgcgacattctcacctaagaatacttggtaacaagtgtcgaggtcaccttgtggtgcatagacaactcccctcccccccccacacgccctgcatggtgatcgtgctgagcctcaagggggtctccacctgagagacacgccgccaagttaaagatattcccctcatgagagactacaggtacttattggcacgctatttccatgaaacatgaatgatgaaacat

SEQ ID NO: 35995 - DNA, 455 bp, Glycine max
  unsure (1)..(455): unsure at all n locations
agcttctatggaggctgaatctatgagcttcaatgatgtccttcaatggtgattntccaccatggagatgcagcggaaggcaaagaagaagaggagatgggagacaccatccactagggaataagccatggaagaaggagcttcaccaccaagaatgttccttagataagaagcttgaagaggataatttaatggaggaaaagaaagagagaaggggggagcacgacattgaaggaataaaagagggagaaaagtggaaccttgaagtgtgtctcataagactctcattcatcaaagttacaacaagtgttatacatgcttctatntatagactaggtagcttccttgagaagctntgttgagaanacttccttgagaagcttctntgagaaaacttccttgagaagctagagcttatgctacacacacccctctaataactaagctcacatcct

SEQ ID NO: 35996 - DNA, 414 bp, Glycine max
  unsure (1)..(414): unsure at all n locations
aagcttagaacaagaatatatgaatgataaatgatataacctgatatcaacacanaaacatgattcaagagtagatctacaaaattcgaaccatagaaatgcgagaacaagtatagatctaagatttagtcggtttattttttttgaatctactttatacatcaccaaaccacaagacaatggaggatatacatggagaataagatgaagaacaaggaattacagagaattcaccgaacaaaaagatagaggaagcataagaacatcacctagatgaagatgctcttgatcccacatgatgtaagctccattggagtttgtaggcctaggatcttcttcatcaatggattcctttgcttcttggaagatgaatggaagtataatggagaacgaagagagagaggagacgccact

SEQ ID NO: 35997 - DNA, 454 bp, Glycine max
  unsure (1)..(454): unsure at all n locations
tctcagctctcagcntgcattccttttcactcatgtgtccaagtctctgatgctacatgtgttgaatattgacagcctcagtaactactaccatatcctcatctgcaatcatgtaaagagatctttgcttctttccacgagccacaacgagatagccttttgttaccttccaagctccatctccatctacaaaagtggtgtgatgtccctcatcatccaactgccttatagatattaaatttctctttaaggtgggaatatttctgacattgtgcaatgtccatanggatccactgaaggtcttgatgttgatatcacctcttccgacaatgtcaaaagattatccatctgcaaggtaaactntcccanatcttctagacatatagttagacaataaatctctagagggagtagtgtggaacgacgcacctgatgtcatgatccatgaatcaac

SEQ ID NO: 35998 - DNA, 471 bp, Glycine max
  unsure (1)..(471): unsure at all n locations
agctngaagaggatgctntaatggaggaaaagaattatagaaggtgggagcacgaaattgaaggaataaaagagggagagaagtggaactttgaagtatgtctcacaagactctcattcatcaaagttacaacaagtgttacacatgcttctatntatagactaggtagcttccttaagaagctttcttgagaaaacttccttgagaagcttctttgagaaaacttccttgagaagctagagcttagctacacacacccctctcataactaagctcacctccttgagaaaattccttaagaagattcctaaagaagctagagcttagctacacatacctctctaatagctaagctcacctccttgaaatgagaagctagaacttagctacacaccctcaataatagctaagctcaccctcatgacanataacatganaatacanaanaaagtccttactacaaagactact

SEQ ID NO: 35999 - DNA, 531 bp, Glycine max
  unsure (1)..(531): unsure at all n locations
gcttacagcagatttagtaatgaaccactaacctagaagtaaaatatcttatatgccattaacctagggaattaaaaaaacttaatggctgagtgtaactgaaatngtggcaaccaaaagtcacccncaacagccaacaagtcagccaccatttggtctcccaaaaggctgatgcctangttgccaattgtgcccttatntacaaattgaactaaacctaactaaatccctttagttgattaacccaaaacatatnnttggtcagccaactntacaaggattgngccattatttagacaaactaaacactctaaaatngaaacaaagtggtgtcatttagtcctcctccattngggccatgatacaactcacaaccttggactnttctccttgaaactngngcttgtattcaaatagtatggacaacactntntgaagagcttncttggctttccttgctctagcccttgcatangtcctcaagtcttcaagtggatcctgccttgtctgctatgtctcatcatctctcct

SEQ ID NO: 36000 - DNA, 203 bp, Glycine max
  unsure (1)..(203): unsure at all n locations
agcttgtngacacgcggagatatacgttatcttctattctcacatgatctgncatactcanattggagtcacgctgacaggcggaaatacacgtatggttatccgtataaacattcttttctgttgtctgtaagacgaaaagcctgatagcatgcagagactaacgtcgttttctgcgctcttcgtcaatcgcggtcgacaag

SEQ ID NO: 36001 - DNA, 190 bp, Glycine max
  unsure (1)..(190): unsure at all n locations
tcggacatccgtgtganaagtatgagcatgagagtgtctatgtatctccatcgancaacgnccagcatctctatatattataagcctgaatcggacattcgtgtgaaaagctctgaccatttgaatttctcaagatgttccgttgtccaatttctagcctctcaacatcttatacgcccgaatcgaacat

SEQ ID NO: 36002 - DNA, 243 bp, Glycine max
  unsure (1)..(243): unsure at all n locations
ctcagcgagaaaggccataagaaacaatatctntgcaatgtcttcttcggagaggttgtgatgtatctccatgtggagcttgtaggccttggatcttcttcattaatggagtcctttgcttcttgaagatcaatggaagtggaatggagaatgaagaaagatgattgacgtcgccacttgaaggagatgatgagtcaagaagaacctcaccaccataggaagtcatggataatagcttgatgg

SEQ ID NO: 36003 - DNA, 464 bp, Glycine max
gaagaatagacagccggccattcaacatcggatgaacacctatattggcacgattgttaggattcgattactatatccaatatcgaataggaaaaccaaatgtggttacgaacgtgttgtcgcggtgctcagagttacccagtgcttcatgtttcatcctctcaatgctcacatttgtgtgtctagaagatctctataaggagttgcagtcgcataacgacttcatcactttaagggagaagatccaggcgaaccccgcagattaccctgatcacgtgttaacacccaattctgttttgcatcgagggcgcatctggctaccttcatactgcaccttcatcaaggctttgctcacgatatttcatcaaacaccaacagggggtcatatggtgtttcgataaacctcgaatcgaatagtggaatacttcacatggcatatgatgagttatgacattcgcaagtta

SEQ ID NO: 36004 - DNA, 351 bp, Glycine max
gctctaacaacagagatatatgcatgagctcgtaataacaagcgttttatcaatcaaaacattggttcgacaccaggagacctgtcattgaatacaatacacaggttttgaaacttctgaatactataatccacctaatatttgaatgaaacactgacataagaatgttgattatgttgattacatttgacgctagctagactattatattttaggatgccactttttaattgtcaataacatcaagcatgcattatcgtttaacgcgagcgttccagtcaacattacactgacaataataacgtagtagctaacaaatattatgagtattacttgtacccttacactgga

SEQ ID NO: 36005 - DNA, 585 bp, Glycine max
  unsure (1)..(585): unsure at all n locations
ttgacttcgatgtcatctcgacacacagantactcaagctcgtatggtgcagctttctagaagtgctgaaacatgctcttaggagttgatctttccagaacatatactacatatgtgaagaagagctttgccataaatgtattgatattatacacgactttttgttcgaaatatggaatgtaaaaaaatacatttcctcacaagcatgcttcatacttgtgagaatacattacgcaaactatgtgtatgtcatctattgaaataccatgtttcaaattgttagcgttttataaatacaattctagaatatctatgtcgagactcaactcacatatatgtgcacataatgttcatcatgactgcatttatattcattcggaatacgtgctcttggaaatagaacgtttaataactcaattatggagtgccacttctatgaccaatgttacatggtaatggagaagttgttccatacatgactcatatgcacctagaatatctactctgagacaaatcatcagaagactacttatggattccatataattgaacatgctggtgagatcgtatacactctcttagctt

SEQ ID NO: 36006 - DNA, 336 bp, Glycine max
  unsure (1)..(336): unsure at all n locations
gcacctgcggctgcagcttctcgngccattctaagtcacgcgctatttccattgaggcatttcaccgaacactnggtgggcgtgcgtttaggcatcaatagcaagagaacggtgacaatgtggcgtgtcctattgtttcanaatgcattataggcctagggccatctcataccaacccctaattcaacttgttggtgatgaacaaaagcgcaaaacagaatcataaaatgcgataaaggatgaccctacggctgcaaattcttcaatcccgtgggtatggctattgaaagggggaaaagaagttattgaatgtaaaaacgccccccctttcgtcat

SEQ ID NO: 36007 - DNA, 398 bp, Glycine max
  unsure (1)..(398): unsure at all n locations
gacactaggtaccacatcaatagataactctatctctcgctcaagtggtaaataggatatatccttaggaaacacttctggaaattctctaacaacagggaggtcacccatagaaaccttggtctctacttctaggttagataagatcatgtacacttcagaatcttctttcanagatgtcataacttggttagtagagataaacatcctatccctactcacttcataatcatcaaacaccacagtactatcgaaaccgctntataagacttggttggaagataaccaatccatttccagagtaacatcaatttggcttataggaaataaatcaaatgaatcaataattctctatcanaattcttacaggacaattcaaacacatctggaagtaacac

SEQ ID NO: 36008 - DNA, 456 bp, Glycine max
  unsure (1)..(456): unsure at all n locations
ctacagagcccctcggaactagttccagccgtgttcatccctacaagccctcttggtttatcgttccaaggctttggtggtagccacatttacatctctcagttcggtattctcttttcggattatcagagctgctgatntgaacttttctttaactgtttgggcctgctcgagttccgccctaagggcctgcacttctttgtcttcctccggtgcctcaacttcctctcttttagcgattctcaaacttggaagccaatccaaaccttgcacgtgggctnttaaccacttacgatagccgctgatgggcccattgttactgcccctgagttccttgtccttcttttgcaacacctctcatgccttgcggaccttctgaagtgtctccatgttggtcttatngaagcctcgtgaaatgacaggcgcgagctcatcctctagtggcgcccctctcat

SEQ ID NO: 36009 - DNA, 508 bp, Glycine max
  unsure (1)..(508): unsure at all n locations
ccgcccgccagcagccnnaggagaccgaggaggcggcctttttttttgagcaaacgaacaccgcaggggcgggaaaactcaaccggcacaaggacaaccgccctagccccccaaaacaagagcgacacaacaggaacaccgccgggaagacgaggaagacaaaccaaccgcagggacgcctcatgcagaccacgtggcaaaaataacccacgaaagcgcaatgggaacccaaaaccccaaggagcaaccacacgcaaacgagcaagacacggaccaccaaaggcaagcgaagcggtaaagactcacaacaagagctcaaacacatgactcgccacaccccacggcgcttgacccaccaagaaccatgagaaggcaaaaggacccgagccatgtggacccaaaacgaatcaaagcccaccccaaacgggccgcacataacggggagaagcaggcgcaaaagggcaacacaacggaggggggggaaaaagggaccagccgcaccaacaaa

SEQ ID NO: 36010 - DNA, 546 bp, Glycine max
  unsure (1)..(546): unsure at all n locations
aggagtgatgtcccttganngcaccatttatccattgatagcgacccctacactagctgagctcatgaatttctcctgagggaggcaatcnattgatgncaagtgcaaaccatggagacatatttgtgtagtttagacgttacacctgcaatatataaccataaagaatcacatcgaccttggaaccgtgttgatacatacgatccgacagagagtttcatgtaagacgccaataccactgttatcggtggagggtttacggataatatacctgagattatacattcaaatctcattgtagaccttatcgcacatagacaatatcatgtcaattctcctgtataaaatctgtttaagtcaataacattacatggagaaccgagatttacctctgttgcccacctataactctttttattgtgcgacaaaaaaaataggatgctccattccttggacaaactatgctcttgttttgactctttggctaagaattttcccaaaagatcgacctcgttcttgtaaaaatatccctctggatcgcgaacc

SEQ ID NO: 36011 - DNA, 406 bp, Glycine max
  unsure (1)..(406): unsure at all n locations
tgccgcatgcaagctnaaccgacatttccctagagaaaagttaatgagtgaagaacaaaaacggccaatcctgctggtatttgagaatcacttaaccctagcgagaaacactgtctctgtgaagaaaatccaagccaagacgcttccgtaacgcttccgaaacgtttccggaggtgatctcgtgaagattatccaccggtcgtcatcgttccgcgttcatttatcgccggtcttcggtcctcaacggggaagtccccgaaaacgaacctttccaattcattctatggacccccagtggacctcatatgcttcgcgggctattatgctcatgtccattgctaaccgcacccccctttagacgtgctttacccatttaaataaggcatctccccgcctaaaacaaaaa

SEQ ID NO: 36012 - DNA, 433 bp, Glycine max
gtgttcaagtgtggaagttttatcataatattgaatatcctgccaaagcacaaaaacaagaatatgagcctttattatatattttgattgtcctattgcattggaaagctttaccttggttgagagccctcatgtaagaggtgtcctgataacttttcaacatggataaagagaaatctggtagctatgatggcttcaccactgcttcttacaggtctattgtgtctctaaagagttacctgatctgtttctttgggagttatatgacaaagggaaagtagaacttatatgaatttattaattgtgatctgacatattatttctgtggcattgtaatattgagagagagaagatacaatcttagtgttattactgagatacacctctctgtttggctgagtcaaaagaaagctctcactcctcaatacaactg

SEQ ID NO: 36013 - DNA, 394 bp, Glycine max
  unsure (1)..(394): unsure at all n locations
atcagtacctgtctntacgtatntgagcttaatgattaggtatttgaattatntgtcagtacgtatctttgattcttgcatgtgtaaatgagaggattntaactgagtaagtctaactctgttgattgagcagaataagtgaattgttatatttgtctgtgtttatctttgattcttacaggtcataaaagaataaaagatttttaaacgggaatgtgataatataattccaatgcttacttaacaaattcaagactgttgcaagggtttcggcataagttgaaacggattcaggtgaaatgaaataaagaaaactggtacaatgctattcacatatatgatatgaagtaatcaattctgaactgtgttcagattcatgtcatctctaataaat

SEQ ID NO: 36014 - DNA, 427 bp, Glycine max
agcgccctatttgaaacttcagctcttccatttgcttgtggatgataaagcgatgctactccatggcaaacatcataatgttggaggacctttgagagttgaacattacaaaagggggtaccttcatctctaatcaagaggctaggcactccaaacttatcagagatgtctctctctaagaactgaatcaccatctttgcatcattggatggactagcaattgcttccaccccactttgagacagtagccactgctaccaaaagaaatccgttgccatgaaaagatggtaagggaccaacaaaaacaattccccaacaatccaagacttttacgacctgtatgatcaataaaggccattcacgtcgactataaaagtggcccggtcattgatagacggcgcatgaacatgcatggctataacccctt

SEQ ID NO: 36015 - DNA, 414 bp, Glycine max
  unsure (1)..(414): unsure at all n locations
attgcataccaatgatgttgggaagttccatataaacttcttcaaacaaatctccattcanaaaagcattattaacatctaataggagaaggcaccagtttctagcagtagcaacacagagcanaactctcacagtggtaagcttgacaactagagaaaaagtataagagaaatcgattccagcttgttgagtataccctctggcaaccaatcgagctntgtatctatccacagagccatccattttatatttaactgtatacacccatctacaacctatacaatgcttatcaagtggtaagggaacaagtcttcaggtggaatttgttggacaagtggcctcaatatcttaaggggaggggggatgaattaagtcttacaaaattgcactcagaacctcattaaatctcaagt

SEQ ID NO: 36016 - DNA, 269 bp, Glycine max
  unsure (1)..(269): unsure at all n locations
catagagaaacaacttggatttgaactcttaatatatacatacatttcaactgtatgtgaatgtgagaaactcaagtattattattcaaatatgtgagtgtacaagatcagtttacaatattatccaatcatacattattattgatataattgttaaggtacttataatanaactaaacaaagtgatcatacataatagattatgattagataatggtgtaaaactggtttacactcatagtgcaaaatctatttctctttctttcttt

SEQ ID NO: 36017 - DNA, 553 bp, Glycine max
  unsure (1)..(553): unsure at all n locations
aacacaaaggcanagcggcttacaagctccttctttcgaaggactcacgtatccaccctatctttcattgctcactccttaagccattccggcatgacgtgggaactaaaccgagcccacttccattacctagaaagcactccaacaaccgtgctatcattacccctctaattatcctcaatactcgttgggtagacacatacaatggactttgtttacaggtgctagtgcaatgggccgatttactagttgacgacacatcttangatgattgggtttcattaaatgaggaatatcaccttcaagacaatgtgattttcaaaggggccgggagtgatatactagtcaacatgcatgaagcccaacatagaaggcctcagagaaagtcacacctctgtaacattttgcaatacattaagtgttgaagcatagtagaacattgttaaatcatggtattaaggcatgtctttgtcgaggaaggggagtatttgctattagccaatatattctttatcctggcaagtgatgttacccctttccccattaaaaattg

SEQ ID NO: 36018 - DNA, 301 bp, Glycine max
  unsure (1)..(301): unsure at all n locations
gtgcgctgcggcggtgtggcggngagggagagttagggctccgtatgggccggtgatggagttgtggcgggggaggggcggcgactctggcggcgcgtgtgtggtggtggactctgtctctgccatgctgcgtcgtggtgtgacttgtggtggactagtagagatgaacacgcggtggaaaaactcggagtttggaccaacaatgaaagtgagagataaataataatacacgcgattcgatgtgcgccaaacaaagtgctaaataaaacaaattagaaacggtccatcactattgcaatta

SEQ ID NO: 36019 - DNA, 316 bp, Glycine max
  unsure (1)..(316): unsure at all n locations
ctaagctgccgccagctcgtcattcagctagctcgncaggcgatctatgtgcttcctctataagcaacaaccttctggaggaatcttctggagggactaagtgggccttggtgctatatacacccccatttatactaaatgcacccaccttctatttatgtggtaactctatttccgtaacgttacgaaacttcacgactgttgtaacgatacttagtttccttccgcaggggtacgaatccttacggattatgtatntactctgttttagctttcgaagaagttacagacactcacggattgcgcaataacacct

SEQ ID NO: 36020 - DNA, 420 bp, Glycine max
cattaaagaaaagtttattcatgagactgagtaatctactctgttatcgatgctttcttgcaactaaccattgatgagaatgatcttaaacgtgtggacgatgagaaatcgtatatatgtgattcggagatgcccttagaatcttaacaactaaatatttaatgcataattgtcactttggaggaacccttataacttaagcgctgtactacctttcattcttttgcaggaacctaccatttcactcataatctcgttcatgccagaagacttatcacttgaaatctcatatcttagtccacccaattcaaaatcccatcttagctgctaacattctgtggccatcccaaacatccaatccatcttatatgtggtatgagacaagataatagtatagaagttaaattctaatacaacttt

SEQ ID NO: 36021 - DNA, 625 bp, Glycine max
  unsure (1)..(625): unsure at all n locations
cgacgttgtnnccctttgaaanagcgnnntgnntttnnnnctnatgatacgcctgctattangtacactatagatactcaagctagccactgtcatgcaacttcaagtttccattgtgctcaatctaatctttntcccaaggttcaagctcagcacgaactntagcaagctcagagcgatatttctcagtttcaactgcttaccagtcaatgacagggttaacaaaggcaaaaaaaaaatacaagtagctaanaaccctctatagcacataggatattagctccatttgtctacatggtagataatattaaaaaaataaagaccagctaccaccaccaaaaacactgaaaatcagcttgatgcatcccagacaataacaacananaanaaacaatttagaccttgagataattatatacaatggactaaaatananaatataagaacatatnttgaaatanatcatgccaatatatatatatatatatatatatatatatatatatatatatatatatatatatatatatatatataagagnntcttatacaacaatggtgtttgaccanagagtcatgattatctgctattataatanaggaacctatcttgactaacactccg

SEQ ID NO: 36022 - DNA, 716 bp, Glycine max
ccaagacgagaaacgccgacctgggttgggtctgacacaaggggttagtctctcgcagcgtgacgaattaagatttaaaacgtcgttgggagaggtgtccccgtttagtgtgcaacagtacttctaacagaattgtcttcgaaggaagatatccgtgggaaaccaaaaccaaaagcaatatcaaaatgagaaatgggtagagagggatttcttgagttttgagtgagacaagggagaattcttcaaagagatccatggaggaagagtgtgaaagggaaacgaatggtggccgcaagaagcagaagcttgagactcttagcctctctcttgctttgcctgatgagtcgctctctctcacagcctccaacgcttttctaaagggcgaccacctcgttaggccaatgcctaatagcccaccacagggaccaccactcctttcaatccttgttcaattgataacccacagcttctgagtcttatttttactcttaccctttctaaaccaaccgaagttgcctccctcaccccgaattttacccggaaattctaggactctccctccaaaaatgatccaatctttggttctgcggggaggggacttatacgctcggtcataacaggtccaaccccactggagagggggtggctttgccaaattttcctcccgcccgggaagatctgattaaggctcttgctctaaaaccattctgttttcc

SEQ ID NO: 36023 - DNA, 657 bp, Glycine max
  unsure (1)..(657): unsure at all n locations
agcttttatatgacatgaagattntttttttgttctatggaatatgatcactgtgggtgcatatatgaacaactgttcctctaaaaatgttgcaggttattggaattgtaggattcatgaatcaacggctcgaaattccaaaaaatgttgatccacggtgggcttctataattgagagttgttggcataggtgtgtattcttatctctgttaaacttttgcatcccaatccccaatccaataaatagcttcgaatatccaagcatgaattttatcactgaaacaaacatacaagtcacgtgtgccccaaaagttggccagcttaccctaattccttaaaattcttaatataacttgttgtttcatcaagctggattcatttggacttttaattaatactagggaacgtacttgatgtagcctatattatatttttcgttgtttaaagtgaataacaaattcgtcgttgcataagttgactttggtttggtttttttgtgcgaatggtgactttgggttgttgcatttgctacttgatattttaatagacaaaatatttgtggacaccccaaattctagttaacacccttcaagagaggtgaaaacatatanaaatatatgtatgaaaggggattgatatcataggaagaaaaatgaa

SEQ ID NO: 36024 - DNA, 381 bp, Glycine max
  unsure (1)..(381): unsure at all n locations
attctaagaaactaataattataattntcacatcccaaatataattgtatatttcttagcaagtattcaaacatgctattattaatttatctgtttaatcaatttgtgccacgattattcttgagagtgttccttgaatgaacaattatacaaggattatagattatactcaatcatatcggatactccgaggaaggtcttggttgatgaattgtgcttgcaaaactgaatatagtctactataatcttttgtttaattatacatttcaagatgtcttttntacaacggtcacctaagtagtcatcatgattcctgaaagataattatcatgcanagtaacatataggactctaattacatcatatcatatgaataataat

SEQ ID NO: 36025 - DNA, 399 bp, Glycine max
aaggccgaaacacgccaaggatggcggaaagaaagcaactaggaccacacactcagactcaagggtcgaaaggcattaaaggcaaaaaccaaggagaaacatcttgggaaaaggaaacaactaggcaccaactttatcaaaggagggcgacagcagccactgtagagggggggcgcgaatgcacccgaacatggcttaaacgctcaaatacaagataacggcgcggaagaagcactaatggctcaaaggaatgtaggcgatcccgcctgggaaggactttagcaaaggggagacacaaaaagaaggccccgaaggtgacggggagcccacacagcgcactcgagggggtgaaggggcatcaacaaaggccccacctacaaaccgggtagaagggagaaa

SEQ ID NO: 36026 - DNA, 411 bp, Glycine max
  unsure (1)..(411): unsure at all n locations
cggtctncaaaaaattggtggctgtggctgttatgtgactgtccaggaagtntgttatcggagaatgcagatgggtttcagcanaagcatgctggaatttgattgccagagtgtggtgttctgttggatctccacaacagtggctgtagtgggagtgcctgtgcagtaatagttgtagctacattgctcatagcagcctcgggtttatctcattatacgttcggtcttatttataagaaataagtgataatatatattatcactcttttcttatatatataggactaaaggtattatttattattatgcccacacatttntacttgcatttctttccttgataataaaatttctgtatctaaacatggaaaatttgacattatatattatactatatgtacaatatattct

SEQ ID NO: 36027 - DNA, 62 bp, Glycine max
agaaaacaggacaacaaagaaacaggaggggcggttaacaaaagagcacacaggggcgagag

SEQ ID NO: 36028 - DNA, 600 bp, Glycine max
  unsure (1)..(600): unsure at all n locations
tgagacttgatacaccatgatgacggcacacgatatgaactcattcangctcactncgctcctcggccatcctcttgtatttcgggaaacagagaacacaccatctgtagtctgatcaaggatggccacatcgttctattgtgctcatctaccaatgatgtgacatactcgttcccacccagtgaaggtacctcagcttgaccactctcgtcagactgcgcatcacctagaccacttgaatctctcatatgcnaatgggagatgaacgaacatcttggatgcttgacattgacacatacgtcacacacgttacctggtacatatcatgttcgctgaccgataaccatattagtagttactataatatatatactatttgaaatatacttgaccaatcttgacatgcaaaggcggctcatatgtngatctatgttccattaacataaactcttgtgccttaacgtggctaggaggatctagttattggagaattatctcatgactacacggactatgatcgactatgttgcattcacccttcatgcacacaagaactgttacgccatagactcactcatcagagtgatactatctcataag

SEQ ID NO: 36029 - DNA, 457 bp, Glycine max
  unsure (1)..(457): unsure at all n locations
ctgcaagctgctacccatggaagctctatttttctctctttnncaggcgggccattcttggatggccttgattttctcagggtccacttggaccccatttctaccaactacaaaccctataaaaactatgttatctacacaaaaagtacacttctctatatttgcatagagggtgtctctcctaaggactgaaagaacttgcctgagatgtcctaagtgatcatataagctcctactgtatactacaatatcatcaaaataaacaactacaaatatacctatgaaatcccttaagacatgatgcataagcctcataaaggtgcttggtgcattattgaacccaagaggcatcactatccattcatacaaaccaaactgggtcttgaagccggtttacactcattaccctgtttcatcttgaatttgggaaacccccttttaacatacatttttgaaa

SEQ ID NO: 36030 - DNA, 359 bp, Glycine max
  unsure (1)..(359): unsure at all n locations
cctagtagaagtcctttatattcaagtttgtgtgctcttgattgaatggtatgagatgaagtgcanagatcgagacttgtgttggttgttgactgatggatagcctacacacttgtgcttgagtgaaacagtgaccgtgaggctttggttgatgatccttccttgatatctatcatttctactagcttatttcagttatgaggcctaataaatatgttcatatgcttgaaaagctgcatgtcttgtgagaagctgttggttaaagcattaaataccattcatttcatgtgagtgaattctgtggaaaaaacctttgttttgaataaccattgtgattctgtcactcgaggacaagtgag

SEQ ID NO: 36031 - DNA, 434 bp, Glycine max
attctaaaaatacaaggggaaattcacagaatagaactaaaagattcatcctttttttccccaaagggatggaatgccctacacccctgactctctgatagtggatcgccccagttttcaagaaacgaaatctagagacccgaaaagaacaatttccaaatattacaaaacaagattgcgcctacattacttgggaagaccatgatatgaactcccctgaacattcagaaaatgagactggccacctgagtccaacgacaaaaaattatgaaagcgatgaaaaaataacaccttcttagaacaaattatataattcatttgacgaattacgagaagacttcccctgatttacataaacaattcaatccgaccttgcaaaacatggtacctttttctaagaaaacctatttctaacttagaaaaaaaagttttta

SEQ ID NO: 36032 - DNA, 539 bp, Glycine max
  unsure (1)..(539): unsure at all n locations
actcgttagatcatatgatattgttctatagtggtgaccatttttccagagatctgagatcttctttttcaactttataagctcattcttagcataagtgcatactttctgcacgaagagcctttcgtgaagcatttccttgggctgttcttttgaatctttaacagctatggttaagggattcaccctttcttgcatgtcttgacaaatcctaangaaaaatatttcatccactggataccttctcatccaataatgccttgacctcctcacaaacaaaggtgtcttgtacatcaccaggtgaagtggtttctaggacaaaatcaactaaataagatngacgagttctcttgagatcatcatgctctctttcaagatgtagaacatgcttggttacttttctataatctttacagacgtgagcagatgcagacanaattattngtaccctttataagtctctctagattgaacattacctcttaccatcnagttgaagtgcattangtaggatttcatctctaacatgcatcatgtgg

SEQ ID NO: 36033 - DNA, 153 bp, Glycine max
acaggggaaggaggagccacgcgcccacaggggaaggggaaaaccgggagagcaccaacgccccaaccgccaccaaaaacgacacgggaggggacccccaaaaccacaaacctgagatgaggaaaaggggaaaggggaaacacccccgccgga

SEQ ID NO: 36034 - DNA, 239 bp, Glycine max
  unsure (1)..(239): unsure at all n locations
gtgctcgcgactggtccctntcttcctttcgcaacttgagttcactattgctaccccatagagctccgcgaaatttgttccggccatactcttccttgcgagccctcttggtctcttgttcaagggctcttgcggtaattgcattctcttcccgtaacccggcacactccttccgaacgtgtgtagcggccaacttgaacttctccttggcaagttttgcctttcctaactcgcttttg

SEQ ID NO: 36035 - DNA, 652 bp, Glycine max
  unsure (1)..(652): unsure at all n locations
gccggcatgcaaacttggaatttgaagaaaatggaccccnctccctcttggttgagcangngcaacaggagaatgataggtttccaaattggtttttcaaagaataagaagataaggcgaaagcttaaggtgacaagcagatttgacaacgtgaatgatcccttgactagccattcaacgtgccaaatgatgtcttttacggttaatgttgattttgaaatttttaaccaaaaatggctaaagtaagtttgaaccaagaacggaaaaaactgtttttgctaaaacttgtaattcttatcttaaatcttatagattagtgtgttaactttctatattattgtgctaacctcccttaggatatgtgtagacaaagtggaacttgcccaaagtccactcacatagagacaaattatactgggactcagtgccattcttgcgcagatggaaaatctaggtcaaacaatttctatttcactacccagcttattatgattatgagctataaaaccaaacttatatctaatggatttagagctaagctaaatattttatatttcccctttcttctgcccaaagcaaaaaataccttcaattcatcttatcttggctaccaaaggaaaaaatcatttcttgccactcccattttgtttta

SEQ ID NO: 36036 - DNA, 198 bp, Glycine max
cctcctctcacctcttctcctttatcttccattgcatctccatggtggaaaatcaccattgaaggacctcattgaagctcaaagatccagtctccatagaagcttcacaagcaagcttccatcaagtggtaatcagagcacaagagcttcaagtaagtgctcctttaaccttcattatattttttgctttaccttctc

SEQ ID NO: 36037 - DNA, 615 bp, Glycine max
  unsure (1)..(615): unsure at all n locations
agctttatggatccaggnatncctttttacttcnttgaaatctaacgtaatgcgttttggtgctcatttggtattttataaggtttataaaaacatgccaacattgaaatctttatttataggagctgctactatagtcctagtggttagcttagttcatatatatgttgaattctaattagatcctaaagtaaacatagtttcctgtatttggcaagttttatcaacttcttggaggataacctctcacttctagatgttgtaggcttaattagcatctcgaaagcaaagtactgaatttaaaagcttgtgtgctgatctttttttttctttgcatcctaagtctaacctaattagtaaaataaagttttcctgatatcacttgccaaccccaattgtgctttgagatagatttattgtttaagttcttttcatgtatcccaactttagcataattaatttagggccataaataattaatttcacctcattcttgctttttagggctaaaacaattgtgttttaatttaacacatacacttattttattgcataaaaccctggcctggggatttacattttttaacaatctaatgcatttatttgaggcaggaa

SEQ ID NO: 36038 - DNA, 321 bp, Glycine max
  unsure (1)..(321): unsure at all n locations
gagtatgagcatgtgatgggattatgactgtaaatgttagtcagttggtagattgattgtgaaggaatgcattaaccgtatcctggtgagagtgtgagtccttatatttgagagaaacaactaccatttagtactgatttttgcgtgaatctctgaagtatggactgaatgcatgcaattgaggatgatgaaggccatgtttgattgtgatagccacttatccaanaagctgaccatgtgcttgaatgatttatcccttgcacccagtttgagctaaatgaattattgattgatngaaccctgagcctatatagtgttatc

SEQ ID NO: 36039 - DNA, 454 bp, Glycine max
agcttgtttgttaaagcgaatcatctactgttttgacagaagacacaacatacgcggctgcgattttatgatgaagcacgtggctcttacatagggggcatcccactactactaatagcagagttcacatcgggagtttaacatcggtttttaacaaaaccgatgctaaccaatatgcggaggcctaatagtaaatactacgtatcgattaacatccgttcttggaaaaccgatggtaacaattaattagacaaaatcgggttttccaagaactgatgataacatcatttccttaacattgggtttgccgaaaacccatgttaacataagtcttgtgaacactcgggttttgagaaaacctatgttaaccgatgataagttaacattcggtcttctttaaaaaaaaaagttatgcggaacttgaattagaaaaaatatcggaagccctcatttg

SEQ ID NO: 36040 - DNA, 658 bp, Glycine max
  unsure (1)..(658): unsure at all n locations
agcttctacttatgtggcagggcgggtaatcnttaccttccagcctccaacgcgaacgtngaccattgttcttccttcccgcaatgcttctttacatgactgcctgaatgggcttatagcctaaaccatacttcccacgatttccttgagtatttatcaggctagttatgccgccgttgttttttcctaaacccatcccgggttcaaaaccgttccccaacataactcgggccatcattaccgctgcatcggacagacaaggttgcccaaagagggagtccacggaggaaatgctgaccacctcaaaaaactggaaagcagtttctaacgattcttctgcggcttccacataaggcatggaggatgggcagcttaccaagatatcttcctcgcctgaacgatgaccaagtgcccctccactaccaatttcatctttttggggagcgaaaacggccccactcccactgagtggatccaccggcgccccaacaagcagctgtaagggagggtaatatccattattgggaagggacttgaacggggtgtagggccaattgtactgggagaaccatctctccctaacctctaggtagggccgtcaaaggcccaaccaccatagacttggtttaaaggggaaactttaaagggaacttttcca

SEQ ID NO: 36041 - DNA, 350 bp, Glycine max
  unsure (1)..(350): unsure at all n locations
tcctgactcaccatanaccttgtacccaggtgttaatgtcaatccttaccctcggaagcaanaaaagaatagagggganatntccaatcaaagaaaaagagaaggaaaatttccaatgaaagcaaaaaaagaaaagaaggaaaattccccaatcaaagagtgggagaaagcaaaaagaaaagaaaggaaaattcccaatcaaagaatgggagaaagtaaaaaaaggaagaagaagaaggaaagaaagctcctgatcaaggatcgaaagaaaacagaagaaatgtgcagagaggtctttggaccggacaatatctgaacaatacagaattgccaccaaatgaacgaaaaaa

SEQ ID NO: 36042 - DNA, 567 bp, Glycine max
actcaattgaaatagacgaagatgatgatcctagtttatttgtaaaaagattcaacaaattcttgagagtaagaggaaatcatagaagatcaaattttaaatcaaagaaaaggacagaagattcatcctctactccaaaatgttatcaatgcaatcaacctggacatctgagggttgattatccaatgttcaagaaaagaatagagaaatctgaaaagaaagtttttaatgaaaagaaggcaaagaaggcctacattacatgggatgacaatgatatgaactcatatgaagattcagaaaatgaagtagtaaacctgagtctaatggccaagagttatgaaagcgatgaagaggtaacatcttccaataacaacttatccatttcatttgatgaattacaagatgcatttgctgatttacataaagaattatttaaacttgcaaaactagtttctttcttctaagagaacaatttcagacttagaaaaagaagttttataattaaataaagaatttagaaatcttaagaatgaaggtattaaatttaagatcaaatgatacaattca

SEQ ID NO: 36043 - DNA, 390 bp, Glycine max
  unsure (1)..(390): unsure at all n locations
gtgggtctattaagaggcaaatccgatcatcttgctttgatatatgtaaaaanaaaaaaaaaactggggcaagtgaagaggataaaaaggagggagaaacctatgctgtgactgccattcttatacgaccaagtttcctaccaacccaacaatgtcattactcagccaataacaacccttctcattacccaccacctagtcatccacaaaggccatccctaaaatcaaccacaaagcctacctatctcacttccaatgacaaacaccacctttagcataaaccaaaacaccaatcaagaaatgaattttgcagtgaaaaagcctgtagaattcaccccaattccagtgtcctatgctgactngctcccatatctactngataattcaatg

SEQ ID NO: 36044 - DNA, 577 bp, Glycine max
agcttcatcctcagatccctcttgggggataatgcttaatttagatggccctcttagggttagactatcttaaactgagcttcgtccgcaaatccctcatttaagtctagactcaacttaagtagcttactaaagtttagcctaatttaacctaagcttcggccacagatccctcattaagactaggctttgatcaaacaacattattgtaacaacataactgaaaccaaaacttaatccgcagatccctcttgtaagactaagtttcgatcctgcatcaatcaagttctaaggcaacagtacatttcccaatgctacagtcacctaactatgcccacaaatggatgatcaaaccaaaaacatacaaacattaagcattaaaggaagcattgaacacagaaaacacaatcaattagatattaaatatctacatcgggtgttcattagaaatcccccactagggtgtttagcccgccattacagagaaaccctatccataaatgagattaaaggtggagaatgatcgttccttactcaagaagggggattccttcttccttttctcagcgtctgacac

SEQ ID NO: 36045 - DNA, 380 bp, Glycine max
atcaatgttcccatagacagatatactaactgtaatcaattgcaagacacactctcaatggaggtctctcatcaaattcattccaacctccaacaagttcaaaccctgcaagagatgacaaagtggagaaagagggtaatgtgtgtgtacctatggagagatctctaatggcagaagaggtggcaacagtgcgctcaattagggtcatctgaccaatcttctccctcagagtcatgcgagagagaacgtccttcacacgagctataatttgctcttcgggattcttgtaaacgcaagccatggctccatggttgaaagtggttgaggagtgactactgagtgtgtattatgtttctgtaccaacacacaaatgatgatca

SEQ ID NO: 36046 - DNA, 389 bp, Glycine max
  unsure (1)..(389): unsure at all n locations
gctccttcttccttgtgcttattcnctagtggatggtgcctcccctatcctcttctcctttgccttccgctgcatctccatggtgaanaatcaccattgaaggacctcattgaagctcatagatccagcctccatagaagctccacaagcaagcttccatcacattcctcacaaatccctccttagtggatgtagtggtggaggagacctccttacttcaccctacttctcttccgccatgacttaaggagttttctttcttttgtcttcttctttacttntattgtacttgtccaaatatattgattgctttgattgttcatgatcttatgattgtctacattgaaacaatgtgttgttaagtgtaaaaaggggggggggagaaattt

SEQ ID NO: 36047 - DNA, 596 bp, Glycine max
  unsure (1)..(596): unsure at all n locations
agcttccatcaagtggtaatcagagcacaagatcnncttttaggtgctccttaaacctccattaattttttttctttaccttctcttccatttttgtttcttcatttttctccatgtatctcctcacatgtcttgttctaaatgtttttaacatgattctttatagtttccaccgattaaacttgctatagaagttagatttgattttctatggttcaaatttcttgttcttgttcttgaaccatgaattgtgttgagtttaggttcctttgagttttgtcttgttattttttgtggctgaaacctaaaccataaaattcttacaaagatattaaagtagaagaaaaccttcaaaatctagagtgacttgttcacctattgtagttttgtcatacaagtcatgtctagtcatgaaacttgtcacataaaaattcttatgttgtgctgaaatttaatttcttgtatcttggctaacccttttgttcattagtgtataaaatcttttaacccatttttgattgagtcaaactttctgttaatagccctaacatgttatgcaaaatcttaaaaacctttgttgtgaccttttttgaact

SEQ ID NO: 36048 - DNA, 315 bp, Glycine max
  unsure (1)..(315): unsure at all n locations
tttcgttcatgtgtctccaccttctagtttggagctatgcgtagtgattgcttagtgcaattctccattctcnaaccttttcggagccccatgaattgcgttttcgttcatgtgtcctccaccctcgagttcggagctatgcgtagtgattgcttagtgcaattctccattctcaaacttttttggagccccatgaattatgttttcgttcatgtgtcctccaccttcgagtttggagctatgcgtagtgattgcttagggcaattctccattctcaaccttttacggagcccatgaattgcgttttcgttcatg

SEQ ID NO: 36049 - DNA, 523 bp, Glycine max
  unsure (1)..(523): unsure at all n locations
ggcaacccaggngcccgcgaaaaagaaatttgtacccgctgcaagccactggcgctcgcgcctctatagggaaccacgaaccaacctatgacctttcatgcaccaccctgaaccaagcgacaaccctccagctcatccccaagacacctcccatagaccgcgccacccccaccaacggaagcccccccccgccgaacaagtaggaccccccccgcaacgcaaacaacccctggaagcagcaagaaccccacgccacccatggcccgggcctctgcaaccacataacgcagcctgccctcctgtccccaaaatgctgcccccccagccataacatacagttttccaagacttcaaaaaccgcgaacaaccacaaaaacacccaccaacgcggggtccctgcaaaccctagctaccaaaagggaggaaggaccacgagtaccctgcacctcccaagggaggccctaaccgcaagaaccccgccaagccgaacacaaacgcaacctcgccctggtacccagaaggg

SEQ ID NO: 36050 - DNA, 121 bp, Glycine max
tatagccgcggcccacgagcatagaatcgacggagtgtaagctctagtctatgccgaacaagatgctacagagaagggtgatctgactctttacaccaagaggctaccatgtggatggatc

SEQ ID NO: 36051 - DNA, 593 bp, Glycine max
agctttagattaccttcattggctatgttatgattcgaacctgcaacagaaaatacatcaaatatgagtaatagatttgacaagatctaaaaccaaaatttgtacatgtatctttggaaggcattagcaaaaggacacctttgatatcacggggaagtacttgatttacgtgacagtaatgtagcccagtcagaagctgtctcatgtaacactttagaaggaaaaaacaactcaggcatgactaaaaaactattaatataccaattaacactgaatgttaacagtaaataccttaatttggggaactgtgaatctcatcccaggtcggtcagcaagacctgtcaaatcatggtccatgtattcaaagaccatatagatgccacctttatatttgttaccatctgctcaattccaaaaaacaaaaccaaagaagatataataggaaatataaaaataacaggatccaaagggagattatggatatgttcatatagtcaaacagtactgtctaattgaaaatgaagtgattgactattattatgaaaaggaataacttgctgggcttcctggtcatttttttaaggcccgaaaaa

SEQ ID NO: 36052 - DNA, 365 bp, Glycine max
  unsure (1)..(365): unsure at all n locations
cgtgggcttcacactatgaagatagtctcaataaaaaggatnnntttggattgtggaggagcattgctgaggggctagatcattacatttcatggagcattgtcagaagtgagaattggttctntaagatgggcgtcactcaatttgaagctgacatgcaagcactaatatttatttttcagccttattgtgctcgcccacaagcattttttccttgtattaatgagattctttagcttttgaaactgacaaaagaagaggaaaagctaatgcaagcatttttgtccaggaatgaacatggatcagagtngttgcatctttatggaatntctcatctatcagtttatcaaattcttcaagttctt

SEQ ID NO: 36053 - DNA, 214 bp, Glycine max
tatattcaattatatgtaggtctatggtcagatatagtcataaacaaactgtcttctgtttctgtggtagtagatcactgctcttggaatgtatttattttggttagcaacaataatatatatcgatatatgagggagtaccagaggtaccattaatacaagagtatgtaagtaaggctggtaaatcctcatattaggctgaatacagactgat

SEQ ID NO: 36054 - DNA, 267 bp, Glycine max
  unsure (1)..(267): unsure at all n locations
taaccgcctgaattctgtttgtgtctctcttctcccttttcgaacagaacagaggactaaccgcccaacatttnttgagtctcccttctaccttgttaaagaatacaatatgacacaatctgagaattttcttgattcttccctttcccatatacgaaagatgtcanaggactaaccgcctgagaattctattgtatccccattcacacagtttcataggttaaccgcctgagaactttgcttaacacatggagggtacatctttgt

SEQ ID NO: 36055 - DNA, 440 bp, Glycine max
cagccaggaagggggcaagagagcccttttttttttatctgagggccacccaaaaccgggcggaagttcttgggcagaaccagacgccaccaaaaccagggaacaaaagaacgaaaccacagaaaggcctaacagacccaaggaggggaagggcgggaaaccacggacacggcacgagaacgccacccaaaaaaaacaggccaaaaaaaaggaacgggccaggcgaccaaagaaagcgaggaaccaggcgaggggataggaaaacaacaacgaccgtccaaggaaggaaccacgcaccccccacggggagaaacaagggggacagaaccgggaagcaaaaaaggcggacgcagcacgcaagggaccagaacagaaggaaggcgagaacaacgagggaacccactaccgaggaagcacccaaagaacaaaaacggagcaaa

SEQ ID NO: 36056 - DNA, 625 bp, Glycine max
agcttgtcggtgatgggatccaacttttgtcattatacttatctatattatattttggacagggacagaaaatggatgctatgcccttttgctaaacgtaattttaaataataataataataatatacaaagctacatattacattttatataaatcgtaattccaataaacttgtttccaaattttaagagaaacttacttaagggatttagagcattatttcgatgataatctatatatgagttatttaattttttttcttattgaaacatgtgacatggcattatttatataaacaatcgttatttaataaatttatatttataaataaaatattttttcaaacataataactcataaaattaagttaattaattatttgaacccattttaacatcagaataaatttcatacaaaatatctaaatttatggcaacattaaagaccctaaaaaaatatgataaacaattcattaaaacaattggtgtaaatgctattggaaaaactattgagaaattaccttgtcattcaatcattacctattagaaggagtttgacattactattttttcaattaaatttttattaaaaaaaaacttaaatcttatttttttattaagaaaa

SEQ ID NO: 36057 - DNA, 436 bp, Glycine max
  unsure (1)..(436): unsure at all n locations
gaaaacagacagaaaatttatgcaatgcgcatatcatagaatagaacctgatcatcattcttgtggtcttgtgatccagaagacttcttcataccatcatcatccttacctgccatagaagcaaaacatacggagagctagccatgagtataatttctttgatgaattanataacacactataacgagtgaacagaaaaataaattggtttaattcgttttatattgcgtaaatattaacaattttccttaacanaaaagacaaggatgctgngcttcanagcttaagaaattgctgcacattaattcacacaaattaattanaatatatgtacatganatcanaaaacaagttttccactccaagactagtgatgaatgctgactagcacactcacaagagatttcaatgcctttttcactcagttatgtttgga

SEQ ID NO: 36058 - DNA, 499 bp, Glycine max
ttttaaccagacttaacatcgatcaaggaatttttgcaccccggatacaaatgcttctttgaatcaatttccaatgtatcatacataggggcatgtgcttgttgaaaagactcttatccaagatcatgaatcatatccttcaagcaatctcccatttgtacatcaaacggttcagattgggacccactctgcatgtctgtcaattcaccttgccatatccacattgtataattcttcttaatcctaactcacaacagatgctccaatatgtcatcgagtattttctatctcccgttcaaacaatttatgcatggacaaaaaaaatttcccgttttcattcggtcgacttctgtctaaagcaatttttaggaactgttccacaccttcgtcatacacagggcctatgcgactttccttcatccaacttcgatccatctaaaaaattaactttgtgatactccaaaagttattcgatgcatgaatctcactttttcattta

SEQ ID NO: 36059 - DNA, 265 bp, Glycine max
atgtgaatgtatgtatacatgattcttgcgatgtctatagaagcaatcacctaggctcctcttgcttcgctattcatacaagaacgtttccacaaacatatccttgactgatgatttcttctcgagcaagccttgcctcacaatgataggttgcaagtcattcaaggcacatgtcatcgattgccattacatgtaatctagtacgcttggttagaaagtgtgtcatctattcacatcatatgtaatcgattccagacactctgac

SEQ ID NO: 36060 - DNA, 746 bp, Glycine max
  unsure (1)..(746): unsure at all n locations
cgcatgcaagctnngaattacaaggagggactcccggttatttgtgtatagaagcagcacaaaggcgcgagctttcattcaaacaaatcatcaatcagcccatctaattttcggaactttaaaactgcatacagttttgtaggaaagttgattaggattagagatatgatgtaatagaggtaccgagaagctcctatacttgcacaaatagttgcattagggataaataggtgtaccattagtttatctattcatttgcctataaatcaatgctttagtctatcagctctgggttaaatcattggaagcggcaaattttcatttcaaattcattttataacgaggaagtttagcaaccactctcttagttattgaaaactgtataatccgtagaaggtttttaaaaaaggaggaaaacctacacaattcttttatattcaatcaaatttaaccaaaaatgaagtggtaaaaaatgtgccacaaacattgttcaacttcgaaccctccaaagaagccgaaggcattttgcaaaaccatttgttaagtgtccccttcgaaaacccaaaaagggagctgaaccgtttggggcaaaaaagaacccctttttttgggggggaaatctagttccaaatagaaggggaggaggtcttttaaaaaaaaaagccgagagggcgtatgaataaaaaagggggggcaaaaaattttcgggaaacccaaaaagggagaaaaaaagcttccaaagaagg

SEQ ID NO: 36061 - DNA, 374 bp, Glycine max
  unsure (1)..(374): unsure at all n locations
agacatacaaatgacggttaatgatgcatctaacacataattcaatttatcgtttacacatgaagtctttcaccactataacatttcatgtactccatctttaacatgtctagtagaaaatcattccacgtgtctatgggtccaggcaagcaccagtgcacacaatcattataaagtgtgactttctcatgtggccaatgcaccatatctactcgggtgaccatctggtcttaataacattgcttgtgtagtgtcacacaacctagattccaaacccttcgttctaccttacttctttgcaatgtctaactcttccaactggatcatatataanctccaaatactactctctaaacgtatgtcactggtcttaa

SEQ ID NO: 36062 - DNA, 469 bp, Glycine max
  unsure (1)..(469): unsure at all n locations
agcttggagnagtcatatagagatatatatttattgttatatatagatatagatatatatagggatatttatatatatatatatatatacacacacaaaaaaagagcacatacaagtctgaatccgttattgaatatagggggactaccacaaacctgccaaataggggggggggggctatttgcaaattcggcccatgttgctagatcaaaaccacactccaccgggagagcagatatttgctgaccttcattggcagcatagaccaatttagaaagcaacgacgacttaaagcgcccccacctagattctaggtgcaactgggaacctcacccccttgtgtgcctccctcccggcagggagggcaagtttgagacgcacaccagagggagcggtgccacagaaagtaaacgatccctctaacaccaacttaaacacagaatcctacgaattatgtgggtttatcacc

SEQ ID NO: 36063 - DNA, 295 bp, Glycine max
ttcaatgcagaaaccatttttgatatagagattaaattgaaattaaaagatggcaagtatagcacgtcttctaagtgtagaaactcagtaaagttgactgttctagagtgtgtggctatgacttgttgaccagtaggctggcgaactactatgggatttatttctctgtatgtagaataacaagtcaatgaggatgcaacatgatctgtagcaccagagtccaagatccatgttacagcttcagacttgtgaatattacaaacaaaggatagtatattacctatggccgatgtat

SEQ ID NO: 36064 - DNA, 613 bp, Glycine max
  unsure (1)..(613): unsure at all n locations
catgcaagctttcaatttttatcctaagccaagttctantccccgaggaatcgagatccatttaagaagtttttctctcccaacaaatgatttttcatacgtatgagtcagagatcaaaccgatgaccaaatacttaaaggacaaggttatctatcaaccatgtcatactatgttgaatttttactcggttttaccatatttaagtttaggaactcgattttttttctagtttgcgaaccaattatctcatataaatttgatggaatctttaaccaatttctttgaataatttcaaatatttgctagtgaagttggtaactgttagacaagtggcctcagatattttaagaaggaggggtatattaagatattgcaaattatttccccaattaaaattctatttcaatttcaatgcaaattacaagttcccttaaaatgaactcttaaatatgaatcaaatgaacaatctgatataaatgtaaagcaattgtaattaacgaggttagggaagagaaaggcaaaatcaatttttactgttcgaccccccctttggctacgccagccccaagaaaccgcttgaaaatttactatcttggaaaacctttaacaagt

SEQ ID NO: 36065 - DNA, 484 bp, Glycine max
  unsure (1)..(484): unsure at all n locations
gagcttcaacagcacgtcagcaggtattataagttcaagaattccggntgttattcaaagatatattgattntgttatctaaatgggtttctatttcaatgcagggtatatatattgcgactccaggggatcaaggtcatttggctgttggaaatggtacttaactnttctagagcattatttcctttagtagcaagaaacatgatgcatatataactaaacagttgtttgttaactagacaaatatacgaacctaacttcaatccaaatgcaaaaatcatagaaataatgtattngtaacttcaatgggaattcatgtgaacttggtgaaattcatacatgaaaccttgtgacagcttcaaatatcaaccgccttgtgttaattgtatttcacacggtgagaataggaataatatgacattattttaattgatttgtcggactgattaagagaacttaattctaatttatgtctctaacacat

SEQ ID NO: 36066 - DNA, 650 bp, Glycine max
  unsure (1)..(650): unsure at all n locations
agcttgagctcattactgctgccccatatttctctttttaactngngcctgctccattcttcctttcggtttcttttgggttcttgctctaatgcttcgatcatagtcatgttgacatccctcagctcatcacactctttcctgaccctagtgactgtcgtctttagcttctccttgaccactctcattttttgagctctattttcaaagcttgcacttcttcgctttcctcagggacttcagcttctttgccacttaggccttttgactttgggaaccaagttatcccttgcatcctagacttcaaccacttgtgatagccacccgtgatgccattgctacaaccctaagctccttaacttacctctccgctgaattccaagctctacggattctcttaagtatcttcgcattggcttcatttgaaccccgtgcgataaaagtaccatgatctccttctgacgtccaccttttattagggagcctaatggtctttgggccacatgggaatttaattaataccaccctctcgttcccctcaaggggacgtttatggaatccctcacaacaacaatacacctttggccccttttttttccttggaggaaccaactaatggaccctcctactttacctgcaagaatttttcc

SEQ ID NO: 36067 - DNA, 352 bp, Glycine max
  unsure (1)..(352): unsure at all n locations
tcttctaatatagaagagaagcccttattgagtangcagagatnttgctntntctattttcctctcctcttaaaaatggaacttgttaacaaaaaaaatattaaatcactcatccccttttcttctcaagggatgccaagctntagtgatactatataaaaacatanattaaactcacttttccacccttccaaatcttctaatatagaagagaagcccaaattgagtaagcagagaatttgctttttctattttcctctcctcttanaaattgaacttgttaacaaaaaaaatatntaatcactcatccccttttcttctcttccttccatttttctcaaaccanacactc

SEQ ID NO: 36068 - DNA, 501 bp, Glycine max
  unsure (1)..(501): unsure at all n locations
ccgcaggcatgcaagcttctacttatgaggcagggggggctttcttcactcncacgncncaaccgcgagcggggttctccgcactntcatcccgcgatgcttcactgtataaccgcctgagtgggttcatagcctaaaccatatggcccacgatttcctttggcaatgatcaggctagatatgccgccattgtctttgcctaaacccattccgggttcgaaaccgctccccaacataactcgggccatcattactgcggcatcggacaagcaagcttgcccagagaaggagtccacggaggaaaagcttaccacctcaaaagactggaaagcggcttctaatgactcctctacggctaccacataaggcatagaggatgggcagctcaccaagagggctacctcgcctgagacgaggaccagaagcccttccactacgaaaaacaaactttggtcgagtgttgagggaacaacacctacggagtggaaccacgggcgcccc

SEQ ID NO: 36069 - DNA, 316 bp, Glycine max
tcgattacactggtatttgagacaatgattgatttattcatgagtctttcttttaatcgattaccaagtggattaatcgattacttctctctcatttagttgttcaaaagtgaacaagaacactttaattgattacttagagcatctagattacgttgtagatttaatcgactatacgcggttataaatggtttctctatgaataaccatcttgtgatccttccaaacatatcagaagaatactgaatatcttgaaaataacccattagcctctgaatgagatagatctcaagttgtcattagtgaaaagagaaaa

SEQ ID NO: 36070 - DNA, 712 bp, Glycine max
  unsure (1)..(712): unsure at all n locations
ttcaggggacaggggaccattaatctttgcccgcgagaattggctcacaacaggccatttatacctatggagcattttcttaagcaagtagcttggcttgaagctcaactttcattggtgagacccaacgaggctgctcctcctgagcccacacctacacgggttgaaccagtgccagctgatccacaatctccaatggtgaatccaccttcttctcataagcttgaagcagctccccaatctccacctttgattatcatctccgattccccatctagagaaattattgctccccctgattcaccagctggagaagcagctgacccccctggttccccagttggaggagttgctgatctttttgatttcttatccggagaagttggtgctctcataaattccctagcttctccatctaatagatgaggaggatgttcagactctaccgatctctctgantataactatataagtttcagacattgggttgagtaatttggggtccgcttataatatatagccataccttcatgaattggtggggtgttaatctgaaacaaatggaacaatttgattggactttgatgaaattggcaacgaacccttttatatcctttgggaaaacatgggggtaagaatcggatttcggaataaatgcccgaaatgggaaggactcctgcgctttcttatcctaaggcgtggccaccgatgg

SEQ ID NO: 36071 - DNA, 288 bp, Glycine max
  unsure (1)..(288): unsure at all n locations
ggagaaagagatgtgtgaatggtataacanaacttgtatgtatcctctcgaattcaggattgtcatcatcaaaaagggggagattgtggaagcaatgacttccaagattattttgatgatgcaaaagaatcaagagttaagcaagttccaaagaatcaagagtcanaaaagcttcaagaatcaagtttcaaagaatcaagattcaagaataatcaagtttcaagattcaatcaagtttcaagaatcaatcaaagatgatgataacaatgatgataacaaaagatgatg

SEQ ID NO: 36072 - DNA, 540 bp, Glycine max
agcttgccacccagctcgcccaggcttttatgatttgcttcctccaaaagcaacagccttgtggattaatcttctggagggcccaattgggcctggttgctatttgcacccccatttttactaagtacaccccctgcctttttttggtgattcttttttcgtaaagttacggaaacttacgaattcgtaacgatacttgtttactttctgtaatgttacggaaccttgcagattgcataatcatcccattttttacttacggaatgttacggaaccttgcggattacataatcatccctttttttgacttacacaatgttaccgaatctccctaattgggcaacaaagcttccatttgaattccggtggggcaacgaaccctacagatagggcatcaatattttcttttggtttccggcatgtcccggaatttcacaaattgcctaatgatggggggccaacaccctacaaggaccaaacacaagttgcttgtcataaaccaaaggccccggacaaattagggatgacaatggccctctt

SEQ ID NO: 36073 - DNA, 316 bp, Glycine max
atgggtttgtagctacctcatgcactcctctaatgactatggcatcatatctggcgctaaactgctgggagttggaagccatcttctcaattaaatatctggcttcagcacgagtcatgtctccaagggctccaccactggcaacatctatcacacttctctccatatcactgagtacttcataaaaatataggagaagaagatgttctgaaatctgatggtgggggcaactggcacatagtttcttaaatctctcccagtactcatacacgctctcatcactgagttgtctaatacctgagatatcctatctgat

SEQ ID NO: 36074 - DNA, 439 bp, Glycine max
aaaaacccctcgcaggccagcaagcgcaacaacgagagacgacgccttattttttaccaacgcgggaacaaccaagcgggccctttgtactataaactgagacccacgccaagcacaaagaggaagcgaaccacgccgccaaagggagccccgaacaaaaaggggcccaccccaaaccatccgacaccagcgaccccgcacaaaagccgccagagcaccacccccgagagcggatgaacgccccacaagctcgaccaagccccaggaacccacagagaaaaagggggcggacacagaaccaccaaagaggcccaaaagaggaccgccgaggccacgtcacaacacacaaaccccaaccaccccgcagggcggaaccagcaccccgccccaaaaaagaaccgtcaaaaagcaccaaaaagcctggaccaccggcgaaaaa

SEQ ID NO: 36075 - DNA, 340 bp, Glycine max
  unsure (1)..(340): unsure at all n locations
cgcttgtagaacagctggaagtgtanatggctcgggagccggcaaggccaccgattcgcggattaatgagatgtcccacattatttccccgatacacatgcaacactgaggattaagacaatttatcgtcaaaccggtcatgcatgcacctatgtggacactcaagcatcaattttttatgggcatgtgacactagggctgaagattcattttacctacttaagccaacccgatgcctgcaaaatatgctcattgatcaattcatgcattcgttcgagtccattttgggtgtctccgcaaattctcgcatcattcacgcttcagggccatacacattgtt

SEQ ID NO: 36076 - DNA, 392 bp, Glycine max
  unsure (1)..(392): unsure at all n locations
actctctaagcttaggtttcgtataaatgatttctagtggtttttttactgcacaactttatctcttttctctactctttcatcagntntctttgagtccttgatgccatctttatattgagagattttaaatatggagaggatctttggcattgaaaatatgaatgggtgtgatctttgattctatttccagctattggcagttgatgcgcgtctttgattgattctggaatcaatacttcctaaattgtccttcatagctcaacatagccattagacatataanaggaatgataaaatagacttgcagatacgttccttttatggttatcatttaaggtggatanacttatctattctagtaagtatgcacatttaaatggtgttggatc

SEQ ID NO: 36077 - DNA, 518 bp, Glycine max
  unsure (1)..(518): unsure at all n locations
cagctttgaacccaaaatctgactcaccataaatcntgtaccaggtgagaatgccaatccttaccctcggaagcaaaaaaaaggagagagagagagagagaagagaaggaaaatttccgatcaaaggaaaaaggagaaggaaaatttccaatcaaaggaaaaaggaaaggaaattcccaatcaaagagtgggggaaagcaaaaagaaaagaaagaaaattcccaatcaaagaatgggagaaagaaaaaaagagagaagtaaaaaagaagaaatctcctggtcagagaaaccagaagaaatgtgccgagaggtccttggaccagacaatatctgaacaatacagaattgtcaccaaatgaataaaaaagaaggaaaggaaaccacgacctanaatggtcttccccctttaattgccaaccaaaaatttgtgcgccccgcactaaccaaaacagaaaaggaaaaagccaaccaaaatcaaagcccaaaacacacaaaagcccaaaaaaaaccacccaaag

SEQ ID NO: 36078 - DNA, 339 bp, Glycine max
  unsure (1)..(339): unsure at all n locations
cctgatgcctganatgtctnttctgatgtgctttggcctagatgcanggaagtatttctccattaacaccctcttaaggtcatcccagctgaaaacggacctgtgagcaaggtagtatagccaatcttttgtcactccctccagagaatgaggaaaagcctctataaagatatgatcttcttggacatcacggggcttcatggtggaacaaaaaatatggaactccttaagatgcttatgaggatcttcacctgcaagaccatgaaactttggcagcaaatgtattagtccagtcttgagaacatatgaaacaccctcatcatgatattgaatgcacaa

SEQ ID NO: 36079 - DNA, 361 bp, Glycine max
cagaaccactggctaatgtcaaataaaccaaccaatacaaaggagaagaaatgcctaatggagccctgcccaaataaaaatagcatcaggtaacaaggcacggcaagtgacccggtctcttcggtaaggagatatcagactatcaacacatactaagccagcatcaacaaacagtttagccactgctcctagaataaaaaattctcctatcaggaaaaccaagctgatatgcatcagattttgtaatacactacagctatatacaataactgagaaggagtaagaaaacattgttcatcaaggaactaaggcaaataccctaatattgacaagaagggttgatcatgtaaaaagtcggcca

SEQ ID NO: 36080 - DNA, 224 bp, Glycine max
aatcaccattaaaggacctcattgaagctcaaagatccagcctccatagaagcctcacaagcaagtttccatcaagtggtaatcagagcacaagagcttcaactaggtgctccttaaacatccattaatattttttggttaccttctcttccataggtggttcttcatttattcctccatgtatctcctcacatgtctcgtgctaaaatcttctaacatgattc

SEQ ID NO: 36081 - DNA, 411 bp, Glycine max
  unsure (1)..(411): unsure at all n locations
tcctgactcaccatatacctngacccagggtgtattgtcaatccttaccctcggtatcgaanagaatagaagggaaatttccaatcaaagaanaggaaagaaggaagatttccaatcaaaaagaaagcaaaaaagaaaagaaggataattccccaatcaaagagtgggagaaagcaaaaagaaaagaaagaatattcccaatcaaagaatgggagaaagtaaaaaaggaagaagaagaaggaaagaaagctcctgatcaaggatcgaagganaacagaagaaatgtgcagaaaggtctttggaccggacaatatctgaacaatacagaattgtcaccaaatgaaaaanaagaaggaaagganaccacgacctataatggtcttctccctttgattaccaaccaaaatcccg

SEQ ID NO: 36082 - DNA, 570 bp, Glycine max
  unsure (1)..(570): unsure at all n locations
aggactgagattgananacgattngannngcnncncnnttgatagcaatgtattancnacactatnantactcaagcttcgaccgttgagactacctattccgnaacacaggtaanatttattgctccagctgtgtgatcttctgcgggttctatggctaagaaagcgtatcaaagcctgagtttcctatctggtttggcaagacatataagcaggctcggtccagatgcacatgtatctaacattcttggaaagtgggtgctgtcctgaggaagatggccttgtcattgacaattagggaattaggccatatgggatccnctgagagagctctgcatacattcttatgggcacataatcaaccttatgtcttcgcagatgattggatctggcccaactgttgtgtcttggctggaccatgattaagattccttcatctacgccattactggttgcgacgatgctgctcgacgcaagatattgtttattaaagagaacctagatccctgaagtctatatcgcaaaggtaaaatgtgatcctcttctccactatttaaatgaaaacctccg

SEQ ID NO: 36083 - DNA, 720 bp, Glycine max
  unsure (1)..(720): unsure at all n locations
ataaatcatcattgcaatttgataatcaggacaccctaagccgtgagaaagtcttgttttttaataagcccacggaacttgtatacctcaagaagaaagtaattgtccattttcctttctgagtacattaagcctctgtcataaaatctttcaagagatgggccttcaggcatggacactattctttcttcctcttgccgatttcatcttggtagtagagctccgcctcacattcttcaaccgcggctctttctcttcctttgcaacccgcacctatcaatgtccaatggcantctactggactgcaagttgcatgaaggctttcccttttcctcatccaaactctcgcatatatcctttctgcatgaagtttgctgtttgggcggcggaagtgtctccctttaagggctctttatatccacccttcagccattggccgctttctaaatggtccaagccaatcactttattccctgaacaccacaaaataacaatttgcatttttattacttccattagtattcagaaaaacaaccttttggaatacatatatattttttctcaaaaattttccaaaatgaacagatttcccccgttaaatagaaccttatggctttaaactttaagggttgttttgcatagccaaatagaatgattttcatattcccctcccgacaatgaccctttgttgtttgggggagagaaaaaaaaaagttctta

SEQ ID NO: 36084 - DNA, 437 bp, Glycine max
  unsure (1)..(437): unsure at all n locations
acgagtggaacgtganngcnnnntttgagcatgtttgcatgcaagaccccactttgtttgaaaactttctgaatataatgatatttttggatatatgatctactcacatagacaaatgcaataatattatatgcaagcatgcataatgaaaacacttcctcctcatattggagaccaatcacataatgcacatgaaaatcgaatggctggttcctatttttaatgcaatttgaaaaattggttttttttttcttccaaacaaaacagaaaacctctgtataatacccctttttgtatttccccggatacggggaaaagaaaccctaaaaaaaatttatttttaaaaccaaaattattttttttttttaaacctctcacactaaaagcgacacaattcttgggggcctctcaacccacacttttcaaaaaggacctgc

SEQ ID NO: 36085 - DNA, 606 bp, Glycine max
  unsure (1)..(606): unsure at all n locations
aaattccccgggagcgagcaagctcacttatgtaagaagggagctgaataatttttgcgcagggaaacgaacaacgcggaattgtgaccaganataggttccgctatgccctcacagacaaacctttgcatcaggtggcacatattccaaacttgcaaaaaagttttatgggccatttccagtcatcaaaaggataggaaaagctgcttatcaactgcaactgcctccaaattctcgcattcaaccaaaggatcactgttctttattgaagccataccttccttcggctaatgaagttcccatttccttaccagatatatctgatggcaatcagccctgcatcactccgcttgcaattatggatactaaacgggaaccctcatcatcaggaaaacaatcgacggttctcaatcaagggcctgaacaatttccggaggaaacatatcgggagccgggggaagaccttaagtgcgaaaacaaccctgaagaccatggtgcttttaaagcctgcagggatgttatgaaacaaggaacaccaaccactatagggcccataaacaacctcacacataaacccctaggaagaagagcaacaggggccaaaaa

SEQ ID NO: 36086 - DNA, 292 bp, Glycine max
  unsure (1)..(292): unsure at all n locations
tttcattatttattacagtattagtcgtgtgtcatttaaacataaaaatagaacaaacataaactggtaaaaataagtgcatacaacatanaaataagtttgtacaaaaagtatcataagtcgaatacataatataacagaatgacaaatgtccttaagtgccctcgcggtcacctcctctgccatatattgtggtgtcttcctcagatgcggcaactcctcatttgagctacatctagttgcgagaccctcctatgccattagcagaaagctattgatgacttgatgacta

SEQ ID NO: 36087 - DNA, 228 bp, Glycine max
atattttcgtacaggggttgctcgcccaggcgagctaacctgtatcttttttgtttaaggtgaaacattaaccatgcctcccccttccttatgggttagcgtttgcctacttgaacctacttaaattagaattaggcgtcgattacttatttaaaacaaacaatagtaaaagaaactgtgaatacaaaggatactgggttaccttgcagcgacatcctctgcttgtct

SEQ ID NO: 36088 - DNA, 401 bp, Glycine max
gaaagaaaattccccatccaagaatgggagaaagcaaaacagaaggagaacaacgaaggaaagctcctgggcaacgtaccgaaaaaaacctaaaacacgtgccgaagggaactatggaccagacaaacgcccaaacaaaaacaaaattgtcaccaaatgaacaacggaaataaaaggaaaccctaaccgagagtggactgcggactttggataccaaccaaaaccctgtccctaagagaaaaaagccccctcgctgcaacaactatcgaagcataaaaaaggccacggaacatagaaccaaaaccccaacaaaccgaatccgaggcaaccccttgaagaatccttttccccggagagccctaggaaccaacacccccacggttctttccagatgacacaaa

SEQ ID NO: 36089 - DNA, 589 bp, Glycine max
aaagacccgcggcatgccagctgggagccgggaggagggattttaattattcgcaaaaagcaccgcgggggcaattgggaagaatgagccgtggcagatggacgcacctagatacctgaactgcggagtccagccctttccttttgcatacttgggaatccccagcggggataatccaagatgtaaagaactttgggatcctatagccagaaaaaacgaaagaaaactagcttcttggaaacaccaacatatttcatccggggggagagcgacactcataaatgcagccctaacaagcatcccgatctaccttcttaccgttaccagggcacctccaagagcaatacccagaagggaagcaaaccacaggcaccctcaatggggaggaggcatggacccaacaaagaatgcttgggctaaacggaaaacaaaccaccaaccacaggacaaaggcagacacggccataaaaaacctaagaacttcaactcaactttgttgggaaaaggcgccgggaattattcaccagcaccggaccaccgggcaaaaatctaacacaaaaaagggggccggggggcatagcacgaaggc

SEQ ID NO: 36090 - DNA, 381 bp, Glycine max
  unsure (1)..(381): unsure at all n locations
acgatgatgccaaagaagtgttcaatgtgaataattgactcttcattagtgtgaacaaatataacatcaatggtaatgatgtgcaatttttatgtctggttggctatcactggacatgaaagtttctatttangcgttagtgnttntgtttgtggtttctgagaaagacagaggttaaaggtgaagaatgaaatgttttctgattcgaacatggcttaatgaggaaacgaatgtggagtgattttcttgcgctcttgaanaacatntaatcggctcgttacttaagtgacaactcaaaatagaatggaggctacgttttttacctaaacattgtgttccacttagcaatatgagtgttgatgttctcgtctagtctttgga

SEQ ID NO: 36091 - DNA, 454 bp, Glycine max
gacctgacggcttgcaagctaggagtctctgtctacgatttttattattttaactaaaagaacacctctggggaaaaatattactagaattaggcttgcactgccgagacatcggacattacataacaatcccgaccatgggtatcaaaactctcaaattaactcgctaacctcctatgagcttacccctaaggatacttcggtagacatctggataaactctaagaaaactcgggagactttcgagtttactattaaggcctcgaattagtagatcaagaaaattaaatcgcagtatcaggcactctccatcgtttctatatgtgtctaacatataacatatcagcatctaccatggaatgctcagaaacaaaattctcacattcgcatagaagcaaactcttggacctttgataaccattaaaatccgagaatgatccaccggtattataat

SEQ ID NO: 36092 - DNA, 256 bp, Glycine max
  unsure (1)..(256): unsure at all n locations
ctcatatcttcacagngccttatatatggaactagttcacctgtgtcagttcctctcttggccttgcagtcatagaagggaggagcatggaaacacggctccattgacatggcacgtcgacagggaggatctggngctgctcgattctcaggtttgtacagaatccacggttttaaacctccaagcccctgagccacatacctcaaagtagaccatgagctagtaaccaacacatcagttaagcttaagagataca

SEQ ID NO: 36093 - DNA, 678 bp, Glycine max
  unsure (1)..(678): unsure at all n locations
gtccatcaccttgtggatggtatgaggttgctcataccaagcttaataccacaaaccttgaagagctcacaccaaaatttactgataaaaatgggatcgcgatcggaaaccaaattgtggggaagaccatgatgtttgcagacaaggtcaaaaaataattgagctaccttgaaagaggtaaactgagagggaagtataccaaaatgcacacccttggaaaaatggtctaccacaacaaggatcactgtatagtttgaagatggaggcaaacatgtaacacctcatttttcgtaaaataaattgaaaatgatttttttaaaataaatagttttagaaaaattatgagatttttatatttaaataaacaagaaaaaataactttattaattaagataatggtttgaaggaaaaataaaaaaatattttattattcattggattggaataaaatagaggtcatggttataaattaacatataaaaaaatagagttaatattagcttggagtaccctacctataaataaagacaccgttggtcagttttcaaactgatgaaacagtntttacccttcctctttctttaaatttcatttttccctttttcctcttctaaaaacctctcttttttttcaatacacccaactttgttttattaaaaagaagaacccgggctcatt

SEQ ID NO: 36094 - DNA, 219 bp, Glycine max
aacaacccttactatctctaatgtatgcgctaacatcagagaattgttcgtgctaaataaagaaaaacagcatccatgttgcatggttgcagagatacattcagcatgatacaggccctggaccattgaccactgttggaagaaattaacagcaaaatcagacagagttttctcctctcatactttatcatgtgttctccgacacaaactccacatcac

SEQ ID NO: 36095 - DNA, 424 bp, Glycine max
  unsure (1)..(424): unsure at all n locations
agcttcccaaatgcatcacactagactctccatccttctcnccgtcgacttcccctattgcggtcaatacttttacttacctctcttcctcgtcatcatcaacaatgagcatcacccttaattgatgatctggacactggtgtcgtgaaagaaaattatccccacacttgtaacacaggttttttttgttgacttatcaaggaactcatggtaaggcatagagcatatacatttatctttgggtcggatacaatctctgtcaaaaaatggtccttttggaagaccaggccacgcccatgtccattaacattatcattgcaaacgtccttgttaccatggaacattctccaatcacacccatattgatggtccaaattggggcaaggggaaataggaatctggtttgccccgagggaccaacccg

SEQ ID NO: 36096 - DNA, 242 bp, Glycine max
tattcacagcaaaaccagactctaatgtctcagagacccatacatccaccaaaacgcacatagagataacattctctctatccaagacaggagattaacaagccattatgtatgaactacaccgaaacaaacagttattataaaataaacccacatgattacaaaaaagataaaaccggcgttcagagtatgacataaaaaacacagaaacaaggtgaaggaagaaagagaccccatttctc

SEQ ID NO: 36097 - DNA, 539 bp, Glycine max
agctttaaggaaatatgtgttagggcttttttatgatttattggcatatagccccacatggcatgaacacttatgccatctagaggttgtattgaaagtgttgaaagaaaatgttttgtttgctaagttgtctaaatgctcttttggtgaattggagataaagtacttaggacatatagtttcaggtgaaggatttgctatggatgctactaaggtgcaagcagttctagagtggcctacaccactcaatatcaagcagctgaaaggtttgttaggcctcactggatactattgaaggtttatcaaaggaatatgcaaagcttgctgcaccattgacagatttacttaaaaaagaatcattccagtggaccccagaggcagagacaacatttgttcaatcgcagaaagtcatgacttcagctccagcgtaagctcttcctaatttccagctgcccttcattctggaaactgatgcttccggcactggtatttgagcagtattacatcttaatggtcgttccatagcatttaatttcaat

SEQ ID NO: 36098 - DNA, 454 bp, Glycine max
  unsure (1)..(454): unsure at all n locations
tacaagtgagcttgtaacatatcttctactcttggagtgatcacctgtagtcctctngaacccttaccacccactctatcatcatgccgagactcangaagcccaataggtttagccttctctaagtattctaaacaaaattcaatggcttcttctgcaatgtacctctcaacaatagatgcttctggacgatatagattctttgtatacccttttaagatcttcatgtattgctcaaccgggtacatccaccgtagataaacaggaaccacaacattgatttctctgaccagatgcacaatcaagtgaatcatgatgtcaaagaaagcagggggaaaatacatctccaactggcacagtataattgcggcctcatttccaactcataaacattactggatcaatgacttgctacatatgcatggagaaaaacacaggcgagtatcgtaatctg

SEQ ID NO: 36099 - DNA, 561 bp, Glycine max
agcatggtcttgaaagaggagttagctgtttgctcaaggtccaaaagaaacttgtctcaacgtttatgcgagacagagaccaacatgctagccatcgtcagcaagtaccaagaagaactaaatctagccacgacccacgagcacaaagtggtggacgagtatgtccaagtgtacgcggaaaaggaggctagaggaagggtgatcgacgcgttacatcaagaggcaacaatgtggatagacctatttgctcttatcttgaacgggagtcaagagcttccccgattgctagccaaggccaaggcaatggcagacacctactccgcccccgaggagatccacggacttctcggctattgtcagcatatgatagatttaatggcccatataattagaaaccgctaagaagttgtacgatcactcggatcttgactagttataactttctgaataaaatgagtttatcccatgtttttactccaaagatcggtgcgaatcaaatcactcccccattttatctctaacatgcattcattctttacctactcctcacggttgtttttt

SEQ ID NO: 36100 - DNA, 286 bp, Glycine max
  unsure (1)..(286): unsure at all n locations
tgatcacctttcaagtaaaagaatcgcttgattcactcttaagaaagaactacgtaggtctgatttcctcttcgatggagggtacgtaggagcaaaagccccgcttttgtcgacctcaaaaaataaaaagaaataaaagttaaggtaatacaatctccacaattctaaaaaataggctgttatccttcgagacaaacgtgagaggtggaataccttcctcnacgtaatacaactccgaacttagaatttcttttgactggttccttcggttttctgacgttttcac

SEQ ID NO: 36101 - DNA, 527 bp, Glycine max
agctttgagccaaaatcctgactcaccttaatccgtcccaggtgagaatgtcaatccttaccctcggaagcaaagaaaaaaggagagaaggaaaatttccaatcaaaggaaaaaaggagaggaaaggaaattcccaatcaaagagtgggagaaagcataaagaaaataaagaaaattcccaatcaaagaatgggaaaaagaaaaagataaggagaacaaggaaggaaagctcctgatcaaggatcgaaagaaaacagaagaaatgtgcagaagggatctctggaccagacaatatctaaacaaatacagaattgtcacccaatgaacaaaagaaagaaaaggaaaccataacctaaaagtggtcttctccctttgattaccaaccaaatatctgtgcgtcggggacttgttcgcctcgcgtcaaacaaaaaccgaaaaagaaaaaagccaccaaaaaaaatatctaaagcccaaaacacacaaaagcccaaaaacccactaaaagaaatctttccaagggaagccta

SEQ ID NO: 36102 - DNA, 620 bp, Glycine max
  unsure (1)..(620): unsure at all n locations
cgatattgatcgcattgattangcacactnatgatactcctgcttantcgacacctgantgactaatggccagccatgttgaacgttctaagtcatgcttccgatgggtattattgctgttgaaatttaaaccanaaatggttaaagtagacataggaaaaaatagtaaaaattgttttcttaccaaagctcgtaaatcttatcttaaatgtctagattaatgtgctaacttcctagattattgtgttaatttccctagggatacatgtactcaaaataaacctcacacagaaacatattacaccgtgactcagtgcacagtgcaattcttgcacagatggaaatctagctcagaacaattttatttctctgtcaagcttcactaanataatcacatacctatatatatatatatatatatatatatatatatatatatatatatatatatatatatatatatatatatatataagcacacaaatgggaactatanacataatcactgcngttaactacatatatgtgagccacaattgtatttttttcanggtgttacatggggggtggacatggtgtgctaccatcgcaccaccaanaaagagatagatatatcgtgg

SEQ ID NO: 36103 - DNA, 694 bp, Glycine max
  unsure (1)..(694): unsure at all n locations
agcttgctattatatcatgtaatntatatactttcttgcaggaaatttcaagattgagatatgaactatgtccacgtgctatgaaagaaagacacttttggaagatatatttcacacttgtcaacactcatgtggctccgtaagtactgtatcatgctgatattccatgtactatgttatatttgtcaatgaagggggaaactagcttttctattttcttaagaatttttgtttaacttaactctgattgtttctttattcttcaaagaataaatatttacataaataaaagacgtacaagaaggaaaaatataaaatatgctagttattagagtattcttactccactaattttacttagtggagtaagaatactctaaatcaaagggaaatcttttctgctggcttggtctatggattttatgtttaaaaacaaaatgttcttaaaacaatgttaaaattccctacataaaagaacaaagagaggtaatgtagcggaacaacttgtggtataatgatataaatggtggacaaactgattaagcctgtgtgtatcttaatttatatgcaaagtggattaggatataaatctgggtctaatttgaagacaggattctaggggtttctattttttaaaaaatattgatcgtttcacccttcgaattaactacccaagggtttttttttggtgcaa

SEQ ID NO: 36104 - DNA, 333 bp, Glycine max
  unsure (1)..(333): unsure at all n locations
agatatacacaatagtcttacttcaatatctgtaaattccacaatntacataacgattctggaagagttttgaagccacccctagaaagattaagtatcttagatgttttaaatgaccaattgatgacgacaattntcctcttcgttcacaatgaagcacacgcanagaataacatttcaatacatgaggagaaagttcatcagtataggccagaggccaagttcgacgaatatcaagcanaggttgcaatatataggtcctcagagaattgactngatgcatctggattgaatcggctcgctcagatgataaccacctataatatgagagat

SEQ ID NO: 36105 - DNA, 621 bp, Glycine max
  unsure (1)..(621): unsure at all n locations
agcttcttatccaggctcatcttggtgtgtttttctccttcttccatggcttattccctagtggatggcgcctcctctcacctcttctcctttgtcttccgctgcatctcgatggtggaaaatcaccattaaaggacctcattgaagcttaaagatccagcctccatagaagcccgacaagcaagcttccatcagtatgtctatgttaatttcttatgggctttcttgttttgctttgaccataactggctaatctcccctagtaagggggttatgatgtaattgtccaattgtactccttcccttgttcttaatgaaattcctctatgttttatgttaattaattcttttccttacttttattgttaattaagacttgatccatcttaatttaatcaaatatacaatgggaaccatatgtgaatatttggtaaacctacgcagtgaatgttttataccaaattgcatgaccaaactgtttgggtattttcaataaataagttatctttaaattaancattcgacccctaactttatttatttttgactaaaatgaatattctgaccctgaaaatcgatttaagcaaaaccattttaaccggacccaagctttagtgattt

SEQ ID NO: 36106 - DNA, 246 bp, Glycine max
  unsure (1)..(246): unsure at all n locations
gatgaataggatcaacatgtcatctatgatgctgccatngaccatgcaacaacaacttcaaatgtcgatgatgtctccaatgggcatgggattanggatgggaatggngatggngatgggaatgggaatggatatgaactccatgaaccgtgctaacatccctggcatccctccagtcctccacccttctgccttcatgcccatggcagcctcgtgggatgccgctgttgctgccgctgctggtgg

SEQ ID NO: 36107 - DNA, 619 bp, Glycine max
  unsure (1)..(619): unsure at all n locations
agcttaactacacacacccttctaatttgttattcttacatccttgaaatgagaaactagaaatcagctacacacaccccctataatagctaagctcacccttaggccaaaaatacatgaaaatacaaaaaagtccctactacaaagactactcaaaataccctgaaatacaatgttaaaaccttatactactagaatggccaaaatacaaagcccaaaaataggaaaaaactattctaatatttacaaagaagagtggacccaaccttggcccatgggctcaaaaatttaccctgaggttcataagaaccctagggtcttctttagcagctctagctcaatcttcttagagtcttctatccaatacccttagggggtaggattgcatcatcccctccaccttggaaaggatttgacctcaaatcccgaggttcttcatactcaaggctccttccctctatacctgtaaaagaataaaagcatatgtattagtggtgttgggtatgttagagttgggtaaagtcctgaaacccgtttattggaaacttgccataagggaacatggntccttcccaactcaatgagtggggctccaagtatagaaaaataatgggacaaa

SEQ ID NO: 36108 - DNA, 439 bp, Glycine max
  unsure (1)..(439): unsure at all n locations
actcctgatatatctgagcaagcggannatggttttgttgattctgaggtatantttgtgctctctatntgattgttggattgttgttgatgtcgtttattgattatatagtttccatatttcagggtgatcaaattcatgctatttgtaaatcggatcacctcaagtcttggaaagctgatttgaaagagaattgcacttatgttatgcataatttcaaagttgttaagaatgatgatcaatttagagtgtgcgaacatgagtacaagttattttttattggagtgacggttgttagagaaagctgattgcatgaaccttcctttaaggaatntagatntgttgaatntgcaaatgtnntgtgctggcaatttgtgtctggcccctgtggtggtgagtatagtcacaatntgtgctttcattttgatcataacttctt

SEQ ID NO: 36109 - DNA, 374 bp, Glycine max
gcagccagcaagccacaagccaaaaggacacaccctttattaactcccccgagcgcccaaaagagccaagcagcccccgcacggaccggaagcacactacaagccccaagagaaaaaccaagaaacgcccagatccccaaggaaccgaggagccacgaaaaagaaaagggaacacagcgcggcggggacaaagaggcaggggacaaacggccaaggcggccccgcaaaaagacgcaaagagggccaaacgagacggacacagaaaagacggcaaaggggggacacgcagaaggaaaagaccgggacccgaaggcaaaaacaaacacaaaggcgcgccaaagcgaaaggcccggcataaaccaacaacagcccca

SEQ ID NO: 36110 - DNA, 561 bp, Glycine max
  unsure (1)..(561): unsure at all n locations
tgcgttganacaccatcgtatgngcgnnnnnnnatgatacccacgttagtagccatactatagcacactcaagcgtctggtgtgcttctatatggatgcttccggtcnatagattactcttgataaaatgtagatcanatcccggatattgatctaacgacaagatagctggtattcgtcagtccttacgctgctgtgagctattcctcccttttacgtatttggtgctagcttcctgcagtaatagaggaaacatagtgttgactcgttcctgagaaaattagactatttttttttctcgagagagcccacagtattaactctgatgtatcaggcctgatcacgatagcttacagggcatacctgactactacattatcgaatccctgcgacaaggtgaaaattctgatggttatgatataacccataaccaacactgttggtttaagtcgtccccatagcatagaagtggctacatctattgtcgtgatgagctcatctatgcttctaatattgcttgataggcggacttcatcgacctctttaaaaattcccttgtcc

SEQ ID NO: 36111 - DNA, 607 bp, Glycine max
  unsure (1)..(607): unsure at all n locations
acggatgcattgtagcattgantangcgccnnttgttcccttgtgagtccgtactatagatactcaagctcgcngctacagttgcgttattaaaacataatctccaactattatgcagacgtggttgctaagaagaatctatgctctcccatcgcatggaacaataagccgcacacatgataagctctggcctacctaccatctaaactcaggtgatcatcctcagccctcacatacagagcanagggcgcatagtacatcatgcatgagaacccatcttccatgcgacaacgtgtatgtgagtgatgccatatcattaacaacaattacctcccatcagtgtgcagcatctgatttagacattcctgagctttggtggctatgataaatcttgacagaactgccgaaaccctcatggtcataaaactaacaaccaatactatgttaaatagaagctctatgcataactgaaaataaagggccaacaatgtgttcatactntacatcttattagctataacgcacagatgcataatgctattaattgcaacgcacacattagaaataagtagcacataatattaacagacactatagctatactgag

SEQ ID NO: 36112 - DNA, 681 bp, Glycine max
agcttgtaatcgattaccgtgagctgaatatttacaataagctccctgtctataaaagctgcatttctcttccttgcgcaaaaccctttcttcctctttctccttgatgacgcccaaccctctccaaacttcaaatcttcataactttctcatttattatccaaatcacttcaaacaaagctcaaatttcttctttttcaattctctacaaagcccgccgatcaaaatttgctgaaacaagctacaatggcagaatcctcaaagaagagaaagggatcctcctccaccaccaccactgcaggccaacgccgacacggtacatccgatgacccaccaacaatcaaatcctccttccttttcatctgccagacataaactttgtttcctttcaatgaccagcgctagaagtattattcccaattctccaatcgtgttattcttgaccctaagtatttaaatggtgaattcttggatggcgaaaattttattgctcccagtgtttcaaaattctaattagttgaatttctgtccctaaattgccatattatcctgaaatagttagagctcttaccaaaaacctgaaaaattaggagggaggccttttttctgggtgcacaatatcctaatattactgaaacaacccaatttatttcttgactaactgaaacaacacggggtttt

SEQ ID NO: 36113 - DNA, 233 bp, Glycine max
  unsure (1)..(233): unsure at all n locations
atataattactntaggtgaagttaccaagtttacatgcaactagtgtcttaataccatacgaagtatgcttatttgattatctntattctttaaagtcgtgagttatgtatattgataaaatntatgctttgtagactattgtggccgtacctgtcaaagcatggtgagtggtacagtgtgaatctagaaagaagggtaacatcatgaaagaacatgaatctgtgatattatg

SEQ ID NO: 36114 - DNA, 726 bp, Glycine max
gcacaggacgcacgctaacgaacgaaggcagaacagcaagacaaaaacagccaacagggggcaaacaaacacagaaaggcgagccggccgcccgaaagcagaaaacaaacaaccagcccaggcgaaaagacaggggaagggggaaaaaaccacacaagccaaaggggaggaaaagggcaaacaggggcgacaaggacaaagaaagaaaacaaaaagacccgccagaaccccaaaaaaggcaaggggaacaaaaacaccaaacacccaccaaaacaaaaggaaggccccgacgaaccaagaacaaaaaacaaaaaaaccaaaaaaagcccggaacccaaagaaaaaaaaaaggaacgtggcccgaacgcaaaggaacccacaaacggggaaacagaaaaagtagagaacgcaagcgaagcgctaagagagacccaaagggggaaaaagcggaacatactacaaaaacacaaaaaaaaaccagagcaagaaggaaaaaaacagaaagaacgcaagaaccggaggaacctggaaacaagaacaaaaacccgacacccaaagggactgaaccaaggaagggaacaaaaaaaacgggcaaagaagaaaaagaagacacacacccgggggcaacaaaaaagaacgaaaagccgcaaaaaaaaaaggggggggccaaacaaaaaaaaaaaagggagcgaaccaagcaagaggcgcaaaaaagcccaaaggaac

SEQ ID NO: 36115 - DNA, 305 bp, Glycine max
  unsure (1)..(305): unsure at all n locations
gtctacgatgtcacgtgtgatgcaattttgttagtcgtggctatacaagacatcttgccaaacaaagtcaggttagccataactcgcctgtgctttgtcttccatgccatatgtagcaaagtcgttgatcctattcatgttgatgagctggaaaatgaggctgcaattatactgtgccagttggagatgtattttcccctaccttctttgacatcatgaatcacttgattatgcatctcgtcagagaaatcannatgtatggccctgtttattgcagtggatgtacccagttgagcgatacatga

SEQ ID NO: 36116 - DNA, 663 bp, Glycine max
agccacaagaggattttcaagcagggaccaaacagcatagacagcatctataggaccccaaagagccagagcctcaagagggaaagtcatccatgcaacccaaagggcgaacacctcaccaacaaaaaagggagggggcaaaacgagcgaagagacagaaacaaaatgggaccactcaacacagagagcccacaagaggatggcgcacgacaccaatttggggaagacgagaacaaaaaacaaagaagaggagaaaaatcggaagggggatgcaacggcgcgccaaaaaaagctagagtcaaaaacacaaaacaaaaaaccccgaagcctaggcagacaaaaacagtctcaagccgaaaaaaaaaagaaacacaaccccaaagaaaagaacccaaccacaaacaagggaaaaccaaaaaaaagccaaaaaaccacgaggcacaaaggaggcacaaaatcaaacactccaacgcgggaagggacgcgtaaaaaaaacccaaaaaggccggccgaaggacaccggggaagagaaaaccggacctccagaaaaaaaaacaagcggccccaggaagcaaaaccaaaaaaaaacgagaagaaggggggcacaccaaaaaggggaccaacaaagggccaccaacaccccacaacacgaggggcccccca

SEQ ID NO: 36117 - DNA, 523 bp, Glycine max
acctgcagcatgcaagctttctcaccccaataccatcttcatttgctactttcctccctagtggacatcatcccgactcacaactcataggctttctcactccctcgatttatctcattaggttgttactagcgcatgagagtgtcactgtcacaaggaagcctttctcatagtctatcggtgccactgattcatcttcttctaacaactatttcactagttcacatgtttaacacaagtttttctggtttctatccagatctttaacaaggtggttttatggttcatttggaccggccatcaaggtgattcacagttgaaccggctagtccgatccgattttgataaccttgaaaattatgctaattgttatgagtttctctgaattttcattatttttgaaatttttttgtatagctttttctttgaaaatcaacataataactttattaccatcccttgttatcacttgattggcaccaaccttaccaaagtggtcaattaaaattgcccctatcatatt

SEQ ID NO: 36118 - DNA, 627 bp, Glycine max
  unsure (1)..(627): unsure at all n locations
agcttgcaatgaaagatattggctatnttgattctggtgtcaatctagacacacaaaccaaggccataatggaaaataggtaaggtagaaatgatcatagtcattggcagaaatattgacttctgtaactgctactaagcttgcaatggaagacattgtatatatatattgatgaattttgcattcactaacacaaatttgtttaatttgtacgctcaaatctattagcttatgtgttcaacttgaaatatgaaatttctattttacatcttttatttggcattatgtaaccttgtccagcacatcacaaatttttctttgatttctcttggccatagattagacctgttttatatagttctactttgttgtagttaaaatcaagattatagttgcgtaaaccatcaatgaaattaaaaattgcaactgaaatatctaacacatgattttagcaaagcagtgatagctaaaaaaatggagggaaaacattcatgggaaacacattttaaatgaagaaaatatgaggtcggatagaaactttgattatattaagagcaccttctttgaaaaaggaaaactgaactataaatttaacacattcctctggattctaaattttttctaatc

SEQ ID NO: 36119 - DNA, 383 bp, Glycine max
  unsure (1)..(383): unsure at all n locations
tatgccatctagtctttcctctcgttgaactnngaacatagggggacttattgcatgttatataatntacaatgtcatcataccaaggaaaagaaaaacaatngctaacaactattcctataaaagacaacatggcccagaaaactcctcaccaccttaacattgttggngggatgaaactattcaatcccttntcattttggcggngtcaaccactatgcctttagaggacattntatgtccaagcacaatgctctcacgcaccatgaatnggcatttctccacattaagaaccagtctagtctccttacaccttttcaagacaacattntaaattttcatataggcatcaaaggatnggaagttatctcatgaggagtact

SEQ ID NO: 36120 - DNA, 494 bp, Glycine max
  unsure (1)..(494): unsure at all n locations
attatggggtacccgncatatttggtactaggtggcggncgggcgatggtgcaagtctactatccacatccacaaatcacacataaatccaccatccccagttgccaaccttcaactgagctcacgtactcctacgtagcccttatcctctttcctctcaacaccgggtccccatcaatccctccaagcttccataacatccaagcaatttcaaaatccaaacatcatgaactatcaaaaccaagcaagacagggcagaggcagaaaactctgcccaaaacacaaaccaataccacagcttttcttactcaaataccccagtaacattctcttcgttccaattcgttcaccgttggatcgactcgaaaattttactggaggtccctagtacacaagtctacattttgaccgttgagatctgctatgaaacgtccagaacacaatatgtacaaccctttccacaaccagccatgcctaaacattttctgcacaaa

SEQ ID NO: 36121 - DNA, 381 bp, Glycine max
  unsure (1)..(381): unsure at all n locations
accttntcttccattggtgtttcttcatttttctccatgtatctcctcacatgtcttgccacataagatttcttatgttgtgctaaattttatttttcttgtttctttgtctaactcatttgttcatgagtgtatgaaattcttttagcctattattntgtttgagtcaaatctttcatgttaattagtccttaacatgtccatgcaaaattcttagagagtctttgattgtgaacctcttcttgaacttttaggtttccttatgatngtgtctattgtgannattaagtttggtgatngaatttctggctganatgtngatcctaagtgaatattgaactcctaaaactgtggtatacaatcctagtgagttcaacatac

SEQ ID NO: 36122 - DNA, 604 bp, Glycine max
  unsure (1)..(604): unsure at all n locations
agctaattaatttggagcaatatcaactngtaactttttttnngcaaaaaaaaattgattatcttgttcatgtataaaaactgttccacgttcaaggacaactgagcagtgttctctaaatatatttcacataaatggtgattgtgtatcttcgacttgttttgtggagctatttagaagtggtgcaatggattgttatggttggaagcctgaaaaggtgcaaatctatggcgtgatgaatacatcacctactattttggatttcaatcgcacgcaacccatgtttttttaaaagataaatttaatgtgatgaaaaagatatagacaaacaatgatgtataaattattataagaattgttatatatatatatattacatctcctttttatacaccagaatgtaagtattggcttattttatttacgcaaaaaaaatattgagtttgggagccgtggtcaacagtaacacaagaacaagtttgagccccatttcgtgtgaaaaagtgattcattacatactggtacaaaaaattctggttattgaatctttcaaattgtccaaactgtaaacaagaggccaaaaaccccgtcttcaagtaacaac

SEQ ID NO: 36123 - DNA, 425 bp, Glycine max
  unsure (1)..(425): unsure at all n locations
gctacagctacctactatcctttaaacatttanaagtgttgcatgacatttttgctaaataaactagggtaggccataccttaagtagaataagcattataccttatatgaacaacctaacaacttaattatatttgaagccctagctcatacaagcatgaatgtgtataaaggaatngaatccaatggaatgattcgtatcttatgtgtgtgtacgtataaatagatggatagagaatggataatataatatgacaatgcttgtgaggagaaaaanaaattgagattaaaagactcgcttgaaaattcacttaagtaatggtggtgatgaattattatcttcattaagtcactggtgtcactactattaacattacataacttttttanaaatataatatattntgtagctataattatcatat

SEQ ID NO: 36124 - DNA, 561 bp, Glycine max
agctttgaataaaaagtcaagagatgtaacttcttgacatgattttctcaaggttataactcttccaatggttttcttgaccagacatgaagagtctataaaagcaagaccttgacttgcattcagatatcctttttgaacatctttttgaacttcttcttcttcttctttctttaccaaaaagctttctaagttttctatttttccaaaccttgttcttctgcaagtgaaaattctgcagaaaacaaaagtgtgctatatcttttcattctcttttctctttgctaaaaagaattcaacaaggactaatcgtctgaattctttttgtgtctctcttctcccttttccaaaagaacgaaggactaaccgcctaaattcttttgtgtctcccttctccctttttaagagaatccaaaaggactcagtctgagaattcttttgattctaccctttcccttaaacaaaagaatttaaaagactaaccgtctgagatatcttttggttctccctacaaagattcaaggactaacccctgagaattcttttgtctaacacaatgga

SEQ ID NO: 36125 - DNA, 107 bp, Glycine max
cctacctctacatcaagggaccttcaattccaggtaagaggtggaattctcctcacttgaaatctgaggatgttggattcttgggagctataatgggtagttctact

SEQ ID NO: 36126 - DNA, 634 bp, Glycine max
  unsure (1)..(634): unsure at all n locations
agcttgactcatatcatacatatgctttagtttgtggaggagtaagagattgggttttgatattattgctgatattatattttttattagaatattttatttcttattaaccattaattgattgatccttgtaattaatgttgattttctttttaatattataaatagcatgaggtgtgatttaaataaaacattgttatagtattaatgtaatattagaaaacctttatattattacattatacggataagatatgctatgcagttgctaatccaaccattgaaaattttcttctaggataacctctganaattgctggaaaaaaagatttgtcatgccacataataaaaaacatgtgtcatctttaaatttgttttatattgcttttggtaagccatctttaattctgttagaggaaccaaaacaagacatttcactgatttaatatacacttattttgccattattaatgtcacgttacaaaaacttttgtactgttacatgcttaaatccttcccagaaaaatttggggaccttaaagacatgatttaaatatgggagaacattgaaaacgctgctctgcaaaatttaaatgttccagttttaaaatgagatgaaaattgtaaaaaccaa

SEQ ID NO: 36127 - DNA, 274 bp, Glycine max
cttgtcatatgattagaacatccagtatctaggttctaagcttctaactgagagtttccttcactagttgtaatcataaaatgatctggatctaaatcttaatcatcatgagccagatttgtctcttgttcattgatttcttgcttcccttttgcatgttagcattcattagcatagtgcccccatttctcacaattaaaacattgaatctttattttatcttgctttcttctttcaccttttgttgtgtcaaaccttccccctcctctatttg

SEQ ID NO: 36128 - DNA, 385 bp, Glycine max
aggttaaaggaagctcataaaggaccaccataagcggcaagataaataaatgctgcttatgaactatcaagaactattgaagggagggggttgaaatatgaagggaacctcgttggaaaaaaaaaacgatcactacaccaaataattatgtcttatatatgaaaaaatatttaaataaggccaaaaatcattgactggaaaaggggataatataacggccaccaatgaagaaataagtgccgaaaatttctgcataaaatgaggggaacaaccaatattgccgcggaaaaaacaccgtaccaagaaagatgctagattgaatgatgagggaattcaaattggcatctgaaaaaggagaaatcaactcatttagctagatcaaaat

SEQ ID NO: 36129 - DNA, 281 bp, Glycine max
  unsure (1)..(281): unsure at all n locations
tattacattgacagaatgtcataatccatttatatgaattgcacgtgatatagacatgcgtattgagaatatggtgagagaaaaagtgaagaggtggatgatggnggaaatggaatggttttcttgctgctatgtgtatacttggagtcaatcttacccaatttgttcgacagattgttggcgcaattctgaaagcaacaaaaaggttcggaggccttgagattatgatgacttgaagcctatttccgggatctatcattactcaagctattatcggtagt

SEQ ID NO: 36130 - DNA, 567 bp, Glycine max
agcttctagccaaatggacttaccttgaataattcctttgatagcccttttgagccttgtttccctttccttgttttgaagctcactacaagccttaagtgaaaaaccatgatattaccatatccttaaggaattttggagctttggaattgttttgggaataagtgtgggggggttttgtttcattggacaacttgttttgttggctatgcttcatgatgtattttgggccatacttgatgtacattgtatattggttaaatgttggacatgctgaatgaaatgttgtttctcaaaggctaaagagttaaaaaaaaaaaaccaaaatctttaataaaaagaaaaagaaaagcaataaagttgagtgaataaaatcttaaatggcgcaagaatgatgaaactcttgggtctactcttcatgtttaatttttatctttacttctttttattttcttattttttttcttaagatgcacttattcccctttgctcgtctattcctttgggatttaaccccttattccatatttctccataccttgtccttggccccattacaacctttaa

SEQ ID NO: 36131 - DNA, 371 bp, Glycine max
  unsure (1)..(371): unsure at all n locations
atctgagattcacttaanattagtgagaaaaattgtttccgtgaagaanatccaagctgaggcgcttccgtgacatttccatgggtgatttcgcgaagattttcaaccgttcttcatcgctcgttgttcgttcttcgtncgtcttcagtcttcaacaggtaagttcccgaaattgaacttttcgattcattctatgtacccttagtggtcctcatttgtttcgcgtgcctttattntcatttcatntacttttcgtacccncttttgacgtgctntagtcatttatttaagtcattntctcgcctaatcaanaataanataaatttccaccgatcattcgtattggaacatcctttaatttctgggtaaat

SEQ ID NO: 36132 - DNA, 750 bp, Glycine max
  unsure (1)..(750): unsure at all n locations
agcttcaagaaaaaatggccncagttttcatcncttttccagaaggaaatccaatcaatagacctccaatctttaatggagagggttaccactactggaaaacccgaatgcaaatttttattgaggcaatagacttaaatatttgggaagccatataaatagggccttatatacccaccacaatagaaagaattactatagatggaagcacataaggtgaaagcataacaatagaaaaaacctatagatatatggtctgaacaggatagaaaaccattacaatacattttaaaagccaaaaacataattacatctgccctgtgaatggataaatttttcaggtttcaaattgtaacatgctaaagaaaagtgggacactttactattacctcatgaaggaacaatttatgttaaaaaatctatgaataacacttttactcatgaatatgaaccttttttgaatgaatgctattgaaagctttcagacactcaaaaagggttcccctatttttaattttttttccccctcagggaaaaatttaaaataaaaatttcttaacaaaggtttaatagttaacacaaaatgggcacccacataccaccccttcttatataaaaaaaatatttacagacgtcttgtgcctctttttgaaaatccacacaccccacgggtttttttttatctcccccctctaaaaaaacactcaaaaaaagggggctttttaatcaatcctcttatacaaaaaaaaa

SEQ ID NO: 36133 - DNA, 537 bp, Glycine max
  unsure (1)..(537): unsure at all n locations
accttttatgccanaacaatcaactgtgggctgcaccatgattttggtcgtgcaccttgaggttggaaatgattgtccgtcatgtgcttgtacgtgtaggataggtatctcgaataacttaagtagcaaaatgcctttgntaattgtgggtagcacaatactttctttgaaaataatcgaacgtatatatatatatatatatatatatatatatatatatatatatatatatatatatatatatcgcgagatgcgtagcaaacatgcctcataaaatgtatatattgcatgataggtanccaacataccttgtggatttaattaacttatgtagcacagataccctcgtaatttaagtaacttatatactctgtcgatgttatttaagatagataacaaatgcctcataagatgtatatatgttgcagagacactgcttcacaaatgtatatgttctgcattgtatgtagcaaaatacctcgcaacttaataaggtgcccgtgtaatctaataataaagtaacaacgaccttgtaag

SEQ ID NO: 36134 - DNA, 390 bp, Glycine max
ccaaaacacaaggcggcgagccaaaagagacaggacaaacgacagggccaacaccgcaaaagccgaggggagccagcccaaccacaccacaggacacacacaaaagccaccagagaaaacccgaaaaggaacaaccaccacgaaaaaaaaagggcaaacacaaaccagcacaaccaaaaaacacaccccgcacaaaggagccccaaggaaaggagacaaagaaaccgcaaccgaccgaccacaaggaaacagaacccagacccaaaaacgatacagccggaggcgggccagaacccacaaggccaacggaagaaaaggaacgggacaaacccaccggaaccaccgaccacaagacgggccaagcggaaacggaacggcaacacaaagcgc

SEQ ID NO: 36135 - DNA, 296 bp, Glycine max
  unsure (1)..(296): unsure at all n locations
aagcatcaacaagaatcaagccaatgctattgtgcaagcaatcaatgtggcataacacaccaaaagattatgatgatgaatggctcatattctcacaaaggtaaacttatcactttcaaattgagctgtcaaaactatcatgacatgtagaggaaaaacaaggatttcaaatcacaaaatgtcaagagactntattttttcagaacaattacccatttcttgaacatatcctataattcagagaaaaatatgcacagttgtacatgcaaacagaattaacctanaatattaaacta

SEQ ID NO: 36136 - DNA, 660 bp, Glycine max
  unsure (1)..(660): unsure at all n locations
atgatgctactttgcttaaacttttttgctgtnctttgnntcatagataaggtcgaacaacacactaaaactttgatttttatctaaaaaaacagtgatttttatcacaacaggtgcatattctttgtagttctttcaaagcttaatttttttggttaattgtttgggtgttcctgattcatctcctactttgtttcgcatagaagccccaagaaaacacattaaagctttgatttttatctaaaaaacagcagtgatttttatcacaacacgtgcgatttctttgtagttctttcaaagcttaatttttttggtgaattgtttgggtattcctgatccttctcctactttgtttcgcatagaagcccgaagaacacactaaagctttgatttttatctcagaaaaaacaaagatttttatcacaacaggtgcgattttttggttaattgttgggtgttcctactagattcttcttctatctttttctgcccattatctttaagtttttgggtggggggctagtgcttacatctacttcagtgggatgtaaggccttatttctattgcttcctaaaatgttaaatttatggttcaatgaaaatctgcatccgggtttcccaaagatagacccttcccttgaaaaataggggctatgatgg

SEQ ID NO: 36137 - DNA, 325 bp, Glycine max
  unsure (1)..(325): unsure at all n locations
gatcaagcatcaagaatccaagcccagattcgagattcatgagaagacatctcgaagcaacaagtcaagacttcatataggataagtattaaaagaatntttcaaaagccaaataacacatctttgtctcacaaaagaatgtnttcaaattttctaagtgaacagagtgattactctctggtaatcgattaccacttagcagtcatcgattaccagtgaccaaattgggtttcaaaatattctcatatgattngtgatgttccaaaatgatattcatattgtggatcgattacactatatcagcgatcgattactagtgaatctg

SEQ ID NO: 36138 - DNA, 590 bp, Glycine max
agcttgaagaggatgctttaatggagaaattgttgtaggagagaaagagagaggggggagcacgattttgaaggaagaaaaagggagagaagttgaactttaagttgtgtctcacaagactctcattcatcaaagttacaacaagtgttacacatgcttttatttataaactaggtagcttccttgagatgcttctttgagaaaacttccttgagaagcttctttgagaaaatttccttgagaagctagagcttagctacacacacccctctaataactaagctcacctccttgagaagcttccttgagaagattcctaaagaagctagagattagctacacacacctctctaatagctaagctcacctccttgagatgagaagctagagcttagctacatacccccctattatagctaaacttcaccccattccaaaaatacatgaaaattcataaaaaaaaggccctactacaaagactactcataatgccctgaaatacaaggctaaaaaccctttactactagaagggccaaaatacaaaggccaaaaagaagggaaaaaccttttctaatatttacaaagaagag

SEQ ID NO: 36139 - DNA, 390 bp, Glycine max
  unsure (1)..(390): unsure at all n locations
tttggaatactggatcccttgttacttgaatggtccatctcanggacaagaacttcagcaantttggggaaaggaacataaggaagttggctcgtggccgatgccaagacgtttccttctaaatcacgacaaactacgcccatgccaattccaataccgttcttgcaagcggcatcaaagtttaattttattaattgctgagggtggacaccatctattctgatgagtcactgttgtggcggctctaaagcactgtgtttcggcaaataacccanaaggaacgatcaatgactaagcttatgggggttntctcttgctgaaagatccaattattccttcttcgccagattgaccataacatcccaaacatctgttgtgcaagccccctat

SEQ ID NO: 36140 - DNA, 689 bp, Glycine max
agcttggaggctctccaacatgggcttctcctagctttacatgtccttcaccctctcaaatgcgaaatattcttaggtagctaggaatatcccaccttaacgatgggaagcaccacatgttgtcctacctcacataattacttatatttagaaaaaaagcattttaaatacatctgacataaatatatcatgacttggtccattttgtccacacttacaaatgaaaagagatgaaatgaattatgaataaccattatattatatcattatataatgttaaaataaaaaaaagttgttaccattcacacaactactcttatatttatcattgtcatcttcttatattaacatttttttaaaaagttatttcgtatattattggtctagtgggatctccaactcattagagtcgtctaaaaacagaaattttagtaaattgtatgaggttataggtattagcctcactctcaagatggacaacgaggtaatcaaaatctcactaatactttttaatttattctcaaaatcttttatggtcattttaaaaacttaaacctagttttctatggccctcaaataatactaattaacctttcgaattatccttctctaatatccggaattcaacaccccatttgacgtccctttttcttatcctccaaagatggttgaaactccaaattcttact

SEQ ID NO: 36141 - DNA, 361 bp, Glycine max
atccatgctcgtcctttaaatctccaatgactttgctttgctaacacagtttccctgcgaggcatgtaagccaaaaacattgaatagcggtacatttatagtttgcgggttagtttagtggtcattaagttggatcttttggacgcatcaagcagtatggttatttgttctgaattcagtattttatgaaaggaattgtggctaatttagagattaatttgttagcgttcacttttatatcaagttgtatctagcttatgtggaagattaatctccctttaaatgttcttccagctccttcatcctatatcatgcggctgtctttcatttgtggttattttgggtcacaagtgttcatttt

SEQ ID NO: 36142 - DNA, 455 bp, Glycine max
  unsure (1)..(455): unsure at all n locations
agcttgaaattgaacaacagaagctctcttgaattttcaaaggncataacttgtcacacgaagtccgattcaggcgcctaatatatggagacgctcgaaattgaacaacagaagctctccagaaattcaaatggtcataacttgtcacacgaaagcccatccatgcgcataatatatccagaaacttgaaattgagcaccagaaactctcgagaaaattaaatgggcataacctgtcacacgaagtccgatccatgcgcataatatatttacaagcttgaaattgaacaacagaggctctcgagaaatacaaatgggcgtaacttgtctcacaaagtcctatttatgcgcataatatatttcagaaaccttgatattgaaaaaacgaggctgtctataaaaaaaaatggggcgtaacttgtgacacggaaggtccgatcatgcgggtaatatatt

SEQ ID NO: 36143 - DNA, 336 bp, Glycine max
  unsure (1)..(336): unsure at all n locations
cgagctctcaaactanatggtcattcttatacacagacgtccgagtttgctcataatatatcgagacgctcgaaattgaacaacgtgtggtgtctacaaactcaaatggtcataacttgtcacacggaagtccgattcaggcgcataacatatcgagacgctctaaattgaacatcggaagctctcgagaaataccaatggtcataacgtttcacacggaagtccgattcgagcgcattatatatcgagacgctcgaaattgaacaacggaagctctctagatactcatatggtcataacttatcacacggacgtccgagttaggcgcataatata

SEQ ID NO: 36144 - DNA, 461 bp, Glycine max
  unsure (1)..(461): unsure at all n locations
agcttctctntgaccttngagaggtctnttttttgtctncgaanaacaaacattcgactctcttttggtccctttcatacctttggagcttgagttcgatgttgctgccccataaagcccctcgaaacttgtttctggttccaaagttgcggctgtagccgtgttgacatccctcagctcataacattcctttctgactctgatgggtgtcgtcttgaacttttccttgactatttgtgttctttccaattccacttttaaggcttgcacctctttgctctcctcagggaccttaacctcttcctcatttgaaacccctagctttgggagccaagttatctcttgcgtcctaaccttcagcccattgggaaaagccgccaatgatcccattgctgcatacctctaaagctccgtgaccttttggggccaccgagacctcatgtgatgaaaggcacaatacc

SEQ ID NO: 36145 - DNA, 305 bp, Glycine max
  unsure (1)..(305): unsure at all n locations
accatggagatgcagcggaagacaaaggagaagaggtgagaagaggcgccatccactacgaaataagccatggaagaaagagcttcaccaccaagatgagcctggaataagaagctcggagaggatgcttcaatggaggaacagacagagggagagaaagagagaggggggagcacgaaattgaaggaagacaaagggagagaagttgaactntgagttgtgtctcacaagactctcattcatcanagttacaacaagtgttacacatgcttctatntatagactacgtagcttccttgagaagc

SEQ ID NO: 36146 - DNA, 698 bp, Glycine max
agcttgcttgtggagcttctatggagtttgttctttgagcttcaatgaggtcctttaatggtttttttccaccattgagatgcagcggaagacaaaggagaagaggggagaggaggcgccatccactagggaataagccatggaagaaggagcttcaccaccaagatgagccttggataagaagcttggaaggatgcttcaatggaggaaaagaaagagggagagaaagagagaggggggagcacgaaattgaaggaagaaaaaaaagggagagaagttgaactttgagttgtgtctcacaagactctcattcatcaaagttacaacaagtgttacacatgcttctatttatagactaggtagcttccttgagaagctttcttgagaaaacttccttgaaaagcttctttgagaaaacttccttgagaagctagagcttagcttcacacacccctttcataactaaactcacatccttgagaagcttcctttagaaaattcgtaaagaaactagagcttaactacacataccctctttatagcttaactcacctccttgaaaggaaaactaaaccttactacacaccctatataactaagctcacccccatgacaaaacctgaaattaaaaaaagttctttttaccaaaacaactaaaatgcccccaaatcaaagctaaaacccatacctctaaatgg

SEQ ID NO: 36147 - DNA, 374 bp, Glycine max
  unsure (1)..(374): unsure at all n locations
tacctcatgctctcctctaatgactatggcatcatttctggcgctaaactgctgggaagtggaggccatcttctcaattaaatttctggcttcagcangagtcatgtctccaagggctccaccactggcagcatctattatacttctctccatattactgagtccttcataaaaatattggagaagaagctgctctgaaatctgatggtgggggcaactggcacatagtttcttaaatctctcccagtactcatacaggctctctccactgagttgtctaatacctgagatatccttcctgatggctgtggtcctggaagcagggaaatattntctaagaatactctcttaaggtcatcccagctcatgatgga

SEQ ID NO: 36148 - DNA, 472 bp, Glycine max
  unsure (1)..(472): unsure at all n locations
gcatgcaagcttgccaccacggaggttttccgactaagtacttgtgtggnggaacaagctacaaaaggagagttcaagaaatgaagagccaatggttgatacatggacggagatgaaaaagatcatgaggaagcggtatgtgccggctagttactcaattgacttgaaattcaagctccaaaaactaacccaaggcaacaagggggttgaggagtatttcaaagaaatggatgtgctcatgattcaagcaaatattgaagaaaatgaggaggtaactatggctcgatttcttaatggtttgactaatgatatcccggatattgttgagctgcaagagtttgttgaaatggatgatttgcttcacaaaacaatccaagtggagcaacaattaaaaaggaatggagtggctacaaagatttttaccaactttggttcttctaagtggaaaaacaaaggtaagaaagatagggct

SEQ ID NO: 36149 - DNA, 307 bp, Glycine max
  unsure (1)..(307): unsure at all n locations
tatatcgagtcgctcgaaatagaatacagaagctgtgagaaaattctaacgtcaatacacttttactcggatgtccgattgagtcacgtaatatatcgagacgcccgagattcaatacagaaactctgagcaatatctaacgacaataatattttacttggatgtccaattgagtcgcgtaatatttcgagacactcgaaattgagtacagaagctctgaggaaattcaaatatatatacctcttgactcggatattcgattgagtcccgtaatgtatcgagacattcganattgaatacagaagct

SEQ ID NO: 36150 - DNA, 574 bp, Glycine max
aaacatgcacactacttgcggaaggatttttatgagagaagagaatgaaagacagcaaaaaaaaaccgataaagtgaagccctcaaatggaacaataaaaagcgaaaccctaaaaaaaagcgcgatgggatatattcgctctacacataccctatttggttgtattcaagggtatcaatgactgggcaatcacgtagattttatatttttttgcactggttgtattatgtacaaggaaatactttgattttggtttaccgccgaaatctcagggcaccacatagaaagcccaattaagagccactacttaattccctggttaaccctatggtcgcaaaaggaaacgtctttgggaatatagggcgagtgtaggaattgggcaacggccaaacaaccgtgaggatgggacccacagataatgggcctttctttccctcggggcgcttccggtaccatccacatattacttggttttaggcaaataaggccacgctcaaaggcattccggccttcggggttattttttcttgaacaggaaaagttaaacgaaggccccctcaatggcaaaacagag

SEQ ID NO: 36151 - DNA, 320 bp, Glycine max
  unsure (1)..(320): unsure at all n locations
accctttgctatgggaatctcgatgatgctgcagcagcaataaatgactaatactactaccagctattgctcgaggaggatctcactactacacanactgtggtacgaggccaggatcaaaggagggtatataattaactcaataagcatgttaaatttgtttttctaaacatatctaagaacttggaatagattattccccagttattactaagccgttntaggatntacctttaacatggatcatatatcatatatcttcaacatggatggttgagtactactacnggtccttgtggatatnttcaatcaatgagtgc

SEQ ID NO: 36152 - DNA, 658 bp, Glycine max
  unsure (1)..(658): unsure at all n locations
nncttaaatgcggtgcttaaagtnggtttaataattcttttgaaaaagaatgtgaaagtttgaaacttggaggtggaggcctgaatgcacatggatcttataggtgggaaacttacacttgaatatagaagtttgaaggagaataatggtcgcatggttgttgcaaaggttggttagtggtggcgtgaaggtaagcaatggagcaatgacaagataatgtggaagcttaaaggaatcttcaattataaaaaaatatatttcatatttattaaaaaaattggttaaccttattggattatgttattttaattaaaaataaccatattttttaaaattattatttattaaaatttaatatcaaatttcaaatataaagaatatctctaatcttattaaatcaaagatattttaaagaaaatattactaaaaaaacataaataattaaaatttgcttatagtaataataatgatattcaagagcggagtaagtacggtaaaagagggtaagttgtcttgtatcttatgaaacatgtgattaaaaaaagtgaatgaaagaaacctggggggtccactccaatgacgtttgccgattccattaatccccgaatggaaccccctggaacctgctaaaatccaaaattttgaagaatattattcc

SEQ ID NO: 36153 - DNA, 345 bp, Glycine max
  unsure (1)..(345): unsure at all n locations
agacatattngaagttaccataatgcatcttatcagaaaacacgtganacagatggttgtgacagatccaacctgcaatacccagcctgtgttacataaatacaagcaatattgatataagcaattgtttntcaatttcattctgttatagttttggaatgtaacagaagaaagccagaaggggttcttctcagttcacaaaatgatgaanactaattctaattcaaagggtacacacagaacttgaccttattgtttaaaatgggtactattatagaccatcgactacagaaatgtaatatatatgaataaagatgcctacacctacaatngaaagtatgttga

SEQ ID NO: 36154 - DNA, 467 bp, Glycine max
agcttaaatccttgtgtgcaccctgtttactttttttagctcaaactgaagctcaactaagtttcagaactaaaacttagctataaaatagatgaatactaattcactagaattctttaaccaattagtgatttcccaagcaagaaaaaggcgacttgggaacagacactagattatcatggcacatatagcacaaatttaacaaagtagggatttcccaaaaacaaaagtatgggaacttctgaacagaaactagattctaatcctttataatcatagtccgcaaatttaacacccctgagaggaaatgaaataagacaagatcacgggaaaagaaagataaggtagcaggggtataaataactgaggcccccttactcgttttcaccattcacaacctgggaagattttggcagcagggaaagctttgaaaagcttggaggggagaatgaagcttcaaccatcat

SEQ ID NO: 36155 - DNA, 396 bp, Glycine max
  unsure (1)..(396): unsure at all n locations
atactcttattgtgaaagctccttgcctgcaacttanganactatctgataaatgcttgcacaacatggtagacggttcctcggatggttaacgtatgaaacttcgttttagtattgcacctttaccacccctataataagtttntgtgattaacttttttgttgggtgtttaaattcaacatgctcaatgctcacatgcttgctatagaggttaataaggaccttaggaatcatagtcaaatccttccttctaacattcatgatcacagtgcctatgttaacgtctgccgtttattctttgttggtttatttcctataactcatatagtgcattttcgcattggtgactatcatactctatgacagggacacattgtactagaccattgtgcttg

SEQ ID NO: 36156 - DNA, 460 bp, Glycine max
  unsure (1)..(460): unsure at all n locations
agcttgttatccagggcactctcttggattatatatccccnccatccatggctnataccctattggatggtgcctcctttcacctgatctcctttatcttccgctgcatcttcatggtggaaaaccaccattgaaggacctcattgaagctgatagatccaccctccataaaagcttctcaaacaagctatcatcagatggtattacagcacaatagctttaagtaagggctccataaaccctccaagaataaacaactttaccttcctctatattggtggatcatcagtttacctcacagaattcccctacatgactaatattgaatgttggtaacatgattcttttgaatttccaccgattaaacttgctataaaaactaaatatgattttctatgggtcacaaaatcttgaccaagctcttgaaccatgaattggggtaaaataagggtacattggg

SEQ ID NO: 36157 - DNA, 462 bp, Glycine max
  unsure (1)..(462): unsure at all n locations
taagctccttcaactgcacaaggctcttaatatttgaagagtattcttgtggaaccttcacccgacgaagacactggcaaaaacttatcttctccttcttggacaaagtatggcaggctgtgggcaagtaaattntcttcccatcagaccttggatgcaactgtgatcgtatacccatatcagctagatcttgacgggtattcaagccatccttcctcttgccttgaatgttaaggagcgtcccaatcacactgtcacaaacanttttctccacatgcataacatcaatacaatgtctaacgtcaagatcacaccagtacggaagatcaaagaaaatggacctcttcttccatatgcaactctgaactttatccttctttggggtcttcccaaatacaatattcaggtgttgaacccgctgatatacctactcaccaatcaacggtatggacgtaatatcat

SEQ ID NO: 36158 - DNA, 484 bp, Glycine max
  unsure (1)..(484): unsure at all n locations
ctacgtggttctcanagctctcgttccttacctaacctcacatcttgattctcgccattcatcagagcaaaaggatgtgatgattgaagaccgaatcactgcgagtcttatctttaatatttgtctgtcacatcataatcgcatgtaaatcttcttgatagggctgtagagattttatttacgtatacaaacattacgtgatgactatcccttctatattatatatttgaaatatgctaatatgtggctacctgaaaacagcctactatcttatcattgtggttagctctgacatacgattaattatcattctgcaatgcctgataatgatcgctgatatatgtcaattttgctacaagaaagatgaacaacttacctctatagtatcgtaattacagatggccttgacaacataccctttagtttctataaagcaaagtatgaatgataatgccatatatgtgtcctaaacccacttactttn

SEQ ID NO: 36159 - DNA, 392 bp, Glycine max
  unsure (1)..(392): unsure at all n locations
agcttatcatcctttgtgagtgactcatgatagccttgagtttacttcaattgttttttatagaacttgtcttttctaaatacccttaagcaaaatcatcagtaagcataaactcataaggcttatgatttgtgtttaaaaggttggtcataattaaaacatatagggttttggactcaacaggaagtgcttggattgtgttatgagatgggaacatgactttcattatggtttgatatttatggaaattatatgaaaaatcttttaatccttaggctttgtttgttggtagagaaagaaagcgaaaaagacaagaaataaatagtaaaatgaggtgggactcacacntttacactctactttaatttaaaactttgttctcttttcatttt

SEQ ID NO: 36160 - DNA, 311 bp, Glycine max
tagaaatgaaagcattcactactagaaaagttacatacaacaacggttgtctaagacattcaaagacgattctgaaccgtctttggttctaatgtggacaaaagtcaaaattttcgatgacaattccaacaaaaatcatcttacaaaaggatatgtcttctaagacaggtgttagttaaaaaccgtcttagaatgctgtatttctaagacggtgctctaaaaaatcgtcttagaacggttccattttaagatggtttttaccattctaaaatggttctacatctaaaaccatcttaaaatggtatccttct

SEQ ID NO: 36161 - DNA, 300 bp, Glycine max
agctttaccacatattaccttagttcatggtcaatgcatttctcattttgtatgttagaagtaagcaagtaagtattttggagatgtacctacatggtgaaaaacatttttatgtgtgttagaagtaagcaagttagtattttggagatgtacaggtcgaagttggcttctctattttaaagcttatatttatcataatttttattatccatattgcaaaatttttactgatgttgtataaaatttaaacattcaatatatttatttttattaccctttctggaagatgtcatttcaatg

SEQ ID NO: 36162 - DNA, 434 bp, Glycine max
  unsure (1)..(434): unsure at all n locations
cgcctgggnntttgtgcgtgcatcgacagcgaggaanaatactacgctagccaatcaggaagggcaggtttcaacttttctttttcagaatttgcagccaagtaactcgttgcttcaaactgtccagtcacgtgagtggtgggaattgaagctggatcataagatattccaccacctctatatgacatctggatggtggcgtctgtctgaaatataggagaagtcgccgaggcaaaggcactgatggaaataggagccgtcctaaaataatgccgcgcttctgcgtctaagttgtagagatgaaataggccgctagagactttgcacttgtaccgctcagattaccacaccatagtgagaaattgaagatgtgctggttgaagtaaaacattttatcttccccatagactatgtggtaatggatatttgtgaac

SEQ ID NO: 36163 - DNA, 375 bp, Glycine max
agctttccatacaaaaaatgttgttttcacatccatttgttctaacacaagatcaaattctgccaccatagccataagtattttgattgacctgtgtttcactacaggagagtaaacttcattgaagtcaattccctccttttgagtgaatcctcgagcaacaagtctagctttaaatctactggtccaactccttggatgccttctttcttcttgaagatccacttgcagctaaccactctagaaccaagttttttttaatcaattcccatgtatggttgtcatggaaagacttaatctcttcattcatggcacttgatcatttttctttctccttactagctaagataggcttaagagtttttggatcttcct

SEQ ID NO: 36164 - DNA, 388 bp, Glycine max
tgtcaacatataagattataagatcaaagtttattaacaatcaataatacaccgtccattgggtcaacattacgtatcttaatatcggtgactacgagatttgtagatatgaaaggcttgttggaaattgttgcctcatgctccacatcacctgatgtaaccaatgcctgtgtacacattgtagactcgagtactaatgaagaaacacatttaggcaccaacaatgaaaaattcataactaaagcagaaatgattattagttacctttttaaggggccttacactttacaacattacacttgcccatgatgactccacacctcataatgaatattctaaagtttttgtatcattagcagttttgaaatccacacctttgcaaagacct

SEQ ID NO: 36165 - DNA, 336 bp, Glycine max
agctttacgatcaaactttttctctctttttctctcaaatgtccttcattcttcttcctcttttcacttatgttcttcttttctcttgcacaaatctcataaattttccattgctgatgatcatggaacgctaaacacttaatcaatccaaggatccattccaagcaaggctaaatttgagctttggcttaatatttctaatctttgtgaatgatcatctttttcttcaatcctattttcaattttcatgattatgattatgcttaggattgacaacgaagtaggctatgaatttatttcctaattatcaaatttagtccccgatcacttgaacga

SEQ ID NO: 36166 - DNA, 209 bp, Glycine max
tggagaatatcaaacgacagtaaccttcttatcggatgtcctactgagtcccgtacatatatcgagatgctccatattgacaaccgaagctccgatcaaatacaaacccaaaaaactttattcacggatgtccaattgagtcctgtgatatatcgagacgctccaaactgaaaaccaaagatcgaagcaattcaaacaacaataacttt

SEQ ID NO: 36167 - DNA, 300 bp, Glycine max
agcttttaactcggaggtcctattcaagcgcataatatatcgagacgctcgaaattaaccaacggaagctctcgagaaattcaaatggtcataacttttaactcggaggtccgattcaggcgcataatatatcgagacgctcgaaattgaacaacggaagctctcgagaaattcaaatgttcataacttttcacacggaggtctgagtcaggcgcataatatatggacgaccctcataatttaccaacggaagctctcgagaaataccaatggtcatagcttttcactgggatgtccgat

SEQ ID NO: 36168 - DNA, 307 bp, Glycine max
tgcttactcgctttgaaactttcttaaagaggttgggagttatgagagcgtctgatgtagatgacctatgatttacccttagagtctacgatagtgttgctctaacctctctaggatgggagcttggctctagtatgttatctgctatgtgtctacattttgtgagatgtttaatcatgacttgtaatgatctttttgaatgaaatatgcgatatcgttctatttcctaccttgtgtgttgcgtgtatatttgctttctcattagctacatactttttggctttgggacgccaagggggggggggag

SEQ ID NO: 36169 - DNA, 392 bp, Glycine max
ttacacacatgccactctactccatatttttaaaggatctgttgactaggacacacaagtatattcaccaggaaaacattgttgtggaaggaaattgtagcgctgtgattcaaaagatccttccacccaagcataaagaccctgggagtgtaaccattccttgttcaattggagaagtcactgtgggaaaggcacttattgatttgggagccagtattaatttaatgccactctccatgtgcagaaggttgtgagagttggagatcatgcccactaagatgactttacaactttgttaccgctcaattaccagaccatatggagaaattgaagatgtgctggttaaaagaaaacattttatcttcccgatagactttgtggtaatggatatt

SEQ ID NO: 36170 - DNA, 375 bp, Glycine max
agctttgataaaaggttccttcataagcatcacactatttgttttcacaaaaaactaggatagaggattctaagcttgcaaaagtgtcactggctgcacaaaccagtaccctgcctcttcagttcacataaccctgttatatggataagcactgtttctcttgctgacctgcaaattacaccaaaacagcattaaagaagaacaataataacaacactgacaaacatgtgaaggttgctgaagttatcattcatgtcatgctattatttgaccaattaaaaataaataatctttaatcagctagacaacaaattatttgcatgtgtattatttagaccaattcctattatcctataggatttgattattaaatga

SEQ ID NO: 36171 - DNA, 376 bp, Glycine max
tagcatgaagagggtgagccagcatgagctttttcccataacgtgtggttttgcattctatactcaacactgaatggtttcttgagtgctgcatcatcggacacagggtaacaagaactgaacttgtcaagagtttctacatacttggaatccgaagcagttatataatggcttcctctgacaagaaagatatctaacgttggagcttggaatgtgcaaagtaacaccacaggcttgtgtgagtatgttttaaaggcaaattcttgttctaataagataaacaaaatgaaacgcccagtggaaagggctttccacgcaggaatcatacacaagcccattccacgtttacagaatgacaagttttccaacctataac

SEQ ID NO: 36172 - DNA, 380 bp, Glycine max
  unsure (1)..(380): unsure at all n locations
agctttgtaatgtgttattttattgtttgatggattggaacattgatacaaagttgtccactatcactttagttaattgtagcacgaatgacaaaatcattgacaaaattaaatataagttgcacttaggaagtttattaagggatgagactttacttcatatgtgttgttgtgcacacatattcaacttgattgtaaaagatgggttgaaatttgtgaaagatgggatagagaagattagggatagtgtagcattttggatagccacaccaaaaaggaaggaaaattttaaggagacagtgaaacaattaaggatcccgtgcactaagactntggttttagattgtccaactaggtggatctcaacttataaaatgctt

SEQ ID NO: 36173 - DNA, 381 bp, Glycine max
cgtcatctgagccagcggctcttggaatgtctttggaggaggccccaatctaagacaaggtctcaatatgcggaaaaaatggctgtaaatattgagaatatccaggccatcactttcaatcccattccttgatgaagagtataagctgtccttacgcaaacatctgcaatactgaggaaatacctcaacccgttatatccttgcattttatctttcttctcgaacagtcgccttatgcactaacaagagaaataagattattccgcagtctcagtcatttactaatcaaaagcatgcatatttactttcttaatcaggggcatgtttggataaacatgatcagaatttaccatataagtgctcttgattccacaaacttat

SEQ ID NO: 36174 - DNA, 374 bp, Glycine max
agcttcaacatcagacttcttccatggtgctggaactacttcacatggacttgatggggcctatgcaagttgaaagccttggaggaaagaggtatgcctatgttgttgtggatgatttctccagatttacctgggtcaactttatcagagagaaatcagacacctttgaagtattcaaggagttgagtctaagacttcaaagagaaaaagactgtgtcatcaagagaatcaggagtgaccatggcagagagtttgaaaacagcaagtttactgaattctgcacatctgaaggcatcactcatgagttctctgcagccattacaccacaacaaaatggcatagttgaaaggaaaaacatgactttgcaagaagct

SEQ ID NO: 36175 - DNA, 317 bp, Glycine max
tggagaatttcaaacgacaataactttgttatcggatgtactcttgagtcccgtaatatatcgagatgctccaaattgaaaacggaagctcgtaacaaagtcaaacgacaagaactttatacgcggatgtccaattgagtcctgtgatatattgagacgctccaaattgaaaacgaaagtacgtagcaaattcaaacgacaataactgtatacaccgctgtccgaatgagtacagtaatatatcgagacgctacaagttgaaaacggaagctcctattagactcaatggacgataactttttactccaatgagcgat

SEQ ID NO: 36176 - DNA, 355 bp, Glycine max
agcttctacattcaatttctatcttttcgatatattacgggactcaatcggacatccgagtaaaaagttattgtagtttgaatttgctcaaggcttccgtattccatttcgagcgtctcgatatattacgggactcaatcggacatcagagtaaaaagttattgttgtttgaattttctcaaagcttcggtattccatttcgagcatctcgatatattacgggactcaatcagacatccgagtaaaaagttattgtagtttcaatttgctcaaggcttcggtattccatttcgagcgtctcgatgtattacgggactcaatcacacattcgagtaaaaagttattgtcgcttgaa

SEQ ID NO: 36177 - DNA, 295 bp, Glycine max
gtgagaaaattcaaacgacaataacttttttctcggatgtctgattgagtcccgtaatatatcgagacgctcgaaattgaatgccgaagcgctgagcaaattctaacgacaataactttttactcggatgtctgattgagtcccgtaatatatcgaaaagctcgaatgtgaatgttgaagctcagagcaaattcaaacgacaataactttttactcggatgtctgattgagtcccgtaatatatcgagatgctcgaaatggaataccgaaggtctgagcaaattcaagcgacaat

SEQ ID NO: 36178 - DNA, 386 bp, Glycine max
agcttcagaccatatctactcataatctaggtatctaaaacccctcaatttagtgggttttcaaggtttgagaagtgaaaatgagaatggggtaaacttggagcaaactctcatctcaaacaagtctatatcatcaatcgaaactcgctccaactggttttacgacgaaaaccctaccgaatcaaaatttgactcctcaacacccaattttaccctagaaatggctcttgttttcactttggtcactcatattcctcatttgcacagtctaagctttctcataagtcctaaatgacatttcaaactaggattaactccctttaacctccaaataccactaaatccagatttggccttccaactatcaaagcctcactctttttcca

SEQ ID NO: 36179 - DNA, 356 bp, Glycine max
  unsure (1)..(356): unsure at all n locations
ttctccactaagttgcctgatgcttgaaatgtctcttctgatggcggnggtcctcgatgcacggaagaatttctccaagaacaccctcttaaggtcatcccagctgaaaatggacctgggagcaacgcagtataaccaatcttttgccactccctccagagaatgaggaaaagcctttataaagatatgatcttcttggacataagggggcttcatggcggaacaaacaatatggaactccttaagatgctcatgaggatcttcacctacaagaccatgaaacttgggcagcaaatgtattagtccagtcttgagtacatatggaacaccctcatcatgatattgaatgtacaagc

SEQ ID NO: 36180 - DNA, 364 bp, Glycine max
agcttgcactttttatattttgctaaactaacagcttggcttagcgaaagagtgaaaaacaacactttgccaaagttgcctatttaacctgaaatagagagaaattgattattaaatgcacaaaacacaagtataaattatctatgacctatatttaacaaaaagtacttatagtattacaaaacaaccataaattgggaagtttgatacattatacacaggttttatatacaaaagatagtcgtattgatcgactaacatacgagagctccttgaagcccgtctaaagtattgtttgatcgtgacactgactccagcagcacagacacaactaggggactatggtcgcccaatggaaatacgc

SEQ ID NO: 36181 - DNA, 230 bp, Glycine max
tacaattatacaagcacactttttgtccgaccatgaactccttcttaactatcatgctatcatggcacttcttggtcatttctttgtagaactcagcgttatcgtacgctgttaggcgggcctcatttaacgcactcagtggcaacttattttcctcaccagctaggaccatacagaaaatgcaggtcttcactgcctaatatgctttgcgctcaatctccattggaaga

SEQ ID NO: 36182 - DNA, 390 bp, Glycine max
  unsure (1)..(390): unsure at all n locations
agctntgcgaaaagcttgccgctggagctgacccattaactgccctaactcctttagactggtggtccctaggctcttgaccttgacttgatagaatctccttttaagtgaaggcatttgacttgatcccatgtgtttactaaagtgaacaaaaatcgatgcaaattaaaactctgacatctatcatgggtggaatggatgaatgcatgaagaaatgtatataacacagatgcgatttatgaatacgggagcctgagaaattgtctccttcttagatacaacgtcttggggtagcaaagtgctcgacttatgtatttaagaaggtggtacggaccctccattggtttgacaaagagaggggaccaaaacagaatccgtgcgtgatgcata

SEQ ID NO: 36183 - DNA, 370 bp, Glycine max
  unsure (1)..(370): unsure at all n locations
tagataccaccagcatcaaggaattagggcggttgatggaacctctccaaatgcaagctttccgcaagacttatggaaagatcttagagttgaccttagcagaggtatccatagaagccattgcatcactcacccaatactacgaccagcctttgagatgcttcacattcggagacttccaattagtaccaaccattgaagaatttgaggaaattctatgatgtcctctcgggggaagaaaaccatatctttcatccgggtgtctcccctctttgagcagaattgcaactgtggtcaaagattcagcaagaggtttggaccgcataaaacagactcngaacggcatatcgggcctaccacgggggtacct

SEQ ID NO: 36184 - DNA, 394 bp, Glycine max
agcttccagctagtaataatttaaggaaaaatagtacttggacaaccatgttatagcaaggcaaggttgcggagggcatattgcaatgccaaggtgccaccctagttaccaaacaggtcatagcctttctagttaggctctcaaattggcaccctagaattgtcttcttattagaggtgttcatgttaaacatatttacctacagttgaatttacctacagttaggagatgtaagtagaagttaatgacttttacctacacactatacatagtaggtaaaacctatagtgacagacaattagtcgtcattatacgcctcctcaaagttgacggaagaaacatccgtaggataaagtgtatcatacatttacctacggattttttttatttatag

SEQ ID NO: 36185 - DNA, 402 bp, Glycine max
gatgaaatacccatgcccatagggtgaaatgtctaatggatcaaacactaaaccaaccaaaaaaataaaattagaccaacttgggctaaatgacactacttgaaatgtttgagaatgaaaatatgcacacaaaaaggatcctagtttgctgagagatgtgtgtgtgtgtgtgtgtgtgtgtgtgtgtgtgtgtgtatatatatatatatatatatatatatatatatatatatgagaattgaccaatggtgacagattacaggacaacttctaatagcttctacaacaagctagaaaacactacgacttttacagcaagctagatatataagacatgtattaaacataatcaaacgacaactttcacaacacttatatatgtaagtcaaacactatacccaa

SEQ ID NO: 36186 - DNA, 271 bp, Glycine max
  unsure (1)..(271): unsure at all n locations
aaattagaatgctaaaaataaaatgctgaaattatatggtcaaatcagaggtcaaatccccatacagatgcacagttcacaataatgggatgctcagaatgatcaaaaggtattaaatgatgcctaactaatctatgaaatgtcctatctatctcangatcaaagggttgtaagtcagatggattgcctctagtcatacactacattcagcatgcacacaactagttgccttatcatgtaaataaaggtgtaagtttgaactacagctacc

SEQ ID NO: 36187 - DNA, 354 bp, Glycine max
  unsure (1)..(354): unsure at all n locations
tggtactttacccattttgcatgcctttgtttttactagctttaccttataatgcacttaagtgattcatgatcactatgaatgacaaattccttggaaacaaggtaatgttcccaagtttggagggctcttattaaggcgtcaagtgctttatcataggtggggtagataaggagggcaccatgaattttttcactaaaataagcaataaggtgcccaccttgtaacaatactgctccaactcacactttagaggcatcacattctagctcagatgttttagaatagtcatgaagagctacaacaggtgccttggtgagctnttctttaagaaaacaaagactcgctcttgtc

SEQ ID NO: 36188 - DNA, 384 bp, Glycine max
agcttcatgcgtatgttttgtactattaagtcaatggcaacatcattatctcctccactcgggatgataatatcagcatactttttagttggcaatacaaaatcttcaaaacttggctttacaaatctggaatactgaacaatcattttgtatttagtcaaggaggactttaaacatttttaaacaaaaacaactttgaataagttatatgctgaaaagaaaaagctacaagaatcaataaaaaaatgttcaactaggggatgtttagtacaataaaagttatttttcatgtgtaaaaatgatgattcctaattaataatatatttattttgttcggcatttatataagttccttttcaaggtgtaacgtggtatttttatcac

SEQ ID NO: 36189 - DNA, 204 bp, Glycine max
tgatggcactagcagaaaccatctctatggtagttatcgtgagagagtgtaaagccattgaaaaacatattggagtaattgtcattgtgaggatttgctgaatgagttttgaagtgttgctggtaactacaatttttaggagcagtttatgtgttattacacaatgaaactggtagtggtatacaagcatcattgtatttattg

SEQ ID NO: 36190 - DNA, 385 bp, Glycine max
  unsure (1)..(385): unsure at all n locations
agcttggattggtcgataagcgatgagacacgttgggcatgtcttgtgcgctaagcgagctgtctcaatctttaactttttctctaaggcatttttttcaagtttttgcatcaatttttctccaaatcacttgtaatctttcttcttttgaatcctgctggtcacaaattaaaataacattaaaatcctcattattctattaaaaacaacagtaaaggagaggaattttaattattcttagtacaatntgactatcaattaaacccaaatttcacagttatcaatgaaaaacatccaagaaagaagttgttattgcaagcaagtaatatatcacttaagacctctaatcgttgattcaattgttgaaaaaaagaataacttgttt

SEQ ID NO: 36191 - DNA, 347 bp, Glycine max
tctacttatgtggcagggcgggcttccttcactttcttgtctccaacgcgagctctgaccactgttcttccttcccgcgatgcctcttttcatgtccgcctgagtgggcttatagcctaaaccatacttcccacgatttccttgggtttttatcaggctagttatgccgccattgtctttgcctaaacccatcccgggttcataaccgttccccaacataactcgggccatcattaccgccgcatcggacaggcaaggttgcccaaagagggagtccacggaagaaatgctgaccacctcaaaagactggaaaagggtttctaacgattcttctgcggcttccacat

SEQ ID NO: 36192 - DNA, 389 bp, Glycine max
agcttaacaggagttcttgatcgatgagaagtaagattagaagtagaaaggtgatcaaggccaagtatttgacttggccacaatgaaccgttcattctttaaacccaaacaatcgatccaacatcacaatccactagacctaacccgaacactccatcttcctcactctacctttcactttcgctctttttcgcttccccaatttttctcttcatttctttttctcttcaacgataagtgcgatgtgggttacggcacattattccattcagatttgggaaatttcatttttagggttttcaattttgactttgcttaataagaagctcgaatcttctataagcacgatgagataacgctacatccatcaccataacgaagtcacacct

SEQ ID NO: 36193 - DNA, 374 bp, Glycine max
atccatgcaagacaggagatttttgccttatatctgtccatgacccaaccaaacaaaaaataacagactaaacttctctatggatctatgccacagaccaacaaataacctccttgaactaacatccatataggacacaaactgctcactccaaacactcatgatcttatccccagcagtcaacattgagcaagcttaagcagtgatcaaacttgctctttagaactggctttgtgaacatatcaacaggattgtgcacagtgctgatcttatgaacttcgagtcttctttctgaccgaatgaagtgatatctaacatctatatgcttggttctatcatgatgaacctgatccttggccaagcatatagcacta

SEQ ID NO: 36194 - DNA, 390 bp, Glycine max
tagcttgttaacatatgttcaggaatcatgaatcccgatcttgcggacaatgttcgtgaccagatacaactagggtcacttaattcacgagatgctccatattaatattcacgctgacttcgcacaatatgtaagggataacttgctcatgcttaaaataattgaattctagcggtgccttattatttatgatgaggctacagtttctgttgcctgcagtttagtccttcttaaatgattccgtgacttttacctacacactatacatggcatgttaaacctattaggacagacaaatcattattatgatgccccctgagaaagtggacggaagacacatgcgttagattatgtgttattacattttcctccggattatttttatttatg

SEQ ID NO: 36195 - DNA, 334 bp, Glycine max
tctgattctcccaaccgattgaacattatttctatcatactctctctatacaactcattttcaaatatgacgtaccccgcaggcttatatactgctctcgacgagcatataactgggggtatcaaaccaattctgaccctagtttgctccaataaagacttctcacctcatcaatatttaagatagctaccttttctttgaatatatctttgacaatcatcaatgctttgaaattttgcttacttaacttgtaaccagatgcaatttgagtcaaatctttcacttcctcatttagatctcaaaacacatctttgaatttaaactctttgaatcg

SEQ ID NO: 36196 - DNA, 375 bp, Glycine max
agcttcttagtttcaattgttgaagatgaattcgtggctacttcatgcactcctctaatgacaatagcgtcatttctggcactaaattgctgggagttggaaatcatcttctcaattaaattcctggctttcgcaggggtcatgtctccaagggctccaccattggttgcattaatcatacttctctccatgttactcagtccttcataaaaatattggagaagaagttgctcataaatctggtgatgaaggcagctagcgcataattttttgaatctttcccagtattcatataggctttctccactgagttgcttgatgcctgaaatatcctttctgatggcagtggtcctacaagcaaggaaaaatttctct

SEQ ID NO: 36197 - DNA, 383 bp, Glycine max
agtacccctctttccccgcctttggttgttgacgctaggcccgatggaggagttaagaactttattatacgcatattctagagactatctttagaagcttaggtgagaattctggaccggagggctcaatttaaagagtgactagtctgttctataggatatgttgaggggacacctccatcaacttacctttatttgttatcgaaaggcatccgacagtgtacctaatacagccaccctaattgcttagacgcatctttttctctttggcacgtgaaagagagtcaaagttcttctcaacatgaacaatttgactcggtgatatgccaaggaggaaaacattgtctttatcttcaccaaggaaaagacacaatcgtcttccg

SEQ ID NO: 36198 - DNA, 331 bp, Glycine max
agcttgcaagggaaatcgaattactcgacttgagtacgcaacacaaagaatagtttactctagaatcagaaggcatggtcaaaagagtattctatatgaaatatatctcgaggcgagtcctcgaactatagagtatcaacattgctgagaacaagaaatggcgaacaaccatactatctatgcaattcaggcaaaacaccatactactaacatacctagaattataaggttcttataataagtatgccacgtacatataagaagtatgaatttaatagttaataagggtgtattaaagaatcacaaacttcaactaccgcattcacgagta

SEQ ID NO: 36199 - DNA, 373 bp, Glycine max
taatcaattgaaaattgacggtgtgagatatttcttggactctactaggggcaattttcattggcacccttaatcatgttcaatttgttggtaaatttaagtcttttaatccaaaaaaggtaacttagttaccatgtgagagtaatttggataaatgaaaatagttttggttgttatatgcatgagtatttcgatgcttgtttgcaacaatgtattataaaaaagtacctaccacatagagagtggctatgcaatttggaatgcatcaacaagtttcagattgtgtaattgcattgtctggcaccaaagctattgcattgaaaaactactgcatatcgaatattgctttaaaaaattgcaaacaatattactt

SEQ ID NO: 36200 - DNA, 288 bp, Glycine max
tactaactaacatttctaattgcaagcttacattcttgttctttctttgtctagcatacacacttgctcaaactcatgataaaacacaagcttcatttcaatcatgcattcaatccaaaatcaccatttcaaaactatattaaaactgcattttcaaggagtcaagttaaactgttctatctgcataaggactttcaaaatctttccaaaacaaaaagtatattgtaaaccatattaacattccctaaaaccataatagttcatatgtcctaaaaaccgtgcaaccaa

SEQ ID NO: 36201 - DNA, 277 bp, Glycine max
gctgaaccgatcgtttgagctgttattttttttaataagtgataaaatgaatttgaaccgatcatttgcgttgtgatatgatttaataactgttgaaacaaaatctaactgatcgctcacactgtaaccacgattaaaccaaaaaaaggcaaaatgataattaaatcatgaaaatatcttgaaaaaattattatggaatcataaaaatatctttgaataaaataatgcaacaaatcaatccgacgtttttcattggaagtttccttgaatgaattga

SEQ ID NO: 36202 - DNA, 379 bp, Glycine max
agcttaagtgtttatccactctattgagtgatttgaatctgcgtattcaattcaaacctttgttgtttgtgaaagccataagtgacttggtgttaaacaatatttgggtgttcttagattcatgaggagtctaaagggtgtgccaaaagtagcctatagaatactattgtagccaagagtggctggacaaaatgtttgttgtaatcaatgtttgattggtgaaaccctttaggtataaacctaagtgtgtcgacttctctacaagctatttgattcatattctcttatgttggttttgatacactttatcacacaagtccacacttgaaaacctttgtgaaaactctgtttttttagtagcattaaaagaaagtccaca

SEQ ID NO: 36203 - DNA, 352 bp, Glycine max
tcttatccaaggcacattcttgttggtgaagctccttcttccatggcttattccctagaggatggtgtctcccctctcctcttctcctttgccttccgctgcatctccatgatggaaaatcaccattgaaggacctcattgaagctcaaagatccagcttccatagaagctccacaagcaagcttccatcattatcaatcaaataattgtgagcttgatgaactggtaatgttccaaagtagaaaaatcatcaatccaaaatagaaataatgtgtaacataacctcaaatagaaaccaaaacaaatttacagtagtaaaattaagtcattgaaatgcacacaaatctcccta

SEQ ID NO: 36204 - DNA, 337 bp, Glycine max
tgctagtgaaggccattttgtatgcttaggggcatcacaaagggtatcctaactctctcagtcagcctggtggccctacaaatcatgctatataaactatctccatcgaacaattactcaaactctagattgtcgtcatatgcactaactatagccttcttgctagcctactttgtatgccactactgcaacacaccatactaccatcttacctagaataataaggtttttatcactctgatgcacacgttcatgccaatgtatgaattcaataacatacaatgctgtcttaaaaaatcacaaagatcaactaccgctgtatcgatcctcacttatt

SEQ ID NO: 36205 - DNA, 382 bp, Glycine max
tatgtagaagtatttggcaaaagccttagccatggaagccaaatttgaatttgctgagttctctcacatattgcgacgaaaaaacttaagagttgacatactttctcggctcgtaagcgcacaaagcttatggaacaacaggatggtgatacaataaacttttcaagaaccaaatcatgtgttaacaatcaacaaccaacaaagttggatgacttcgattatggcatacctcatctatgagaagctacttattgacgagaaagaggccaaaaaattgcagaggatgacaacaaattattgcattcataatactttatagaagaaagtattctcaaccattactgaagtgtttggtactcaccaaataagcttatgtgttact

SEQ ID NO: 36206 - DNA, 352 bp, Glycine max
agcttgtagggttaaagtctcacgattgtcacgtgttgattcaacaattgttagtcgtggctatacgagacatcttggcaaacaaagtcaggttagccataactcgcatgtgctttttcttccatgccatatgtagcaaagttgttgatccagtcaagtttgatgaacttgaaaatgaggccgcaattatactgagccagttggagatgtattttctccctgctttctttgacatcatgattcacttgattgtgcatctagtcaaagaaatcaaatgttgtggtcctggttatttgcggtggacgtacctggttgagcgacacatgaaaatcttaaacatgtgtacaaagaa

SEQ ID NO: 36207 - DNA, 298 bp, Glycine max
ttgagttggtttctggccttagaattaattttgctaagagccaatttggtgcatttggccaatctgaggagtggtgtactcttgcagcaaatatcttgaattgtggtcctctgcagtgcccatttatatacctagggatgcctatatgcgttaatcctagaaggaaggtggtgtgggagcctctaatcacaaaattagaggccaaactgaacatatggaaccagagaaggctgtctatagctggcagaattactttaattaatggtgtctagacagctttgcctttgttctatatgtc

SEQ ID NO: 36208 - DNA, 368 bp, Glycine max
agcttctgatgatttcactgcttctagctcctgcatggcaccttgaaatctttcctcactcccctttatctccaacaaggcctttttaatctcttctttggtgcctgcaacctctccatttattataagctctttttctttttttgctgcttctgtttcggacttgagcttatcaagagtttttgacaagttactgactattgatttggccttttcctctgcagcagacacggcttctaatttagattttgctctcaagagcttgtaactgaagtttcgaacttttgcaccaattttcgattccgcgttctttaaatgattcgtggctgcactcacatgcttcagctcatttcttgtgacattcatag

SEQ ID NO: 36209 - DNA, 361 bp, Glycine max
cgtgtagaaaccgctacatgtgaaggagaattatcttcatcccaaattttactgtttaggctttccatatacagtggagagtaattgcaaaagtatctcgtgattccataggaagagaattcaacaaattaaaaattagctcatttataccttcgattgggtacctgtatctgttgttccagtaaatgccacaggccaggttgtagccaattgaatatcttttgcgcattgatgcagtcttatcccttatattttggtcttgatcaagttgggtttgactttgaattattagcttgatcaaagattctgatcacgccacgacgaaggtaaatagatcccgacacaccctttctttaccctt

SEQ ID NO: 36210 - DNA, 378 bp, Glycine max
agcttgaacatcccttgggtactctttttcttcttaatcttttcttatattgttttttactctgctatttctatttgtggccttattcatgattcgttccgttgccacaacacaaacactgaaacaaaactggcctaatgtattttcaccgaaccccacccttgtgtttagtagggtttgcgcgtaattagtacagttaaaacctttctgacttaaattgtaattctaaccttttgattcctggaatttaaaatcgatgccttttggattctgtcgaaaataaaaattatggcaaaggataattcatctaaatgaaaatctagttgattctgattatttattctaagacaatttcaaaaggatctcttgcttattctc

SEQ ID NO: 36211 - DNA, 240 bp, Glycine max
  unsure (1)..(240): unsure at all n locations
ncgcggcaagccagtggtgggaggactattgtttttggtgaaccagatgtgaggaagtcataatcataaacaggacacgtcattaatcggacatacatgtgcccggcgatcgactaaaactgaaaagacacttagtgtcgatatgacgaagtcactgatcaaaccaagaaacactctactagctctgacggagcacaatgccaatagttgtatgaccatcaaacaaatatacaacacatg

SEQ ID NO: 36212 - DNA, 287 bp, Glycine max
agcttcaatggctcaatgagcatggtgaaaatgatagtctatcaacacgtaaaaatactcttttctataggagaatactatgatgaaagtttatgtaatataaatccctatggaagcagggcacattttgttgggtagaccatgacaacttgacaagaaagcaatccacagtgggctcaccaatgaaatagccctcacccatggaagcaaaacattctaacttgctcccttgacaccttcacaagtgggtagggatcaactacaaataaaactcacatgggatgagg

SEQ ID NO: 36213 - DNA, 355 bp, Glycine max
  unsure (1)..(355): unsure at all n locations
tagaagtcaagtgatcatcaattccaaaacatagggggagtgaatgcgcaaatattatgcatatacactacttgcttgtatcttgatttcatgacttatattgtcatcatcaaaaagggggagattgtagaatcaaatgactttgatgttttgatgatgatcatgatgatttgatgcaaatgatgtaaatgtgtttttcaagtttaaattcaagacaatgattcaagaatacaacacacaacatcaagatgatcactagtattttaggaagggaattcctaattgatatagcaaaaggtgatgtgaacctgagtacgagcggatcgttngatacaagctacagaggtttggatga

SEQ ID NO: 36214 - DNA, 361 bp, Glycine max
  unsure (1)..(361): unsure at all n locations
agcttcaacaatcaatttcgagcgcctcgatattttacgggactcaatcagacatccgagtaaaatgttattgtcgtttgaatttgctcagtgcttcaacattcaatttcgagcgtctcgatatattacgggtctcaatcagacatccgagtaagaagttatcgtcgtttgaatttggtcagagcttcaacattcaatttatagcgtctcgatatattacaagactcaatcagacattctantaaaaaggtattgtgggttgaatttgcttaaagcttcaacattcaatttcgagcgtctcgatatattacgggactcaatcacacattcgagtaaaaagatattgtcctttgaatttact

SEQ ID NO: 36215 - DNA, 315 bp, Glycine max
cttgggctaattcaaatgacaataaccttttgctctgatgtctgattgagtcccgtaatatattgagacgctcgaaattgaattctgaaccttagagctaattcaaacgacaataactttttactcggatgtctgattgagtcccgtaatctattgagacgctcgaaattgaattctgaaccttagagctaattcaaacgacaataactttttactcggatgtctgattgagtcccgtaatacatcgagacgctcgaaattgaatgttgaagctctcagcaaattcaaatgacaataactttttactcggatgtc

SEQ ID NO: 36216 - DNA, 191 bp, Glycine max
tgcttgtagggttaaagtcttttgattgtcacgtgttgattcaacaatggttagtcgtggctatacgacacatcatggcaaacaaaggcaggatagccataactcgcatgtgcttgttcttccatgccatatgtagcaaagttgttgatccaggcaagtttgatgaacttgaaaatgacgcccgaattata

SEQ ID NO: 36217 - DNA, 371 bp, Glycine max
tgaccaatcccgacccaacccgggcatattctgtcagtgagaacctgtgatgtacctaagcaggcgagctcctggcagtcaacagataaaaggaaaacaagaccacaaagcaaggaggcttgtggtggctggccagctgtgaattttgtgtaatatgtggattgtggcctctggtaatcgattaccaaaggtgagtaatcgattacaaggcttaaaattgaggacaggaggctaagatggtctctggtaatcgattaccaaggggtgtaatcgattaccaagcttgaaaacgaagtcaggaaacttatggagcctctggtaatcgattaccagcctgcgtaatcgattacacagaggaatgggtcactggt

SEQ ID NO: 36218 - DNA, 320 bp, Glycine max
agctaagaatggaatttttttagataatgaatatcacacagatgaggattctaaaataatttttcaaaaaattgccttagaatatatacgatctgagaggattgtttaaaggattatcttaaaatgttcttgaaaaaaataagataaatttataattctacgacaattattaaaaaaatcatcgaagaatgtttttcttaaaaaaaaattaaaaacccaatttggatattcaagctccctaagtctatgtgtctcccctacttcattaagtatttaataagggaagccatttcctttccttcttcctttatttatatatc

SEQ ID NO: 36219 - DNA, 216 bp, Glycine max
caaaggttgatattcagcatagccctttaccctctgatccaaacgtgggggctaatcaattatgtacagattttttatatttgaccagtttgcattttacatctgtattctgtatttttattaccccttaacttcccagcatgaatctggagaattttcaaagcctgtttataatgaaagaatatcgtttggtgatttacattgtatttcacatga

SEQ ID NO: 36220 - DNA, 308 bp, Glycine max
ttggtttctcttatctgcttaaaagcacttataagaatctactctgcaatggaaaaagtgaacgtattgatgatgaagagccccatcaataaataaacgcttgtatagacatgtcctcattgcttattaccgctacaaaatgattgcgactagctgctaatgctagtgaagaaatcaaactatatctgctagagctatagagtaaatcaaactatctgcccatgaggatatagaataactagccaatgcaatgctacaaacgggtatgacaggaaatgacctgataagttcttttgaaaagcttattg

SEQ ID NO: 36221 - DNA, 303 bp, Glycine max
tcgaggcaggccataggttggaggactagttggatggagaactcgaagtgtgggcatcatcaccactagctggactcgtgattacatggacattcatgtgccgggcgaatgaggggagctggaaaaacacttattgttgatatgacgaattcagagacctaaccaagaaaccttctactaactctgaaggagcacaaggccaatagttggatgaccattcaacaattctacaatccacgaagtgcatatcgcttctccattagaggaagtgatactgaaatgccacatctaatggagcttttt

SEQ ID NO: 36222 - DNA, 366 bp, Glycine max
agcttgaagagtttcttatctatactcaaaggtatattcaatcctttaactgatttctctattgtaatttgatcttggatagggtttgcaagagattgagttgatagggtttcaactcttgaggttcttgtcataaagttcaacaaggttttgtgattttcgcttgtggggttcaagttggaaaggcgttcttgaatttctttacatgtgcataatgttcatattgcattgaaattcatagtggaaatatttaactggagttgttgggtatgactagatgtaggctctcttgagggaagaaccagtatgaatcttgtctgtgattctctctttctctatccctaagtgtgccaccaatcttgatat

SEQ ID NO: 36223 - DNA, 304 bp, Glycine max
tgcttctatagtgaatattggggtacctcgtgtttttctcgctcaacagatggactgtatcggcgcgcttagcaagatgacccttcactcatcgagcaagcacagatgagctttcttacagattctatctcccgcttatccgaggaatgttgctcacaacggatggctggctaagccatcagattggttgacctagacggtgaaaatcatcactggacaaactggcctcattaacctgaaataacaagaacatgaatattcaacgcacgcaactggagtactaagtatttattacctatcttta

SEQ ID NO: 36224 - DNA, 392 bp, Glycine max
  unsure (1)..(392): unsure at all n locations
agcttttaaaatatactacttcttagtaaaaaacatgtgtttttggtaattatatttttaatgtctgaaattatattatcttttacttaaagattaaatatttgactaaaaaaaaattaatagcgtggtattaaaagatatcttattacaataaataatttaataatgatggaggcaaggaagaatttgttaaattattgatggtaaaataaataaataaactaaacgctactttattttaccaaacactntgattttaattaattttattagttaagtaaattataaattaggtgaaataatccgtccggcacattataagatataaggaatttgaattttacgtttaatggtgattaaatattacgttgaatgcctgcaaaatgactagt

SEQ ID NO: 36225 - DNA, 145 bp, Glycine max
acactataaatactcagcttctaaactgatacaagaatgaagctctgataccacttgttagacaagtggcctcagatatcttaagaatggggggggggcggagctctacattctatctttacaacattttcgtataaccgttgtt

SEQ ID NO: 36226 - DNA, 381 bp, Glycine max
  unsure (1)..(381): unsure at all n locations
agctttggaaccaaattagggaaagaaaatgacctcactgtatttgaatatacttattttatttttctttctttttgtatcagttattgtgagtgctttgctgctggtgtctactgcatagaaccctgctcctgtcaggattgcttcaacaaacctattcatgaagacactgttcttcaaactcgcaagcagattgaatctcgtaaccctcttgcatttgctcctaaagtcatcagaaattctgattctgtacctgaaattggggttagaaaataaactcgacttagtttttcccctaagcaattgaaacatcttttataggtattaattattatctttttgtaggatgacccanataaaactccagcttcagcacgacac

SEQ ID NO: 36227 - DNA, 314 bp, Glycine max
tctataaccttttcttctatgcagtcatttattgcgaattctgcagtcaaagggtgatttccagcatagccctttaccctctgatccaagaagtgggggcagatcaattagagaaggcttcttgagatttgacagcttggcattttacatctgtattctgtatttttataaccccttaacttccaggcatgattctggtgaatttgcaaagcctgtttctactaaaggaatatgtattgatgatatacatctaagttcagatgacttagaaatgtccattgatcttgctccatttttgaatccctcaccatata

SEQ ID NO: 36228 - DNA, 346 bp, Glycine max
agctttaaaatttgaatttattcgttcagaaactactggtaatcgattaccatatatgtgtaatcgaatacacagggcaggattttgaatagaaattttaataactgtttgtaaattagatgtggccactggtaagcgaatacatgctctggtaatcgatcaccagagagtaaatttcttgaagaagactttttaacttaaaattgttggccaaaccttttgctacttgaattggaattcccttactatttaatataccctttctaagacactatagacaggcttgatcatccatatagaatatctttaatttgtttgttttgaataaagctttgagacgcatgtg

SEQ ID NO: 36229 - DNA, 349 bp, Glycine max
  unsure (1)..(349): unsure at all n locations
ttntggagtagaaacatgggaccaactcattttatttcaaaaaggaagtcatatctagtcaaggtcggagagaccatacaagtttcctaacgatttctaattatgtgggccattaagtctatcatatgctgacaatagccgagaagcccatgaatctcttcgggggcggagtaggtgtctgccattgccttggccttggctaacaatcggggaagttcttgactcccgttcaaggtaagagcaaaccgatccatccacatggttgcctcttggtgtaaagagtcgatcacccttcctctagcctctatgtgcgcgtatactcgggcatactcatccgcgattctatgct

SEQ ID NO: 36230 - DNA, 391 bp, Glycine max
agcttaaaagggcaggatattttttttgcaccatttatttttcttctaaatccaacattttatgtgaaattccaaatttggccttcacttaaaagcttatatacaccagctgctactgtacacccaatattttcatatttttgcctcttctcctcctctgtgcttccttcgcgagtctcctctcttctaccgccgtgagtagcattttgtcatcgatggtgagtttttactttttggactccgttaattccatagggattgacaatccgtatgcaacatgcaaaattgcaatccgtatgaatctgtatgtttgttaattttaaatactttatttatttaataaataatttaaataataattttgtttatttaaaaatccatgtataaattt

SEQ ID NO: 36231 - DNA, 346 bp, Glycine max
tgttcgagaatgtatcaatcttcattttgattatatgcattccaagttgatattctatagtgaaaaatagctctgggcaaagggaaggatagcatcttgatggtgcagcttctgaaagagaaggacagcatgaaattttatactgcaaattagatcagaggagcgaaaacaagtgtgattattttgacccattgtttctacttctgcaacataattgatgcttgtattcttttcctaatagatgcatttgtcaatagcaattaaagttaaataaagaatgctgcaatcgtcaccttattccattactcactacaaccaataccgaaattaagaacactagagataa

SEQ ID NO: 36232 - DNA, 388 bp, Glycine max
agctttggcgtgaaaagctcaacaacacaatcagaatcaaacatttcattcattcccatccaggaaatgctcaagtgggtaagttgggggacgaagatttgaaacctgtggattccaccataatactgacaacgatgaagatacaagtgtttcaaattaacgcaacccctaaaagggtcgagaagctcttccaccccacactcgaaacgacaatccaaaaggtacaagttttcaagggaaacgaagtcaaaggttgttgtttcagtggatatgtgagcaagtttgagagtggtgagggattgacagagagagagttgaggaagcttcccaatgacacattcagcgaggatgctaagaacctgaatgcttgtgagtgaaacatggtcaa

SEQ ID NO: 36233 - DNA, 391 bp, Glycine max
ttgacaaagtagggataccaaattatagattcctttatgctttttgcttcgtgggtttggttcatgtccccccatgttttgtttttaagttcctcttctttttggttaatatatttccagtgtgccgtaagcatgctgttttgtttaaaaaataataggctaaattgtgattttagtccccgtagtttctcaaatccatgattttggtccactcaatcttaattgtaacatttggtcttcgtagtcttatgaattggtgattttagtcctgatagattattaacatataattatgattaactgagttattaagttaattataaattaatcaaaaaccattaattattaaaaaaattgaataaaaaattattaattctaattttctgcaaca

SEQ ID NO: 36234 - DNA, 509 bp, Glycine max
  unsure (1)..(509): unsure at all n locations
ctgctgcgacacacactacgttccgacgcntctcctgctnctcacttnaccctncagcagccaagcgctaatgatgcctccttggccccccggagagatactatacgcccgcctgccgcaagcaagaactaaattacgataatattctcccaaactactggcaattgaatagcctatatgggtcatcgatgacacatggcaaggcgttgaatctgaaattcttaatagggtgtgtcgaaaaatatttcttccgccacctggtgaatccactacatcctctggtcatcgattaccagagagtacgatttcttgtcaaaaactttttagcttaaagtgcttggccccaccttttgctacttgagaatgaaaaaccctcctatttaatatcccctttgtacgactatatacacagccatgatcaaccatctcgaaaatgattgatgcctgtgtctagaagaaagcttcgagacacggggaacgttttggcgacctgcaaacatcaggtggcg

SEQ ID NO: 36235 - DNA, 168 bp, Glycine max
tgtctttgttcacccttagatcctccctacgtttctttatttccacggcttgtcctcctaccttgaccccgtccacagagagcatacaatccacctccccccttcaaattctgtgagcccattgacctatattatgcaggctcaatcctcagagcacctatatccttt

SEQ ID NO: 36236 - DNA, 328 bp, Glycine max
ttctgatccaaagagcttgatttacagcattgttgcagcaacatattctgcttctgctgtgggttgagctattacttcctgtttttgtgaataccatgagaaaattccagaaccaaagctaaaaagataacctgaagtacttctcatatcatcagcacattcagcccaatcactatcagaataaccatgaaggctggagtttttaacataatggtatcttattccaaaatcaattgtgcctttaacatatctaagaattctttctgctgcctgaaaatgaattctactagcacagttcatgtgccttgataacaagcttactgcatgc

SEQ ID NO: 36237 - DNA, 141 bp, Glycine max
  unsure (1)..(141): unsure at all n locations
caagcaagctgtgatctatcacctcttgcagcaccatcatcttagntttctattatttaatattacgagtactttgctttctagccgtgtattcggctatattatgacacttggatgatctaccacttctttattcgccct

SEQ ID NO: 36238 - DNA, 380 bp, Glycine max
tacgcttaaatcatttaaataatagagctctatttcaagcacgaatttgtttatttaattaaacaaaggaatttaatcaattatttaacaaattaagctacaataattcatgaatagtttgacttacacttccaattgtccttctatagtaattcttctaaaatatcaaacatactgccaacaaatttgtcactcctcccacgagagaaattatcatgtggtctaaactctaaattatatagtctctgttaattattacatgacatataattgttgttaattcttcataaattgaaattttaaatgtttaaatatatttttggttttgttagttagttttttttaaaaaaaaatctagttcatgtgagtttatacttttt

SEQ ID NO: 36239 - DNA, 384 bp, Glycine max
tgctttcgcgtgcatagcatttcttctatggcaaatagttataatttgaactctactatgctagataggcttaatctggtttatcttgtgacgaacgtgttcagcctgatcattattgaactgtacggggatccatatatagccaatattggcatttgagcacttcctaatatagggttaagaactctatctatcggcatcttcattgctcaatgcaaacgattcaagccgttcagtatggagacaaattcgtagctgtttaacaatatattatgacaaaggtgcatagcgtgacggacttgcccagatattggttaagagtattgacagatatacatgattcgtggatgctataaacataactgcaccccttataactctgat

SEQ ID NO: 36240 - DNA, 376 bp, Glycine max
tgaagtgagaaagtgtggaagagtcattctttctacttttattcgttgaccatagagtggtacctgaagatatgtcacgggggtcaggagaccttggggacgtcaggtggggtgctattgcccaaaaccaagcttgaccaatcccgacccaacccgggcatcgattacacagtgtaaattgcaggtttccatgttctgaagctgtgtaactcgagtttggcctctggtaatcgattaccaatgttgtgtaatcgattaccagagaagaaaacccttgaggcataccttttaactacatgtagcggttatgggactcattgtgttgtacacgtagttagatttctcatgaaagagtctacccctttttctcttattt

SEQ ID NO: 36241 - DNA, 356 bp, Glycine max
agctttgatcacatttctcattccagacaaacttctcattcttgtgagtcaatttacttaggggcagtgccaatttataaaatccctcaatgaattttctatagtagccagccaaccccaagaaacttcgaacttctgtcggaggtgtcggatattgccactccataaccgactccactttaatcggatccaccgcctccccatctttagaaatgacatgtcccaagaactgggctttctccaaccaagattcacattccgacgatgtggcgaacaatttgctatccgtgagaatatgcaagacaattctcaagtgcttctcatgctcctccttattccttgaatacactaggata

SEQ ID NO: 36242 - DNA, 341 bp, Glycine max
tgagcaccttttttcacacctctttctttgttgatgggttgagccttctctagggctgtctaactgttctgtaatcttcctccatcattatcttgtgcatatagtaggcagggatgattcctttgaaatctgatatgtgccacccaattgcctccccgtgtctcttaaggacctctaccagcgtgttctcttcctctgctgttaggtcactgctgatcaccataggcttggtctcattctcctccaataacacatactttagatggttgggtaagatctttatctccaccttggtcttctcgaatggacctccgctttcaattcttcaaaactggtccccc

SEQ ID NO: 36243 - DNA, 340 bp, Glycine max
agcttagactatgttcagcctaccatcctcaggctaatggccaaactaaacggaccatacagtcgttggaggaccttttgagggcgtgtgtcttatagcaaaaggggggttgggagagttttcttccgttgatagagttcacttataacaatagttttcactctatgttggcatggctccctatgaagctttgtatggtagaaggtgcaggacacccctatgttggctagagcctggagaagaccttaccttatgacccgaagtggtacaacaaaccaccgagaagctcaagttgatccaagaaaggatgaggactggttagagtaagcagaaaaattat

SEQ ID NO: 36244 - DNA, 301 bp, Glycine max
tgctgatgcaaagagctagaggacagcattttttgtgccaacatattctgcttctgctgaggggtgagcttttacagcctgttattgtgaataccatgagaaaatatcattagcaaaggttgaaagatagcctgaaggacgtttcatatgatcagcacatccagcccgatcactataaaaataccatgaagtctgaagtgtttaacataatgggatctgatcccgaaaccaattgtgcctttaacgtatctaaatattctttttgctgcctgaaaatgaattctgatagcacagcttgatg

SEQ ID NO: 36245 - DNA, 276 bp, Glycine max
  unsure (1)..(276): unsure at all n locations
ttctgttttttggtttttgtgatgatgtttctcatctttatttgctgaaattgctgatggaaatcttttctacaccaatggtacaactaacctacntcgataagagagaatgtgatgttatgagtggtaaaagagtgttcctttgagagttggaaggctaagtctgaattctgtggtttatggacgttaaagcgagttaattctaccttgaaatgttatttatgacttgtgagaaagcttggactgtgctataaagaaataccaatgaccaaagtg

SEQ ID NO: 36246 - DNA, 325 bp, Glycine max
taccaccataggaggccatggataagagcttatatgaaaaaggagatgaatgaaaggagagggagagaagagcacgaaattttgtgctctaaatgagctttgaaatctgaagtttaatattcagatgatcaaagttaaaaaaaatgcacacacataacctctatttatagcctaagtgtcacacaaaattggagggaaatttgaatttcaattcacatttcacttgaatttgaaagtgaatttgcggagccaaactttggagccaaaatttcactaattatgattagtgaattttagttatggttcagcccactaatcccagatc

SEQ ID NO: 36247 - DNA, 379 bp, Glycine max
agcttttttgttcggtgttgtttaaaaatttacaatgtacgtcggctagggtttttcgtgcgagctcaaccgaagctgtgtttcggccgacactggcgtgttcccatgcactcggccaaggaaacattagcccacatcgaaaagaaaaaaaaaacattaatcaccgatattgatcggaaaaaatgctggttgacgtcggccagaaaagatgaccgatcgaggtctaaaaataaaagaatcaccggatgacgccgatcgagcattttctaattgacatcatccaaatattgttcacggattggatagaaaaaacaatagctgataccagtcgttatgtagtcccgactgacatttttcagccgacattgcacagtatttt

SEQ ID NO: 36248 - DNA, 369 bp, Glycine max
tgtatataagctgcaccattttatcctttttcacaggctgagttctattcaaaacattacagattatctctggtatcatagtgagagtgactctcctagattcttgagtgattcaagaacaccctgtctgtatcaaatgacttacacaccctttgtgtgtagccctcgctggaaagagtgattctccacttgctgtcatattcacccttgttctttcaaaccacacttgcagaaaatccacctctgcccttaattatctcgaggccataactaccatattacgcactgtgattaagtgatttcttgagcctggatggactttcacaacgagacctttcacctcttttatgaatcacctcatctggagcc

SEQ ID NO: 36249 - DNA, 383 bp, Glycine max
agcttgagatgatgaagtgtttgaaggtgaaacttcctgcttttattgttgaccacagagtggtacctggagatatgtcgcgggggtcaggagaccttggggacgtcaggtggggtgctattgcccaaaaccaagcttgaccaatcccgacccaacccgggcatagtcggtcagtgaaaacctgtgatgtacctaaacaggcgagctcctggcagtcaacagataaaaggaacaaagaccacaaagcaaggaggcttgtggtggctggccagctgtgaaacttgattgatatgtgagatatggtctctggtaatcgattaccaagggtgggtaatcgattacaaggcttaaaaatgaagacagggggctaagatggtctctgg

SEQ ID NO: 36250 - DNA, 346 bp, Glycine max
tcaagcttgcttgtggggcttctatggttgtttgattttggagctcctatgagggccgctgatggtgattttccactatggagatgcagcggaagacatacgaaaatatgtgagaggaggctccttccactagggaataagccttggaagaaggagcttcaccaccaatatgaaccttggataagaagcttggataggatgcttcaatggaggaaaagaaagagggagagatagatagaggggggagcacataacttaacgaagaaaaagggagagaagttgtacttcgagtcgtgtctcacaagactctgattcttcaaagttacaacaagtgtacacatgcttc

SEQ ID NO: 36251 - DNA, 162 bp, Glycine max
cgttggcagctgtataatatacttcttttgaaaattcaagagatttaatgtatttgctgccaggattgagatgagcaaacgtatttgttgcaaaaatttagggcagagaaccgcgcgagcagtattattacatacctatgctcttatgctgttcttctcttt

SEQ ID NO: 36252 - DNA, 340 bp, Glycine max
tgtagacaaatttcagctaataatacattttatttgcatccctttaaaagaactgcaacgcagatatatagaagcaactatataattaaactattaaagtgaacatgagtcatcatttagaaggtcaattctattattctctcatttaaaaaacaagaacaataatcacaattatactctttccaaaacgtggcatatgagcacataaacacaagccaaagaacttacataggaaaatggtggtcaagcttccaaaaaacagcatatttccactgtgtgtgatcacaaaagcccttcaacaactgcgttatagaagtggcttccatctatctgttctact

SEQ ID NO: 36253 - DNA, 385 bp, Glycine max
agcttgtaatgcatgttcataccacatcttatcaccctcaccttgcccccaatatatacgcatcttaaagagtatatcttcttcattcatagaatttgctttatttaccaacatccaaggttcatatacctctttgcttttttaattttgatatgaatatccttcgatatgtcccctgaattcctacaatcacaatcactaattgatttaccttctttgtcattctctttcagtgcatgttgtggtctagccttcgatccacttcctttagagcttgctaatttcgagcaaccaatattggctagacaaactagtttctcatgacaaatatcctatcgtggaccatatttcttgcataagaaacaaaccaagtgtacataaacct

SEQ ID NO: 36254 - DNA, 390 bp, Glycine max
agctttagaaccacaaacaaaaaattatttgttattagctttttgtaaaacaaaaaatatgacatatgttaataaaaaccatttcatacactctgcaaaaccatttcatacagtatttgtagtgtactctcaatggaaatacacttatgagataacctctaatatttttttatcagcgaaaaactctataaaaaaaggtaaaaccaaaagacagaaactccaaggaccttataagtccaatcagctgagcccactgagcatcaacagtactccattgatccccctcaataaccaaaaaaatatgaaatacggcatgtgagaatagggtcagagaggataacattagcacagaccatgatatcaaagatggttgacagacacgaaatcttg

SEQ ID NO: 36255 - DNA, 395 bp, Glycine max
ttatgagaaaccattaaaactaaggtagttcttatacaataatcaattgaggaagcttctccgagtgtccccattgaaaaacctttattcaaacctttcaaagttagtgataaggctaaacgaaaaattagggaacttagaaaaactaaatccttaattgaaggcgtaggtgacaatcatagcgaattactaaacaagattagtagtttgcttaaggtcattccatatactccccaagcttcggaaaatactttcaaaatggtaacaagaagtaccttctaattaattaatgttattaatgaagatagtgaccaaaacttagataacacaactgagataagatcagtgtcagaaaagaatatagatgcattaaactccaaacactggaaaacccc

SEQ ID NO: 36256 - DNA, 385 bp, Glycine max
agcttcttcggggccatttcttacgaaggcaaacatttggaaagttagttttaccaagaaatgctacccttaaaacaaaaatggcatacaacctcctccaataaatacaaacatcaatgtaaatttatagtaaacttatgcacatacttttttacgaacgttcacttgcacaagacattcttataactaagaaaaaaaatgtacccatgtacaatcaagacacatccattacctacattatttatatgtacttccaaggcgtatttgctacctacatcacatgcacttgcttggctaaatttacatacatgcatactcaaagcatttggggtaccacaaattgcacatgtgcacattccggtatttctaatatttatgcatatac

SEQ ID NO: 36257 - DNA, 381 bp, Glycine max
tctacttatgtagcagggcgggcttccttcttcttcttgcctccaatgcgaactttgaccattgttcttccttcccgcaatgcttcttttcatgtctgcctgagtgggcttatagcctaaaccatacttcccacgatttccttgagtatttatcaggctagttatgccgtcgctgttttttcctaaacccatcccgggttcaaaaccgatccccaacataactcgggccatcattaccgctgcatcggacagacaaggttgcccaaagagggagtccacggaggaaatgctgaccacctcaaaagactggaaagcagattctaacgaatcttgtgcggcttccacataaggcatggaggatgggcagcttaccaagatatc

SEQ ID NO: 36258 - DNA, 386 bp, Glycine max
agcttgcttctacaagaaactgatcagaattgaatagtaataacaaaacctcaaagagagctgtgcttgatcctcaagagaaaacaacactggagacttagccttccattaatcagtagaaatgaaattgtagattgaagcagaaaacgaaattttattgctacgtgaatagtaaaaattggaattgcaaaacctaaaattattctttctccctaaaacgaaaagtgactaaaaccaaaaagagagtgagctcaaactacaaccttggtgctgttatataggttctcagccccaaagcttacaaatctgttttaagtccaagcccataaataaaataaaatctagataagataagataagaccaaatctagatgacataatatcta

SEQ ID NO: 36259 - DNA, 340 bp, Glycine max
actcacgcttccttgcagaccgccacgccagattacttcatgtttgagatccccacttttgtcgctcaacctttgcctgttggaacggatctcgtttggagctggcttggggctctcaattgaatgtgcattcctcttaattggttcctgcaaaattgcctctttttgcactcgatcgggccgcgcgacaaagcccaaggttggtaaaaatgatctttatttcattcttttaagggacgcctttggtttataggcagatggacacgaacacgctctctcttagcgaaccatttatcgactggcgctccaaaactgatattggctgaaactatcagcacat

SEQ ID NO: 36260 - DNA, 475 bp, Glycine max
  unsure (1)..(475): unsure at all n locations
actacgaancttatttatacacgaagaatatcttcctcaagacaagagttgtgaacctgacaccccccgggatccttaaacgactgcagcagcaacttttagttgatgtattttaaaattacaaagcggtcggcagggttctcgagcgaaaacaacgaagccgcgaacaggcacacagcggtgagcctccatgcaccgggccaaggaaaaatatgggacctcggaatagaaaagagaaacaatcatcacgcggatggaacggaaaaaaagctgcgggacgtcgggcagaaaagatgaccgactgaggggtaaaaattatacgaccaccggatgaggccgcgtaaacatcaccctaatgacagcaaacaaacatagctacgggatcggaaaaaaaaacacaaacccgtaccccttccgaagtaggccgactgaacacgtacacgcacaactgcgcataagttttaccaaacgcccg

SEQ ID NO: 36261 - DNA, 280 bp, Glycine max
tagaggtcgccagtttgcaagaattggagctatttatgggtcagctccaacctcaagccttccgcaagacctatgggaagatttatgacctaactacggtagaagtctccgtggaagcaatttcatcccttacttagtattatgatcagcccctaaggtgcttcacgtttggggacttctagcttgtaccaactgtggaagaatttgaagagatcttgggatgtctggtgggaggaagaaagccatatcccttttcggggttctacccttccatgacaag

SEQ ID NO: 36262 - DNA, 531 bp, Glycine max
  unsure (1)..(531): unsure at all n locations
aactggctcacttcaatnttcnactgnntctcataannctacagtgacantaaaaattantaaaaaannaagacaacgagganaattgatggcctcgagatcgccacccggngatcctantaaagactacctgcaggcatgcaanctagagaagcacgaacattttataactcgtaactagcatcttgcggcaaaaaataaaagacataagtacataaaaaccactccatacactctgcagaaccatttcatacagtacaaggagagaactcaccaaggcaacacacttatgagacaacctctaacatttcctgatcagtgaaaaactatataagaaaaggcacaaccaaaagacaaaaactccaaagaccctaaaaagccaatcagctgagcccactgagcataaacagtactacattgacgcccaccaatacaccaaaaaaatgaaatacggcacgagacaatccggtaagagaggataacattcacacacaccatgataacaaaaatggtggacgacacaaaccctcg

SEQ ID NO: 36263 - DNA, 142 bp, Glycine max
tgcgggcgagcagacacaataccacatttcatgccttacatctccacaaagaaatcgatgccgtgcatgtcgaatattgtgcatatacgaggccattatcacagacctttataggcaccatggcttgagagacaaaatcacg

SEQ ID NO: 36264 - DNA, 498 bp, Glycine max
  unsure (1)..(498): unsure at all n locations
tgtcttctcccacacaacacttcacactcttctcctcccggtnatncatcctcttctcatcttcaccctagcagatgcnccnnnntngtgacttcgctgcatcttctatgcgangctatacaatactaaagctgaacgcccgtacgtcgactatcagaggatcctagtttacctagctttaatccccgctatactgatgcgtattgcaaggcaatgagcgtcgatccacaacctcgccactgagaaaaccatggcgtcaccaagctgagctctctagcttatgtacccgattacaaacttcatgaggaaaataaggcgctgcgcataacaaaggaaatacttgactgtgagtaagaccaaaggagcatggggcggagttacttttacgcatttttgcagaagttaacaccactttggactctctcatacagctgagtgacccccaaaaaagttatttatggaaggtggcaaccaaaaatgtctttcttgactgatgct

SEQ ID NO: 36265 - DNA, 167 bp, Glycine max
gctatgataaccataatgtggttgacgatggattgatatgacagctgagcttgatatgctcggactcccttccatagcttgttaccgttggcttaaacacatctggggttgcgaccgttctcagaaacctaaaaacattgtcactaataagctgtttgattccttgt

SEQ ID NO: 36266 - DNA, 361 bp, Glycine max
cgacactatacaaacgcaagctttggaacaaccacccattagtgcttcttattcctgagcactatgaaggcctgcaagtaatcatacaaatcaacctacaaccacaaaaagctgtcaatccaaagcaacccccctggcctcaaaactctatcccaatcatacaaaataaactcaaggagcacaagatcaatccacccatcaagaaaccttgttgtgtgaatcaaatctagggtgttgtcaaaaaatggaagcctttggtttatagtcaagtagagaggaacaagtcctcttagagcaatcatttcattggagggtgctccaaaaatgatattggctgaaactatactcacattgaattccc

SEQ ID NO: 36267 - DNA, 282 bp, Glycine max
agcttatcccttgaatatcatttatttagaaaaatataacataagctaccataaactagacggtgttccttgcagatacctgcaactacgtcattcttggcatttttagtgactcttacagtttcttgtaactgctccaacatatggacccttgatttgtcagccacaaagctccatctacataggtaaagacaaatgcatactttcatttataacattaatcataaagattaagaataagagaaacattccttgtttcactcatatccatgctatagatgg

SEQ ID NO: 36268 - DNA, 367 bp, Glycine max
tgaagatgcgtaccccaccttttttcatagtttaacaccggaaatgtgtctactattattgtgatcatctctttctccggcattggaggtgccacttgagctatcatgtctccctacctttgggcgaattctttgaaagattcatgcccctttttgcacatgttctggagttgcgtcctatccagagccatatcaaaattgtactgacactgcctaacgaaagcaaccattacgtccttccaagaatggactctggaaggttccaagttagtgtaccaggtaacagctaccctattaagactttcatgggagaaatgtctcaggagttcctcatcttttgcgtatgcccccatctttcgacaataca

SEQ ID NO: 36269 - DNA, 279 bp, Glycine max
  unsure (1)..(279): unsure at all n locations
cgggatacttagaggcgggcggcgggcatgcaagctatgagcaaaantaaattattttaacgtttcacttcgttggctgactgagtcccgcaatatatcgcgacgctcgaaattgaatatcgaagctctgagcaaattcaaacgacaataattctttactcggatttctgatttagtcctgtaatatatcgagtttctcgaaatcgaataccgaagctctgagcaaattcaaacgacaataactttttactcggatgtccgattgagtaccnttatata

SEQ ID NO: 36270 - DNA, 297 bp, Glycine max
ctcaatcggaattccgagtgaacagtcattgccggatgaatgcgctcatagcttgagcattccattccgagcggctagatatattacgggactcaatcagacatctgagtaaaaacttattgtcatttgaatttgctcaaagatgcggtattccttttcgagcgtctccatgtattacggggctcaatcggacatccgagtaaaaaggaaattgccgatcgaaattgctcatagcttgaacattctattacgagcgttccgatatataacgggaatcgatgacccatcctagaaaaa

SEQ ID NO: 36271 - DNA, 384 bp, Glycine max
agcttccatcaagtaaataggatgaaaataatggcacatcacacgctgaatgaattaattcaaaaagaagaaacatatagtaagattaatgtacttgttgcgataaagacttgaccagatgtgtcggccaagcaaggaaggtctaaattgcctaccccacttaggaaacctcatgagtgggtacaggaactgaagcatctgcatctataacctcctccacacttacctttacttggccaggcaacaaaggagtgttatgaacaatagtggatccctcataaactctccccagggcaaccaggcgggcaggatctacttcgatgtacaagccgcacctatctgagtcacctatctcaggatcgtttcctgagggatcaacacaac

SEQ ID NO: 36272 - DNA, 304 bp, Glycine max
tccatacattgctaagcatgcaacagaatctacatcagttttttcccctgctcttctcatgtttattgaagggaaataagtaacaagcctgacactcccctttgatctataaataggttcaacatgttgagctatataatcttctgtaacccgattacgaaccttcacggcggaaattttatgtgttgatacataaaaaggaacatccttaactgtgatataatacaaaaggatgatggggaggtgttagtttttgctgagtattttagatgttaattctcactttttaactttcaaaataaat

SEQ ID NO: 36273 - DNA, 377 bp, Glycine max
agcttctcccccaattttcttttaatagggggagaagtgaagtgaaaaagggttcagcccctttggcacttctctctctttcgaatttgcttggaaaaattgtttccgtgaagaaaatctaagccgaggcgcttccgaaacgtttccgtaacgttttccgtgaggaatttcgcaaaggttttcgaccgttcttcgacgttcttcattcgttcttcgatcttcaacgggtaagtacctcgaatcaagcttttcgattcattctatgtacccgtgggggtccacattgtgtttcgtgtatttgcatcctcatttcatttactttttatacctccttttgacgtgcttaagccattttacttaagtcatctctcgcttaa

SEQ ID NO: 36274 - DNA, 369 bp, Glycine max
atatctgaagaactcgctaagttcgttgactgtgctaagcgagttcatcctttgaggatgaacattcatcctcttgctgaactacctgtggctaagcgaggctgaatcgctaagcccgggtaacttaaccatttttttttgtgatagccacacgctaagttgagcattctggagccaagcgcaattggttgcggcatccgctgagctaagcgagcttcactcgctaagctcccatgacttaatgaaatttttgctcagtttagtgtcgctaagcgcagcttattcttggctaagctcaaatccatgcggctaaccttaggcttagcgagctcctcgccagctaagccaattttgaaaacactggaccgt

SEQ ID NO: 36275 - DNA, 459 bp, Glycine max
  unsure (1)..(459): unsure at all n locations
acctcgaataacgcgatacaaatttaantcgctancccnagcaagggnatgatctcactcggcacggnanacaaaaggcggggcacagctacaacacataatattgaagcccggacccacaaccacccgagaagaaccaacaccggaggaacaacggcggagaacgggacaagacgccaacagaactggaccagaagactccgccgaacgaggacggactcaactgcccacggaacttacgaaacgaaacaatcgggtacacccactgcagcagacgcacctagacagggagcccaaggagccctaaaacggccccccttcacacgaatgatatggaacaaggggaggaggctgacaaacactcccacccagccacagacggcgggcagaaccactcagagggcaagcctcacccatctgaggccccatctcaggaccggccccgagggaacacacccg

SEQ ID NO: 36276 - DNA, 393 bp, Glycine max
  unsure (1)..(393): unsure at all n locations
tatctagacctggagacaagttatgaacattacttgtgcatccaaaaatacgtggatcaacatgaaacaatggttctttaggaaataaaatggaatatggtattttatttttaatagaggaagaaggcatccgattaatcaaaaaatatactgtcaaaactgcatcaccccaatgtcggacaagtacattggcatggagtaataatgtccgatgagtctcagcaagatgcatatttttgctttcgcgatgtcattntgttgacgagtatgaggacaagaggattggtggataatgccctacgctgacaaaaaggaagaaatcacatgagaaaagtattttttcacattatcactcctaaggatcttaattgtcttacttaactgagttttaat

SEQ ID NO: 36277 - DNA, 395 bp, Glycine max
  unsure (1)..(395): unsure at all n locations
ttaacctcatcgtctctcacagtctttagttttgggagccaatccagtccttgtgttcggactctcagccacttatgatagccgccgatgatcccattactgcttcccctaagctctctgtcctttcttcacgccgcatcccatgccttgcgaactccttggagtaccctcgcgttgtggtcactgaaacctcatgcgatgaaaggcgtgatgctttcgtctgatggcactcctctcatgggacatccttcgcatgaagatagaatcctgattcttccttccttctagcgagggaaccatntaacagacgccccctcatgctagccaagagttggtgcacaaaaaacaattcttgcgcccgctctttcacatncccggtcgaacgtgtcatacat

SEQ ID NO: 36278 - DNA, 133 bp, Glycine max
ccccattttttaccgccgaaacgcagggaatggtcaccccatccactcatcttctctaattgtcggaaaaagtccccacgaaaaaccaagccgacgcgctccgaacctttccgaacctcccggagaatgcaaa

SEQ ID NO: 36279 - DNA, 315 bp, Glycine max
actaacccactttcactagtcgaacatgaaggggccatccccagttgaacaccttgagttgagctaacgtactgctactgagacctaatcctgcatcctataaaaatcagggcgcgatcaacccctctaagcttccgcaatatgcaagaaattgaatctccaaatatcatgaactcctctaaaccaagaagacagggcctaggcagaaaactctgccacaacacattccagtaccacaactttccctactcggataacccaatgacaatctagtttttctgatacggttaccattgtgtcaactccggaatttta

SEQ ID NO: 36280 - DNA, 359 bp, Glycine max
atcagaggagaaaccttcaggttgttttatattaacctccttctctaaatcaccattaagaaaagctgcctccacatccgcttgttgcaactcaaggtcgtaatgagcaactattgccaagattatatgaagagaatctttcttagatactggagaaaaagtctctttgtaatctattacttccttttgagtaaatccctcagcaacaaggcttgccttgtatcctctaatgctgcctaaagaatcctttttggtcttaaagacccatttacatccaatatccttcgccccattatgcaactctacaaggttccaaactttgctcatctgcatgagactcatctcattcttgatggccg

SEQ ID NO: 36281 - DNA, 385 bp, Glycine max
tagccctagaggggaaggaccttttcggttttttataggatcaataacaatgcctataggttggacctcccagaagagtatggagtcagcaccacttttaacatttctgatttaactccttttgcaggtggagctgatattgaggaggaggaactaacatatttgaagtcaaatcctcttcaaggggaaagggatgatgcaatcctccctatgaagggaccaatcactagaaccatgagctagaagctccaagaagattgggctagagctgctgaagaagccctagggttctcatgaaccctacggtagatttctgaacccatgggccacggctgggtccaattatctttgaacatattctactaggatgtcattatatttgggc

SEQ ID NO: 36282 - DNA, 545 bp, Glycine max
  unsure (1)..(545): unsure at all n locations
gttattaatctaatncttnagantgtctcacncatttcaaattccgtngatgtttattaataaaatatnntnntnnaagnnannnaagataggnattgattgccgtccgtcgatctcncnancccgnngatactataaaaaccacctgcaggcatgctatctatttggcgggggttttctatcaacaaataatattttaaaggctagcttacgttattgatcctttcttttctaacacactcaccagattcaactcatgataaaacacaaacttcattttaatcatgctattcaatccaaaatcaccatttctaaaatatattaaaactgcatttccaaggacttaacaaaaactgttctatctgcataatgatttcaaatcctttcaaaacaaaaaatatatcgtaaactatattaacataccataaaaccttaataattcatatatactaaaaaccatttaatcaattatccacacaaacataataattaatatgtgctaccacaaaataattaaatatctattacacgaggataggcattcc

SEQ ID NO: 36283 - DNA, 405 bp, Glycine max
ccgcttactgaaaacctcagttgtgatgcacatatattttaaagcactttagcgacgaaattagcgaccgaccaggacttgaagtatgcaaaattattttgagactagcgaccgaatttgcgaccaagtttatttttctagaaaaattaagaagctaaatttttaatttattataagtcataatcaatatgtaatattaataaacacctttatacttgaaaattattgaaattaatatattagtaatatttttaaatcaacaaatcaatattttcattattttgtaaatcataataattatataatatttttaattataatttgatgatctataataaaattaaaagaccaagatttacattatttgattaagataaataaatcatgggtatcattagtatttta

SEQ ID NO: 36284 - DNA, 304 bp, Glycine max
agcttaaaaacacaagaaatgaattgaaagtctcggattcaaaaacttacccgttgaagaactaagaacggatgaagaacggtgaagaacggacgaaaaccttcacggatttgcttacggaaacatcttggaagcgttacggaagcacctcggcttggattttcttcacggaaacaatttttttcacccaaaacagctgaaatacatagccagggagctcagggatccttagaacagcccccttcagcctatttataggaaaaagggggaggaggttgccgcccagctcacccaggcgaggctg

SEQ ID NO: 36285 - DNA, 356 bp, Glycine max
tgtagggttaaagtctcacgattgtttcgttctcatgcaacaattgttaggtgtggctatacgagacgtcttgccaaacaaagtcaggttaacgataactcgcctatgctttttcttccattctatatgtagcaaagtcattgatccagtcatgtttgatgagttggaaaatgaggccgcaattatactgtgccagttggagatgtattttccccctgctttctttgacatcatgattcacttgattgtgcatctgatcagagaaatcaaatgttgtggtcctgtttatctacggcggatgtacctggttgagcgatacatgaagatcttaaaagggtatacaaagaatctatatc

SEQ ID NO: 36286 - DNA, 379 bp, Glycine max
agcttgaacatcccttgggtactctttttcttcttaatcttttcttatattgttttttactctgctatttctatttgtggccttattcatgattcgttccgttgccacaacacaaacactgaaacaaaactggcctaatgtattttcaccgaaccccacccttgtgtttagtatggtttgcgcgtaattagtacagttaaaacctttctgacttaaattgtaattctaaccttttgattcctggaatttaaaatcgatgccttttggattctgtcgaaaataaaaattatggcaaaggataattcatctaaatgaaaatctagttgattttgattatttattctaagacaatttcaaaaggatctcttgcttattctct

SEQ ID NO: 36287 - DNA, 379 bp, Glycine max
taaataggaatctgccctatggaggttttttttgttattaaaaaaaatgcataagtatataattattttacttcttatttcaattttcttgcctaaacttctaagcaattttttaaattttaagattataaatgtttgaaatctattccgttttcttaattttaatcatgatcaactataactttaagtgaaagcatttttagaataaatttaatctttgtctacaatcatatgctagaaatttataattgatatttaaaaacatcaaatttactccaaagagaatttgagaagcaatttgttgcaaatcatatatttcattactttacgcatcattaaaaaaaaaaatcacttgctgtaagctttagctgtgttatga

SEQ ID NO: 36288 - DNA, 379 bp, Glycine max
agctttagagaccatttcttatttccaccataaaccaaaagattaagagagatatatatactattatttggtaaatctagcttctctatttctccacattggatgcaatgtactacttctcacttgtaatcatctaatctaattagtttagatagttataaatgtagagtatgtaataaagcaaaataagacactacacaaaaaatgtaaatctacttactcttactagaaatttgtttttgaaatcatctaataaaaaaagctatatatatagcttgttatttaatgaatatatgatataaatatgtgaaaatacaattataattattttgagatatcttatctgccccaatgattaaacaattaactcttatgaaaa

SEQ ID NO: 36289 - DNA, 467 bp, Glycine max
  unsure (1)..(467): unsure at all n locations
ntgatgcgtcgatcgnacnagcgacgcgacactatacataactcaagcttgtatatgaggatgccacacttcactgttgttttantgantgatgcaaaagactcatgtccgtgtatctgaaaggcacactacgcagtagagagatattttagcacaaacaccaggtgtgcaacatattatgataagacatgctgtggccaggaaattactggcatttgagaagaagatgtgccatggaaaaaagaaaatgactgtgacaattgaaagagctgctgcagaacgacatcagttggcaccaaataactagtgccctacattataagcttcttgcaaaattatctaaattaataataacaatgtctcaggtatctcataatcactttataatattttttaatctatgggccgctgatggtgtccttatagttaancatatcttattaagtttctcttatattagaccattt

SEQ ID NO: 36290 - DNA, 379 bp, Glycine max
  unsure (1)..(379): unsure at all n locations
agctagcaaaccaaatgctcatcactattagaggagaaaccttcaggttgttttatataaaccttctcctctaaatcaccattaagaaaagctggtttcacatccatttgttgcaactcaaggtcaaaatgagcaactaatgccaagattatatgaagagaatctttcttagatactggagaaaaagtctctttgtaatctattccttccttttgagtaaatcccttatcaacaagtcttgccttgtatctctcaatgttgcctaatgaatcctttttggtcttaaagacccatntacatccaatagccttcgccccattaggcaactctacaaggttccaactttgttactctgcatggaactcatctcatccttcat

SEQ ID NO: 36291 - DNA, 365 bp, Glycine max
tatgctgcagacatatacaatagaccttctttatttagtagcaaaatcagccacaacaaaacaattatgtcctctccagcaacaggtacgatcccgggttgaggaatcatcccaaccttagatggtcaaatacttcacaacagcagcgacaacaacaacaacagccttatttccagaatgttgctagcccaagcagaccatacgttcctccaccaatccagcgacaacaacaacagccacagccccagaaacagcaaatagttgacgctcctccgcaaccttcccttgaagaacttgtgaggcaaatgactatgccaaacatgcagtttcaacaagagaccaaaacctcgatttagagcttaact

SEQ ID NO: 36292 - DNA, 364 bp, Glycine max
  unsure (1)..(364): unsure at all n locations
agctcgatgaattattactacataatacctgttatagatgtactaaccaactgattaatgctagtcctcatctttatcggagactgagagactttggacacgctcataaaaagacccgtggaacttggcatacgttgatatatgcagtacaagcataaaagcttctcacattatcattgactacaaaatagaacactatccgacgatataaactttaactgtcttacattttctttatcagtgttgactaaaataagataaactaacagaagaccantccttagttatcattcaatcaatgataacatctattatcatcatgctcctcaacatctttatcaagagcacgaatagttgaatgacc

SEQ ID NO: 36293 - DNA, 348 bp, Glycine max
tggcaagagctccagcagctagggaattgatgtttgtgcatggttcagccttaggcgagtgccaacgtttatcgttgaacttgtcgttgaagtcaagtccacccaaaatggcaccagtgagttcatgggggttaggtgcatctttttgaaaccatttggagaagctcgtggcgcataccacctcttcatcctttttcagttttggcaccgaaacacctctatggtgagcctgcgttggtgggttctttccaaatccaaccatgtaagatcttctatcagggtttttccctagtatgtaatccatctgtgcaaattgcaatttctccacccaattaatcaataagtcta

SEQ ID NO: 36294 - DNA, 352 bp, Glycine max
  unsure (1)..(352): unsure at all n locations
agctntgattattttaatgtgggtgaattgatcatttcattaacattgttctattctttattttgacatgcatatacttgaatgaattttgggttttatgaaaacatgagactttgataggctttcttgagaccaatgaattgttttgactagtttttcccctagttgactactttgagattgaatgattatttcctttttggtccttgcactatattgtgtaaattgttgatgtgcggaaaaaagggggaagtaatacacattgtaggttatgccagtgaataaatcataagtctttctctcaagtgaaataaaagacaaaaagaggttgataaaaagagaagacaagaga

SEQ ID NO: 36295 - DNA, 371 bp, Glycine max
tgtatttaaaaatgttttaaaaatacttttaattaatatttgaatttttattcctttattaatatatatgtgaggggtagagggtgtcacatcagggaattgagatttttcctaagtttgaggctaggaaaatacctccagaaatcaagagagtggaaaggtattgccgaataattttcttatgattcccattcattttgtctacatatttataagctcttaggctatataattctaaaagataaaaacagataacactgattaacaaaaaaataggggacaagggagcatgaaatcaacatctaacaaactccgctacctagctgtgccacctctaacaaactttccaatcacggtctactggatatatg

SEQ ID NO: 36296 - DNA, 323 bp, Glycine max
agcttatagccatttggacttaccttgaattaattccttttatagcccttttgagccttgtttccctttccttgttttgaagctcactacaagccttaagtgaaaaaccatgatattaccatatccttaaggaattttggagctttggaattgttttgggaataagtgtggggggtttttgtatcattggacaacttgttttgttggctatgcttcatgatgtattttgggccatacttgatgtacattgtatattggttaaatgttggacatgctgaatgaaatgttgtttctcaaaggccaaagagtaaaaataaaaaaat

SEQ ID NO: 36297 - DNA, 341 bp, Glycine max
taggacacttaaatctcagcttgggataaactagagcactttttgtttacccaaaaagtaatgggcaagctgaagcagctaacaaagttatactctaagaggtcaagaagtgagtcgaaaaggccaaagacaattggaccgaagagctttaagttataatgcggacttattgttgttctggtcaatcgacaacaagtgagacccctttttgattctcatacagatcaaatgcaatgataatagtatatgtcgatgaacataccttttgaaatatgaactgtatagaagaatataataagaagatgcttaatgaagcacttgatttggttgaagaaaccatc

SEQ ID NO: 36298 - DNA, 387 bp, Glycine max
  unsure (1)..(387): unsure at all n locations
agctttagaatgttgattagcggattcccttgatgatggtgaatcaggtgataatgaatcanaaaaataagtctcctcctcaagaatggacgcaactgttctgtcttgtaacagtttccttctcctctcagccctgttccttcttagtgtagcttctatttctaagtccaaaggaactaaagttcctataggagatctatgcataaacagtactaacagagcagtggttatccagttcaatttgagaagataaatataaattaaagaacaaatattcacagaaacaatcaaagaataacaaataaagattagacacctaaaaatgagctaacttcccaaataaaaagaagttccttggcaacgacaccaaaaacttgttcgcaaccg

SEQ ID NO: 36299 - DNA, 389 bp, Glycine max
gtactccaatctttcctgcttgactgcacaatcttctttaaaattctcttgatgtacctgttagaaatttctgtctgtccattggtttggaggtggtatggtgtggataccctgtgtacaaccccgtactttttaagcatggcatgcattgatttgttgcaaaaatgggttccttgatcactaacgattgctttaggtactccaaacctgcaaaacagattagatctgacaaaatctacaacaaccttagcatcaatagttctagtgggcttggcttccacccattttgaaacataatcaactgctatgagaatgttaacataaccaaaagagacaggaaaaaggcccatgaaatcttttcccctacatcataccacctacacaatacg

SEQ ID NO: 36300 - DNA, 385 bp, Glycine max
agctttacaacagattttagtaatgacccactaacctagaattaaaataacttaatgccattaacctagggaattaaaaaaaacttaatggcggagtgtaactgaaattgtggcaaccaaaagtcacccccaacagccaacaagtcagccaccatttggtctcccaaaaggctgatgcctaggttgccaattgggcccttattacaacttgaactaaacctaactaaagcccttttagttgattaacccaaaacatattttttgtcagccaactttacaaggattgggccattatttagacaaactaaacactctaaaattgagacaaagtggtgtcatttagtcctcctccatttgggccatgatacaactcacaaccttggac

SEQ ID NO: 36301 - DNA, 330 bp, Glycine max
tcctaatctctctaaaagttgagaacttggctccttgctctacttcttcgttctctgcacttcacactcactgtggtgattattctctctcaaaatctctctctgttctcttgatatttaaggtttaaaaagggctcacaaatcttgctgtcgcgcttaacgcgagtaagtggatttgagcttatcgccaatctcacattgagcctggaaagcgatagatgactcgcttagcgagttaaccttgtgctaagcgcgagcttgcaaatcatatgctcttctagatgccttcttcatgctaagcgcgctgatgcttcgcttaacccaggatgc

SEQ ID NO: 36302 - DNA, 386 bp, Glycine max
gagctttaagaaactgcaatttttaagttacttcatgtaaagcataaatgctatgaatttatctaacgagttactactgtctaagaaaacatactccctattacgagttagatttttatgtatttcatatttcgctcatttttctttcattgaaaaccatgactttttataacatagtatgaattgttatctcttatcttgaatatatatatatctttttctatagtaccaaaactactctatgattgagagcacacttgtgaatgtgatttacacgattatttttataataaggtattttctattgtgcatattatttttactttgtaattaaatttattcagtaatattcttattttgtgattcttataacattactcttatga

SEQ ID NO: 36303 - DNA, 264 bp, Glycine max
tccactcggatgaaatgaattgaatacactttggtcttgttagatgtacaaattgtgaacgtgcgacatcgttcgctagagtggcttaaataaatcaattagtatcgcctaaggccgaagacgcatctatttttgaacatgaatattaaatgaactgatgatgtttgatgaggatactctactacgtgaatcctcaaacttatgcgctatgcccgataattggatattacattctatatatatatgaaggccaacgattatgct

SEQ ID NO: 36304 - DNA, 157 bp, Glycine max
gcttaaattgaattatttcgttcagaaactgctggtaatcgattaccatataagtgtaatcgattacacagtgcaaattttgaattcaaattttaatagctgtcgcttaccaacttctcactattcttccgcttctcctcatacccattcgcccaat

SEQ ID NO: 36305 - DNA, 333 bp, Glycine max
  unsure (1)..(333): unsure at all n locations
ttggaggtggcggaccatacctatgtgggtgttttctcaatacatccgagagtgtgtaatgcctccatgatggcggctcagattatgttatgggatggatatgaacccaggatgggtgtgggccgaaatagtgatggcatggagactttgctggaagttgccgaagatcatggaacgttcaggttgggttactagcctaccaatactgactagagaaaaattactctggagagaaaataaaagttcttggctcgtcttcaagggcgtgaaccgtgggtatagagggtccctatctcccacattaacatgagcttcangagtgcaagatcgatg

SEQ ID NO: 36306 - DNA, 418 bp, Glycine max
tatacagtagagctgcaggcgtgccagcctagaacagaaacttaattccttaattccttgttaaggctggttgcaggagctgtggcatcctttccaccaccatattttgacacaaattcatctttgacacgctctaaaaaagccatgggtaactgggtttcaattgattcatctgcaacaacacaatatgcttgataatggcagaaggtcgaaatttcataacactaccaaactcaaaaaaaatatacggttcacctctacaaaagcagtatcagcagataaaattataacttaaaagaaaaccaatgaatacttagttatcaagcttaaatagcagcactttgctgcaagcaccataaaagctatagcaagatgatgaatagtggaatgaccaccattctgaagattctagatacaa

SEQ ID NO: 36307 - DNA, 370 bp, Glycine max
tacctattatatggcagtctctgctgttgaacaactatcaagtcatggcttcgaagacgtcaatataaagaggcagctgcgcatctggaggtatccaatctatctttacagcattttcgtataactgttgattactgaatttgtgtggtgtgcgcgcatgtgtgttatggtaaaacgaatatctattactgctttaattattaataatgcatggcttaatgcttgttaatgcaatgcgcgcattcatgtgattaactgataatatttataattattgtgttatttcttcggagaaaagtcttctaaacatgctacaaagagaaaacacttgctcctaagctcactatatgctctagaggattacttcaca

SEQ ID NO: 36308 - DNA, 381 bp, Glycine max
agcttttgaattatcaatattcaaacttgcttctacacccataattcttgcacctaattggaaatatggttttgagctcatatgttacgcaagtgattatgtagttggtgttgtcttgggacaaaaaaaagaagacaaaatttttcatgctatacattatgctagtaaagtccttaatgagcatcaagtgaattatgcaacaaccaaaaatgaattactagctataatctatgcattggaaaaatttagatcttatctcatttgctctaaagtggttgtttatacagattatgcaactattaagtatctcctatctaagcccgattccaaaccaaggcttattaggtggatacttatgttgtaagaatttgatcttgaaat

SEQ ID NO: 36309 - DNA, 345 bp, Glycine max
ttaacatccagcaacaacaatagtagagatttatataagtttgatggtctattgaaatgggttttgttctattgtccaaatttccctaatcggtatacaagtagtagagagaaatggaagtttgaaggtctatttaaatggttgtaagttgtaacatttatttagggagaacattaggtttatgaattatggtcttcttcgtcatgcaatgaaacccaatcttgatacacaatagacccaaggaatgaagcctagatttctgctattttatgatttctttaattttctctacaacactaacattttctattgtagacagcaagtaaaatcccacttatcaaacaa

SEQ ID NO: 36310 - DNA, 380 bp, Glycine max
agcttgcctaagcaattttggtcagaggcaattaatattgcatgttatttggtgaacatatctccttctacaactattaattgcaagacactagaggaaatgtggtcaggctctaaaataaattattcaattctgtgtgtatttgggtgtctagcttatactcatgttaataaaggaaaatcggagccaagagccaagaaatgcacatttttgggttatcaagatggtgtaaaagggtacaggctataggaccctaaggaatcaaagctcttgattggtagagatgtgatctttgatgagacaatcatacttaatccaagaccacatgaggaccataataataaatttgaaggtcatggtgttcgcaaaaaggtggagca

SEQ ID NO: 36311 - DNA, 372 bp, Glycine max
ttgctatgatgtaggtgttactgttaaggcgtgtggcggctgttaaggatagcaatatagttgatacacttccatttagcatactgtcatctcattgagtgttgcatccccaccaacaaagatttccttactatcatcgtttgaggtatgtatgtgattctcacacttatgtgcttaagtattataggcaatggttgacatgttactattctttaataatacattgtaattcattgagtgagccatagctccccgtttgagattgaatacaacgattaatacggacagcttggattaattgctgtattcaatcttgaattgtctgtttggatagcttgggaagacaaactgtttttacttcattttgactta

SEQ ID NO: 36312 - DNA, 373 bp, Glycine max
agcttgtagaggaagttaatgagcaaaaaagatataagaagcatgaatgaattagctcacaaagttggtcattatagtttattatataattagttacaagagtaactaactcacaactaactaaactaactctagttacatagagattaaccaattaaccaattaaccaactaagctaactctagttacataataatccatgctaagaacaacaacacaaattaagacaattattatcttttgtgatcatgtacttattttgtaaaagcatgatgggatttctatgagaagaagcacgccttggattattatcttttctatttttttagaaatacaattttggttcaataaaatttgttcaattctcattcac

SEQ ID NO: 36313 - DNA, 173 bp, Glycine max
ccccattgagaaacctttattcaaacctttcgaagctagtgagagggctgacacaaaaattagggaacttagagaaactacatgcttaattgaaggcgtatgtgacgaccatagtgaattactaaacaagattggcagttcacataatgtcattcccgatacccccccaagcc

SEQ ID NO: 36314 - DNA, 360 bp, Glycine max
agcttcaacattcaatttctatcgtttcgagatatgacgggactcaatcagacatcccgagtaaaagttattgtcgattgaaatggctcagagcttcaacattcaattttgaggttcttgatatattgcgggactcaatcagacatccgaggaaaacgttattgtcgtttgaattggctcggagcttcaacattccatttcgagcgtcccgaaatattacgggactcaatcatacatccgactaaaatgttattgtcgcttgaattggctcatagcttcaacattcaatttcgagggtctcgatatattacgggactcattcagacatccgagtaaaaacttattgtcgtttgaatttgc

SEQ ID NO: 36315 - DNA, 241 bp, Glycine max
ttgagccagttcatacgacagtaactttcttctctgatgactgattgaggcccgtggtatatctagaccgtgcaaattgaatgttgaatctctgagccaattccaacgacagtaacggggctactctaatggtctgacttgggtctcgtcatgtactcgagacgcatccacaatgaatgttgaagctccgagccaatccgaacgacactgactctatactaagatgtctggttgtacccct

SEQ ID NO: 36316 - DNA, 138 bp, Glycine max
agccgcctgcagctgcagctgatagtcctttatcaggcacatgaagtgagcgcggtacatacagcctgattcatggacaatgtcgcctatgcaacattttcatgggattgcatgaagaaatctgcgcattcccaggta

SEQ ID NO: 36317 - DNA, 340 bp, Glycine max
tgggtttgggcaatagcaccctatctgacgttcccaaggtctcctgacccccgcgacatatcttcaggtaccactctgtggtcaacgaataaaagtatgaagactgactcttccacactttctcacttcaagcttgtaggattatggggtacccgtcatatgtggtactaggtgtcgatcgggcaatggtgcaagtcgactctccacatccacaaatcacacataaattcaccatccctagttgcccacctgtaactgagctcacgtactcccacgtgagccttatacttgttcctctcaacaccgggtgcgcatcaatccatccaagcttgcacaacat

SEQ ID NO: 36318 - DNA, 364 bp, Glycine max
tagcttcaaccattgtgttatggaccatttcaagtgctagaaagaatcaatgacaatgcttacatatacgagctgcccggggagtatactgtaagatccaccttcaatgtctatgatttatctctttatgatgcagatggagaatccgatttgaggacccatccttctcaagagggagagaatgatgaggacatgttcaagagcacgggcaaggatccactatgaggacttggaggacctatgacaagggctagagcaaggaaagcccatgaatctcttaaacgagtgctgtccatactatttgaatacaagcccaagattcaaggagaacagtccaatgttgtgagtagtatcatggcccaaa

SEQ ID NO: 36319 - DNA, 298 bp, Glycine max
tctcccctattgtgctataaatagggggagtattgaagaggaaaagggttcagccctttatgcacttctctctctctcgaatttgctgaggaaaattatttccgtgaagaaaatccaagctgaggcgcttccgtaacgtttgcgtaacgtttccgtgagtaattacgcgaagattctcgaccggtcttcaagattcatcgttcgttcttcggttttttcagtcttcaacggggaagtacctcaaaccaagcttttcaattcattctatgtaccccgggtggtccacattttgttacat

SEQ ID NO: 36320 - DNA, 384 bp, Glycine max
tagcttatacaacgtgctattatcttttggaaataaaggaatacaatattatttaactgtttcttgttttaaaaaattgttatcattaataattagaggatatcaataaatgatctttgtattaattaagtaaataccccttcagtctatgcattggttaaggctgttgcacaggttaataaatactatttaatttatacaaaagtgatttaactatccttaattatttattacttctttctgactttaatataagacactttgagaataattacacaaaccaataaatagttaattttatgatttttttaaatgttatcaatataccaattttaccttattactaatcattaacttgtcaagtattatgtatccctatcaata

SEQ ID NO: 36321 - DNA, 141 bp, Glycine max
atgatatgtatctttttaacacctggagatagctatcattcattcatgttacccttccgcggcggtgctgtgtaatggctagcatgggtgtcatctgcgctcgaatccaagcagatgtaaatatggagatccacaggaata

SEQ ID NO: 36322 - DNA, 371 bp, Glycine max
agctttccctttatgaacaaatacccgtcagccaaatagaacccatcttaagccttttgcccataactctcataaataggagagaaatgttcatctgaagtgttataccctaatttcgtcaggggactgtcattcattgattctcagcttgcttgggtgagctgcaggtccaccaaatgccatttttggatataaataggcgtgaagggggctgagtaaagggttccaaggttcatcattgaaggacattgagagaattgagggagaagaataagaaagaagagaaaatgatgccgaggcgctactgaatcacgaccgtgatcgacccctacattgttccttgttcagtgttcttcgtgtggccgccgatt

SEQ ID NO: 36323 - DNA, 283 bp, Glycine max
tctatggaggctggatctttgagcttcaattaggtccttcaatggtgatttttagccatggaattgcagcgaaagataaatgagaagaggttagaggagacgtcatccacttgagaataagtcatggtaggagaatcttcaccacctagagagtgacttggatgagaagcttaacgagaaagcttcaatggaggaagagaataccccatagatagggggttgatgggggcttcatcaggttttgtcctcaaactaagcttttcgtgtgcgtctatgtacccgt

SEQ ID NO: 36324 - DNA, 383 bp, Glycine max
agcttgtgtcactattcactgtgatagtcaaagtgtcattcacttagcaaatcaccaaatgtaccatgagaggacaaagcacatagatgtgaaactacacttcatcagagatgtgattgaatctgagaaggtgaaggtggagaaagtttcaacagaagaaaacccggctgatatgttcacaaagtccctctctagtgtcaagttcaagcactgcttggacttgatcaatttcgaagatgcctaaagcagattggtagaagtgcagccctgaatcacaaggtagacacttgctgatttggagtcaaggttgagatttttggtgtgtgactcaaaatcacaaatggcacaagtgagaaggctttaaagtggtgttgtcataactg

SEQ ID NO: 36325 - DNA, 358 bp, Glycine max
tcagggatttcaaactccgcctgacaaattaaaaattagattttattgtaagtcaattataaattttggctaataaagaaaatcagagaagcaaactaaaatacctgaatatcctcccaaatcaaatccttctgagcaacagggaattccttccaggtctcatatatggcgtcgaccttatcacgagcgacaaccccgaatatcttcttaatttcttcttgtagggaccattggccttgtcggtcgcaggatcgacgttgaccattggtctctctgccccaagtggtctagtggccaaggatagtagtcgtgtcgctttacgtgtccacttctggggggacggagacattgatgctac

SEQ ID NO: 36326 - DNA, 303 bp, Glycine max
gatttagggcttgcaaaagaatgattgaataagtgttcgagattgaatgaatgaatgaataagtgtattgaaaagcaaatcaaagccttgctattatagactcttcatgtctggtcaagacatctatttagaagagttataacttttagaaaaacttataaccattttgaaaaagtcaaaaaccttttgaagagttacatcttttgatttatgcagaaacaaacactggtaatcgattaccaaatcagtgtgattcgatacacaaagtctttatgttaaaggatgtgactcttcacatttgaa

SEQ ID NO: 36327 - DNA, 343 bp, Glycine max
tgtctcagcgtttatgcgagacggagacctacatgctagctatcatcgccaaggtccaagaagagttaggtctatccaccacccacgagcatagaatcgcggacgaatatgctcaagtatacgcggaaaaataggctacaggaagggtgatcgactctttacaccaagaggcgaccatgtggatggatcgggttgctcttaccttgaacgggagtcaagaactgccccgcttgttagccaagggctaagcgagggcagacacctactccggacccgaatagattcatgggcttctcggctattgggagcctatgagagacttgatgggccacattattaaaaa

SEQ ID NO: 36328 - DNA, 295 bp, Glycine max
ttactggcagggttgctcgttgcatcttctgctgataaaaaacatgatcatattttgtactccaatcaaaatgttttgtctttttcacgaggtacatgactggcttgcccttttcggcaattcctatcaaataccttgacatagaggctattcaatcagacaacctgtatgtttccttcaagtttcttcctatctaagatccgaacacttaagtgttgatatgttgccttgtcatttttttaatccgaatgggattaccttgtaacagtatgttgccgattcaattacgaaagtt

SEQ ID NO: 36329 - DNA, 364 bp, Glycine max
caacaagctttttttatggtttcagcttgactttttttatctttttaaaaaacttgagcttgacctttatagtaaacaagccaggccaagtcgaaggtcctcgacaagctgctcgactcatttccacccctaactccaatgcacaagaaattaagcattaagcaatgcttattatgatttgaatagtccacgccccaaaaaaacattattatttgaacatgccccaaattaaaaatggaggttggttcaaatatatacttttttttagaaggttcagatacaaacttttatattatatgcaatttcaaaatattaaggtgttgcaactgtgttactggggttgatgattctttgcctttttggg

SEQ ID NO: 36330 - DNA, 365 bp, Glycine max
  unsure (1)..(365): unsure at all n locations
agctgtgatctatcaccactgcagccaccatcatcttagntttctattatttaatattacgagtactttgctttctagccgtgtatttggctatattatgacatttggatgatttagtatttctttatttgcattgtttgaatgaacaattatgaattatattataagactatgtggcttttatatatttgatctattcatgtttcttgcttcatggattggtttatattcttcaatgtatgtcctgggaatgatgaatagtataggtttgtcttatacttgttacacactttggctttttgttgatgccaaagggggagagaaataacgaataaatcaagaactcacacaagtaattaacttat

SEQ ID NO: 36331 - DNA, 392 bp, Glycine max
  unsure (1)..(392): unsure at all n locations
tcttagtttcagatgatgcagatgggtttgtagctacctcatgcactcctctaatgactatggcatcatttttggcactaaactgctgggagttggaggccatcttctcaattaaatttctggcttcagcaggagtcatgtctccaagggctccaccactggcagcatctatcatacttctctccatattactgagtccttcataaaaatattggagaagaagctgttctgaaatctgatggtgggggcaactggcacatagtttcttaaatctctcccagtactcatacaggctctctccactgagttgtctaatacctgagatatccttcctgatggctgtggtcctggaaacanggaaanatttttctaagaatactctcttaagtcat

SEQ ID NO: 36332 - DNA, 380 bp, Glycine max
  unsure (1)..(380): unsure at all n locations
agcttaacaagagatttcaacaccttgaattcttgcaaacaacttaccaaaaactcacatgaatgtgaatctcatgatctcacataaagtcaaatctaatcataaaataacatgatctcaaccacgtctcatatcatcattaagaaatcaaccaacacaacccaagatattcattaatcaacataattatctcatcatcaatataatattctcaacaacaacatgataaattagcaatagtaaaatgatagaccaaaccatgaataataaatatgcatcactataccattgtaacaactttatacctcatgtttaaggttatcaaaacatcccataagtcttgggttactatctgcttcattntctattatgtggctatg

SEQ ID NO: 36333 - DNA, 379 bp, Glycine max
tcctgtagcataaaacgaaaatgcacaatataccatgtaacatcctggaaatttctacccggaatttttgaaaacgatgtattttgaatgattatatatatatataagtattcttcagtgtacatgcatatatatgttcttggtagaaataggagtagtgggggcaagatacgcgggttaggctaattaaggaagagaaatccataactaggaggttatgggttaattcataagtaattagtctaaaaatcatcgttttgcgtgcgacttaaaatttaacgaaaccaacctctgaaccacgctcggggttctattctgagagttttgatatatatatggcttgctttcgaaaactggccccgatggacgcagagaaacg

SEQ ID NO: 36334 - DNA, 378 bp, Glycine max
agcttagaaatgaaggcatcttgttgtggaggcctctggtaatcgattaccagtctgtgtaatcgattacacagaggaatgggtcactggtaatcgattaccaggtatgtgtaatcgattacacagtgcctttttcaggttttcatgtcctgaagctatgtgattcgagtttagcctctggtaatcgattaccaaggctgtgtaatctattaccagggatgaaaagccttgagataccccttttacttgcatgtagtggtcatgagacgcattgtgttgcggcgtagttagattctcgtgaaagagtctacccctttcttttctttcttgtagatcgtgatggcggcgcaactaattcatgatcgagtggagatggag

SEQ ID NO: 36335 - DNA, 172 bp, Glycine max
tctcgattgcctaagcgtggaccctctatgttcattcctccattcaccacttttttgggagccccacgtatgtgggcgcctatcgcgggtcaagcatcttgcgacgttcacatccgatgccgacaaatgtgaacgcctagctatacactgcaatgatgcatgtccccacttt

SEQ ID NO: 36336 - DNA, 387 bp, Glycine max
catgcaagcttattgttgtttctctccccatttgaaaccaacatttttcttgagcacttcattgagaggtgctgccaatgcgctaaaatccttcacaaatcgtctataaaaacttgctaagccatgaaaactcctcacctcggtcacagacttaggtgtaggccatttttgaatagccctaaccttctcctgatcaacttgcactccttttgaactcacaacaaaaccaagaaacacaacatggttagtacaaaagatgcatttttcaagattggcatacaattgttcttttctaagcacagtcaagacagatattaaatgatcaatatgccaatcaagtgaagtgctatagataagaatatcatcaaagtacaccacaacaaactt

SEQ ID NO: 36337 - DNA, 442 bp, Glycine max
  unsure (1)..(442): unsure at all n locations
ntgatgagtccatcgaccaccgacgganantataccaacctccagctttgagcatattcaaacgacagatacttttttgtctgcagtctaatcgtgtcccgcaatatatctagaatctccaaatccagaccacatgctgtttcaaaaataaaatgacgaaaaccttttacaccgatgtgctaatggatccgaaattaatatttttacgctcgcatttgaagacatgaattgcgcacccccctcaaacacattaacttttgtactagctgcgcgattgagtgcccaggttcatcgagaatctccgaattctaaaaaggacctaatacaaaaattcaacttacatgactttttacacctgttatcgcatttgaatccctcatctgtgcggaagctttcaatgcaatacagactttgtaacctttcaaagaacaactttttttcg

SEQ ID NO: 36338 - DNA, 354 bp, Glycine max
agcttggagaaaagcttgaatatgttttttcttttacatgtcgaactcccttgtgtggcatttgtattggctgttatattgtatgttgcatctcagtccatatcatatcttttgtgcatcattcatcatcatgagtaagtgagaagaaaattttctaagttagaaaagtttcttcataaggaaaagttgcatctactccaatggcaacgtcaacctaccttgacttgatgagaaaggtaaatcagtggatgactcaagatatagaggtatgtttggatcacttctctacctaactgcaagtataccggatatcaagctaagtgtttgctattgtgcaagatatcacgccaatcc

SEQ ID NO: 36339 - DNA, 315 bp, Glycine max
tgagatgaggaagtgttgaagggtgaaacttcctgcttttattgatgaccacagagtggtacctggagatatgtcgcgggggtcaggagaccttggggacatcaggtggggtgctattgcccaaaaccaagcttgaccaatcccgacccaacccgggcatagtcgctcagtgagaccctgtgatgtacctaaacaggcgagctcctggcagtccacagattaaaggaacaaagaccacaaagcaaggaggcttgtgtggtggctggccagctgagaatcttgggtgatatatgggttatggcctctggtaatcga

SEQ ID NO: 36340 - DNA, 385 bp, Glycine max
agctagataattgcctacctttgaagacagcgaacacacccattatgaaatcgccaattgtccccctaatctgcaaattataggtagaataagcattcgctagatgcacacgcgaggataaaagaacccaatagaagtatatagtattgaatgtataaatgcattattctaaaaaagcagaatttcaaactactgaatacagacaggagattggttagctccaaacggcattaaaccaatccagatcatgcagtcacatatagtatagttcacaaaatgcaaagtcaaaattattcacatttgattagattctggagactatatcaactctttgaatgctgaacatgatacaaattcctgtgcccactcacaagatactgagaga

SEQ ID NO: 36341 - DNA, 228 bp, Glycine max
aattgtcatatggaaattagaaaatgtacctgtctataagctctgcattgtccagagagttgatgggggtgacccatacttgcatttcaaggtatagaataaagtgactcacctaaacctattttgagtgcggggcaatcataactctgcttaaaagttccagatggctgttgtttcagattctgcaccattagagaaagagttcatacagcgggttagataacatga

SEQ ID NO: 36342 - DNA, 377 bp, Glycine max
agcttgggattgcatttgggtatctattttaactttcctatgttgtctctacatacataaaacagccccaccatcccaattttgcaaaatcatattcatacatcattggggcatttcaccgagcacttgatgggcgcatgtttggacataaattgcaagagaatgggggcaatgtggcatgccccattgcttcagaatacaacataggcctaaggccttctcattcaaatccccaactccaaaaaatcaagcataaaaacaaaccaaaactgccccacaaatataatcacattctcacaatttggagcaccaaaagatgaagaaaatacaccaatgggaagctaaaacatcaaggattgaatacttacatgttggag

SEQ ID NO: 36343 - DNA, 379 bp, Glycine max
  unsure (1)..(379): unsure at all n locations
ntggagtttccaagtgccaattcgtcctcttctttagtccagtcttcttctggcttcaattcatcagtgggctttccttctgtgtccagcatcttgggatgttcccagcctttgatgacagctttccaggttctgctatccagtgatttgaggaaggccaccattattgctttccagtattcatagttgcttccatcaagaattggtggtctgttcactggtcctccttctttctccatgttcatcagaatttatctccccagatctcactctgtgatttcgagtgttggctctgataccaattgaaattctgataccacgggacaaatgtcgtacacgatgtcacgacatcacgcttagaacatgcagattgtatgtg

SEQ ID NO: 36344 - DNA, 289 bp, Glycine max
agcatgaccttctgatcctatgaggctgacccttgcggagcccgtctagagcgaaattgacctctgcaacgtgctccatcatctctccgaactcctgcgcctccatcagcgtggacgtcgccggaatcccctccgccggcgcccgcttcgtcctcttcgactaccttgctccgcctgcgccggtgccgtttccgaagtcgccgatctccgaatacaataaggaccaatgctgtgaggaccagtcctgtgaggaaaacacgaagccgcatagagggtcctttttctcctg

SEQ ID NO: 36345 - DNA, 244 bp, Glycine max
tgtcagggtgaggaggggaatcgcattactgataatgcatctattcctcaaagtgggtcattcaaatgaaaggcctgtgggtagaaacgattgaggatttacgcgtgctcccacttttgatatctaccaaggactaccataacatattcctgtgtcacatctacttttgttaaggcttattttactacactcacatgggaaaaactaccttcacggggcaaataggcacagctgatacaactgg

SEQ ID NO: 36346 - DNA, 653 bp, Glycine max
  unsure (1)..(653): unsure at all n locations
tgcnnnntttgggttgccctgcactcgncgatctctanagtcgacctgcanggcatgcagctgngatanggtcagactatggaganatgcctnggagcgatgatatatgcaaccacccttcagcacatagacttgaataaagaatacagtactttntatcttagtcttggaaccaactgtgattaactaanagccactcaggcacccttgcaatagaaaggccaatccacacgttgcctttcgttggttctttcagtgcattcatgcggaggaaactaacaaatatgatcagaggctgtctcctcttattcaagcgccttgtaaaatagcacccactgtacacttagctcttatatntctgtgtacaggatcaagttcatttttaccccactnttgcatctaactggtggctaacctcgcccataaactggcgttcttgatatgacataccatctagctcaatgaaaattgataatcagaatcgtgagtagtgggccttacggtacaatatgatttttctttctttgtatacagacgccctattagacacgtcactcatcagatagcaatgcgaataattgctactctctctcttttattgtcgggtgtggactccacaaaataagaaaacacattgttgcttttaatgaaag

SEQ ID NO: 36347 - DNA, 369 bp, Glycine max
  unsure (1)..(369): unsure at all n locations
tcattcttatttcgacattgcttaccgctgcacggatcttcttggaaagatgatccagtcgtgattatgtcatcagaaaatgttccttccagaatcagcatgtaagttctcctagcttcattgtggaattgaatacactnttctttttaattttgttgctggggatttattttctttcctttcagtacaatttcgaaaattggtcggtaagatttatcataatcagttgtggctgccttatataatcatcactntggtacatgtaataagaaagaaanaatgcatcatgtataagtttctgcagtacatgcaagaaataaatgcattagcgacaaaatttagtgacgaaaattgcttaatgtattacat

SEQ ID NO: 36348 - DNA, 330 bp, Glycine max
  unsure (1)..(330): unsure at all n locations
gatgatnggagacgacacttcaatgagaagatgagtcaagaagaagctcaccatcatangaagccatggataacagcctgaatgcangagaagatgagtggacagagagggagagaacgagcacgannatttatgcctcanatgatgtataaactttgaagtgtaattcttaaatgatcaaagctgataaaatgcacacacatggnctctattatagcctaagtgtcacacaaattgagggaattgaattctttaaattacttgattgtgggccaatttggatcacaatntactaatatgatagtgatttagtatgtcactctatcagac

SEQ ID NO: 36349 - DNA, 422 bp, Glycine max
  unsure (1)..(422): unsure at all n locations
atggtacatgattgngacttgtatgattcatattgngcaaaattggatgagggaaagagtggttttcgaaatctgcactttatgcagaattttgctgttggaatgtgcagcagaattttgcataagtgcagaaaaatgctatgtatttgctggttgtggaaagagtagtacagaatgagttctggatgtttgttagcagatcccaacggtcaaaatgtagacttatgtactagagacttccagtaacattttcgagtcgatccaacggttagcgaattggaatgaaggaaatgttactacggtatttgtatgtgaaaagctgtgattttgagttgtngtttgggcagaagtttctgcctttgctctgttttgcttggtnntgtagtccatgatgattggatgtggaattacctgcatgttgt

SEQ ID NO: 36350 - DNA, 346 bp, Glycine max
  unsure (1)..(346): unsure at all n locations
atataattgttccttccaacaacactccactgttcanatataaactacaatatcatcaactcaacacaataggaacatggaanaccatagatgtataagcaagtctgattcaacanaagccaggagcaacagaaagcatattagacaacananagtccaccttgatgttcagcatagtgtccatgcaagtctcaatccagcttcatcccacactgaagatgattataaccaaccaaagacaccacctcatagtgttcatgcaactggcgatcgcgctccacacgatgctgaagatcattgtgcgttatcaaagctaactattntatatctctacattcagctcata

SEQ ID NO: 36351 - DNA, 523 bp, Glycine max
  unsure (1)..(523): unsure at all n locations
ttctaccctctaaccctntagaacacttaatgttgtctcntaatttgtttacaacaggaccaactactttcaacccctcttgaacaataaggtgtaaaatctgagcacaacatcggatatgagaaaattcaccaccacttactaaaccattattatgcacaagaagtctntccttcaaatagtcttgcatcttatcattagaagaagcattatccaaaattaatgaaaaaaaattccactaaatcacccattcttaaaaaaaaaccatatataattttagccatctcatgtctggagtttggagaaggaaaatgagaaaaattaagcattttactattcagcttccaatttacatcaacataatgtgtagttaatgaaaaacaagatgtccatccatcagatgtcaagtctattctactagtgactctagacaacatgcatntcanntttttcttntcaaaatcatacaaatcgttcatatttaatggagcaacacgcccagagggtaccttaacatctggat

SEQ ID NO: 36352 - DNA, 340 bp, Glycine max
  unsure (1)..(340): unsure at all n locations
ttttctttaccttctcttccattggtgtttcttcatttttctccatgtatctcctcacatgtcttgttctanatgttgtaacatgattctttagagcttccaccgattaaactcgctatagaagttagatttgattctctatgcgtcannattcttgctcttgctcttgaaccatgaattgtgttgagtctaagttcctctgacgtttgtcttggtatctttcgtggctgaatcctcacaccatacattcttacananatattagagtagaagaacacctcananatctagagtgacttgttcacctattgtagttctgtcatagaagtcatgtctagtc

SEQ ID NO: 36353 - DNA, 361 bp, Glycine max
  unsure (1)..(361): unsure at all n locations
aactatttccgctcctgagtatgacagtcaccgctttatgagcgctgtacaccagcagcgcttcgaggccatcaagggatggtcgtttctccgggagcgatgcgtccagctcagggacgacgagtatactgatttccaggaggagataaggcgccggcggtggacatcactggttactcccatggccaagttcgatccagaaatagtcctcgaattttatgccaatgcttggccaacagaggagggcgtgcgtgacatgaggtcctgngtaaggggtcagtagatcccgtttgatgccgatgctatcggccagctcctgngatatccgttattgctggaagagggtcaagagtgcgagtat

SEQ ID NO: 36354 - DNA, 394 bp, Glycine max
  unsure (1)..(394): unsure at all n locations
gatctatcacgacaccaattatcacgccatattagtgcactctcatcatattccatggagagattgtctntatcccacaacatagtacaacgccatactccagaatcaatntgtagccttctagaccttacttacttagatctatcatcaaacaatgtaagtggatctgtcttattcatcgtctctcaagcttaaaatttggaagacttccctttccaaatgatcagtatactaatttcnatccatgttatatagtttccattatcagttgactatctctagggttactgatttcaaatattggaaagccaagttgcatcctctttgccacacaactaaggagatgcacatggtgctaaatctttctgatgactcttataccatgacatcatga

SEQ ID NO: 36355 - DNA, 310 bp, Glycine max
  unsure (1)..(310): unsure at all n locations
cacagaactgtacatgctcacaagtcctaaagtcaaagaagaatgcatgtntccatcatcaataaaagcatattccaccatgtatcggctataggcatcttgaacaacgttcttcatggcttcaaatatttttatgagggctcttggtattgngccactaaagttgttgaaagagacatcaaagatgactaaactggngaatccacatgctnggtctttaaaccggccatgtgaccgtacaactntgttgttggctcgcaaaaccaatactatcaattctggtagagttgaagccgatggggagacacat

SEQ ID NO: 36356 - DNA, 620 bp, Glycine max
  unsure (1)..(620): unsure at all n locations
ccttgactcattgtgagaatgtcaatccttacnctcggaagcanaaaagaatagaagggatatttccaatcaaagaaaagagaatgagaatttccaatgaaagatgaagaaagaatagaaaggacattcccaatcaaagagtgggagaaagatatagacaagatagaatatttcaaccaaagaatgggagatagtataaagggaaggaagctcctggtcaaagacaccagagaggtctctggaccatataatatctgaacagtacagatatgtcaccanatgaacaanaaggaaggaaaggaaaccacgacctataatggtcttctccttttaataccaaccaanatcccgtgcgctagcgactctttnttctcgccccgcactanaaaaaannaaaaaacagaaaaaggaatagccaggagaatcantagccatacacacacantagccgtaagagataccacccaaagacacgttccnanggaagccctattgaccatgatacncatgtattnttggttgatagaaatatctganagcaagcatacatattattgtcngaatangatgaaacactactgtgcagagtgaacctctgatggattctctatattgtcact

SEQ ID NO: 36357 - DNA, 584 bp, Glycine max
  unsure (1)..(584): unsure at all n locations
agagattgacnccccttgagnaatgcatagccattcgattangcttcactatcgtntactcaagctctgagggtggaggatagacgaacagtgctaggctatcaaatcgttggcaccagactcgattgtggacgacgcatgattagctgctcgcaataaattcatgggtctccaaataagatatgagggtggaggatagacgaacaatgctaggcaatcaattcgtggtgctccagactcgatggtggaggacgcatgaaccgaactaggaaatctattcatgggacttccaataagatctganggtggatgatagacgaacagtgctacgcattcaattctgtgggctccagactcgatggtgtgggactcattgaatcgaactatgatatcaattcatgatagttcgaataantattgagggtggaggatagaccaacactgctttgctacaatatgtttggtctaaactgattgtgatgaccccccatctatctagcaaccaattataggactctaataaaattgatggtgaggtatccaacatccatgcattaatcttgtgctccgacttatcgtgcgtc

SEQ ID NO: 36358 - DNA, 303 bp, Glycine max
  unsure (1)..(303): unsure at all n locations
gtcgtatccagtcaaggtctgagagaccatacaagtttnctaacgatntctaattatgtgggccattaagtctatcatatgctgacaatagccgagaagcccatgaatctcttcgggggtggagtaggtgtctgccatcgccttggccttggctaacaagcanggaagttcttgactcccgttcaaggtaagagcacaccggtccatccacanttgtgcctcttggtgtaaagagtctatcaccctttcctctagcctcttttccgcatatactngagcatactcatctgcgattctatgctc

SEQ ID NO: 36359 - DNA, 510 bp, Glycine max
  unsure (1)..(510): unsure at all n locations
tactatatganaagataaaatgatacattggccaaaaagtattccttggaaatgatgaagatgttgcctntgtgcaattntttaaagctcgccccaggcatttgtttaaacatgagcttgaagtgctcaaacacaagtttgggcgcacgactctcgatggccatgccatacaaacattctatagattgcagtagtattgctttggcttggaacctaaaaagaagccacctattggttcttatcatcattaaattgagtgttgttatcagactntgaaccacttcacttctgcttcactcaagaaactcccttccatgatctattcatggcaatgggatttctatgctacgtctaatcacaccttctcttttatgatgatattttcattctctcgcttcttcttcacccatcatgtagaacccatcattgaagaggttgacttagacactgatgctatgnttggctcatggttattcagtgtatgacctccacccctttgtgctatgttac

SEQ ID NO: 36360 - DNA, 310 bp, Glycine max
  unsure (1)..(310): unsure at all n locations
gcctgtatggttcacctcaaattccgttgtcatatgctanacttgatcccatatccactcaataattcaatggtagccataaccccaaccaagggtcctcaacctccattcttctgaagatacgactcgaacgcaacgtgtgcttatcgtggaggagccctgtggcattccatagagcattgtatgaccncgaagcatatagcgtgaagtctaattgatacgggctagctgagatatgatgagaatcgcttcgtgaatcataacattgacaagcaacaccatacatggngcaattctggaagctcgtgta

SEQ ID NO: 36361 - DNA, 358 bp, Glycine max
gcttctatgaagtgatattgagcttaataatgtccttcaatgtgtgatttcatctatagagttgcagcggaagataaaggataagaggtgagagatgacgccatccactatagaataagccatggaaggagaagcttccccaccaagagaatgtcttggataagaagcttatagaggaagcttcaatggaggaagagaatgagagagaggggggggggggcatggaaattaatggagattagggagagaagttgaacttttatgtgtgtcttactagtctctcattcattaaagttatgacaagtgttacacatacttctatttatagcctagcacatgggaagcttccttgagaata

SEQ ID NO: 36362 - DNA, 701 bp, Glycine max
  unsure (1)..(701): unsure at all n locations
acccnacagtggcgctacttcatcttcttacccnccctttttttttnnnnnnnnnnnnnnnnnnnncaatgtggatgnttgctatgcatcgacntcgaccagcgatctcagagtcgactgcagcatcnagcttatatcgacgctcatatcgggattatactncttcttatatggcatactcactagtggatgcagcactctctcacctgttcttcttcttcttgcactgcatcaacatggtggaaagtcaccatatgaggacctcattgaaggtcatagatacactctgcatcagagcctgacaagcaagctctcatcacgtgtgatcagaagacatgagacttgagtaggcgctgcttcaacctncattaaatatctatctgtcgcttgtctcccatagatgatcactcatcctctccatgctcaacaacatgtgtagttagatgtccttacatgaattgtacatcctcacctgacagcttgctcagaaactagattggatctctatggtgcaactcttgactagatctcaccacgagagtgccagatatgtcctcgacttccnctgtcattgagagctgcaccaaccattactctacacctataactgacaccaccgaaatgtaggagagtaactttgacttcgcaaaacatgtagcataacaaactacatctatggccgatttttcttgtcttctacg

SEQ ID NO: 36363 - DNA, 321 bp, Glycine max
  unsure (1)..(321): unsure at all n locations
tctatggaggctggatctntgagcttcaatgatgtcctctaatggtgattntccaccatggagatgcagcggaagacacaggagaagaggtgagaggaggtgccatccactatggaataagccatggaagaaggagcttcaccaccaagatgagccttggtaagaagctnggaaggatgcttcaatggaggaacagaaagagggagagaaagagagaggggggagcacgacattgagtgaagatnaagggagagaagttgaactttgagttgtgtctcacaagactctcattcatcaaagatacaacaagtgntacacatg

SEQ ID NO: 36364 - DNA, 770 bp, Glycine max
  unsure (1)..(770): unsure at all n locations
accgcactaggtgctcgcgacaannnacttcnnttcacttaaatttcnntgcncnnnannnntcnnnnnnaagatgagngtgnttgcgttgcatgcctctgacncgncatactctnagtcgacctgcggcatgcaagctctggccncaacgctatgatcacgctctctcataatctacaggtaccnctangatctctatcagacactatgctagacggcgcaccatgtaatatgacaatctcactaatatacagagaggtctacctttccaatgaagatatgatattaatgtgaatacagtgagcagacgtggtcagcctgtcaataataacccagatagaatcacgacctctggtggttctatgtagtcctaccacacgaatcatatatatattgttncatctccactgcgtatctgcganaggttgtaacttacatgaatgtctctgatatcttagccttctgacagaaatacatgcatacacaaactcactaacctctctgttcatgttgtgctgcccaaacatcatcttcatacgttgatacagtgttggtagcaccaaggatggatgcttatactactcctatggtctctctctangatcgactttcttangtcaggctcatatgcgacacatattcttcctctagtctcaagactcatctcgaccaatcatgaccactgtcttactacctctcactcgactgatcctaaaaggataaactgtgctcactatttgctgtgatccggtatctgaatcctatctacg

SEQ ID NO: 36365 - DNA, 280 bp, Glycine max
  unsure (1)..(280): unsure at all n locations
cagcctttggaggaatcttctggagggcccaagtgggcctatgtgctatttgcactcccctatttactaaatgcacccccttctattttgttggtgattctttttccgtaatgttacgaaactgtacgaatttctgaacgatacttatttntcttccgcaagggtacgaatccttacggattatgtatttacttctgtttagctttcgaagacgttacggaaacttactgattgcgcanaacacctcttttccatttccgtcacattagggaatttcacg

SEQ ID NO: 36366 - DNA, 598 bp, Glycine max
  unsure (1)..(598): unsure at all n locations
aacctagaattattataactaatgccattaacctannggaataanacacacttaatggctgagtgntaactgtatatgtggcaaccaaaagtcaccctcaacagccaacaagtcagccaccatttggtctcccaaaaggctgatgcctaagttgccaattgtgcccttattacaactntgaactacagccctttagttgattaacccanaacatattntnggtcagccaactttacaaggagtgngccattattaaacanactanacactctaaaatngaaatanagtggtgtcatntagtccttcatttgggccatgatacaactcacaacctttggactttctccttgaaacttgngcttgtattcaaatagatggacagcacttgttgaagaagcttcttggctntcntgctctagcccttgtatangtcctcaagtcctcaagtgatccttgccttgtcttgtcatgtctcatactcggacacaacgaacatcgagtaaaggattgtcgttacactgctcaacctctgtgcaatccacgtccgattctacaaactatntcatcgcatcatagtttgtctttctttcgaactcct

SEQ ID NO: 36367 - DNA, 342 bp, Glycine max
  unsure (1)..(342): unsure at all n locations
ctcggatgtcngattcaagcgcataatatatcgagacgctcganattgaacaatggaagctctngagcaattccaatggtcataacttttaactcggatgtccgattcaggcgcataatatctcgagacgttcgaaattgaacaatggaagctcttgagcaattcaaatggtcataacttttcactcggaggtccgattcaggcacataatatatcgagacgctcgaaattgaacaatggaagctcttgagcaattcaaatggtcataacttttcactcggaggtccgattcaggcgcataatatatcgagacgctcgaaattgacaatggaagcttttagc

SEQ ID NO: 36368 - DNA, 373 bp, Glycine max
  unsure (1)..(373): unsure at all n locations
tcacacatacactcaacactgtgttctactcagctgtctacaatataatactntaacacatgacacatacacaaggacatgaatcttcaattaaagagatatacaacacatggcataaccatgaaatatgagaaggtgaggaataaggggtgaaacagtaaccaccgaatcagaagcataaagtatatatacctttattgcaaaaagatcaccagttgttctcttgttagccaagaaaactcttccatatgccccacgactgatagggtttataatctcaaagtcatcaatagaggtgcgatcccttgaagaatggatggggctnngtctcangctgcgaaccacatcatcttccaagatatcatcatcaaca

SEQ ID NO: 36369 - DNA, 355 bp, Glycine max
  unsure (1)..(355): unsure at all n locations
acgcgtttctttggtctttctatttgatctctttaagggaaatgtttatgacccgttatgctagatgagtatgttatagcactgattagtcatgggctgtgagaaagagttaaaaactaagtattagagattattgtgattttctcaaaaccctaggttagctaaaattggagattttgtctaatcccttgttctattatttaaatgcttaggttctgtggaaaatacttatggtgaccttcctaacaacggtaggagtcagtgattgcgtnnattangtgagtagctaatatacttagcgattttctcaaagttctattatagaaaagcaagtatacttccgaacatatatata

SEQ ID NO: 36370 - DNA, 321 bp, Glycine max
  unsure (1)..(321): unsure at all n locations
cttatactcggtggagtgaaccactcangaatcgaccttattctcttacggttcatgggaaccncttgatcactatttgtaaaattaagaaaagtcacacaatanaacatacctttctctgtagtttcatattgattattcctaccaaaaagtatgacacacctaaggtgtnccatatgagtacctaagattgtattgaaactaaanataagaacacacctacctaatgggtccctatgtacacacaccatgaagatgttatgtgtacgacgtgatttacanaagaaggttgcaccactcacaacattcatcataccacct

SEQ ID NO: 36371 - DNA, 441 bp, Glycine max
  unsure (1)..(441): unsure at all n locations
catagtagaacactggtaatgtgtntactatcacaattatcatctcctttttcgtcattgggggtgccacctgngctaccaggtctttccacctttgggcgtattctttgaaagattcatgcccctttntgcacatgttttgtagttgcatcctatctggagtcatatcagaattgtactgacactgcctaacgaaggcaaccattangtccttcctagaatggactcgggaaggttccaagttagtgtaccaggtaacagctaccccagtaagactttcttggaagaaatgtatcagcagttcctcatctttngcgtatgcccncatcttccgacaatacatctctagatggttcttggggcaagtagtccccttgtacttgtcaaagtccgacaccttgaacatgggaggggtgatgatatngggtactangaacaact

SEQ ID NO: 36372 - DNA, 204 bp, Glycine max
  unsure (1)..(204): unsure at all n locations
tctctggacgagctctttacgaattctanaagacaccttagatgtgtattcttcgacgagtaaaactccgaacgtatgtctccacttagtgtgccttactcgctagtgaagtatctcctcattagacaagtgtctatgatgacttatcatttcttgatcactctcgaacagccatgtgacattgcacatacaattactatccct

SEQ ID NO: 36373 - DNA, 353 bp, Glycine max
  unsure (1)..(353): unsure at all n locations
tacctctctaaagtgagcatataagaatatatgcatccttgtattgatataaagtatatcatgatatacatagaactcatggagaaaatggctgcgcactcaccagtcaataaaagcagagaaaggaggtctagcactagatatgttcacatcttatgaatgatagcgaagatgcagaactgaaaaaggagattngctgacatatggttagtgacaggcgtaacgcatccatgatttcgaagtcacaggttagaactttgaagacaggaatcgcggtttatgagtttgtgaataggtggctaatctgaagaacgaaagatacatgactccatgcatgtgctancanncaatta

SEQ ID NO: 36374 - DNA, 170 bp, Glycine max
ctcttatgtctggcaagacaaccttagaagagtatgactttagaaaacttaaaaccacattgaagaagtcaaaacactatctgaagagttacatcttgtgattttattcaaaaacaatcactgggtaatcgatacacaacagctttatgtgaaaagatgtgactcttcac

SEQ ID NO: 36375 - DNA, 369 bp, Glycine max
  unsure (1)..(369): unsure at all n locations
atgtttcctaccacagtccaacctttactccaggacttctcatccatattntatcaatcccaaggcttaccccacccgccttcaatcccataaccaccaaattcctcttttacccaattccaaaccaatgaatgtaaaatcataccgttaccctcacattcaaaaggaggcaatgacaaaaatcatttcggagatgttgaatgaaagattgattgtgcaaagtcacaatcctttntcttccccagtgctgttgaattgctaaaaaagatggaactnnggtgctttgtacgaattatagagctctcaatgccattacaatccgagatcaatttcttattccaacacttgatgaattatnggataagttac

SEQ ID NO: 36376 - DNA, 146 bp, Glycine max
  unsure (1)..(146): unsure at all n locations
tcaccagatactcgtgtgccctatntgataataataatgtctggtagaaactcttggggacagacaacgaacaagcataaattcagatatgcttactggtggcgcaagaccatcatcatccagcttatcataacaaccatgtctca

SEQ ID NO: 36377 - DNA, 444 bp, Glycine max
  unsure (1)..(444): unsure at all n locations
gtattattatttatcagagcgcttntggatcctaanatcacggctcattgaatcaataatgaacagaanatagtgttctcatccnctctgtgaatntaacttcaggaaaaaaagcctgacatacanaattgatgtgttatcaaaagataatattataccaacatcggtaatgtttacatgaagatacaatgctatatcaagagaaaaaaattactgtcactgcattctatgtagatttttgtagaannattttgtcgtggaaaatgcanaatcaaataagccagaatttaatcataaataaattttgtacctgtataaatnggtgctcaaaaacaacacaataaacacatacctatggatcttgacactgccaaaacacctagaactcggacccattccattgataacccttttctctgcagctttatcctttccattcatcgc

SEQ ID NO: 36378 - DNA, 396 bp, Glycine max
  unsure (1)..(396): unsure at all n locations
atcttcaatgtacatgcgaaggtgaaggatactctaatgttcaatacttttgttctctgccaagtcttcaacgagtncaactctagaagtatggagagactcaatgtgtctcaaggcattcacaaanaccacttatttcttcgaattgtgaggattactctggttctttaagtattgatggtggaactcctaaagaagtatgctgatacagagagattgacatgcgagcaatggagaatctgtattgtcattgcagctgcgtcctggcaattgcttgaatacaaagctcgtacctgtcagattaacgtcatcaccaccacgttaagtggtaaattatggtcttaagattaacattgtataatctacctctcacacgttaagaatataattcaacct

SEQ ID NO: 36379 - DNA, 458 bp, Glycine max
  unsure (1)..(458): unsure at all n locations
tcactctactctaatatgatcagcttaatttatatctccaaggtctttatgaactcattntctaatactgatcctacgattagacgtataattaactagaaatactcttaacaacatctctactaaaataacgtcatatttctagtagaaaaattcttcaaaacactgttgattgattcaaacatattttaaagtttaagctctaggcttatcaataaaaaatatgtatctatagtctctattaaacaaaaagatgatatatgttgagctaactctttanaagatacaccaaattgtcataaggaataaagtcaaatgaatatttgagtgtcgagttcacaagatcttttattatatntagattgtgtaacctaattctaagcattaatagagtgaagagatagaaatttatatgagaacaaaaatggactatacgacatgaaataacaatatcgatg

SEQ ID NO: 36380 - DNA, 319 bp, Glycine max
actgcatgatttgacagacttttaccctgatcggataaatgtcagtatgcttcgttgattgatatcagacaacatatatttatttgaagtaatcgatgaattttatctatgtagccagactcatccaacatcttgatattaatatgctaaaaaaattgtatatacctttatataaaattgtgccttcaaccttatcaacgattttaaattatgatattcattataagataaaactactgttgttgtgaaaaatctcttagctgcaactctgttttaaaacgaacaataacgtgctgctttaaaactttttttgttattt

SEQ ID NO: 36381 - DNA, 397 bp, Glycine max
  unsure (1)..(397): unsure at all n locations
ttgaatganattagaatctatattaccttcttttaagaaaattaactgacatgcacacaagaagaacatagtgaaacagaagaattcaattattaaaggctctaacaacaaatttaccttctggaggatctgttcattgtgtggctgcttttaggattataaaacaaactaaaacatatacaagtatgttttttaagccattatcataatatcctagaaactgaacaaaaaggaaggaaggaataaaagaaaaagtgaacattntaaactataaatntattcatatcataaatntagaacataaaatgaatacataattgtaagaggaagtttctgcccaaatgataaccttcaccaagcaagagggctgtgtagttatctgatttatctgacaaac

SEQ ID NO: 36382 - DNA, 330 bp, Glycine max
  unsure (1)..(330): unsure at all n locations
ctgcagcttangaggtattgcataatcgctaaacgcttattctaataaccgtctagaaagcgatttatatggacttgtattaatatntaattattaattcctacttttttcctttatgtnttatgcccttacatataaaataataatataaataagaaatattggattgaatattctattcatgttacanaatgaccttatagcatgtttacaaaatacaataaatgcatgtataaatngctaanaattatgaataagatcttctatccatttctgtggaactagtaatataaatgggtaaanattatgaaaaggaataacatataacct

SEQ ID NO: 36383 - DNA, 395 bp, Glycine max
  unsure (1)..(395): unsure at all n locations
tttgtttctcagccatttcccaattcggttgcagagaaacttgatgactccaattatctgcactggcatcaacacgtgtcaatctggaatcacagaaataagatagtcttccaaaaccacacgtttaatgggagtagattaatggatgaagcggttnttgtcctctggtcgtggattaaatctatggagaaggaatttgctgtacacctaaatcagtggtcttcaaacataaaggaagcttttaatagctaggtagggtggggtggtttatatacatgtaacagtcttaggggtaatagcttgtgtctctgtattcacaagaatccacatgcttatttctatcaatagttgtatctatagtacctctggtacttcttcataataatatatatcta

SEQ ID NO: 36384 - DNA, 275 bp, Glycine max
  unsure (1)..(275): unsure at all n locations
ctgcagctcatacttcaaatacactgctcttttgacatcttaagttcagagtcagctttctttaactgctactggtcttcatgcttttggcaccatagacgtttggtcatccgcacctgtttgttgaattaaagnactcgcatacattaccttgataatccactgtagtttttcattgatatttaattatatgttcctgtatngctagacccttcagtgcatttttaatcataaatcatactgtctaccctgctggccgagaatgatgtattcat

SEQ ID NO: 36385 - DNA, 324 bp, Glycine max
  unsure (1)..(324): unsure at all n locations
gaatcatccaacctcggctagggtaggcaagggattgcgaagtacgggcggccccatttatgcgcaaattcaaaacaagcatgccttcccaccatatggcttgcctcccaactatacaccacccaatgtggcatacactcccaatgaggatgtcaataactccgctcccatactcattgaaagccgacaacctcatcatgcacatgtctcttaaaccatgggggagacacatgaaatgccccaccacaatctagcggactntgagcctttcctcggatatgccactaaagggcaagcagttggtggtatacccatgccaaacac

SEQ ID NO: 36386 - DNA, 298 bp, Glycine max
  unsure (1)..(298): unsure at all n locations
ctgcagctctcattatatgccctaatctacttcgttgaaagtatgacattgaattctggagagcttcgtgtgcaattcagcgtctgattatatgccctgaatggacttcgtgtataagtataccattcaattctcgagagcttcgtgttaattcaagctttcgattattatgcacctgaatgnacttccgtgtgcaagtatgaccatttaatgttcgagagcatcggtgtcaatttcagcgctcgattattatcatctaatcgacttcgtggatagtataccattgattctcgagagc

SEQ ID NO: 36387 - DNA, 374 bp, Glycine max
atatggagagggtaatgaaataacaagatgatgcgctccatgagagggtggatcaaatggagaatagagatcataatgaagaagaaaggaggagaagagggaatgatcgtgttcctagacaaaaccgaattgatggtattaaactcaacattcctccatttaaaggaaagaatgatccggaggcctacttggagtgggagatgaaaatagagcatgttttctcatgcaacaactatgaggaggaccagaaggtgaagcttgccgccacggagttttccgactatgctcttgtgtggtggaacaagctacaaaaggagagagcaagaaatgaagagccaatggttgatacatggacggagatgaaaaagatcatg

SEQ ID NO: 36388 - DNA, 623 bp, Glycine max
  unsure (1)..(623): unsure at all n locations
ntggctccatgactgccttgacncgcatcttagagcacctgngctgcagctctataangaagttattacagctactatcactggatgaattgcancaatctcttgcgagtggatgtgaagcatatgtgcaggtacnctannagcagacaatttggttcaagttcaacttgaaccaaattggangcacttagatcatatacaacaacatcgccttatcttactatgtggtgtcggcgaactgcactcacatcctatcatattggaacatgacctgaactctaccatgcnggaggcatttatgganaaggtatcgtttcacttatcttgactacatatgatagatattggtgtatgttgttgttataatgcacaatatacaccgttacatatgttaagtagagtcatcttcaagtaactttggctctccaattatctatctagcgcgtcactctcgaaacaataactacgaacacattattccatccattgctacataatttacgcaactatatattaagaattatcatntctagtcgtatctgctcttactatatctatataattaacgatcaactcttcagcttgacatgatgacatataacttttcatataccattatttcg

SEQ ID NO: 36389 - DNA, 434 bp, Glycine max
  unsure (1)..(434): unsure at all n locations
ctaagctttgacttgatattcttaagtttcaacaatngagatgctganatattatctcattctcgtgattcatccncttccttagacactatctcttcaatttaatcacaccaacttatctcaattgttttgagttgacccaaacttttgggtgttgaggatgtgaacaaatatagcagtggttgcaatttttacttccaaaaatgtcaaattcgagaagggcactgtgcatggttccaaattaagcaacactccgcttttatgaaaattcgtagcattattcttcgaataatacaccacaacctattcataaattctctcattctatttcatccncttggttaaagatgatggaacacaagacttacccaaaataaaatanaacatgccagaatatgtgaattggatacctttaaactaaaagtctaaaacat

SEQ ID NO: 36390 - DNA, 315 bp, Glycine max
  unsure (1)..(315): unsure at all n locations
catatgcaatgtagctcaaacacacaacattgaattaaaatccactttcacttactgttactttcctctcattntcattcctcaactgtcaattgaagcaaacacgtaacaatataacagtcaagagtgactntctctgttngtaattaccatattactacaggggttatacattntccatttccctatatgtgtggcttacctatcatatgcacggcttttttcttttaccaatatagtatatttttcacataaataccataatgggtaatgtacgtgtgacaaattgttgtcaacagataatgtccagtttga

SEQ ID NO: 36391 - DNA, 384 bp, Glycine max
  unsure (1)..(384): unsure at all n locations
tggcgataatgtactgatcatgaactctgttgctaagtactcgcattaatgcatgaaataattaagctctaacactattaattaaattcatctggttggtcaagtggttgcancaatctctggattgccaattcattgcatggtcttgcccttcggtataagtattttggacactataacatgtgcacgcatctatcaattgagttaattattaatatatgtctaacaatataactgatcatctgtaataatatctctcattctaatcaagactttaatcgagatttactttaagagatgggatctacaatcattaagatcaacaacttatggatatactgatataagtatactctcatatactatatcatacatgtgcaaaaa

SEQ ID NO: 36392 - DNA, 234 bp, Glycine max
  unsure (1)..(234): unsure at all n locations
gtcagcgtgactcagaagtcagtatgacatatcttgtgagcacggaagatgacgtatatcaccgcgtgtaaacgggcttgtcggccgctatggacgaatggcgcatacgacgacgttagtctctacgtgctatcatgcttttcgtcttacagacaacaaaaagtctatacngataaccactctggtatattcgcccatcagcgtgactcagaagtcagtatgacagatcttgtg

SEQ ID NO: 36393 - DNA, 351 bp, Glycine max
  unsure (1)..(351): unsure at all n locations
gactaacgtcgtcttctgcgcccttcgtctatcgcggccganaggttcgttgacacgcggagaattacgtcatcttacgcgctcacaagatctgtcatactaactcttgagtcacgctgacaggcggaattacccgagcggtgatgcgaataaactatttgctgtctttaagacgaatagcctgatagcacgcagagactaaccgtcacttctgcgcccttcgtgaatcgcggccgacaagcccgttgacacgcggagatgtacgtcatcttccgcgctcacaagatctgtcatactgacttttgagtcacgctcacgggcggaaatacccgagtggttatccgtataaac

SEQ ID NO: 36394 - DNA, 362 bp, Glycine max
catacagtacaccagctttgttgttcgagcttaaatcgctcacataaacttcatttttataagtgtgtaataaatggaaaagcttgaatacttaaaggaaaatattgaataatgaaattatccttaatcagaaataaaatatctttaataattacttatatgaaactttgatttcccttaatgtttgtgtaagagaaagtaatctggcatatctcattccaaaaacaacaaatagaagatggatctctgtatgatatcccgacaaatgtcagaacaaatcatagtgactactatccgtacatagtttgaatgtgttagtgtgaaaaacagacttggtatgtacatatctgtttcataatcac

SEQ ID NO: 36395 - DNA, 505 bp, Glycine max
  unsure (1)..(505): unsure at all n locations
tcatctgcatatngctgaatgttactgtcaccttctgctntcctactaaataactgttgtacagaccttnggatagagttgtcctcatcatgctagtcaagcttgaagccacaatattgaaaaggaaaggggctaaggggtccccttgcctcaaacctctagtgggggcaaattcatttgaggggctgccatttatgagaatggatatagaagatgattgattgcaagcattgatccatttcctccatataggacagaaccccatttgaccatcatataatccagaaagttccatgaaacagagtcataagcctttgcnaagtccaccttaaacaccaaaagctggttcttacttcttttatcttcctctattgcttcattgagaatcaaagttccatgaaggatgtttctatcctttatgaaaagtgntngtctctcatcaatgagtccagngcaataatttcttaacctatntngccagtaattagcaatgatcttatacata

SEQ ID NO: 36396 - DNA, 275 bp, Glycine max
  unsure (1)..(275): unsure at all n locations
tggtttagtaacaggcatacacnaacgttccacacatactaagtcttctttgttgatgacaaatttgttgattctgacgagaacctcattacaatcttcaagcacatattcaacctttttatagaatgttctgatagtgccaaaaagaagttagccaagcactctgtatgatacagcatcaatntcttgcanaatcttgtctgcagaaggtaaaaatgaaatgaanataatggcanaacaatagcatatatcacacatcttaaaatgatttcaca

SEQ ID NO: 36397 - DNA, 138 bp, Glycine max
  unsure (1)..(138): unsure at all n locations
catgtgtaacactggtcatatacttgaggattgttaaacttgtgagacacacctcanagttcaacttctcttcctaatctccttcaattccgatgcccccccgcgcccaccctctatgatgcaattctactccctaat

SEQ ID NO: 36398 - DNA, 413 bp, Glycine max
  unsure (1)..(413): unsure at all n locations
ctgcagcttnccttagtctttctggatcagaatacatgttctctatgtttntctttttctctcttctgccatgaatctgttgtctctatcatgttnttctngaataagtttgattttttttcaatagtctctgagccccatttgagtnngttcctcctcttccatataccatttgccccactaatattntattttgtccaccccatcaacttgtggaaatgcttcttcagatatctntcagagtntctactgtctcaatngcaaccacttnttctcttgctcctgctgttctcaatgggttntctttcanactcanacttatctcatncatctttccaagggtagctcaccatcactatcttctncaacatatatngtgaggagtcttcagttttagcanacatgtatatact

SEQ ID NO: 36399 - DNA, 500 bp, Glycine max
  unsure (1)..(500): unsure at all n locations
actctcaccacactgcaagttctgctttgtgataaanataaataatattatgcaaatgctccaaatgaatgtgtcacgtttctttntccattctcacaaagttatgttggatcttatcacccacaaagaaaagaaaggaaaaagttaagttggatcatggtatgcataattgaatcaattgggcaaaaattgacaacgcgacatgtgatcaataatgtcttgttaaactatgaaaaagaaaggttttgttaaccggngcataaggagttctgctttcagaatctactactattttttctgatttcagaaacagaaccatataggctacaaacaaacacagctagttaaccatacagcttgcttcaattcctcatctcatatggacccatcagccatctcacataatgctttgncattanaaaactgagaagcaatagatctaaataagcaaccacaactacaactacaatcctcatacatctagaaataatacactacaa

SEQ ID NO: 36400 - DNA, 569 bp, Glycine max
  unsure (1)..(569): unsure at all n locations
aacctatanttaatataacttattgccattaacctanggaattaanananacttaatggttgagtgtaactgannatgtggcaaccaanagtcacccncaacagccaacaagtcagccaccatttggctcccaaaggctgagcctangtgcaattggcccttatacaactngaactatacctaactaaagcccttntagttgattaacccaaaacatnattttggtcagccaactntacaaggattgtgccattatttagacaaactatacactctataattgaaacanagtggtgtcacttaagtcctcctcatttgtgccatgatacaactcacaaccttggactttctccttgaaactgngcttgtatcaatagtatggatagcacttgtgagagctncttggcttncttgctctagcctgcatangtctcaagtcttcagggatcctgcctngctntgtcatgtctcatcatcctcctctgagaagatngtctcaatcgatctcatctgataaaagaggaatcaacattgagggactactttctcccgcagtatcgtacttgttg

SEQ ID NO: 36401 - DNA, 423 bp, Glycine max
  unsure (1)..(423): unsure at all n locations
gttgcgcgtactgatgggtaccatgaggtgtntgctgtngtttgacccacgcgggtngtgaagagacggcatgggcatctccttccttttcttttgcccctgttgccccgattcttttggcattcgcgtttgtggaggaaacgtaatcaaactttcctctnttcaatccaacctcgattctttccccagcaaacaccagatccgcanagctggacggcatgtaacccactagcttctcatagtagaacactggcagagtgtctaccatcatggtgatcatctctctctcaaccatgggaggagctacttgtgccgccagatccctccatcgctgcgcatattctttaaaggtttcaccctctntcttgaacatattctgcagttgagtacggtcaggagccatattagaatngtactgatact

SEQ ID NO: 36402 - DNA, 434 bp, Glycine max
  unsure (1)..(434): unsure at all n locations
gccatgaccagaaccacatttatgtgtgacatgaagatgttgtaggtggcatcaccaatggatatgcagtcatcaccagtttgcaaggtacacccattaatggtaaccccagttgagcgttcaacatgaatgccatcggtgttagggctctggtctggtgcaataagcctcacaattttaacaagaacattgtngcaagcgttgatcacaatgtgactttagctggctgtgatagaagttatgccactaaccaccaagttattcacccagttgaatgtcattgactgcaatnnatagcatgtattcagtcgtacataatattcactggataaacataatattctagttccagctaaaatataaagtacagaattctntcaacacattcttagtcagccaacattatagaacttacgattaccacatatacacat

SEQ ID NO: 36403 - DNA, 452 bp, Glycine max
  unsure (1)..(452): unsure at all n locations
gctctacccaatggactaccttgaataattcctgtgataccctttgagccttgttccctttccttgttntgaagctcactacaagccttaagtgaataaccatgatattaccatatccttaaggannatttggagcttggaattgttttgggaataagtgtggggggttcttgtttcattggacaacttgtattgttggctatgcttcatgatgtattntgggccatacttgatgtatattgtatattggttaaatgttggacatgctgaatgaaatgttgtttctcacaggctatagagtaaaaaaacaaaagaaattcgtaacaaaaataattcttaaaagaaaaagagaagcaataagtcgagtgaataagatcttaaatggacaagaatgatgaacactctggtctactctcatgttaattatatcttacttctttaatttctaattt

SEQ ID NO: 36404 - DNA, 371 bp, Glycine max
  unsure (1)..(371): unsure at all n locations
catcttcagactgatcaacacttgcacagtggccaaagatgcatgggagatcctgataatcactcatgaaggaacctccaaagtgaagatttccagattgcaactcttggctacaaaattcgaaaatctgaagatgaaggaggaagagtgtattcatgacttccacatgaacattcttgaaattgccaatgcctgcactgccttgtgagagaggataacagatgaaaagctggtgagaaagatcctcagatccttgcctaagagatttgacatgaaagtcactgcaatagaggaggcccaagacattcgcaacatgagagtagatgaactcattggttctcttcanacctttgagctangactctcggata

SEQ ID NO: 36405 - DNA, 515 bp, Glycine max
  unsure (1)..(515): unsure at all n locations
tcgagactacactctcacacgcaagtngatgcagacaatgttgataacactctccaatggcttaagaggaccaccatctaccaaacaaagcatgcgctgaaggactgaacgacaacaatatgctctgtaaaatagaaccataccctgaacattattacaaaagtaatatttcactaatagggaataacgacgcgaaccaacctgataaagtggtcctatagaggaccaagcaaaactgcattgctagcacattcaactaaatccatttcgaaaacgctaaatcactaaacaacaatccactagctcattacccacaagtccacaacacaatttcaggtaacaataaccaaacgcganaataatactaataccaagattctaacattagcaacatatagtgattcagattcaaacttgccagcaataacagctaaagactgcattacaagttactgcaacaccacctgcaacttcccacacacaatccttgcgcattcttttactatattcataac

SEQ ID NO: 36406 - DNA, 592 bp, Glycine max
  unsure (1)..(592): unsure at all n locations
ctctgtttgttatatcttgactatacactattctattatctgtcgtatcatagagaataaattctaaagatatatatattgccagcaacatgacattcaccttttcagagatgcacagacgcttcagtattacacacggcacacgggctcgaagtaactcaagagctacatncaacaatagagtgctagcaatgtcaactcctaatatcctcattgtccgaacagcaagaagagttcttcggtgcacatgaganagacacaagctattctctcttgccctgagattggggcacatgtaacgtggtaaatacgaacagcgtcatcanatattcgaatgtctgcttgctanatcatatgaacaaacacgtattgatcgactgggcagctctcattctgactcaggctatctgcgactgcngaccagtacactgcactcacatgtgacacatnttctgccaatgntgatgctgacagtgaaacttctgcatggtgacctaccgtgaacctcacttcaatatggctaatattgaggatatcccgcntgaggtgctcgatttgtaacatcccactcgtcgtaccgaatatattgccg

SEQ ID NO: 36407 - DNA, 259 bp, Glycine max
  unsure (1)..(259): unsure at all n locations
tgaacaggtaactgtgtctcctgcaaaaccacctacgaagcccgatccggatgtcgacgatccgctctatctgatgacattgatcatnccacagcttttctagaggccttatcaggttacatgggatgcctccgtgctctgagtctgtaatacagatttgccgctctacataaagcacgaatacctgtctgaaatcgcacacggtggacaatgcctcatcatatcagtgatacagatatggattttgtaagtctttatc

SEQ ID NO: 36408 - DNA, 481 bp, Glycine max
  unsure (1)..(481): unsure at all n locations
actgaagaccgtgataggtacgttntgtctacctatgttgctctattgaactgaagaccgtgaccatgctacgtctatttctggaactcgnggttaagctaacgaccttttctggtttttggtgcaaggattggcgaagtggtggtcacctgaggtacatttgactggtagtacatgatctttgtggtcagttgaggtacatttcacctgaggtacaatctcgccggcattgtcgctattgcgttcaggtaagcttcatgtcttcattgtaactctgtgctaccgcgtacgtggtctttgtgctctttgttcttatagatcgttagctagtttcttaattagttactactactanctagggtttggaatgcaggtagtcttgcttggatagctgtgtaaaatattgcctattttgtgagttgtgcttgaancatcactttatcctcattgatgtggactcgtctttctgctctaatttgtt

SEQ ID NO: 36409 - DNA, 532 bp, Glycine max
  unsure (1)..(532): unsure at all n locations
ttaagatatagtggtatatggatacnaaagaanatatggatagtgaacatgaggagtttntcttggcagcttcttccactctatgccatatgttngggtccgcaagaaccgcgtcagataattggttaaagttaccgtgagacacgctgagaattcaatatcattaatcaaagtgattggtcacatgacagtataaatacaacttaatagatactcgaatgtctgtttctaatgatattgnttatatagaatttcttatctgtgttattgagatcttaggttatgataagtaatgaaattatattattgttatagagaatanaataacaatataaatctaatttatttaattaattatatctgacagtgactagtatttggtgaaactgttgaacacatacttcactatgccggcttttatgagacaaatatatgtaccgtgtttggttcagactatcatatattatgtatattattagtcagagttgataacttgtataaacaactgcggtatagctatgtgctgagtaan

SEQ ID NO: 36410 - DNA, 313 bp, Glycine max
  unsure (1)..(313): unsure at all n locations
agtgtagtctctgttagtagtagctcgtatctgagaatataaatactntgtaacacacactttacaaatcaagtcataatattttttcttctttcatcttcattctctattnttctctcctctggaactgaatcctaaccaactcaacaccattctttctcanaatcgttattgcatcctttacggtcctttgataaatgtgtctggatctatgttctttggtaggtcccattctctgcattgaaaggctgtctagtgaacctaatngggggtctctagtgacctatatnggttatatgatcattctttacta

SEQ ID NO: 36411 - DNA, 397 bp, Glycine max
  unsure (1)..(397): unsure at all n locations
atttgatcttcttttggtgctctgaattgtgggaatgtgctcatgtatgtgggggcaatttggtttgttttcttgcttgattgngttgaattaagggtttgtatgagatggccctaggcctataatgcattttgaagcaatggggcatgccacattgtccccgttctctcgctatagatgcctaaacgcgcgcccaccaagtgttcggtgaaatgcctcaatggcattagcgcgtgattnttgtagggaaacaacctatgggaacaattggtttgcacatgttttctattttttgggacatgtattcagtttcgtaagggctagagtaattgccccacatatatcctaggcctaggaaccaaagtntttatgcaagagaacacaagagtggatgcat

SEQ ID NO: 36412 - DNA, 309 bp, Glycine max
  unsure (1)..(309): unsure at all n locations
agtccctttcataaggagggtagttagccttganaagggtangcagataatcattgttcccaatatccacagctgagtcaccanatgttatgaatgctggcacaaggggtatttgtgcattgccccatgccaagaagacatatgctaagagcacaagaagtgcttctgtgctattgatagtcatctttgtagggccaatttaacaataagctggtgaggttntctgcttgtgtatgtattatatttatacataagtcgaagggtcaactaatatggtaactgaaatgagcctttatcactgatctattg

SEQ ID NO: 36413 - DNA, 376 bp, Glycine max
aaaatatactatatgctttattatattcttaggtataaataaaataaaatactaatgaggtcattacttgtctttcttaggatgatgtgttaattaagttagcagagacattctaatatcgcaaatgttaaaaaggaaaataagactagtttagtttactcacgagtaaacgtgttgatttgttagtgaattgtttattactagttcataaccacgggaatatatgttcttacgcttaattccctccctcaatattattagttgtctctttaccagattttgtatttcatcagtgatgtacttgtatataattatcattacttttttcggacagttgtggtaccggacgttgaatcaaatcaactataattattat

SEQ ID NO: 36414 - DNA, 175 bp, Glycine max
tggcccgagaagctgcctcaagagtcaggaagacaagcggcgaagactattccgcccgatacacatcacgttagagcgtgcaccacacgtcaaccataagatggcgtttcgaacacgctcactaggagacattctgattcagagaataggcgccgggggcacactggtacccatg

SEQ ID NO: 36415 - DNA, 414 bp, Glycine max
  unsure (1)..(414): unsure at all n locations
tatatagatcttgttttgtntgaatagctgtctttagagtatatcccatgtgatttaatgataaaatttgcataatntcaagtttaaaagaggctaaaatcttgaaatgctaaaaggagcagtcgcgctaagcagaccctatgggctcagcgcgcatctaccgctaagtgcagcttcagcacgcttagcgtgacaagggaatctgttagagcacaagaattgaggccacacgctaagcacgagatcatctcgctaagcaagatgtttgtctttggccaggctcagcatatgactggcgccaagcccaaatccacttactcgtgctaagcgcgagggtgacgctaagcgtgatgtcgcgatttcagagcctatntaagcctgaattgtcagaattanggtacaaaacacacaaca

SEQ ID NO: 36416 - DNA, 231 bp, Glycine max
  unsure (1)..(231): unsure at all n locations
caacattcaatttcgagcgtctcgatatattacgggactctatcagacatccgagtaaaaagttattgtcgnttgaatnggctcatagcgttaacattcaacttcgagcgtctcgatatattacgggactcaatcagacatccgagataaaagatattgtctttngaatcggctcagaggttcaacattcaatttcgagcgtctcgatatattacgtgactcaatcagaca

SEQ ID NO: 36417 - DNA, 395 bp, Glycine max
  unsure (1)..(395): unsure at all n locations
actcgcatgtctggttgagtcccgtaatatatcaagacgcactcaattgaatgttgaagctgagagcaaattcaaacgacaataactttntactcggatgtctgattgagtcccgtaatatatcgagacgctcgaaattgaatgttgaaggtctgagcaaattcaaacgacaataactgtttacccggatgtctgattgagttccgtcatatatcgagacgctcaaaattgaatgttgaagctctgagccaattcaaacgacaataactttttactcggatgtctgattgagtcccgtaatatatcgagacgctcgaaattgaatgttgaacctctgagccaattcaaacgacaataactttntacttcgatgtctgattgagtcccgtaatata

SEQ ID NO: 36418 - DNA, 416 bp, Glycine max
  unsure (1)..(416): unsure at all n locations
gctatgtctcntttcttannattgatgaaatattagcagcatttcgtattgatctccgagtacacgaaatgaaaatgatgatatgaattccaccacaatcaagtatgcactcagagaacaaagtaaaatgcattgtaccataatctcatcacatctaagacaaaagacttaacctatacatatgaatctactataaaaaatgactattgtcaaactgttcaaacaaacaattcaagattcaatacaccgatttatccaatatgtctggaagaatcattatattgaatctcatatgtgaaactaaggttcactcataatatacataactggtatataaagtaatagtcattaatcacataatacaatgtataaaagcattcatgacacataatagcctaaaaagagtatgaaagaca

SEQ ID NO: 36419 - DNA, 262 bp, Glycine max
  unsure (1)..(262): unsure at all n locations
catgctatatgtagcaaagtcatcgatcctatgaagtatgatgagctggaatatgacgccgcaattatattgtgccagctggagatgtatgtcctctctgcctactatgacatcatgatntactcgatggtgcatctagtcagagaaatcaaatatggtggtcttggttaattgccatggatgtacccgattgagcgatacatgaagatcttaaaggggatactaagaatctctatcgtgcacaatcatctattggtgagag

SEQ ID NO: 36420 - DNA, 147 bp, Glycine max
attttcatcttacatgcccggggaccgctctaatcgcgtaatgcgtaagattcttctatcatttctccatttggcgcagacatcctggtagaacttctccgcatctgtaaatccttcgatcttttgctagaactccttatgcaacca

SEQ ID NO: 36421 - DNA, 714 bp, Glycine max
  unsure (1)..(714): unsure at all n locations
ncgcgnttttgtttttgatntcngactcgcaagntngcntantcctntancatgtcgacaacagnanngcccctgcaccctntnngannttaaaaantaaaantaaggangagttgttttttattttattatatntannganacatgnacttaacactctgcgcattgttcccttttgttgcacaaccgaactnccacacactgatactggaatatttaagatacacggaatgagaggaaaaggaaagaaatgtanaattggattatgttggaagagtaatatgaaggatacatagggagggtacgaatacagaacttcgacgtaacacaagatgtctgtcaacatgaactgataacagaacacactcatcacaatgatccttttggaatatcataacatataatagtcacagatcaatttgatgtagcatatgaacatggacagaatatgtcgtgctatattaatacatcaggagtcagantgctaatccttctggcatcactgaccatagtgagcgctaaactgacctaactgcnagtcattgctacctcattctactagtgcatcgacananaagcttaccaaagcaatttcgacttgagcatgtccactctagctttctcaccacttctgaatataatatgggtggttatgtgtatcatacaaattnaaggactgtcagaacaactttgtggttaatgactgcctaatct

SEQ ID NO: 36422 - DNA, 165 bp, Glycine max
tgttcgggaatgatcgtacttcaaacatcaccgagcgaacgaagctggtgcaagaagacaactaataatggtgtctactgccgttcaacggaaccgtggcactgatcataatgccacgcaacagtgggcgctcgccgaacacgttacttgaagacacgtcagttt

SEQ ID NO: 36423 - DNA, 587 bp, Glycine max
  unsure (1)..(587): unsure at all n locations
ataatactatgtcatgtggttctaataagaaaatggtatcgggagactctcattatatgacacagtgaatacatacatgattgtctttataatcattctatgactattgacgacaacatatcacaatagatncacatatataagaggagaaacatagaggtgattggatcaattatatattacattcacgtcataactaatctctatcattaatggattctaacaccgcctttcagggtggagcatgaatgtcacatatttccaactngccaagagaattactacggatctcggatactatagtcatggctagcatatcaacaagtaggtgcttgattctgcataacgagagacaataataatatcatattcaatcttctctttgatgaatgtttgcacttccacctngtctaacactacttgntgttttactctgcacgtgctagatttctctccagagagaggagcagtgtagacttcttatctctttattcactgatgatcacacatgaattcagtgtgtgtctttcgatatagcgcttcaccagcctactgttcgtacaatacaacctcctctttggaacgat

SEQ ID NO: 36424 - DNA, 311 bp, Glycine max
  unsure (1)..(311): unsure at all n locations
accatctcaaatcgacatttgactagacacacacactcgaactactacctccttatgaggtggtatgtctctttaattattataccccactaatatatgtttctgactatggaggtgagtctatgttaaccataaatctagtctggccctcccacatgttattatatcatttattcgctattaaattggagcctatttaatgccactcctctattgttgctnttctactccccatttatcctactctacctttgcttttataccttcctcccctccctcctccttccttctctttcttctcttcttatttt

SEQ ID NO: 36425 - DNA, 648 bp, Glycine max
  unsure (1)..(648): unsure at all n locations
gtgttgccatgactgccntgacanactcagagncgacctgcagcatgcangctnggtaganaacgctnnanatatctcagagtgaactcatctactttatcaatcctgctgcaagtcgtactctctatatttcttgctgataatgagcgcactgtactctctcatntctcttgaagcgtcaatctcgcgacctcttctgtattatatatctatcagtctcagaagatgagattaagcaaccacttggcaatgatatctttatataccatctaattgtcaatacacgtagataactactattaagtgataatctgctccacacaatattaaagtgataatgtacacaaaaactcatatacatgtatcgtgatgttgaagataaaaaaatatctgaacctacgattagattggatatttaatgatgttgacatcaacaccctaaatactggctagactcatgaacgaaagtttaagccgcgccgataacatcagggtgtctttttatatgaagccatgatatcaccaatctattttatcggacatgttagacgcaatcttgcgtcagatatcttaagtgactccgagacaatttgacgatgaaaactcttttagtatatgancaagagattctcttagcaatgttccact

SEQ ID NO: 36426 - DNA, 352 bp, Glycine max
  unsure (1)..(352): unsure at all n locations
tcaagctcggtgggtgtgcatgtntgngaatggtgtatgtgggtctangcgtgcgcggcggtttaggttgtagtgatgcgctgagttggttgtggtcggagtatgtggcggcggcgcgggatggtgatggtgtttgggtggaatgtggcgactctggttagagatggtggtggtctggtcggaggtgcggtggttatggtgaatgttctataggaaggtgaatatggagaagggttggggtggtggcgtggtcttagacatggacctctttctgcagtggtgtattctatttgggaggattatgagttgccaatttaaacgttttttgggggttaatataactatattatta

SEQ ID NO: 36427 - DNA, 520 bp, Glycine max
  unsure (1)..(520): unsure at all n locations
gtatttatggagttttgagataaaaatcgaagctntccgagatataaatactatctctagaagacacagcgcacatgtggtgagaataaatcgatcagatcacatggagagggaatacgacgcacattcgtggagttcggagataaatatggtagctctagaagaaacaatgaacatgcagtgtaaatataacacatggagagggaacacgaagcacattcatggagtttggagataaaattgaagctcttgagataacgtggaagatataataacactatcatcaatgaatatatcaacaaacacataagaggaaacgaacacgtcgggagctggaataaatgaacttcgaataaatatttttaaagaacatacctgcgtgaaaatataaaaagtctgaatgatacccaccatctgattggaataagtgagctttagatcaatggtcttgagacacaactcctaaaatgataaacttggaggacgaccatctgagtgaaaactagtttgatatggatcg

SEQ ID NO: 36428 - DNA, 215 bp, Glycine max
  unsure (1)..(215): unsure at all n locations
caacgagatgatgcgctccatgagagggtggatcanatggagaatagagatcataatgaagaagaaaggaggagaagagggaatgatggtgttcctagacaaaaccgaattgatggtattaaactcaacattcctccatntaaaggaaagaatgatccggaggcctacttggagtgggagatgaaaatagagcatgtattctcatgcaacaactg

SEQ ID NO: 36429 - DNA, 233 bp, Glycine max
  unsure (1)..(233): unsure at all n locations
acccactcctncacgttggtgtttagcggaaaacaccataactaaacgcgccgcatgggatccctatcgcaccagatccacatctagaatgatgggtgatcaagaggagacgcaggaacagatgacagccgacatgtcggctctgaaagaacacatggcctccatgatggaggccatgttaagtatgaagcagctcatagagaagaacgcgtgcaccgcctgcactgccagtt

SEQ ID NO: 36430 - DNA, 411 bp, Glycine max
  unsure (1)..(411): unsure at all n locations
tatctctagcatgcatagtatgtnggtctcgtcctatgtcacgggaagccggaaggtccatatcaccttcttaatcgtacacatggngcactgcgcccacaaatgcacaagttagaagagataatnttgcgggctctcgtgtccgtaaaatgcattcatatcatgcaccacataagcatctcttcataacatcataatggacatatcctgcatttgtccgttatcatattccagcctcacattntgcatgagtcatggcatcatcatgcatatgcgttcaacaaactntntgatctgcaaaattgcataccatatgttntcatgtntgctcatccttgcgttttcctctacaaaacataaacaaaaaagggggaagcgtgaaacttcacactacattcttagtttcatgtg

SEQ ID NO: 36431 - DNA, 150 bp, Glycine max
  unsure (1)..(150): unsure at all n locations
atcttcgcgtaattactcatggaaaccgtacagaagcgcctcggctcggaatttcttcacggaaataatnttcctcagcaatctccagagaatgagaagtgccaagaaggctgaaccccttctcccttcactcctccctctatgtatagc

SEQ ID NO: 36432 - DNA, 335 bp, Glycine max
  unsure (1)..(335): unsure at all n locations
ccttacttctgatctacctcttattagattattagtggattcaatatatagttacagctaacaaggtttcatgctacccaatccacaacaaaaagggataaaatggactgatataaacaaaaaccattgatttatcactcgattaattgatgctacattgaaactagcatcttcttgtaatcttcaccatctatctatccatccaatgtggtggaatcaaagtctctgcaactggcggagacacacataatcttgtcacacttantatcantcacaaaacatatntcatcaaagacagcccatgtggcgacatgttgcnnttttcantatctctc

SEQ ID NO: 36433 - DNA, 607 bp, Glycine max
  unsure (1)..(607): unsure at all n locations
ggtgcttactccataagctatanccttctggaggaatcttctggagggcccaagtgggcctggttgctatttgcacacacatttttactaagtacaccacnctacctcttttggtgattctctnntcgtaaagttacgganacttacgaaattcgtaacgatacttgttttctttccgtaatggtacggaaccttgcggattacataatcatccccttttttgacttatggaatgttatggaacctcactaattgtgcaacgaatgcttcatttgatctccggtgtgtcacggaaccttacggattgtgcatcaatattgtcttttgantccggcatgtcccggaactgcacaaattgcctaatgatgggtgccaagcacctcacaacgaccagacanaagttgcatgtcatcaagcaacggtccccggacgaaatanagtatgacagttgccctctctactcgtccttattcgagatagacggaagtaagatatacactaatttgctcttctgtgacagagtccggtgacataaatattctgatgcacttgatgtgtcccagggacaacgtgcgagatatgcagctcgatctatcaggtctgctaa

SEQ ID NO: 36434 - DNA, 377 bp, Glycine max
  unsure (1)..(377): unsure at all n locations
acctctgcactgtgaaaatcgngttccgagtttgggtttatgttttgtgtaattagtttaattagttagttactaacactctatatattagtgttagttaggtatttagtaaactgaacttcacaagacttcattttgtacaaaacttgttgtgcaaactttctcttttcctctctttttctctcaattgttcttcattcttctacatcttttcacttccgttccaccattttcttgctcaaaatttcgtggcttctcattggtgatgaacatggaanggataacaattaatcaatccaacgatccactccaanctaggcttaatttctcttctggttttggatttctattctttgtgaatgcttttctttctcttc

SEQ ID NO: 36435 - DNA, 361 bp, Glycine max
  unsure (1)..(361): unsure at all n locations
actgagctgcagctantcttcgtactatatctctctgtctctacaaccgtatcgagacgctgacaactcgccacctgtcgcgactctgtctcatgtacnatttganattatgtctcttgtctcttgtatntctaattatgaatgtagcacacaatgccctagtgagaggggctagcgctagctagatagggttgtgttgntgagcctactgtctcangtactntntgaaattgtgtctcttgtctntatagcatgaaagcatactannggagtataaacattgtaatctagttcgtatgaaacatgttctgaagtatgttatacatagggtgttngctacaatggtattatcaagatgtac

SEQ ID NO: 36436 - DNA, 378 bp, Glycine max
  unsure (1)..(378): unsure at all n locations
tgtcacatcagataatgtcaataatcgtatcngattatggagatcgtggttgggatggcactaagcacatgatcacagttgagaatgaaaatgcttggaatgaatattgcactgtaaatattctttaaatgttgctatttgttattcaaagtagattggatttgactttttctttgttttctagtcgcataaatcggctaaaccatttcgactcaaggtgcttcaaattgggatgatatagtggatttgtgtgctaaagatacagccaccggtcatggaggatgctgatgaagcgatgagtaaacaaacaaatgaagtggaattcatggggttaggtgctactgccatagatttagaagaatcaagctctaatacaaa

SEQ ID NO: 36437 - DNA, 365 bp, Glycine max
cctggagatatgtcgcggtggtcaggagaccttgatgacgtcaggtggggtgctattgcccaaaaccaagcttgaccaatcccgacccaacccggtcatagtcggtcagtgagaacctgtgatgtacctaagcaggcgagctcctggcagtcaacagataaaaggaaaacaagaccacaaagcaaggaggcttgtggtggctggccagctgtgaattctgtgtaatatgtggattgtggcctctggtaatctgataccaaaggtgagtattcgattacaaggcttacaattgaggacaggaggctaagatggtctctggtaatcgattaccaaggtgtgtaatcgataccaggcttgaaactaag

SEQ ID NO: 36438 - DNA, 314 bp, Glycine max
  unsure (1)..(314): unsure at all n locations
acttaatgccattaacctanggagataanacacacttaatggctgagtgtaactganattgtgggcaaccaaaagtcaccctcaacagccaacaagtcagccaccatttggtctcccanaaggctgatgcctaagttgccaattgcgcccttattacaacttgaactaaagcccgtttagttgattaacctcaaacatanttttggtcagccaactgtacaaggattgtgccattagttagacaaactacacactcnntaaatganataaagtggtgtcgattagtcctccatttgggccatgatacaactcac

SEQ ID NO: 36439 - DNA, 432 bp, Glycine max
  unsure (1)..(432): unsure at all n locations
ataacgtntcactcggatgtcggattcaagcgcataatatatcgagacgctcgatattgaacaatggaagctcttgagcaattccaatggtcataactcttaactcggatgtccgattcaggcgcataatatctcgagacgttcgaaattgaacaatggaagctctcgagcaattcaaattgtcataacttttcactcggaggtctgattcaggcacataatatttcgagacgctcgaaattgaacaatggaagctcttgagcaattcatatggtcataacttttcactcggaagtccgattcatgcgcataatatatcgagacgctctgaagttaacaatggaagctctttagcaattcacatggtcataactcttcactcggatgtccgatcacgcacataatatatcgagacgctcgcatttgaacaac

SEQ ID NO: 36440 - DNA, 289 bp, Glycine max
  unsure (1)..(289): unsure at all n locations
gactcatccggacttccgtgtataaacttattgtcaattcaattctctcagaagcttccgatcacaatttgagcatcttgatatattacgggactcatgtagacatccgagtaataatgtattgtcgttagaagttgatacgagcttccgttntcaatttggagcatctcgagatatatagcgacactctgtcnggcatccgcaaaaaatgttattgtggtgtgatatgtctaagagtttccgttatcaatgtggagcgtctagatatattacgcgactcaaccggaca

SEQ ID NO: 36441 - DNA, 364 bp, Glycine max
  unsure (1)..(364): unsure at all n locations
gccttnntctccttggcaatgaatgaatactttcacgtgccgggagtccgatatatcagacgctcaaattaaccaacttgaaaatgaatgacatacttatcactgagccggtgatcctgaataatcgagacctcaattgaaacgaactttaaaattaaacaaatactttactcgatgccaagatgcgtattatcagggacgctcaatgaaacaacctctagaattaaacacatactttactcaattctatagatccgtatattcaaccttatttaaccaactttaaaattatcacatactttatcctttctttncccttttttccacctcttttaactaactcttaatctaccattctttctcc

SEQ ID NO: 36442 - DNA, 97 bp, Glycine max
gtataaaatcaaacacaccatgtaactctatcgcttttacaaagaactacgtaggtctgatttcctcatcgcacatgaggatacgtatgagcaaaag

SEQ ID NO: 36443 - DNA, 379 bp, Glycine max
  unsure (1)..(379): unsure at all n locations
acagcagaatttagtaatgacccactaacctagaattaanataacttaatgccattaacctatggaattaaaaaatacttaatggctgagtgtaactgaaattgtggcaaccaaaagtcatcctcaatagccaacaagtcagccaccatttggtctcccaaaaggctgatgcctangttgccaattgggcccttattacaacttgaactaaacctaactaaagcccttttagttgattaacccaaaacatatttttggtcagccaactttacaaggattgtgccattatttaaacagactaaacactctaaaattgaaacaaagtggtgtcatttattcttcctccatttgngccatgatacaactcacaaccttggac

SEQ ID NO: 36444 - DNA, 294 bp, Glycine max
  unsure (1)..(294): unsure at all n locations
tcaagctntaactganactcctattagtgaattctgtgaagttggtggatgtgttaggtggacaaagtacaatgaaactctgcttttatgaacttattctgcaactatacacatgtacaccctattatgtatgatgaaactatttttcagccgattgatatctccaattctttagtatactattactattgtaccctctacgacgaatggtgcaaactccatcttaaatgtaaggcacaccattattaaaaagtcttatcttgagaatgccccctgtttctacatgaactatgt

SEQ ID NO: 36445 - DNA, 654 bp, Glycine max
  unsure (1)..(654): unsure at all n locations
tggttgntgccatgcatgactctgacncgncatctcagagtcacctgangcatgcagctggacatttcagtctgcatatattctgaagatagctctctatcgattctactctgtgatagctcgctctcatcagatgggtcgatgccaagcctgacaaaccttatacgcctcttctctttattcatattctcatactagngaatnctcctccatgtccactgaataattaacactaacattatgttcatgtattctgatcagagagttcaattctctttcttcaactatatgttcagacaccctatagcagtgatctataatacgtgtgagctataaatgcatacatctttgagagttggaagtgcattgtcatttcgcactcttcctgagatgtatacatcctgctctttctctctccatgagatggaacatgcactggattctattngcatggctactcttgtataaatacagtgtaacgaatgattatacatattgacaaggggtgtgaactttatcttgttcactccaggtctgaataggaacctgcaactacgaactcggcctagttatgaatagttcttatagattaccacctggctgtcacattcatatcataacactctactacacggtagtgtctattagatgcct

SEQ ID NO: 36446 - DNA, 324 bp, Glycine max
  unsure (1)..(324): unsure at all n locations
ttgtgagccctggtgtgantgagtntccctcttcagataaatgtgaggcccttcaccattaggtctcttgtgatgctccgtcaacctttcagcaaaataaagaggactctcccgtccaacataatcttttagaatcccagctagttctgtctgcaattganaacatccatctcagagaatttccattgtttttccttccaggaaactacatttcattgtatggcttctgaatgtagttaacatacaatgaatgagtgacgtgcatgtatgttagagagacagaaagttattcttaatataattgagaaaagaatgacatggagt

SEQ ID NO: 36447 - DNA, 272 bp, Glycine max
  unsure (1)..(272): unsure at all n locations
cgtgaagatcatcaacattacattcaaacatgggtcaaggaatcacaatgagaagtgtacttgggaccttacctanatcagtaagttgaattgatgttgtacaatatggatattatgtgaatcattgctgcctaactaatggttttcatcttcaacgcacattagcaactcgttgttctgtgtccacgggacaatgttgttgtttggtattgttctttgcgtaacaagcctgatgtaacatcaagactgtagtgaacatgttatgtttaaca

SEQ ID NO: 36448 - DNA, 483 bp, Glycine max
  unsure (1)..(483): unsure at all n locations
actcagctngagaggatgcttcatggaggatatgaaagagggagagaatgatagaggggggagcacgatattgaggaagaaaagggagagnaagtgaactntgagttgtgtctcacaagactctcattcatcaaagttacaacaagtgttacacatgcttctatntatagactangtagcttccttgagaagctntcttgagaaaacttccttgagaagcttctttgagaaaacttccttgagaagctagagcttagctacacacacccctctcataactaagctcacctccttgagaagcttccttaagaagattcctaaagatgcttgagcttagctacacatacctctctaatagctaagctcaccttcttgagatgagaagctagagcttagctacacancccctataatagctaagctcacccctatgacananaacatgantataccaaaaaaaaaagtccttactacaaagactac

SEQ ID NO: 36449 - DNA, 665 bp, Glycine max
  unsure (1)..(665): unsure at all n locations
atggatgtctaccttgaccgcatctcagagtcacctgcggcatgcanngctgcgctngngatcatcagcgagcttgattatctgacatcatccgttgcgatacaggattgcatctctatctggagagacgacttgaatctangactcaaatgctatagaatgcactcgtctacttgaacttaattctaaagaatgatcgcttacaacgctatatgttatgtgtganagtatcttatatgatgcatttacgcaggatacattagtgctacagggcttcaccttgctacaacaacatgaagacactcacgagctatagtgtcagctcatgtgacatgatcgaggtaacgattattaacattgatagagatacacacttctcactctcaatcatacaagatacaacgagtgtgcatcatgactctatatctatatacagtatatgatgtanatctgtntgtccacanatatattggaaactatttgtcaacgtgactaaactaacactccctactatgacaagcatactctatagacactctcatcattttaaccctacatgccccactatgctgtacttcatctcgacgatgtattaaggattatctcgccgtgcttacactgcagatctgagtcaagctactcatttataaatgtatatctgccgg

SEQ ID NO: 36450 - DNA, 580 bp, Glycine max
  unsure (1)..(580): unsure at all n locations
tgaatgtcgcatcatangcgacactatgatactcagcttacagactctcgaggaatcatctgacgcagaatggatgctacatcatctatgatgcgggtgagcgttgatacgattgtagctaatgcggacaggatgatacaacttcataatgagatgaactgatcatcattataggactgaatctttccattgcacattgcagatatcagcacagctcttgcagacaatgatctcacttcagacaaaccagagatccagctngctcctggatggccgtaactctttaagcagtgtgtactcattgtgtggataactattatgatgtgagactttttatcgcgaaatgtaaatttcgaatgtactgctaaatgtatactaggtttgattacttgctcatacggatattatcatacaatgctgatgtactctgcgacgatgacgaagggtactcagatatcacaagcgtagctatgcatttgtttctgctaagatatacatccatgaacaatggagaggtggattacttcatactcanatgaaagtgtgcaactatcgatcccgacaagtggacatatacaag

SEQ ID NO: 36451 - DNA, 309 bp, Glycine max
cggtctcctggccgaagatatgacacatattggccttgacagagatagatgcctcatgcctgtcatacccttctgagatcagcggattgtgtagcaccatactgcttctacaagtacaggctgacttattaacaaggagaatgttacaggctctcgttgctcgcaaagggtgtatctgcgccaattgcgccattctcccacactagcgacactgtcacgctccaattgacatttgaccgctatatgctggattcttcatgcgccgataaacagtctatcccccgccatgtgtttctacgctctcatccg

SEQ ID NO: 36452 - DNA, 501 bp, Glycine max
  unsure (1)..(501): unsure at all n locations
gaatcaaagagatataccactcagtgaaacacaatgctgatagagtctatcattntcttagcaaagttcttgtattgagtcttactttattgtaaagctctctttgagtgttagaatctataattctttaaatggtttgtttatgaaagctaggagtcacttagtgacaaaacaatacttgaatgttcttaggttcaaggggagtctaagggttgtgttagtagtgacctagagaattcttgtaaagacaggaggggtaggttagaaatattattgtaatcaatcattgattagtggaaccatttactattntataaaggagaactagacatagcttagattgagtgaattaatataaacctaagtgttctactactctccttaagcttatatgagattcttaaggcttannatcgacacagctttcacacacantttatatattaaatngctttgaaacattggtttataatcattgatgacaactctngtactggacat

SEQ ID NO: 36453 - DNA, 232 bp, Glycine max
  unsure (1)..(232): unsure at all n locations
aaactgtgtccgtgaagaaaatctaagccgaggtgcttccgaaacgtntgcgtaaggaatntcgcgaaggttntcgaccgttcttcgacgttcttcattcgttcttcatcgctcttcgatcttcaacgggtaagtacctcgaaccaagctgttcgattcattctatgtacncatggtgngccacattgagtttcgtgtattcttatttctcgtgtacttactttntatacct

SEQ ID NO: 36454 - DNA, 482 bp, Glycine max
  unsure (1)..(482): unsure at all n locations
tgcgagacagagaccaacatgttagctatcatcgccaagtacgaagaagagttaggtctagccacggcccacgagcatagaatcgcggatgagtatgctcaagtatatgcggaaaaagaggctagaggaagggtgatcgactctntacaccaagaggcaaccatgtggatggatcggtttgctcttaccttgaacgggagtcaagaacttccccgattgttagccaaggccaaggcgatggcagacacctactccacccccgaagagattcatgggcttctcggctattgtcagcatatgatagacttaatggcccacataattagaaatcgttaggaaacttgtatggtctcttagaccttgactagatatgacttcctttntgaaataaaatgagttggtcccatgttcctactcanaaaaaacttgtgcanatcanatcactcctacatctcatttctagcatgcatnttctttcttta

SEQ ID NO: 36455 - DNA, 364 bp, Glycine max
  unsure (1)..(364): unsure at all n locations
tctctctctctctctctctctctctctctctgtcgttntagttnntttgatttggagaataattctagttttcttcgtttgttactacaatatcgttntctatagattaatggaagactaagtctccaacattgttttctcttaaggatcaagcacaactctctntgaggttgtattattactattgcattcttctcagttnttcctcttcaccaattactatgtattcgttgctattaatccatgcatgcttagtgctagaattaatgtctctgcgcctacattacgttcatgccataatgatcagttcgctcatgaataattggtgtatgtgtcgcttaatcacataatgacatgcctatgt

SEQ ID NO: 36456 - DNA, 457 bp, Glycine max
  unsure (1)..(457): unsure at all n locations
ccttttagaaagcatcttggccactggtaatcgattacatcctctggtaatcgattaccagagagtaaatctcattntaaaatgatttagataaaattctttggccaaaccttttgttttttcaatttggaaacttcttcctaagattctagagatcaacttgatcatatatctcgattctcttggattcttggattcttgtcttgaataaaacttgagaagcacttgatctttgggcatcattaaaacatcaaaatatcttgcttctacatgtacatcaagcacaaagatctttttgaaattgcacacggtggtcaatgtctcagcatatctggtatacagttgtggattctgtaagtcaacttacattatttgtaattacctaagttattgtttaaattcatccattaatagaattgtcttaagaacaacaagcatctgactgagacaagtatat

SEQ ID NO: 36457 - DNA, 146 bp, Glycine max
tatagatttattctcgagagcttcgtgtcaattcagcgctgatatgtgagccctgatcggacatcatgaaagtatgaccttgaattgtgaagctctgtgttaattccacgttcactatatgttcgatagacatcggtgacagtatg

SEQ ID NO: 36458 - DNA, 401 bp, Glycine max
  unsure (1)..(401): unsure at all n locations
tctgctggtcaattttagtgtctcgatatattattcacctgaatctgacatccgtgagataagttatgaccatttgaatntctcgagaactttcggtgatcaatttcgagcatctcgatatgttatccacctaaatcggacatccgattgaanagttatgaaccattgaatntctcgagagcttccgttgntcaatttcgagcatctcgatatattattcgcctgaatctgacatccgtgtgataagttatgaccgattaaatatgtcaacatcttccggcgttcaatttcgagcgtctggatttattatccacctgaactggacatccgttcgaaaatgtatgaccatttgaattctcgagagcttccgttgttcaatttgagcgtctcgatatattatg

SEQ ID NO: 36459 - DNA, 667 bp, Glycine max
  unsure (1)..(667): unsure at all n locations
ntgtttgcctacctgacncgcgatctctgagtcacctgcggcatgcaagctatncttatggcttgccttcggactttcactcccgtgcctttctgaagattaagccaagcccctacttctgnggngcaactcctgcttatgacgactatncctggcaagacgatgaggaaggagatactcatctcggccncctgcnttcactcanagatccgtccccacatgaactaccncaaccgaacatagtctggcatatnccggcctcacccacacccgtaaaagaatctgttcccttcgcggaagataagggaaagatagaggcgcttgaagagagggtaagagcagtcgtgggccttgggcaatacccattcttagaattagcggatntatgtctcgtgcccaatatcgtcattccttccaagttcanagtgccagactttgatacgtacaaagggacgacatgtccaanggggcatctcngatgtattgccaaagatggnggcngtatctgcnngacgagagatgttggtcatttcttcagacagctgggcngagcactgtacatggatacaatctgaagcnccaaatcgacatganggactggactgcttatatgcatacagacatacggcttgtccgactgacacttatagtactacgctattcctag

SEQ ID NO: 36460 - DNA, 390 bp, Glycine max
  unsure (1)..(390): unsure at all n locations
atggcttattccttaatggatggcacctcctctcacctctttttccttgtctttcgctgcatctccatggtggaaaatcaccattaaaggacccaattgaagctcaaagatccagcctccatagaagccccacaagcaagcttccatcaaatagcatcatttcttgcactgaattgttgggaggtggaagcaatcttctcaatcaaattgctagcctcaacatgagtcatatcaccaagagctccaccactggcagcatcaatcatactcctctccatgttgctaagtccctcatagaaatattgaagaaggagttgctcagaaatctggtggtgaggacagcttgcacancaattcttgaatctntcccaatactcatacaagctctct

SEQ ID NO: 36461 - DNA, 168 bp, Glycine max
  unsure (1)..(168): unsure at all n locations
atggacgtgaggatgtgctcactgctgccattgngcaaccagaacaccctggtcgtgtgcatgctactagagccagtgtgaccatcaagcaatactttggatcggctccaccggacctccgcactttcttctccatggctccagaagaactagagcagctgactcaac

SEQ ID NO: 36462 - DNA, 395 bp, Glycine max
  unsure (1)..(395): unsure at all n locations
tcagttgttgttggtcttcatacattgagttgttagggtggtgttacattgagtccctttcataagcgttggtttcgtgtgttgggttggtgtggcttgagtcatccttgaactgaattatagtttgtagtattntgaggttcgtgatataattgcagttttcattaaaatatttttctgagatttggttgcattgcatggtgtgactgtatggagggtttggagtccatgtgtgagggaataattatgttcatgacttgnggattgtttaatttgtaagctggaaatttatttccttgcaaaagaaaaagttggtaaaggggaataacaaaaaacaaggttataagtaacagataaaacagtcatgtagcacaaactccatgacttccgagggg

SEQ ID NO: 36463 - DNA, 389 bp, Glycine max
  unsure (1)..(389): unsure at all n locations
ttccgctctggagtacgacagtcaccgcttcaggagcgttgtacaccagcagcgcttcgaagccatcaagggatggtcgtttctccgggagcgacgcgtccagctcagggacgacgagtatactgatttccaggaggaaatagggcgccggcggtgggcaccactggttactcccatggccaagtttgatccagaaatagtccttgagttttacgccaatgcttggccaacagaggagggcgtgcgtgacatgagatcctgngttaggggtcagtggatcccgttcgatgccgatgctatcagccagctcctgggatatccgatggtattggaagagggccaggaatgcgagtatggccagaggaggaaccggtctgatgggttcgatg

SEQ ID NO: 36464 - DNA, 294 bp, Glycine max
  unsure (1)..(294): unsure at all n locations
gtgtctccatggngagcagctagtgtgtagtgaggaaaaaagatggaattatgaggttgtgtgtagactaccgccagttcaataaggtgacgaataagaataagtacctttttcctagaataaatgaccttatggaccagctgataagagcttgtgtgnttagcaagatagaccttangccaggttaccatcagatctaagtgaagtcntgaaatattccgaagactgcctntacgacccgttatagtaactatgagtatctagtatctagtatttttcttcaatgtgactaat

SEQ ID NO: 36465 - DNA, 330 bp, Glycine max
gcttctacaattatgtgaaggagatctctctcaaccttatgtgccattacctatcacaaattctgaaatgcgacctcgtttgcaaccgagaattatcttacaatcaagggtcattctcatgaaccaccaacaagtgcagcaacaactaattaagtgggaaggtcttgaagatgatcaagctacatgggaagatacttcaacaattaaacttgctttccttgatttcaaccttgaggacaaggtttcttttaaaggggacgataatgtaacaagttcagccttatgggaagtgaagaaagaataggtgggaccaaagcacgaagacacatg

SEQ ID NO: 36466 - DNA, 154 bp, Glycine max
  unsure (1)..(154): unsure at all n locations
ctgatcctagcaatatgtatattcataaataaacatggtaagctgatacatcttctgaaatgttnnttatttggaacagtgaatctgtctggatggatgactgatgaacagcttgcaagagagatgattgctggagtatatccacacattatta

SEQ ID NO: 36467 - DNA, 354 bp, Glycine max
  unsure (1)..(354): unsure at all n locations
ggtagctgaatactgttccagctgcagcaggaactctntataaagacattataggactntgtcctcatcctaaggtcctccacccctccctcttagtctgtttgcagtatgcaagcttacctttgtagttgcttgtagccgtatatctntagttgagacaaaagagaaagaatgtttataaagaanatgaatattcaataagctttaatctgaaggatatagccaaatgggcagaaatngattattcacagcatactctagctagcatgatttttaaatgggtatgattcataatcattcaaacacaatgtagatagaaccaacaaaagtgttcacgatctgtngaatttgata

SEQ ID NO: 36468 - DNA, 155 bp, Glycine max
  unsure (1)..(155): unsure at all n locations
tcttcattattatccatgtatctcttcacatgtcttgtgctaaatgttgttaacatgattctctataatatccactggatgatcttgctatagaagccttgatttcatttctatggttcanatttcttggtcatgttcttgaaccatgagttgtg

SEQ ID NO: 36469 - DNA, 105 bp, Glycine max
  unsure (1)..(105): unsure at all n locations
catacatgaaatggatatattatggaacttatatagggggcaatattctgtaattttggtgtattcttggntatttccaanaaatacaatatttaaaataaaatg

SEQ ID NO: 36470 - DNA, 297 bp, Glycine max
  unsure (1)..(297): unsure at all n locations
tgcagctcagcggatcgtagcgacactatccttggctagcgagacctatggtcgccaagctaaattccttacagccataactgaggttcgtaaagctaagcgccagtcatggcagctaagctaaattcattgccgcaatgtgagcgctaagtgagtccttatcatctacgcgcatgctcctctgtacttaagatgcatcattntagctaagctggctagagcctggcttagcgagagttactgctnttcagatctgcacacctcgctaagcggtcttatcctcgcgctaagccaagc

SEQ ID NO: 36471 - DNA, 362 bp, Glycine max
  unsure (1)..(362): unsure at all n locations
accagagagtaaaaactctggtaacttagaaaanttggagaaaaaattctttgaaaaacaaaattgtgctatgnttgttttttgaaaaatcttttcaatacttaccttgtgaagtcttcttgatatattctcttgaatcttgaattcatcttctcttgaatcttgaaatcaaacttctcttgattcttgaatcttcttgatttcttctcatgaaacttgaaattaaacttgatcttgaacttgttgactcaatcttgaaatcattctttgggctttttgtcatcatctntatcattatcaaaattacttgaatcaacttgattcatcattattaagcttgcttctacatagtgaacttcatg

SEQ ID NO: 36472 - DNA, 265 bp, Glycine max
  unsure (1)..(265): unsure at all n locations
acaatggtgagttggttgtggataagcaagtgttacttacattctccatagcanagtatgtngatgatgtgaatngtgatatggttcccatggaagctggacatatgtngctnggaagaccttggcaatatgatagaggtgttgtccacaatggngtcacgaatcgatattagttcttgcataaaggtaanaaggtagttctcaccttcgtctccaagtgaggtgtgtgaggatcatataacaatgagattaanaagagaaagag

SEQ ID NO: 36473 - DNA, 522 bp, Glycine max
  unsure (1)..(522): unsure at all n locations
gcttctacttatgtggcagggcgggcttccttcaccttcttgtctcaaccgcgagccttgactaccgttcttccttcccgcgatgcttctctntatatctgcctgagtgggcttatagtctaacccatacttcccacgatttcctttggcatttatcaggccagttatgccgccgttatctttgcctaaacccattccgggttcgtaaccgttccccaacataactcgggtcatcattactgctgcatcggataggcaagctggcccagagaaggagtccacggaggaaatgcttaccacctcanaagactggaaagcagtttctaatgactcctttgcggcctccacataaggcatagaggatgggcagctcaccaagaggtcttcctcgcctgatacgatgaccagatgcccttccactacgaatttcaacttttggtggagtgtagagggaacaactcccactgagtggatccacgggcgccccaacagacagctgtagggggggtnnatatcatattt

SEQ ID NO: 36474 - DNA, 259 bp, Glycine max
  unsure (1)..(259): unsure at all n locations
gttgatgcaagaaggtcatccaatggctctatttagtgaannagtaagtggtcctacccttaactattcaacttatgatanagagtngtatgccttagtacgggcttngaaaacatggcaacactacctttatcccaaggaatntgtcattcatagtgaccatgagtncctcanatatatcaaggggcaaggcaagcttaacanaaggcatgcgaagtggggtggaatcctagagcaattcccttatgttatcaaacat

SEQ ID NO: 36475 - DNA, 464 bp, Glycine max
acatggggtacgaatgaggcccatgatatatcgagaggctcgaaattgaaaaatggaagttctcgagaaattcaaatggtcataacttttaacttggatgtccgattcacgcacataatatatcgagacacacaaaattgaaaaatggaattctcgagaaattcaaatgttcataacttttgcctcgaatgtcagatttaggcacataatatatcgagacgctcgaaattaaacaagaaagctctggtccaattcaaacggccataacttttgacatgagtgtatgattgaggcccatgatatatagagaacgctcgaaatgaataatggaagttctcgagaaattaaaattgtcataacttttcactcggatgtccgattcagacacataatatatcgagacgcttgaacctaacaaggaagctctggtccaattcagagggccataacttttgacatgggtg

SEQ ID NO: 36476 - DNA, 184 bp, Glycine max
agcagagcaattatgacctctccagcaacagatacaaccctggatggaggaatcaccctaacctcagatggtccagccctcagcaacaacaacagcagcctggctccttcttccagaatgctgctggcccaaacagaccatacattcctccaccaatccaacaacagcaacaaccccagaaaca

SEQ ID NO: 36477 - DNA, 456 bp, Glycine max
  unsure (1)..(456): unsure at all n locations
gcttctcttcctttctaataataggggaaggagggaagaacaattatgttcaaccctcctggtatctgagattcacttaaaattagtgagaaaaattgtttccgtgaagaaaatccaagctgaggcgcttccgtgacatttccatgggtgatttcgcgaagatnttcaaccgttcttcatcgctcgttgttcgttcttcgtcgttcttcagtcttcaacaggtaagttcccgaaattgaacttttcgattcattctatgtacccttagtggtcctcatttgtttcgcgtgcttttattttcatttcatttacttttcgtacccnnctttgacgtgctgtagtcatttatttaagtcattntctcgcctaatcaaaaataaaataaatgtccaccgatcattcgtattgtaacatcctttaatttctgttaaaatgtattccgaccgttcggtcatg

SEQ ID NO: 36478 - DNA, 253 bp, Glycine max
  unsure (1)..(253): unsure at all n locations
tagacctccaatctntaatggagagggttaccactactgganaacccgaatgcantattttatggaagcaatagaacttaagtattgggaagccatagaaatagggccatatatacccaccacagtagaaagaatacaacagatggtgcacatcaagtgaancataacaataganaaacctagagatagatggtctgaagaggatagaagacgagttcaatacaatctannaagccaaaacataataacatct

SEQ ID NO: 36479 - DNA, 376 bp, Glycine max
  unsure (1)..(376): unsure at all n locations
gactcanagaatggatcatatgtngaatacttactatttccatgcatgtggaagcttctttgtcttgttatagtagcaggcaaggcaatgatacaaatcttctagaatttcatatttttattattaattaagacttgatcaatcttacattaattgaatttaccgtggtgatcatgtgcgtgtatttggtagatctagctagtgaatgttttataccaaactgaatgatcaaagtgtttaagtaatatccaatagattagttttatctttaatatagtcatccctagactntattctatcatttgtcttanattgatatattaatgatcagtggaatatcgattaacacagaagcatctatttattgacccagatc

SEQ ID NO: 36480 - DNA, 259 bp, Glycine max
  unsure (1)..(259): unsure at all n locations
tagagtctgaatagttcgtgcagtctgaccatctcgttgaggatgataagctgaactaatcttcagctttgtccccaaggcttcatgtaaacttgtccacaatcgcgaagtgaaccttggatccctgtcatatacaatactacgaaagaattccatgccaccttactacttacttgatatacaactccactagctnttccattctatacctcatattcactgggataacacgagccagattggtgagtcgatctactat

SEQ ID NO: 36481 - DNA, 326 bp, Glycine max
gaggacacatgaacgataacacaattcatggcgctccgataaaggggttgagaatggataattacactaagcaatcactactcatagctccaaactcgaaggtggaggacacatgaacgataacgcaattcatggggctccgaaaagattgataatggagaattgctctacgcaatcactacgcatagctccatacgcgaaggtggaggacacatgaatgaaaacgcaattcatggggctccgaaaagattgagaatggagaattgcactaagcaatcactacgcatagctccaaacttgaacgtggaggacacatgaatgaaaat

SEQ ID NO: 36482 - DNA, 413 bp, Glycine max
  unsure (1)..(413): unsure at all n locations
cttctacatcatattcanactngtccanataaataatanagtcatctcgactcanagatagtcatataagtctcatacaattaatatagaacctatatcctaatgtcacatcctatcagagcgtggtgttcccgtgtcctctagcatgagggtcttcatagtcatccacctattcatctgctcgcccgaacacaaagttcanatcatcacaggatcgaaacacatacagcacaccgggagtgagttatcacattgctaactactagagagaaacaacacaacatatagtaaccaaatacaagttacttagcatatctcacatntattcatcactgtgtcattcatcaatcacactnttcatccattaatcacacgtttcaatcatcaatcattatacacaggaatcacacact

SEQ ID NO: 36483 - DNA, 372 bp, Glycine max
  unsure (1)..(372): unsure at all n locations
actgcacaaaccttngacatatagttggctaacatagcaccttgtggtgacaaggaggctgttgtcgaatcaagtgacaatgttatccactctgtcaaactccatcctacctatgggtttatatgggagagggaggaaattgatgctgttccctctgaagatggagtcattccaccaactgggtggaatatatatgaggattaatatgactgaggccactgcatgggccagaattacggcttatatggccgaaaatagactaaatacggtctttgaggctgaatctcaacaaaatatggcagttgaagccaagatcgaagatcatgaaaacaaagaaacaaaggatcgaagactggattgatttatgatgat

SEQ ID NO: 36484 - DNA, 201 bp, Glycine max
  unsure (1)..(201): unsure at all n locations
caaatgcaagtgatatgattcttgtcatagtttggtttgccaaattcactgtaataaccttcctctttgaacatacaatgaaactccgataatattgaccttgatcttgacaaggatcatccncttatcagtcaaacaccaagttaaggggatacccataatctgaggcaatatcaagtaagatggtgacccgagaatcat

SEQ ID NO: 36485 - DNA, 397 bp, Glycine max
  unsure (1)..(397): unsure at all n locations
aaatcaaaataataaaaatatatatattanaaggaaattcanaaaatatattacataagtactaaacgaatgggagtagtaaattataaacacataataataataataataataataataataataataataataataataataataataataataataataataataataataataataataataataataataataataataataataataataataataataataattagtcacaatctattattaggtccggatacatttgtcgcactttttatactttcagagactaaattttatattntcatctttttggaacacatttatcaatgaagtgagaagatgaacagtaaaaaataatattatgacaaatatgtccttatgctaacaatccaca

SEQ ID NO: 36486 - DNA, 270 bp, Glycine max
  unsure (1)..(270): unsure at all n locations
tcagctcacaatggatcactcttcaagttaataatatctcctctttcttaatgtatatcccgtgcaacttcttctatcntacttgtcaattattcgtgctgtataatgtagaattcttcatctacatcacacatatgttctatcagtaatacccttctcgttacaagaaggcaatagacgcgtntgctatgttatctatttgggtatatatatactactatatacatctttcgatgttgtcttcattatgagcatgtgagtgcacacatg

SEQ ID NO: 36487 - DNA, 491 bp, Glycine max
  unsure (1)..(491): unsure at all n locations
tgatattaatatatctcanaaaaatatattataaaattatatttaattgatcattntatatcacaacaaatttgaaaatntaattgtaaataaaacaataataattttaataaattattttataaataaataaaatatttcattcttaaatttatctcttaactcctaactccttgagcctaccttgtatatatatgaggaatattagtaacttgctcaaatactctgtgtcaaattgcgtgtcagtcgtgccaggctagcaaacatgttaagagtatcgagggcatggattttttttatggtatctctgtccaagaccatgattaattaatttcattgcatttcaaanagtgggaattaanatcagttatttcaaaatgaataaatatcttnntttcgtgacactacattagtggcttttttaataaanaaaatatttcatataaaatacggatattttattttntattcttaaaatatctaaataatac

SEQ ID NO: 36488 - DNA, 259 bp, Glycine max
  unsure (1)..(259): unsure at all n locations
tgcatgcagacaccacagtgtaagttatatatcacacatatntatatggaaggcatntggaatatctgtgacataccanacaagtgctccaaactccaanataattgcnagaagtgtcagtaacttgttatgaacctgtctaatgcanaataatgagatagtgagctaaactactcacaagancnngatccttatcactagtaatctctactggtgctgccagcaatctatagaattaacagagacanacttcaacatg

SEQ ID NO: 36489 - DNA, 422 bp, Glycine max
  unsure (1)..(422): unsure at all n locations
gaatggaaatctcatgcaagcacgaacatgcattcgtcacacacaggactttagaagggagaaggcacgggtactaatccccttttcttaaaatttctcatgtactttattaagtaaaatcaagtaaaattaagtaaagttatttctcacggatttctggatctatccgtccaagagcacgatagaaaattattattacatagactatattgatttaagaaaaagaaaaaagttattacatagaggtgttntaacctagtttgatgacatcaacatcaaatcaataacatatgattctaagaattaactcgaactagttagtacaccaaaaatataaaactggaactggttataagntttgttcctaatcatccgaccattagttaatacactagtagaaactaaacattcgaacacacact

SEQ ID NO: 36490 - DNA, 462 bp, Glycine max
  unsure (1)..(462): unsure at all n locations
atgtccatgaatcgcgcttgatactgagccctgatancccccnaatatctcagcctaagttttatatatatggcccttaatgttaccattacatatggccctatcaatcccatatgatcttagttctagaagtctatcctctataattccattattaggggcagaccccgaaatgaaatatactactgtattaacaagcgatataaaatatacccaaagaatcagctatctgtcaaaagccattcaacccaacttattatctgctgatctcttttcggaaactactgtagctgcagatatggagatctataagaggagacacacctgagacatagaaggcatcattcttcctactcaatggcgatatgtttcatgacgcgattattagcgtgtgagaagatggaacctgggccacgccgaatccctaattagaaggggaacgtgccaaaactttgaaggacn

SEQ ID NO: 36491 - DNA, 420 bp, Glycine max
  unsure (1)..(420): unsure at all n locations
ctatagatattctattacttagaattcaatgagaacttatctctagaaatnngctttgatcattaagaatttatgagnatgtggattcatggtaggtgcatccacagtcaagcatagtaagggatttgcaagacatagtgaagctggttgngctctacactatgcaacataatggtgattgtaagttgtgccatgctaattaagagtaaccttagcacgtgtcacaaccaggcttgggcaggtaccccactcccatatatgatgctagatatcaccactcatcatatcccattaacttnctanaggatcatgactgactaatgcccanacattnttctattataggaatctaattagttctcttttgtaatatccttcactgtggaactgatacatgaatccgcacattggcttgtatca

SEQ ID NO: 36492 - DNA, 360 bp, Glycine max
  unsure (1)..(360): unsure at all n locations
gtgtaagtctntatgttcttacattggattcagattgcacgtattagattnttttgttaaaataaggattacgggtaacaagtttattattaaacttatttatgtgcaatacttaaattgcacttaaggacttcaattgatatctttaaagacttaagttaaaccagttggaaatagacatgtttgagatcatattgcatacaatttccatgttgctcattcatattgatatatatcattgagtgtattgacgaaagccatggcgattccattatngcatgtaattntcaagtgaacgtctatagataaataacatacaaatgtgtgcctaaagaattgtgatacaattngtacactact

SEQ ID NO: 36493 - DNA, 290 bp, Glycine max
  unsure (1)..(290): unsure at all n locations
taagttgtaatatcttaattcaacctcctcttcttaagatatctgaggccgcttgtccaacaagtggtattagagcgggattcttgtataaagtntanaaacttcaagaatagatatgggctcatccaaatttccattntctgaggacaattctatcaataggctcttatgttcaatggtgagggctatcattattggaaaacccgaatgcaaatctttatagaagccatagatctaaagatatgggaagccattgcaattgattcatttattcctacaatggtagagag

SEQ ID NO: 36494 - DNA, 431 bp, Glycine max
  unsure (1)..(431): unsure at all n locations
cgtctgatatgttctatgagttattcatgtgtgtatgaatgtatcgttgtatgttgttaattgattgtttgtataatggtttatttttttcttcagtaaccaattgttgtcttgcactctatgggacgattattgtcttcaattnttggaatatttggatcaacatgagactgaagggcctattattgtgttgttgaccaattccagaattaaagagggccagggtatactgtgatatatagtttattgtttttcatcttcatcgcatccaacttatggttgtatttctgactggtgcaggatcctatccatgctcagttagcaattctttgaaggcttctaaattgactattaatgagccagtggcaccaattgaagaattcaataagaaagtattgcctcatgnttgtattaatatatgtnntgttttc

SEQ ID NO: 36495 - DNA, 220 bp, Glycine max
  unsure (1)..(220): unsure at all n locations
tataactaaattaacctcttggaatattacgaataaaaataacacaacacataatcacatatcaaacataattactaataatatatatatatatatatcagggggctacaccatctatgtactctggttcgatctcgaaaagtaaagttctatgctcgacagagttccttgttacgagtntgctcttatgatcaccacatgactgtgactctggatgatc

SEQ ID NO: 36496 - DNA, 444 bp, Glycine max
  unsure (1)..(444): unsure at all n locations
gctgcacagaagggcaaatgtctgtgtagtggtcatcanaggagcataaaccacagagtctaacaacaggtgcagatttttgattcatagtcagttaggttaccaggttaaccaaggcatctagtttaccttcaagcttcttagtttcagatgatacaaatgagtttgtggctacttcatgcactcctctaatgactatagcatcatttctggcgctaaactgttgggagttggaagtcatcttctcaattaaatttctggcttcagcaggggtcatgtctccaagggctccaccactggcaacatctatcatacttctctccatgttactgagtccttcataaaaatattggagaagaagctgctcagatatctggtggtgagagcaactggcacatcagtttttaaatctctcccagtattcatatagactctctccactga

SEQ ID NO: 36497 - DNA, 237 bp, Glycine max
  unsure (1)..(237): unsure at all n locations
cttcatctnttcctctggagtcttatgttgttcttgattccatcttgaacactttgaactcattctntgatcgaccttngagctgtntgtcatcacctttgtcagtcatctttggtatcatcatgtttatcatcaaaacatctntgaatcattcttgattcaccatgaagctntgcttctacaatctccccattactgatgatgacaaccctgaaatcaagaaacacatacacattc

SEQ ID NO: 36498 - DNA, 450 bp, Glycine max
  unsure (1)..(450): unsure at all n locations
cgccttatcccactaggtggtgtcggctacatggatcaacttccaccataatgttctatcaagtaccatacttctatccaaatcattaagttcgagatcctttntgataacctctcttatagtctctgtgggtcttcctctgcctcgaattgtttgtcttctctccatctggtctactctcctcactacagagtctaccggtcttctctctacatgcccaaaccacctaagtctattgtccatcatcttctctacaataggcgctactccaaccctctctctaatagcttcgtttctaattctatcctgccgagtcttaccacacatccaccgcaacatgctcatctncgctacacctactttatttctcatgtggctcttgaccgcccaacattctggttcgtacanaatcgccggtctttaccgcagtccgataaacttttcctttaa

SEQ ID NO: 36499 - DNA, 438 bp, Glycine max
  unsure (1)..(438): unsure at all n locations
ctctctcatgtaatgatgtagaatctacagccaaagacttcaaaaaagggggtcattccgaaacatctcctgtagttcttcaagaaggtgagaaattagaagatttcagtgcaaatgagtctcatttgactgctaaacctgatcctccacagctcaattctggaatcaatcagagaccaaaaagggtcactaaacctcccgaaagatacggatttgaagacatggctgcctatgcattacatgcagctgaagaaatagattcaaatgaaccagccacttaccaagaagctatcaatcatcctgaagctgannaattggtgtagctttgaaagaggaaatggaatctttgtataagaatcagacctggaaactttgtgaactacctgaaggaagacatgtggtaggtngcaagtggatattcaagaggaaacctggtct

SEQ ID NO: 36500 - DNA, 310 bp, Glycine max
  unsure (1)..(310): unsure at all n locations
gaatcttcacatacaagttacttgaagaatngtgactnttgganatgtattcttcgaaatcagtcactggtaattgattaccattaaggtgtaatcgactacacatcaacagatgtgactcttcattctgaatgtagaaattaaacgtgttacaaacactggtaatcgataacaagtattgtgtgatcgattacacaaattagatatgttcaaacacaagctgtaactcttgagatctgacatcttannagtntaanacactggtaatctgatactaccttctggtaatcaattaccagagagtaaaact

SEQ ID NO: 36501 - DNA, 477 bp, Glycine max
  unsure (1)..(477): unsure at all n locations
aagcttatacaacttggtgaatggattacaatgaggctataatcgattaaaatagaaaagttttgcctttgaagaaaattctctaactaagaaactnttcttcacacaaaccatgataatgcatgatgtaatacaaatatcaaatgtactaagatgtaacaaccaagataacaaccaatacaaatgccactcaatggagttggggatgtaaaaaccaaaacttcttcaagctntagcccttaggttgttcagaagctagctagttagttaagttgaacatcctttagattgctagctggttgaaatcaagcttaacgaggtggatatagataaataataggaggaaaaaagttttaaaatataaaattctattanaacttttaaattataaaaagatattaaaagtttaataaaaatacaaagaatagcaactatttaatgtattagttgcacatactttgttaaacaaatgtgtga

SEQ ID NO: 36502 - DNA, 240 bp, Glycine max
  unsure (1)..(240): unsure at all n locations
tctcatcaccatatgattcatcctcctacttagacactatctcttaatcgaatcgcgcatttaccttcattgtttaacctgagtcacacttatggcttgtgagcatgtgaacacatatagcatgttcttgcaactatctacttgcaaatatgtcaaattggagaaagacacactgcatggtaccaaatntattgaactaaaacagatgaatacttccaagaattctctgaaccattggaa

SEQ ID NO: 36503 - DNA, 408 bp, Glycine max
  unsure (1)..(408): unsure at all n locations
atcttttnntgtttatctctatatcttcatattcaatgtctaccactgngctataagaatctgaatatattgcttggcagaattttagcataaaaagtcctgtaaattgtcattaattagttntagaaagcattagttggaattcagattttgagatcacgatgagagtgcatttatccatgcatttcatttattgtgtgcacattagcatgtggtttattaaaagttgtgtcttaaaacataacttattcataactccgtaataaattcaaaaattactcatgttgataaattattcaaacaaactaccactgttatgtaaaaaaagcctaaattggaatacggntataggtctaataaactgtatattctaaagcatatagttaaataatgaaaatatacgtcact

SEQ ID NO: 36504 - DNA, 431 bp, Glycine max
  unsure (1)..(431): unsure at all n locations
tcacttgattcatgttgtcttagagtcatgtntagtcataataattgtcacattatgttctaagtttgtgttgaattctgacttctgtgatggaattctagatacatttcttgatgtattcttgtgattcttagcctatcattngaattntgagtctaattcatgcatcttatntagttcataacatgttctacatcaattcctagaagtagtctcgttgaactttttttttctangtttcctatatgatgcctataaaganatngagttgtggtgctgagttgtggctggatntgtgaatcanaataagtcttaatctctcttgagttgtgtatccaaacaatatagcataccaaacacatattgtactattcaagccttaacaacataacactactcttgttgctanngtaaatctggtgctgcagtct

SEQ ID NO: 36505 - DNA, 494 bp, Glycine max
  unsure (1)..(494): unsure at all n locations
tgtagctattagaagagaatgagcatactattagaagcatgactgataatgttagtcagtttgtcagaatgattgtgaaggaatgcattaaccgtatctcggtgagagtgtgatccttaaattntgagagaaacgactatcatttagtactgattnttgcatgaatctttgaagtatggactgaatgcatgaaattgacgatgatgtagtgtcgcaacctacccttcggcgggagggcgacgcgagactcgcgggatgcgtgttccacgaaaggaatacgcgcggagtcgccaccaacgtttattcgaggaaaacgtcggataaaccggaanagacgcgatctacgaactnttaagttgaaagggtcgggagttgtatttacgcacggngaaggtatagcaccccacacgcctgtcccaagggacggcagcctttaatcgaatgtgcaaacatgactttgattntatgttccctttatggtctatatccttata

SEQ ID NO: 36506 - DNA, 719 bp, Glycine max
  unsure (1)..(719): unsure at all n locations
agcgatggctccatgatcgccntcgacncagcatctctgagtcacctgcnngcatgcagctangaacncaagctctttacttcagtgcatggatgcatgacttatgcctanaaatctannatntggttgttgaaagtggagaggcatgannaatatgacatgcttgagagggttttactagaattttggctgcccatgacggatacttngcatctangtagcatggaaaataccttntaatggtatgtatatatgtgtgtgaatataggtagcgtggaacatatctctcaatggtgtgtgtatatatgtgaatatatggcataaaatgccttgtgaagtgtgaatgagtagcatanaacaaatgcctctcaacatatgctgtattgaggatatgtagcattataagccctctagaaaatgtacccatgtcagaaatggcctgaggacgcttcctacatgaatatatgatgcggaactatccctganacgtatatcnatggcatcgcattccctcttanatgccagatgtgcgtgacataagactagttctccagtgatatatatggataacaaaatgggactgaacaccacacacttnggtgctacatacacacatccaacgtgngnggtagttgcgataccaacattangattgaaatgttgaatnttacacattgcttgacacggangtcggtctgcgtggcggtgttgtgtgcgcg

SEQ ID NO: 36507 - DNA, 377 bp, Glycine max
  unsure (1)..(377): unsure at all n locations
tgctcaccaacacaagataagaatccctcatgttgtttcatgtaaacctcttcttctagatcaccatttaggaacgccgtgttcacatccatttgatgcagctcaagatcaaaatgagctactaatgccagaattactcgaagagagtctttcttagatacaggggaaaaggtctctctgtaatcgattccttctctttgagtgaatcctttagcaacaagtcttgccttatgtctctcaatgttgccttctgagtctttctttggtttgaagacccatctacatccgatggcttntcaccaacaggcaactcaacgagatcccaaacttggttagatgccatagaatccatctcatccctcatagcattataccac

SEQ ID NO: 36508 - DNA, 551 bp, Glycine max
  unsure (1)..(551): unsure at all n locations
ttggttgcattgggtgcctttgacncgngatctctgagtcacctgaggctgcagctttgcanatcaacgacataacgtttatttgatgtctgatgagtcctgnatatatcagacgctcgagatgaataccatactctgagcatattatacgacataacttctacttgatgtccgatgagtccggttatatgaacgctcgaattgatagtgaactctgagacatcacacgaaatacttttactgggagctgatgagtccgtataatcgaacgctacaatggaaccgagctctcaaaaatcaacgacacatgttttactggatgccggtgatctctcatatatgacgcttgaatgatgagaagctctgacaatcaatacataactttactgatgtgatgatccgtcatacagacgctgaatgatttaacttggcaattacacaaactttatcgagcgatgtcctattattaactcaatgatatcactcacaatcacaaaactttattagtcgagagctgaataaacaccatgatggacttgacataagcaacg

SEQ ID NO: 36509 - DNA, 376 bp, Glycine max
  unsure (1)..(376): unsure at all n locations
acgggactgaattagacatccgagtaaaaagttattgtagtttgaagatgctcagagcnttaccattcaatatcgagcgtntcgatatattacgggactaaatcagacatcagagtaaaaagttaatgtcatttgaattatctcagagcttcggtattccatttcgagcgtctcgatatattacgggagtcaatcagacatccgagtaaaaagttactgtcgtttgaattngctcagagcttcgataatcaatttcgagtgtctcaatatattacgcgactcagtcagacaaccgagtaaaaagtattgtcgttggaatttgctcaaagcttcngtattcaatttcgagtgtctcgacatattatgggactcaatc

SEQ ID NO: 36510 - DNA, 254 bp, Glycine max
  unsure (1)..(254): unsure at all n locations
cctgtgctacacatagatgacatgtgtcggatacctacaaattatattatgtatcgaaacagagggtcattttatactctgaatccttaatataacctcttataccctcttctntaannattacttagcgagtatcttttntccagtgatcaacatgattatgacgtcgtacaanaagtgtgcaggtggacatatagtgaagttcttgacagcatatatatcaatagatatgagcgctgtataatcaagattct

SEQ ID NO: 36511 - DNA, 414 bp, Glycine max
  unsure (1)..(414): unsure at all n locations
tggtggtcagcagatgatcacanaccacaaacccttgcaacaggtaaagatttctgattcaaggccagatgggttaccaagttaaccaatgcatccagtttgccttcaagcttcttagtctcagatgatgcagctgagtntgtagctacctcatgcactcctctaatgactatggcatcatttatggcgctaaactgctgagaattggaagccatcttctcaattaaatntctggcttcagcaggagtcatgtctccaagggctccaccactggcagcatctatcatacttctctccatattactgagtccttcataaaaatattggagaagaagctgctctgatatctgatggtggngggcactggcacatacgtttttaaatctctccagtactcatatggctctctcactg

SEQ ID NO: 36512 - DNA, 423 bp, Glycine max
  unsure (1)..(423): unsure at all n locations
atcctctaagtcacctgctgcatgcaagctngcctcanagaggtccaggatggacaatgcatcctattgaactagctccgctccggagtatgatagtcaccgatttaggagtgctgtacaccaacagcgcttctaggccatcaagggatgtgtcgttctcctggagcgactcgttcatctcatggacgactagtatactgatttccatgatgaaatatggcgccggcggtgggcatcactggctactcccatggccaagtttgatccagaaatagtccttgagtattatgccaatgcttggccaacagaggagggcgtgcgtgacatgagatcctgtgttatgggtcagtggatcccttttgatgccgacgctatccgccaactcctaagatatccgttggtgtttgaagacggccatgaatg

SEQ ID NO: 36513 - DNA, 373 bp, Glycine max
  unsure (1)..(373): unsure at all n locations
tgctngaagagatcttcaatggctacgaacaacaacgcatttcattttgcttcttctttccccaattacatatcacataaagtagaagattcaagctttcttttatggcgtcaactagctaagcctattatcaaatcaaacaaacttcaatgattcattgctaatccgcaaattccactttgatttctctntaaagaagatcatgaagttggacgtgaaaatctagtttatgaggcatgggagtagcaaaattaggtgttattaatttggcttcaatccattctttctacactgatatattctcatgtaatcggttataatcactcctatgaagtctaggagcacatccatgattactttcacaagcatagca

SEQ ID NO: 36514 - DNA, 352 bp, Glycine max
tggatttccttttagtagggagtctatccttcctaagatggagccaaacccactcaccctcattaagaattagcttttttcttcctctattgtctttagttgaatacacctttgttggattctctatttggttcttaaccttctcatgcaacttctttacaaactctgacctagattccccttctttatgtataaaaaaagtgtccagtggaatgggaatgaggtctaatggtgttaggggattgaacccacctcaaaaggggattgcttggtggttctatgagtccccctgttgtatgaaaattctacatgaggaagatactcatcccaagacttatggttgtctttcaga

SEQ ID NO: 36515 - DNA, 483 bp, Glycine max
  unsure (1)..(483): unsure at all n locations
aagtcacctgcggcatgcaagcttggcttagcgcatgaagactgagcgcttagttgatagacaattgcaaaagaatttctggagtcttttctgtctatctcttcacacaagcttaaaaccccttgttcattactaaacaggctgaaattaatcacaatcacaagcaaggtatcctaactacatgcaagagataacaaatgaaaaatagaaaagggaaacaaaagttgggttgccttctagtaagcgctcttttaacgtcactagcttgaagcatcgtcctgttatccaggatccaacagagttcctacttcaaggaccttcttctcaggtctcttttcctccatcacatgcactntaagacataacatttggctaggtggatctttgtcctcatggaacaaatcanagctgatcttctgatcttatatgcccatctgcaatatcgtttntcccatgtccaccacacaacttacagtagacatg

SEQ ID NO: 36516 - DNA, 422 bp, Glycine max
  unsure (1)..(422): unsure at all n locations
tccatcacccaaccctctcttctcatgggggtagacctatgtaagtttaatccaagctttgttcattttactaccgtatagaaggttggcattgtgcatatctgtaatgaataggaagacgtgcaattaatgagaaataaactaagaaacatgatgcataatttgataaaccattttactacatagacaattgcatatgcctttgttgagctatgaaacatgatgcatgatttgataaaccatttactacaatgacaactgcatatgcctctgttgagctatgaaacatgaagggtggtagtgaaactaatcaaattgttgcctagataatgtaaaagccaatggaagagattngaaattcttgttactatagtctctatgatgtagcctctatgccattggttttcatttttgcacgtgta

SEQ ID NO: 36517 - DNA, 449 bp, Glycine max
  unsure (1)..(449): unsure at all n locations
agcttcanaatattngaaagaagcccatttgttgatgaagtcagtgcttccttctaaggatctcaatcttatcgtgtcatgtaacactccaaacaaatcacactagaatgagagagattcagaggcaatacaggtgtgggatgcatagttgagtgtgacttgaaaaattaattggcacttgttatacaaacacgatgcatttaattttcggtcgctcatcacttaagagctccatagttaagtgtgcttggtttggagcaattatgggatgaatgacctttggggaaattttctgaaaaacatgtaagtgagaataaagcattgcatactgaaatgtattgtgttgggttntgagggcaatcgttgatcttggaagaaaccaaaacatattgtcaaagtctcagaaaaaggatacctacaaagggttctgaccaacatggatgtcaaga

SEQ ID NO: 36518 - DNA, 420 bp, Glycine max
tggagaggatacttcaatggaggaaaagaaagagggagagaaagagggaggggggagcacgaaattgaaggaagaaaaaggaagagaagttgaactttgagttgtgtctcacaagactctcattcatcaaagttacaacaagtgttacacatgcttctatttatagactaggtagcttccttgagaagctttcttgagaaaacttccttgagaagcttctttgagaaaacttccttgagaagctagagcatagctacacacacccctctcataactaagctcacctccttgagaagcttccttaagaagattcgtaaagaagctagagcttagctacacatacctctctaatagctaagctcacctccttgagatgagaagctagagcttagctacacacccctataatagctaagctca

SEQ ID NO: 36519 - DNA, 447 bp, Glycine max
agcttctctgaagtcaaaccacacacatatatatatcatgacatgggacaaaatagttcttataaaaatgttttccccagaacaagtacacgtaaattataacaaatgaacaaacaaaaaagcatactttcattgtctcctatcaaatgtatcctgagaaaacaaacaaaagtgagtcacttacagggaacaaattcttccagaactgaagatcagtcttaggaggctcaactatcttggtggcccaacagaacaacattatgagagagccacatgcaagggagagagttgaggtaagccaagggtatgggaatgcattcatcaccttcttgttataaatgttgaacaccacattcagtgcccaccatgtagcaaagtatattccaatcttcaccttcttagcagcctctgatggagccccagcccctccaacctttgatctatcag

SEQ ID NO: 36520 - DNA, 403 bp, Glycine max
taacaataacagatacaccaggaagctaagatttctcacctgcaaatctttgtaaccctaactaaagctttctcttcatctgctacatacttcatattgtttcaccttaacgtctataatttctatcgcttacacagatctgcacccttctaaacaaatcactgggaagacgcgtgatagagaaacaattaagtacaagagttagaaagaatgatatatacacggggaacctagagtattcatcggtcagaagttaaaaaaaaactacattttcaaagtattaatgcttgcttaaataattaacctcttttaatagacattttttcatacatataaattataaacattagactcttaatctcatatgattatctgctaactatgcctctcagttatatatgat

SEQ ID NO: 36521 - DNA, 183 bp, Glycine max
  unsure (1)..(183): unsure at all n locations
agcttgtatgatggnacgacattgttcatggttatattgtaaccgatggtgatgtggcaccagacatcgattgtggtatcgctgctgccctaatattatgccttgaattaacttctgggctttctctagacaggccctccagagtaggtatgaactaactatcactcctggatttgttgtgta

SEQ ID NO: 36522 - DNA, 237 bp, Glycine max
tgagcccattaggacataaggacgggtatctgatgcatgtactctccatcctactgcgctgtacattgcgggctgtccactcggtcccatgtgtccttgcggactgattgaggcatcaaaatgagtcttctttgtaatggtgatgagaatatgggatgcctggacgctcaagaatcatcctcaccgggtgatgccacagcagatgttctcaagattcctcgcatgaggtgatggatg

SEQ ID NO: 36523 - DNA, 395 bp, Glycine max
  unsure (1)..(395): unsure at all n locations
agcttaatgtgacatttgatgtatatgcatggaaaatcttcgtgagggcttattttgaacatggacgatagagtggcaagagcatcaaccatttggttttcctctctaggaatgtgatgaaatgatatatcatcaaagagttccatcaattccttgatgtaagcctgataaggtatcaacttatggtctttggtttcccattcacctttcaattgatgaattaccaatgctcaatctccatacactttgagcaacttaaccctanagtcgattgctactcggattcctagggtgcatgcttcgtactctggccatattattgtataatcgaaacataatctatccgtgaaaggcaaacattgtttgtttggcaaaaccaacactgccccaattca

SEQ ID NO: 36524 - DNA, 405 bp, Glycine max
  unsure (1)..(405): unsure at all n locations
tagaaatagaagctnttagaaatcaagtgattaagtggtgattaagtaatcatcaattccaaaacataaggggagtatgaaatgagtgaacgcaatatatcttgcatatacattgcttgtatcttgatttatggaattaaattgtcatcataaaaaagggggagattgtagaagcaaagactttgcctttgatattttgatgatgccatatgatcgtgatgttttaatgccttatgaaaatgtgcttctcaagtttaattcaagacaaaaattcaagaatacaagatacaacatcaagaagatctctagtgtttttaggaagggaattccaaattgaaactgcaaaaggtttggtcaagaaatttaagcaaaaatgtatttttcaagaatttactctctggtatc

SEQ ID NO: 36525 - DNA, 387 bp, Glycine max
acttgccaggtgattcaaaatgaaaaaggtctctacattgtttcaattagaagatcatggaggtaaatttcacaatgactcttttgaaaacttttgtgaagaaaatgtatttcaccacaatttttcagccccgtcagcacctcaacagaaaggtgttgtggagaggaaaaatatatcccttgaagaaggtgaaagaacacttctaaatgaaacaaggttgcgtaagtatttttgggcagatgttgtacatactatatgttacacctttaacaaagtacttattagacctattctgaataaaaatccttatgaaccgtattaaggaagaaaactgaacatctctcacctaatagtttttttgcaagtattttgtttttacaatggtaa

SEQ ID NO: 36526 - DNA, 403 bp, Glycine max
tccatcaagtggtatcagagcacaagagcttcaagtaggtgctccttaaacctccattaattttttgctttaccttctcttccattgttttttcttcattttttctccatgtatctcctcaaatgtcttgttctaaatgttgttaatatgattctttagagttttcaccgattaaactagctatagaagctagattttattttctatggttcaaatttgttgttcttgttcttgaaccatgaattgtgtagagtttaggttcctttgagttttgtcttgttattttttgtggctgaaacctaaaccataaaattcttacagaaatattaaagtagaagaaaacctcaaaaatctagagtgacttgttcacctattgtagttttgtcataaaaagtcatgtcta

SEQ ID NO: 36527 - DNA, 458 bp, Glycine max
cctgcagcatgcaagcttctacttatgtggcagggcgggctatcttcactatcttgtctccaacgcgagctttgaccactgttcttccttcttgcgatgcttcttttcatgtccgcctgagtgggcttatatcctaaaccatacttcccacgatttccttgggaatctatcatgctagttatgccgccgttgatttttcctaaacccatcccgggatcataaccgttccccaacataactctggccatcattaccattgcatcggacagacaaagctgcccaaagagggagttcacggaggaaatgctgaccacctcaaaagactggaaagcagtttctaacgattcttctgcggcttccacataatgcatggcggatgggcagcttaccaagatatatttcttgcctgacactatgaccaagtgcccctccactatcaatttaacttttggtggagt

SEQ ID NO: 36528 - DNA, 417 bp, Glycine max
tgaagcaacatgcttgcccaggcgagctgttgcttcctccaaaagattcctgatggacctagggctgaagaacaccccctaaattgatcagttcacccccattttgagtttttttttggcttatttccttccgaaacatcgcgaaaccttacggatcgcacgaaaattggctttaagcagctcaatgtgatcggaaaaaatccggatgtcgacaaacaattggccctggacgaaattagggtatgatagttgccccttttcacttatcttttattggagataaaagggaagtaaagataagacactaatttccgtcgagttgaattccctcccgaccgacgatctgcttgaacagcgaaacttgtcaaaagagagagcataaaagacatctggtgcatcagcaaagccttggtgcct

SEQ ID NO: 36529 - DNA, 354 bp, Glycine max
agcttgaaattgaacatcagaagctctcaagatattcaaatggtcataacttgtcacaaggatgtccgattctggcgcatcacatatcaagacgctctaaattgaaaatcggaagctctcgcgaaattcaagtggtcataacccgtcattcggatgtccgattcaggcacataatatatcaagatgctcgaaattgaacaacgaatgctctcgagaaattcaaatggtcataacttgtcacacggatgtccgattcaggcgcataatatatccaaacgctctaaattgaacatcggaagctctcgagaaattaaatggtcatacttgtacaccgaagaccgatctgcgcataca

SEQ ID NO: 36530 - DNA, 378 bp, Glycine max
tgccgccacggagtttttcgactatgctcttgtgtggtggaacaagctacaaaaggagagagcaagaaatgaagagccaatggttgatacatggacggagatgaaaaagatcatgaggaagcggtatgtgccggctagttactcaagggacttgaaattcaagctccaaaaactaacccaaggcaacaagggggttgaggagtatttcaaggaaatggatgtgctcatgattcaagcaaatattgaagaagatgaggaggtaactatggctcgatttcttaatggtttgactaatgatatccgtgatattgttgagttgcacgagtttgttgaaatggatgatttgcttcacaaagcaatccaagtggagcaacaatt

SEQ ID NO: 36531 - DNA, 69 bp, Glycine max
agtaaccgctggtgcaccttatgtatacttattctttcttcgcaagtgaagtcgcttcatgcttatgct

SEQ ID NO: 36532 - DNA, 403 bp, Glycine max
tgaagtgaggaagtgtggaagagtgagtcttcctacttttattcgttgaccacagagtggtacctggagatatgtcgcgggggtcaggagaccttggggacgtcaggtggggtgctattgcccaaaaccaagtttgaccaatcccgacccaacccgggcatagtcagtcagtgagaacctgtgatgtacctaaacaggcgagctcctagcagtcaaccgataaaagaacaaagaccacaaagcaaggaggcttgtgtggtggctggccagctatggatcttgagtaatatttggaatatggcctctggtaatcgattaccaaggatgggtaatcgattacaaggcttaaaaatgaagacaagaagttaagatggcctctggtaatcgattaccaaggatgtgt

SEQ ID NO: 36533 - DNA, 338 bp, Glycine max
  unsure (1)..(338): unsure at all n locations
tcctctaagncacctgctgcatgcaagcttgcgaattttggcgatatcaggggacatatgcttgatgactgcagtgagaacaccaaccttccacgccttctttaagtcatgtggttactcgtatagaggagggccttgatctttatgtagaccaatttgatgccaccattcttcattcccagttggccaccatggtggaagaacacccttctctattgggaacctcctctgatgaggatcacagtgctgcataagtgctgacaagatagaacccaaggttgtgtccttgtaactcttgcaaggtgtgtggtgtcgaccaatggaactgatccatcatt

SEQ ID NO: 36534 - DNA, 260 bp, Glycine max
actctgatgattcgacggtagttgcctagactactatgactcttgtctatcaccaatgaagcatgcatgcatgattatattcagatagccatgtctcaaattgacatttgtcattagggtaggggataccaactaacatagtaacattgtaaattccgattgagggagactagatgggattatggctaaaaaacgaggaagtaacttggctcttgtgcttcaaaggcacacgctataaaatgaaattgagcaaaaagtgc

SEQ ID NO: 36535 - DNA, 178 bp, Glycine max
accaacacgagcgcgcggcaggagaaacgcccattacaacgcggaaccgaagaagaccaaacacgcgacggaaagcccaaaacacacccgggaagcgagagcgaaccaggccacgaaaaaaagcaaaggggcaatgcccaacggcacccaaccgagccaaccaaaaaaggggaaaaac

SEQ ID NO: 36536 - DNA, 104 bp, Glycine max
ctaagcttacaagctgcgacgaaggagataaagccagagctttgggcttttatacatgaataagtacgtcactcagaatattagatcaggccaaaactcataaa

SEQ ID NO: 36537 - DNA, 439 bp, Glycine max
  unsure (1)..(439): unsure at all n locations
agcttgcttgtggagcttctatggaggctggatctttgagcttcaatgaggtccttcaatggtgattttccaccatggagatgcagcggaaggcaaaggagaagaggagaggggaggcaccatccactagggaataagccatggaagaaggagcttcaccacaaagcatgtgccttggataagaaccttgaagaggatgctttaatggaggaaaagaaagagagaaggggggagcacgaaattgaaggaataaaagagggagagaagtggaacttttaagtgtgtctcataagactttcattcatcaaagttacaacaattgttacacatgcttctatttatagactacgtagcttccttgagaagctntctcgagaaaacttcctttgagaagctctntgagaaaactttcctgagaagctagagcttagctacacac

SEQ ID NO: 36538 - DNA, 412 bp, Glycine max
tcagaaaaaagtgatgaggtacaagcccaaaaggcagagcttgaaagagcccgggtagtcgaagagaagttcaagtccatagccatcaaagtctgaaaagagtatgatgaactaaaggacgtcaatatggccacagctgaagccttggaacgagaaaccaagaaggcccgaaaggaagaacacgaccaaagaaaagttttgaggggctttataggccagcaatagtgagctcaagctccgaagaggtgaaaggaatcatcacgggtcaaaggcatgatcttgaaggacgagctaaaggcttgccttaggtcgaaaagaaatttgtcccaacagttaagcgagactgaagggaatatgtgggccatcatcgatgagtgcaaagagaagctaaatctagcggcgactcacaagc

SEQ ID NO: 36539 - DNA, 453 bp, Glycine max
  unsure (1)..(453): unsure at all n locations
agcttcanaatatttgaaagaagcccatttgttgatgaagtcagtgcttccttctaaggatctcaatcttatcgtgtcatgtaacactccaaacaaatcacactagaatgagagagattcagaggcaatacaggtgtgggatgcatagttgagtgtgacttgaaaaattaattggcacttgttatacaaacacgatgcatttaattttcggtcgctcatcacttaagagctccatagttaagtgtgcttggtttggagcaattatgggatgaatgacctttggggaaattttctgaaaaacatgtaagtgagaataaagcattgcatactgaaatgtattggtgttgggtttgagggcaatcgttgatcttggaagaaaccaaaacatattgtcaaagtctcagaaaaaggatacctacaaagggttctgaccaacaaggatgtcaagagaag

SEQ ID NO: 36540 - DNA, 424 bp, Glycine max
  unsure (1)..(424): unsure at all n locations
gggagaggatacttcaatggagganaagaaagagggagagaaagagggaggggggagcacgaaattgaaggaagaaaaaggaagagaagttgaactttgagttgtgtctcacaagactctcattcatcaaagttacaacaagtgttacacatgcttctatttatagactaggtagcttccttgagaagctttcttgagaaaacttccttgagaagcttctttgagaaaacttccttgagaagctagagcatagctacacacacccctctcataactaagctcacctccttgagaagcttccttaagaagattcgtaaagaagctagagcttagctacacatacctctctaatagctaagctcacctccttgagatgagaagctagagcttagctacacacccctataatagctaagctcacccc

SEQ ID NO: 36541 - DNA, 472 bp, Glycine max
  unsure (1)..(472): unsure at all n locations
agcttnttcttaagcttgtgctacaacctttttctccccctttggcaacatcaaaaagccaaagaactcggaaatcaacacagttataacaatggagtagcaagatataagtatcagagtattaaatccaataagccaaactcataatcaagaaaataatcaaaccagaattcaaataacataaaatgtcaacaatcacaaaatatccaagaccgaaacacaagaaaaataagcaaagtacttagcataataatgtaaattctaagaaactaaaagccaaaatacacggcttataaaagataaataagcagaatctaaaatctaagaagacggaggaggtggtggaagatcaaaactctgacgaatgtatccgacatcctcttcaagctgtgtaagacgaatgtccataccggcaaagcgtgaatctaacgaggcatagcggtcaccaacatacgaacgaagaccccgtatt

SEQ ID NO: 36542 - DNA, 364 bp, Glycine max
tgcttgtggagcttctatggaggctggatctttgagcttcaatgaggttcttcaatggtgattatccaccatggagatgcagcggaagacaaaggacaagaggtgagaggaggcgccatccactagggaataagccatggaagaaagaacttcaccaccaagatgagccttggataagaagcttggaaggatggttcaatggaggaaaagaaagagggagagaaagagagaggggggagcacggaattgaaggaataaaagagggagagaagtggaactttgaattcggatactgaatttcctgtcaacttgtgtgatttttcgtattatttctttttatccaaatcacttgtgttctttttta

SEQ ID NO: 36543 - DNA, 272 bp, Glycine max
agcttatctatcacataaactaaattactctgtctaggcatcttccacatctgggggcaacctgcgcttttcttaaaaacctctcaccagcatttccctgctgccaatgtggggctcaagtgccataccttgcgtgtgtatcgctgcaatacctacctatagactgatgagtgaacacacttcatcacaattacctgtctgcgtgccctatctgatgggtagcaatctaaatctttccaaatagtagaaccatcacgtcggacccattatgc

SEQ ID NO: 36544 - DNA, 260 bp, Glycine max
  unsure (1)..(260): unsure at all n locations
tgaagagaccatgngtggcatatgttatcttactatttttattcgtggacaccaccgaggtacgctagttatttatactcacttcacgatatcttgggtatgtgaggaggagtgcatattcctgtcaacctaaatggaccatgacaaccccaccctctcatcaatagaccgtgtccacctgttgcctccctctactagctatctcctggtcagctaccttttatggaactctgaccacataacgagggagcttgtgtggt

SEQ ID NO: 36545 - DNA, 327 bp, Glycine max
actcaagctctaaatttgaataaaacgtgcctaagctgctgttaatctattaccatatatgtgtaatcgactacacaaggcaaattctcaaatccatagaaacaagttgccgcaaagtaaaattggccactggtaatcaattacattcctctggtaatcgattaccagatagttaacttcttgagcagactttttaacttaatttttatggtcaaaccttttgctactacgattggaattccctccctattaaaataccctttcttagactctattggctgtcttgatcatcaatttgatatctttaaatgcttggtcttgaataaa

SEQ ID NO: 36546 - DNA, 432 bp, Glycine max
  unsure (1)..(432): unsure at all n locations
agctntacagcagaatttagtaatgacccactaacctagaattaaaataacttaatgccattaacctagggaattaaaaaaaacttaatggctgagtgtaactgaaattgtggcaaccaaaagtcacccccaacagccaacaagtcagccaccatttggtctcccaaaaggctgatgcctaggttgccaattgggcccttattacaacttgaactaaacctaactaaagcccttttagttgattaacccaaaacatatttttggtcagccaactttacaaggattgggccattatttagacaaactaaacactctaaaattgagacaaagtggtgtcatttagtcctcctccatttgggccatgatacaactcacaaccttggactnttctccttgaaacttgggcttgtattcaaatagtatggacaacac

SEQ ID NO: 36547 - DNA, 405 bp, Glycine max
tccaatgtataatttcgagcgtcttcatatattatgcgcctgaatcggacctccgagttgaaagttatgaccatttgaatttctcgagagctttcgttgttcaatatcgagcatctcgatatattatgcggctgaatcagacctccgagtgaaaagttatgaccatttgaattgctaaagagcttcaattgctcaatttctagcgtctcgatatattatgcgcttgaatcggacctccgagttaaaagttatgaccattagaattttttgaaagcttccgttgttcaatttctggcgtcttgatatattatgcgcctgaatcggacctctgagtgaaaagttatgaccattcgaattttttcagagcttccgttgttcaatttcaagcgtctcgatatattatgc

SEQ ID NO: 36548 - DNA, 184 bp, Glycine max
agctttaggagagtacattcttgacatgatatcaaaatcttatgagattatgactatctgagctatagttcagtcactcttttctccattcaaataaaaagttaaattcagcacaaaattgaattgcatatttattattcatgcttatagcccaaaatgttcttacgtttgggggggggggggg

SEQ ID NO: 36549 - DNA, 414 bp, Glycine max
  unsure (1)..(414): unsure at all n locations
tcctatcggtttctaattatatggaccattaaatctatcatatgctgacaatagccgagaagtctgtggatctcctcgggggcggagtaggtgtcctccatcgctttggccttggctagcaatcggggaagttcttgactcccgttcaaggtaagagcaaatcggtccatccacattgttgcctcttgatgtaacgagtcgatcacctttcctctagcctccttttccgcgtacacttgggcatactcgtccgccactctatgctcgtgggccgnggctagatttagttcttcttggtacttgctgacgatagctaacatgttggtctctgtctcgcataaccgctgagacatgtttcttttggaccttgagcaagccttcaactcatctttcaagatcagactgtctactcgt

SEQ ID NO: 36550 - DNA, 440 bp, Glycine max
agcttcaggctaagtcttcatgttgctccccctatctctaacaaatgagacgttgtaaaagttacctttttatagaattgatgttatttttgtgaccttcgctgaacctcgatcatattggtgttatcggaatttcaaaatgatgtctctttgtggtagaaattgaaacaccacttagcccttttttgttttgacaggggtaattgaccctaaatgttattataaactttgtttttgaaatctatactaaattcccttcaatttggtatatcgaactatgtgtttggaccgacgaacgtgaataagagaggcctttgagtgacgcaaaaaggagctaatgaagagctcaccatatgtgagggggagtttattttggtctactgctttgacaccatagttggagtcagggaacccaactatagttatgcatgtctgtccct

SEQ ID NO: 36551 - DNA, 366 bp, Glycine max
agcttggctttgtagtagtgacatttaaattgggcctaaggcaatatagtcttattgtctacacgattatggataaacgacaaagatgcattgaacggtcttttttatcatttgcagtaattttttttaaaataatcaaatgagagtacttttaaattaattctcatttaaaaacaagtcattaaaagtaattacgactttgtaaacaaagtcgcagctactttcgtgacttacatctaaatacaaattaagtcaaaaagtattcttagttaataatttttaaaaaaattacctccaaatggtaaaaaaaagtcgcattgaacacgccgaagagaggatagcatgactcatatgtgttgaagatgc

SEQ ID NO: 36552 - DNA, 371 bp, Glycine max
tccatcaggaatgctcagtgagatgattatggattatacaatggtttgagtatgcacgagtgaggtttatagcgtacattcttggaaacatgtttccccaaggttgatatgccatcactctatcaagctttttagccatgttgatggcttcattttccttttctatactaggtgtatttattaccctcggcttcaatatcatgaatagcacaagtttgagtgaaattaaaaaaagtatgagctctttgtttgttaaaatagacacctctgatttctaaaataaaagcaacttcattgaagtctcctatcataagccaagggatagaaatagaagctttgaacctcataaggtactcccaaagtttatagct

SEQ ID NO: 36553 - DNA, 426 bp, Glycine max
  unsure (1)..(426): unsure at all n locations
agcttctaagagattgattgggtttgtgttcatgcgaggaaagcaagattccctgctcaaagaaaatgcaagttgcaactaagaggagatagaccttttcaatttcttgaaaagataaatgacaatgtttacaagctagacttgccaagaaaatatggtaacataagtactacctttaatgtggctaatctatctttctctgatgtaggtgacgaatcaaatntaaggactaatacttatgaagaacgagagaatgatgaaggtgcaacaagtttgtttaatgatcctttacatgggattggaggtactgcgactaggttcatgactaagaggatgaaacaagatttgcgaggcctaattctaaatatcaaagagaaagaaaaccaatgtgaattaagggctgctcctaattgagtcactatctta

SEQ ID NO: 36554 - DNA, 387 bp, Glycine max
tcatggctctgctattgatctatcaaggaatccagtctctcatgaccgaattaagcacattgagactaaatttcattttctgagagatcaagtggctaaaggaaaggttaagctagtgcattgtataattgaggttcagctagctgacataaagactaaggctttgaaagctggcagattcaatgagctgagaaggaaaataggagttcaaagtttggaggattaagaatttttgttcaataaatgttgctgtaatgttcttgttgtggattcactgtttttgaatcaaaggggggtgttagggataattcaaaaaacagctactaatttgttaatagttgatggcggttagttagttgacttagcctatatatagacatatgggta

SEQ ID NO: 36555 - DNA, 470 bp, Glycine max
  unsure (1)..(470): unsure at all n locations
agctntacagcaaatgccactctactccaaattcttgatggatatgttaacaaggaaacataagtatattcaccaggaaaacatcgtagtggaaggaaattgtagtgttgtgattcaaaagatccttccacccaaacataaagaccctgggagtgtaactattccttgttcaattggagaagtcaccgtgggaaaggctcttattgacctgngagccagcattaatttaatgccactctccatgtgcaaaaggttgggagagttggagatcatgcccactaggatgactttacaacttgctgaccgctccattaccagaccatatggattaattgaagatgttttggtcagaatgaaacantttatcttcccggtagactttgtggtaatggatatctgtgaagatactaacattcctgtaatattgggaaggccattcatgttaactgcaagctgcatagttgatatgg

SEQ ID NO: 36556 - DNA, 425 bp, Glycine max
  unsure (1)..(425): unsure at all n locations
taggaaggtagttaggagctaactgacatgtccaaagttagttatttgattctgttagttttccccatttggcaagttgttaggcaattagtgggtagaagctataattagcaactggtggttaggaagcattttcaagccagaatttataatcatcttccttcttgtaatttctttccctaataatgaaaaacatgacttccatgctcatcttaattcattcatttcattgagtttccttgtttgttcaagaacttcaaattcttttatttgattcatagttgggattaaaaaaaatcattttttgttgatggatagtgtttttcgatttgggtgagtagaagaatgaagatggagcgatgaaggagggaggaggggacagatgaggaaaaataatggtgttcccgganagagaaaaaaaaaaa

SEQ ID NO: 36557 - DNA, 398 bp, Glycine max
atccttaagtcacctgcggcatgcaagctttcttgagaagcaaggaaggtaacttccttgggaagcaaggaagaaagcttccttgagaagctagaggggggctactcacacccctccaatagctaagctcacccccatgccaaaatacatgaaaatacaagaaagtccctactataaagactactcaaaatgccctaaaatacaaggctaaaaccctaaactactagggtatctttaacttgtacccttaatttgtagggtatcctacaaacctaaaatggtcaaaatataaggcccactagaaggaaaacctattctactattggtctccttctaaggaggattgcatcattgatggtgagatggctgcaaaaaacctagtggcagttactggaaca

SEQ ID NO: 36558 - DNA, 421 bp, Glycine max
ctaagctttggcaaaggaagaagaagaagaagaagaagttcaaagagatgttcaaaagttgtaagagttatatcaagtacttaaaatgaaagttaaggtcttgcttttatagactcttcatgtctagtcaaaaaccaatggaagagttataaccttgagaaaatcttgagaaaaccattggaagagttacatctcttgatttttattcaaaacttgtcactggtaatcgattacccacaccatttaatcaattacacaaagtattttatgaaaaaatgtgacttttcacaattgaatttgaatttcaacgttcagacacactaataattgattaccaatatattgtaatcaattacaccatttaaaaatcaattggaacgttgcaattcagttaaaaattttgaatcaaactttccactgt

SEQ ID NO: 36559 - DNA, 422 bp, Glycine max
atgcaagctggaaggcaaactggatgcattggttgactgggtaacccagctggccttgaatcagaaatctgtacctgtcgcaagggtttgtggtttgtgctgctatgctgaccaccatacagacctttgcccttccatgcagcaacctggagcaattgagcagcctgaagcttatgctgcaaatatttacaatagacctcctcaacctcagcagcaaaatcaaccacggtagagcaattatgacctctccagcaacagatacaaccctggatggaggaatcaccctaacctcagatggtccagccctcagcaacaacagcagcagcctgctccttccttccaaaatgctactggcccaagcagaccatacattcctccaccaatccaacaacagcaacaacctcagaaacaaccaacagttg

SEQ ID NO: 36560 - DNA, 416 bp, Glycine max
  unsure (1)..(416): unsure at all n locations
tggttcgaggtacttacccgttgaagatcgaagatcgatgaagaacggatgaagaacgtcgaagaacggttgaaacttttgcgaaattcctcacggaaaacgttacggaaacgtttcggaagcgcctcggcttagattttcttcacggaaacaatttttccaagcaaattcgaaagagagagaagtgccaaaggggctgaacccttttcttcttcacttcctcccctatttatagcaaaataggggaggtggttgccgcccagctcgcccaggcgagccaggttgcttcctccagaagcaatagccttctggaggaatcttctggagggcccaagtgggcctggtgctatntgcacccccatttttactaagtacacnccccctgctggttttttggtgattctttttttcgtaag

SEQ ID NO: 36561 - DNA, 465 bp, Glycine max
  unsure (1)..(465): unsure at all n locations
agcttgacaataaaccgacttaggattntaagtattattttgctattggataaaattattttttaatcacaaattttactttacaacatgtagattatgaaaattaaaattacaaataatagaagtgaaaaataagttttagttcatatattacagaaggcaaatttaaaatatatcattcatttttataattataaactttataattataaaagatgtaaaaaattattcatagttaataattaaagtaaatccatgtcaaatgacacatataaagcgtaataattntatttatatttaaaattcaacaaaaaaatcattcatagaagaatatttaaatataaatgaatataatatttaaaattggttcaatcaaattggaaaacttgactgctgagctatagtgagaattttttttttcaattatatnttttctatctataaaatttacatctaagaccttat

SEQ ID NO: 36562 - DNA, 363 bp, Glycine max
  unsure (1)..(363): unsure at all n locations
tgtcctcttgatgtttggccagagccacgatctactacaagcacatcggctacaaggcctgtacctcaaggcctgaaacgaaacaactcaacaggaacggtggaacgagtccgacgacccaatttgcgaggcactcgaacttcatcaaataatcattcatggtgcctcgctactgtagtttgaaaaacgcgctgtgtgggttgtcgtagtacgacgtagcaaatcgggactccaaggcctgaagcatggccggccacgatgtcaggaacctattcctcgacatccattaaaaccagcaaagggcgggtccctccatataaaacgacgcgacaatgaggcgctcgacgtcngggataccttggt

SEQ ID NO: 36563 - DNA, 187 bp, Glycine max
gcaccgcgctcagctttctctgtaataaaaaatgaagaggtatctctttttaatgcaaaaaaactaaatctataaaaggagaatacaaggtgtttttaaataaagcaaggatgtaaaaaatacaattcaaccaatttattagaaggaaaagtaactgaattaaaggcaaaattttatttaaaaaaaa

SEQ ID NO: 36564 - DNA, 253 bp, Glycine max
gatccaaacaaatttattaatataattcaaaggatggttcatgtgcatataccttttatagtttggcccatcataacgagccatgcatttttgtaagatcaaaaataactattctattactgtttaagtcttctggaatggtcttcttctgcataaaaatttcatacttcaaatacgatcttaagattacctatgtactttcccaatatctacctctgaaacatagaactatcttgttaaacacctttctgaa

SEQ ID NO: 36565 - DNA, 389 bp, Glycine max
agctagtagcagatgcaaaccacattatattatatctcggatatcccatcgagtcccgttatatatcaagacgctcaaaattgagtacgaaatctcttagcaaattagaacgacaatcactttctacacggatgtccgattgggtcacgtaatatatccactcgctcgaaactgaatacagaagatgagagctaattcaaacgacaatgacttctacctcggatatcccattgagtcccctaatatatcgagacggtcgaaattgaatacagacactgtgagaaaattctacgacaataacttttaccttgatgttcgattgaatcccctaatttatcgagacactccatattataactgacgctctaccaaattcaacgacataactt

SEQ ID NO: 36566 - DNA, 390 bp, Glycine max
tatggttttaatttcgagcatctcgatatattattggactcaattggacatccgagttaaaatttattgtcgtttgcatttgctcagagcgttcgttttccattacgagcgtctcgatatattacgagacttaatcggacatccgagctaaaagtaattgtcgtttgcatttgctcagagctttcgttttccattacgagcgtctcgatatattactggactgaattggatatccgagctaaaaggtattcttggttgcatttgctacgagcttctgtgttcaattttgagcgtctcgatatattacgggacttaatcagacattcttgtaaaatgatattgtcgttagaaatcgctcacagcttttgtattcaatttctagcgtctcga

SEQ ID NO: 36567 - DNA, 390 bp, Glycine max
agcttgtaagaccacagtatgagtagtgttgttgcagtgtataacagccaaccccttattgtagccccatagtatgaattattgcatgaataagaacgaaacttatagaagaaaaacacttgataaaagatatcatcatcaaaatactatatagaatatgatttatttaagcagtttctgcttgagcaacaatgaaattgtctctcgcaggtcctagttcatgaaagggataaaatatttgataaacattaacttacaagcaatagttggtcaaagaaaaaattgctggtgcatcattcaaaacttgtatatttagttatatatttctaattttagtaaatacaccaaagtgagctttacataagttgatcatacatatagacaatttat

SEQ ID NO: 36568 - DNA, 318 bp, Glycine max
tgagatgaggaagtgtagaagggtgaaacttcctgcttttattcgttgaccacagagtggtacctggagatatgtcgcgggggtcaggagaccttggggatgtcaggtggggtgctattgcccaaaaccaagcttgaccaatcccgacccaacccgggcatagtcagtcagtgagaacctgtgatgtacctaagcaggcgagctcctggcagtcaacagataaaaggaacaaagaccacaaagcaaggaggcttgtggtggctggccagctgtgaactttgattgatatgtgagatatgggctctggtaatcgattac

SEQ ID NO: 36569 - DNA, 347 bp, Glycine max
tgatgatgacaaagatgatgacaaacaactcaagagaatgatctcttgattgagtctacaagttcaagatcaagattaatttcaagtttcatgaagtgaaatcaagatgattcatgactcaagagaagtttgatttcaagattcaagaatagatgaattcaagattcatgagaagatatcaagaagacttcacaagggaagtattgaaaagatctttcaaaaacaaacatagcacagttttgtttttctaaagaggttttctcacaactttccacgttaccagagtgtttactctctgggtatcgattaccagtatcctggaatcgattaccgatgacgaagtttga

SEQ ID NO: 36570 - DNA, 398 bp, Glycine max
  unsure (1)..(398): unsure at all n locations
ntagcatggcctccgtgatagaagccatttgatcttttaaagccgataggtcggccttcatctgttcttccactccctcttcattatccatttttctggatcgagtgttatagggtgcctctgcgctttcttagttattgtgagttccctaaagaaacaaacaatggtgagtatgccaccaaaacatgaatatgctaatgaatgatcggagcacttggatccacctcaagatttttagataacgcgatgagtttcagaacttcttgttttataaaaaggaacaaagcttttatctagccaagatcatacaaaagtgttacaacagaacctaacggtttctaattatatgggccatcaaatctatcatgtgtngacagtagttgattagcccataaatt

SEQ ID NO: 36571 - DNA, 375 bp, Glycine max
  unsure (1)..(375): unsure at all n locations
agctngaatcagacctcagtgtaaaaagttatgaccatttgaatttctcgagggcttccgtttttcaatttcgagcgtctcgatatattattcgcctgaatctgacatccgtgtgataagttttgaccattttaatttgtcgagagcttccgttgttcaatttcatacctctcgatatattatgcgctcgaatcggacctccgtgtgaaaagttatgacaatttgaatttctcgcgatcttccattgttcaatttcgagcgtctcgatacatgatgcgcctaaatcggacatccgagagaagagttactaccatttgaattcctcgagagcttctcgtgttcaatgtcgagcgtctctatatattatgctcctga

SEQ ID NO: 36572 - DNA, 342 bp, Glycine max
ctgcggatttggtcttcaccagtgttaggatcgaagtggatctgaaaagaggcaaatttaatcatcctgcttagacgaatgagaaaactggggcaaataaagacggtgaggatgagggagaaacccatgctgtgactgccattcctatacggccaaggttcccaccaaacccaacaatgtcattactcagtcaataacaaaccacctccttacccaccacccagttatccacaaaggccatccctaaatcaaccacaaagcatgtctaccgcacttgcaatgacgaagaccacctttagcacataccaaaaaaaacaccaaccaagaaatgaattttgcagc

SEQ ID NO: 36573 - DNA, 343 bp, Glycine max
agcttcttagtttcagatgatgcagatgagtttgtagtcacctcatgcactcctctaatgactatagcatcatttttggcgctaaactgctgggagtaggaagccatcttctcaattaaatttttggcttcagcaggagtcatgtctccaagggctccaccagtggcagcatctatcatacttctctccatattactgagtccttcataaaaatattggagaagaagctgctccgaaatctgatggtgagggcagctggcacatagttttttaaatctctcccagtattcatacaggctctctccattgagttgtctaatacctgagatatccttcttgatgg

SEQ ID NO: 36574 - DNA, 405 bp, Glycine max
tgtaagattatggggtacccatcacatgtggtactaggtggcggtcgggcgatggtgcacaacaagttttccacatccacaatttgtgcataaacccaccatcccctgttgcccacctgcaactgagctcacgtactcccacgtagcccatatcctcgtttctctcaacaccgggtccccatcaatcctcccaagcttccacaacatccaagcataacaaaatttaaacaacacaaaccatcacagtcaagaaaaacagggcaaaggcagaaaactcttgcccatacaccaaccaaaatcatagcttttctcacttaaagaccccaaaaacaattcctttgttcaattcgttaccgttggaacgactcaaaagtttactggagttttagtacataagcctacatt

SEQ ID NO: 36575 - DNA, 364 bp, Glycine max
caagcacagagacatatattccaactgatttatagcagcatatgcttttttgagtgaaaaacaatgcgtctaccggggaaggagagtctgctgatgaaatctcccataaccataaatgagattttggatgttagcattttgtttctaaatgaccatttagaggaaacactgggttcgacaaaaatagaagaaatccactcaaagtgtatcaatctcgcacaggtaagtgtttcatcctaattccgaaccatagatatgtcatgacttgactttgcaaattatttcctatcaaatcaaaaattacatgcgtgatcatggatcaaataggacttcccttgggaatggtttttatattatgggtttt

SEQ ID NO: 36576 - DNA, 377 bp, Glycine max
ctcagcttcttatccaggcaattcttggtggtgaagctccttcttccttggcttattccctagttgatggtgcctcccctctcctcttctcctttgccttccgctgcatctccatggtgaaaaatcaccattgaagctcaaagatccagcctccatagaagccccacaagcaagcttccatcatgtacccttcaatgtcttaagacaaagatctcaggctgttaaacctttgatactttgtgaatggggatacaaaaaaattctcaggcggttagtcctttgaacacttttgtattacggaaagggaagaatcaaaagaattctcagactgtgtcgttttgaattctttgacaggcagaagagagacacaaaagaat

SEQ ID NO: 36577 - DNA, 300 bp, Glycine max
agcttgcttgtgaagcttctatggaggctgaatcttttatcttcaatgaggtccttcaatggtgattgtccaccatggagatgcatcggaagataaaggagaagaggtgagaggaggcgccatccactatggaagttgccatagaagaaggagcatcaccaccaagagagtgccttggataagaagcttatacaggaagcttctatggaggaaaagatagagatagattaagagagaggggggatcacgttattgaaggaggaaaagacgaataatctactgaagaaatctacccccaag

SEQ ID NO: 36578 - DNA, 422 bp, Glycine max
  unsure (1)..(422): unsure at all n locations
tgaacagggtgaatttgtctgcgtgtaagtgcatcaantttgaaattaaatttcactttgattatttttttcccataatgaccttttttcttacgtggcagcacatatgtgcaacgtcagttatttaaggtggagatgaggaccataggattgttaattcatgatgattttgtattgtgtatgatttggaattcttccatttttgggagcttgaccctcaggtgtagtgatatgaccaaactatggttacctcaactacacatggttaaggtggggacaccatacactttaaaaggcacagcttggagcaacatatttcccaaatcgttcttctccattttgcgctttcattgtattgcaaccattcttgtttcacgttatttgcacttctggcctctagctttgcgcatcaagctcaacat

SEQ ID NO: 36579 - DNA, 216 bp, Glycine max
gtggaggcgttccacactcgccatcctctccttcgtgtccttcgcacacgacatttacagcgctatatccatttctttctctcaacagatctgaagaagagtgaaccaccttcttcagagtccgttgcttgggtcgagtatgacgtccccgacgtcaacgttgtcgcctatcgtcatgcatgttaattgtggcgatgaacttttaaggctctttct

SEQ ID NO: 36580 - DNA, 371 bp, Glycine max
tgatgtcattcccaacacactatgtagaccgtaatgaagactatacatgctttgtggatgtaacggtattcattatgctatataatccgctgccacccgttactaaccaattaatattattaagtactcgtttggttaagccaggaatttgttggcccaacaaaaattatttacgcgtgcagtatacatcattgtcataattgacaacacataatgacatgcatgcctattacagtttgagcgcgacaacacattggctgacttgactacacattctgaaactagcagtcgctcgacaacacattggttaacttgactacacattggcgacaacacattggctgacttgactacgcatttacgcgtgtcta

SEQ ID NO: 36581 - DNA, 442 bp, Glycine max
agcttcttatccaggcaattcttggtggtgaagctccttcttccttggcttattccctagtggatggttcctcccctctcctcttctcctttgccttccactgcatctccatggtctaaaatcaccattgaaggacctcattgaagctcaaagatccagcctccatagaagctccataagcaagcttccatttagtggtatcagagcataagagcttcaagtacgtgctccttaaacctccactaattttttgctttatcttctcttccatttttgtttcttcatttttttctccatgtctcctcacatgtcttgggctaaatgttgttaacatgattctttagagtttccaccgattaaacttgctatagaagctagaaattgattttctatggttcaaatttcttgttcttgttcttgaaccatgaattgtgttgagttt

SEQ ID NO: 36582 - DNA, 420 bp, Glycine max
  unsure (1)..(420): unsure at all n locations
tgtgaacaagattcttgaccggtccgggttgggaccgtggacgtatgtcccggagggtctcctggagatccctcccagactaacgttggaggaggcaaggaaggagacggacacggtgctcttcggggccgtcgacgagctcttggagaaaaccggtgttgaagccaaagacattgggattcttgtggtgaattgttgcttgttcaatcccacaccatctctctctgactccattgtcaaccggtacaagcttagagggaacattttggcctataatcttagtggcatggggtgcagtgctggggttcttgctgttgactntgccaaacagctcctacaggttctctctcaccatcatgctaataaattagtattccatgcatttntgtattgttttactgccatcacatatatatcttc

SEQ ID NO: 36583 - DNA, 460 bp, Glycine max
  unsure (1)..(460): unsure at all n locations
agcttcattgacttttcatatagtatntttttatataaataagtatcgtttagaaaactgtgtaatttccccccaaaagcaacatttttcaatgctgtgtcatattttttaatatttctttacgtagttatatttaaaacagtattttatagaaacaataaggagatctttttaaaaaaaaagttatatatattggaataaatgcatgtgcatttttttaatatgtattcacacatatgaaaacaactaatggcgatataataaaaaaaaaaagttgtaagtaaagattaaaaaaacaagataattttatagcatgactccggataaatgaaatgagtctcgctaggggtatgaattggattatcaattattaaaagagaatcgcatttacaagtaaaaaataaaatagaattgtatatgggaaacacttacatatatctcttttttatacatatatatt

SEQ ID NO: 36584 - DNA, 425 bp, Glycine max
tatcctaatctctgaccattgtatttggatactgaagttaaatgaatagtattgaatggggacacatgtggtgtgtgtcaaaacatgttttggatgttgttgaaaatctaagcacaacaacaaagatcacgtgtccttcttacactatcgcatccattgactccgatgcagccgacccattcagctaccaatctctaaacttgcatattggatgagaattagatattaccaaaatcatttagtgttttcttttttataacatttattagtttttatgataattaattttgtttaagagaattaatttcagtattattctaattcacgactcgttaatatataaatttatttaaaatgtacattagatatagaaagaaattttccaaattattaattatatatactctcttctatgtgttttggaa

SEQ ID NO: 36585 - DNA, 448 bp, Glycine max
  unsure (1)..(448): unsure at all n locations
agcttcagagacgaccgttgaagtggagcccactcaactaacatgtntttggagcaagtattcattcatgacagttgctatgaagtgacagcttgcaaaactattctaaggaagtcattttgaggaacctttctgatgaacattctaatgtatcatgaaaatagacattctatgtttgctgagaacgaatccatactcgtagtagatntttttgatgaagttcaactgatatacccttctgaagcagcacaacttcattaaccttaacacattttcacaacataaagcattctgaagcagattacttcatagatactgagtgaaggtacatttgttggtgtggtagtgtttcgtccaggctagactatgtaattccttagattttattatgatgctcttcatagtgctttcataacaaatcagctttacaggttgcatcttaaatgtt

SEQ ID NO: 36586 - DNA, 405 bp, Glycine max
tgtaatttctgatcctcagataacatatgtggttaaggttgggactggaacgagtcaccaatggctttcttgaggaaagagacatgaaagaccggatgagttttactgtgagatggaagatctaacttataagcaacaacacccaccttatttaacacctggaaaggaccataaaatcgaggggagagtttttcattaatccttttagccaaggatcttctcttgtaaggttgcatcttcaagaacacccaatcaccgactgtgtattctatgtcctgacgacgtttgttggcatttgctcgcatgatatcttgagacttcaacaaatttctcttagagtagccataattatcctaaccattggtagtgtattgacttcttcatgcgggaggaatggggatccct

SEQ ID NO: 36587 - DNA, 450 bp, Glycine max
  unsure (1)..(450): unsure at all n locations
agctngagaataagacaaaacattattagcttctttccaatatcaaaaatattatcaaaaagtcatatcaaaagataatttcttaccaaataacattgtaaaaacttctaccctaataattaataaatgcttactaaaatcaaagcttttatgaaacaaaatgaaacaaaaacttcaatgtgatatatattctagtttttaattttatatgttgccgtaattatcattagtaagacccctaggggtcccctatatataactttctatatatggntcaggtcgcgaaaagcaagaataattatcaaataagttttcttatagcaattcaagaaaattataattataagacattcttatagcagaaaactaatgcctcatanaagaattttaatttaaaggagtacaactgtacaaggatgttaataacataaccttttataataaatatca

SEQ ID NO: 36588 - DNA, 367 bp, Glycine max
tctccttcttttccctataaataggggaaggagggaagaacaaaaacgttcaaccctcctggtatctgagaatcacttaaaattagtgagaaaaattgtttccgtgaagaaaatccaagccgaggcgcttccataacgcttccgagacgtttccgtgagtgatttcgcgaagattttccgccgttcttcgtcgttctttggtcttcaaccggtaagttcccgaaattgaacttttcaattcattctatgtacccttagtggacctcatttgtttcccgtgcttttatttttatttcatttactttccgtacccccctttgacgtgctttagtcatttatttcagtcattttctcgccttatcaaaaa

SEQ ID NO: 36589 - DNA, 285 bp, Glycine max
tctggactcatgcttaatcctattgagctgccggaacaacgtatcagtaatcaaaatgttttttatatagtgaccaactagcaaaacttatagttccttctcataactaagcgttatttactatataacatattatatcagatggtgatatacgcgtgatcattatacaccactaacaaaacaaatgatgaggttgcataatataaaaaaaaaaaatgtgatgccatgcgcccaccctcttatatatatacagctctcaaccccctaaaactgcatgctatcgac

SEQ ID NO: 36590 - DNA, 394 bp, Glycine max
agcatatcagaccaccatttttcttatgggatattaatgtcgttgaggaaaggaatttatggtgtacgatgtaaactgctgtcgcttgaattggtaagtaggttaataaaaactggccagagttgtaaatattgcaatggtacgtgggtatgtttgcaattaatatataacatgtgcacttaattaggttgctttgtttcaatctgaataacatatatcaccgtgacctgaaataaaaaatcccatccaggtcatggccaaccttctcttaaatggtcttacaggttcgcttgtgtatttttgaaactccattattagttggtattttggaacattttatactgggtcctatggttgatacaagacaaacttcatgttagatatatttcacatc

SEQ ID NO: 36591 - DNA, 432 bp, Glycine max
  unsure (1)..(432): unsure at all n locations
cagatgagaaaccttcaggttgtttcatataaaccttctcctctaaatcaccattaagaaaagctgttttcatatccatgtgttgcaactcaaggtcaaaataaacaactaatgccaagattatacgaagagaatctttcttatatactggagaaaaagtctctttgtaatctattccttccttttgagtaaatcccttagcaacaagtcttgccttgtatctctcaatgttgccaaatgaatcccttctggtcttaaagacccatttacatccaatggcctttgccccattaagcaactctacaaggttccaaactttgctactctacatggaattcatctcatccttcatggcatcatatcataaaattgactctctacaactcatggcttgatctaaagtcaaaatcattctatctcccatattatacn

SEQ ID NO: 36592 - DNA, 394 bp, Glycine max
  unsure (1)..(394): unsure at all n locations
nttcactagttgttctgttagaattttcaagcattatagcaaaggagaagggattggagcctctatcccattgtctccgtgtgggacatttctatcaccacatatattattttgcaaattccaatggtgaggatgtgcgaagatgagttccaaacctaatgtttaaatttcacaacgatccgaggttaacgagtccaagatcgtagttttacggagacaggtatgaaaaaagagagttacgtgcgagggatatttctttcaccacagcgattatttcgcaaatccaaacggtggggatgtgcaacaatgagttcggaactagtatttaaatttcacgacaatccaatagttaacgtgttcaggatcattagtttaacgggacagatgtgagtgt

SEQ ID NO: 36593 - DNA, 445 bp, Glycine max
agcttgccgcctagctcgcccaggagagcaaggttgcttcctccagaagcaacagccttctggaggaatcttctggaggccccaagtgggcctggttgctatttgcaccccctgtttactaaatgcacccccctttctattttttttgtaattctttttccgtaacattacgaaactttacgaatttcgtaacgatacttattttccttctacaaggttacgaatccttacggattatgtatttactcttttttagctttcgaagaagttacggaaactcacggattgcgcaaaaacacctcttttcgatttccgccacattacggaatttcacgaatcacgcaagcctgcttcctttcgatttctgagacgtctcgggacttcatttattgcatgtcatcaagaaataatccccggacgaaattagggtatgacaacattcatg

SEQ ID NO: 36594 - DNA, 413 bp, Glycine max
ttacaattcgaattaaaacgctcagaaactgctggtaatcttttaccatatatgtgtaatcgattacacagcgcaaactttgaattcaaattttaatagctggtgtaaatcagttttggccactggtaatcgattacatcctctcgtaatcgattaccatagagtaaatttgttgaaaaagactttttaacttaaaattcttggccaaaccttttgctacttcaattggaattcccttcctatttaatataccctttctaagactctatagattgtcttgatcatccatcttgaatatctttaatttctttggctcgaataaagctttgagacgcattgtgaaactttggcatcatctaaacattcagcttgatccctttatcccagtcataactgggaagcttcctttcaac

SEQ ID NO: 36595 - DNA, 565 bp, Glycine max
  unsure (1)..(565): unsure at all n locations
gtccgacgtctttctccattagttaatttaacttcaacttataatatcaacaaaaaggatggaactgtgctgagaccctcgcagaccncaccagacngcccgcaggcccgcaagctagagaatagtgaataacatatttaggcttctcttctatatcaaaaaatatgatcaaagaggcatagtataatgattatcattctaccaaaatatcattggagagacgaactaatctaattattaataaagagctgactaaaatgaaatgttcttgagaaacatagtggaacacaaacttgtggagtgatgcgtaatcgcgcatataccttctgaagttggcgcataatcacacaatacatccctacgggcacctataaaaaagcatattatttgggtcgagtaggcgaaatggcaagacattggagacaagtcttgttagaagcgaacgaaaatttaatataaagtcattcatgatcaacctcacgggcagagatagtgtacattatccgggtcacacgtgtctggtgagatgatcaaccttataactagatagatatcagcgacgacc

SEQ ID NO: 36596 - DNA, 420 bp, Glycine max
  unsure (1)..(420): unsure at all n locations
agcttagcacaatcggcgcgctaagcgcatttccaagcatttcanaagcagtaagggattggcgcttaacgcatgctgccgctaagcccaactcgtgaaagttcacttccagaatggatatggggcttagctcaggacaatgcacttagcgctgctacaaaagatttttccagagatggagtggcgcttagcgcatcatctctgctaagcccactgcttgaagtttacttccagtgaagatgttgggcttagcacagtgatgtgcgcttagctgaactatttagccaactatccaggggtctaagcgcttagcatgagcaagctcatgcttagcgggtgaagacatggcacttagcgaatggacaactgaaaaaaaattctaagtctcttctgtccatctcttcagctagggcttaaaaa

SEQ ID NO: 36597 - DNA, 412 bp, Glycine max
  unsure (1)..(412): unsure at all n locations
ntgtggatgaaaaatatataacaacaccaaggctctagttggagctcctatctttttttcgtttttagttttaggcttctcttcttcttttagacacttttttgttttgcaattccaattgttacctttcgtttttgcaataaattttcattctctattgattaatggaaggctaagtctccagtgttgttttctcttgaggatcaaacacaactctctttgaggttctattattactattaaattctgctcagtttttcctcttcaccaattactctgtatttgttgctattaattcatgcatgcttagtgcttgattaattgtctctgcgcttaatttacgttcatgcttaatgatcgttcatgattaattggtgtatgtgttgcctaatcacataatgaatgccttatg

SEQ ID NO: 36598 - DNA, 385 bp, Glycine max
agcttacaaatctatcttaagtccaagcccatacacgaaataaaataaaatctagacaagataagataagattggatgaaataaaatcgggataaaataaaatctagatgaaataaaatctagataagataagatttgataaaataaaattgtctgctctcttcaagtccaagcccaattctggattcaagctcaattgcttataattctcctgaaattaaattaaaaacacaaaatttgttaagtaggcccaaatgataaaactgcataattaatttgacaattaaggctaatcagtaattaaaatggtgacaaaaaaggttaagaaataggagaaaataatgacacatcaagtgcaaactatggatctttcaccagtggcaat

SEQ ID NO: 36599 - DNA, 396 bp, Glycine max
  unsure (1)..(396): unsure at all n locations
nttccttgagagattgttcacaatgttgctccctctatctctaacacaaacccctgtgaaattgttacatatgaagtttctaaaatattagtaattacgagcattttctaaatacaagaataagaaataaaacagaatatgtaaagaagacctatttataattttttttattggaaaaaatttaggtgagttagattccagatttgtcagggtcagaataggccttaaggctcaaagaacatttatagagatacttacatgttacctaacaacaaggtcctcacattaacaatggaaatcaaattcacgtcctttttgaaatatgagtttgttcctaccaattaaccaatatttgtgggttatttattaaaatacattggtattttttattaaaaa

SEQ ID NO: 36600 - DNA, 380 bp, Glycine max
agctttgatattggttagtattaataaatactgcaaaattatcttttaaacctacatgaatattatgtagttaatagtccacattaggactgtgctaaatttgaatataactgaacatcttataaacaattcgattaaatctgtcttacaaaatggtttggttcaattttttcaaaaatatttggtttgattttggatcaattctgttctgtttgatttttttgcacgcccttagtccatatgcatgtgctctctttattttcctgagcttccgatttacaaatttacggagaaaactatctgcataaataaattggttaatcaacgtctggtttttaacttgatgaaataagtgccttctagtggcctttttataacaa

SEQ ID NO: 36601 - DNA, 309 bp, Glycine max
tcaatttatgttacatattttccttgacttttattgaacaactcaccagaatcttgcgttccttttgtaagtaccttagagattattttagcaacaaccatgttaggtgtgagtttgtgtggccttaatgtcactcatatatcagttaatctgcctactttcataaatcataactaatattaggcctgctattacacaaaaagggtgtggatcccattaactgtttgaaaaaagttccatcatcagacttatcagactgttctttctgtgaatacattctcttttctgttttttccaatgtacaccact

SEQ ID NO: 36602 - DNA, 297 bp, Glycine max
agctctcctagcggcttctaattatatgggccattaagtctatcatatgctaacaatagctgagaagttggaggatctcctctcgggcgaagtaggtgtccgccatcgcttaggccttggctagcaatcggggaagctctagactcccactcaaggcaagagcgaatctcaccatacacatcattgcctgtatgaggcaccgagcgcatcacccttgctctacccaccgtttgaacgtacacttgggcatacatggtgcaccacatctaagctggtgggtcatggctagaactattt

SEQ ID NO: 36603 - DNA, 359 bp, Glycine max
tgcccacaggtaaaaagacacatgttttgcagagtaccctgctttgtcataaatctttgttatcatttataacaacctcctatatagaggtatatattgtaatttttttcaaacaattaagggggttaatgtaatgtataaggagtgtcaatataatgtttttcaaacaattaagaggattagtgtatagacatagaaaaggaaaaaatattgtgcaatctgaaaaaaacttagggaatgtcagtataatttattctattttatactttttgtgatcactcttcagcatgatgatactacatcctgagctagaacttgtatatgggttaattatttgaaaaatggagaatgtagataaa

SEQ ID NO: 36604 - DNA, 396 bp, Glycine max
  unsure (1)..(396): unsure at all n locations
agcttcttatccaaggctcatcttggtggtgaagctccttcttccacggcttattcccaagtggatggcgcctcctttcacctcttctcctttgtcttccgctgcatctccatggtggaaaattaccattaaaggacctcattgaagctcaaagatccagcctccatagaagctctacaagcaagcttccatcaagtggtatcagagcacaagagcttcaagtaggtgctccttaaacctccattaattttttttgctttaccttctcttccattgttgtttcttcatttnttctccatgtatctcctcagcatgtcttgtgctaaatgttnttaacatgattctttagagtttccaccgattaaacttgctatataagctagatttgattttcta

SEQ ID NO: 36605 - DNA, 287 bp, Glycine max
tgaatagacacaccactgttattgtgaacaatggatccatttgtataacaataacctatatgtggaattctcaactgtctgactgcttgtctctcccaaaaatgccataatttttcttgtaacagttgggttacaattgatacttgagattcttttacagtgtcatgttgagtcatatatactaatgagttttaatagcaccgttgccttttataaagattaaaaatacccctgctcaagctttatgtatgtgtagtaaactacaccattgacgtgacatgctttac

SEQ ID NO: 36606 - DNA, 469 bp, Glycine max
agcttgtgagagatatacagatattatggtcccaggaaactactaccggagaggaatgtagtagtttattacactaagcttgacgagtccaaggaggaactatagagaagacactgggatgagaagttgactgattttgctgacagtagcatagacattgctattgtgaagaaattttatgcctacctctatgaccccgaggataaatcacctaatcaagtgagggagagaggtcacctagtgaatattgatgaggataccttgaacacatttctgaagaccccggtgattatggaggagggggagaatttatgtacttattccaagtttgcactcctgaggcctaatcctcaggagtgggctactaaattcttgatcccagggaggggatactagctaaatgcagatgggttagctttgtagatacttgggaagaacatgaccaccttatctcagacatggagtgttc

SEQ ID NO: 36607 - DNA, 366 bp, Glycine max
  unsure (1)..(366): unsure at all n locations
ntggaacaataaggtggtgtgtgaatattaaaatgtgggaagtggagatgagtgtgtgtgtgtgtgtttctcataagagaaagtttgggtgctcattgttttataaggctttttttagctttgagagacatgaagagccccaccaaattgagcgacaaagagttggagggctttaagtctttgtaaatagtacgcaaaggcttgctggctaacttgaattgtctaaaatgggtaagtaggattaaaaccacttgtcccgtttcttgttccctcatttttttccctctaataaaagatggcgtgccatcattagtaattgtttattggagtgttattttctaattaaaagaattcgaaaagggaaat

SEQ ID NO: 36608 - DNA, 316 bp, Glycine max
  unsure (1)..(316): unsure at all n locations
tggaggggtagatggggaccatttgtttagacgttcgangattagggctacgtaggagttcgtgagctcaatagaatgtgggcaactggggatggtgggttcatgtttgatttggggaagtgggagagttgatttgcgccatcgcccaatcgccacctagtaccacatatgacgggtgccccataatccaacaagcttgatgtgagaaagagtggaagagttactcttccttctttcgtttattgaccactgagtggttcccgtagatatgtttctggggtcaagagaccttggtgacgtcatgtggggtgctatt

SEQ ID NO: 36609 - DNA, 196 bp, Glycine max
agctggcagttacatataatttattaggggttactcatgaggtgcatagttttaatacatagtgactatgatcacagaaatagtcctagtgaaatatcaactcttatcataacttataaatcagaattttgtttatatataataacgataacgatcagtttaaaacttaaaacctcgtgcaacctctctctctctg

SEQ ID NO: 36610 - DNA, 387 bp, Glycine max
tgttgcctttctcagcaattctcttttcacgtagtgcaatctctttcagatatttagcctgctcttttttctttttactagcttcactttcaaagtattctagctctttaacaacaccttcacggcttttttcctcatcttcaagatccttaattgtttcagcataatcgttgtgtatattaaacaacttccacaagaaatgttctcccttcatagatttctgcaagagaaaaacagagatacttgaaaacttcaccttccacaataagtctgatgactgatagagaaaatgcatgaatttgtggtaggtgcacaaatgactcctagttgaaaatgaagtataactgtagtccaggaatggtatcatatcttttattagttgaaagt

SEQ ID NO: 36611 - DNA, 402 bp, Glycine max
  unsure (1)..(402): unsure at all n locations
agctngctngngcgagctcactgctacagggttaagttttagctcgtttggatgagctgcaactgccccaaagtgacccttttcctataaataggcgtcctaagggtgttttaaggggttctaagatttagaagtggaggaaattgaaagaactatgaaagaagaagaagaaagaagaggaaacaaagccgaggcgttactgaatcgcaattgtgatcattacctacgtcattttcttgttctgtgttcttcgtgcgaccgtcggttagttttattttttgggattgaatgtgatctatgtacccttatgggtcccccttgttattatgtgcgcatncatcttctccatctatcattagcaatcttatttttctttgttaagttcaatcttaaccgattact

SEQ ID NO: 36612 - DNA, 417 bp, Glycine max
tgtgactgttagagttatcatctctctcgctatctctcagaagtggcctcttcaacaactatgttaacaatgccttccttaatagcactcatgaagaggaagtatacatgtcacagcacctggttttgtgttttctaacaagcagcaagttttgcaagttacacaaggccatctatggtctaaaacaggccactagagcctggtttgacaaactcaaaactacccttctcagttttaagtgtttccagcaaatctgatccttcactattggtgttttctgataatgctgttgttgtatatattcttgtctatgtagatgatataatcatcactggaaacaacaccaagttgattaattcttctgtacgtctgctaaattttgtatttttctcttaaagaacttggtgacttggacta

SEQ ID NO: 36613 - DNA, 254 bp, Glycine max
ctctccatatccgtgaaagcatactctgggctgccttatgatgtgtactaactcacatgttttgtgattgcctcgctgaacacgatgtacccactatgcacttttaagccatcaattatcatgaatctggcatggccaagctcttgttgaagctggtggcaactgtccattatattgttggtacacataacatagcatccatgtgctagttgcaagttgtgacatattctcatatatttcatcaccacgagtgg

SEQ ID NO: 36614 - DNA, 291 bp, Glycine max
agcttagtgccaccggtgatgcttcttttaacgatccaaccaaataccgcagtcttgcaggggctcttcaatatcttactttcactcagactgatatatcttatgccgtgcagcaaaattgtcttcatatgcatgctccgacaaatgagcatatgagtgctctcaagcgtatcatatgctaccttcagggtactttatcccatggtttgcatttgtacaaatccaccattgatagactaatctcttatacagatgctgattggtgtgggtgtcctgacacccatcgttcca

SEQ ID NO: 36615 - DNA, 392 bp, Glycine max
  unsure (1)..(392): unsure at all n locations
tgaacttttaaagcgtaaagttacgttactgtgttatttattaagattaatcctttagaaagcgtaaacatgttgttgtgcttgaattatttattaaaattaattgtatgtttattttggtatttaagcatacaatattaagctaaactaaataatttatgcatattaaatttaatggttaagagtttatatgtttcaaatattagataatcatatgcatataatatttatttaattttgaagttttgtgtgtatgatttatgattttatacatgcganattatcttgaatattttatacaatattatttgggttatttacattatgtaaaatattatatgaatatttaactcctattaagaatgaatggtaagtgattaatataattttat

SEQ ID NO: 36616 - DNA, 417 bp, Glycine max
  unsure (1)..(417): unsure at all n locations
agcttagtcacaaggtcttgaatctgatctacatgtgtgtcaattatgtgaactacaagatttgagacagatctaggcacagggttgtcagcttcctcagagtgattcatagtcaataagaattcaagaacatgctccttgatcactgtcctttcctgctgctgacctcttgaaggataggaactttcaacactaggaatctccgaaagtagagattcacccacacgtgagaagcctaacctgtgaacacgccccaaggaaacggtaattactgaatgttctgtaactctagcagcaatcctaaatgtgaagtcgctggagggaggaccaggcgaattaacccggaagacaagcgccccatctacatgagcacanaagggtccattgctaacaagtgaaagaatgtcttggagtttc

SEQ ID NO: 36617 - DNA, 406 bp, Glycine max
  unsure (1)..(406): unsure at all n locations
nntatatttaaaaaatctattaatatttacaaaatgtaaaaaaaagtgttaaataaagattaattcacttattgcaaactgaaatgaagtaagcgaatatgttttcatattaaaaagttatggcttaaatttataacacaagcttcataattcttacactcttctgtttgatttttttttaatatgcaaatgagttaacgtctctataattcttttagtttatatttgtatacgatcgatgacaaattttattaaaaaaatatatggtacggcaaaatgtaaaataaggttatcttcaacacgtcaaattggtattattaaaaactaaaaaatctcatcagtattattaaaatctaaaatcatgtcttgtttacacggatcccagtaatccttataacattattat

SEQ ID NO: 36618 - DNA, 393 bp, Glycine max
agctggcttgagaagcttctatggaggttggatctttgagcttcaatgaggtccttcaatggtgattttcaaccatggagatgcagcggaagataaaggagaagaggtgagaggagacaccatccactagggaataagccatggaaggatgaacttcaccaccatgagagtccttcgataaaaagcttagagaggaagcatcaatggaggaaaagaatgagagagaggggggggggggcatgaaattgaaggagaaaaaagagggagagaagtcaaactttgctgtgtgtatcacaagtttcacattcttcaaagttgtgacaagtgttacatatggttctatttatggcctaggtctctaactaaatgatatccacaaaatgtaatttcatt

SEQ ID NO: 36619 - DNA, 390 bp, Glycine max
tgctcgcgctaagcgcatagacccttgattggttggcaagatagttcagctgagtgcacatcactgtgctaagccccgcatctttacggtaattgaactttaaccagtgggcttagcatggatgatgcactaagcgccacttcttcttgagaaaaatttatcgtagcaacgctaagcgcactatcctgcgctaagccctagatccattctgtaacttgagtttttaagctgggcttagcgggccagattgaaggtgtagactttgatgaaacgtttgccccggttgctagacttgagtccatcagattgttacttggtgtagcttgcatcctcaaattcaagctgtaccaaatggatgtgaagagcgcgtttctgaatggatacctgaat

SEQ ID NO: 36620 - DNA, 125 bp, Glycine max
gtcacctgccgcatgcaagctcgtcagtccaacgtattcttaccaaattcttaacatcacacatttagactccctcaaacgctagttacccctaaatattcatatccacaacaaacaagattgcc

SEQ ID NO: 36621 - DNA, 404 bp, Glycine max
tggaggcattacctttatggatctaaattagatgtgtttagtgaccataagagccttagatatttgtttgatcaaaaagagcttaacatgaggcagaggagatggttagagttccttaaggattatgattttgagcttagctatcatccaggtaaagccaatgtagtagctgacgccttaagtagaaaatcccttcaaatgtctgctttgatggttaaagagttggacctcttagagcagtttagagacatgagtttggcatgtgagatcacctctagtagcattaagttgggtatgttgagagtcaccagcgaacttttgagcgagatccgtgagggtcaaaagtttgaccgattcttgtcagcccacgtagaatccatagtcgcagggagagagagtagttt

SEQ ID NO: 36622 - DNA, 443 bp, Glycine max
  unsure (1)..(443): unsure at all n locations
agcttgtcaacctgaaatcnttttctttattacagaataacctaagattaggagtaccaatgagatatctaaattttttcttaaaatcagttaagtgtaaacaagtgccaaagctagaggtttgttgagtcttttttttatagttttttttactctactctagagtcattctaagtttctctttgagtcctagcttgtttctatgtccttttcattgctttaattgttgagtaatccttgaaaaattgtcttgttaaaactccattggtttagctttcatttcattttntttggtccttgtttattgcttatctctttgtttccttgtttgtgggttgccatatatggaattggaaggaggattggtgtcatcccttgaagaatttgagtcaagaagaaaggcgcccaccaccttaagagctattggactaagaagcactcca

SEQ ID NO: 36623 - DNA, 352 bp, Glycine max
  unsure (1)..(352): unsure at all n locations
tagcctggctgaaggcacctgctgtgcttagcgcactgatctcgtgcttagcgcactgaactactgtgcttagcgcacctgctgccggattctcttttgcgctaagcacactaaagctgctcttagcgatggatatgcgcttagcccaactgttgagcttagcctaactgctacattttgcaattcaaaacttagcctccttttcacctgaaaatgcacaaatttcatcattaaatctaatggaaatgttctagagacaacattaaccataaaacaagatttatttacaaaaatcactacaaaataaccatgaattggggaactatacaagctttggaaaatgatntctata

SEQ ID NO: 36624 - DNA, 344 bp, Glycine max
agcttggccagtcgcatgcaatcacagccatagtcatatgagtatctatcaatgccatgcctattcaacattcattgaatcattttatttaatatccgccccttctattctttctctccagaaatgagacgaatttaagttatatgcacacacacacacacacgtaaaactatttaattccatcaatattggtagcaacaaccactcctacttctcttccaatcttcatagcaacctcataagggataaccttacgcaacgcaatctctttagacaccaaaaaggcttataatctttcttgatataaactatgatataacaataacaataaaattacattattt

SEQ ID NO: 36625 - DNA, 424 bp, Glycine max
  unsure (1)..(424): unsure at all n locations
ntgcattgatgttagttgtatatccacatgtaatccaattacctgcaaaatttcttaaaacacctccaaaacccaagagatcttggtttagccaaggagcttccatcgagtatatttatctttatgtaatcatgttgcggcagttgtgctttgtctagggatgaaagaacaacttactcgtggagttcaaatctgagctggtggtagtgaagaggaaactcgttggtggtggagttgaatgatgaggaggaagagaaaggtataatctgaaaaggatagtttgagattattttaaaattatgagttgcaggatgcaaaaaggaatgtgttgaatataaatgctctcaacaagcatgcactcgcgcgaactagactccatagtgagtaatgacaccctatctgagtgtgaagccatgttacaaca

SEQ ID NO: 36626 - DNA, 373 bp, Glycine max
agcttcctagcgattactaattatatgggccattaagtctatcatatgctgacaataactgagaagtctgtggatctcctcgggggcggagtatgtgtccgccattgctttggccttggccagcaatcgaggaagttcttgactcccattcaaagtaagagcaaaccattccatccacattgttgcctcttgatgcaacgagtcgatcacccttcctctagcctctttttccgcgtacactcgggcatactcgtccgccactttgtgctcgtgggccgaggctagttataattcttcttggtacttgccgatgatggcttacatgttggtctccgtctcgcataaacgctgagacaagcttcttttggacctt

SEQ ID NO: 36627 - DNA, 418 bp, Glycine max
tgtgacttgaattctatattatatacaatgacaacagaaaatttaataaatccgagctacttgcttagagaaaaggtggtgagatactttgccaaaaaaagagcccaacatcagcaaattagagaacaattacagaagtgttcaagattaagcacttgtagaactccacttcctgatcttcatcgccacagatcaaaatgctatgcactttgcctaaaagagttagacaaaagcaggaaaatacaacagctattacactattttcactaccttgacaaaaaaagttcatatagtaagcacttccgcagttccaagagatttggtgaggttgaaaccttcacaaatcacggtttaagtctgcgaatgaatatcaaaaccaagttgtcaagaatatgatcctacttagaattgggagggg

SEQ ID NO: 36628 - DNA, 376 bp, Glycine max
acaagcatacattgtgacaccaactcttggatatactcagtaagcacatccaagacataggtaggtgctcaaagtagacctttgtgtaatcctattgtcataggagaatctgttgtgaacccacacagtaaataatgtagcaaagcagatgacttaaccaactataatttaaccaccttcttagaatattaggattctcattttaggagacttacagtgttattagtcaaattgggctaagtatatagcatgtgtactacattaggaattggcttagattgtaaataaattaaaaaaaaagtattaatgggttgttttaactttcattattgtttcaacaagttggtatatgttttttaaaacttttctttcatca

SEQ ID NO: 36629 - DNA, 406 bp, Glycine max
  unsure (1)..(406): unsure at all n locations
tccaacaccaaagatactcaagtagagagcaagactcatgctcagtggcggacctaggttcatttgaaggggtgcacttacactccctcattttttaaaatttatcaaatttgtaaataaaattttatatttttatattttattttatctatatttatataattaaatctcttaattttattttttataatttgcacccactaacttaagatcttagatccgccactgccatgcttctagttcatttgggacctagtcataaaaaaattcctgcagaccaaccatggtaaaaacttgagagactccgaacaagaaatattggggaatcaactatcatatactcattggaacaatngcattangttcaacaacaacaccaaactcttgagctgtttcaatcttttca

SEQ ID NO: 36630 - DNA, 451 bp, Glycine max
  unsure (1)..(451): unsure at all n locations
agctttctcataattcctaaatgacatttcaaactaggattaactccctttaacctccaattaccactaaatccagatttggccttccaactctcaaagcctcactctttttccactcataacaccacattctcattttctaaccctaggttaactctacccttcatctctagcagttttccataagcaatttcagcacataaacatcacaagcatcatcataaaaaccctaaaacagaatgggtaagcttgactcacaccaaacatgactagtttagcatgctttcaacaaattccttcacaaataactaccgcaatgcataaacctagtaaaactacccatcatatctcccaaaacccattacctacgataatntatgtgagaagaagtctacccaaacctgaaatntcgaagtcccacacgtagagatgcgcttcacgacttcgaaaa

SEQ ID NO: 36631 - DNA, 242 bp, Glycine max
tcattgcctaacaagccaacttacaacagcaagccccacgagactcaacataaggatgcgcaggtcaaagttgagtttgagaaaagattgtatgaccaagtgaaggtgcaaattgcaaagaagaatgaaagctatgccaagcaagccaacaagaaaaggaaggaagtggtacttgaacccggagatgatcctggacatttgaggacaaatgttttccaagaaggagggaatgatgagaatca

SEQ ID NO: 36632 - DNA, 397 bp, Glycine max
agcttcctaaaccgccatgttatacgtaattcataataaaaggcccttctttttcatcagcccaagtgtgccatcaaaatccaaacttggataatctctctctgaatccaagtttcatcctcttctgggttgtcttcagacttatagtctagtgcagtgtcagtgtcaccctctttcacctctccctcattccattaccacttctcaaatccaccatttaaaactctatcagtagtgtgcattttcagaacctctcaacttggccaagtgtgtactttttttcatgatataaatcccatcgagtactgggaaattcagtgtcataacatcatttttttatctgctgagttctacttttggtggagagaacaccttggagggtgactaacaaggaaga

SEQ ID NO: 36633 - DNA, 410 bp, Glycine max
tctcgctgttcatgctcatcatcattcttcaccctatagaacaccatccaccccaccactggtatgatcacaccaccctttttctttatttcattccctttatattctcaattttagatcccttgcataaagcatttaaagattatcatgctgtttctccactttttaaaatttctccacaagtactttaggagaagaaaataagaagataaaaatgtaaaatgaattgaactcctttcaagataaaatcaacttatgcactttagtttttggagaagttagacgagagagcttttgattttggctaataggaaaagttcaattcagttgacctccttattttcttctcataggtgcttatagtgaagtttatccaagccatgccttaggtgattttattgggtgagtgt

SEQ ID NO: 36634 - DNA, 458 bp, Glycine max
  unsure (1)..(458): unsure at all n locations
agcntttacatatttaaaaggataaagtgggttaaattaatgtcaatttattttctcttttatttttacaatctgttatttaaaaaaattattttattaggacaatacctatttttatggagacaaaaataataatcattaaaaaaatttacttagtggaacaattattctcatggttgtcaatgtgcatccgcccctgaaacttataagactgaatgttccttgtcgcataatatttgtgacaaacaacttgattgcattatcattttgagatttttttttcttacaaaaacatgaatttcacttcaagaatgacattatgatgaatatattttgtagctggttgcttggaaaagtgggtgagtaggaataaacttgccatattcacctaatagtaactagatcaaaatctattataatatatatacacacacacaaattcccacatataaaatata

SEQ ID NO: 36635 - DNA, 416 bp, Glycine max
tgtacaatgtaaccttatacattgtaaaaatcatgttctaatgcaattctaattcctactaaacttatagtatacaataacatacatataattgaaattttaaattaactacttgaattaaattctcattgtaattaattttcaatgtcaattatatttttacaaattgcacaacacaaaactttctataatgagttgtaatttccaaggtattacattagtcattacaaattatgtttattttgccttttgtaacatttttttaactattaagaaaatatggttattatataaaaaaatatagatatttgtatcttttgaatattttatacgtcagacacaaaactgtcctataatttatcgagtaaaaagaaaataagctttattctattgattttttatctcatatatttttt

SEQ ID NO: 36636 - DNA, 408 bp, Glycine max
  unsure (1)..(408): unsure at all n locations
agccttgcggagttggtcttcgccaacgaaaggatcaaagtgggtctggaaagaggtaaatctgatcatcctgctttgatgaatgcgaaaactggggcaaatgaagaggatgagaatgagggagaaacccttgctatgactgccattcctacactgtcaaatttcccatcagcctaacaatgtcattactcagccaatatcaacccttctcattacccaccacctagtcatccacaaaggccatccctaaataaaccacaaagcctgcccgccgcacatccggtgccaaaacaccaaccaaaaaggaaatttgtagcgaanagcctgtatgattcaccccaaattccggtgtcatatgctaactagctcccatatctactngataatgaaatggtagccataacccca

SEQ ID NO: 36637 - DNA, 378 bp, Glycine max
tgtaattgaataccttaatgataaccaactatcttgtttcacagttcttaaaacataaccaacaacaatttaacatattacaacacctcataatccattataacatgttatcaaatacaattttaagcataaaaaatcaactttgttcatacaactataagtacacaaagattacaaaaatattaatgctacgtcctattaattttattaataaaaattaattactttaaaatcatataaataataagatctaattaattgataatataatttttagtcactaataaatgcatacgaaactcactctttttcttcttctcaaaatcactcgccattatactgatatagtgaacccaatttatactaatcacttaaaat

SEQ ID NO: 36638 - DNA, 336 bp, Glycine max
agcttgagatgaggaagtgtagataggtgaacttcctgcttttattcgctgaccacagagtggtacctggagatatgtcgcgggggtcaagagaccttggggacgtcaggtggggtgctattgcccaaaaccaagcttgaccaatcccgacccaacccgggcatagtcggctagtgagaacctgtgatgtacctaaacaggcgagctcctggcagtcaacagataaaaggaacaatgaccacaaagcgaggaggcttgtggtggctggccatctgtgaatcttgtgtgatatatggaggattgcctctggtaatcgattaccaagggtgagtaatc

SEQ ID NO: 36639 - DNA, 411 bp, Glycine max
ttatcacataaaattacatgttattaaatatttaattaattacttaagttaaatgttattgtaattaatttcaatattaattatatttccacatatcacacaagtacaaaactttatataaaataagttataaattttatttatgatgttaccagcaagactatccgatgacctgtgatccattgaattgtcaactaggacaaaaataatacacagacaattatgtgagcaacatatatgacatcttagaatcatcaatatgagatataagttgacatattcaagtgtaaatattatgagtaatattatactagaccaactcactgtgagaagacttcaaaatagttaagtaaatgtcatgataagtgcttcttatgataattatattatgtgataactacatcatatatg

SEQ ID NO: 36640 - DNA, 262 bp, Glycine max
agcctggtgaaaagctagccgctggagctgacccatcaactgccctaactctcttagactggtgatccctaagctcttgaccttgacttgatagaacctttctttgagtgaaagcattagacttgatcccatgttctactaatgtgaacaaaaatcgtcgctaattagaactctgacatctatcatgggtggaatgtatgaatgcatgaagaaatgcttataactcaaacgctatttatgaatacgggagcccgacacattg

SEQ ID NO: 36641 - DNA, 341 bp, Glycine max
tgtgctatttacacttatcatctcttctccctttgccaaaaagaattcgccgaggactaaccgcctgaattcttttgtgtctcccttctcccttgtcaaagaattcaaaatgacacagtctgagaattcttttgattcttccctttcccttatacaaaagttttcaaaggactaaccgcctgagaattcttttgtatccccattcacaaagtatcagaggtttaaccacctgagatctttgtctgaacacattggagggtacatcctttgtggtacaagtagagggtacatctacttatgttgttgactgagaacaagagagggtacatctcttgtggatc

SEQ ID NO: 36642 - DNA, 456 bp, Glycine max
  unsure (1)..(456): unsure at all n locations
agcttggttcaacctcataacccaaggaatggcaattntgatcgctaatacttcgacaacatttcatagagatgaaagactcgggaatatgtatgttatgcatggaaaatgtaatgatgagattgagatgcccaaagaaacatcatttcctagttaaccatgcattaggtaccatgctcaatcattttgttttgttctttttttttttagaaatgggtttatgatccaacatggttggctcatggtacctaacacatgcaactaagaatgtagtgtgaattttcacgcttcctttctctgttttgttttgcagaggagaacgcaaggatcatgcatgagcaaacatggaaacataaggtatgcagtttgtagaacaaaaagtatatcgaacgcatatgcatgatgatgcaatgactcatgcacaatgtgatactggaatatgataatggacaaatg

SEQ ID NO: 36643 - DNA, 358 bp, Glycine max
  unsure (1)..(358): unsure at all n locations
nggaagaagaaaattaataattaatgtaagtaaggttaaaaactaagtggggataattaaggttgattaatggcgatctagatttcatagaattagaaaatgggtaattaagtcataagagtttaaagtgaagggtatttttgtaaatgactatacaactagtttcaaaatagaattttagtttaattagttggtgtctaattgatgtgcctaattgtatgatgtagaataattaaaataagttagagttgtaacacactaaaaaattacaactcagactgacagacaaattgtgtcatttgttcatgtatgaatttaatttcagtagttatatggttttaatcatagaattttgttt

SEQ ID NO: 36644 - DNA, 439 bp, Glycine max
agcttaaagagcttgacttgtctacgccacttattgtgtccatgttatgattccaagttactgttaatattaattcttataactcgattatatttttgcttgaatttttttttacccttaggtgacatcaacgttcacccacttgatttatgtaagaatataatttgttgcaaaagttatacctgtgtatgaaacttatatttttttatatttataattcagatattatgatatatacatataaagtacctattaattgtatgtttaatataattaagttttcattaaaaaattaaccctcttttgttatctggttatgcttaggaatgctactacatgcaataaccaccctattagcacattctactatatcatattaacctttatctgctcatctttcataagctaaagactgctccactaattacaatatttggtt

SEQ ID NO: 36645 - DNA, 415 bp, Glycine max
  unsure (1)..(415): unsure at all n locations
acactcgtcaaattacattccgaaatgactntnttggaattggaatttacattccagagattaggtgcaggaaccaattaggtcacttcttagtaaagcccaattctatgcaggtcaccttaagagatcatcagtgaactagctcaaattatatcctttttttttggactacagaatttgattcggttgaaatccttccaattctttcaacaagaaagtggggaagaaggcccaaaactgacatgatttcagtttcagggatgcccttttaaaattattaaagcttcacagtcgtaaaatgacactccctagttcatgacatgttctcatatactaaacttaattcgtgtgcttaaaaaacattttaatacatatgactggagaatgtaanacttgcagctaacagtttatttta

SEQ ID NO: 36646 - DNA, 452 bp, Glycine max
  unsure (1)..(452): unsure at all n locations
agcttgagcttggttcaaccccgtaatccaaggaatggaaattctgattgctaatacttcaacaacatctcatagggatgaatgactcgggcatactttaagcttatgcacggaaaatgtaattatgaaattgagatgcccgaagaaacaccatatcctagttaaccatgcattaggtaccatgttcaattattttgtttttaagtgaaacgggtttatgatcccaacatggttggctcatggtgcctaacacatganactaagaatgtagtgtgaaatttcacgcttccccctttttttgtttttgttttgtagaggaaaacgcaaggatgagcaaacatgaaaacaaatggtatgcaattttgcagatcataaagtttgttgaacgcatatgcatgatgatgccatgactcatgcaaaatgtgaggctggaatatgataacggacaaatg

SEQ ID NO: 36647 - DNA, 350 bp, Glycine max
  unsure (1)..(350): unsure at all n locations
tgagatgaggaagtgttgaagggtgaaacttcctgcttttattgttgaccacagagtggtacctggagatatgtctcgggggtcaagaaaccttgcggacgtcaggtggggtgctattgcccaaaaccaagcttgaccaatcccgacccaacccgggcatagtcggtcagtgagaacctgtgatgtacctaaacaggcgagctcctggcagtcaacagataaaaggaacaaagaccacaaancaaggaggcttgtggtggctggccaactgtgaattttgtgtgatatgtggattatggcctctggtaatcgattaccaacggtgggtaatcgattacaaggcttaaaat

SEQ ID NO: 36648 - DNA, 431 bp, Glycine max
  unsure (1)..(431): unsure at all n locations
agaccccagagtcacctgangcatcgcagctngcatatggaattgcgaaagcccccctacatcattatgacttgtacctgccatctcaaacaaacaaatcatacgtaacaagacaattatagttgttgtttgaatacctcacccactcaagtgtatcacacaattatggcttttctctaatgaaacactcttgccttttaccactctaaatccccttgagttcttaggcaattcaagagattatggccacaacaaagaacaattcaccaatatgtgtaaggtaaggctagagagacaaggaaaaggttaaccaaaaaaaaggctaacaatgnttttaggctcaaaagaaagaaataaaattcagaaattacgaattcaagtaacaatccttcatgctaccaatatattaccttaaagagaattttttttaa

SEQ ID NO: 36649 - DNA, 419 bp, Glycine max
tgtcgttctcgatcacactgaagaccgtgacagttcgttttttgttgtccatcgccaatttacctatgtacgtttcgtctaacctgtgttgttctattgaatacctaggtctattttgggaactcgtggttaacccaaggaccttttttggtttttgctacaaggtttggggaactcatggtgacctgaggtacgtttcactgtcagtctcgctgccattgtcgctgttgggtttgaggtaagcttcatgtcttcattgtaactttgtgcttccgcgtatgtgctagctctttgtgctcacttctctctgaagcattgttttgttcccattgtaatttgttactatgaaaactagccggttatagaatattaggtagtgtggtaattaggtactactactagggagttttctcttgcat

SEQ ID NO: 36650 - DNA, 447 bp, Glycine max
  unsure (1)..(447): unsure at all n locations
agcttgagcttggttcaaccncgtaatccaaggaatggaaattctgattgctaatacttcaacaacatctcatacggatgaatgactcgggcatactttaagcttatgcacggaaaatgtaattatgaaattgagatgcccgaagaaacaccatatcctagttaaccatgcattaggtaccatgttcaattattttgtttttaagtgaaacgggtttatgatcccaacatggttggctcatggtgcctaacacatganactaagaatgtagtgtgaaatttcacgcttccccctgtttntgtttgntgtttgtagaggagaacgcatggatgagcaaacatgataacanatggtatgcaattttgcagatcaaaaagtttgttgaacgcatatgcatgatgatgccatgactcatgcaaaatgtgacgctggaatatgataacggac

SEQ ID NO: 36651 - DNA, 317 bp, Glycine max
tgagatgaggaagtgttgaagggtgaaacttcctgcttttattgttgaccacagagtggtacctggagatatgtcgcgggggtcaggaaaccttggggacgtcaggtggggtgctattgcccaaaaccaagcttgaccaatcccgacccaacccgggcatagtcggtcagtgagaacctgtgatgtacctaaacaggcgagctcctggcagtcaacagataaaaggaacaaagaccacaaagcaaggaggcttgtggtggctggccagctgtgaattttgtgtgatatgtggattatggcctctggtaatcgattac

SEQ ID NO: 36652 - DNA, 455 bp, Glycine max
  unsure (1)..(455): unsure at all n locations
agcttcaattgtgacgggtgtatatccaccactcaattatttcatgaaggttagaaaaaaattacatagttgaatcaacatcattaccaatgtgattagaatgataaaaaaacctaacaaatgaaatccaacacatcacatgataattagaaaaatgcaataacaataaagaataggaatattataaattagatatacataaattaatattatgtacagagcaaaaatgtccaaacaatttaacaacatttttgttgatccataaaatatcataatttgtgcctaaatcggaaccaatctagatccaagtgtgatttaaaaaccataattcttaaaaagaataaattattctacattgtgaaacatattcaatgatctagcacacaaatacattgcaaccataataaaataatgttagctatcaacaataaaaactcaaaacanaaaaatatgtc

SEQ ID NO: 36653 - DNA, 394 bp, Glycine max
  unsure (1)..(394): unsure at all n locations
tctaatatctcccacactttntggggtgggccattcttggatggccttgattttcttagggtccacttggaccccatttctaccaactacaaaacctaagaagactatattatctacacaaaaggtacacttctctatatttgcatagagggtgtttttcctaaggactgaaagaacttgcctgagatgtccgaagtgatcatctaggctcctactctacactaaaatatcatcaaaataaacaactacaaatctacctatgaaatcccttaagacatgatgcataagcctcataaaggtgcttggtgcattagtgagcccaaaaggcatcactagccattcatacaaaccaaacttggtcttgaaagcgggtttccactcatcaccctttttc

SEQ ID NO: 36654 - DNA, 369 bp, Glycine max
tctctgaagggcatggttatttccagtttcctaaaaatacccaaaaatctcgccaaatgatggtccttctccttcttggaaggtaccacaggatatggtacttccttaccttcgttttcatccttttcaatttttttattttttttctttttcttggtcattaaattctttttgcttgaccattatttttttctctttatcttgattgctttcacctctcacctcatttttcttgccatcagtacctttcttttcagcagttttctctttgtgcacaatactctcctcctcctcagcctccataaaccttttactccttgtcatcacatctttgaattccgccttgggattcttttcttgtatttgctg

SEQ ID NO: 36655 - DNA, 421 bp, Glycine max
agcttgtgtatgcttgtaatccttaacaagatattctttggtttagtctttcctatttaaccttcattcgccaatgtttgtttctattacttctatatatattacatccatgcaaacaatgctaaaaggatagggggaaaaatcataataatcagatgtagttctgttccgaactgatttccaatttttcagaagagaatcttttgctgctatccataatacattgcatgaaaagcaaatcgatctgctagtttcatctgttatagtaaccacaccacattaaaagaagacaaaagtagaaaagaaatatgctctctttgtcatcagaagtgtgatcatcattgtaaatttgtagaacgggcactgaaaattatgaccttcactagctatgaataaagaaataacattgtacagccatgcc

SEQ ID NO: 36656 - DNA, 247 bp, Glycine max
agcttattgtttccactgcttcatgaaagtgtctagttgttcgcgcacactttatggacgagggttcaccttactcgaagacatgggcagagggtaccttcactactgggcgatgacacctataaggaatatctgaagttatccccacggtattgcttcatgcgacttggtataatatatgcatataatatattatcggtccacagaataaataagtgggtgatgaagactcaagggcacagctgga

SEQ ID NO: 36657 - DNA, 447 bp, Glycine max
agcttagcacaaagaatgcccatgaataagctcaaagacgcgctaagcgcgtgatcaccatcatatccgctatgcccagaagggcactcttagtgctaggtcgcgtgaactttaagctaccttaagcctataaaaggagtatgaagcaaatgagaaagacacactgagactcatagctctatattgaatacacccaaagccttggacatgtctaataagggaaaccctctttctatagctattttttcctttatcttactttatccatgcctcttcttcttccatcctcatcaacccctaaagagtaaagtctcttatggcaatgagaggctaaacccacattgttgggacctgacaagccaaacttattgcatgtcactattccttactatttattaaatgaaatttcagatttaatgttcctttctgtgcttattgttattgatt

SEQ ID NO: 36658 - DNA, 324 bp, Glycine max
tgttcgcacatcgcttgcgtgtatgacatccacttcacaaggtttgaagtagaggagaccttcaatcctattacgcaacgtggcggacaaaagtgggcagttaacttgaatggtcattattgtcaatgcggaaggtattctgcgcttcactatccatgttcacatattattgcagcttgtggttacgtgagcctgaactactaccaatatatagatgttgtttatacaaatgagcacatcgtaaaagcttactccgcacaatggtggcctcttgtgaatgaagcaggtattcctccttctaatgacgcatggacacttatccct

SEQ ID NO: 36659 - DNA, 369 bp, Glycine max
  unsure (1)..(369): unsure at all n locations
agctntaggtggagtcttctgtgcagntgtacaagtttgtgaatccaatacaacgtgaaggtttgtgattcatacaactttgcactatttctagaatgagatcatttgtgcaatatagaaagaatttcacaagtgaagtagatgtgacataagtattaaacttctcaattttttttcatgttagtttaactttctttgggactttatcattttttatctatgatgcagtttagcccatgtcagtctcagctagtgcagcgccactattaggggattgactgtgtgaaaatggatttaagtattaaaattctccctgccaccaatgatgcacatggatgagtcattgtggacttaaaggagcctatggac

SEQ ID NO: 36660 - DNA, 387 bp, Glycine max
tattggagcactaccaatatgctatattggttatgagaatggtggccagctaactgaagttgttctttatcgcccgccttctttatttctctttgacgaggttgaaaaggctcatgaagatgttttcaaagtgtttctttagattttggatcatggtagactgacaaattgcctatgaaaagttgtggacttcaagaaaactattattataataactttaaatattggatttggtaactagtccaatgatatacagagtaagataccacaagtggaaatgacaagcagacccaagaggaaaaatatcaacaccaaagtatttagcatattataattgatttatgtcttgtattaagagtatgaataattaaggtctatggagacata

SEQ ID NO: 36661 - DNA, 414 bp, Glycine max
tattaaaatactccacttcacaatgacctgcagaatgggcaacttggtcgcacaaaatacacttatcttgtcaacgcaacttcccattgcgaatacaatgcatttttcaatagatttggtgcaaacaaggtgaaatacacaaatatgtatatatattctcaaataattgtcaatatttgtacaaatgtgtttctaatgtttacaataaccatcaaatataccatagttgtttgtcctatatcatctaaacctttctacatcggatgtttctaacttttacaaaatatgctgcccatttcttgtgaattgttgttatggtctcgatgtttaatgttgtaccatcaccataccacttctaaatatgaaatatacaaataataatgtgacgtacatatataattgatctaaaaatga

SEQ ID NO: 36662 - DNA, 395 bp, Glycine max
  unsure (1)..(395): unsure at all n locations
tgcagttggaattgcgatatccccacttcatcattaggattagnacctgacatctcaaacaaacaaatcaaacgtaacaagacaattatagttgtttgaatacctcacccactcaagtgtatcacacaattatggcttttctctaatgaaacactcttgccttttaccactctaattccccttgagttcttaggcaattcaagagattatggccacaacaaagaacaattcaccaatatgtgtaaggtaaggctagagagacaaggaaaaggttaaccaagaaaaaggctaacaatgtttttatgcacaaatgaaggatataaaaatcaaaatttaagaattcaagtaacaatccttcatgcaaccaatatattacccttaaaaagatttttttt

SEQ ID NO: 36663 - DNA, 513 bp, Glycine max
  unsure (1)..(513): unsure at all n locations
aggcaaatggnttttagactattaagtgtcagnatcnttagncaagaattctngcacgnagnncgagnnatttatagtgtgangtaaatagtgtgttngtaatatagtaatagatgattagtgagtgaaattgttatacgtttantatactaacaacatatgattaggaagcataatgtgtaaagattgaggtgatttatgagcgaattatatgagattaatttgtgttgagttcattgataagattattagattaggaatattgtttgtgagactatatcatattatataaatgattgaataaataatctatgtatatatttaatatgcttaactaggataatatgaggaatgaatttgtgaaattggatttatatattaaaatttttttgttcacatttttttgatcaatgataaattatttgtatttttcattcactataagaatttatattagatgatttgaattttatgtgtagnttattgaatgttatagattaaattatttaattt

SEQ ID NO: 36664 - DNA, 180 bp, Glycine max
agcgagggtaactgacgcgggtattcttctgtgcaataacgtcggaaatccctcccccgaccctattcatctcccactgccatacacagtttcggaaacctcactcccaccccatcccctcgatactaaccggtaccatactctgcggcaccgcgcccaatttcacccctccattcgccc

SEQ ID NO: 36665 - DNA, 435 bp, Glycine max
  unsure (1)..(435): unsure at all n locations
agctntcataagtgaaatcaggtgcagtcatttccctaagagtcctctcatgaggtggaggttgagctatgttctcagtatgaaaattagtagtcaaatgctcaaaatcagaatattcagaatcaccagcaacagaatactcagaatgctcaaaatgcatagaatgaccaggatgcacactatgcctaaccaatctatgaatggttctatctatttcaggatcaaagggttgtaaatcacatggattgcccctagttatgcactatatgcagcaaataatgtgttctcaaacaagaacctaacaagggggtaaaactacaactatagtcaaacgatatccaaatgagctgaaattntgtgagcaacaccctaaaatcatgaaaagatagaaaaaaaatttcaaacaaaaattcaaagtataactatgacaactac

SEQ ID NO: 36666 - DNA, 351 bp, Glycine max
tcttatccaaggcttatcttggtggtgaagctccttcttccatggcttattccctagtggatggcgcctcctctcacctcttctcctttgtcttccgctgcatctccatggtggaaaatcaccattaaaggacctcattgaagctcaaagatccagcctccatagaagccccacaagcaagcttccatcacaatcatccatggctcatggcggccaacctcttaccttttataagattcaattgatcaaagcaagtttaggcccattctgattcctccaatcccgacttagctagaatcctcaatgaaggaacatctacttcaaacggaagcacaacctccatcccattta

SEQ ID NO: 36667 - DNA, 401 bp, Glycine max
  unsure (1)..(401): unsure at all n locations
ntgaatggngtgcgtagtgacttntattgtaacttgctgggcatgattaacatctatgctccaacttgagggggagtgttagagtcatttatgttagagctgtttaaaataaaagggttttagtatgtatacgggcttggcccaagtgcttggatatgcttaacctagtattataaatatgatggtagctacacattgtagagtacctaattacagtttactcatgtgcctctctctctctctctctttcccttatctctttctacaatattcagttagggtcagagacctattcatttcacacttgagataaattatcaaaacacaaatcatgaaagtgctatctagntatgagagtccacctgaaatataggcttcctcttgaagcatgatactatgtt

SEQ ID NO: 36668 - DNA, 477 bp, Glycine max
  unsure (1)..(477): unsure at all n locations
tggatgtgananattgaacctttgatacttgagacantcanacgaactctgagaatacccnagctcctacgctttgttactatgaattgtttggcgaattggacattggtgcttacctcgactgtcgacattgtacgatgtcgccttgacgaatgacggtggatcgtggaacatggctcctctttacggtaactctagtcctctatacggcgggctgaggttcatggttgaacatgcttcacacatcacgttctatgaagaagaagaataatcaaagggatacaataaacaatgcaacacgaggaagaatagccatgggtttcgagatgaatcctatgcttagacaaaggatattatctaaaactgttcgaagaatgtatcctagactgttcttacaggggacacagaaaagagaataattcgttttaaaaaaaaaacacacggaatataggaattccttctaggatagtgcacaag

SEQ ID NO: 36669 - DNA, 417 bp, Glycine max
  unsure (1)..(417): unsure at all n locations
agctntgacttgagtcatcaagagattataaatatgtgaccatggcatgaatttcacatcatctttttcaacatctgtttcaacaatcaagaaatctatctttcaatcttctctctcaacatcgttcaactctttcaacagattttttctgattcatcttctcttcatctttctaaaagtttttgttcaaaactttttctttcaagaaaagttctttgatcaaaaacttgtgctactcatcttttntattctcttctccctttgccaaaagaacgaaggactaaccgcctgaattcttttatgtctctcttctctctttccaagagaatccaaaggacctcaactgagaattcttttgattcttcccttccccttaaactaaagatctcanaggactaaccacctgagatatctttt

SEQ ID NO: 36670 - DNA, 355 bp, Glycine max
gcttgaggccttggatcttcttcatcaatggagtcttttgcttcttgaagatcaatggcagcaaaatggagaaggaagaaagatgattggagacgccacttcaaggagaagatgagtcaagaacaagcttaccaccataggaagcaatggataagagcttgaaggtaggagaagataagtggagggagaagaagaaaaagagcacagaattttatgcctcaaatgaggtctaaactttgaagtgtaattctcaaatgatcaaagttgaaaaaatgcatacacaaggcctctatttatagcctaagtgtaatacaaaattagaggaaaatttgaatttctattcaaatttcacttg

SEQ ID NO: 36671 - DNA, 435 bp, Glycine max
  unsure (1)..(435): unsure at all n locations
agcttggagaggatgcttcaatggttgataagaatgagagagagaaagagagaggggggagcacgaaattgaaggaagaaaaagagagagaagttaaactttgagttgtgtctcacaagactctcattcatcaaagttacaacaagtgttacacatgcttctatttatagacttggtagcttcctttagaagctttcttgagaaaacttccttgataagcttctttgagaaaactttcttgagatgctagagcttagctacacacacccctcttataactaagctcacctccttgagaagcttccttaagaagattcctaaagaagctagagcttagctacacatacctctctaatagctaagctcacctccttgagatgagaagctagaacttagctacacatcccctataatagcttagctcacccncatgac

SEQ ID NO: 36672 - DNA, 397 bp, Glycine max
  unsure (1)..(397): unsure at all n locations
ntgcggatttggtcttcgccagtgaaaggatcgatgtgggtccgaaaagaggcatatttgatcatcctactaggacgactgagaaaactggggcaaatgaagagggtgagaaagagggagaaacccatgctatgactgccattcctatacggccaagtttcccaccaaacccaacaatgtcattactcagtcaataacaaacctcctccttacccaccacccagttatccacaaaggtcatccctaaatcaaccacaaagcctgtctaccgcacttccaatgacgaagaccacctttagcacaaaccaaaaaaacaccaacaaaaaggaattttgcagcaaaaagcctgtagggttcaccccanattccgttgtcatatgctaaacttgatcccata

SEQ ID NO: 36673 - DNA, 407 bp, Glycine max
tataaaatgaagcacttgacatactttacatttacgtattgtcactaaattatgatgcatgtcattatatatatatatatatatatatatatatatatatagcagactttgggcttacgttacaatggagacggatccaggggacaaggcatttctgaaacacttttctaattgagagataaataattcattttaaaaaaattattatcaacctttttcagatacaaatatatctaattcagaaccgaagaacttccatcggtatcttaattgaaattctaacatgagtttgattttctaaaaaatatttatcatccgaaaaaaggagaaaaaaaaggaatacttgtcaaaaaaatacgttggaaaagttctgtaacctaaacaagccaattatatataataaaaat

SEQ ID NO: 36674 - DNA, 416 bp, Glycine max
tgttcgcacatcgtttgcgtgtatgacatccactccacaaggtttgaagtagaggagaccttcaatcctattacgcaacgtggcggacaaaagtgggcagttaacttgaatggtcattattgtcaatgcggaaggtattctgcgcttcactatccatgttcacatattattgcagcttgtggttacgtgagcctgaactactaccaatatatagatgttgtttatacaaatgagcacatcgtaaaagcttactccgcacaatggtggcctcttgggaatgaagcggttattcctccttctaatgacgcatggacacttatccctgatccaacaacaattcgtgcgaaaggtcggccaaaatcaacaaggataaggaatgagatggattgggtcgaactctctgagcatcgacaaaa

SEQ ID NO: 36675 - DNA, 150 bp, Glycine max
tcacgaacacgcactacatacgctcttcatatacgtgaaagcatactcgaggctgatatagatatatactaaatcacatgtttagcgataaccgcgctgaaaatgatgcacccactatgcatttctaaccaatcaattataatgaatcat

SEQ ID NO: 36676 - DNA, 415 bp, Glycine max
  unsure (1)..(415): unsure at all n locations
tgtaattatggttgatccagtatttggatataagagtatcagtatatgaattgggtttagcccaggttcataacaaatttaaaaaatttatactcgatttataaaattaacaagagattttaatttcaagttctagttataaaattacattaaatatttaaagaaaaaattaatcacctataatgattatataaaactcgagtatggtctacaaaaacaaaatgaaacattgtctttaaagtctaagtttatatttttttgttaactntgtatttttaacatttgagacatagaactgtacgtactagcaagcagcggcacgttgagtaagtctaggaatacacgtgagatccaataaatagaaattaaaaaatatttggaaaacattaaatttaaaggttatttatatataata

SEQ ID NO: 36677 - DNA, 357 bp, Glycine max
agcttccttttagtgcgtcacatttaaaaccaagttcgatggtggtacgagcctttgatggtactcggcgggaagtgatgggggaaatcgacatccccattcagagaggcccccacacttgcaatgtggtgtttcaagtgatggacataaatcccgcctatagctgcctcttggggagaccttggattcatgcgctgggagtggtcctttcaacgcttcaccagaaattaaagttcgcagttggtggacttttagtgatagtgtcgggtgaagaggatatgttggtgagcttcccctcttccgcaccatacgtagaagcagcagaagaatcattggaaaaagctttccaatctttcg

SEQ ID NO: 36678 - DNA, 403 bp, Glycine max
ttctcccacgaaaaaggtcatttgaaaccgtttcaaggtccaacgccttaacggttccttttacttttatcggttaaagtgaaccgtttaaaagtctaaaatcaacaccccgcataacttccttgcttttcaaagaactacataggtctgagttcctcatcacaattgaggatacgtaggagcaaaagccccgcttttgtcgacctcaaaaacgtaacaaacataaaagggaaaaagataacataaaaaagggaaaaataaaatgaattaaaagtaatgattttgcacatttgattaaaagtcgtcgtccctcatggcggacgcgtggggtgctaataccttccccgtgcgtaaaaaacacaactcttgaaccttttattcttaaagctcataaatccacttt

SEQ ID NO: 36679 - DNA, 457 bp, Glycine max
agctttcataagtgatatcaggtgtagccatttcccttagagtcctctcacgaggtggaggttgagccatattttcagaatgttcaaaatcagaatgttcaaaatctggatgttcaaaattaccaaccacagaatgctcagactcactaataacaaaatgctcaggatgctcaaaaggtacaaaatgttcagggtaatcaagatgcacactattcctaactaatctatgaaatgtcctatctatttcagggtcaaagggttgtaagtcacctggattgcctctagtcatgcactatatgcagcagttcatgtgtttcttagatagggcaaaagaggtgggttaaaactatagctatactcaaaaaatatccaaatgagctgaaagtttgtgagcaataccctaaaatcatgaaaagatagcacaaaaatattcaaacaaaaattcaaagtctaacta

SEQ ID NO: 36680 - DNA, 86 bp, Glycine max
tctaaactttatacaataatgaagctcttataccacttgttggacaagtggcctcacatatcttaaaaaggcgggggggtgtgttt

SEQ ID NO: 36681 - DNA, 264 bp, Glycine max
  unsure (1)..(264): unsure at all n locations
agctttatgnnngcttattntattctnaaataccatgtacacacaaaggagaatataaaagtcaaggtataagcttcatgtgaatgccttattcaaacatgagggtttttcatataaagtttgataatgttaagcaccttgataacatgcaatagaactatggaagaaaaggagtagcaaaattagggagatattgacatggctataataatggttacataggatctttattctagaatttagcatgaaaaacctttatgaatt

SEQ ID NO: 36682 - DNA, 668 bp, Glycine max
  unsure (1)..(668): unsure at all n locations
cacccgtcactnttnntatttagatcgctgattcctcgttggtgnnccnccctctctcactcatgcgtgngccaatgcatgtcanatcgtctctcatcttcatatctatacgtatactactaccatatatattccatctacatgatgtcatgtatgctactcctcagcgctgatacatcaatcaacatgtgtctatcgatcagtctgctgtatatctatatcatccaatatacgatgctgctagcgcgatagcatgtatgccagtatgagcgacgtacagaagatatggctgcgaccctacaatgatatgtcatcaatctacgcataccctgttactataagtattgcgtataccatatctgagacatgattatcactatatgtttgtgtagaatggtgcccttctgctaacgagtcgattgcactgcataatactcgntacgcgttcatctgcacgacatcacctcacgggatcaattgagatatctgaacagcggatgcggtcgcgatctgtaaaatacgaccatatgcacgtggatattgctcttgacactctccctacactcatgctcacgatatacaatcaacagtcttctacatcatattacacgttcccacttaatctcatatatagatgcatacctacctctcatgtcacgcgatattcc

SEQ ID NO: 36683 - DNA, 260 bp, Glycine max
agcttgtctccctgttcttgattattgtagagaaacatagggagccaaatgtcttcagatttgttagctttggtttgtagtcgtgccatgcttcaaatggagtctttttctgcaaagcttttgttggtaacctattcagcaaaaaactgttgtgtgtgcagcctctgcccaaaattcctttggtagccctttgtcatgaagtaagcaccttgtcatctccataattgttcggtttttcctctcgacaacaccattctgtt

SEQ ID NO: 36684 - DNA, 330 bp, Glycine max
  unsure (1)..(330): unsure at all n locations
tctctcttcattctcagactgcggaacgatcatctccaatctcttctatacagtactctctatgaacaccacgcaccctgacccatttctcgttntcttctctcttatgttggatttcacgagcattactcatatctatgctagtgtgcgtgactgtgccatcgacagagatagagagatgatgtcacacccaaactctcgtcttatttgaacttgagcaatcttgatattgagagaaagagttgaatatggcgtgaggaatgcttctgaatatggtctcctacgcttattgttattcatatcaaacacttatgtccttgtagacctctc

SEQ ID NO: 36685 - DNA, 257 bp, Glycine max
  unsure (1)..(257): unsure at all n locations
agcttgtaggattattgggtatttttcacatgtggnactaggtggcggtcgggcgatggtgcaaaacaattctccacatccacaaatcacatataaacccaccatcccctgttgcccaccttcaactgagctcacgtactcccacgtagcccttatcctcgtttctctcaacactaggtccccatcaatcctcccaagcttccacaacatccaagtaattcaacattcaatcatcacaaactaacacagccaagaaa

SEQ ID NO: 36686 - DNA, 171 bp, Glycine max
  unsure (1)..(171): unsure at all n locations
gatcggtgcgaatcagatcactcccgcatattatctctagcantgcattcatttnttacctactcctcacatttggttgttgtaggagaaacaccataactaaacgcgctccaaggcatacctatcacactagatccacatctagaacgatgggtgatcaagaggagacac

SEQ ID NO: 36687 - DNA, 263 bp, Glycine max
  unsure (1)..(263): unsure at all n locations
agcttgacaaancattgtaaattattgaaagncaggaccacaataaatgaaagtaaaaaaaagagttctttattgcagagataaaacagagtcttattacagataaaataataaaacatacatggtaaaaatgacatagataaggaaaatactttgtaaatgataacattgaactaaacttcaactggaaaatcatattcataattggtagtttgcaaatgataccattattagttgcaagagagtatgccgtatcttataat

SEQ ID NO: 36688 - DNA, 375 bp, Glycine max
  unsure (1)..(375): unsure at all n locations
acttctntgaagaaagtgtattataatgagagttactataaagtgcacanaagctcaccaagctcttcanaacgtcaataataaataaacaacccannaaagggcatgagaagatcanacacaatagagatgccaagtgtgcaattgcaatgctatctcaaagttacgtgggctctaagatccacccnctaantccctaaatagtnttgaattttctaatgactagaagaaatgcaatgttaaatagtaactttaaatttaaaattngagtatatntagctaaaatagttaaatgataaatgcaatggtaagtgagtgctattcaataaactattgggacatgagagcttatgtcataattttgacctgaaactt

SEQ ID NO: 36689 - DNA, 258 bp, Glycine max
agctggtttatagattctaagaggaattttacaaggatccaaatgacttgtaacaaaattatacatcaactagcattatataaggaactagtttgttaaaaattaaggattacgatagcaatacggttaatgcttaaattggaacccaacatggttgaatgcaatcattccttttgaaggaaaccatccactctactatttcaataaaattcttagcttggaattattgcaaaactggtttaactggctttaggtctc

SEQ ID NO: 36690 - DNA, 372 bp, Glycine max
  unsure (1)..(372): unsure at all n locations
cactacttatatataacaggcattgtgcatgcanatganggatttgagagatatttacaaaactacacatgtattagtgtaatntacatagacaaatctaataccaaaagtcaacagaacattcatatagcatgtagcataatgacttctctttattctaagaacgaattacaatcatataatagtatttagctatttctctttgactaattggataaatngactcagtataacaaatatctatgccctctaaacttaacactcaagtgtctatggaccatccaagtgaggactctatagaacggctaggcctcttacccttctaatcacatcaatgaatatgcatatccttggatcaatacctangtacat

SEQ ID NO: 36691 - DNA, 258 bp, Glycine max
agcttgttcatggatgtttaaaatgaggataaggcttagacccaccactttggtgcaaattaagctcaatcgtggaaggctcttgtattggctcgagcttaagccacaccaattggggaggattaaactcactttactcaaaagaaaaacccacttaaaaaacacaactattataaaaggcaaattttaaacatgttgatgggttgatcgttgtgattttgaagggagaaagatcacagagaaagctcatggtggcgt

SEQ ID NO: 36692 - DNA, 232 bp, Glycine max
ctctattaattgctctcagtctcatcttaaatcttggaatgactctttttccactattcaagtgcttctgtttacattctgtgccatcccatctgattaaaatttcatattgttcatgcttcatagttggaggaaatcaatgtagcccttctaccaacatgtgaaactatggagcaaaatgctccatacaattaccacccttcccaatcagagggatattatgagacagcac

SEQ ID NO: 36693 - DNA, 246 bp, Glycine max
  unsure (1)..(246): unsure at all n locations
agcnttttaagcgtatttcagnagagaccgacancacaacaatacggcacagctcagaaggggagaaacanagagaagaaagngacncacnatcccccacagaaagaacgggaataacgaaaaaaggngaaaaaagaaaataaaaggaaagattctcataagatactacattttttgtccgtgagccgtgtctttattgaagttattactgagagctgggctatggaatagtgtcttttcctgttg

SEQ ID NO: 36694 - DNA, 658 bp, Glycine max
  unsure (1)..(658): unsure at all n locations
cgcgttgatgcctacctgacagngcacttanatactangcttacgctgtcatngctccggttgctgatggaggggcaagttctgtttggttgtcntatangagcacataccacagacccttgcaacatgtacagatatctggttcatggtcaactatggtaccaagtgtaccaatgcatncagttggccttcaagcttcttagtttcagatgatgcagctgagttggtagctacctcatgcactcctctaatgactataacatcatntctggcgctanactgctgggagttggaagccatcttcctaattaaaatatctggcttcagcatgagtcatgtctccataggctccaccactgggcagatctatcatacttctctacatattactgagtccttcatataaatattggagaagaagttgctcaaaatctgatggtgggggcaactgcacatagtcttttatatctctccaatactcattcaagctctctcactgattgtgtaaaccttggatatccttctcgtncgtgggatcctagaacacggagatttctttangatactctttatggtatccacttggatgacgtgggagggaataccatcttgctctcttaagatgagaaacctaagatatactcttgcttggggtagg

SEQ ID NO: 36695 - DNA, 277 bp, Glycine max
acccggggatcccaagagacgaccagccagccagcaagcttataacatattgatacgcccgaaacaaaacaacgaaaacccgcgggaaagacaaagaggcaaaaaaaaacacacggaaggccgactcgggcgcaaaagacggcgagaggcaagaaaaagaacaacggaagctcttgagaaaaacaacggggataaccccccacacggaaggccggaggaggggaaacgctgtcccaaacgacccaaactgaaccacggagaccgcgggaaaacgcaa

SEQ ID NO: 36696 - DNA, 257 bp, Glycine max
  unsure (1)..(257): unsure at all n locations
agcnngttctttattttccttatncttgggtaggctcaattgttacaacagaatttagagtttgaatttaataagttcactaactctggtttttatgaactggtaggtggtggagatatattttatgctggcttgaatatcatttttctgtacatatgtcaacttcctattgatcagatgtgtggcacatatgtcaactcctgttatatgttctgtaacagacattttcagcttattaaaatttgttggcaggccat

SEQ ID NO: 36697 - DNA, 341 bp, Glycine max
  unsure (1)..(341): unsure at all n locations
tcacanaatcatattctataccttcacattaatcacatgttcataacanaacatctcaagtacaacacaacatctctcacacacaattcattacccaccatcacatagcangtcacaatgatcattacacagacgttatgcaacatatatactaagactcaatcctatattgaatgtggtatcttatcagtgaanaataacgctagggcacctaggattacataatanaatacaccacacaatgggtaagcaggtcactcttattaaaagaaatcataaggtgatcaattanggtattctgttagcgtgaatgtctaacatatgagatcaacatagattaa

SEQ ID NO: 36698 - DNA, 254 bp, Glycine max
  unsure (1)..(254): unsure at all n locations
agcttaccacaattcgtacccttctatctgnggctgctattaaggactggcacttagaacaacttgacgtcaacaatgctttccttcatggtgatctgcatgaggaagtatatatggatctgcctcctgggttcttgcggcctggttcttcttctaataaagtctgcaaattacataagtccttatatggactgaaacaagctagcagacagtggttctccaagttatccactgctcttatctcccttggatac

SEQ ID NO: 36699 - DNA, 377 bp, Glycine max
  unsure (1)..(377): unsure at all n locations
ttcccatcataagaatctggaagtccaattatatactcatcaacctcctacagtctcaaaaccatgtcaatntcaaacttagaataccctcanagatatangatccaatccaagtagtacaagtgaaatagaatgaatcaaaacctcttcttctgcaatgttaataatctgaaccgtaagcttctgtcctcgcagttccaaaacctatagtaactgcaggaatataaatggctgatgaaacacagataacataattcgaattgatcttgcctaataaacatgtagtacactagtaccatgtgctcacccataattaatgtnanacatgtgttattcttacaagatactaaacttnggtttagtcatctataatctgg

SEQ ID NO: 36700 - DNA, 247 bp, Glycine max
agcttataatatatttatacgctcgaaattaaacatcgaaaactctcgggaaattcaaatagtcataattattcacacggatgtccgattcgggcgcataatatgtcgagaggctcgaaattgaacaacggaagctcttgagaaattcaactggtataacttttcacacggatgtccgattgaggcaaatcacatatcgagacgctcaaaattgaacaacggaagctcctgagaaattcaaatgggc

SEQ ID NO: 36701 - DNA, 263 bp, Glycine max
agcttggggtagagtttaaagttattgtgattaatacttgtaacttgttgaagttagtggaacttggtggttttcccaaaagtggacatagtcttggtggttgagatgaactaatataacttcttgtatcttaacttttcttgtcttctcctctgtgctttaaactgactcggtttgaatttgatttttaattttgaaaaactatttgttttacaaagagtaaggctatcatctaaactcatttgtgaaaatgtaatctatgt

SEQ ID NO: 36702 - DNA, 366 bp, Glycine max
  unsure (1)..(366): unsure at all n locations
tggtcattattgtcaatgcggaatgtattctgcgcttcactatccatgttcacacattatngcagcttatggttacgtgagcatgaactactaccaatatatagatgttgtttacacaaatgaagcacatttanaagcttactccacacaatggtggcctcttgngaatgaaacggctatntctcctttcaatgacgcatggacacttatcccctgacccaactacaattgtgcgaatggtcggccaaaatcaacaaggatacggaatgagatggatggggtcgaaccatctgagcaccgacananatgtagtagatgtggagccgaagggataacagacgtcgctgtccaatgcaatctgagcat

SEQ ID NO: 36703 - DNA, 261 bp, Glycine max
agcttgaccatgatttttagaataatattctctgatgctgaccaggcactttttgatgaatgcttgaagagattccaagaagaagaaatcaatgatagggagaagcaagagaagcgagaatccatatggaaacaactggaagatgttgctgcagctaatgctgtaagcaatgaggccatccttgtctcaagatttgtgtcctctgttgcaattgctaccagtgctaatcaattggcaactgcaggtggttgagagccatca

SEQ ID NO: 36704 - DNA, 390 bp, Glycine max
  unsure (1)..(390): unsure at all n locations
gaaatagcttatagcagaccttatgcgtaataatgtagcttatctcctgtagggcttcaattgataattctgaaactctgaaccaaacgtgagtgattcctcatcaagcttcttcttcaacctcctccaagttctcaacatatcagcctgaatcagccctctgtaaagtgactcanaggtacctttcagaggaagaaacccattctctatcatctcaacanaataatggcaagcctccctccatctctgcctctcacacaacccatgtatcagaaccgtatacaaatccaaatccggccccgcccctgtctccttcatatnctggcatatctccttcacaaccntgatcatgtncaacctcannaacatacttatcanaatcacatacgt

SEQ ID NO: 36705 - DNA, 256 bp, Glycine max
  unsure (1)..(256): unsure at all n locations
agcttgtaggattattgggtattttttacatgtggnactaggtggcgatcgggcgatggtgcaagacaattctccacatccacaaatcacgtataaacccaccatcccctgttgcccacctccaactgagctcacgtactcccacgtagcccttatcctcgttcctctcaacaccgggtccccatcaatcctcccaagcttccacaacatccaagtaattccacatccaatcatcatgaactaacaaaaccaagca

SEQ ID NO: 36706 - DNA, 268 bp, Glycine max
  unsure (1)..(268): unsure at all n locations
acatccacagatcgcgcataaacgcaccatccnctgttgcccacctccaactaagctcacgtactcncacgtagcccatatcctcgtttctctcaacaccgggtccncatcaatcctcccaagcttgccaacatccaagtaattcaacattcaaacaacacaaactatcacagccaataatacatggcagaggcagaaactctgcccgaacaccaaccaaatcacagcttgctcactaaagacccagaacaatccttcgtccaatcgt

SEQ ID NO: 36707 - DNA, 253 bp, Glycine max
agcttgtgaaaaattttgtcatttcaaggacttcacaagattaaagattttgtttgatggaggtggaagagggagtcgattctgaactttgattagtatcttaatccaatattctttctgtctaagactcaaattttaaaatggaaaatgataatgaattgaccttcttttacctattttattgttttttgattggttgttaattgaaggctataaggagggtggagcatctgattaaaatataaagttaatt

SEQ ID NO: 36708 - DNA, 211 bp, Glycine max
  unsure (1)..(211): unsure at all n locations
tcatatgctngagtttnttcttaattattctaattatctatgctttaatattctctttagatgtcaaaggagttgtgacaactatatcttccattagagattccattagagagtatttcacgggtggaaaatcattgaagaggatattcattgaagncaaatattcatcgtatgtattctatantaaacatgtcacttatttttctatgat

SEQ ID NO: 36709 - DNA, 262 bp, Glycine max
agcttataagaactttttgcctcatttttttcctaataggcgtgagaattaggaagaatcaacaagaatcaagccaaggctattgtgcaagcaatcaatggggcaaaacacaccaaatgattatgatgatggatggctcaaattctcacaaaggtaaactcatcattttctttcaaattgagctgtcaaaactatcatgacatgtagaggagaatcaaagatttcaagtcacaaaatgtcaaaaacttttattttcaaaaca

SEQ ID NO: 36710 - DNA, 151 bp, Glycine max
  unsure (1)..(151): unsure at all n locations
tcatgactcttctcttcttgctcaagcanatcgagctagagggcagcttatcatgcttagaaaagcacagactatgaagatagctcaactcatcacgaacaagtatctcttgcaagctgacaaatgctctannattttccatgccttaatc

SEQ ID NO: 36711 - DNA, 258 bp, Glycine max
agcgaatttgagcatcataaagcatacattggacatcggattatcctttttcgagaatgatgatgaaaacgggaaaggtcttggtgacaaggttggctcctcctgtttagctaatacttaattacaagagtaaattacacatgcctctctcgaggtttaaggaaattacacatgcctcttctctttttgtaaaacctacacatgtctcccatgaggtttaaggaaattacacacgcttcccttctgtatttaaaaacc

SEQ ID NO: 36712 - DNA, 365 bp, Glycine max
  unsure (1)..(365): unsure at all n locations
agcatgatctagaggtggcattattcattgggtagacattataagctacacatgactnnaaattcatcagaagatgcaatgtataaacaacaatgaagacatttgtgtctacatagtcaagaagcacacaccataagttgtgaggaacaaagtcatgcactattgtactaatgcaatatcatgacaaactcctctaagatcaatgatcaaatatgaagaaaagagctagtcacgtactactattcctatattaataagttaaccgtgagagacanaaatgagtctctaacatctgcaatggtaacanaacgatctacaccattatgtataagactcactnnttctatagagtagcagaactcatg

SEQ ID NO: 36713 - DNA, 256 bp, Glycine max
agcttgtttacgctggtcagcccttggtgagccccttttttgctatgtttcatctctacaggcacttaaggtatgcatgatttacccgttgacaatattttatattcctaatttttatcggtgcagaaatacaagtctacaggaacatcaaaaacctaaggtccgcccttggtacaaaaagccaaggtctacctttgttattgaaacccaaggtccaaccttggtacaaaatcccaaggtccaccctgggtacgga

SEQ ID NO: 36714 - DNA, 244 bp, Glycine max
  unsure (1)..(244): unsure at all n locations
tgagtgatttcgcgaagggttttgaccgttcttcgacgttcttcattcgttcttcatcgttcttcagtcttcaacgggtaagtacctcanaccaagcctttcaattcattctatgtacccgtggtggtcccacattgggttcatgtatnnttattctcgttttcatttactttttatanccccttttgacgtgcttaagccatttatttaagtcatttctcgcttaacctannaataaaataaa

SEQ ID NO: 36715 - DNA, 250 bp, Glycine max
  unsure (1)..(250): unsure at all n locations
agctngtttatatttttcagaanngggtacttcgaattttgagctgaaatttttactgaattttctaagcatctggaaaaaaattatacaaaaagaaacaagtgatttggataaaattaaaaaatactaaaaatcacacaagttggcagaaaaatcagtatccaggaaaaaaaagtgaaagggaagtgtgcttgttcttttggttcaaaatttattctataattggtgcctatgttatatcaatcttagt

SEQ ID NO: 36716 - DNA, 550 bp, Glycine max
  unsure (1)..(550): unsure at all n locations
cgtatgatgcatcnctgcacggcacttnnatctaagctctaccgtcaagttatccgctgtcgatntaagactactantattgtatctagtctttacggacaagtgatcgcagttgatttaaactaccgacagttgatctaagtctgtctgacaagtgatccgaagtgattttaaacttatggacacttgatcgaagtcttacggatcagtgatccgtaaggagaaaaagctggataattttcgtttaaaaaatgttggtgcaccacataatgctagtgccctataacactccttctaaagatgtccatattatgttggtctgacgatgaactggagtatatatgtggatgatactttctgcggtcaagtaactatatgttgttattctttgtgtgggggggcgggtcttactactacctccttcctattcgatcatgtatataacaactgtctgtccgtttcatcttgcttctgttacatcttctatatatctcatatttcaactctatgaatctgtgagcaactttttatattattcttagtctcggct

SEQ ID NO: 36717 - DNA, 240 bp, Glycine max
agcttttggatttttggtaacgccggctgcactggatgatgtttaagattgagcctgtgaatgaggtttgtgttttggaacaaaaactcgaagaaaaacgtttgagtttaagtgtatatttctctccacagagtttggccaacgaaactgttctgaggagtgatgcaggtgattgcgcaatgacatccattctgatattaacgtttaatcctcccacaaaacaatccaatacagcttctt

SEQ ID NO: 36718 - DNA, 153 bp, Glycine max
  unsure (1)..(153): unsure at all n locations
tcacgtcgtttcattacaataatcaatctnttccctctntctcatcattcccactattcttcacattcacttctcttctcttctcattcacttctcttctcttctcgtgaacaaacatatagcaaacacacacacacacacaaaagcacagtt

SEQ ID NO: 36719 - DNA, 256 bp, Glycine max
agctttgtgccctcacttgcaataagccactgaacccataggacattttgttgttcattgcctgggctaagcgccactctcgcgctaagtggctctgtctgaattaattactgaattgggctaagtgcgccctacacgctaagcccaattccttcatctgaatattttgtcaattaggctaagcatgctacttgggctaagtccaagcctctcctagaggttcaatttttttgtatggggcttagtgagccatatg

SEQ ID NO: 36720 - DNA, 154 bp, Glycine max
  unsure (1)..(154): unsure at all n locations
cagagtctngccatgatgagagagtgngaggtaagggttcaagaggactatatgttatcactccaagtctagaagaattgaacaagctcattatatatgctgaataacagtaatgaagttctgccatacatagttcatcacanagctntagtca

SEQ ID NO: 36721 - DNA, 251 bp, Glycine max
  unsure (1)..(251): unsure at all n locations
agctttatgattctggttngganctttccttctgccataatgttaagtgcatcttatttattatcaattattttctttctaatttgaatacatttcttttaaatttatgatatatggaattattagtgaataaaaatttcttcatgtttgatttgtcctttattgaggtaggtccagggtagtttgcatgatgtgaagttatctgttgggaacatagttcttttagactttacagcatggtttgttttttt

SEQ ID NO: 36722 - DNA, 244 bp, Glycine max
agcttttggatttttgttattgcgggctgttttggtttatgtttaggtttgagtctgtgtttgaggtttgtgttttggaacaaaaactcgaagaaaaaggtttgagtttaggtgtatatttctcttcatagagtttggccaacgaaactgttctgaggagtgatgtaggtgattgcgcaatgacatccattctgatattacgttttaatcctcccacaaagcaatccaatagagcttcttgtgt

SEQ ID NO: 36723 - DNA, 301 bp, Glycine max
  unsure (1)..(301): unsure at all n locations
aaagataattatattactcttctaatgtagtcgacaacaaanaanaaatataacagaaagtaatgcttaggccaatctaatcaagtcantttgaatctcgtcattactatcatgcatctcanagagaaggagaatcaagcatcgtaatgcatagcacaacaaaacattaaaagagaacatgccttccaaagccaaccaatggtaaaatgtattcatatttggtgaactntntcaaaataataacacatatatataaacatggtgtaacaatctgaccacatgcacaacacattccacacat

SEQ ID NO: 36724 - DNA, 262 bp, Glycine max
agcttccatcaagtttttatcattatcacaagagcttcaagtaggtgctccttaaacctccattaatttttttgctttaccttctcttccattgttgtttcttcatttttctccatgtatctcctcacatgtctagtgctaaatgttgttaacatgattctttagaatttccaccaattaaaatagctatagaagctagatttaattttctatggttcaaatttcttgttcatgttcttgaaccatgagttgtgttgagttt

SEQ ID NO: 36725 - DNA, 371 bp, Glycine max
  unsure (1)..(371): unsure at all n locations
gacatgctcaccactngtattttngcaatctttcatcttgttcttctctttgttgtaaagaaggcttcctggtatggaaagctaaatcacttgttggatcttctctgtangtacctgatgtaaatattattttatctatttaataannttttgtgtgttctcttgtgctatctgctttcactccagtatgcctttaccttgatcacgtagatgcatgctttgttagggtcattcaacagtggaaactggtctaactctaaagtccttgatagtgcagggctaagttgtcgtactatcacgaaggaatngtgtgcgataagatagtngtgtatgtgtgtcttaatgcggtcctagttgagtntagtcttaca

SEQ ID NO: 36726 - DNA, 261 bp, Glycine max
  unsure (1)..(261): unsure at all n locations
agcttgttgngagattgtctgttttacgancacctccacataattgtgaggggggagatttgttggatttttcgggctcccttcctatgtggagtaaaggtccaaatgagaaggctcatttcatttcacttatttaagtggagaggggtcaaattagagagagagactcatttgagaggaaaaacaattacaaaacattgagagagacaggagaggggaaatcattgtgattttcgcacacccatcaaagagtgtttttca

SEQ ID NO: 36727 - DNA, 192 bp, Glycine max
agcaccaacctgacagcggtctggatctccctggatgtaatggtcggcttcttgttatacctcgcgagacgcgctgcttcctgcgcaagcttctcgaatatatcgttgatgaagctgttcatgatccccatggccttgctcgaaatgccgatgtcaggatgtacctgcttcagcaccttgaatatgtagatc

SEQ ID NO: 36728 - DNA, 256 bp, Glycine max
agctttataagcgctggtctggttttacaaaggtcaagtggtcgcgatatgcgaagatgatgttccgagtacattggatttggtacgaccatgccctcctgatttccagctgggaaattggcgagtggaggaacgcctcggcatttacgcaacgagcataatgtaaacctttacggttttaaaagctctatagttgggcctaggctttagagtttttctttttgttaaggctttgtgtcttttgtttttgaattta

SEQ ID NO: 36729 - DNA, 172 bp, Glycine max
  unsure (1)..(172): unsure at all n locations
tgactgaatgactggtggtgtctccaagaaaagcattcaacgatgtagcgtcaaatttattagcttccttctgactcanacctatnttggtgaattatcttctggatcatacaggttcgagtaaaattctttaactanggccacatcgatgtgcctgtccatatgctgtgtc

SEQ ID NO: 36730 - DNA, 256 bp, Glycine max
agcttgtctgggtttaactgtttttgttgcttcatttaaagcttacaactgttagaaattcagttatagttagttaattgaactgttatgcagttgtaattatgttatttatttggtagttaataaaactgagatctaacaggttctatatataaacatgagaacctctctcaaggttatgcatcaattgtaataacattttgacagacatagctctctctcgatgtacattttcaaaaacctattttctaatatt

SEQ ID NO: 36731 - DNA, 164 bp, Glycine max
  unsure (1)..(164): unsure at all n locations
gtgtatatgtgtatatatgtattatattcgttggttcttgnntgtgntngtattttgtntgngcagaagaaaaaaaggaagaagtatagacgagagtcgtcatcatggaaaggcanggcggacgaaatcagtgtcctatcnttgctttcctcttatctccgatg

SEQ ID NO: 36732 - DNA, 261 bp, Glycine max
  unsure (1)..(261): unsure at all n locations
agctngannangatttgattttatttcttagctgcactttggttattagtcaattgatccaagaaaacttccaaagaaaaacgtccgattgatttttttatattattttattcaaaaatattttgattattttattattatttttctttttttggtttaaccgaggttacagcataaacaatcggttagattttactttaacagtgattaaacgagattacatcataaatgatcgatttaaattcattttatcatttatta

SEQ ID NO: 36733 - DNA, 152 bp, Glycine max
  unsure (1)..(152): unsure at all n locations
actatcaacatgagagactaatntctctatgcananatattatntcataaatcccaacgatgcanatgtganaaatgggttccaaatacggtgaccaattntcacgacgatccaacggttgacgagtccaggatcataattntacagggaca

SEQ ID NO: 36734 - DNA, 256 bp, Glycine max
  unsure (1)..(256): unsure at all n locations
agcantttatacacttcagagctccaatccattgagagatctcaactagccgttgtctaatagctttggtgcttgacacgaggctgctactgtgcagagagagagtggggaccacaaacactttctgcaacaaatcttcagagaaatacaatctgtcaatgttgtctattgcttagagctaactttcatcatacaaatcgaaagaaacgttaacaacataagacaaaaggaattaaaaatgacaagatgagacaat

SEQ ID NO: 36735 - DNA, 166 bp, Glycine max
  unsure (1)..(166): unsure at all n locations
ttagaatttggtggttgaaccttactntctataaacacacctctttttctcttctgtttttaaaccaagctcatntacacagattcaagaacttaactcatattcatctatatccactagaacaaatcaagcaccaganacatcatatttttttattagatatatc

SEQ ID NO: 36736 - DNA, 256 bp, Glycine max
  unsure (1)..(256): unsure at all n locations
agctnttttttgtctaattgtgatccctttgggtcccatgttccagccacattggaagatgatcagtatgtagaatatcaactagatgaccttgcaggttttccatctactgcagaggaggaagaaagagtgagtcaacttgataacttctacataatcgaaatacttgatgacaaattttggattttattcatgtttgatttatccatgctatttagatgttcatggaagcagtgatggagtcactgaaggaccc

SEQ ID NO: 36737 - DNA, 357 bp, Glycine max
  unsure (1)..(357): unsure at all n locations
tcactcgtcaaaagaatcaaaagagtgtctaatggtccaacgccttatatgacctttcattcaataagaacatatctcgcagaatacgataaaatataacttaaccaaaacgctgtgttcacaaaagaactacgtaggtatgaatttctcatcacaattgaggaatatgtacgagcanagggaaacgctcttgcgaccacanaaagataaaaatataaaacggcatcanatagacatacgaatgtaaaaagggaagataacatacattgaagtcatatttgcacatttgattaaaggctgtcgtctcttgtgacggacgtgtggtgcataataccttctcgtgcgtaaatacaactc

SEQ ID NO: 36738 - DNA, 224 bp, Glycine max
acctgacatcacctttgcagtaggtgtttgtgcaagatatcaagccaaccctaagataagtcacttgaatcaagaaaagagaattctgaaatatgtaaatggcaccagagactatgggattatgtactgtcattgatcatattcaatgctggttgggtattgtgatgctgattgggctggaagtgcagatgacagaaaaagcacttctggtggatgtttctatt

SEQ ID NO: 36739 - DNA, 661 bp, Glycine max
  unsure (1)..(661): unsure at all n locations
atatgatgcttcgctgcacggcactatnatactcagcctggggganactagatgcctgggttaacctgtgtcgcaacgtgtttctcttggtctatcgagggcgaggctcacgggtgcgctntccanaggagganagatgcgcggagtcgccaccaacgtnntattgtggagaacgtcagaaaaaccgaagganaccggtcaaaatgaannattctaagttgggagtngtattttacgttgaggaaggtattaacacctctcacgtttgtctcgaaggacaacnagcctatttntagaattgtggaaaatgcgctatcttaacnnttattcttttattttttgaggtcgacanaagcggngctnttgctccctacgtaccctcnttggagagganatcagacctacgtagttcttccttatgcatgggatcaagtgatctctttacttgaaggatgatcattntannggcgnggaccctanaannntatcttntacttagtangaaaactgaatgataaactttcaaaccctatttgttgccagcttgctangcgagtgattagcttagttacttagtatagtaatcaataaaagagaatccaaagaaacgccgatgattccgttactactangggatttatataatatatnacctcttgat

SEQ ID NO: 36740 - DNA, 162 bp, Glycine max
  unsure (1)..(162): unsure at all n locations
agcanctcacacggttcttatgccggcgacccctcaagcccacagcacgagaacgcgcaagaaagagcttatccaatccggcacaaggggccagaggaagaataggcccaatcaacttcaaccagaacaaccaacatgagggggggaaaggaaaatcaagac

SEQ ID NO: 36741 - DNA, 259 bp, Glycine max
  unsure (1)..(259): unsure at all n locations
agcntgttgccaatatttagcattagatattccaataacacctctacagtaacagatttaataagaatatttgttttagttcaatgaatgctgaaaatcattaaaaattaaaaaataagaaagtaattcaatgtctgatataaaccaagatatttttccgcttgcatccttggatgaccaaaattatagggccagcattttcaagtttgtcaaggtgctgttgcatttgctctgcaaaatcttcccaacgagtacattt

SEQ ID NO: 36742 - DNA, 309 bp, Glycine max
  unsure (1)..(309): unsure at all n locations
ttccgcggagccacagcccttgcgtactcaatntacaatatcctctcctataattgagtattcannaactgtagctataatcctatgacatcatagcacgtagtaacaatggnttgtttcctatgttaaaaaataaagattaaagacattgataagttattgttcgtatacccaatctcaatccctggaatttcaacaactttcgnttgaagtgactaaatggcataagggtgtagatcattcggtttcacatgaatgaaacactcacatttgntaatgtaagatctgtgttgaattcacacaagtaca

SEQ ID NO: 36743 - DNA, 255 bp, Glycine max
agcttatcatgttttcattaactaactaaattgccatgtgttgttgtccttttcaacaataaaggaagcttatcatgtattcatattagcacaagacaagtgatttgatctacacctacacaatagacatttacttgggattatgatttgtgttactctcttctctcccaaactaccctggtctcttttttttttaggaaggcagtacaactgtacaagataagaagaataaaaagagtaaaagatttaactgta

SEQ ID NO: 36744 - DNA, 280 bp, Glycine max
  unsure (1)..(280): unsure at all n locations
ttcatcctataacgcaancgtggggacataaatgagcagttaacttgaatggccattactgtcaatgcggaaggtattctgcgcttcactatccatgttcacacattatcgcagcttgtggttacgtgagcatgaactactaccaatatatagatgttgtttacaccaatgagcacatcttanaagcatactccgcacagcggtgcgctcttgtgaatgaagcggcaattcctccttctgatgaggcatggacactaatccctgacccaactacaattcg

SEQ ID NO: 36745 - DNA, 148 bp, Glycine max
agcttaccttcttttcatctctgttacccttcaggacaacatcaagataacgatcaagtatttctttttccaatctgaaaaaaggggacagaggaagaatattgatttatcaactttaacttgaaaacgcattatgagggggggagag

SEQ ID NO: 36746 - DNA, 140 bp, Glycine max
  unsure (1)..(140): unsure at all n locations
agtggacctggagaatatgtcgcggggtcangagacctttgggacgtcangtggngtgctatngcccaaaatcaagcttgaccaatcccgacccaacccnggcatagtcagtcagtgagaacctgtgatgtacctaaaca

SEQ ID NO: 36747 - DNA, 261 bp, Glycine max
  unsure (1)..(261): unsure at all n locations
agcttttgaggcgttttcttttttgatnnnancttatgggagattttagttttaagagcaatggaagtgtttattcctttcttcttgtttaagatgaccttatgcactctgatctaagaagctcatctgaagttagcttgttaatatcatgatgagtttcttggatggctgcattcttgagttcccactccttcagaaggttgtccaagaattgttacaatcatatatgatcttgctaggaggtataatcatcttcaaagg

SEQ ID NO: 36748 - DNA, 233 bp, Glycine max
  unsure (1)..(233): unsure at all n locations
acagcaccatatcgganatttagtttcgaaaggagcccatgtngnngaaattgccttctagtctaagtgtatgnttggttngcaatngaaattaatatgacacatgtttcaatataatccaacggataaagtgaagaaaaaaaanaacanaggtcattatccttatacaanaagtagttagtctcaaacatacttttcacctcattttaaatatgcactanatcaccactaac

SEQ ID NO: 36749 - DNA, 261 bp, Glycine max
agctttctccactattttgccttatgcctgaaatgtcttttctgatggtagtggtcctagatgcagggaagaatttctccaagaacaccctcttaaggtcatcccaactgaaaatggatctgggagcaaggtagtagagccaatcttttgccactccctccagagaatgaggaaaaacctttaagaaagatatgatcttcttggacatcagggggcttcatggtggaacaaacaatatggaactccttaagatgcttatga

SEQ ID NO: 36750 - DNA, 163 bp, Glycine max
  unsure (1)..(163): unsure at all n locations
gtctccgatttatctgcctcctcttaagcaacttgtacttgtagctgctactggctgctgctgtgtccacttttgtgttctgccttcgccattgctgcaacaatntctgaacctcgtcgtagtcatcttcggtgtccgtggactcaatagcctcggcaacgct

SEQ ID NO: 36751 - DNA, 257 bp, Glycine max
agcttggttcaaccttataatttctttgaaggaaattctgatcgccaatacttcaacaacatttcatagggatgaaagactcgggaatacgcatgctatgcatggaaaatgtaattatgagattgagatgcccaaagaaacatcatttcctagttaaccacgcattaggtaccatgctcaatcattgtgttttgttatttttttttagaaatgggtttatgatcccaacatggttggctcatggtaccgaacacatg

SEQ ID NO: 36752 - DNA, 661 bp, Glycine max
  unsure (1)..(661): unsure at all n locations
ttagtcttaggaccttgcantaccagctaacctgttcttgtatcataacaactccaatcagagcgacacnccggtcatgtgtcnattttatactgtgacgaaaaagcctaataaggagtgcangctatatgtgcgcacaatgccagcgtgcacacaacaatagtaacacacgttctatattcaacatgtcctgtggaccaagagagagagcnactgtatttaacaatcacatgacagcttacgttatagaacaagagaagcgaacctaaacatccagaaagagaagctagtgcgcagtctgtgaantgactaaccatgtgccatatattacaactcagtatatgggatcagaacacccaagcagcagaacagagcatagacgcgtatacatttataaacaaagcanaagctgactctcgacatacctttgcatncggtaagaccatatcacggtgctagactatnacgcgctagacaaccacatgtcacgatccgaactcaagcgtgatggttctatctaatagtacaatatatgaaactcgagcgtgtccgcacaaactttatgataggatatatggatgcaacatgtgatcgcgatgcacctcacacacacattatgacatttcttctctgttatgacagaggaaacaatattagatct

SEQ ID NO: 36753 - DNA, 257 bp, Glycine max
  unsure (1)..(257): unsure at all n locations
agcttgcatcnactttatttcatgaaggaagttgcatgcatttgcatcccaaaaattgtggtcatattaaattataagtgcatagattgctctttatataccaatttcccaaatctaatgtcctatcttaagttttggatgagagaccctcgtaaagagtcaacctcttgctttctcataaagttgagccctttggtactaatacttattggcttatttcacaagactcaaagtcctcatttttatctttcattgga

SEQ ID NO: 36754 - DNA, 308 bp, Glycine max
  unsure (1)..(308): unsure at all n locations
catacccacgannattaagagaganagaagtccacccacacctcgaatttcgaagtcccactcgtagccacgcacttcacgaatcccgaaatgctcttctttcacgatatgtggcagaaacgggcactaaaggtngaagctntgtatggagctctaatggagaatgaaggaggaagaaaggcaacgtgagggagagagaaagctgtctgataaaaaagtgagggctgagtgaagagagagaaaagctnnttggtttaaataaaaggtntcctctnttctattatttattcaagctctgcacatgtcct

SEQ ID NO: 36755 - DNA, 228 bp, Glycine max
acactttttggggtagggcattcttggatggccttgaatttctcaaggtccacttggaccccatttctaccaactacaaaacctaagaagactatattatctacacaaatggtatacttctctatatttgcatagagggtgtttttcctaaggactgaaagaacttgcctgagatgtcctaagtgatcatctaggctcctactgtacactaaaatatcatcaaaataa

SEQ ID NO: 36756 - DNA, 594 bp, Glycine max
  unsure (1)..(594): unsure at all n locations
atggctntaaantgatagagtngtcacannnattattgctctatatanttttngttagaagtcttgatgttgngngtcgaagctagaanggtattttttaatntcatcacttctcaagcagaggactnntgtttccanagggggtaccttttttctttatttcggtgccacaagcagggatggttggatcagtaagtgagagaatactaataagagctgaatttgagggatatggacaacgaanaagaagaagaaatcngtagaaaaagaaaaacagtttgaaaaattngaanggattanatgaaatatttgatggttgatattatatttttaaaacaatcataaaatcatcnaatctatttagaaaaaatatttaaattgtgaactttaatctagaaacttcttatagtataaaaatatattgatataatgaatttatttactcttaaaactctaataatntaatgataccataaactatttatattaaaatctgataatataataattttgtaaatattaaatcttatatctaatatacacctaatacacgacattcaatgcccatatctttttatctctaaaaatatcacn

SEQ ID NO: 36757 - DNA, 255 bp, Glycine max
  unsure (1)..(255): unsure at all n locations
agcnngttgctgcatgatgaaanggcagagatgcttccggcagggctttaccttcacgctgcaacaataaagataatcggataagaagatccccatatgaagtacgttcacaacaaaaaaaagattttgatttctaaaagaatgagtactaacaaataataatagtgtctgactttcttttttatagtttggcacaactatatcagttatattatattttgcctcttattttggtagaaaaatctatattcaaag

SEQ ID NO: 36758 - DNA, 595 bp, Glycine max
  unsure (1)..(595): unsure at all n locations
tgtgatggatactgcncgaccttnatctaacttcctnacctcaaatgggaagtctgtgagcgcntttagctttaaataatactacttgaattatctgaaagttcgtgttcaatttaacgtttcatctcataatatatatatatatatatatatatatatatatatatctatatatatctatatatatatatatatgtatatatcagagatatctatgagatagcgtgatttgtgaaattcttaataatatacagaaatgtgcgctattcataagcaagaaaatctcactcctaagtgggagaatatcacattatataatcactgtgcggtgaagagaagactcaaccttttcacacacacatgtcatgttgaaaaccctataaactccgcgacgcctccctatcataaagaacacacatcccgcctaaaaatgctaagccggcacaaacaccatcataggggtggcaagttatttcgttcgtggtgtgtgtgggatgagagccctcctcgtcatctcaatcacacagactccacacccgnacacagaggggtggaatctgcacgaggactgtgccgtcgccacaaaacaacaccg

SEQ ID NO: 36759 - DNA, 234 bp, Glycine max
  unsure (1)..(234): unsure at all n locations
tttttgaaaaccgccgataacccctgggaaaaagaatccgccaacagctccatagacncagacaatgacaatgtcatccacaacaacagcaataacagttacagtaacaataacaacaacaatagcctcagcaaaaggaaggccatgtctccctgacccgatcgggaggagagatcaagacccaaaatgaaagagttagcgggggtgtaaaaaaaaacaacactttagagagag

SEQ ID NO: 36760 - DNA, 284 bp, Glycine max
  unsure (1)..(284): unsure at all n locations
gatgagtcaacaagttcaagatcaagaataatttcaagtttcatgaacagagatcaagaagaatcaagattcacgagaagtttgatttcaagattctagagaagatgaattcaagattcacgagaagagatcaagaagacttcacaagggaagtattgaatatatatttcataaaacaaacatagcacaagtttggttttcacaagagtctttctcanaaatttctaagttaccagagttcttactctctagtaagtcgataccagtttcctgtaatcgattac

SEQ ID NO: 36761 - DNA, 256 bp, Glycine max
agccctttgaaggttatttcgtgtagccctccgaaggagaggacatgtagtcctctgaaggcgaggacctgtagccctctaaaggtgaggacctatagccctctgaaggcgagggcatgtagccctctaaaggtgagggcgtctagccctctgaaggggacgacgtgtagcctctgaaggcgaggacgtgtagcctctgaaggcgaggacgtgtagctctctgaaggcgagggcatgtagccctcttaaggtgatg

SEQ ID NO: 36762 - DNA, 190 bp, Glycine max
  unsure (1)..(190): unsure at all n locations
tagatacaatccagtgtggaggaatcatccanatctgagatggacaagtcctccataacaacaatagcttgtccctccttttcagaatgttgctggtccaaccaagccatatgttcctcctccaatacagcagcagcaacaacagcagtcacaacaaagataacaagcaactgaggcnntctctcaccct

SEQ ID NO: 36763 - DNA, 253 bp, Glycine max
agctttcaaatttattgtaccaaagtacacaacataaactagtacctactgaatataaattagtcatatccaacaacacatcctaataacaaaataaaacaagaaatgggtcttcacttttcttcatttttatactggatctttatcagcagctttccttctagtgaaccttggtgttggcatgaaaagtaagggtgttgttggtgggccatccacaacaagtaagtctattgttgaagtgtctaaaatgttg

SEQ ID NO: 36764 - DNA, 398 bp, Glycine max
  unsure (1)..(398): unsure at all n locations
ctaactgatattgaagtttactgtacctcggttactaatgccaagtgccaaccattacttgcttgttactaaggtgaaactccaattataatgggagaatagcactganagcacttaaggaatttcatctcagactctcagtattgctcttacttttatttccacgggcctctaagtccactaaatanaantaacatcannnatttatatattatgtgtgaaaggatgnttngaatgtctannaccattgtgttgaactcttaagtaaactcataagactcttatgagtntacgaattctagttagcatgtngacnntcattgtcaaactcttttctatataaacacacataaactcattaaacccgtgtaaactcgagtcaagaagcgagtcaacaa

SEQ ID NO: 36765 - DNA, 249 bp, Glycine max
  unsure (1)..(249): unsure at all n locations
agcttcagccgtactttttgaaatccgntgataattcctgtgaaaaagaatctgctaacagttccatagattcagacaatgacaatgtcatcaacaacaacagcaataacagtaacagtaacaataacaacaacaatagcatcagcaaaaggaaggccatgtctcctgagcctcatcgggaggagagatcaagacccaaaatgaaagagttagcggtggtgtaaaaaaaaacaacactatagagagagg

SEQ ID NO: 36766 - DNA, 679 bp, Glycine max
  unsure (1)..(679): unsure at all n locations
ccctacttctaactgatgccatcgcatangccccactatgantactcaagctntaccgagatcaatgcacagaccaatggtgagcanattcatcctatccaggttcatcagagccagnggtagctccataccctgttcannattgtatgcatcctngatgagctcggctgtgatgagaacgtgaggtacagatcttgccacanagaaggtaacccaattcanaaaccattctaacttaacaagaatgctctntgcatcccgaataccggccattcttctcacttttctcatatgaagaaagatggaatgcagctgtaccatcacagaaaagtcttcctttagttacacaataaccncttagcattatgcagtagggcttaacaacagactcannaaaacccgagaaatgtacatggttggggactaccatgngtcanactaatctctatatggcatggtatcaaagtgtattaaatataannntctactngtaatngaatggtcactatacgtacanaaanantcatgaccatgacatcangtggtccggactgcntatattctctatcagtcacaatacatgatcacacatcatcacatttaaaaggggggaacctattgcaaattctatctttaatcaaaagcttaatatgacattcgccaaaagagagttcaagag

SEQ ID NO: 36767 - DNA, 261 bp, Glycine max
agcttatgcgcatatttccctatgatcgttcacttgcacaagacatcctattaactaagaaaaatgcacccatatacaatcaaggtagcttcattacctagattatttacatgtacttccaaggtgtatttgttatttacatcacacatgcctccttggctaaatttacatacatgcatactcaaagcatttcggggtaccaaaaattgcacatgcgctcatcttggtatttctaatacctatacatatacaaacttcatg

SEQ ID NO: 36768 - DNA, 258 bp, Glycine max
  unsure (1)..(258): unsure at all n locations
agcttgccaatagtttatcatttctttcactagcaaaaacaaaaagggaaaaaatacattgaaaggggaatatatattcaaatctagcagcaaaattactgtgcattgcaatccagacctgtgcgatagagtgtttgtcctctgtaagatgcccaccgtcgagtgaactcctgcttatcttcttcaagatctttactttntagtcgctcatcgaaattggcccattcatctacagtacattaatggcatacagtaaat

SEQ ID NO: 36769 - DNA, 305 bp, Glycine max
  unsure (1)..(305): unsure at all n locations
tcatgtcatcgaatttgtaagntatattctnttcgatcaagcatcanacataacattaatattgtgctctntagattaaaccaacttcaataaatcttntaaattcccatacttaannaattttacttgtaccactaacacanactggaagcataatttaacctaccatcgtcaaccataacanaattctacagtaaacaataatggttactannatgngacgaaatgacttcaannttgtgatgggtatccattcttgtaaatgcaacctatcgaaatggaatgtagaggacaataagttcatc

SEQ ID NO: 36770 - DNA, 256 bp, Glycine max
agcttgcctcaaagatgtccattattgacaaggcggccgaaggaactaattccgccccggagtacgacagtcaccgctttaagagcgttttacaccagcagcgcttcgaagccatcaagagatggtcgtttctccgggagcgacgcgtccagcttagggacgacgagtatactgattttcaggaagaaatagggcgccggcggtgggcaccactggttactcctatggccaagtttgatccaaaaatagtccttga

SEQ ID NO: 36771 - DNA, 168 bp, Glycine max
  unsure (1)..(168): unsure at all n locations
accttctcttccattggtgtttctgtcatttttctccatgtatctcctcccatgtcttgtgataaatgtntttaacatgattctttatagtttccaccgattaaacttgctatagaagctagaattgattntctatggttcanatntcttgttcttgttcttgaacca

SEQ ID NO: 36772 - DNA, 256 bp, Glycine max
agcttctaatattttttttgtgtacttttaacttaatcttacccacatgatcataaagtgcaatttaagaacaaagatgaaagtggaatcatgcgcatgtgctgtgttttgacaactgatgaatgtcttgaatccaaaataggtgtctaaactttcacgacacactctccaacttttttacactaacgaagtacgatgcttggagttataactaaaacatgcattacaacttgtaataacaaagtcatagtctcga

SEQ ID NO: 36773 - DNA, 346 bp, Glycine max
  unsure (1)..(346): unsure at all n locations
caccctgagtcttaagggagttccaaaaccgagtgacataccctcaagtacaagtatttccccttatgagaaacttcaagtacttactcgcanagtttatactatntccatgcaacatgaagtatgaaacatgggtaccatcaatgcacanactgtggataattaaagattctaagtcatcccccttcatagatgcttanaactctctaaccactctnntcctcaccagggatatccatcatggtaactgaacccnccatgtacatacacaacatacatcatcacaatgacattntcaacatcaacaacatntcatctcaatgtcattatcaacatcaacatcatc

SEQ ID NO: 36774 - DNA, 263 bp, Glycine max
agctttatttagctttatgccttttatgatacgaaaaattgctcagtggcatggtccacaattaatcaaatttttggacagtttttaaagatgcatccatccatgacatcatcactaacatttctgttgtaacaagcttctatccatatacccacatatgtcgtgtttcttgtaatctatggccatggattcacatagacagagacgcttcaacgtgattaatgtccaaaatatcgaattaataacaccgcatacatatatac

SEQ ID NO: 36775 - DNA, 151 bp, Glycine max
acaatgcttagttgacttcatggttgagctccctcccaatgaagaaaccaatgaaggataatggaccttatatgtcaatggagtctcaatagaacaatcattggagagattacacaatcagaccaaatacaaagccctcattctgggtctg

SEQ ID NO: 36776 - DNA, 254 bp, Glycine max
  unsure (1)..(254): unsure at all n locations
agcttgtgatgagctttattatagnggaaaagttggattagcttcttactcaggagggtcttgcattggtaattctgggaaggtttgcttcaaaggttcaagaaatgtgactatggttgcatctacaatgagatcaaatgagcaagcatgtgatccgattaaagtgcttgtaacattgtccctccttggtttctcagtgctgatagcttcattttttcgctcaatgttttcaagagctcttgatcttgctgggg

SEQ ID NO: 36777 - DNA, 303 bp, Glycine max
  unsure (1)..(303): unsure at all n locations
agagaataatgacctaagcggcgcagcaacatataactagtgctctgagctctntcagttngngctttagggtttcttccttcccaatctanaatgaaggtttttggattcaattcaccttattaccctccgttacattctcctgtctcttcttttggtttanatatgtctatagtatttctaatctagagttctctttttaattcttggtaaatataattatgtcattttagtattcactttaaataacattctgaataattaaaaaatattatctaaaatactataatatacaaaataaaa

SEQ ID NO: 36778 - DNA, 252 bp, Glycine max
agcttttagctaattcatactacaataatggtttgctcggatgtctgattgagacccgtaatacatcgagacgctcgaaattgaatgttgaagctctcagcaaattcaaacgacaataactttttactcggatgtctgattgagtcccgtaatacatcgagacgctcgaaattgaatgttgaagctctcatcaaattcaaaccacaataacttttttactcagatgtctgattgagtcccgtaatatatgga

SEQ ID NO: 36779 - DNA, 690 bp, Glycine max
  unsure (1)..(690): unsure at all n locations
cggttgttgccttcgctgtcacgcacactatcaaactcaagctcagaantcaattcgagcgtctcgatgtattacgagactcangttgacntncgagtataaagtcatcggcgnttgaagttggatatagtctcatcattgaatttcacagcgtctcgatatatgtacgcgaacctacaatcagacatactatgtataagagctattcgtcgtccgagacatagtcacagcgtcatagatcaactatcgagcgactcgatacattactggactgaatcacacataccagcacgacattattcgtcgttgaattatgtcacaccttcagagatcaattgcgatcgtctcgatgtaggactggactcaatcagacatctgacgaagaaaggatatgcatatgaatatgctgagagcttcaacattcgattntgagcagctcgatgtatgacggaacttaatcagacatctggatacaaagtnattgtcgattgataagctgatagcgtcacaatcaataccagcgtctcgtgtattaccggactaatcagactccgacttatagtagtgtccctgaattgccgaacctcaacattcatttcgagcgctctatgatcactgactcactgaacttcgtcaataactactgctgtcgaattctngaagcctaaaactattctaacgttgtatttg

SEQ ID NO: 36780 - DNA, 249 bp, Glycine max
  unsure (1)..(249): unsure at all n locations
agcntctttttatgttttaaggcgggtaaccataactatattgtctcaaccgcgagctttgaccaccggttttacgtgccgcgaagcctatctttatatctgactgaatgggcttatagcctaaaccatacttcccacgatttcctttggcgatacaacaagcttactatgccgccgaggaattgcctaaacccatgcggggttcataaccgattcccaacataaatcgggacataaatactgctgcag

SEQ ID NO: 36781 - DNA, 632 bp, Glycine max
  unsure (1)..(632): unsure at all n locations
catgtgttanctactgacactacantcnnattctacgctgggctgcgcgcagcnctganttctgagtgncatagaagatttatcatttgtattantacaggccatcggaatcgaggacacgcctaataagccttctggtaatcgaccacacgatgttgctatcgataacaagctgcctgatcatgtcgaaacgactacactggatggtactatataccatagcactattctatgctagtttctatcagaatatctatatttatgctcaatacatcctatacgacttatgtcactactaatacactaatgactacattcgctactatatacacgaagatcttatcctatcttaaatcataattcacctagatcatacatatttctacatctaacggttaatgtatattcctatcatccatcatcatgatactattcgatactctacactaagagaccattttctcttaataacacaaccttcttgtgagaggtagtgaatatcacacgtcactttataatatcaacttaactcactccctcttaccaaatctatgaatgggacaatttattgttatgcttatgcaacacggtctggtatatacgctcacattaccataatgtgcgacaatgcg

SEQ ID NO: 36782 - DNA, 215 bp, Glycine max
  unsure (1)..(215): unsure at all n locations
caaaccaaaacatgggtaancaaacaaacatcccaaaaagggaaaagcgcgactggccaaacgccaaacaagaagagggtctcttagattcagggggagactaagggtgggtcaatagtggcctaaagaatactgttgcttccaatatttgcaacacaaaatacttttttgtaatcaagctttgagtattggaacccttcattatgtgatgacag

SEQ ID NO: 36783 - DNA, 606 bp, Glycine max
  unsure (1)..(606): unsure at all n locations
cgcttgttgcacgttgacntgcactancatctaagctgccgattacatctcccttctangcagatcttaggttttcgtttcntcatctntatcnacanganncacattctgctactgtattatgatgacnatcgcctgtatgttatgagcaacaacatagaganaatagtctatcgcatatagtctactccactatggttntgcaatgatcgcttatatgagacacgtgaagacttcatatctatcatatgtaaacaaatcgtctcatacactatagataatctttcttactcatgtatcttttaatctgtatacatacattccaatacgtgtgtatacccacacacaccttgtcaacaagacactatatactgaccatagctaaccaagaanacaagttcccgagtgtcgataatgggctgangtatatactattggcgaccgggccttgcgacacaacactataagtctctcccttatttataaactattagttgtgttgagaacatcaagcattctcttacttcatacatatagcttgtgtgggacacaagctcccttattcaaactcaagcttgttgggacttcagcttgccttatcttacc

SEQ ID NO: 36784 - DNA, 256 bp, Glycine max
agcttggactgtgttagtataggaaaacaaatgaccaaagtgaaccaagagccatttctagggcaaaattaggtgttgaagagtcaaattttgatttggtggaattttaggtgtaaatccagtttgggcaagtttagattgatgttatggactggtgtgaggtgagagtttgcttcaaatttacctcattctaaatttcacttttcaaacctagaaaacccattgaatggaggggtgttggacacctatattctgt

SEQ ID NO: 36785 - DNA, 160 bp, Glycine max
  unsure (1)..(160): unsure at all n locations
tctgcactntgtgcagaattttgctgtganaatgtgcagcagaaatttgcataagtgcagaaaaatgctaggtatttgctggttgtggaaagagtagtacaaaattagttctggatgttngctagtagatcccaacggtcaaaatgtagacttatgtact

SEQ ID NO: 36786 - DNA, 251 bp, Glycine max
agcttgcccagaaatggaatctacagaggaaatgcttaccacctcgaaagactggaaagcggtttctaatgactcctctgcggcctccacataaggcatagaggatgggcagctcaccaagatgtcttcctcgcctgatacgatgacaagatgcccttccactacgaatttcaacttttggtggagtgtagagggaacaacgcccactgagtggatccacggacgccccaacagacagctgtagggggggt

SEQ ID NO: 36787 - DNA, 284 bp, Glycine max
  unsure (1)..(284): unsure at all n locations
gcacaacaagtttccacatccacaatgcgcgcataaacccaccatcctctgtggcccacctccatctgagctcacgtactcccacgtagcccaatatcctcgttctctcaacaccgggtccncatcaatcctcccaagcttccacaacatccaagcgagacaacattcaaacagcacaagctatcacagccaagcaaaacagagcaaaggcagaaaactctgccataacaccaaccaaaatatagctngtctcacttatagaccccagtaacaattccttcgat

SEQ ID NO: 36788 - DNA, 248 bp, Glycine max
  unsure (1)..(248): unsure at all n locations
agctttagngtttttttactctattnactaattttaacatgtgtattcattcaaacatttttttttgtgaaaatcgtgactggcttagcgttaaacaataattgggtatcttagatttagggggagtctaagggtgggtcaatagtggcctaaagaatactgttgtagccaggatttgcaacacaaaatacttttttgtaatcaagctttgattagtggaacccttcattagtttatgtaggagaatt

SEQ ID NO: 36789 - DNA, 165 bp, Glycine max
  unsure (1)..(165): unsure at all n locations
taagtttntgagctcatgtgactgccattgcgtctgcatcaactgcatttgcccncaatttcccagaatgtcaaggatcacgctgaaattgcatccgcaaccacaatttanaatatggctngaagcttaatagcacaataaccttcaaccattccatctcttcat

SEQ ID NO: 36790 - DNA, 258 bp, Glycine max
agcttctatggaggttggatcattgttcttcaatgaggtcctttaatggtgatttttcaccatggagatgcagcggaagataaagaggaagaggtgaaaggaggcaccatccactagggaatcagccatggaataaagagtttcaccaccaagaaagtgtcttggataagaagcttagagaggaagcttcaatggaggaaaacagagagagagaaagagagaggggggagcatgaaattgaaggaagaaaagagggag

SEQ ID NO: 36791 - DNA, 372 bp, Glycine max
  unsure (1)..(372): unsure at all n locations
atcacncataataatcctactcaactaagaagaatactcataatcttaacagaatgtaatgtagcaagtcatcccattgaaattaaagtccaaacaatataccatgtctccttgagattaaatagactgagccaattgcagtattgtacattntctattctatagaatntttatctctggttctcaatggataacaatgataaaaatatagacttttcacctttatgcgtatcacacgtatattgtngaagaactcaagggactggttgcgctantatcataacacatatacaattctaatatcacacanattcatttttaatcaattgaacacatccccaatganataatagtcaaacatatcgacaaatc

SEQ ID NO: 36792 - DNA, 257 bp, Glycine max
  unsure (1)..(257): unsure at all n locations
agcttctagccaaattgacttttcttgaatnaattcctttgatagcccttttgagccttgtttccctttccttgttttgaagctcactacaagccttaagtgaaaaaccatgatattaccatatccttaaggaattttggagctttggaattgttttgggaataagtgtggggggtttttgtttcattggacaacttgttttgttgactatgcttcatgatgtattttgggccatacttgatgtacatcgtatattg

SEQ ID NO: 36793 - DNA, 123 bp, Glycine max
  unsure (1)..(123): unsure at all n locations
ctgagctcacgtactcccacgtagcccatatcctcgtttctctcaacaccgggtccnncatcaatcctccaagcttccacaacatccaagcaaaacaacattccaacagcacaagctatcaca

SEQ ID NO: 36794 - DNA, 257 bp, Glycine max
  unsure (1)..(257): unsure at all n locations
agcttaagngaaattttacttgtttctnganttgaaaatctatcattttcagttggattagcaatagcagttaaagaatcaatgatttgatccagaacagccctgtcatctgcaccaacctgttcaaaacccagcatgttaagacatcgtcgatttttaaaagttctttaagttggtatgaaagtcatagttttaaatgtaatttccattaaaaaaatgactaaaaaacacagtacaacaagtcatatggtgaattc

SEQ ID NO: 36795 - DNA, 164 bp, Glycine max
  unsure (1)..(164): unsure at all n locations
ttcacattaagcaacagtcccaacatgcagcatataatacgtgctccttgctcgcctctctcctcttcgcgtanagcaatggaacatgacattgagaacagggcaccgganaacaacanntggcatctctggcagtgattctttggctaagttcataaagatac

SEQ ID NO: 36796 - DNA, 255 bp, Glycine max
agctttgcagattttgtctttttcggcgaaaggatcaaagtgggtctggaaaaaagcaaatctgatcatcctgttttgatgaatgcgaaaactggggcaaatgaagaggatgagaatgagggagaaacccttactatgactaccattcctacacggtcaaatttcccatcagcccaacaatgtcattactcagccaataacaatccctctcacccaatcatccacaaagcctgcccgccgcacatccggtgccaa

SEQ ID NO: 36797 - DNA, 280 bp, Glycine max
  unsure (1)..(280): unsure at all n locations
tgagaacttggaatatngttgtggggccaanatgccatgccaactntgtagtctatgctaaggaaagacagaggcaagccatcttcggagttggttatgactntggttgacacanacaaactatattatgcaacattttgttgtcttatagttttaggattcattttcaagactttcatccctattttntntattattagtaaannatatattattatttattatattatntggaatagaatggtcatagacacaacanaaggggttgttcattgattca

SEQ ID NO: 36798 - DNA, 264 bp, Glycine max
agctttcaacaaatgtcttcattttttatcatcacacagcagaaacctagcaagactacccatcatatctcccaaaaccccatacccacgaaatttaagagagaaagaagtccacccaaacctgaattttcgaagacccactcgtagccacgcacttcacgactccaaaaatgctctcctttcgcgatttggagcagaaatgatggccaaaggttgaagctttgcttggagcttcaatggagaatgagggagaaaaaaatggca

SEQ ID NO: 36799 - DNA, 166 bp, Glycine max
  unsure (1)..(166): unsure at all n locations
cttcccttcgcaacttgagttcactatngctaccccatagagctccgcgaaatttgttccggccatactcttccttgcgagccctcttggtctcttggtcaagggctcttgcagtaattgcattctcttaccgtaacccggcacactccttccgaatgtgtgtagc

SEQ ID NO: 36800 - DNA, 253 bp, Glycine max
  unsure (1)..(253): unsure at all n locations
agctncttatcatcttttaaacccagctgggaatggttgtcaagaatcaacttagtatgtgcaaattaatttagaaatactataatacatccgcgtgatgaaaatgatgcaagtggacatacttcagcaattgttgtgggttcaagcccactcaatggcctacgttctgaagatgatgatgttctgcgcatgaaatattcgctaatcctgattggaaaatatcaagatagtcatgagaccactaaactatata

SEQ ID NO: 36801 - DNA, 195 bp, Glycine max
  unsure (1)..(195): unsure at all n locations
cctctcttagctntgcaatcatagaagggaggagcatggaagcacggctccatcgacatggcacgttgacaaggaggatcangagctgttccattctcgggcttgtacagtatccacggtttcaacccttcaagcccctgagctacgtagccganagtagaccatgagctcgtgaccaacatgtcggtcaagctc

SEQ ID NO: 36802 - DNA, 250 bp, Glycine max
  unsure (1)..(250): unsure at all n locations
agcttcttgtgggatattttgactagctntccaatctgacattcaccacagattctgccttcttctattttcagattgggaatgcctctaacagcacctttgtcaatgattttcttcatgcctcttaagtgcagatgtccaaatctttgatgccatatattgacttcatcttctttggagactagacatgtggaggagtaactggtttcttgaggtgtccataggtaacagttgtcctttgatctgctgc

SEQ ID NO: 36803 - DNA, 222 bp, Glycine max
  unsure (1)..(222): unsure at all n locations
tagatgcaagggtgggcactaagcgctngagactcgcagcttancgcatgaacaaagatgcgcttagcgtgaggctggcgcttagcgaaaggactactntttagaaaaaaagtttctacagttattttcagtcctctttccaacaaatngacacccttatgttaaacattcaaacataggctaatatactcctatgtatagatcatacaacaagttccaaat

SEQ ID NO: 36804 - DNA, 166 bp, Glycine max
  unsure (1)..(166): unsure at all n locations
agcnattctaatggttaggaggcagaaaaagaccgccgagtagaaaaagaacagccatggccgggagaaaaccaagaattgaaacgaaccgacccgctcaaaagtcccatcccgcgaagaaaacaacgagcaaccaaagccccaaaatatcaaagcgccgagaacc

SEQ ID NO: 36805 - DNA, 320 bp, Glycine max
cttagcgcactctggctcgcttagcgtgcattagtgaattttggcttagcacgcgtcttctcgcttagtggatggactcaagcggcgcttagtgtgatgatacctcgctcagtgaacaagcacagctcattcttcttccatattcttcctcgcgctcaaccaaaggagtggtgcgctcagcggatggctctctatgccgacagatgggttaagcgagcagatcataatcatcacttcacaaacttacctaattaacctagatattagaggagatgattattaaatacacgaaatgggagtactaagtatttattacctat

SEQ ID NO: 36806 - DNA, 127 bp, Glycine max
  unsure (1)..(127): unsure at all n locations
agcnncttccacattacttttggngacgnccactnnaacacacagcacatgaacacgggacaaaaagcaaaacgaagcctgctcaacacctacacaaacaaatgagcccatacctttcacccaaaac

SEQ ID NO: 36807 - DNA, 258 bp, Glycine max
agcttgtctcagtgtttatgcaagacagagaccaacatgttagccatcatcaacaagtactaagaagaattaaatctagccacgtcccatgagcacaaagtggcagacgagtatgcccgagtgtacgcggaaaaggaggctagaggaaaggtgatcgactcgttacatcaagaggcaacaatgtggatggaccgatttgctcttactttgaacgggagtcaagaacttccccgattgctagccaaggccaaagcaatg

SEQ ID NO: 36808 - DNA, 399 bp, Glycine max
  unsure (1)..(399): unsure at all n locations
acgcttagcgcacaacanaaccaananattctaagtgtctaagaacacattactctcttaacgcacagacgtgcttagcgagttcataagcaattgaactttcaaccaaagaagatgaacgcgcttagcgggacatggccacgcttagcgagttcatctggaaatccagatgttcaacgaaaatgatgaactcgcttagcgcagcaagacgcttagcgcgctcatcgcgaattccagaaaaagcaggggcttctcatccctccacttaggcccctataaggccatntaaccctaatcanaacaagcacattgtatccacaatanatccctgattcaagtctaacgaacaaataacctaatagaactaagtattaacagaaaatcaannnctacactact

SEQ ID NO: 36809 - DNA, 250 bp, Glycine max
agcttttgagttagttttagaaacacataatggcaagacactgaatctatcatgtgaaacctactatgacctaatttatttcaagtttttcccatgaagtaacaaattaatattaaaaaaattagtgtttgatcaagttttttaagaaaataagaatctactgaaaaaaatgatttctgattattttgagaaactactttgagtaatagtttctatttttgttgttttttatctacaattcaaatttagg

SEQ ID NO: 36810 - DNA, 296 bp, Glycine max
  unsure (1)..(296): unsure at all n locations
gatgcatgggagaatcctgaaatcactcatgaaggaacctccacagtgaagatgtccagaatgcaactcttggctacaaaattcgaanatctgaagatgaaggaggaagagtgtattcatgacttccacatgaacattcttgannatgccaatgcttgcactgccttgngagagaggataacagatgaaaagctggtgagaaagatcctcagatccttgcctaagagatntgacatgagagtcactgcaatagaggaggcccaagacattngcaacatgagagtagatgaactcat

SEQ ID NO: 36811 - DNA, 250 bp, Glycine max
  unsure (1)..(250): unsure at all n locations
agctnacnatttattatccatccaanccatgaatcaaanccaaatacattcagagaatgagaaagcagaagggacacctttcatcttattttgggatttctttgagaagaaatcaacttcttccattgtaaaataatgtctcttaacatccttttatgaggctcattatcataagaaataggtgattatacaagaatatataaatattattatcaatttagattttttgttataaacttataatattcat

SEQ ID NO: 36812 - DNA, 337 bp, Glycine max
  unsure (1)..(337): unsure at all n locations
ttctctgaggctcgctgttgtaccttttatatttggtcctttatctactggttaatttcagtgtnggttggttctgtattctgctgtgaatttcgccttatgagaactgcacgtgccgtgagttatgcatgcttgtgctccttttccatggtgctattgcttatgatgtgatagtgcttataaataaaaggcttggttatcttacttctatgcctcttttccatgattgncgtatgtgatgaagctgtgtatggtgtgtgaataattactcatgtgaataatgggcaccacttctataatattcttcaacaacaatgatgaataacaagatagacag

SEQ ID NO: 36813 - DNA, 257 bp, Glycine max
agcttataagaacattattgcttattcatttccaaatatgcatgtgaattaggacgcatcaacaagaatcaagccaaggctattgtgcaagcaatcaatggggcaaaacacaccaaaatgattatgatgatggatggctcaaattctcacaaaggtaaactcatcactttcaaattgagctttcaaaactatcatgacatgtagaggagaatcaaggatttcaagtcacaaaatgtcaaaaacttttattttcaaaa

SEQ ID NO: 36814 - DNA, 159 bp, Glycine max
  unsure (1)..(159): unsure at all n locations
aggaatgagaggtatacggagagaagatatcacagaagataatgatgtatacaaagagaggaatggattgagggagtgaaggtgaacatccctactnttaaagggacttatgatccanaagtgtatcttgagtgggagatgaagggttgagcaagtctt

SEQ ID NO: 36815 - DNA, 259 bp, Glycine max
  unsure (1)..(259): unsure at all n locations
agcttgcaggcnnggttaactattaggnacccaacncatacagaaacggatgattgcttttacagagatcgatctccagatcaaaaaccctttctcaatgaaaactgggcaaagaatacatacatacatatatatatatatgactacaaaaattcaaattgaactttcaaaaagagacaatatgaatcaaggttagagatgaaaaatgaagattaaactaacccaacacgatcaaaaccaataaggggatgatgatcgg

SEQ ID NO: 36816 - DNA, 165 bp, Glycine max
  unsure (1)..(165): unsure at all n locations
ctctcttcaaccataactgtcatttttttcgatgttataattgaatcagatggggttaacctgatataggataaanacacttatgttaaattatagcacatgagaaattcacggagaaggaatgggttaagtagtgaagagatctggtccacagccaatacagag

SEQ ID NO: 36817 - DNA, 322 bp, Glycine max
  unsure (1)..(322): unsure at all n locations
gtctaagagnnnagtgcccatgagcctcgtaggcgacccnnnagagncgaccngcaggcacgcaagcacgcggcnngattgcaattgtttgttccacacaaccgaaccggaagagggccaggacaaagagcgcaacccggaagacacacccccaacgcaacgcaaaaccgggccaagaacacatgcccacccacaaatgaacacgacgacgaaaacgcagcccgaacccgcaagaagagacacaacgagaccccgcaaaagatgaaaaacgaccaaaaaacgaacccaccacaaactggaccaccacggggaagaagacccg

SEQ ID NO: 36818 - DNA, 270 bp, Glycine max
ctctctttttagatagatcagggtaccgtagaaaaccttgtaatcctaaatcggaagatgtaatgaaactgcccgcaacagtttttttcagtaaaacttgtatagtagaaatagttctggacttttttcctttttctaattacaacatcttgctagacagctctcaaacactcttgtaatataataaccatttatattcgctatgcgaaaatcctaaccatatttaccctttgttattaacggtatactgtagtaacaacattttaagtc

SEQ ID NO: 36819 - DNA, 257 bp, Glycine max
agctttgcagatttgtcttcttcggcgaaaggatcaaagtgggtctggaaaaaggcaaatctgatcatcctgttttgatgaatgcgaaaactggggcaaatgaagaggatgagaatgagggagaaacccttactatgactaccattcctacacggtcaaatttcccatcagcccaacaatgtcattactcagccaataacaatccctctcacccaatcatccacaaagcctgcccgccgcacatccggtgccaaaac

SEQ ID NO: 36820 - DNA, 215 bp, Glycine max
acttggaatatgtgtgggccaaatgccatgccacttgtagtctatgctaggaaaacagagcaaccatcttcgagtggtatgacttggtgaccaacaactatatatcacattttgtgcttaagttaggattatttcagacttatctatttttatatagaaatatatatatatatatattgaaaaaggctaaccacaagggtgtatgatattgcttg

SEQ ID NO: 36821 - DNA, 265 bp, Glycine max
agcttgtacatcagtgtataattcagccaaagcctgatgcgacacgtcttcaatccaacaattatcttgaaatctaatgccaactttgtaagtctaaacatgtttaggaaatattataatatctcattttgcctattttcatgataaaaaaagatgtttacaaaataatttagatgtttggaaacagtttaaatttagaaaaacaaaatttcttaaaaaataagctgttttttttaatctaaaaatttgtaacttatgtttattt

SEQ ID NO: 36822 - DNA, 354 bp, Glycine max
  unsure (1)..(354): unsure at all n locations
acaatctgacaatacaccatgtatttgctttttaagaagatntctacattaaaaaaaacctaatgaacataattatcttaacagaagatacatgtgttataaacaaaacataaatacctaacaacatgtgtcatttctcacttctttagtcaattcctttttgaagagttaagactatgaaaaaaatacgtttacaagaaaaatatctctttacatgacaatatnnttgttgaacaaaagttatataaatacgattaactcacgactaatgacaccttacaacatattatatatacctatcataagatttacatggataaaaacaactatgtctcgtgaaaagttatttgataa

SEQ ID NO: 36823 - DNA, 246 bp, Glycine max
  unsure (1)..(246): unsure at all n locations
agcncttaacttttacaagaatgaagctctgataccacttgttagacaagtggcctcagatatcttaagaagggggggggggggggtnnnngnnncnnncccacccncccgacccccaagacccancgccccaaaccccacaaacgcaaactcactcctttcaaatacagctttcaaaactatcatgacatgtagaggagaatcaaggatttcaagtcacataatgtcaaaaacttttattttcaa

SEQ ID NO: 36824 - DNA, 498 bp, Glycine max
  unsure (1)..(498): unsure at all n locations
ccgtttgctcttgaacgcacttnatctcagctcctcccaatgccttntcttaatagcctgcagggaaggtttcatgtgctggattctctaaggaacanaanggaaaatgcatgaagaggaagataagaagaatatagcgaagccgaggtgctacggaatcgtgatcgggattgttcctacatgtttttactacctgacctggacagtcgtagttttcttcatttgagaacttgatcttttggccttggaatatgggcttatttttggggcctaatatgacggtaatatatgttaatacaaaaaccagggaaatttgttctttttgttcgtcttcttttccaaataagtcaaaggatatattaagtcgatggcagtacattatcgagcatttttgaccttaacttaacattgtttcaagaaagtgccctattagcgactgaaaagaataagcacgtgacttttatagtgtacatcttatcaatactagctctttagcgg

SEQ ID NO: 36825 - DNA, 249 bp, Glycine max
  unsure (1)..(249): unsure at all n locations
agctngttgannatgtttacccctcacatgtggtactaggtggcggtcgggcgatggtgcataacaagttttccacatccacaaatcgcgcataaacccaccatcccttgttgcccacctccaactgagctcacgtactcccacgtagcccatatcttcgtttctctcaacaccgggtccccatcaatcctaccaagcttccccaacatccaggtaaaacaacattcaaacagcataaactatcacagc

SEQ ID NO: 36826 - DNA, 338 bp, Glycine max
  unsure (1)..(338): unsure at all n locations
gctgtctctcacccacangtgacttctgatggccaactcttatcttctccagtcggaagaagatatgtcgatcacttanagaatgacgtagtgagtaattagnangttaagcttctttaaccttctttatgttaagcttcaaagaaacccagtcaataagggtaanatcttatgttgaaggtagtgtcattgttaatatttgttgttcataagcacttatgcanactatatngcccactaatatngttgcatctcccagctcaaaggctacaagctcattagaaagttttgatataaacttagtacataatatnattgtagtatgtcctgtgtcaatc

SEQ ID NO: 36827 - DNA, 254 bp, Glycine max
  unsure (1)..(254): unsure at all n locations
agcngtttgatattttgtacccaacacatgcggtactaggtggcggacgggcgatggtgcacaacaagaatgccacattcacaatgcacgcataaacccaccatcccctgtagcccacctacaactgaactctcgtactcccacgactgcccatatactcatgactgtaaacatcggggaccccataagatactgcgaagcttacacaacattgaacctacacaacattggaacgcctcaagagatcacaccct

SEQ ID NO: 36828 - DNA, 276 bp, Glycine max
  unsure (1)..(276): unsure at all n locations
caaagtccacagatcaatgctgttgtcagcctataattaactcgtatttttcagtggaagctatcaattgagcatgnagttgttcgtgcacctggcgaagttatgagatgaactcctcaatggtggtataggaacacacttgactatggaaacttatcaagtcataggtggccacgagtaatcatgcaataaataacgtgganaggactagcctgggtactatgatatcgacattattgtgagagaatatatcttgacagagtctaacatcccaag

SEQ ID NO: 36829 - DNA, 233 bp, Glycine max
  unsure (1)..(233): unsure at all n locations
agcnnatttaaatttttcgaaacaacaaggaccagggaagagggaaaacacgcccccccgggagagcacaaaggcagaccaccaaggaaggacggaaaaaacgagaacaccgaggccacaaaagagacccacaagcacggaaacgacgccaaagaaacagaagaaggaaggacagacgacncaccagaaaangagagcagagcagaaaaagaacacccaaaagaaggggaagc

SEQ ID NO: 36830 - DNA, 294 bp, Glycine max
  unsure (1)..(294): unsure at all n locations
ttctacacttggagtgataacatgcagtcctcttgaactcttaatgcacactctgtcatcatggcgagactcacgaaggccaacacgtttagccttttcaatgtactctggacaaaattcaatggcttcttctgcaatgtacctttcaacaatagatgtttccggatgatgtaaattcttggtataccctgttaagatcttcatgtatcgctcaaccgggtacatccactgcanataaacaggaccacaacatangtattctctgaccacatgaacaattaagtgaatcatgat

SEQ ID NO: 36831 - DNA, 255 bp, Glycine max
agcttctcccccatttttctataaatagggggagaagtgaagtagaaaagggttcagcccctttggcacttctctctctttcaaatttgcttaggaaaattgtttccgtgaagaaaatccaagccgaggcgcttccgtaacgtttccgtaacgtttccgtgagtgatttcgcgaaggttttcgaccgttcttcgatgttctttattcgttcttcatcgttcttcagtcttcaacgggtaagtacctcaaaccaag

SEQ ID NO: 36832 - DNA, 409 bp, Glycine max
  unsure (1)..(409): unsure at all n locations
tatctnnggtggtgcatcttagtatatntgatatctgtatngcatcatgcatcatcatggttggttntgagaaaagtntctaagttagaanagtttcttcaaaggcataaactctctgtttgatcgatacagcctcattgtaattgattaccaacaagtgtctaaagctcgtagacttgagtctcgtatcgngttaaatcgatacaactatctcataatcgatacatttgtgttgagagaatgactgattatcangactctcggtntaatngataccaagtggataatcgatacttcctctcatangtgttagaggtaacaagacacttaatcgatacttangcatctatcgatgcattgtcttgagtatttcagatgctggataactcttatcatactagatatctat

SEQ ID NO: 36833 - DNA, 250 bp, Glycine max
agcttattgactttttcaagattaccttaaagtcatacacactctgatttattattggttgacgtcaacaacgtaatacaattttacattattaatgcatcaccattaaatttgatattaaattaatctaatttatttttttttctctaattctcttaatttttaaactaaatcctataaatatttaacttcaacaaaatatcatatttaatctctctttagatatttgtttttattattcatgatctat

SEQ ID NO: 36834 - DNA, 227 bp, Glycine max
  unsure (1)..(227): unsure at all n locations
tacacacccnctataatagctaagctcacccncatgacannaaaacatganaatacaaaaaaaaagtccttactacaaagactactcanaatgccccgaaatacaaggctaanaccctatactactagaatggccaanatacaaggcccagacgaagganatacctattctaatatntacaaagataagcgggctcatacttagccccatggctcgaaatctaccct

SEQ ID NO: 36835 - DNA, 251 bp, Glycine max
agcttatagaattttttataaaagaacaatgacaattgaagagtctatacatgtttcctttgatgagtctaatgtcattcttccaaggaaggattttttagatgatatttcagattccttagaagatacacatattcatggaaatgactctaaagaaaatgatgaaggaagcaatgaagattcacaagataatggagttagagcaaataatgaacttcctagagaatggaaagcctcaagagatcatcccc

SEQ ID NO: 36836 - DNA, 615 bp, Glycine max
  unsure (1)..(615): unsure at all n locations
cgttgtccccatgattccattgatagtccactatgatactcaagctgcgtttcttcaactctggcatcctcaatggctggtttgagtccatngttattctncanaccacanacgcattgcctntgtggtcagaggatntgacagtntccagcagatgcattgaggccattgcctcanaggccttaagccacccctcanaggtgagtttgtcacacagccattcccggagaatgaggaatgatgtgtcttcatacaacgaaaccganagcctgagacacanatcaacaagcaagggatggtgggctgaggattatcacaatttagcatagacttgtattggagaaccatgatggctatcaaatctggtggcagacaccctcaaactcattgggatgcattgaaattatgcattgatggtaccnatataggaagatgtcatatgtcagaggaactgatcnactcnattcaatctgtgtgagtgattcaagctggctgctttgatcatatgagctgctcacaagaaggtgtgttctgcactcctctactctgaggtgtaatctatgcttgttttaatgaatgccaaaagactatgagacacgtacactcttctcgtct

SEQ ID NO: 36837 - DNA, 256 bp, Glycine max
agcttgtcgaaatttttcaacttctttcatgtagaaaggctcacaatttagacatatctttaataaattgaaacagctgaacactaatcaaacaacttcatcgtatatttgttagatacagtacactttcagatttttcaagtatggatttagagacagtaatttatatcgtcttatgcacttcctaggtgctctaatttgataaaactataaaagaactaaacataagtcctgccataaccagtagaaaacactt

SEQ ID NO: 36838 - DNA, 554 bp, Glycine max
  unsure (1)..(554): unsure at all n locations
cgttgatgatatcgattacnnttgcnanancanngcntnacacanngatctntgttattacggcnngagttaacccgctgngctgtaagtatatannattattggctgcgcaaanagntacaattattgatgatgactgttaccgagctaaatacacacaccaatgtttaagctgagatctgctatcatgatgttcttcatctttccatccttctgtttagcagtctagaacaactatactgcttttccttggtntaaactctgatctcgtatttaaataattctctatgttgtctaccttattgcttaggaatgacagtaaaatactttgaatctggctactctggattcatgatgaaatacaatatcctatgtatggaccctattgccactacaaataattcttggtcattgagctgaaggagataaaaacttgcgtctttgcagctgacgaaaggatgctgatctctttaattgccgcttctaatgcaaaacctaacaccgtcaccattacccctctttactttggagttcgactccgagcttcaaatacg

SEQ ID NO: 36839 - DNA, 261 bp, Glycine max
  unsure (1)..(261): unsure at all n locations
agcttatccncatgttctgcctttgttactncaccccccgtgccactccggaagatttaagccaagcccctacttttgaggggcaactcccaccttatgaagactatcccgggcaagacgatggggaagaagatacccatcttggccccctgctccacctcaaagatccatccccgcatgaactaccccagccgaacatagtccgccatatcccggcctcacccacacccgtaaaagaatctattccctttgcggaagata

SEQ ID NO: 36840 - DNA, 154 bp, Glycine max
tctagccacgacccacaagcacatagtggcggacgactatgcccgagtgtacacagaataggaggctatgggaagggtgatcgactcgttacatcaagaggcatcaatgtggataaacctatctgctcttactttgaatgagagccaagaactt

SEQ ID NO: 36841 - DNA, 218 bp, Glycine max
cacttattggatcatgcgatcccttaggaactttccattaactctaaacatcttgttgatccatttgaagtaaaactgaatcttcttatatgtgaaaactctactctaagtgtttcatcttctcctactctatctaaggattgtatatcttgtcatcatgtataaattaattgtgtagattttaattttcttggtacgatttatagacatgcatatag

SEQ ID NO: 36842 - DNA, 180 bp, Glycine max
  unsure (1)..(180): unsure at all n locations
tgtgacctaagcgcttatgccataatgctctngagtntgtattatcaattctacgcttagtaccacgcaattaaaggattcaccatacgaagctacagtatcatgtaaatatagattatcgttaaccaagagtgaaccagttccaacaatatctgaattaaaagacaacatgaacatatt

SEQ ID NO: 36843 - DNA, 222 bp, Glycine max
ctgcgggcgtagggactaatgccgctctttaattcgatagccatcgctttaggagcgctgagcaccaacagcgtttcaaaaccatcaagggatggtccttccaccgagagaaactcgttcagctcagggacgacgagtacacagatttgtaggaagagatagcttcgcggcgttggatgttgctggtcaaacccatggccaagtttgatccggatataaatc

SEQ ID NO: 36844 - DNA, 705 bp, Glycine max
  unsure (1)..(705): unsure at all n locations
acgttgcnccctttttgatgacagttgattngtgccactatgantactcaagctggtcactcataatnntagtngananntgtgaatntactcatgctatcttatttctcaacacactntntggatgagtcttccaaggatggtgttgccttctctaactntccttccttttccagtgataaggtaaagctacaaaaatgagtctcccaatttttgatataagttttgtaagaccatctntaattcgaacaagtggcttanaggtgtaaatgcacaatccttccaagcgagcaactcaaaggtgtaacgccatcttagaaatttctatgagcatcttcaatgaaaatggaagacttgaacgaaaaatggtggcttgctcctcatttgtctgggaatagataaggatctatataatgagcacaatgtatgaaggatggaaaaactcccaatnntatgtcatcccagcgttaagacttgtagttcacactaatcaatgactaagaagcaagaaccaagccatgtntacagaaaggatatagaaaaaatactntcaagtcttnctttgangagaagagcagantgagagtgaattgcacanacagatcaagtcatatggtgaatgatactactatacccatatatacccatatcgtannaatacagagaaattttctcatatgtantgttganatgatggagatatag

SEQ ID NO: 36845 - DNA, 250 bp, Glycine max
agccattctcctttaactgcacaaggctcttaatatttaaagagtatccttgtggaaccttcacccagcgaagacactgaaaaaaaaacttatcttctcctttttggaaaaagtatgacaagctgggggcaagtaaattttcttcccattagaccttggatgcagctgtgatcgtgtccccatctcagctagatcttgacgggtattcaagccatccttcgtcttgccttgaatgttaaggagtgtccca

SEQ ID NO: 36846 - DNA, 344 bp, Glycine max
  unsure (1)..(344): unsure at all n locations
cacttctctctctttcannattgctgaggaacattagttccgtgaagaanatccaagccaaggcgcttccgtaacgtttccgtaacgtttccgtgagtaattacgcgaagattctcgaccgttcttcaagaataatcgttcgttcttcgttntcttcagtcttcaacgggaagtacctcnaccaagctttcaatcatctatgtcccgggtggccacatttgttcatgattttattctcgttcattactttatcccctttgacgtgtcagcattattaagtgttctgctaactaaaaaataattcaccgacgtgatcgatatcgtatttgtaaatgaatcacgtc

SEQ ID NO: 36847 - DNA, 227 bp, Glycine max
  unsure (1)..(227): unsure at all n locations
agctngttaaataattttttttgggcacgtaacttcattttttttcaaaaaaaaaaaaacaaattaactatttattgtatttcttttgcaaaaaaattatgttaattgcttaaaccataaggtataactaacctgatctcgttttaaaagatatatgactatttatttttaccacgtactattttcattaaaaataattaaaatttatgtatatccaaattgtgtcg

SEQ ID NO: 36848 - DNA, 191 bp, Glycine max
  unsure (1)..(191): unsure at all n locations
aaactctgcccataacacataccaataccacaactttttcttactcatataccccagtaacattctctttgttccaattcgttaaccgttggatcgactcgaanatcttactggaggtccctagtacataaatctacattgtgaccgttgggatctgctagaaaacgtccagaacccaatctgtactactc

SEQ ID NO: 36849 - DNA, 223 bp, Glycine max
tttattggagggggttgtatgccatttttgttttaagggtagcatttcttggtaaaactaactttccaaatgtttgccttcgtaggaaatggccccgaggaagcttgcctcaaagaggtccaagaaggacaaggcgaccgaaggaactagttccgctcctgagtatgacagtcaccgctttaagagcgctgtacaccagcagcgcttcgaggccatcaaggga

SEQ ID NO: 36850 - DNA, 228 bp, Glycine max
  unsure (1)..(228): unsure at all n locations
gacatggagtgataacatgtagccctcttgaacccttatctctcactctctcgttatgccgagactccagaactcccaatatggtttgccctttccatgtactcggtacanaactcaatagcttcttccacaatgtacctntcaataatanatgcttcangatagtgtagattctgtgtatccctctttaagatcttcatgtatcgctcaactangtacatccaccac

SEQ ID NO: 36851 - DNA, 218 bp, Glycine max
ttagggattcggacaagcccgaccatgaggaagaagaaaatgaatgtgagtctttttcccctccgaaagacttgtttccaaaaaaaaatgttttaaaaatatttctaattaatatttgaatttttcttccccttattagaatatatgtgaggggtacagggtgtcacaaaaacacaccctgagccctagtgattgcgtgaccacaaattttatattga

SEQ ID NO: 36852 - DNA, 337 bp, Glycine max
  unsure (1)..(337): unsure at all n locations
cacttctctctctctcganagtgctgaggannaatatntccgtgaagaaaatccaagccgaggcgcttccgtaacgtttccgtgagtaattacacgaagattctcgactgttcttcaagaataatcgttcgttcttcgttntcttcagtcttcaacgggtaagtacctcanaccgagcttttcaattcattctatgtacccgtggtgggtccacatttggttcatggatttttattcttgtttcattcgcttttatacccacttttgacgtgcttaagccatntatttaagtcatntatcgcttaatctanaaataaaataaatntccacccgatcg

SEQ ID NO: 36853 - DNA, 256 bp, Glycine max
agtttgtagattgttttgacatgatacatgtcagggttttggtttggttcaaggataaaagggatgccccacattatttccatgacacaaatgcaaacatgatgatttggaaactttatgcaaaactggtcatgcatgcacctatgcggacactcaagtgtcaaatttttatggtcatgtgatgctagggctcaggattcatttcctctatttttagtcaacccaacgtttccaaaatatgttcttttatccattt

SEQ ID NO: 36854 - DNA, 335 bp, Glycine max
  unsure (1)..(335): unsure at all n locations
gtctatcgaccgagactacattagtctccncttcgttaacccgaggcaagagagcctgttggtacgcagagaccaacatggccgtctacacccatttgtgaagactcaatgtctatcaactgagactactntagtcttcctctcatcatccagaggcaatcaagtccgatgacacgtagagaccaacatggtcgtctgcatcctttgtcgaagactcaatntctatcgaccgagactactgtagtcttcccttcgtcatctagaggcaatcaagtccgatgacacgtatagaccagcatagtcatctgcatgctcggtcgaagactcaatttcta

SEQ ID NO: 36855 - DNA, 247 bp, Glycine max
  unsure (1)..(247): unsure at all n locations
agcttgagatgagttgtgtagaaaggngaaacttcctgcttttattcgttgaccacaaagtggtacctagaaatatgtcgcggggggtcaggagaccttggggacgtcaggtggggtgctattgcccaaaaccaagcttgaccaatcccgacccaacccgggcatagtcagtcaatgagaacctgtgatgtacctaaacaggcgagctcctgacagtcaacagataaaaggaacaaagaccacgaag

SEQ ID NO: 36856 - DNA, 212 bp, Glycine max
  unsure (1)..(212): unsure at all n locations
atgctcctctgcagaccaccacacagaccttngcccttctgtgcaacaatctgaagcaattgaacagctngaagcttatgctgcanacatctacaatagacctcctcaacctcagcagcataatcagccacaacagaacaattatgacctctccaacaacaggtacaatctctggtggaggaatcatncnaaacagcagcaacaacaatctt

SEQ ID NO: 36857 - DNA, 336 bp, Glycine max
agcttgaatcttctagaagcattatgagctaacctcaaatccatcaccataacgaagtcacacctaccattctaaaaacataatttcattccaaaacaaccatatatagggaccaaaatacaacattccaaaacaaccatataacctcaaactcataatgatgggtcgtaccaaaactgccatcgattaccaatttcaaagacgatttttcaaaaaccatcattgaaaaagtcacactaattacaaaaatgtcactaccttcaaaacgacaacggttttgataaaaccatagtcgaatcaccatcgtaaaaactatgttttgtagtagtggaagaa

SEQ ID NO: 36858 - DNA, 305 bp, Glycine max
agcttgtcaagataatgaggttatattttgcttgagtgcttttggtgttgattcttatcaggttacaaataacgctaatttttgttcattgaccgtttttgtccttttctcatcagtttacaactaacgttaattttttctcattacttgaaactgacgcttgtatttgatcgagagaatgtccgccaaaaaacaacgttaattttgcttgattgggggacttggcagcatgacactgagtgttgtaagaaggagaggggtaacaggtggtggacgttgaaacaaaaggaggactaggcgctcct

SEQ ID NO: 36859 - DNA, 326 bp, Glycine max
agctttgagccagcttgtgatctaatgaggttgtccattgtcatggaagattgttttgtgtcgagggtagtatcctcgacaagtatgagggtcgtgagtttattgagcccctaagcatggacaagagttgtccaatgttaatagtggttacctcgacaagtgaaaaagttgtaggtctttgaggcttgtcaagcccccagccaggacaagtgttgtccaggctgcttttgtcaagttgtttggggcggacctgctttaggtcttgcaggaaaaatcatacgtgccatgtgaggggagtcttgtatgtgaaaatgctgcccttcttt

SEQ ID NO: 36860 - DNA, 431 bp, Glycine max
  unsure (1)..(431): unsure at all n locations
ctcataagtcaagatcacttcatgataacaaagatgatgacatctaagaatgagttcaagattgagtcaagaacacttctaggatcaagaggatatctgtattcaagaatcaagaatctagattcaagattcaagaataatcaacatcaagattcaagacacaaagattcaagagtcaagagaagacttaatcaagataagtattaaaaagttcttcataacattgagtagcacaagaagtttcacaatatcataccaaagagtttactctttggaatcgataccagatcatgtaatcgataccagtggtttaaaacgttagattntagactcanaatgaagagcacatctatgatgtgtatcgatacaccttatggtatcgataccaggactgtttcgaaaatcatttccaaagcacattctcagtgact

SEQ ID NO: 36861 - DNA, 327 bp, Glycine max
agcttctaaactttatacattattgaagctctgataccacttgttggacaagtggcctcagatatcttaaaaagggggggttgaattaagatatcacaacttatttccccaattaaaaattctagttatctttctattccagttataaattcccttaataatgaatttcttaaatattgattcaaatataacaatttgaatataaatataaaacaataataaataaaggagtttaagggaagagaaaatgcaaactcagatttatactggttcggccacacccttgtgcctacgtccagtccccaagcaacccccttgagagttcca

SEQ ID NO: 36862 - DNA, 332 bp, Glycine max
agcttcatgatgatgaatcattttgattcaagttgttttgatgataacaaagatgatgacaaaaagcccaagataatgatttcaagattgagtcaacaagattcaagaatcaagagaattttgatttcaagaagacttcacaagggaagtattgaaaagatttttcaaaaaacaaacatagcatagttttgtttttcaaaagagtttttctcaaaattttctaatttactagagtttttactctctggtaatcgattaccaattacctgtaattgattaccagtagcaaagtttgatttcaaaagcttttaattgaatttacaacgttccaa

SEQ ID NO: 36863 - DNA, 325 bp, Glycine max
  unsure (1)..(325): unsure at all n locations
cgagacgatgctctccatgagatgttggatcaaatggagaattgagatcataatgatgaacaaaggaggagaagatggaatgatggtgttcctatacaaaaccgaattgatggtattaaactcaacattcctcaatttanaggaaataatgatcccgaggcctacttggagtgagagatgaatatagagcatgttttctcatgcaacaactatgaggaggaccaanaggtgaagcttgccgccacggagttttccgactatgctcttgtgtggtggaacaagctacacaaggagagagcaagatatgaagagccaatggttgata

SEQ ID NO: 36864 - DNA, 336 bp, Glycine max
agctagataattcatgaatgtttatggacgaaactctattacgagaactaaaatctacttggctaatcattaaacttacaaaatgttattccaaaaccttaaggctcaattcatggcatattaacttaataaacgactcaaagaaaatcttatttacgtttgttaatattactcttcgtcagttttgctacctaacctcaaaaacactacaacatatttaagattgatacaagtgatagtaatttatctctcttaatcaaataatttaagatttaaattttaacattaaatataaaataaattgtgttaaaaagaattttaaaacaccttcgctaa

SEQ ID NO: 36865 - DNA, 669 bp, Glycine max
  unsure (1)..(669): unsure at all n locations
actactctccgactactcgtaactanantacgtanntaattaattctntnntatttccnnncnccccnnnaagcagatgcnnaattgtagccttagagcagtcgaannagcgacacnatanantacnnaagcctaagcgnaggctanaccacacataatcaagatgacttttattgtgantatgaantattggatctcaagcgtaagtgtggattgaataacgctcaagcatgactgagcttaagtgtgggttgatccacactttagtgagactaagcttaagcgtatgttgagccaagcttatatgtcacgatgaaaatatacccaatgtatttcgaatgacttccacatgagtatggaacgagatgagagagccctcttccattctagtcatggtgagagtgtgtaaacgccacatgattattatgtgcataccacatcgttcaagaaataagatcttctagtgattgctagttataaaggccagcttcggagaaggtatgttgggagcttgtcttcgttgtgtggtatgcttgtgaaagataaggaatgatcgtataaccttgagaatatgttgaaatgtggatctcctaatgaattgtgatgaaatcggttgataattgaccctttccggcacatatataagacctaccaacctgtaaggaatcn

SEQ ID NO: 36866 - DNA, 335 bp, Glycine max
agcttcggaagaaagtgatgttgttcaagccctaaaggcagagcttgaaagagcccgggtagtcgaagagaagttcaagtccatagccatcaaagtctgaggagagtatgatgaactaagggacgtcaatatggccaccgctgaagccttggaacgagaaaccaagaaggcctgaaaggaagaacacgaccaaaacaaagttttgaggggctttttagggcagcaatagtgagctcaagctccgaagaggtgaaaggaatcatcacgggtcaaaggcatgatcttgaaggacgagctaaaggcttgccttaggtcgaaaagaaatttgttccaac

SEQ ID NO: 36867 - DNA, 536 bp, Glycine max
  unsure (1)..(536): unsure at all n locations
cacataaacctcatccggtgtaggttaagatnttatatatattctcattcnncnnncnaagaggagggaatgacgcctgnaacatctatagncacaccaaaaacccagcncataaacaanacgcctcantatttcaaatgttgtaatttgaccatcacaaaacagccagctttggcagcatcatgggcaaaacaccaatatttgtgatgatgccaattttaaaagtgaatcatcacttcaaatgagcttcaaacatatgacatgaagagataacgttcaagccaaatgcaaaactttatttcaaacaataccattcttgaatatcatatcaaaaaaactgcaagtttctgccacaaatgaccaaatttaactaaaatcgccaactttcacattacaattacacgactacaattacataccacatacttccaaccaagaaactcccccctcgctccatactaaaacatggctagagtcccacttgatattaaatattaatcttaataaattgtattgaattacttcatggatcgaat

SEQ ID NO: 36868 - DNA, 329 bp, Glycine max
agcttctcttcagtgagtgcttctttgcaaatcctctttgtttacttgatttaatttaattttatcaccaaatctgtgtacgaatatatatatatatatatagtgagagagagagagagagagagagagaaattggcattttcatacctctaaagattaattttttactctcacccagaagccacccataaaaaatgccactctaaattttcgagtttcttaccaattaaattatgaacaatagacctaagtgaatgattggacctgccgatatttttcttttcatatattctttcttatagaacttctgcaatgtgaagtccaaaccc

SEQ ID NO: 36869 - DNA, 328 bp, Glycine max
agcttgactaggcgagttgattttatccttagtttcactttagttattagtcaatccaattaagaatgagaaatcccaaagagaaaacgtccgattgatttttcgcttttattttactaaaaggtattttttgattattatattattattttacctctttttttatttccaacgtggttacggcacgaccgaacggtcggaattcattttaaccgaaattaacggatgatacaattcaaacgatcggtggaaatttattttatttttagattaagcgagaaatgacttaaataaatggcttaagcacgtcaaaatgaggtataaagag

SEQ ID NO: 36870 - DNA, 351 bp, Glycine max
  unsure (1)..(351): unsure at all n locations
tctaatcgattacacacatactgtaatcgattaccagaggagtttttcagaaaacattctcaacagtcacattntnttatctgtttcttaaatggtcatcaaaggcttatatatatgtgacttgagacacgaatttaacaagagttttcaagagcaaaaaggtcttatcctcttaaaaagcagaatagttttatcctcttacaaattccttggccaatacacttgtgattcaataaagaattatttgagtgctcaaattgttcaatctatctctttcaagagagatttcttcctctcttganaagggattaagagaccgagggtctcttgttgtgaaagaattctaaacac

SEQ ID NO: 36871 - DNA, 331 bp, Glycine max
agcttgttactcttggcaatttctttaaaactaggcacttaaaaagttatgacttttgaaagaatcttcagaaacaagtcacttgaagaattgtgacttttggaaatgtatttttcaaaatcagtcactggtaatcgattaccattaaggtgtaatcgattacacatcaacagatgtgacttcattttgaattttgaaaatcttaacattttaaaacactggtaatcgattacatgattatggtaactgattacagctttgtaaatcagtttgaaaaaaatgctggctactggtaatcgattactaccttctggtaatcgattaccagaga

SEQ ID NO: 36872 - DNA, 328 bp, Glycine max
tagcttctacagaaggtttgttcctaatttctctacacttgcctcacctctcaatgagctggagaagaagaatatggcattcacttggggtgaaagacaagagcaagtcttttctttgctcaaagaaaagctcacccttgcccctgatctaactcttcctaacttttctaaaacttttgagctataatgtgatgcctctaaagtgggtgtgtgagttgaattgttgcaaggtggacaccttatttcttattttagtgaaaaaattcatggtgccaccctcaactaccccacttatgataaagagctttatgcctataataagagccct

SEQ ID NO: 36873 - DNA, 535 bp, Glycine max
  unsure (1)..(535): unsure at all n locations
agctgtcnnnatganccttggncctctgtcgcatctttagcgacctatgatactcagctccattgtgagttttgcttcccttctacactttaattcactctccacaagtaagtgcaatntcccttggctatttggctcttcattgatgtgtttggcgctttaatgctcatttttgcaaaatctgaacaattacatctgaaccatgcttgttntgttgaattgaaggtttgtgtgagaaggcattatgcctatgttgtattctaaagcaatggggcatgccacattgtccccattctcttgcaatntgtgtccaaacgtgcacccaccaagtgctcggtgaaatgttccaatgatatatgaatatgatttgcgaaattggatggtggactgtttattatgagaacacattgagatcaaatagtgccgatgcaattcagctttgacccaactttatcttatgaaaagactctatgctagatcaatttggttaaatataaactgaattagactgctgaagtttgtcattggtgccatg

SEQ ID NO: 36874 - DNA, 322 bp, Glycine max
agctttcactcgcatgttcgattcaagcgcatagcgtatcgagacgctataaatctaacaaaggaagctctcgagaaattcaaatggtcatagcttttcactcgcatgtccgattcaggcgcataacatatcgagacgctctaaattgaacaacatattttttcgagaaattcaaatggtcataacttttcactcggatgtccgattcacgcgcatagcgtattgagacgctcgaaattgaacaacggattttgttgagaaatccaaatggtcgtaacttttcactcgcatgtccgattcacgcgcataacatatgtagacg

SEQ ID NO: 36875 - DNA, 242 bp, Glycine max
tctagtcgtccatagacctcctcatatgtacggtccagcaaacgttgcatctgtgcattcatcgcatgcagttacagacgttgaagcgccgcctactgatgatactcgtcaccaccaccacctgctccagacataattcaacaagaaaaaaaatgtgcaatataatatattaaggtttcaggacctcacaacactctactcacgtgtttaactcttacatggtagtacacttgtgtataatg

SEQ ID NO: 36876 - DNA, 335 bp, Glycine max
agcttaagcgtgaaactttattttttcatattctttcaattagatatttttaatattgtctttttatttatcttttggaggttaattaacacactatctcacaattaaggatgaaaataagtctgtccatccaacaggcttatggcttaacctatatcatgctcaagtcaggcttgattttctttttagcaaataaactatacccatatttttattaaagagtatatggttaaaaaaaaaagtcaagcctagtccacttggtaagtcttttatgcctaacacggttgacttatttaagtaaatatgaataacatttattttttttattagcataa

SEQ ID NO: 36877 - DNA, 501 bp, Glycine max
cgatggaaatgacgcgtgatgagctacttgcactctaagcttattgacttcagcttgtccgttgagccactttgttgctataccttggctgacacaggccgtttttgttaaaggatataagaagtggtgaccacaacactttctgcacatgtctctatagaagtacaatctgcaagtgtcgcctagtgcttagagtgaacctttaatgttcaaatgaaacgaaacatttacatcctaagatcatatgattgagattgccatcaaaacactttaattatggatgtggctcataaacatatcgacatactttctgtgattggtatagtactaagatcgattacattctgtgcttgttctgtaacaatgctaaacactgattttacattttttgaacatatatcatgactaacttgcctacttatacaattggctattttctgcttgcacaaattgtgtctttattaggtaaagtttacttattttctttttcaaatctctgtt

SEQ ID NO: 36878 - DNA, 323 bp, Glycine max
agctttgagccaattcaagctattatgactttttactcggatatctgagtgagtcccgtaatataacgagacgctcgaaattgaatgttgaagctctgagccaattaagacgacaataactttttactcggatgtctgattgagtcccgaaatatatcgagacgttcgaaagtgaatgttgaatctctgacccaattcaaacgacagtacctgtttactgggatgtctgattgagtcccataaatatcgagacgctccaaattgaatgttgaacgtatgaaccaattcgaacgacaataaccctttactcggatgtctgattg

SEQ ID NO: 36879 - DNA, 222 bp, Glycine max
tctaatcccgtaaactattgtcttgatggctcaagtcacatcattcagcctcgatgtatggctcatcaactccataaagtatgcgttgaatggtaagatacatcattcacgtcgatttacgctcacaactcataaagtatgcgtgatggtgagtcacacattcagcgtgttaacgctataactcagaaatatgcttatggtaagtaatttttgggccttttt

SEQ ID NO: 36880 - DNA, 327 bp, Glycine max
agcttgttatctaagagcgatttgtgacaacgacgaatacttgtaactttgagaagttagtggaacttagtggtttactaaaaattggatgtaatctcagcgattgagatgaactagtaactagtataaatctctacatctgtttattctttagctaatcggttatctatttttgaagttattttcaaacgatagctttgtgtttgtgaaaaaggtttacaaaatattataaaatcacaattcaagcttcttcttgtgatatttaccatcacatttggtttggattaatagtaattttttatccattggaatgaaagacaatgttag

SEQ ID NO: 36881 - DNA, 248 bp, Glycine max
agaagaacttcaatgtctttatgttttcacagggtttactactcggactttcactagtggccagttggatggtgagatctctcgaacgaaattagtgtccttattttttattcccttttatttccaataaaatataagtaaagaggggcaattttcataccctaatttcgtctggggatgatccttcgcaaacatttggattcttgctagccaaattgggctgcttaacacctattgctgcacattcc

SEQ ID NO: 36882 - DNA, 326 bp, Glycine max
agcttggacttgctgtgtttttggaacctctccttcctcaggtggacccaaacccaatcacctggttcaagcacgactttctttctgcttttgttggcttgccttgcatagctcgcatttttcttttcaatttgaaccttcacttgctcatgcaacttcttcacatactcagctttagcctgtgcatccttatgcttaaacataccaatgttaggcataggcaacaaatcaagaggagtcaaaggattaaatccatacactatctcaaatggtgaacaattagttgtgctatggacagcccgattataagcaaactcaacatgagg

SEQ ID NO: 36883 - DNA, 245 bp, Glycine max
  unsure (1)..(245): unsure at all n locations
tgccttgcccctngatatatntgagggactcatggtcactatgaatgacaaattcctcgggataaaggtagtgttgccatgttttcaaagcccgtactaatgcatacaactccttatcataagttgaatagttaagggtaggaccacttaacttttcactaaaataagcaattggatggccttcttgcatcaacacagccccaatcccaacatntgaagcatcacactcatattcaaaagatttt

SEQ ID NO: 36884 - DNA, 330 bp, Glycine max
agcttattgtaatctaatttattggtcattactttggttgttgctgaactgatgctgatattttctttcttcttgtattttcttgctatgtagatgcatgaattagaaatgaaactttcagtgcagaaataccaaaatgcaaaactcagaagtcaatttgaatgttgtttgttgagccagtgatttcatttgattatgttttggcattttaatgcattgatcttttaaactggcttctcaatgattgctaatttcctgtgtcactctatcagattcattaaagaagtttatataatcacaaattaatattcattcccaaatacagacaag

SEQ ID NO: 36885 - DNA, 247 bp, Glycine max
  unsure (1)..(247): unsure at all n locations
atcctcacatgatagaattagctgtcaacccactaatcataaatattctttcatctctctaatattcttttatcttacaatgatgtantttactgtcacataacccatatcaagtttgcactctctaacagcttccatcaaccacgtacatttagttaaattcatttcacagaaataatcatttgtttcattaacttagtgaaaaataaaagaaagcttttgaaggaaaatcattctttattatgaa

SEQ ID NO: 36886 - DNA, 330 bp, Glycine max
agcttaaacattcaacttcgttcgtttcgatatattatgggactcagtcagacatccgagtaaaaagttattgtggttagaattcgcactgaggttcaacattcaatttcgagcgtctcgatatatgacgggactcaatcatacatccgagtaaaaagttattgtcattcgaattggctcagagctttcaacattcaatttcaaacgtctcgatatatgacgggactcaatcagacatccgagtaaaaagttattgtcgcttgaatttgctcagaggttctacattcaatttcgagcttatcaatatattaccggacttcatcatacatc

SEQ ID NO: 36887 - DNA, 548 bp, Glycine max
  unsure (1)..(548): unsure at all n locations
cgagggaatgatgcatgnagcgtctactngcatacttanactctcagccttggccagtcaacgacataaaaggtactctgatgtctgntgagatccgnacatatcgagacgcgtcgaattgaatgttgaagctctctacccatttctacgacaataactctttactcggatgtatgaatgagtcccgttatattaccagacgctaggaattgaatgttgtacctttgatcaaattcataccaacaaaacctttctctcggatggctgattgaagcctcgcatatatccagaacgctcgatatgataggcgaaactctgatccaattcacacacaataactctgtactgcgaggtgtgtcgcgtcccgcatcaatcgtacgctcaaaatgagtgttgaaccttggacattctacaaaaaaactctttctggtgtgtatgatcacgtatatttcgaatgcgaaatagatgtaatccttgtccattaaacaaaatcttttcttgttgttggtgtgccagaatacagtcctcaataggtgcgacctgcccac

SEQ ID NO: 36888 - DNA, 335 bp, Glycine max
agcttgttcttctacaaaacttttatgaaacaatgacaaaacaaatgtggatgtagaagagtgagtgtcttggttagtagcaaaaaaatatgtatcttcttgaaagatgacgtttctagaaactcgaatcctatgtaaatgaggatcatagcatataaaacctttttgatgggttgagtaaccaagaaaaacacatttaacagattgagctgtgggtttggtgtgttctagtggctaaagatgaacatagtagacacaaccaaaggtgcgaagagtggaataattaggtggcttaccaaataaccttaagaaaggggaatcattatttaaggctt

SEQ ID NO: 36889 - DNA, 329 bp, Glycine max
agcttttactcggatgtccttttgagtcccgtcatatatcgagatgctccaaattgaaaatagtagctcctagcaaattcaaaccataataactttttactcggatgtccgattgtgtcccgtagtatatcgtgacgctcgaaattgaaaacataaggtctgagcaaattcaaacgacaataactttttactcagatgtccgattgagtcccgtagatatatcgagatgctccaaattgaaaatagtaggttcttccaaattcaaaccataataacgttttactcggatgtctgattgagtcccgtactatatcgagacgctcgaaatt

SEQ ID NO: 36890 - DNA, 226 bp, Glycine max
gcatcttgatatattacaggacacaatcggacatccgagtaagaagttatagtcatttgaatatgctcagagcttctatgttcaacttcgagcgtcacgatatattacaagactcaatcagacatccgcagtaaacagtattggtgtttgaataatctcaaagcttatgttcttcaatttaaagcgtcttgatatatatcacgactcaaccggacattcgactaaa

SEQ ID NO: 36891 - DNA, 326 bp, Glycine max
agcttgtgggtggaggactcttgaacgaaaacacaattcatggggctccgaaaaagggttgaggatggagaattgcactaagcaatcactacgcacggctccaagctccagggtggaggacgcatgaacgaaaaagcaattcatggggctcccaaaaagggttgaggatggagaattgcactaagcaatcactacaaacggctccaaactcgtgggtgaaggacgcatgaacgaaaacgccattcatggggctccgaaaaagggttgaggatggagaattgcactaagcaatcactacgcatggctccaagctcctgggtggagga

SEQ ID NO: 36892 - DNA, 334 bp, Glycine max
  unsure (1)..(334): unsure at all n locations
cgatganatggcttggtaaactaattcattcttattgctgtcctcctttgtaagtttcattttctatattaaaaatagtaagtcttaattcttacacagattctttgttatagttatatactgcctaaagttttcttctgtatttttttaattctttagttataggaaaaaaatcttgattaatttggagatcaattaaaaaataattagagtctgactaataattattctcgtattattatatttacatcattcagtaaaacgtgattttaatctatgcatatgtaggaatcgaaatttaaattcttttacaatactaaaatttgaaatgatg

SEQ ID NO: 36893 - DNA, 329 bp, Glycine max
agcttgtacacccaaattatgttttagttgatcaattccctgtaaaagaaggaataggtcaactatttcaccctcaaggagtttaacataactttagagaaacaacattgatgccaataatattcaacttacagatgctagaggccaacccttcaatggaagacttgtaactccttgatttattcctgaaggatgattaataaacatcaacaaaaaatacctcatgtgatacaagtttcacaagatgtgtcaaccatgcaatgaatgtgtcaagggcctgcctcacatactgaatttctgacgttggcaacgggacttgagcgtcacca

SEQ ID NO: 36894 - DNA, 213 bp, Glycine max
  unsure (1)..(213): unsure at all n locations
tgtatgtgatgatctttatatcatgggcgcgggaatccttcaagtggtatatttatatatcctatacagatgatgcactagtttaatcttgtctttntaatatgtaatttacatgagacattctgaggctgattcttgtcattacaactaaactgaagcttaatcatattagtaatagtaaataagatgaagaatctctaaacccattatttt

SEQ ID NO: 36895 - DNA, 326 bp, Glycine max
agcttgtgcatccaattctctgttgaggatgtcccatatgttcttaaaactggactgattcatttgcttccaaagtttcatggccttgcaggtgaagacccgaacaaacatttgaaagaatttcacattgtctgctccaccatgaaacccccagatgtccaagaggatcacatatttctgaaggcttttcctcattcattaaagggagtggcaaaggactggctgtattaccttgctccaaagtccatcacgagctgggatgaccttaagagagtattcttagaaaaaaatttccctgcttccaggaccacgagcatcatgaagga

SEQ ID NO: 36896 - DNA, 517 bp, Glycine max
  unsure (1)..(517): unsure at all n locations
gagtagatggcctgacctgtgctctagcccttgattcactctcccttgttgatagtggaatgagagacaggtccctctagcactttctttctcaaatactgagagattttttcggaaaaaatcacccgaggcgcttcgtacgttccgtggaaatacgcgaagattctcgaccgttcttcaagattcatcgatcgatctctcgtgtcttcaatccttaacgcggaagcacctcccaccaagcttgtctattcattctatgcacccgcggtgggccacattagtgtctcatcgtattgttattctcgctgtcattctctttttatacccccttttgacgtgcttgagccatatatttaacgccgctcctcgcttaatctacaaatagaataaactgtcaccgatcgtttgattgtatctccgtcatttggttcaatgattccaccgtttcgcggccgaacaacttgaatcaaaagagtcaatatattaatgacaatccttagtaataagcaagatatcn

SEQ ID NO: 36897 - DNA, 326 bp, Glycine max
agctttatgagaaacttttttttagtcaacaacctttagcagattttaggtggttcagagatactttcctaactagggtttacacaagagaagattgtcaacaacctttttggaaagaaaaatttctagccggtcttcccagatcattaggagataaggttagagataaaatccgtagtcaatctgccaatggagatattccatatgaaagtttaagttatggccaattaatttcttacgttcaaaaggtagccttaaaaatttgtcaggatgacaaaattcagaggcaattagccaaagaaaaggctcaaacaaagaaagattta

SEQ ID NO: 36898 - DNA, 247 bp, Glycine max
ttaatcacaaaatcatattctataccttcacattaatcacatgctcataacaaaacatctcaagtacaacacaacatctctcacacacaattcattacccaccatcacgtagccagtcacaatgaacattacacagatgttatgaaacatatatactaagactcaatcctatagtgaatgtggtatcttgtcagcgaaaaatatcacttaggcccctaggagtacataatagaatacaccacacaat

SEQ ID NO: 36899 - DNA, 331 bp, Glycine max
agcttccacaaaccttttactttttgtcatcacatcttttcattcctccttgggattttgttggatgacttgccagctatctacttggccagttgtcccacctggacctcaaggttcctcagtgctgactcagtgcttttatgatttgacattgttacctgcataaactgagtcaaagtctcctctagcttagtagtcctttgaaagatgttaggcccttgttggattggcatgtttgaaggtccaccttggtctttgttgaactaattactagggtgtgacctccactgtccttgttgattataaggaccctgctggaagcctgaaaatc

SEQ ID NO: 36900 - DNA, 229 bp, Glycine max
  unsure (1)..(229): unsure at all n locations
taaacctctttttaagcgaaggctnttgacttgatcccatgttttactaaagtgaaataaaatctagtgcaatcaaaactccgacatctatcatgggtggaatggatgaatgcatgaagaaatgcatatgacacagatgcaatttacgaatacgggagcccgagagactgtcttcttcttagatacaacgtctaggggtagcaaagtgccccaacgtatgtatttaaaa

SEQ ID NO: 36901 - DNA, 329 bp, Glycine max
agcttgaggatgatgttagttttattcgtcagtgctttgaccttccgccaccatcctcatagatttagattattattatattttgttttttaagccttgtatttggctatgtttttatgacatttgaacacttagtatttcttttaatatttgcttagtatgattgaacatgatgataatatttacttgctcttggttgtttatggttatggttgttaaacttaattattttgatgatatatatgtctagtggtatgtacttacatttggtattgtgctttatgtatgtattagaattatttatgtatgatttattttacacactttgg

SEQ ID NO: 36902 - DNA, 154 bp, Glycine max
ctgatagtttcatatgctgttggcaaaaatctgatcaaataagtggttatgagtcctaaagacaagtccatgctgtgcattaagaagtgcatgaaaccctcttccaatccggtaaatactctgtgcaagataacaacatttctcattctgtatg

SEQ ID NO: 36903 - DNA, 330 bp, Glycine max
agcttgtaggccttggatcttctttatcaatggattcctttgcttctttgaagatgaatgacagtggaatggataaggaagagagagaggagatgccacttcaaggagaagattagtctagaagaagctcaccaccataggaggccatggataagagcttggaggaagaaggagatgaatgaagggagaggaagagaacagcacaaaattttgtactctaaaagcgctatgaaatctgatgtttaattatcaaatgatcaaagttgaaaaaatgcgcacacaagacttctatttatagcctaagtgtcacacaaaattggaaggaaattt

SEQ ID NO: 36904 - DNA, 292 bp, Glycine max
gaccacagagtggtacctggagatatgccacggtggtcaagagacacttgtgacgtcaagtggtgtgctattgctcaaaaccaagcttgaccaatcccgacccaacccgggcatagtcagtcagagagaacctgtgatgtacctaagcaagcgagcttctggcagtcaatagattaaataaacaaaaccacacatcactgaggcttgtgtggtggcttggcagcttgtgaactttgtttgatatgtgggttatggcctctggtaatcgattaccaagagtgggtaatcgata

SEQ ID NO: 36905 - DNA, 329 bp, Glycine max
agcttctagccaaatagacatatcttgacttaattcctttgatagcctttttgagccttgatttgaagctcactacaagccttaagtgaaaaaccatgatatcgccatatccttaaggaattttggagctttggaattgttttgggaataagtgaggggttttttttttcaatatataacatgtatttgttggcctcgctttatgatatattctgagccatacttgatggacattgcatattggttaaatgatggacatgctgaatataatgttgtttctaaatggctacagagtaaacaaatattataataaattcgcaaatagaaaa

SEQ ID NO: 36906 - DNA, 332 bp, Glycine max
agctttaactccacattcaatttcttaaaaaataaagtaagatcttatggtggttgtgttgaactaaaaatggagaagtgaaaaagagtgaagaagaagaaacaatgagaatggcgtcacagaggggggtagtggagcctcactgctttgaggagtcacattttcgatgttgtgaacgaccaaaggttccaagtatgtccaccaccatgcaccttttcactttatgacttttttcaaactattagaagccctttctagagcttctatgtcgtcttcattgttccctcattagaagatcctaagtccattgatgtgtcttatgcctagatctg

SEQ ID NO: 36907 - DNA, 311 bp, Glycine max
  unsure (1)..(311): unsure at all n locations
ctaagcttgatcctcttaagagtcgaatntgcaatccagagtgagtgattttgttcttacttctagagggtggaattctaaaaattttgcaaggcccttcgtntaggatattgtgatactgtccatgcttngttccctcccatcattactcatcctaaagatgtggtagcctggaagcataaagttgatggatccttcttcgtggcttctagctgagatgctctntgganacgttgttggtccaaatcctctttttgaagcaatctggaagtggaggggtcataaaagaaccanagtccacctttggaaaa

SEQ ID NO: 36908 - DNA, 335 bp, Glycine max
agcttatgctgcaaacatcttttacagacctcctcaacctcagcagcaaaatcagccacaacagaacaattatgacctctctagcaataggtacaatctcgggtggaggaatcatcccaaccttattttcaaaatgatgctggcccaagcagaccatacgttcctccaccaatccagcagcaacaacaacaacaaccccagaaataccaaacagttgaggcccctccgcaaccttcccttaaagaacttgtgaggcaaatgactatgcaaaacatgcagtttcaacaagagaccagagcctccattcagagcttaactaatcagatgggacaatt

SEQ ID NO: 36909 - DNA, 285 bp, Glycine max
acgagtacaaagaaaagctagacctagcagcaactcatgagcataagctagaggacgagtacgctaatgtgtcagtcttgcaagcggaaagggtgatcgattcattccacggcgaagcaatgatgtggatggacaaattcgcctttactttgaatgggagtcaagatattcctcgattgctagccaaggccaacgcaatgtcgaatgtgtactctgcccccaagggaaatcacgggctcctcaattattgccaacacatgcttgaactgatgtcccacataatta

SEQ ID NO: 36910 - DNA, 329 bp, Glycine max
agcttttcagagagctcttgtttctttgcttctgcctccgagtaagccgtttgaagatgcttcaaggcctcttctgatgcaattcttgtttgtttttcttccagaaattctttatttaacaattgtatcttttcctttaattctttcacaatgtcagattccccatcttcagagccaccaactcctttctgtatactagagtcactatgtacactgtctacatttttaaatccctcaaactgggacttcaagaagtcattctgaaacctgaggtccataaccatttgtaaaagctgatcgtgagtatcagcatgaccttgatcgctatc

SEQ ID NO: 36911 - DNA, 327 bp, Glycine max
agcttctagccaaatagacttttcttgacttaattcctttgatagcctttttgagccttgttttgaagctcactacaagccttaagtgaaaaaccatgatatcgccatatccttaaggaattttggagctttggaattgttttgggaataagtgtggggttttttttttcattaaataacatgttttgttggccttgcttcatgatatattttgagccatacttgatgtacattgcatattggttaaatgttggacatgctgaatatgatgttgtttctcaaaggctacagagtaaaaaaaaattaaaaaaaaatcgaaaaagaaaa

SEQ ID NO: 36912 - DNA, 267 bp, Glycine max
  unsure (1)..(267): unsure at all n locations
taagcttattgcctagcaggccaacttacaacaacaagcctcaagagactcatcataaggatgcacaggccacagttgagtatgtgaaaagattgtatgactaagtgaaggtgcaaattgcaaagaaaaatgatagctataccaagcaagccaacaagaaaaggaaggaagtcgtccttgaacccggtgatgatcctggacattngaggagaaatgttntccaagaaagagggaatgatgagaatcataaaattggccaaatacagg

SEQ ID NO: 36913 - DNA, 329 bp, Glycine max
agctttcaggtactgtcttattgttttcacaatgaatgtcatctgaactctcaagggttcaaatgaagctctgctatacaccatgaagctattactcaactcctccaattttttttattattctaatatgtcccttttatccttcttattcctccctccctcccaccacctccaccgagccaccatcactcttgcacccaagcgaccaaacacaacaccatcgtcacttgatccgcgcgtcgcgtccgctcaatcccacccagtccctaccatcattatgaattcaacaattcataatgcatttgtactaccgattgaacaattcacgt

SEQ ID NO: 36914 - DNA, 332 bp, Glycine max
agctttggagttaccaagtgtcatttcgtcttcttcttttgaccagtcttcttctggcttcaattcatcagtgggctttccttctgtgtccagcatcttgggatgttcccagcctttgatgacagctttccaagttctgctatccagtgatttgaggaaggccaccatccttgctttccagtattcatagttggttccatccagaattggtggtctgttcactggtcctccttctttctccatgttcatcagaatttatctccctagatctcactcagtgatttcgagtgcccgctctgataccaattgaaattctgatactggggacagat

SEQ ID NO: 36915 - DNA, 657 bp, Glycine max
  unsure (1)..(657): unsure at all n locations
caacactctctgtagacccgtgtattnacatactaactaanntgtctgctantnncataacnnnnnnnnnnnnnnnccgtgggatgatcgcagtgaacagtcgtccagcgacacccannnatctcaagctcctgcgagaaggctctccaagagatgcgaaccttcgtgtttgtgctgctggtgccaggtgtatcttcgcgaatgatgtcttggagagtccggctcctgctcatctcacagctctcatctgcttccgcttctgctattactgcttcttatgcttccaccttctcgaaaacaacatctcccagcatgaggctggcgagtgagtatcggctgctgctgccggctctcatttgatcgtaaagaggtatcctccggcgacctccatgcattgggcgggaaattccgactcttccacacaggaacagcgagatgtactcactgagagaaactaactntcgcgttaagacggagggtcggcaatcctcaaccgcgtgtgtgattgtggaacatagagtgcacgagaattgcggaggagatagggagaaacttctcaggataatcgcgatgaatcaaccaaaaagcagctcgtcacttctcctagaaccgtataagacaggagtgggaacttcattctcccacaccactcttacg

SEQ ID NO: 36916 - DNA, 354 bp, Glycine max
atacagtagacccgacctgctggcatgctagcttgataggaaaatttctttgggaaattcactagtatcttggaattacaagaaacaagcttgtgtagcactatccactacaacagcaaaatacattgaaattggaagttgatgtgctaaatgtctctatatgaaacaacaacttggagacattgcggtaacccttgatcccattcctctaaaatgtgacaacataagtgctattaatctgtctaaaaatccggtcatgcattcttgaactaaacatatatagattagacatcattttctaataaatcatgtataaaaaggagattgatgcattgagtgtgctgatagtgaaca

SEQ ID NO: 36917 - DNA, 326 bp, Glycine max
agcttgttccaagtttgtaattaaatgcctgaaactttgaaaatttacaaaggcaggttgctttaggatccaacttgttgtaaactcttgacaaaattcacaaaatttaacattttgccttttaagttattcgcaaggattttccctatttattccaatccaatttgaacccatttcagttttatttttttttataaaattgaacccatatcaattagtatcatcaacaatccaatgtacgacaatgacaccaattttaataataaaaaacccacagattaaaacatgtcatgatttaatattgtgtttttcatatcatgggtctg

SEQ ID NO: 36918 - DNA, 326 bp, Glycine max
  unsure (1)..(326): unsure at all n locations
gctttacaggtcggctgccttctatgttggagaggcttatgctgtgcttcaagctatgaaatgggtcgagcttttatcttatggggtagttagaacgaatggtgtgtgattgtttaagcttaaacataagtcttgagtaccaactttaaatatgtaattgtgttaaatatttaaaataagagattcatcgtttatataatgatcaactcaaacacaatttggttgantttagtaaaaaatacacgtgatctataaaaaactagaatttcatgacattgtgtccctaatactctattaataatgtattgtaacataattataaaata

SEQ ID NO: 36919 - DNA, 332 bp, Glycine max
agcttatgcagcaaaagtgcttacatgagtgtgtgtttgtgccatactttttatcagacaacccgtagtagtttgcaccgtactttcatgtcgtactttctgttcgaccccaataacgtgtcaaagttgttgagcaagcttagcgtggcgcagtgctacaacaccatcaagtcgttggcgtatgagacggaggtgcgtttgcgcgaccccatgtatggctgcgtgggcttcatcttgctcttgcaacaatgactatgcgaaatcacaacaaaggtacacaacgcgaaggagttatcaacctacctcaaccctaggccatgcaggttctttta

SEQ ID NO: 36920 - DNA, 279 bp, Glycine max
  unsure (1)..(279): unsure at all n locations
agaaagaagntaaagctggcaaagaaagcaacaatngatcaaatggattgaatgaatctcattgaaagaaatgaatgatgaatacatgtgtttcatattatatacaatcaactttgggcaccaatctaactactagaaaatacaactaactataactgcttctaactgtcaaaacagaaaacagttagtgcataactaattctatatgttgagagccctcccaatatgaggaatagtatgtagacatttccaacttgagctgcanaagacaaaaagcaa

SEQ ID NO: 36921 - DNA, 329 bp, Glycine max
agcttcaccaacatccacgttatacaacattcaaacagcacaaactatcacagccaagaaaacagcgcaaaggcagaaaactctgcccaaaacaccaaccaaaatcacagctttttctcacttaaagaccccagtaacatttccttcgttccaattcgttaaccgttggatcgactcgaaaatattactggaagtctctagtacataaatatacattttgaccgttgggatctactatcaaacatcagaaactcattctgaattactctttccacaaccagcaaatacatagcatgtttctgcacaaagccaaaattctgcataagtgc

SEQ ID NO: 36922 - DNA, 275 bp, Glycine max
  unsure (1)..(275): unsure at all n locations
ctccaagaagatcgcgaagaagcgcgtcatgaagtttatacgctcccagagtgatcgcaagatctccgtcaaggatagttagtataaaccataaacagtttcatatccttgttttgcttgtggtttgatttgaactgaacgagtggaactttattcaagttgttagtnttgtttagatcgaaatgatgattgttatagtggccccagtcttaatttgcaccacacggtgtaatatggtgattgacattcttatctgatcccctgttatcaatatc

SEQ ID NO: 36923 - DNA, 325 bp, Glycine max
agcttcaagttgcttggatttttacttatttcgggccaacaaggcatcttcagatgaaagctccaataaacttttcttggtaggaatatgatcttatcatacaaaattgcgtgggcattggcagccatattttcaattaagttaagttttgtgcctgaacctctggccgcgtaacacttgagaaatattgcggcactgaagtacttgagtaatcttccaaggtcactcgtcgaggttgctctttagccatgacttcgacttcaaattctgctgtctgagattccctgcatgtaggtgaaatacaagatgatgactcacaaaagtg

SEQ ID NO: 36924 - DNA, 226 bp, Glycine max
  unsure (1)..(226): unsure at all n locations
caaaacacaactcaaaatcacagcttttcacatacaaataccccagtaacgtttccttcggtccaattcgttaaccggtggatcgactccgaaaatttactggcagtctctagtacataagtctacattntgaccgttgggatctgctagcanatgtcagaaaccgatatgtactaccctttacaaccagccatacacagcatttttctgacttatacaaattctg

SEQ ID NO: 36925 - DNA, 309 bp, Glycine max
agcttgtaggagtatggggtttctcattacatgtggaactaggtggcgaacggtcgatggtgcacaacaagttttttcacattcactatgcgcgcataaacccaccatcccctggtgcccacctccaactgagcacacgtactcccacgtagcccatatcctcgtttttttcaacaccgggacccggaatatatcgggacgctacaagatcacctatgattgtattgactcattcaatcgaaactaacttacctatcgaatgcctgtgtgcacacattatgaagatgtggcgcgcatgagtgaattttc

SEQ ID NO: 36926 - DNA, 227 bp, Glycine max
tcgtctcgatatattacaggtctcaatcttacatctgtttgaaaaaagttattgtccgttggaattgctgagagcttcaacattcaattttgagcgtctcgatgtattacaggacttaatcagacattcgagttaaaagttattgttgtttgaatttgctgagagcttcaacattcaattccaagcgtctcgatattttacgggactcaatcagacatccgagataa

SEQ ID NO: 36927 - DNA, 334 bp, Glycine max
agcttgcctcaaagaggtcctttaaggataaggcggccgaaggaactagttccgctcccgagtatgacagtcaccgctttaggagcgctgtacatcagcagcgcttcgaagccatcaagggatggtcatttctccgggagcgacgcgtccagctcagggacgacgagtatactgatttccaggaggagataggtcgccggcggtgggcatcactagttacccccatggccaaatttgatccagacatagtcctcgaattttatgccaatgcttggccaacagaggagggcgtgcgtgacatgaggtcctgggtgaggggtcagtggatcctgtt

SEQ ID NO: 36928 - DNA, 316 bp, Glycine max
agcttcagaattcaatttcgtttgtctcgatatatcacgggtctcaatcacacatctgaggacaaaagttatggtcaattgaatttgctgacagcctaccatttaactgtgagcgtctccatggagacccggacttcattatacctcccaccaaaaagttatcgttggatgaatttgctgatagcactggcattctatttcgcgcgactctacattttgccggactcgatctaacatccgactaaaaaggttttgtctgtagtacttgctgccagcttcaccaatcaatatcaagcgtctgcactgtattccagga

SEQ ID NO: 36929 - DNA, 294 bp, Glycine max
tgattgagtcccgaaatctattgagacgctcgatattgaatattgaagctgagagctaattcaaacgacaataacgttttactcggatgtctgattgagtcccgtaatacatcgagacgctcgaaattgaatgttgaagctctcagcaaattcgaacgacaataactttttacctcagatgtctgattgagacccgtcatatatcgagatgatcgatattgaatgctcgaactctgagcaaattcaaacgacaataatgatttgctcggatgtttgatagagtcccgtaataca

SEQ ID NO: 36930 - DNA, 328 bp, Glycine max
agcttgtgcaaatcaaatcattcttacatttcatctctagcatgcatcttctttctttacccactcctcacgtttggttttttagggaaaaacaccataactaaacgcgccgcaagggatccctatcgcaccagatccaaatctagaacgatgggtgatcaagaggagacgcaggaacagatgaaagccgacatgtcggctctgaaagaacaaatggcctccatgatggaggccatgttaagtatgaagcatctcatagagaagaacccggccaccgccgccgctgccagttcggctgccgaagcagacccgactctcttggcaacta

SEQ ID NO: 36931 - DNA, 541 bp, Glycine max
  unsure (1)..(541): unsure at all n locations
aggacccactttggggcctgaataactgttatatgcccatcttagantactcaagcttctgccctcatttgctgtgatgtgtggagaagcgtagtacaatatggttcactctattgtgcccttctatctctctcgaaattgctgaggaaacatatttgcgcgaagaatattccagccgaggcgctcccgtaacgcttttgtgagtaattacgcgaagattctctagcgttccttgagatgcgtaactcgtgcttcgttcatctcagtcttcaacaggttagtacccaaaccgagctgtcatttagtctatgacctgtggggccgaaatttgatcatgtgttgattctcttgtaatcacttgtgtacctctttgacgggctatccattttctagtctcctcgttatctgtaagaataactccaccatcgttggttgttcattcttattcattgagagaatcgacgtcggcgtcgttgcgtgtggagcagaattgtggatatatcgatacgatatgccctcttccggtggagaattatcgctg

SEQ ID NO: 36932 - DNA, 330 bp, Glycine max
agcttcacatagatcatcattttcctgtataccatttggagacaacatcaagaatgaacaagaatccagttaacatacaaagtgaagtctttaacacagtattacctttgaagagtaagagcagttgccacaaggcatgatgaaggccccatcaattgcaaaattttggcattttattgtagatgtcataggcctattgatatcttaatagcttcagcaagacttcagtttgtaaagcatagacctagcatacatatccaatttttaattaatcagcatgagtcatagcagttgagtacgagaccaatataaatgctacataatgaccat

SEQ ID NO: 36933 - DNA, 279 bp, Glycine max
  unsure (1)..(279): unsure at all n locations
tattctntgtcctaccaagtcactgctaggtctatcataaataagaagattcgttagnttgataaaatgactaacactttatcatcttacaaacggatnaacaatttcaacacttagtcttttctctcaagatgagcaaagtattttgaaaacttttatgaactttacaagaatttacacaaagaaattcttacaaaaagaatttgaataatgagcactttcaattgtacttcatgtcttcaaaacttctggatatataggccttcttcaatcaagtat

SEQ ID NO: 36934 - DNA, 328 bp, Glycine max
agcttcctctggcttctttgttattttttctcaagaggcttctttgagaagctagatccttatctacccatacccttctattaactaaatcaacctccttgaaaataattacggataaaataacaacacaaatataatcaaacatcaaacataattattaataatatatagatatatatcagggtgttacataaggtgtcccacatgagcacctaggtttgcattgaaacaaaaaataagaacaaacctacctaatgagtccctatgtacacaaatcatgaagatgttgggtgcatgagtgattttacaaaagagtgttgcaccactc

SEQ ID NO: 36935 - DNA, 230 bp, Glycine max
  unsure (1)..(230): unsure at all n locations
agagctaaatcctctggtggatcttccttgtatgtacttgatgtatatacatgtatatctatttaatgatgttttatgtgttctctgtgctatcagtacttcattntagtatggctttgccttgatcacgtagatgcatgctttggtaggatcattcaatagtggaaactgggctgattcttagaacttgataggacagggctagtttatcgtataatcatgagggatcg

SEQ ID NO: 36936 - DNA, 330 bp, Glycine max
agcttatcattgatcttaagtttttggaaccaaattattcaattctcgtggtgttggagaattttcgggataattgggttgctcttttatttcatggagttgttgaattctttatacctaatcgaatttattagttgtagagcaacaaaatattattagtgcagaggatattaagcacaatggctttcaaaggagccttttctagctatgctttcttttttttacttttactttatttttgttaatcacttttatatctcctcacatttttcttccatattttatatttctacttgtacctccttattgtcatttttatcttgccacctt

SEQ ID NO: 36937 - DNA, 456 bp, Glycine max
  unsure (1)..(456): unsure at all n locations
agtatttttgtcccatacgcatcattngcgacctatagatctcagcttcccttctccgccgnttttcctgcataactatgggaataagaaccacactgcatcttgtgcgtcgctccgtttctcaccgttaaaaatacgcacccggcgggctgaggaaagttggcctggatagggcctcggcttggctcggcttgaacacccgtgagcaatcttcagaactgaggcgcggttatagaccaccagtccacagtgtgatgctggagcaccgaactcagattgaggctgacctcccatagatccaccatcatttttttattttcttatggatatacacttgatgggattacaattttgttgaagatattattcggaaggaagaggttaggttggaaacaatattggatctaaaaacccaatgccaaatcctacggcctttttatttcaaaaaaaataatt

SEQ ID NO: 36938 - DNA, 328 bp, Glycine max
agcttcttatccaaggttcattcttggtggtgaagctctttcttccatggcttattcccttgtggatggtgtctcccctctcctcttctcctttgccttccactgcatctccatggtggaaaatcaccattgaagctcaaagatccagcctccatagaagctccacaagcaagcttccatcaagtggtatcagagcacaagagcttcaagtaggtgctccttaaacctccattaattttttgctttaccttctcttccattgttgtgtcttcattttttttccatgtatctcctcacatgtcttgtgctaaatgttgttaacatgatt

SEQ ID NO: 36939 - DNA, 324 bp, Glycine max
agctttatcaaatgtggcatttgaggtaattaatgatataaacttttattatttgagcagagatttcgatggacaaattacacacagaaaatatgattttgctaattatgttaaatctttaatttgaagggactgctaaccgaaggtttcctttggatcccctctttgggtggtcctactaccattgctgctagacaaagtggagctggaatttcttggctttttccatttgtggtaagaaagatatcttttgcttcatagttgaaataataagttgtagttgggctttttccccctaatcctgtgagtcattatgatctttcg

SEQ ID NO: 36940 - DNA, 383 bp, Glycine max
  unsure (1)..(383): unsure at all n locations
gctgttcttataacttaaaacgatttataagatagatattcttattttagttatacaaaatttaatttaatatataaacaaacctttaaatatatattctatattacatgtggtatattctagatggaaactcaaaatatcacacttgttgttttatagtntcttatgcccctangcttttttttatgtacaataatcacattgatgtttaaatntaagaattcattcatattatctcaaaatccatcacttggctgactccagtatttgctangcctgtctggcatagtaatattgtagtttgcctaaaaataatcaatgagtaatatcgtctactatataagngttattctctacattatattataattctagcgatggta

SEQ ID NO: 36941 - DNA, 220 bp, Glycine max
tgggtggtaaaactaatgtctgacatggcatattacctggtggatggagtctaccctctcctcatctactttgccttacactgcatatgcatggtggaaaatcaccattgaagctcaaagagccggcctacataaaagctacacaagcgagcttacatcaagcggaatcaaaccacaatagcatcgagaatgtgcttcttaaacctacagtaatattgtg

SEQ ID NO: 36942 - DNA, 325 bp, Glycine max
agcttgaaggcaaactggttttattggttaacttggtaacccagctggccttgaatcacaaatctgtacctgtcgcaagggtttgtggtttgtgctcctctgctgaccaccatacagacctttgcccttccatgcatcaacctggagcaattaagcagcctgaagcttatgctgcaaatatttacaatagacctcctcaacctcagcagcaaaatcaaccacagcagaacaattatgacctttccagcaacatatacaaccctggatggaggaatcaccctaacctcagatggtccagccctcagcaacaacaacagcatcctgc

SEQ ID NO: 36943 - DNA, 280 bp, Glycine max
  unsure (1)..(280): unsure at all n locations
attctccgatcttttaaatcatgccgttctttttggaagaaaagcccaggaaatcttgccaatgatatccaaagcttgtttgatgcaactatgaaagttacagccctcaagcaaaccggtcatgacatgatcgctcatgtgggtaaggctcgtgctgccgtggaagaactaagaaagttccttgtagctgattcattggaagaagtgaatatgaaacttgacatgttctacatggttcttattttgaggagcttacanttcagaaactttgatcatgtgc

SEQ ID NO: 36944 - DNA, 326 bp, Glycine max
agcttgagcctcctcctccattttttttttgcgagataaagagagaaaattattaaatgagaagtgggaccaccaaaattggtgattttctataaatttcaaccaatcataagaaaatgctagagtaagggcaccaaagattattgctagcattccttgtgagataatgaaatatttgtgaaatattactcctaatttcctttcctttttttatttataactatgtaaggtaaaatgttggagttgatagtatatagaaaaggaaagtgttgatagagaggacagagggaacataggagaaggcacttctaaaacatttgtggctt

SEQ ID NO: 36945 - DNA, 553 bp, Glycine max
  unsure (1)..(553): unsure at all n locations
tgatantcattgaaccccatcgtnangccactctatacctttctcaagctcctggaagaatngatcatcgaaaagcttcctattatgtaaattatatctgactaggtactatatttatatgaaataacataattaacattaactaaatggaaataaaaggagaaaaatatgataatccattgaatgcatttgatgcactgaacacgattagtgtaaactcaaagacttactggcagcatcctctngatgcttatgcaacttctcatataatttgacaagcaaagactcgacatcattataatgtgcaagaacaggtccaatataagatacagatgggcgggaatattaaacatacaaatgcaggtgaatttcattcacaaccttattaaaatatgcacaaatgattcacattgtaacaatatctaatagtgatcatcaaaatcagagaatatacacgacctataattccttatatgggctcagcagcatacaatctagattgtagcttacacagtatatattgattatgtccatatgatcgctgtcacacatg

SEQ ID NO: 36946 - DNA, 328 bp, Glycine max
agcttgtcaaggaagttttcttatgaaatcttttcaaggaagctacctagtctataaatagaagcatgtgtaacacttgttgtaaatttgatgaatgagagtcttgtgagacacaactcaaagttcaacttctctccctttttcttccttcaatttcgtgctcccccctctctctttctctctctctttcttttcctccattgatgcatcctctccaagcttcttatccaaggctcatcttggtggtgaagttccttcttccatggcttattccctagtggatgacgccgcctctcctttgtcttccgctgcatctccgtggtggaaa

SEQ ID NO: 36947 - DNA, 567 bp, Glycine max
  unsure (1)..(567): unsure at all n locations
acgatcgnatgaacccatgattacgcgcactatacatctcagctacgccnattagtctaaactttcgtaagctatttaagctgagtctgtccaacatganggatctgaggacaaagcttagtttaagttagtctaaacctatganggctgtctaaattcagcctagtccaacaagagggatctgaggatgaagctnggattgattcagtctaactagggatngatgtttagtaatttaggctacatcatagaacacaaaagtatgattgagtagagaaacatcttatatgcatcactttgtttgttagaaagatccaacacctttatctactgtggtcaatcttacttacttgcatattttactgtttntagcctagactatatttaattctggtttaaaccatcaattattaatgtttctttcaacaatgccttatntctagaattaacccttgtctaatactagttccctgagttgatactcggantatcgcgttaatttaaatactagatgacccggngcgcttctgacaataagatttcctagacatatgtgtataggagaat

SEQ ID NO: 36948 - DNA, 324 bp, Glycine max
agcttgacacgctgggcaatttttttaaaactagtcgcttaaaaggatatgactaatgaaagaatcttcgtaaacatgtgacttgtagaatggtgacttatggaaatgtatagttgaaaatcagttgctggtaatctactaccattatggagtaatcgattacacatcaactgatgtgactgaattaagaattttgaatatcttatcattttataacacttgtgtaatagattgcatgattatggtagctgattacagctttgtaggtcagtttgaaaaaaatgctggctactggtaaattattactaccttctggaaatagat

SEQ ID NO: 36949 - DNA, 579 bp, Glycine max
  unsure (1)..(579): unsure at all n locations
cgagagggattgaaaccttggatnacgtgcactatcnacnactaagcttggtccgacangactgtaagccctntaatagcagtcagcgcgnttgatttgtattatggctcaccacatcgaatcatataattgagggtccatacagaatgggaaaaaagaacacgctctgaattaatatttatgcttgataagtcacttcttatgttgtacagaaactaacgagatttgtgtttggtatctcaagcctgagtgtctgaaacccgtattcgcttgctgatcacaaatgagcatattgaccaatggtagaggcgtgcatgcttacaaaatacaaatatattattctgcctaactaacctgcagcgctagtaacatcttacattaccaatatagtcttgttgccagtcgtcccgtaccagcttgcattaattctcgtttgaagaaaacgctacatgacttatacttgaatccgtacaagctattatgtatgtcactggctctaccttactatcntaagatatactttgtacctatgaggattatgataatactatgtaacatctttctgatcattattattcn

SEQ ID NO: 36950 - DNA, 322 bp, Glycine max
tagcttgtgcctatacacgtatgttatgtgaatgtagcatataaatcgcgaatacccttatgtgctttgatgatggctatttcccgctcctagcttcaattggagttatgtcttttacagacttagtagtacatctgttgagtatgtaaacagaagtgtatactgcttcaacccagaatgtgttaggtagtcccttatccttgagcatcgatctaaccattcctataactgtgcgattctttttattggacactccattttgttgaggagaataagcgactgtaagtaggcgctcaaaacctttattctcacaaaatctttc

SEQ ID NO: 36951 - DNA, 507 bp, Glycine max
  unsure (1)..(507): unsure at all n locations
cgatannattgtccatgaagcactcattagcgacactatgatactcagctttatgctctattatcttacagggctatctttacnnctttatatttgcgnctaagaatatgcatacaccttcttcagagtgaagcgcgtaacctctctctatcatgtggccaatcttagaagattctcgttatgctatgaactagctagacatcatggatgagtcgcgacctttatctgctccacgctgacagggccttacctattattaaacccactgtcctgtcctgtcgaactatgctttgcaaactcgccatgcctttgagaatatctcatacgtgccacgtgatggtacatcactatcaagaccaactccgtctgtctatatcgacctgagggatagaacacattntctgacctctctctggaataaatcagccatttggtgacattcttgtcttccaactatgaacgcgatgggatatacgaccacatttcctccgctgctttcaaatagcg

SEQ ID NO: 36952 - DNA, 331 bp, Glycine max
agcttacatgaaacttcctattgttatgtcctcaccgttacctaatattgtttgcaagctaaaacgttctttgtatggattaaaacatgcaccaagagtgtggtttgaaaagtttagcacaacactacttggcttttccttcatccaaagtagctatgatccatctttattcctataaaggacctcaaaaggaattatgaccctccttgtttatgtagatgacattatcgtcactagctcagatcaagaggctatcactacaatcaagcaattgttgcatacaactttcaacatgaaagatcttggacaactcacttatttcttgggatta

SEQ ID NO: 36953 - DNA, 61 bp, Glycine max
atgaaacacaggctttcttcaccagtccttcgcttcagggggagaataatctataagctga

SEQ ID NO: 36954 - DNA, 328 bp, Glycine max
agcttaacgataattctttctaaatcattatcatttttaaagtagtgacaattttgtaaataaaactaacatttcaattacgattttttcaaaaacgtcattgaaacctcaaaacgacaacgatttttaggaaaatcatagtcgctttggagtattcaaccatcatctttgaatgagaccaattttgatgacatttttgacttacaccctaactctgtctcactctgatcactttgaagcaatcgacctctttgcgcccctctcactccgtatgtgtcactttgcctttgtcagcagtgtcgtcgtagtgtctcctgcaacgtcactc

SEQ ID NO: 36955 - DNA, 277 bp, Glycine max
  unsure (1)..(277): unsure at all n locations
acaaaagaaaactaactaagctgcatatccattactaaagcagacaagacaccaacaactgctggaaaagtttgatttaagacaatattagtttattaaaaattgattntaatcaatatttagtacactcaccagacatttactattcgtttatatcataaagttcatatccttnttttttttttaagatgataacttattaaaaataaatttaaatattataaatattaaacatattcttttatatcatttaacatctatttagttaaggtatcaa

SEQ ID NO: 36956 - DNA, 328 bp, Glycine max
agcttgttcgcacatcgttttcttgtatgacatccactccacaaggtttgaagtataggagaccttcaatcctattacgcaacgtggcggacaaaagtgggcagttaacttgaacggtcattattgttaatgcggaaggtattttgcgcttcactatccatgttcacatattattgcagcttgtggttacgtgagcctgaactactaccaatatatagatgttgtttatacaaatgggcacatcttaaaagcttactctgcacaatggtggcctcttgggaatgaagcggctattccttcttctaatgatgcatggacacttatccct

SEQ ID NO: 36957 - DNA, 512 bp, Glycine max
  unsure (1)..(512): unsure at all n locations
tgggattgacccatgaagcatctttagcgaccttagactctcagcttttcttcttttttttttgtaaatagtctgtgctttctcttttaatcngaggaacagagagagctttacattctgcatgcaagaccgttgcagccattcataaaatattatatctctgttaaatacactcatttgcgagagaagaatgcgttgattccttacattcgtatccactttagggtcattcatacttgaatgccagaagcaccttttaagttcaagctgtgacctttaatggaacttctttcacccaaaaggttttgaaaatttatccccattgttgaagcttctcaaacaaaagataatagctgttaattttatgagttgcacatgtggccaattaccactccgagctactgacttcttatttgaataataaaatttagttgggatttttattcaatagacctctcgatcacttctacaccctccattactaatcatttgctctcagaaggaaaacctan

SEQ ID NO: 36958 - DNA, 332 bp, Glycine max
agcttcttcattccttgaacttttaattttcatctcactaatccaacaaagttgacaatactaaccatttccaatagcggaaacatcccagccaactccctttactgttttgatcttgctcatagcaatccttcgattacctgcacactgagatatacattgcaggatgcaaccatcccatcaacaacaaaagaaccaaaatagacatgggtccaattcaattcaagttctgcaaaaaaacacacacctgcaacgtggcagtgacagaatattttggaagcatcctgtcatcaaataacatgggcacgtttttgcataacaaccaaaatact

SEQ ID NO: 36959 - DNA, 344 bp, Glycine max
tgacaagacagtacacactgttgtcttcttcaacatgatataatatggaaatctactctaaagatacatctaacaatacccataattataacacagataaaaaaataaagatccatgtacacatggttgaacaaaaaaaaaatctatcctatatattgaagattacagagagagagagaggagagaaaatcgttccaaaacttctccacaacaggagaaatgaacaaaagaattaacaactatatccaaattgttattacaaggggcttttaaagaggtactaattcagttatttttttgccacatcatcattcgctgcaatgaatccttacttcttcagcaaa

SEQ ID NO: 36960 - DNA, 324 bp, Glycine max
agcttggcgacacttttttaagattgaatcctataatgaaggaggaagtaagaaaagaagtgctcaagttattagaggcaggccttatctatccaatttcagacagctcatgggttagtcctgttcaagttgttccaaaaaaaggagggatgacagtaataagaaattattgaaatgaactaattcctaccagaacagtcataggatggagaatgtgcattgattatagaaagcttaatgaagccacaagaaaagatcactacccacttcccttaatggatcaaatgcttgagagacttgcagggcaatctttctactgttttt

SEQ ID NO: 36961 - DNA, 97 bp, Glycine max
cttgaatctcacttcgctatgggagtctaattgagaagtcagtcctgatagtgagaaattgtgtgtgagattgtgagccaaacttgaaagaagtgtc

SEQ ID NO: 36962 - DNA, 321 bp, Glycine max
agctttttggttataattattgggttttctctctttctattattctatttaagctatgccacatgtctccgtttgagtggagcaagaagggcccactttcccttttaattgtgactcatactcagccacaaacagtgagaaaaacctgacctttgaaacgctaaaatcctgcctcgatttgcgtgccatttctctggttccagttcctcgcgtttctctgcgtccgtcggggccagttttcgaaagcaagcaatatatatatcaaaacgctcagaataaaaccccgagcgtggtttagaggttggtttcgttaaattctaa

SEQ ID NO: 36963 - DNA, 503 bp, Glycine max
  unsure (1)..(503): unsure at all n locations
cgtnatcgattacaagaagctgtaattgantatagctcatccctgttctataaaagctgcactttctcagaaccctcaactctctcttcttcttgcggagccaacctcctctaaacttcaaatcctcataactttctcgattcttggccaaattactttaaacgaagctcaaacgtcttcttttgttaattctccaaaaatcctacctatcagaattagctgaaccaagcttcaatggcagaatctctaaagaaacgaaagggatccttcttcaccaccactactgtaggccaccgtcaccatggaacattcgatgacccaccagcatccattcttccttccttttaatcttcacaggcattaactctatttcccctagtgatacgtgcagaggacttatcccaatttgaaaacgcgtattcttgccctaaaatttagatatgattcttgatggaaaacattatttgtacaagttgttcaaaatttgactgttgaatcatgcg

SEQ ID NO: 36964 - DNA, 329 bp, Glycine max
agcttctccgaagggcatggttatttccagtttcctgaaaatatctaagaatctcgccaaatggcagtccttctccttcttggaaggtaccacaggatatggtactttcgcaccttcattcacagtttttttttcttttcttctctctagcttgttcacttctactcctctcttcattcttatttttttcatatttttcattttcttggtcatttaattcttttttcttgaccattatttgtttttctttttcctgattgctttcacttctcacatcatccttcttttcatcagtatctttctttttagcagctttctttttggataca

SEQ ID NO: 36965 - DNA, 413 bp, Glycine max
  unsure (1)..(413): unsure at all n locations
agtcgagagacaccagttgagagtcgagggcatgatattgggagacaagttgaggcttgaaaaanattcaaaaggtgtttgttcgaacaattgggcaagaccgaagaaaacatgtggaccatcattgaccaatacaaagagaagctaagtctagcggcaacccatgaacaaaggctagaggatgaatatgcaaaggtatcagtcctgcaagcagaaagggaagcaagagaaagagtaattgattcattacacagagaagcaatgatgtagatggataggttcgctttcaccttgaatgggagtcaagagcttctgagattgctagctaaagccaaggcaatgatggatgtatactcggcccccgaggaagttcatgggcttctcgattatcgttagcacacgatcaatctaat

SEQ ID NO: 36966 - DNA, 263 bp, Glycine max
agcttgaccggcagaaaatgtttttttgatcttaagattcgattgaactattataaactactctcgatctaaaagatgtaaactacccacaattgtggaaaatattaatgcttctgtaactcattttttactgctgcaatgtattttgaatacaaaatatatcatttttattccaccacaaagtgttgaacacactacattatatctatcaggcacctcccacatgctgcacggttacaacaccattttcaacaattttattt

SEQ ID NO: 36967 - DNA, 302 bp, Glycine max
  unsure (1)..(302): unsure at all n locations
tacattagaantataggttcatttggcccttgattagagntgtctttatcttggacataaaacaacatggctaggaaatgtttccagatatttgaattggacacaatgcattaataacatgtaatgaatntgtagttggagaaatttcattataatctttcccatttcaattgcatcctagtgtacacaacaacaataaaacaacaaanaccttatcttactaagtgaggtcagttatatgaatccacacggcatcttgatatacacaaaaggaggaacaagttgagagatcattaagagat

SEQ ID NO: 36968 - DNA, 329 bp, Glycine max
agcttcggtgatagataaattttctttaagtttattcacagttacgagtaattaaacagtaacatacttgattctgtaataaacgattgacttgagggaattttattatcactcaaatggatctctatttcactctaaaaagcttcctagctgatgtataaccaaggtttctaagttatgctattctaacgaatttgcggttaagaaaaaacaattaacagtagaataaagttgtgaaaaggcaataaatatggcatattatggaaaataaaatttcatgatttggccgggtagtctctttacatttcaaattcccatatttataataa

SEQ ID NO: 36969 - DNA, 587 bp, Glycine max
  unsure (1)..(587): unsure at all n locations
agcaacgagcggattgacgccatgattacgccgtcgctatccntactcaagctcggctcaacagannaccaatcggtgatcattntaaaagatactggatgtgttgcttatctgcactttccaaagaagaaccgataatagctcgatgataaatgagaatagtgcatttttggcgactatagcgaccaatctaatggtaccgattattcacaccatatgatcaattcaagagatgtcatctttgacgaacgagccatgctgcaatggagtactaatgtcaatgagacgcacgaagcaaccaattcaagcccatgcacacttgtcaccatcacttacacagcatgaccaacatcaccagcaagatgaagtagatgaagtccacaacaaccacttcaatgatcaagaaggccgcactaacctgattccaaggcctgcaatgttgatttttcgcctgtgacctcacaagctggaggagcatcncaagaagaagttcggagatatccatggtcatggaatcaaatgattagataatcttcatgggagctctgcaaatacatactacacgaaatcattgccctgaataggtg

SEQ ID NO: 36970 - DNA, 321 bp, Glycine max
agctttgctacgataaccacttggactggactcacccactggctgtcagaaatggggtaaatgattccagcttgtaagagcttggtcacctcctttttcaccacatccagaatgacggggtggagttgccactgaggttgcctcactggcttatctccatcctttaaaagtatcctatgcatgcaggtagatggtctaataccaggaatgtgtgctaaagtccatccaatggctttcttgagaactagccacaacttctcctcttgctcagcatcaagggaggcatagatgatcactggaaatttttccttgtcctccaag

SEQ ID NO: 36971 - DNA, 367 bp, Glycine max
  unsure (1)..(367): unsure at all n locations
tactaagcttacggaagatctgggacctagccatggcaaaggtctncatagtggtcattgtcttcctcgcccagtattatgaccagccattgaggtgcttcacctttggggacttccaattatcacccacggtggaagaatttgaagaaatcccgggatgccctctaggaggaaggaaaccatacctcttctcaggattctatccctctttagctagaatntctaagatagtccaaatcttgacgcaagaattagaccacaggaagcaagtcgaaaatggggtggttggagtaccaaaggaaatgttggaggcaaaagcaagagtcttggcatgtaaaggtgaatgggccctgtcgcaaccttccct

SEQ ID NO: 36972 - DNA, 326 bp, Glycine max
agcttgtacgctataatgattatgattgggctcaaaatgatgatgatcaaagaagtattaatggatttgagtttttaagggggaatccaaccttcctggaatgaaaaaagcctcaatttcctttttactcgtgaggggcaaaacccttaaaagtaacattaggccttcgtcctgtaatccggcttagagaattgtaaaaagagttggacatgtcacaagacgatcagaccatcacctttggggataataagtcaaccattgctctagtaaacaacctcgcgttccgtgatcgaagcaaacatattggcactcgttaccactacata

SEQ ID NO: 36973 - DNA, 330 bp, Glycine max
agctttgatcccaaagaagcttgccatgaccattatcttcaagcccatcacttttcccaacacacaaacaaaagggtatagaagaaccaaaactatggctcttataagcccccctgcctcaaaggccacgagcatgaaatatgggaacaaagaagaggatttcaacaacgcgttttcgacataaaagatcaacgtgtgatcgttgaggtctgatcggtggattaaagaggggaatttcaggtatttgttaaactgtgttggtgcacccgaaaaagaattgctaatggttctgtggaaacggacgaggttcctgagttgcctaaagagaaa

SEQ ID NO: 36974 - DNA, 331 bp, Glycine max
agcttatatgtaggttcatttctgtttaaagcagatataacacggaactatcaaaccaggcactcttctttcccactggttattgtgagagaaccaggctatttatctgaaacactagaggcttgccaaaacacattaaaaacaattactatttactacagaaaaactttcaacacatactcataactagcattacaaacctgaacactgagacacaaaagctccgcaagtctcttcaaagtaatctttccatagtattttgatataacaataatattctgataagggaacaagaatacaccacattaatgctcacatcctaaatcaagaa

SEQ ID NO: 36975 - DNA, 329 bp, Glycine max
agcttggagaggatgcttctttggaggaaaagaaagagggagagaaagagagaggcgagagcacaaaactgaaggaagaaaaagggagagaagttgaactttgagttgtgtctcacaagactctcattcatcaaagttacaacaagtaaaagaatgtttatacggataaccacttgggtattttcgcctgccccctaacctcacgggttagtgcttgacagaggtagtctgcgcggaagatgacataaatctccatgcgtcaatgggctcgctttcctctggttgacaaaaggtgcggataaccataaggtaccctcgcatgttatttg

SEQ ID NO: 36976 - DNA, 515 bp, Glycine max
  unsure (1)..(515): unsure at all n locations
nttgaacccatgngntccgctcatatatgccacactatagantactcgagcttctatagtagctgaaccattctatagataaacacatgttgagttgtattcataacattagagattatctcttctatcttagcgagagcgattctgctcaattcctgagtgactccagaacaacactggctgtacaaacgactttcacaacctttgtgtgttgacctcgccggatagagaggattctttctttctttcatcttcaaccctgatatttccaaccataattcccaaaatccactcctacgcagaatatcttgtgccatacttgccgttacacactcgaataagtgattcttggcctaaattgaatttaagacagacctttactcgtttggatcactatatgagcctgggctgagtttgcatttatatacatcaccacactacctagtnttattatattcttttgcaggacactatagacccaataccactgatcctcttctaacattcgtttctag

SEQ ID NO: 36977 - DNA, 329 bp, Glycine max
agctttactgcttatagcgtttgttgctgttttccatgagattactgagcagtgagcacattggagtagattggcacttttgtcatactgaagatcctatttagagacatcagtactaattggcaattcaaatgatcaaccagtaggttttttttaccaaattatttagaggtcgtttgataagtttcctttattacaagtttgactcataggaattgtatgctctaccttgaagaggagtgctagggacatgaatgcgcaaacaaggtgattggaagcactagtgaggagtgcagattgcattttttttgtaaccctgtgaaaaaggg

SEQ ID NO: 36978 - DNA, 534 bp, Glycine max
  unsure (1)..(534): unsure at all n locations
cccgtgtccgtactaggaaagatctgattactgcctgtctaaggctatatcagcacaattccgatatggcctccgaccgcactcaactgcagaatatgttcatgatagagggcgagacctttatagaatacacgcagcggtggacagaataggcggcacaagtggctcctcccatggttgagagagaaatgatcaccatgatggtagacactttgnccgtgttctactatgagaagctagtccgttacatgccgtccagcattgcggatctagtattcgccggagaaagaatcgaggtaagattgaanagatgaaaggttgatgtacgttgctccacgagtgcgaatgccataagaatcagggcaacgagggcataaaggaaggaaggagatgcccatgccgtctcttctgcacccgcgtgtgtcaaacgcccacatacacctcatggtacccatcaagacgcgcaacatcactcgagcttgttgctcataccgtgaccgctctagttaacacccgtgcagctantgcancact

SEQ ID NO: 36979 - DNA, 334 bp, Glycine max
agcttattaaaatgcatatgatatattttcttgaatttcttggtgttggtgaatttataaaattaggagattttcatgcagggattgcccatatgtctaatgcatgatatatgattttaagtgaggatattgacgttgctctaagtcccaagtataataggagccttgcaagattgactagccaagtattgagaagcctttaggaagatgcatcagagtggtataggtcaacatcaaaattgtagatgatagtgattattaccaatatgtccgaaacctatacaagcagggccaagaggaatgtggcatgacctcattacctaaaagactatgg

SEQ ID NO: 36980 - DNA, 369 bp, Glycine max
  unsure (1)..(369): unsure at all n locations
aagcttcttgaagccgttctcataactggcaaccgaatgaatgatggaactntccgcggtggtgcacaagcatttaaacttgatacacttctgaaattatctgatgtaaaaggaacagatggcaagactacactcttacattntgttgttctagagaatatccgctccgagggcataaaagccatcagaaaggcaaaagagagccagaaatcgtctagtattaaattggatgaccttcacgatagtacccgagaaacagaagatcgctaccatgaaatcggtcttcatgtggtttcacgattgagcagtgaacttgagaatgtaaaaaaagcagcaattatatatgctgacagcttaacaggaactact

SEQ ID NO: 36981 - DNA, 326 bp, Glycine max
agcttctcagatgtcattggtatcattgaccttgtggcagcaagattgcgtcctgtcctcccttgcctccgaacaccatctccatgttcttccccagaaacaagcttattctttcttgttggcaataccatattagacaccttttgaacattttgtccagatttctggtctatctcttctgctttcctacccttttcttttggtttaacatcagccacccctgactcttcactttcagataaggcagctgaagatgaaggatcaccttttagtttaatttgctgaggagaactgccagccaagcgtctggcaaattctaacccaag

SEQ ID NO: 36982 - DNA, 227 bp, Glycine max
ctttatctagctctctggcttattaagttttatgcctcatttcgcgaaatcttaggctcttccacgaactatgtttttataaactgaccaccttgaagaattggattacctagctatatcttgttttactatacctgcaatgagctaactcgagtttatgagggagctgtcttaaactgacaacctgctctaattaaatcaaaagatttgacaaataactatgatca

SEQ ID NO: 36983 - DNA, 326 bp, Glycine max
agctttgcggatttggtcttctccagtgaaaggatcaatgtgggtccgaaaagagacaaatttgatcatcctacttggacgaatgagaaaactggggcaaataaagagggtgacgatgagggagaaacccatgctgtgactgccattcctgtacggccaagtttcccaccaacccaacaatgtcattactcaacccttctccttacctaccgcccatttatccacaaaggccatccctaaatcaaccacaaagtctgtctaccgcacttccaatgacgaacaccacctttagcacaaaccaaaaacaccaaccaagaaatgaattt

SEQ ID NO: 36984 - DNA, 328 bp, Glycine max
agcttatgaccattttaatttttttttagtttccattgttcaataaccaatgtctcgatatattatgcacctgaatcggaaatccaagtgaaaagttatgaccatttgaatttctcgagggattttgttgatcaattttcagacgtctccatatatggtgtgcctgaatcggaccttcgtgtgataacttatgaccatttgaatttcttgagagatttcgttgttcaatttctagcgtctcgataaaggatgcgcctgaatcggacatccaagtgaaaagttatgaccatttgaattgctcgtcagcttccgttgttcaatctccagc

SEQ ID NO: 36985 - DNA, 304 bp, Glycine max
atcttgataataaaacatgttattgttctattggaagaccagctgtcttatgctaaaatcataccataaatattctccaactataaggtacggctgttcttactatgccctagtctactcaccggtgaacttaaaactttaaacgatgattaacatgcatatgtcattgaactaaaatatacactattgatactagagtggtcaccactcttgagttagatccccctaataaaggactgtgactgacccttaaattccattcacatgtatctgtccgtgccgattaagtgtgcaacttaaaact

SEQ ID NO: 36986 - DNA, 145 bp, Glycine max
actgcttactagatatacatctcgtctatctttctcttcacatattcatagtgaactcgccggtgataactcactatggacttggagctatcctactcctttgtgctgaatcagtttatccatcttcttctttgcgttgatacac

SEQ ID NO: 36987 - DNA, 329 bp, Glycine max
agcttaatcactaagatcccatttgtcttgtatgtccaaactagatggtagttctataaatgagaaattaacaatgatttttcttcctcgatctcaacctatttattggctttaaacacaaaacacattcttgcatcattatttatattgtatactaacttacaagtttagtacaatgaaaacatagttttcttttataaaaaaaagtattgtgtacatcagtcctgccaccaccaaccatgtatcacatcataaaaatgaattaagcattaccatcactgaaacattgcaatgaattccattcattttaacagtccagcctacacttt

SEQ ID NO: 36988 - DNA, 163 bp, Glycine max
aatcataatgctcaaatcaaaatgctcaaatatatgctcatacagatgtttaaatcccataacgaatgacacattcccagttatggaatgctcttaatgatcaaaaggtgtaaaatgatgcctacttatctatgacatgtcctatctatctcaggatcaaagg

SEQ ID NO: 36989 - DNA, 391 bp, Glycine max
cgagagtgttttgatccttggatcgcacccgggatcctatataccaacctgcacgcatgcaagcttgtatgactatggggttttcataacatgtggtactacgtgggaatcatcagactggtcgaagaatcttttggacgtccaaagagggcctgtgagctctccatcccctcttgcccaccaacaacacaactcattgcctctcatggaggatttattttctgtacagttacggaaacttactcatttcaattctatgctgtgttctctatttatgttgtttccgattctcgtggattacattatcattcactaataaaattagggaaagggacaaaacctttctcatagtgcactgatgcttccatgttatcctcggcgtgttcctcac

SEQ ID NO: 36990 - DNA, 333 bp, Glycine max
agcttctccgaagggcatggttatttctagtttcctaaaaatgtctaaaaatttctccagatgacgatctttttccttcttggaaggtaccccgggatatcgtacttccaaaccttcatccacaactttttcacttctactcttctttgcattcttattatttttttcttattattcatttttttcattttctatttctttttctacttctttttctttttcttgggcctttaattctttattcttgaccattatttgttcctctctttcttgattattttcacctctcacctcatttttcttgcaatcagtacctttcttgtcagcaatttt

SEQ ID NO: 36991 - DNA, 246 bp, Glycine max
aagatgaatcgagtcacatcactgcttcgtctattgccaaacatatttaggattattgatgtccttgttacttccagtttcaccttgacaaagatgtcatggaccatgttgaaaatctaacatgattcaaccccatatcctgcgtaaaaattcgcaatacttcgactgtacatcattcgcatgcatccattgctttcattggttgattgctcattgcattctttccttgaaaataaaataaaataa

SEQ ID NO: 36992 - DNA, 327 bp, Glycine max
agcttgttactgaatacccttttttctctaacagtagattcgccttgggggagttttacaagcttctagacaacgttcttctgaaactagtccaacttttcttgctttggtttgacccaatattcatcagacatagcatcatctatgtgctttggcttaactttagaatccaatgttatgtgctaaagagaattttttgtttagactttgtccttaggatcaccaatgatctggactctagatgatgtttccttagcaagcatccagttagttctctaaccttatcaggttgaccattcattggtaggttggaccaaagttggttat

SEQ ID NO: 36993 - DNA, 331 bp, Glycine max
agcttctttgagaaaacttttttgagaagctagagcttagctacacatacccctctcataactaagctcacctccttgagaagcttccttaagaagattcctaaagaagctagagcttacctacacatacctctctaatggctaagctcacctccttgagatgagaagctagagcttagctacacaccccctataatagctaagctcacccccatgacaaaaaacatgaaaatacaaaaaaaaaagtccttactacaaagactactcaaaatgccccgaaatacaaggctaaaaccctatactactagaatgaccaaaatacaaggcccag

SEQ ID NO: 36994 - DNA, 275 bp, Glycine max
  unsure (1)..(275): unsure at all n locations
cgatctagncaaagtctgagagaccatacaagtttcctaacgatttctaattatgtgggccattaagtctatcatatgctgacaatagccgagaagcccatgaatctcttcgggggcggagtaggtgtctgccatcgccttggccttggctaacaagcggngaagttcttgactcccgttcaaagtaagagcaaaccgatccatccacatggttgcctcttggttaaagagtcgtcactcttctctagcctctttttgcgtatactaagcatact

SEQ ID NO: 36995 - DNA, 328 bp, Glycine max
agcttgtaggattatggggtttccatcacatgtggtactaggtggcggtcgggcgatggtgcacaacaatttttccacatccacaaatcgtgcataaacccaccatcccctgttgcccaccttcaactgagctcacgtactcccacgtagcccatatcctcgtttctctcacaacaccgggtccccatcaatccttccaagcttccccaacatccaggtaatacaacattcaaacagcacaaactatcacagccaagaaaacagggcaaaggcagaaaactctgcccaaaacaccaaccaaaatcacaaccaaaatcacagcttttct

SEQ ID NO: 36996 - DNA, 467 bp, Glycine max
  unsure (1)..(467): unsure at all n locations
ggcatgacctggccatcgttngcgccttagatctcagctgagcaatgcaaccaaaaactttagctgttttccgttgagtctcaaaatatcagacgctcgtaatgaaacggaagctctacaaattcaacgaacatacttgaacttgatttcattgagcctgaatatatcgagagcttggaatgaatatagaactctgagatatgaaacgacaataattttaactggatggcgattagtcccgtattttccgacgatagaattaaacggagctcgacaaattcaacgacatattttaactcgatgagcccgtatatatgagacactggatgaaacgaagcttgagcaaggtacgacaatactttactgaagtcgataagtccgatatttccaccttaattgaaaggcctgtccattcacgacatgtttaccaaggggatgaccgatatataacctgattaacggtccct

SEQ ID NO: 36997 - DNA, 328 bp, Glycine max
agcttgccacccagctcgcctatgcgagcagggttgcttcctccagaagcaacagccttctggaggaatcttctggagggcccaagtgggcctggttgctatttgcacccccatttttgctaagtacacctccccttgcctttttttggtgattctttttttgtaaagttacggaaacttacgaatttcgtaacgatacttgttttctttccgtaatgttacggaaccttgtggattacataatcattccctttttgacttacggaatgttacggaacctcactaattgtgcaacgatgcttccatttgatttccggtgtgtcacgga

SEQ ID NO: 36998 - DNA, 218 bp, Glycine max
gcggattggtcttcgccagtgaaaggatcgaagtggatctgttaagaggcaaatttaatcatcctgcttagacgaatgagaaaactggtgcaaataaagagggtgaggatgagggagaaacccatgttgtgactgccatccctgtacggccgagtttcccaccaacccaacaatgtcattactcagccaataacaaacctcctctttacccaccaccc

SEQ ID NO: 36999 - DNA, 328 bp, Glycine max
  unsure (1)..(328): unsure at all n locations
tagcttcacaaaagtttatattgcttgaaacaagcaccgttgcagtggtgcaagaagtttaatgagttaatgagcaactcgggattcaaaagatgtgacatggaccattgctgctatgttaagaaatatactaatagttatgttatctttgtcgtgtatgttgatgacatgttgactgtgggatctagtatggcnnaaattaacaagtcgaagcatcagttggcagaaaactttgaaatgaaggatcttggtccagctaaacaaatccttggtatgagaattcttagaaacagatcataacgaatcttgtagctgtctcacgagaaat

SEQ ID NO: 37000 - DNA, 327 bp, Glycine max
agctttctttactgttttattttgtctgtgcttggcgcacactttcgctggtgattgatctagccccccttcctcaatatgatttagtgtgaacattgaataaactgtctctagcgctccatatcatcactgttaatgagtccatgcctctgtttatatgaaaggaaaataatgcgtgtggcgcgccctttatattatatatatacaccccggggatgagaatcctctgatttacattgagctgggacgtgacatgaaaaccacacttatgccttagattgctttgtctttcggacaactgccatatggataaagctacaaggacta

SEQ ID NO: 37001 - DNA, 466 bp, Glycine max
  unsure (1)..(466): unsure at all n locations
ngaagaaccatctaatctcaactgttgttcacattgctcaatgctaacatcaaataaataatctaatactaatacctcttgattcaaacacattcattatgccctaccgcatttttggggagcaagaattcttcacaatgagtatatcattcctaaaataagtttttgataatattttaaaccaagaatggaagctagatcgcaagaagtacatcagcttcattatcattntcttcccacactccaatggactntactttaggcaaaaaggtatatactcatgctaggttctgaatgtgctcctagctgtgtaactgcatactctaaatatccgaaatcaacagactaacagtggaattggcgataactagtaatggccatcttatactcatacaaagtacctagataagtctccttgctttatttcaactttgtaagaaaaaagaatacaagcttgctctatttg

SEQ ID NO: 37002 - DNA, 324 bp, Glycine max
agctttcttgagaaatttttcttgagaagattctttgagaaaacttccttgagaagctagagcttatctacacacacccctctgataactaagctcacctccttgagaagcttccttaagaacattcctaaagaagctagagcttagctacacatacctctctaatagctaagctcacctccttgagatgagaagctagaacttagctacacaccccttataatagctaagcttacccccatgaaaaaaaacatgaaaatacaaagaaaaggccttactacaaagactactcaaaatgccccaaaatacaaggctaaaacccta

SEQ ID NO: 37003 - DNA, 250 bp, Glycine max
  unsure (1)..(250): unsure at all n locations
gtgtcaacatgcaattagaaaacaatcacatctgggagcgtcctatcttatgatatatatatctatatacatgcacatatatataactttgtgacaggcattctatgatgtatatacacnattnttgacaggcatcttcatgctacctatccacatatatacacatctttgagacgcatcttcatgctacctattcacatatatacacattgttgaaggcatcttcatgccacctacccacatatataca

SEQ ID NO: 37004 - DNA, 314 bp, Glycine max
aactattgcttgtgcaagcatgtatgttgaatgggcatgctgaggctgtaattggatatggaacagacaatgctctcgcattaaatgagggtggcaaagcattacttattcctaggatgtgggaatagaattaactcagacccaagcactagtttatacggtgagggatgatccccactgatacacgatttgtgtaatatccaaaacatatgggtataagcatgcgctgatattattatatcagatgcatgttatgatgatgatcagtattataatagatacgctatgtgactatgaccgatgccaatagtgtt

SEQ ID NO: 37005 - DNA, 330 bp, Glycine max
agcttcaacatcaggattcttttaatggctatggcggatatcaccatgaccgttaattaagaaaaaaattatatttaagcatctaattaaagtaattatttttagggatataataagaacatttatctataatgcacctaattaaagtaattatctttagagatcatattataatatatatctataatgtgtctaattaaaataattatctttagagatcatattaaaatatatatctatagtgtgcctaattaaaataattgcatttagaagatctataaatagttggagtttgaactctcgggattcgaaattcattatacattttac

SEQ ID NO: 37006 - DNA, 255 bp, Glycine max
  unsure (1)..(255): unsure at all n locations
tagttcaagtggcactcttgtgcacacaatatctttcgggccacaggcccaaaatgtctgatgttgtacgcatgcttgaaggtgatgggcttgcagagaaatgggaagcctcacaaagtgctgacactaccaagtgcaaaccacaagaactctcttcatcagataggtattctgacctcattgatgactcttctttgttagtccaagccatggaactctcaggccctatgatgtgaaccttacggngcggatcgc

SEQ ID NO: 37007 - DNA, 315 bp, Glycine max
tgcttgtatgaaccaacctatttttctccaagatatgatgactcgggccggatatgacaaaacccacaccagaactatactcaccctagattcgaaattttgagcttttcgagaattttcatactacttaattcatggacttgctgcaatttcaacatgagggactatgggggatctatactactgaatgtatggggtggaggtgatgtttttggtacatgtgttgttgaaaacaatttgtgcgatgccatcattgttgtatggtattgaattggattaatagctaatgggttgtcatttttgctataaacgatg

SEQ ID NO: 37008 - DNA, 331 bp, Glycine max
agctttgtgtaatcgattacttggttttggtaattgattaccagtgacaagttttgaataaaaatcaaaagatataattcttccaatggttttcaggtttttctaggtggcaaccacctcctccgttttgtttaaaaatgggcttccgggacacccgtaatgctttcgtaaaattcccataatcctaaataagcatatttcatttaaaacgggtgagaaggaagagaaaaaagaataaaatcaagttctataggcttccgtaacttttccgtaaattacgaaagaaggagggtgaacttatcaaaatagggggtgcaaatagcaattttga

SEQ ID NO: 37009 - DNA, 575 bp, Glycine max
  unsure (1)..(575): unsure at all n locations
tggaatgatcgcatcatncngcgaactatacatactcaagcttctattttcagagatgaagatgaatctgtggccacctcatggtactcctctatgaccatatgcataattcttgcactgaatngtgagttgaaaaccatcttctcaatcaaattcctagcctcagcaagggtcatatcaccaagagctccaccattggcaacatcaatcatactccctctcatgtngctaagtcccttatagaaatatngaagaaggagtngctcanaaatctagtggtgaggaaagcttgacataatttcttgaatctttcccagtactcatacaagtnttctccactaaggtgcctgatgcctgaaatgtcttttctgatggcagtggtcctagatgtagggaagaatttctccaagaacacccctctaaggtcatcccagctaaaaatggacttgggagcaaggtattaaagccaatcttttgccactccctccataaatgaggaaaacctttaaaaaattgatcttttgacataggcgctcatggggacaacaattggactccaagagctataggactcn

SEQ ID NO: 37010 - DNA, 285 bp, Glycine max
agctaaagcttgatttttgattatgacggaggtacattttaccatagtcgtagtgcaccttttcggactaatacctttacgaagctatatataagacttttgactttgcaaaatcaatcatgtgttcacttttatcttttacaaattttgagaaaaccttgcggacttttgagagctataaagtgtggacaacattgtgaggacagatagtgaacattgttactaccttattggaatggcacgtctaatctgtattataatgctaggtttgctttgaacatgagc

SEQ ID NO: 37011 - DNA, 151 bp, Glycine max
cccgggacactaaaccacctgcagcatgcaagcttcaggatcagcaaacgtttaatggtaatggacagaatgacgagggaacgttgagtaggaaaacacaagaacctaaacaacaaagtagggtgacaagcgccaaggataaaataagagc

SEQ ID NO: 37012 - DNA, 196 bp, Glycine max
atctcaagactaactatgacaggatttttcttgaagaaatagctcaagcggcactctggtgcacacaatatcttccgggccacaggcccaatatgactgatgttgtacgcatgcttgaaggtgatgggcttgcagagaaatgggaagcctcacaaagtgctgacactaccaagtgcaaaccacaagaactctcttc

SEQ ID NO: 37013 - DNA, 329 bp, Glycine max
agctttccattctcttgggagttcatcattggatttgacttcttctggaggatcttcattgattcctttgtcatttcctttggaatcttgttcatgaatgttcatatgttctaaagaatctgcagtgtcatctagcatattctttcttgacaatatatcattagattcatcaaaggtaacatgaatggattcctcgatatacatagttcttttattatatatcatatatgctttgctttgtaatgaatatccaagaaaaataccttcatcagattttgcatcaaattttcctagattatctttaccattattaagcacaaagcacttgc

SEQ ID NO: 37014 - DNA, 328 bp, Glycine max
agctttgacttgagtcatctttgagattataaatatgagaccatgggatgagttgaattaatgaatccttcaatatctttataaagaatcatcagtcatctatctttcaatcttctctcaacatcattcaatatctttcaactctttctactgaattttctgattcatttctcttcatctttctaaaactttttgatcaacactttctcttccaagaaaagttctttgttcaaaaacttgtgctattcagccttttcattctcttcttcctttgccaaaagaacgaaggactaaccgcctgaattcttttgtgtctctcttctccctt

SEQ ID NO: 37015 - DNA, 330 bp, Glycine max
agcttcagggatatcaaattttggctgacgaacaataaaataagtgtcattattagtaaattataaattttggctaataaagaaaatgaaagatgagaactaaaatacctgaatatcctcccatatcaaatccttatgagcagcagggacttccttccaagtgtcgtatgtcacatcaatcttatcccgagcaacaatccccaaatatgttcttaatttcttctcttggggaccatcggccttccctgtcgcaggatcgacgtggaccaccggtctctctgccccaggcgggctaatggacaaagatcgtagccatgtgactttgcttgt

SEQ ID NO: 37016 - DNA, 92 bp, Glycine max
agggtctggattaaaaagtggagaatctcttttataggccccatggaatggggtatccatatatcccagaattgatgcatgcgctaatactt

SEQ ID NO: 37017 - DNA, 323 bp, Glycine max
agcttgttatcatactttttatttgttttagactcctttattttctacatctcaaattatctaaccagattcagggcttgcattcccttaatcctttcatctccttcgtattcattcttgagaaaactccaaatttcatatcctgatttgatggtcattattctagtgaaaaattcttttgagacaacagcaaataaagaatctcttgcctttgactttcttgctttcctctccttttgatttttatctgagccattgttggattggttggtaaaggaagaacttcatagtgttcctcaaccacttcccagagatcatttgcc

SEQ ID NO: 37018 - DNA, 103 bp, Glycine max
atgtgagtcataacccctggtcatttctatcatcacttatacctctctctatgttcatttaattgctctattataaaaacccacaccacaagaatatttaaat

SEQ ID NO: 37019 - DNA, 225 bp, Glycine max
agcttgagattaggatttgttcttaggtgaaactatctgttgttatcgctgaccacgaaatggtaccactacaaatgatctgcgggatactgatatcttggggacatctgggggggggctattgcccgctaccttaattgtccatgaccaacccaagtcgtgcatcttcaggcatagaacacccgatacgtacctaatcacgcgaccttcagacaatattcatat

SEQ ID NO: 37020 - DNA, 344 bp, Glycine max
acctgcctgctgcaagcaaactgaatagctaatttttttttcaaagccttaatatcggaccagattcacttactgcaaggcgtgacaacatgtttggagagaggaaaaagttgtgctctacgtcctccttccactataagggaaactaactttcttgggacaatctttgatctctagaatgaaaaaaatcgtcccgcctggaactaacaatgtagagattctaacaaaataattttattataggacacaaatggaattccactactcggagccaataagccttcatattctacgaccgacggacgtcatatcttatttatctcattaaagtcacctcatctata

SEQ ID NO: 37021 - DNA, 246 bp, Glycine max
ctattgaagaatcatgcaatgtgtgaaaagatgatcctttgagaattatctaagccatcataccttagatttaatatgtcatgaatttttgtatttggaatattttggagtgttgtcaattcacttttccatgcctctgtacttcttacttcttgaacgaagaattgaacccagaacttttaaagccaaaggaataccttcgcaataagaaattgcacttgctgatagatcttcatatacaagttt

SEQ ID NO: 37022 - DNA, 439 bp, Glycine max
agcttgtggattaattagtagttgagtgtgttgtctatatatataatcatatcaaatatcgtagaagggagacacaatttactcgtttattataatcttatttgattcgagtgaaaattatcacttgtcataaatacatattacatctacaaataacaataaagtttatcatatatgtgaattccacttatgtttattctgaaccggttgtaagctcggattaaggagggaagttgtgttataccattggcaccaacttaaaattcgcctttatacccaacatggatacttgtgatttcttaaaaaacattaaggattaccaactacattatatgagctgtaataatttatatgggtcacctaactacattagaagtgtataatgttaaagattatgcactcaacttaactacaacacccttataagaccagttctacc

SEQ ID NO: 37023 - DNA, 596 bp, Glycine max
  unsure (1)..(596): unsure at all n locations
tcatacccgtgtaactcatacactantgtcngttaatnattcttcnnntanaaaaannaaaaanaaagggatgtgagtgatgccnatccagnacngnganactnnaaggcgagctgcagcgtgcaagcaccaccttatggtgcactcatagtgtgttcatgagacaacatgctgtattataatctgccactccaaataagccttctgatcattcttttctttatatggaagaatgctgagactaataccaccacattcgtgttgtacacgaacaacatcagtacctcgtgtcctgctttcgtactcattatgagctatatactccgatggagccaacctctcatggatcgcatcatcttgttgctatagctaccgctcgaaagttgcattaaagcatgcattgggaattgctaaacccccactctatcattaagattagtacctgacatctcagaccaacaaatcaaacgtaactagacaaaaatagtggctgttcgataacctcccccgcaagtggatgacacggtatggatgtctctaaagaaaactcttgcctctacactcaactaccttgagttcttagcaataagagatag

SEQ ID NO: 37024 - DNA, 246 bp, Glycine max
gcttgtcctatagatgtgaggcatgtcccgactagtgcgcctctctcttatctctactgggaagctagatgatgctagtctgatgaactactttggtgaatgaatgtggaagctcaccatatgaattccattcatggctcgtggtatgaatgaatgatcattatacatgatgctagctcagctctgcacacgagaggttaacataatcactgatgataagaattatggcataaattacaagggcat

SEQ ID NO: 37025 - DNA, 183 bp, Glycine max
agcttaataaggggtttgattaagacacctcacctaattttgttgtaatccaagtgagattaagacccactacatcaggcaacacaaccctagatcgccctacggtgtgcttgtgtattgagaaaaaaggagggaagagctctcattttctctcttgcttgcggcctatgctgtgaagaatga

SEQ ID NO: 37026 - DNA, 295 bp, Glycine max
gtgacttttgtaagaatcttcataaacaagtcacttgaaaaatcgtgactcttggaaatgtatctgtcgaaatcagtcactggtgatcgattaccattaaggtgtaatcgattacacatcaccagatgtgactcttcatctatatatttgaaccattacatgataataagctctggtaatacgctacaagtgttgtgttatcgattacataattctaagatgattttacacttgttaacgcacgctgccactctagaaatttgaaatcgtaacgttttaaacactggcaatcgat

SEQ ID NO: 37027 - DNA, 416 bp, Glycine max
  unsure (1)..(416): unsure at all n locations
agctngccacccagctcgcccatgcgagctcatcttgtctatgtgagctaggttgcttcctccaaaagcaaccgtcttctgaaggaattatctacacagcccacactggtctggttgctatttgcacccctattagtactaaatacacccctttctcttttgtggagaatctttctctcgtaatgttactaaactttagcgaattcggaacgatgcttgttttctttccgtaatgttacgaaacctcacggattacgtaatcatgcctttttttcctccggaacgttacgaaactttacggattgcgcactaacactttctcttaattccccgcatgtcacaaaacttcactgattgtgctacaatggcttcttttgacttacggcatgtcacgaaacttcacaaaatgcctaacg

SEQ ID NO: 37028 - DNA, 400 bp, Glycine max
  unsure (1)..(400): unsure at all n locations
tcggaagaaagtgatgaggtacaagccctaaaggcagagcttgaaagagcccgggtagtcgaagaaaagttcaagtccatagccatcaaagtctgaaaagagtatgatgaactaagggacgtcaatatggccacagctgaagctttggaacgagaaaccaagaaggcccgaaaggaagaacacgaccaaagcaaagttttgaggggctttatagggcagcaatagtgagctcaagctccgaagaggtgaaaggaatcatcacgggtcaaaggcatgatcttgaaggacgagctaaaggtttgccttatgtcgaaaagaaatttgtcccaacagttaagcgagactgaatggaatatgtgggccatcatcgataagtgcanagagaagctaaatctatcag

SEQ ID NO: 37029 - DNA, 446 bp, Glycine max
  unsure (1)..(446): unsure at all n locations
agcttctcgatatattatgcacctgaatcagacttccgtntgataagttgtgaccatttgaatttctggagagattccgttgtgcaattntgagcgtctcgatatattatgcgcctgaattggacttccgtgtgattagttatgaccatttgaatttctcgagagcttccggtgttcaatttccagcgtctcggtatataatgcgtcagaatcggacttccgtgtgacaagttatgaccatttgaatttctcgagagctttcgttgctaaatttcaagcgtcttgaatataatgctcctgaatcagacttccgtatgagaagtgatgaccatttgaatctctcgagagcttccgtggatcaatttcaagctgctcgaatatgatgccctgtatccgactccctgtgaaagttataacctttaattcccaaagcgcgtttgttaata

SEQ ID NO: 37030 - DNA, 295 bp, Glycine max
  unsure (1)..(295): unsure at all n locations
gcgcctgaatcggactgtgctttgagaagatatgaccatttgaatntctccagagctttcgttgttcaatttctagcgtcccaatatattatgcgcctgaatcggactttcgtctgacaagttattaccatttgaatttctcgagagcatatgttgttcaatttcgagcgactcgatatattatacacctgaatcgggcatccgtgtgacaagatatgaccatttgaatttcttcagagctttctatgttaatttcgagcgtgctcaatatattatgcgcctgaatcggactttc

SEQ ID NO: 37031 - DNA, 432 bp, Glycine max
  unsure (1)..(432): unsure at all n locations
agcttcaccttctggtcctcctcatagttgttgcatgagaaaacatgctctantttcatctcccactccaagtaggcctccggatcattctttcctttaaatggaggaatgttgagtttaataccatcaattcggttttgtctaggaacaccatcattccctcttctcctcctttcttcttcattatgatctctattctccatttgatccaacctctcatggagcgcatcatctcgttgtttcattaacctctccaaatgttgcatcaaagcttgcatttggaattgcgaaagccccactccatcattangattagtacctgacatctcanacaaacaaatcagacgtaacaagacaattatagttgctggttgaatacctcacccactcaagtgtatcacacaattatggattttctctaatgaaacactc

SEQ ID NO: 37032 - DNA, 156 bp, Glycine max
  unsure (1)..(156): unsure at all n locations
ctaagcttctatctcgaaatatgtgccanaatatgcagctgtggtctctcanaattgtaccctaattctgacaattcaggctgtaaataggctctaaaattgtgacatcgtgcttagcgccacccttgcgcttagtgtgagtaagtggatttgggc

SEQ ID NO: 37033 - DNA, 409 bp, Glycine max
agctcggaatgtagtcataccacacaaaatatatatatgtatgttgaggtagaaagataacttagatatgcatgtatgtaaacaaaaacacacttcacaaaatatatatatatgtatgtttaggtagcaagataccttagatatgcatgtatgtagcaaaaagatacctcacaaaatatatatatatatgtatggtagcaagataccttggatatgcatgtatgtagcaaaaagatacctcacaaaatatatatatgtatgtttaggtagcaagataccttggatatgcatgtatatagcagaaatacctcacaaaaatatacacatgtttaggtagcaaaatacctcatgaaaaaaaaaaaaagcaaactagagaaagaaatacacaaatgataatgatcaaaaaaaa

SEQ ID NO: 37034 - DNA, 387 bp, Glycine max
  unsure (1)..(387): unsure at all n locations
gtgcgggtctgggagacgaaggtcaagtgttcgcgatatgtgaagatgatgttccaagtacttcggatttggtccgaccatgccctcctgatttccagctgggaaattggcgagtggaggaatgccccggcatttacgcaacaagcataatgtaaacctttacggttttaaaagctctatagttgggcctaggctttagagttttcgttttgttaaggctntgtgtcttttgtttttgaatttataatacaaggatctttcttcatctgttcctggtctctacccattctcattcatttgcatgtttacttctttttctgaaacggcagattcgatgacgagtccnccgaaggtactaatacctgngacccgtctatcaacttcgag

SEQ ID NO: 37035 - DNA, 156 bp, Glycine max
acacttgcaatgtggttttcaagtgatggacataaatcccgcctacagctgtcttttggggagaccttggattcacgcgctaggactggttccttcaacacttatccacacattgaaatacgcggttggtggactctttacgatagtgtcgcgtga

SEQ ID NO: 37036 - DNA, 475 bp, Glycine max
agggctgtgctcatgacgacgaacataatactatcttgcaccatctaaagaactggtggcgggtttaatggtctgcttaaacagcattatatggttgttatctaatgccactctgttcaaggacgatggaagacatactgacttgttatcattgacatgattttgaacaccatttctggattgagagttggtgctgccatgatgtcagctaatggattattggatgaataccacgtataaatgtgcggtggggtatgcttacctcgactacttcccttatgtatgctgtcctaattcttgttactagatagacaatcttgatactatcgttaaaatggttatatatctatatatatggtgactattccagtgtcttagggatttcttgatctgatttacaatattctacctaagcatgtgttcttactgctgtaggtttttgtctcttgaaattgtttaactcaatctctatctt

SEQ ID NO: 37037 - DNA, 376 bp, Glycine max
  unsure (1)..(376): unsure at all n locations
tgttcttcgtataattatgtagcacagtaattggttggccacattggcatataattcaattatcatgttttgctataagtttcaaattgtccttacttgtttggtgaattaatttgggagtttctagtcaaagatctctaagtttaaaataatagtatataaattctattagagcaactttgacctatcttacttcaacttcctcattgagaataaagaaattaatatgacagccatatatacttacattgcacttattaccagcattgcttacatgagaataaagggatcccgatgggcattttgcaggtccttaaaaaacggaccctaacatcacgtcaatgagaaattcaatanttaaaattgatcttataat

SEQ ID NO: 37038 - DNA, 444 bp, Glycine max
  unsure (1)..(444): unsure at all n locations
agctngggaccactatcctctgtaaatattagaatagggctttcttcttttaggcttgctgggtatactacaaattaagggcaccctaccctacaaaagtgaatttcatttaattagtgacctaggctataaatagaaacatgtgtaacactttcacaactttgatgaatgagaaacttgtgagaaacacttcaaagttcaacttctctgcctctttttctccatcaatttcgtgctcccccctcccctttctctctcacattcttttcctccattgaagcttactctctaagcttcttatgcaaggcactctcttagtggtgaagcttctncttccatgacttattccctagtggatggtgcctcctatcacctcttctcctttatcttccgctacaactccaggggtgaaaatcaccattgaaggacctcattgaagctcta

SEQ ID NO: 37039 - DNA, 334 bp, Glycine max
  unsure (1)..(334): unsure at all n locations
ttgatgcgtcacatctaanaccaagttcgatggtagtacgagcctntgacggtagtccgcgggaggtgatggtggaaatcggcatccccattcagataggcccccacacttgcaatgtggtttttcaagtgatggacataaatcccgcctacagctgccttttggggagaccttggattcacgcgctaggagtggtcccttcgacacttaaccagaaattgaaattcgcggttggtggactcttagtgatagtgtcaggtgaagaagatatgttggtgagctgcccctcctccgcgccatatgtagaagtagaggaggaatcattggaaacaac

SEQ ID NO: 37040 - DNA, 502 bp, Glycine max
  unsure (1)..(502): unsure at all n locations
aagtcacctgcggcatgcaagcttgaggaatcttagacaactactagagatgctactatcactattggaatacacacatgagcccacttagaggtaaggaatgagtttatcgcaattggagttagaatgaacatgtgtagggatccttaaaggattaaattggggtttattttgggatgtttattgaattataattttccttcatgattataaatacaatattgttgtttttgacggaccaattgatgttntgatgtgaattggttgataaacttgagtgctcttgatgttttcgtgtttttaacctatgattttgattcattgattctaatatgattgtgtgaaattgtttgaggggttttactccccatattgaaagaaacattttgtataaattgttatattgagattattaaattgtgattcanattatgagtatgtgacaaattgaaccaatgatgaatcgtgaaatacatgtgtattgagttgtgagctatgaact

SEQ ID NO: 37041 - DNA, 480 bp, Glycine max
  unsure (1)..(480): unsure at all n locations
gcttatacctctgtcatgcattgaagagagactcagatgtcatttgtcaaaagctagttatcctttcctttatagctatgattntttattatggaaagaattgtttgaaggacttgtctttgatgtgctcccatgacgttatactatggtgtagctgacaattgaatcatctaagtgcacttccccctaatgaaaacggaaaaagttgcatctcgatgcgactgtctgtgattttggatgttcctactgatgtgtatatttgttggaatcacgtgaggtgggtgtgcagtactttgtgcaggatctcacaatctgatgtgatgggcatagttatgaactcgctacgagatcaacaccctgctgactcaaatgtacaatctaatgaagaaatattattattattctnaagatggctaatggtattttggcattctgatataactaaatgaaatctattaagataatgtttgcctaaatttt

SEQ ID NO: 37042 - DNA, 528 bp, Glycine max
  unsure (1)..(528): unsure at all n locations
aggaaatgtgtatcgttgcatcgatgcacntacgnacactatagaataccaagctcgtcgcctgagtggacatgacacatgagaagactcgtggattaccatagacgacctgtaacgagtcaggtatctatttacaggacgtgcaatgaaatcagttggaaaggtaacacactgcaggtcacgcgcttacgtaagcggacacacaagcgtcaaacaattattgtcatgtgatgctaggggtcacgacacatatcctctattacaagttaaccacatgtgaccgaaaaatggactttgatcagtatgtgcattcatccgaatcgatttcgggcgtccagagaaagtgtacagcactcacccatgaagtgtatacacaatatccaaatatgggccttcatcaatgtatgacttttttgagcaaatgcggtgtgaacctactaaagcagaccgtttcagctgacactacttatatattcactttggcatctgcaactatctcttgattttcttacatcatcgtcatttacg

SEQ ID NO: 37043 - DNA, 324 bp, Glycine max
  unsure (1)..(324): unsure at all n locations
agcttattggattgtcatgaatcgaaccctgttctntaaatgattatctcctaataccttgtttggattctaggagagcatatggttcaaggaaaatttactctataattgggggagaaaagatgaaaagaatgaaaagaaaaaggttaagcatcagcacacacaacaaataagttgtatgttaaaaaaaacagaagacagaaaaaaataagttgtgttgttacaataaggtcagaagcaaattaaaaaaaaaaaggaatagtgataaggctatcttttacaaaacaagaaaagatcattgggattagtctaggacttgtgctc

SEQ ID NO: 37044 - DNA, 525 bp, Glycine max
ttctgaaactatttatttgatattattattatattttaatagaaagggatgtcctgtgcctgatacggccatctactcccacctcttacgcaagctaccgtgaaggtttttacacattccgagactcagaggtgattcgcacctcctataaccactcagctaagcctcctgactagctatgtgagttttcaagagatggtcatatacacagactactcctgatgcttggagatacattggataaaccctcttagagtgtgatggtcaacatcttaccacaaattgatgatcgacgtttggtgactcttaagtaataagttggataaaacaaattttggtggccgcccctctctagccttatttataacgtggtgggtacctcgttactaccttaatccttcgagggagtgtagtgctctcggaaagattgagttctccttcattctatgcgactatgtggcacgggtaagtattgctcgtatttccagaatgctcttgcacgaaatcctgaatctgtttgtaccc

SEQ ID NO: 37045 - DNA, 425 bp, Glycine max
  unsure (1)..(425): unsure at all n locations
ggcttgtttggtatgaaatgagtgtttgaaagtgatttggtttancaaattttggttgtcagattgattgtgaaggaatgccttaaccgtatcccggtgagagtgtgatccttaaattttgagagaaacgactatcatttagtactgatttttgcgtgaatctctgaagtatggactggatgcatgaatttgaggatgatgaaggccatgtttgattatgaatagccacttagccaaaaagctgaccatatgtttaaacgaattatcccttgcacccagcttgagctgaatgaattgattgattgattgaaccacgagcctattcagntgtatcttctgctaccttatcttaggttgtaggatagcatcatccacagaagctgggttcaaagaaaatttgttccaaatttgggggagttattatc

SEQ ID NO: 37046 - DNA, 447 bp, Glycine max
  unsure (1)..(447): unsure at all n locations
tgtccttagatccctcttgttggactagacttagaccaaacaacattattgtaacagtatatttaaaaccaaaacttaatccgcagatccgtcatttaagactaagtttcaattctgcttcattcaagttctaaggcaacaatacatttcccaatgctaaagtcacctaaccaggcacataaatggttgatcaaaccaagagcatacataatttaagcactaaaaaaagcattgaacacaagaaacacaatcaattacatattaaagtaattacatcagttgttctttagaaatccccaacaagggcttttagccaaccattactgaaaaacccctaacaataatgagattacaaaacttaggtatctctacaaaagctgctcctcttgtngcctctatagctcttttcccgaaataggcattgtggtgtgctctagaaattctgtc

SEQ ID NO: 37047 - DNA, 499 bp, Glycine max
  unsure (1)..(499): unsure at all n locations
aagtcacctgcggcatgcaagcttagactgagttcagcctaccatcctcatactgatggccaaactgaacggaccattcagtcattggaggaccttataagagcatgtgtcttatagcagaagggaagctgggagggttttcttccattgatagagttcacttataacaacagttttcattctgccattggcatggctccctatgaagctttgtatggtagaaggtgtagaacacccctatgttggttagagcccggagaaggcctcacattaggaccagaagttgtacaacaaaccactgagaaagttaagttaattcacgagaggatgacaactgctcagagtaggcagaatagttatcatgataagaggaggaaagatctacaattcgaggttggcgatcatgtattcttgagagtcactccatggactggggcttggtgagcattgaaatcccgacnactcacacctcgctttattggtcctttccagattctta

SEQ ID NO: 37048 - DNA, 497 bp, Glycine max
  unsure (1)..(497): unsure at all n locations
cttgtacaagaatgaagctctaataccacttgttagacaagtggcctcagatatcttaagaaggtgggggggttgaattaagatattgcaaactatttccccaattaaaattctattttaatttcaatgcaagttccaagttcccttaaaaatgaacttttaaatgatgattcaaactaaacaatctaaatacaaatgtaaagcaataataaataacagagtttaagggaagagaaagtgcaaactaaagcaatctaaatacaaatgtaaagcaataaatccctaagcaacccgcttgagagtttcactatcttgtaaaatccttttacaagttctgaaccacacaaggacaaatcctcctttgtgttcagatttctttacaacaagagaccctcagtctctcaatcccttngagaataagatagaagagaagaataaatctatctcgaaagagatagattgtacaactcgagcactcaattaattccttattgaat

SEQ ID NO: 37049 - DNA, 102 bp, Glycine max
cttataaattacccccgccctgcactcattgatgtctgtgtaatcattaacactctgccgaatggaaccatccaaacggcagatgaactgaatccccgccct

SEQ ID NO: 37050 - DNA, 480 bp, Glycine max
  unsure (1)..(480): unsure at all n locations
gcgagctngagatgaggaagtgtggaatgttgatttttttctgcttttattgtngaccacagagtggtacctggagatatgtcgcggaggtcatgagaccttggggacgtcaggtggggtgctattgcccaaaaccaagcttaaccaatcccgacccaacccgggcatagtcggtcagtgagaacctgtgatgtacctaagcaggcgagctcctggcagtcaacagataaaaggaaaacaagaccacaaagcaaggaggcttgtggtggctggccagctatgaattttgtgtaatatgtgagatatggcctctggtaatcgattaccaagggtgggtaatcgattacaaggcttaaatatgaagacaggaggctaagatggtctctggtaatcgattaccacggggtgtaatcgattaccaggcttgaatacaggtcacgaagctatgaagcctctgtaatcattaccaggggcgtatcg

SEQ ID NO: 37051 - DNA, 500 bp, Glycine max
  unsure (1)..(500): unsure at all n locations
ggtagaatggctagacatgatacatgtcaggacttggtttggttcaaggataaaagggatgccccacattatttccatgacacaaatgcaaaaatgatgatttggaaactntatgcaaaactggtcatgcatgcacctatgcggacactcaagtgtcaaatttttatggtcatgtgatgctagggctcaggattcatttcctctattttaaatcaacccaatgtttccaaaatatgttcttttatcaatttgggcattcatccgagtccatttcgggcgtccggggaaatttcacagcattcacccttcaggtgtagacacattttccaaaaattggttatgaatcaatgaatgaatttttcaaagaaaagttggaaatcgtctcttttcaaaagcatgtcggtttttcagcttgacaacttattttctctttttccaccttttccttactngccnntctcttttctttttcttttctttccattcaatcattcattttt

SEQ ID NO: 37052 - DNA, 421 bp, Glycine max
  unsure (1)..(421): unsure at all n locations
ctccttccatggcacatgacttaatgagatggcgcctcctctcaccatttctgctttatctttcgctgcgtctccatggcctgaaatcaccatcgaaggacctgattgacgctcatagattcaacctccatagaagcttctcacgcaagcttgcatcaaatgttattcttcattgtgatcaccactagtttgtagagacttttcacacagaggagattcatntggacgctcctacagcaagcatgaattttcaagattgggagcatttatactatggcccttagcttataatgaagttatcttcctacacacaagagataagatcaagacaagcttctttttgcataattcanaggctcaacactcacatgcctcttatgttgggtcacaattctcttacctagctactccagagactcaa

SEQ ID NO: 37053 - DNA, 299 bp, Glycine max
gtacagtatatctacaaccaaaacttaatccgcagatccgccattcaagactaagattcaattctgcttcatataagttctaaggcaacaatacatttcccaatgctaacgtcacctaaccagtcacataaatggttgatcaatccaagagcatacataatttaagcactataaaaagcattgtacacaagatacacattcaattacatattaaagtaattacatcagttgttctttagaaatccccaacaagggctgttatccaaccattactgaaaaacccctaactataatgagat

SEQ ID NO: 37054 - DNA, 406 bp, Glycine max
  unsure (1)..(406): unsure at all n locations
ttgcagatttcattggaagagaatgtgctaaagatgatgaaatttcttcttgtgtgtatcataagaattaaaaatatattaactctattatttttatttgaaaatttgtactgaagtaatagtattgaaactaatagatataaagaatagaaatattcaatggttttgacctttccccattttttgcactctcaatttttgaactagtagctccatcttattcatggaactactttatagttgcatctaaagctatcagatcaacttgtattgcctttgtattgtctttccatgagaatctctntctccaaatcttttaaaactgataggatttttatagaatgacattacaaagacaataaaaattgagtctggaatttagggtggaaatttgttggaaaacata

SEQ ID NO: 37055 - DNA, 473 bp, Glycine max
  unsure (1)..(473): unsure at all n locations
gaaagaatgtgagaacctctggaatattctggagatgtgtggaaccttcaggaatcttatggaaaagtatgaaaggatatggaagggagtagaagagtgtagagactcctacaatgtgtggagcattctagagaattaatcttcaccttaggatacaagtaatctccaccattcatcgtggaggtggagtagtataaataagggttggagccttcatttctagcaatccaagtagagagcctctttgagagagaagataaatagctcggaaagtctntatcctcaagcatgagagagcctctttgagagagaagataaataggttggtaagtctctatccttaagcttgagtaagcttctctgagagagaagataaatagcttaggaagtctctatcctcaagctcgagtgaaccaccatagagtgagtcaatccaagagacacgagtgaatccactccttggagtgagaaag

SEQ ID NO: 37056 - DNA, 332 bp, Glycine max
ttattatactaggacaaacagagacttaatcgcttctaaactgatttgttttgtcaatgagctacgtagacaacagcattttcttttgcagctattaagcagacatcgaacggcgagtgtaaactacggtgcccttggccaataagaggctcataatttgcaaatgacatatgcatcaatttgctacttagatctttaagtatactttggtatcatcactatcatgttaataatcactaccgcaatatatagaaaagaatgccttcctaacacagcctagtctataaacaatacatagattaatgtgggaatagaagaatgtctcatatcag

SEQ ID NO: 37057 - DNA, 402 bp, Glycine max
  unsure (1)..(402): unsure at all n locations
ctaagcttctngacaggatcagtatattcattgacttagattgaatgatgaaggtgtcgaacgtgacatattttggagtgatcctgatgcagtcaaattaagcaatgcctataatttggtatttttgatagacaatacctacaaaacaaacaggcacatgtcaccattacttgatattgttggtgtgacaccaacaaggatgacatcatctgttgcttttacctatctggagggagaacatctgaataatgttgtttgggctctacaacggtttcaaggtctttatcttatacgtgatgcagacctttgagttattgttaccaacaaagatctaacattgatgaatgtagcgaagatcgcattctctaatgttaccaatttgttgtgtcaaattcacattga

SEQ ID NO: 37058 - DNA, 557 bp, Glycine max
  unsure (1)..(557): unsure at all n locations
cggtttgatcattcgctccatgacccnacagnnanctgagagctgcactgctgcatgcgcgcttgtgacgataactcatatacaatttcattgtgtcctaagtatctacagcaagaataaatcctatgttgttgttcgactattggttgacttagactctcgctaaatgaccatgatgatataccggacatgatttcacacatatcgaaaaccatactactttcaacagagttctcagttgaatctgttatgcccacgaaagacagggaatgagtcgctttctttgtcagctntgcgngaatcatattatatatggaagctcgcttctcctgctgttgaacaatcttctatagcgtggagtgtgtatgatgatctaccacgcactcaagatactatcggactgatcgactctgagctctcagatgctgcaccaagaagatcgcagcacaacgcgttgaatgaatggctgacatatactaaccatgtcgtacagcgatgccgttcactatataaacgatctttggtgtgaatgattgcacaagcgcgatgtcaacccn

SEQ ID NO: 37059 - DNA, 367 bp, Glycine max
  unsure (1)..(367): unsure at all n locations
cgccgatatagcagagcatgctgtgagagagcatgttttgagcgtccacctatgtcagatatagcatctcgtgtggagcaaatngtgaaggacggattgatcttatatcattaatcattgccctgtgagaaacttgntacgaattttgatccatccacaatatcttctttatcataaatctctgtgagtaatgctctcttctgcgattgtaaatatgtttgagtttgatgtagattgcttatctcctctgtagtagatctttgggtttacttttcctaatcttcacgaagtgaaggacatggcattatagacacatacacacatgctgtgaattgttttcctctcattaagcctagaccattgcagc

SEQ ID NO: 37060 - DNA, 524 bp, Glycine max
  unsure (1)..(524): unsure at all n locations
cgcatgatcattgcatcgtgaccnaccagnnanctctagagtcacctgcggcatgcaagcttgagtctcctatactctgctaatactagtatatgttatccctggttctgggatgtcatgcattctagcattacaaagcctcttcccttcctactgacagagacagttataagcctcctacgctactctattatgacatgtctcacacgtctacctctatgacgactgagatcatcgcgtgactgacttcgacgacgcacttctctctctctctatatacatcatgatcatgctaccatctacccttgctatcttggataaccttcctccatcgaagctatcacggatatgtggtgacgctccgacgtgtgttagtgtggaagcttgttgatatgtgactgatctgcctagggagagagcaaccctgtcctctgctcctgttcttgcgctcatgatctacggaactacaacaccgggtgacctcttggagtgaatagacacgcacttagaatgtgtctacttcg

SEQ ID NO: 37061 - DNA, 516 bp, Glycine max
  unsure (1)..(516): unsure at all n locations
gacggatgtgcctgatncctgcattacggaccttgaaactaagcttctacggcgctactgggaagaagtatgtggattacatcgcccacggtaatacgtgagaggatcgtgaatatcggatcaatccatatagcctcacacttgcggcgtgtgtgatgggacggacttaatgatgcctacaacgcgtgcgtgtagaccttggattacacgcgtggagtggactttcgccttncatcgtaaaatggagcctcggctggggactgttagtgaattgatgcgtgaataatatgtgctcgaggaactgtccgccttcgaccatatgcttaactggaggatgaatcatggtacacgatctaccgatgcttccatgaggcgatgagtgcctctgttgcaacaagatcgttgatctcatgcttctccattgcggccataatggtggtacgggagagcttacgcactgcacgcagcangaatggtgttggtctcgacagcaactgcaatgccaactggtggaag

SEQ ID NO: 37062 - DNA, 477 bp, Glycine max
  unsure (1)..(477): unsure at all n locations
agcttatgagagcaaaattgcctcaatcatttccaaatatgcatgtgaattangaagcatcaacaagaatcaagccaaggctattgtgcaagaaatcaatggggcaaaacacaccaaatgattatgatgatggatggctcanattctcacaaaggtaaactcatcactttcaaattgagctttcaaaactatcatgacatgaagaggagaatcaaggatttcaagtcacaaaatgtcaagaacttttattttcaaaacaattacccatttcttgaacatatcctataattcaaagaaaaacatgcaaagtcgtacatgcacacagaattgacccaaaatattaaactagaaatccgacgaaactaacaacagtaacaaattaacacaactaacaaattaacaaaaccaacaaaactagcanaaccaaagaacactcncttccatacttanacaacacattgtcctcaatgtagcaca

SEQ ID NO: 37063 - DNA, 158 bp, Glycine max
tgcttatcttaacgcataaaatgtcatgctaacctctctgattttagaacgaactgacccctcacccataaacagcctaaacacatatgtgtggaatatcctactatttatatcaacatagaggccatccaacacattctaattgtcatacatatatg

SEQ ID NO: 37064 - DNA, 470 bp, Glycine max
  unsure (1)..(470): unsure at all n locations
agctntatacctcatatgcatcgaagagagactcatgtcatttgtcgaaagctagatatcctttcctttatagcttcaattntctattccagaaataattgtttgaagaactcatctttgatcttttcccatgagtttagactatggtgtcattgagaattgattcattcaagtgcactttcccctaatgaaaagggaaaaggtagcatcttgatgtgactatctttgatttcgagtattcttactaatatggatatttgttggaatcgcgtaaggtgggtatgcggttcttcaatgctagatctcgtaaattgagtgttatggagagtattcatgatcatgttaggaagatttacttgatgttctcccgtatccacttgatgaataggttcatttatatctatgtcttggcaggcttctaatttggtcatggtaggatcttcgaccatttttataattatgtgcaatac

SEQ ID NO: 37065 - DNA, 405 bp, Glycine max
  unsure (1)..(405): unsure at all n locations
tgtcgttgtattgtttttaattactttttagtatttattatgtattttgtgtttgtatgatgttttttccttagtcatgagggtacttaaataaattgcaaaattaaaggaacatgaacataatgtaagtggaaaagttcaacataagttaattggagaataatattttcagcaaaaaatagattttactacttaatccccataatggtgtcctgtttcacatggaggacatctnctattatgtcttggatatcgacgtgggcgttgatatggttatatcatgcaatgatggattattctcttcaacatcttggctaaacatcatattgaaagtggtggagtacgttacccattttgttctgtatgctatgcatgtattcacgagctgatgttggcgtgccacaa

SEQ ID NO: 37066 - DNA, 452 bp, Glycine max
  unsure (1)..(452): unsure at all n locations
agcttggaagtatcaatgtctcacgtatactgtaagggtactgcaattcanaatagtacgattaagagtttaagaaagtatttacaatacaatccactttattgagaaccacaaagttgagtaaaactatgtgctaatgtaccataacgactggtccactcatattttgttntgcatacaggcatccattcaatggcagaaaacttaattctgaatatggctaacagcgaataacattggaaaactcgatatataaagggagaaatggtgtaattctcacaacaactaaaacagattctcagaatttcaagccctatttgagtgtatagtaaaagattatatatctatcatgtaagcagacaatagaagaagaacttgcagatgaggttgatttcatattaccaagactgaattagagataaccaacaacagtctgatgttcatttgataca

SEQ ID NO: 37067 - DNA, 393 bp, Glycine max
tatattagcacacttgatgtccctataaaattgaatatttgaattgaaacattcagaatgtagcaaatcaatgcaaattcaagatatttttatatttaagaatttaatttccaagcactgcatcaaactttcatctttggcaatgattgaaagtcaagcatttttcacttccaaataaaatctgttaaagcaaactcatcttcccatgcaaagaaacatactctgtatctggtttctcaacaattttctcaacataaatatgtgcaaatagagctataacatatagcatatcctctaatataagaacagaaatactataaccattggtaacacgtcttatagaaacttccaggacttaagtagcaaaatattctcttattctaggtcctaaat

SEQ ID NO: 37068 - DNA, 420 bp, Glycine max
  unsure (1)..(420): unsure at all n locations
agcttatgctgcanacatctacagtagacctcctcaatctcaacagcaaaatcagccacaatagaataactatgacctctccagcaacaagtataatcccagatggaggaatcatcctaaccttatatggtcgaatccttcacaacagcaacaacaacaacagccttattttcaaaatgctgttggcccaagcagaccatacgttcctccaccaatccagcaacaacaacaacaacaacagccccagaaacaacaaatagttgaggcccctccacaaccttcccttgaagaacttgtgaggcaaatgactatgcaaaacattcagtttcagcaagagaccagagccttcattcaaagcttaactaatcagatgggacagttggctacacagttaaatcaacaacagtcccacaattctga

SEQ ID NO: 37069 - DNA, 477 bp, Glycine max
actcaagtgtttctgctctcgggataagaagcggttctcacacactatatgacatatcgcagattgcaacggtcagatcgtgggaatctgtcctttgaacctctacaccaaatttcgagaagatccaatggttaacgaatgcctgagggcactcttaccgagacagctcatacaacttccttgagaagctttctcatgaggcttacttgagaagcttcctcatgaggcttcttgggaagctagagttttaactacccacacccttctaatatctaaattcacctgcttgaaatataatatgaatcacacaacacatttaataaaatttaacatgaattatgattactaataatattcgagggtgttacattctctgtcttagagattaacaaaaaacagctaacaaatcatgactcaaactagtacatacttggggaagaagagtagcgcatgactgtttctatattagttcatctc

SEQ ID NO: 37070 - DNA, 278 bp, Glycine max
gtgatccttcagtcacctgcggcatgcaagcttcgaacattcaattcgagcgtctcgatgtatcacgggactcaatcagacatccgagtaaaaagttatcgtcgtatgaattagcgcagagcttcataattcaatttcgagcgtctcgaaatatcacgggactcaatcacacatctgagtaagaaattgattgtggttggaatgggctaggaacttcaacattcaatttcgagccgcctgatggaaacgggactgaatcatactctcgagtaaaaagt

SEQ ID NO: 37071 - DNA, 371 bp, Glycine max
tttagtaatgacccactaacctagaataaaataacttaatgccattaaccttgggaattaaaaaaaacttaatggctgtgtataactgaaattgtggcaaccaaaagtcactcccaatagccaactagtcagccaccatttggtctcccaaaaggctgatgcctaggttgccaattgggcccttattacaacttgaactaaacctactaaagcccttttagttgattaacccaaaacatatttttggtcagccaactttacaaggattgggcccttatttagacaaactaaacactctaaaattaagacaaagtggtgtcatttagtccttctccatttgggccatgatacaactcacaaccttggacttt

SEQ ID NO: 37072 - DNA, 181 bp, Glycine max
gatcttgtcccatgagttgagactatcgtgttaatgagaatcgagtcatatcggcgcactctcccctaatgaaactggaatgaggtagcatctcgatgtgactatctctgattacgagtattcgtactattatggatattgtgtcgcaatcgacaatagtgggatgccgttcttcaatgct

SEQ ID NO: 37073 - DNA, 190 bp, Glycine max
  unsure (1)..(190): unsure at all n locations
ctctgaagagatatgcatggttagggatgagcatttcttctntcgtaaaacttaatcaacattcaacaatctcatttattcgagaagatcgtgatagtgaagaacccttcagagagtatttatcctaattgcatcgtcatgggatgatatactgtgagaatggggttgataagctcttgaagttttatcg

SEQ ID NO: 37074 - DNA, 188 bp, Glycine max
caaattgctggcattgattcgcttactgactcttcttcaagcgtatctgcaaagcggcttacggctcccatcactgcctttataaataacgccacgactgccactcatagcaatgctgtatgaattgattaagctttgtgatcgaaccgaagactgtcataacgcatgataaatcttaatttcatacg

SEQ ID NO: 37075 - DNA, 412 bp, Glycine max
  unsure (1)..(412): unsure at all n locations
agcttangctgagttctacttaccacccacatactaacgattagaccaagcgcactatcaaatccttagaggacctcttgagagcctgtgtcttatagcagcggtgtagttgggatggtttcttacccttgatagagtttacatataacaatagtttttactccagtataggtatggcaccttacgaggcgttgtatggtagaagatgtacgacacctctatgttgggtagatctaagtgagagcattgccttatgacctgaggtggttcaccagaacactgaaaaggtcaagttgatccaatagaggatgagagtagcccanagtaggtagaagagctaccatgtangaatagataggaccttgaatttgttgcaggtgatcatgtattcctgacagtcactccatggact

SEQ ID NO: 37076 - DNA, 438 bp, Glycine max
  unsure (1)..(438): unsure at all n locations
acatgttcatgttgaanacgtcatatcacaagataatgatatgaaacanaacaaagtgctatgtcgctgtcagtttattggacgaaggaaacttgagtaaattgattaaatcttagcttttctaagttagtgagtttcattgtattcaaacttattgtgtaaacactctttgagtgattaaaatacattttgtatcaaacatatattgtttataagagtcaggagtggcttagtgacaaagaatacttgggtcttaatctcagggggggattaagagtagtgtcaagagtggcttagagatactcattatagtcagaagtgacatagagaatacgtggttataatcaaagaattgattaggggaactattaatgttntaattatgttaggatttatgttgacaaagtgtaactgaatcccaattgtcgtactgagctg

SEQ ID NO: 37077 - DNA, 354 bp, Glycine max
agctagccgcccagctcgcccaggctagctcatttctctcaggcgagcagggttgcttcctccagaagcaaccgccttctggaggaatcttctggagggcccaaatgggcctgggtgcttattgcacccccatttttactaactacacccccctctgctgtatgttggagattcttttttcgtaaagttactgaaacttactaatttcgtaacgatacttgatttctttccctaatgttacggaaccttgcggattacatactcatcccctttttgacttacagaatgttacagaacctcacttaaatatgcaacgatgcttccatgtgattttcggcgcgtcacggaaactta

SEQ ID NO: 37078 - DNA, 395 bp, Glycine max
atgcttagttaacctggtaacccagctatcgttgaatcagaaatctatacctgtcgcaaaagtctatggtttatgctcctctgccgaccaccacacagatcttttcccttccatgcagcaacctggagcaattgagcagcttgaagcttatgctgcaaacatttacaacagacctcctcaacctcagcagctaaatcaaccacagcagaacaattatgacctctccagcaacagatacaatcccggatggaggaatcaccctaatctcatatggtctagccctcaacaacaacaacagcagcctgctcctttctttcaaaatgatgctggcctaagcaagccatacattcctccaccaatccaacaacagcaacagccccagaaacaacaaacag

SEQ ID NO: 37079 - DNA, 270 bp, Glycine max
atgcttttatggaggaatatataaagagaaggaggagcaccacattgaaggaataatacagagagagaaatggaacttccaactgtgtctcataagactttcattcattaacgttccaaacacgtgttacacatgcttctatttatagcctatgtagctgtcgcgagatactttcttgagaagctttcttgagaagctcctatgagaagcttctttgacatccattcttgagaagcttgagcttaactacgcacctctctctaatatcta

SEQ ID NO: 37080 - DNA, 463 bp, Glycine max
  unsure (1)..(463): unsure at all n locations
agcttanggttcaagtcaatcaatctaattctcagctcaacatgggtgcaagggataaatcattcatgcacaaggtaagctctttggctaagtggctatttcaatcaatcatggccttcatcatcttcaaactcatgcattcattcagtaatcaaagattcatgcgaaaatcggtacccaatgttagtcattctctcacagttaaagatcacacactcaccacgtagtggctaatgattaccttcacaatttacttgtcaaaccaactaacattttcagtcaggctcctaattcatgttctttctcttctaattactgcatactcattcaaagcatatgatctacgcatcacaattcactcaattcatgccattgatcaatccaaatcattcacacacacaagaatttcaaatcaagtctaaccactgcataatcaaaccgcaaactgttcaacaagcttcaa

SEQ ID NO: 37081 - DNA, 349 bp, Glycine max
atcctgactcaccataaaccttgacccatggtgagaatgccaatccttaccctcggaagcaataaaaaaaagaaaggaacaatgagaaggataatttccaatcaaaggagaaaggaaaggaaattcccaatcaaagagtgggagaaagcaaaaagaatagaaagaaaattcccaatcaaagaatgggagaaagaaaaaaagagagaagttaaaaagaagaaagctcctggtcagagaaaccagaagaaatgtgccgagaggtccttggaccagacaatatctgaacaatacataattgtcaccaaatgaataaaaaagaaggaaaggaaaccacgacctataatggtct

SEQ ID NO: 37082 - DNA, 460 bp, Glycine max
  unsure (1)..(460): unsure at all n locations
agcttcaatctttntaatccttaatttgaggattaattatacttaaaactttntacttctttctaagaatgtatttgtgtgaattgaacttaagtcatctctccttctcactntctcttctacaagcattgttcttccatatcctccattcttttcatgtaatattttgcacctccattgcttcttttccgacagcattccattttgccacgaataagacaaaaaaactagttcatgttatgtcaactttgttaagatacaaaacagtcataacaaatacttgcaatgaatattttgataaaattttgacattntcgtcaagggtatttttatcaacaacaaacaagtgagatgggaagttcgaaatcgtcagtatcatgggccatcccanatatataaacctctataagaactaaacagccatataatatattacagtatcgcagagctgacaggatat

SEQ ID NO: 37083 - DNA, 450 bp, Glycine max
  unsure (1)..(450): unsure at all n locations
ngcaatcttaggcacataatgaatccaaataagtgaaaccctatctcgccttgcatgcaataagaaaaatatgaagctctatagaatcaaaatgaataagtcgggaaaacaaaaagataaatatacatgatgctagtcgaaaggaactgctatgatcttgccacttgctagtggtataacatattatattatggtgtgtaatactatgaatgccatgacatttaataagtacataactacaaagagcctaattcatgaaaagctttaggggaggcatcataatcatatctataacgtgattagataaaataaaatgataattaagtaacttcaatgctagttgattatntaanaaaaatcccaaaaacctagctatatgatataagctaataaactagaacagtgcagatccaaaagaagacgacaacaaagaataatgccaagaagcat

SEQ ID NO: 37084 - DNA, 522 bp, Glycine max
  unsure (1)..(522): unsure at all n locations
nttgatcaatgataccgtgacactnacagncacctgaggcatgcacgctngctttgaaatgaattattaaacaacctaaccttgatgtacgactgataattgtcttggatagccctagtttattgcgtatatattgcttgttaggaatgctacccattttaggtcatatatatatatatatatatatatatatatctatatatatatatatatatatacatatatatatatatatatattacataactgaatgagataggaccattctcttatcagccaaaagattatagtggtctaaacaatatcaaaatatggttaacggcatatctgttatgagaggctcatcgngtatatatcaatactgatattatcattatgaaacgcgccaacatataatgatcacacttgtggttatggatggacatacccatacagacgttatggcacctatgtgtgatatacataacactactattcttttaagaatatcagagaaaacatgagctcttacattcgaagacg

SEQ ID NO: 37085 - DNA, 298 bp, Glycine max
aagctttgtttggttacaaatggacattccagaacacaatattcattatggaatagtcgttccatgatagtgaaaagagctttcgaaataactattcgggaaatatgtatgtttgttctagaacatgcgatacaaaatagggatagcatattctagagaacttattccagaaacatatcttatgttattcggaaagcctattctgtgactcaacatgtgttctagaatgttccttctataagctattgccatatagggatgagtgattcgcacaccgatttctaagtacctattccac

SEQ ID NO: 37086 - DNA, 476 bp, Glycine max
  unsure (1)..(476): unsure at all n locations
agctntnggagtagaaacatgggaccaactctatttatttcanaaagaaagtcgtatctagtcaaggtctgagagaccatacaagtttcctaacgatttctaattatgtgggccattaagtctatcatatgctgacaatagccgagaagcccatgaatctcttcgggggcggagtaggtgtctgccatcgccttggccttggctaacaagcggngaagttcttgactcccgttcaaggtaagagcaaaccgatccatccacatggttgcctcttggtgtaaagagtcgatcacccttcctctagcctctntttccgcgtatacttgagcatactcgtccgcgattctatgttcatgggccgtggctagacctaactcttcttggtacttggcgatgatagctagcatgttggtctccgtctcgcataaacgctgagacaagcttcttttgaccttgaacagcaactaacttctctt

SEQ ID NO: 37087 - DNA, 387 bp, Glycine max
tcgcctgttccactaggctcttgatgtctatagaggatacttcttcgttgacatcttttgtcttgaatgggattgccatgacaggtttattgatactgtctttgatatttggtagttgatattgtgttgcgggaggtaattccgattggattaactcaccatccttaacttgccaatttgttatgacatttgttgttggatcacctatgacgtcttgtttccaagggtaatctatatcctttctgtggcataagcatgaaaccaatcaaagaataggacagtaattttgacttgttcgacaaatactagaactcgtttggaaatgtatctgattgaccctcgtatgttgaaaaccatcttcttgatgtcattctccgagaataaatc

SEQ ID NO: 37088 - DNA, 488 bp, Glycine max
  unsure (1)..(488): unsure at all n locations
gtgatccttaagtcacctgcggcatgcaagcttataagaacaaaattgccttatcattttcaatatgcatgtgaattacgacgcatcaacaagaatcaagccaaggctattgtgcacgcaatcaatggggcacaacacaccaaatgattataatgatggatggctcatattctcacaaacgtaaaatcatcactttcaaattgagctttcaaaactatcatgacatgtagagaagaatcttggatttcaagtcacaaaatgtcaagaacttttattttcaaaacaattacccaattcttgaacatatcctataattcanagaaaaacatgcgaagtcgtacgtgcacacaatattgaccgctaattttatactaaacattcgacgaaactaacaacattgtcaaattaacacatctaacaacagtaacaaaactcatcaaactatcagaagcaaagaacacttccccncatacttaaacaacacattg

SEQ ID NO: 37089 - DNA, 230 bp, Glycine max
tgagtgctggtcgtcaactcgtttgtaatgtctaatagtccaccccgactgctattagggtcaatcctgaatgttgaataaaggtcataatcaatgacgaatgttgagcgcctgcttttatcagctaaatatctcataaaatcctctagttttactgattaaggaatgattggtagagccaacgggatcatagatactctacgatctattgagttattgcaattgcacta

SEQ ID NO: 37090 - DNA, 463 bp, Glycine max
agctgttactctcttatgcttgtgcctaccgctgtgcttgtgtgcattatttctgcgtgtgctttgagtctattctcctgcattcttgctctcatcttacatctttcacctcaatccaagtaagctttttatgtcattttctttttccttcagaagcttaaaccttagggtagacaatttatagctttttagttgcatttatgtttaacttttgtgttttaactcctaaggtctagttaggtcttagagcccaataggggcaatgcctgcaagaggggtgaagacccctcatttctgctggagatcactatgaacgcgctaagcgcgccagctgcacttatccagttcatcacaactgtcaaatttttagattttcagatgatcgcactaagcccgaccatgtcgcgctaagcgcattcatccttctgatgattttcaatgatgagctcgctaagcgcatcta

SEQ ID NO: 37091 - DNA, 408 bp, Glycine max
  unsure (1)..(408): unsure at all n locations
ctatacaaaagttagtcgtataaagcgactaacataaatcaaagagaaagatctatatttttcatgaagactaagccttgtaacttgaaagagcttaaagaagttttgtctttttacatgcccaactctttgagtggcatttctatttattgttgtattgtttgttgtgccttagtctcaatattttcatatgtacatcatgcatcatcatgtagaagtaggaagattgtttctaaagttagaaacttcttcaacagtgcataaaactctagtttaattgattacaaggaaaatnttaatggattacagaagtgtttgcagcttgtagagagataatcaattgaaatgttaatataatcaattacttcttcaaaataattgattacattgactatttagtcgacaagt

SEQ ID NO: 37092 - DNA, 89 bp, Glycine max
agtcacctgcggcatgcaagctaagacctcatagacagtgtttagttgttcgtacgattaatccgaaactagctccaagattttttggg

SEQ ID NO: 37093 - DNA, 61 bp, Glycine max
tctggagctagtttcggattaatcctacgaacaactgaaacctgtctatgaggtctaagct

SEQ ID NO: 37094 - DNA, 299 bp, Glycine max
ggcacgacaaggaaatcttatgtgtacacctggtcacgcatacatatatatatatatatatatatatacacactgtgtgaatgagaagactacaccaccacattcttggtgcaaaaatattatatacactgttaaccaaggacccttatgttctttcctattgccttaaaagaaaggagcgtgccctctcccaatcaagaagataaagtttgcatatggtatcaaaatacccttacagggcaaaaaagcatcaaggagacaactcatataaaatagaagcatgcctacggcaaaatcaa

SEQ ID NO: 37095 - DNA, 438 bp, Glycine max
  unsure (1)..(438): unsure at all n locations
cgcgacactatacacactcaagctatgaaccatccgtcccatatgagcccatacttgcatgatgaatgggtcaaacaaaatattgatgaagctacaaaggagaaacttggtataggaatgggcttaattgtagaaaccatcacggcgagatcctaggggttgccatgagcatggtgaaccattgttatcgaacacacatggcataagctgtagctttcaaatgggccttaaagatagctaaggacctctnttttttttttttttttgacattgtcatggaaacagattgcttgaagattgtttagacttggcacaacacaaggaagttttcaacttcctatattgaaggcatccttgatgattgtagagagctgcacagtagaggttttcatacgctcaaaatgtcttntggtaagcatacaggaaacaaagtatatg

SEQ ID NO: 37096 - DNA, 201 bp, Glycine max
  unsure (1)..(201): unsure at all n locations
acgcatgctctcaccgagtaaactaacagatatcaatatgtcaatntttttatccagagccaaagatagaatgtgatgtcctgcaaaattttatcatggtcaaaaagtgctttcttgaagacaaccatctcttgatctccagatatttcacaccaccgctgcttacatgatcatcttgacttccttccccgttctactttt

SEQ ID NO: 37097 - DNA, 460 bp, Glycine max
  unsure (1)..(460): unsure at all n locations
tcttcaactttgtattcaagtttttacatcaattcttttgaatcttactagtcaaaaattaaaataatattaaaatcctcattatttcattaaaaacaacattatagtagaggaattgtaatcattcttaagtcaaaattgactatcaattaaactcaaacttcgcagttatcactcattattttcaaacaacttgagcttgtgagaagttttactgaacttgatatatttctatctacataggctatgccttggtgcatggtcagaccatggtgaaaggactggtggattntatgcttgcaatcgttatgaagcagctaaacaagagggagtggtaagggaattagaaatactctacttcattggttcaggttcatgataccataacctactgcccctgcatatatttgataacgatatttcttctgactaaatgttgtgcatgtagtatgataaactg

SEQ ID NO: 37098 - DNA, 421 bp, Glycine max
  unsure (1)..(421): unsure at all n locations
agctaggaagaaggcaagtactggactagctttcgttatctagcctttcgcgctcagagcatgtgatatgttctttaatttggactcggaataaaaatgacatatgctcgcatatggcatatatgttgacaataataaatattcaatcgcccccatgtaccaattcgcaagttgcagtagcatgagattgcttaattgatataaaggttagtgtttacacataaaaacttttagcaaaaaatcaaaaaacaaaaacaaatggagacatggctagtctatttcgctaataaatttggtcggtctattntcttctggcagataaaagaaatgttgttcaaacaaaagcctttgaatgatgcacgcatatttacgtgcatacatcttaaaaggaaaaataattaacgaaaagtatggatgcatc

SEQ ID NO: 37099 - DNA, 451 bp, Glycine max
  unsure (1)..(451): unsure at all n locations
actcggcatgggacctganatgttgttcccactcagatccaacaatgtcaaagatctcaaactagtccaattactaggtatcccaccactgatatcattacctcccaaccttatctcaacaagagaatccaactttgcaacagaaggactcaaagtcccactaatattaaacttttccaaaagaatcatgtccaccttcccatccccattgcaccttatccccaaccatggcccatcacaagggtcattcccactccactcatcaaccaaaatccgaggataccccaaccctccaagaaactccaacaacaccatcacctcaaaaccacacataaccccgggtttggccacacaaaattcattgttctcaaagctcactttactcngctgcgaaatccggatcggacccacganagtggtgtattcanatcaatctatccaacttcattca

SEQ ID NO: 37100 - DNA, 432 bp, Glycine max
ccgaaattatatatcatgctcttagaattactaaagtattgaaaaataaattcgtggtgtaagtcaaatgctcaaaaattgaacatgaggtctagtttagaaatgacaaataattcataagagaaagacagagtttagtcgaaaagtatataaaatttgacaaagaattattttcgctaatgattaaattcagacaatatataaatgattccatcttaacttcaatacattaattacttacgttttattaatattttatctattaattaatacaatatatttatgtttaatatgtatttttctccgacaaacacagaaagaaaactcctttttcgtgtagtatatgatgcagcaccgaatctgaattatttattttaatttcagtttaaattaatttcatataaggaatataaatcaaatctataaactaaa

SEQ ID NO: 37101 - DNA, 342 bp, Glycine max
  unsure (1)..(342): unsure at all n locations
gaactacagagattatattctaattctaaacccacaaatcaaactaatgttatgcaggattacaacgcaaaaatttcatattttggcttggcgaaattagggccttcgggtggagattcacacgtgagtacgaggatcatgggaacatatggctatgctgctccagaatacgttgcaacaggtgaacatgtcatcttatctaaacacatatatatagagatggtttgtgaatatgctatttgaagttgaaactaatcgtnttatgattcaacatgacacgctttcgtgaagagtgatgtttatggatttggtgtggtgctgctagatatgctgacatggatg

SEQ ID NO: 37102 - DNA, 655 bp, Glycine max
  unsure (1)..(655): unsure at all n locations
gtctgctcgcagtanattacttcntgnanctgacttcatantnnntgcttttntnttcttttccnnnnnnncagggaacgaagcgttgatttcgattccttgcagtancngagcacctctaaagtcgaactgnangcgtgcgagcgcgaacattgaataaaagatttatcttctacattctcgagacaagttttgagagagagtaactattatataagataatgtatgacctgacacagtctgcaatgaccgatcctgtgagtaaacaaaacgacgtgatgagcatactagacaactaccctacaccttctcgaagatgagatatgagctgggcaaaccacacaccatgagtttacaacgccagtatgctcatttggtaaaaaatagacccgccctagaaaacaccagtcttattgatcgctcgcatatactggaaactattcggtggaatgggatatcaagtcaagatactgtaaggaaagtatttattctgaagccttgaagaacctagaatgagaccctcattgaatgagccggcgcagcttacataaattttaaaatcaccacacggctgcgtattccgtgtataaagtaaatgcacagacctgattgtggacatatgccataatctataatgcacttaccctactatttn

SEQ ID NO: 37103 - DNA, 306 bp, Glycine max
aagacaggctgactatcgatgttggatattatcaatgacaccaagggtcgcagtggcccttagagtcaacgttttggggctggatgataccggtgtgccttgggaatgagggataggaagggaattgtcatacattgccactggagatttatacagtttgcatcgagccagcgcatcagtttttagagggctaactttagtgctttgtgaccaccggagatgggtcattgttggggtctctcgacgaaatatggttttctctaaacttcgataggatggtaagacgctttcctggcttggtcgcga

SEQ ID NO: 37104 - DNA, 75 bp, Glycine max
agcttaagcggatctcctgatccatctatagactctaccatggcaggaatcctcgccatacaactacatatacct

SEQ ID NO: 37105 - DNA, 405 bp, Glycine max
  unsure (1)..(405): unsure at all n locations
tcatgatgatgatgaatcaagattgattcaagttggtttgatgataacaaagatgatgacaaanagcccaagaaaatgatttcaagattgagtcaagaacaattcaagaatcaagagaaatttgatttcaagaatcaagaatcaagaataatcaagatcaagattcaagaatcaagagaagactcaatcaagataagtactaaaaagtttttcaaaacaatgagtagcacatgaagttttcacaaaatcttttaccaaagagtttttactctctggtaacgattaccagtttcctgtaatcgattaccagtggcanagttggttttcaaaagctttcaaactgaatttacaacgttccaattaatttcataatggtgtaatcgattacaagaatttggtaatcga

SEQ ID NO: 37106 - DNA, 136 bp, Glycine max
gaacgacccagcgaatacatggactcattactgccgtaaataaattacgccccgccttgctctcttagtgaacttgtgtaataattaatccatctgccgactatgagtcatctcgacatgagaataacctctatcg

SEQ ID NO: 37107 - DNA, 324 bp, Glycine max
ctgcagctggacttctgtgtttgagaacctcttcttcctcaggtgtacccaaacccaatcacctggttcaagcacgactttctttctgcttttgttggcttgccttgcatagcttgcattattcttttcaatctgaaccttcactagctcatgcaacttcttcacatactcagctttagcctgtgcattcttatgcttaaacatatcactgttagacatacgcaacaaatcaagacgagtcaaaggattaaatccatacactatctcagatggtgaacaattatatgtgctgtggacagcccgattataaacaaactcaacatg

SEQ ID NO: 37108 - DNA, 479 bp, Glycine max
  unsure (1)..(479): unsure at all n locations
anngctttgctacaaccttttctccccctttgtgcaacatcaaanagccaaagaactcggaagtcaacacagttataacaatggagtagcaagatataagtatcagagtattaaatacaataagccaaactcacaaacaagaaataatcaaaccagaatccaaataactgaaaatgtcaacaaccacaaaacatccaagactgaaatttaaaatccacaagataaataagcaaagtacttagcataataatgtaaattctaagaaactaaaagccaaaatacacggcttagaaaagataaataattagaaactaaaatctaagaagacggaggtggtggtggaagatcgaaactctgacgaatgtatccgacatcctcttcaagctgtgtaagacgaatgtccataccggcaaagcgtgaatctaacgagtcaaagcggtcaccaacatatgaacgaagaccccgtaattcggagagga

SEQ ID NO: 37109 - DNA, 367 bp, Glycine max
  unsure (1)..(367): unsure at all n locations
tcatgcaagtggaccttcttctagttattctgacttgcagcagcctcctatccctcttccattcccacctagggcaattccaaacaaaaaaatggaagaagcagaaaaggagatcttggagaccttcaggaaagtagaggtgaacatacctctgctacatgccatcaagcagattccaagaacaaaaggaagctcaaaggcaatgaaaggattagcatgggcagaaatgtgtaagcattgataggtaaatntgttccttactntcctgagaaatgtaaggacccaggtactttctatataccttgcattatttggaacagtaaaattgagaatgccatgctagatctaggagcatcagttagtgtca

SEQ ID NO: 37110 - DNA, 488 bp, Glycine max
  unsure (1)..(488): unsure at all n locations
ggatccttaagcacctgaggcatgcaagcttgtttaccacatgttgagttngcttacaatagagttgttcatagcactactaattgttctccttttgaagttggttatggttttaacctactaactcatcttgatcttttgtctatgcctaatgtttctatttctaagcataaaggtcaagcaaaagcggactatgtgaagaagcttcatgagcgagtcatagatcatattgagaggaaaaataaaagctatcttaaacaagccaacaaatggagaaagaaatttgtcttctaacccggagattgtgtttgggagcacatgagataagaaaggtcttcggaacatacgaaatcaaagcttcaaccaaggggagatggaccattttcagtgcttgaaagaatcaatgacgatgcttacaaagttcagctacccagggagtataatgttagtcccaccttcaatgtatctgactcatctctctttgatgc

SEQ ID NO: 37111 - DNA, 381 bp, Glycine max
acatgctgaattcaaacaatcacaagctatcaaacttaactaaatgcaagagaaatagaactaaaaagggttgggatgcctcccagtaagcgctcttttaacgtcattagcttgacacaaaagtctttgttagcccagatcaatcttggttctctccttcagaaccttctcttcactctccttcacctctagacaaacattctagtccaacaatgtcctttcttcatcaaatagctcaaagctaatcttttggtcttcaatacccatttctagcttcttctttcccttgtctactacacagcttgcagtaaccataaatggacatcccaaaattaagggaatatatgtatcttcctctatgtccattaccacatagtcagc

SEQ ID NO: 37112 - DNA, 497 bp, Glycine max
  unsure (1)..(497): unsure at all n locations
ttaagtcacctgcggcatgcaagctgttggtcagacatattctaaaacccnataaacctgtaagtgatggacattntcccaaggtataagaacccaagaccataggcatcaaagacgctagagatttaaataaccttgcatgggatgagttgttaggtattctcaaagtccatgaagtccaccttcagaacatagatcatctgcaaaagaaggatttccttacccttaagtatgaagaaactatctctagaagaaaagagaaaaagagcttatccaaagctctcaaattacagatgactgagtccgatggatcagacaactctgaatgatccacaaatgatgaagtgacttttatgtccagacagttcaaattgatgatgaagaagaaagaaaagttccatcattcctccaaaagaaaggacacacgattcaagaagaaatataaggaggagagtaatgaaatcatcttctttgaatgtagaaagcctggacacatg

SEQ ID NO: 37113 - DNA, 502 bp, Glycine max
  unsure (1)..(502): unsure at all n locations
cgcaaccattacaacctccagcttgtcctcttccttacgatgcgtaactggaaatatcgctcgatctttgtcaaccagcccataggatcctcatcgtcgaatatgggcaattccaaattcctccactgattgccgtcatgcgatgtcataccttcatctcctccactcgcgtcaactgcgtgcacgtttgacgcaggagattttttctcccatgccaccgccaacctttggatcatcccttcgattgaactcaactgcaattccactgcttcacgattctcctttatcgctttctccatagcttccatgcatgtctccattcttgcattcgcctttgtcaccattaacgattctacactccaagatncagagtctgatactagtngatagaactggaccaaaccagcggaaaaattgttttattcgagttaaatgctacaacacaatggttacacacagtgatggtctcatcaaccctctactgtctccagttttctgtcta

SEQ ID NO: 37114 - DNA, 342 bp, Glycine max
ttaaatattctcagtcataacagcctcaccccatatatatttgggaactttagtagaaaagagtaatgccctacccacctctataaggtgtgtattaattctctctgcactcccattttggtggcggtgtattaacacaacaactatgatagacaatctcattttcaagaaacaaacttcctagggttgcgtcaaaatattgcatcccattatcactactaactacttgtatattaacacgaaattgactttgcaccatcataaggaaatctctgacatctagtttacctacagatctttcttataatatgtacacccaacaaagcctagtgtggtcatcta

SEQ ID NO: 37115 - DNA, 343 bp, Glycine max
catgatggatgatcagctctgtctctatagtcataggatggatatatttaatctgaatgcaatttctaccctctgtatcataaggactggcctacacatataacttgcaaagtctttttctagagatactactctctggtaatcgaacaccagatgatgcgtcataccctaatttcctccggcgattattatttgatgatatacaacctttgagtggccgcttctagatacttggcaccctttgctgcacaatatgtgaagtcccgagacgtgccgacaatcataatgaatcacgctcacgcgatccgtgataattccgtaatgtgactaaaattgaaaggag

SEQ ID NO: 37116 - DNA, 265 bp, Glycine max
ctaatgccattaacctacggaattaaaaaaacacttaatggctgagcgtaactgaaattgtgtgaaccaaaagtcacccccaacagccaataagtcagacaccatttggtctcccatgaggctgatgcctatgctgccaattgtgcccttattacaactagaactaaacctaactaaagcccttttagatgatgaacccacaacatatctttggtcagccaactttagagggagtgtgccattatttagacacactaaacactct

SEQ ID NO: 37117 - DNA, 214 bp, Glycine max
ccttgacttgctagaacctctcgccggtttgattcgttcccatgcttgctaaagtgagacagaagctggtgcaaatcagaactccgatatctcatgggtggaatggacgaatgcttgaacgaatgcatctaacacagatgtaatctaggaatgcggtggtcccgggaattcgtcccctatttagacacaatgtctaggggtagcagcagtgccc

SEQ ID NO: 37118 - DNA, 428 bp, Glycine max
  unsure (1)..(428): unsure at all n locations
gcttcgaagaagtgtgaggtcaagccctaaggcagagcttgaaagagcccgagtagtcgaagagaagttcaagtccatagccatcaaagtctgaaaagagtatgatgaactaagggacgtcaatatggccaccgctgaagccttggaatgagaaaccaagaaggcccgaaaggaagaacacgtgccagcaaagttttgaggggctttatagggcagcaatagcaaactcaagctccgaagaggtgaaaggaatcatcacaggtcaaaggcatgatcttgaaggacgagctaaaggcttaccttatgtcgaanagaaatttgtcccaacagttaagcgagactgaagggaatatgtgggccgtcatcgatgagtgcanagagaagctaaatctagtggcgactcacgagcaaaggctagaggatgagta

SEQ ID NO: 37119 - DNA, 349 bp, Glycine max
ctctcacctcctctcctttatcaatcactgcaaatccatagcagaaactcaccattggaggacctcattgaatgtcaaaaatccatacttcatataagcttctcaagcaagcttccttcaagcggtatcagaacacatgagctacgaatacgtgctccttagacctacattaatatccagctttacctactcctccagtgcgtattcatattctctccacgtatctcctcacatgtcttgtttgacagtagctaacatgagtctctcagaatatcatcgacttaatttgccatacaagctagatttgattttctatgcgttcaatatcttgttcttgttctccaccatg

SEQ ID NO: 37120 - DNA, 340 bp, Glycine max
  unsure (1)..(340): unsure at all n locations
ctcaagaggcttctntgagaatctagatccttatctactcacactcctctattaactaaattaacctccttaaaataattacggataaaaataatgcaacaaataatcaaacatcaaacataattactaataatatatagatatatatatcaaggtgttacagttgtggtggcacgatcgacgggtggcatatttggcgctactaaaaaaacattttnttacaaagaacattcgaagatgattctcaataaccatcttgtaaagtcagatggtggcaattatttgaagatgaggctcttcaatgaagacgtgtctatgataagcgttctataaactacca

SEQ ID NO: 37121 - DNA, 402 bp, Glycine max
  unsure (1)..(402): unsure at all n locations
agcttccatcaagtggtaatcagagcacaagatcttatgtaggtgctcattaaacctccattaattgttctgctttaccttctcttccattgttgtttcttcattaatttctccatgtatctcctcacatgtcttgcgctaaatgtttataacatgattctttacatgattctttagagtttccaccgattaaacttgctatacaagctagatctgattntctatggatcaaatttcttgttcctgttcttgaaccatgaattgtgttgagcttatgttcctttgagatttgtcttgttattttttttggctgaaacctaaatcatataactcttacctaaatatttgaggtgaagaaaacctcaaaatctatagtgacttgtcacctatagaagtttgtca

SEQ ID NO: 37122 - DNA, 279 bp, Glycine max
ataagattagagctggatgaagtcatatctagatgagatcaactctaaatgatatctggatgagataggatcagatcatgataagagctaattgtggtgaataaagtattctgccctcttcaagtccaagcccaatgttggattcgagcccaagcccaattctagattcaagcccaatgcttcattaattcttgagattagattaataacatcaaattagctgaatggtcccgaataataaaactgcctaatatatttgacaattaagactgatcagta

SEQ ID NO: 37123 - DNA, 444 bp, Glycine max
gagctcgagaagttcaagaccaaacgctccttgcttggctccaatccattctttcacagattgttctctcacatggctcgaatcactcctatcaggtgtgggagaagaatcaccagtatctcatccttcacaccaaatctgatggatgaatactaccttcgtaagatcgaatgttacattgatgaactcgccggagttggaagctccgattcgccatgaggaatatgtcgacacacttatggaaggtctcccgtctgattatgcgccagagatctcggtgatcgatagcaaaacacggactgtgtacagtgctgaaagtgaagctctgctttactgtcacaagactcgtgttgttcactacaacagagacactcaggtgctcacttctccatccttgaattacacacaaaggtatttgcactcgaattcatacgaatctggaga

SEQ ID NO: 37124 - DNA, 306 bp, Glycine max
  unsure (1)..(306): unsure at all n locations
tttcttcctacacttatactgattgctcctttcactacacaatatcacaaatgaacttctttctctactaccagaatgtgtgacagacactataatgattacaacaagatcgttttcatgggcaaccgatcgagcccactgcanaacatcatctcatgttccaaagacactacaacgtgaccccaaaaatgaatattttatacgaaacatacattctatcaaatgactcaaactaatgaacattattacctgaaaagtattaatagcatccaaacaatcaacatgtggttcagtcataccacattc

SEQ ID NO: 37125 - DNA, 459 bp, Glycine max
  unsure (1)..(459): unsure at all n locations
agctngaggaatcttagacttctactatagatgctactatcactattggaatacacacatgagcccacttagaggtaaggaatgagtttatcgcaattggagttagaatgaacatgtgtagggatccttataggattaaattggggtttattttgggatgtttattgaattataattttccttcatgattataaatacaatattgttgtttttgacggaccaattgatgttttgatgtgaattggatgataaacttgagtgctcttgatgttttcgtgtttttaacctatgattntgattcattgattctaatatgattgtgtgaaattgtttgaggggttctactccccatattgaaagaaacattctgtataaattgttatatcgagaatattaaattgtgattcaaattatgagtatgtgacaaattgaaccattgatgaataccgacatacatgt

SEQ ID NO: 37126 - DNA, 394 bp, Glycine max
  unsure (1)..(394): unsure at all n locations
atacctctgtcatgcatcgaagagagactcatatgtcatttgtcaaaagctagttatcctttcctttatagctatgattttttattatggaaagaatngttgaaggacttgtctttgatttgctcccatgaggttagactatggtgtagttgagaattgaatcatttaagtgcacttccccctaatgaaaagggaaaaagatgcatcttgatgcgactgtctttgattttggatattcttactaatgtgtatatgtgttggaatcacgtaaggtgggtgtgcagatcttttgtgttggatctcgtatattgagtgttatggagaatattaatgatctcgttatgaagagttacttgatgctctataattatgtacaatactaaagagagaaata

SEQ ID NO: 37127 - DNA, 359 bp, Glycine max
  unsure (1)..(359): unsure at all n locations
aaaatattaatgatagaacttgtactgagaaatattattatataaaaaaaagtgtagttaatatcctacttgctactagcatgtaatgaacaaagagaccacctgctgacatcatcatattttatccaaagagaaacttcacagacacattcctattcctaaaagttntctaataacttattataaatctaaggttcttcaatctaattaagataaattatataagactgagaattacttatacaagagaaggatctcttatatattaattctagctagctactatgacaatgacgctcttctaataatctcattacggacgtgaatgttaatctttaaaaggatttatttttgtgtat

SEQ ID NO: 37128 - DNA, 323 bp, Glycine max
atgctcctagctatgctgtctgtaaattatttatccatgtttatagcatatgtgtataggttggtatatgttgcaatgtgcataggtcatgctatgcatgtatgcacaaagttacttaaattattgcttatgtattaatgaatgtttggattaatggcttcacaggttctaaacatgataaaatatgtcatcatatcgagatttctatattattggttggaaatattatttggtttaaagaagaatctcggtattgtcatatctattgaacgggaacatcacattcatggcttctattgcacttaatactactcattgtgggt

SEQ ID NO: 37129 - DNA, 511 bp, Glycine max
gcattactcattagtccgtgacctgaagtcacctgaacatgcgcctcatacagcacttatggatcgagcattcttatttattgtaggatgtgatgtgtcatgatactcttaataccattggcccgcaagaaacattacttatcaaaggttttaccacgaggaaatgggcaggacgaaacctgtcttagagaagaccaggatggacatgtcactcgaacgaaactatacctgctcgctatatgagaagaaacagtttatgtgtgcgaaccaccatatgctcgatgtgggcaagacaggatacgctgttgtcctaaaagacacctggaaataacgcacggcgattttgcttatgctcaagaaactatatggcgccaacggttggcgagacttaacactccaaatggcaaacacatgcagataaattgtgaaatgtgacgcactgcttggactcatacctgacgatcgtacgagtgagccacgtaagagtctcatatctttagtgcataagtcc

SEQ ID NO: 37130 - DNA, 646 bp, Glycine max
  unsure (1)..(646): unsure at all n locations
atcttcctctctacttacgantttattgtcaaattcgagttattagtattatanntnattatttttnnnaaatattagagagtgtactgatgccatcgatgcacgtgacactataccatacactagcttctcattcaaggattatctagagggccaatcgggataaggcattgcttactctgaagagcatagtgccacaatgtaccgaagacatctagacggcctcacacatcacattgtcgaaggctaccatgagcagacatcattggaacagagtggcatcacagtcttcgtcacaacgatgaatatcttgactttgaggactaaacttacgaacggatcattatgctcctaagaagacaaaagctcactctccgtatgatatcacacacagttgaagacacatctagagagtgaactgtaaactcgatttaaagatgcagtcatgtcgaaaatcgatgattaccatgaaaagatctcatgtgaaacatcagaacagaggactggagacactactcaatgtttccatcgggtgcaacactatcacaactatcacctgtaccttgattgtaagtctaataagcagtctacatcagaatgctttgtgttgttaaatgtgtcacgtcgatgagcattctactcaacg

SEQ ID NO: 37131 - DNA, 258 bp, Glycine max
ctcttacaggtgactttgagcgtttgtgtccggaggagtacccaacatttcctgattatctctctcgagtattggccgccctccatccacttatcagagatggtgaagatggcgatgacgtgcatgtgacgtaaaaaatacttcgaactttaaatgcaaggtctgacttcattggtaccaacattgacgaaaacgccgatttaaggaccatgactattgagcaactcatgcgttccttacttgcctacgatgatgctc

SEQ ID NO: 37132 - DNA, 325 bp, Glycine max
tgtgcgtcctgttaagaatgagagaattacttgccatgtataaagacttctcatatttattattgcaggatctagcgcttatgaaatcaaggtgatttaaggtgcaccactagacccgcgtagtttatgcagaaggccaactttgactacattacggaaggttcaggtttatccatgattctgatattcgaaggtgcttgttaataacaaccactaaaaaactaggagggcaactacaataagcaccacaacgtatacttaaacggattttctaatgtgtctctgggtacatgatatacagcccaaaatacaaagcatttatcat

SEQ ID NO: 37133 - DNA, 489 bp, Glycine max
  unsure (1)..(489): unsure at all n locations
anngcttgcggattggtcttcgccagtgaaaggatcgaagtggatctgaaaagaggcaaatttaatcatcatactaggacgactgagaaaactggggcaaataaagagggtgaggatgagggagaaacccatgctgtgactgccattcctgtacggccaagtttcccaccaacccaacaatgtcattactcagccaataacaaacctcctccttacccaccacccagttatccacaaaggccatccctaaaatcaaccacaaagcctgtctaccgcacttccaatgacgaacaccacctttagcacaaaccaaaaaaacaccaacaaaaaggaattntgcagcaaaaagcctgtagggttcaccccaaattccgttgtcatatgctaaacttgatcccgtgtctacttgataattcaatggtagccataaccctagccaaggttcatcaacctccatttctccgagaatacgactcgaacgcaacatgt

SEQ ID NO: 37134 - DNA, 380 bp, Glycine max
gatacacgcagagactaacatcgtcttctgcgaccttcctcaatcgcggcagacaagatcgttgatacgtggagatttatgtcatcttccgcgctcacaagatctgtcatattgacttttgagtcacgctggcgggcggaaatacccgagtggttatccgtataaagatttgctgtctgtaagtcgaaaagcctaatagcacgcagagactaacgtcgtcttctgcgcccttcgtcaatcgtggccgacaagcccgttgacatgcggagatttacgtcatcttccgcgctcacaagatctgtcatactaacttttgagtcacgctgacgggcggaaatacctgagtggttattcgtataaacttattgttatctgtatga

SEQ ID NO: 37135 - DNA, 462 bp, Glycine max
  unsure (1)..(462): unsure at all n locations
agctngcttgtggngcttctatggaggctggatctttgatcttcaatgaggtcctttaatggtgattttccaccatggagatgcagcggaagacaaaggagaagaggtgagaggaggcgccatccactagggaataagccatggaagaaggagcttcaccaccaagatgagccttggataagaagtttggagaggatgctccaatggaggaaaagaaagagggagagaaagagagaggggggagcacgaaattgaaggaataaaagaggtagagaagtggaactttgaagtatgtctcacaagactctcattcatcaaagttacagcaagtgttacacatgcttctatttatagactatgtagcttccttgagaagctttcttgagaaaacttccttgagaagcttctttgagaaaacttccttgagaagctagagcttatctacacacacccctctcatac

SEQ ID NO: 37136 - DNA, 427 bp, Glycine max
  unsure (1)..(427): unsure at all n locations
gtctagggtttctagagagagaaaggtccatgtgcctgatatttntgagagatattgctgtgtgaagatctgcagagaccagagctcatagtaagagctggtttgagagcttgagatgagtttgtgagtgattgtgagatcctagaggtgaaggagacatcctcaccacttgtatttttgcaatctttcatcttgttcttctatttgatgttaagaaggcttcatggtatggaaagctaaatcctctgtttgatcttccctgtaggtacctgatgtaaatatatgtttatatatgtaatgatgttttgtgtgttctctgtgctatctatttttcattccagtatgcctttaccttgatcacgtagatgcatgattcgtatggacattcaacagtggacattggtctgactctaaagtccttgatagt

SEQ ID NO: 37137 - DNA, 489 bp, Glycine max
agcttgtcgtgtcatcaccattctggcctacacccattctgagctcatacccatcccttaacataactcgggccaccatcaaggaggcaccagatagatgtggttgcaccggaggagcctccacataaacattgttcataatttctagtgcttgaaaagatgtttccaatgacttttccgcagcttccacatagggtgaagagaatggacaactcactagtatatcttcttcccctgaaactataatcaggctgtccttccatcacaaacttcaatttctggtgcaacattgacgggaccaccctaacagaatggatccaaggtcgacccagcatgcaactgtaagcgggatttatgtccatcacttggaaggctatctggcacatgtgtggcccaattttaatcgggagatcgatctctcctctcacgtcactccggctaccatcaaaagcccttaccaccatggagttggcctcatgtgcgatgcgt

SEQ ID NO: 37138 - DNA, 456 bp, Glycine max
  unsure (1)..(456): unsure at all n locations
caagagattataaatatgtgaccatggcatgtgtttcattaacaatcaatctttcgagatctttcaacactttctacataattttctaattcatttctcttcatctttctaaaagtttttgatcgacactttctcttccaagaaaagttctttgttcaaaaacttgtgttattcatctttttcattctcttctccctttgccaaaagaacaaaaaggactaaccgcatgaattctttagtgtctctcttctcccttacaaaagattcaaaggactaaccgcctgagaattcttttgattcttcccttccccttaagcaaaagatttcaaaggactaactgcctgagaatatctttatttccccttacaaagattcanaggactaaccatctgagaattctttgtcccagcacattggagggtacatcctttgtggtacaagtagagtgtacatata

SEQ ID NO: 37139 - DNA, 403 bp, Glycine max
  unsure (1)..(403): unsure at all n locations
agcttgctctnatntacattgatgtttgtatttatgggaggaggttgtatgtcattnttgttttaagagtagtgtcccactggtaaaactaactntccaaatgtttgccttcgcaggaaatggccccgaggaagcttgcctcaaagaggtccaggaaggacaaggcagccgaaggaactagttccgctccggagtatgatagtcaccgctttaggagtgctgtacaccaccagcgcttcgaggccatcaagggatggtcgtttctccgggagcgacgcgttcagctcagggacgacgagtatgctgatttccatgaggaaatatggcgccggcggtgggcatcactggttactcccatggccaagtttgatccaaaaatagttcttgagttttatgcccatgc

SEQ ID NO: 37140 - DNA, 433 bp, Glycine max
  unsure (1)..(433): unsure at all n locations
tgaaagaagtccatntgttgataaagtaatgcttcctctgaagatcttaatcttacaatgtagtgaagacatcaagaaggccttacacaaaagatttatcaaaggctacaatgagcaaacaacattagaatagagttgcatcaaagtctacatcaaaatgatgaagatcttgactttgaagactaaacttcagaagggatcataatgcacctcagaagacaaaatctcactttccatatgtttccacacacattgaaaacacattagaaagtgaatgttaactaaattagaagatgcaatcatgttgaaaattgaagttttccatgaaagggtctaatgtgaaacatcagaaaagaagactggagacactacacaatgtaaccttggatagaacactaacacactagcaactgtaccttcattttaattctat

SEQ ID NO: 37141 - DNA, 461 bp, Glycine max
  unsure (1)..(461): unsure at all n locations
atcctctgagtcacctgcggctgcagcttganggttcaccccacattccgtcgttatatgctaaacttgatcccatatctacttgataattcaatggtagccataaccctagccaaggttcatcaacctccatttctccgagaatacgactcgaacacaacgtgtgcttgtcacgaagaagccccggcgcgttccattgagcattgtanggctctgaagtgtagggtgcgaggtctaattgatgctggctgaaatttgaggagaatcgtgtgtaaatcctgacattgacaagagatgccacacatggggcaattntgaaagctgttgttagatgtctctaatgactcaccaggattgtcaactctcaccggaatgtgggtgtaagccactgggctgtttgctcaagcaacctgcgcttctgagtgttgacttctcagaccgttcaatcagagaatactcat

SEQ ID NO: 37142 - DNA, 416 bp, Glycine max
  unsure (1)..(416): unsure at all n locations
gtcctanatgacatttcanactaggattaactccctttaacctccaaataccattaaatccagagttggccttccaactctcaaagtctcactctttttccactcataacactacattatcactttctaaccctaggttaactctacccttcatccctagcagttttccatccacaatttcagcacataaacatcacaagcatcatcataaaaaccctaaaactgaatgggtaagcttgactcacaccaaacatggcaagttcaacacgctttcaacanatctcttcacaattaactatcacaaagcataaaccaagtaaaactacccatcatatctcccaaagccccatacccacgaaaaattaggtgagaagaggtctacccaaacctgagatttgagggcccacacgtagaga

SEQ ID NO: 37143 - DNA, 511 bp, Glycine max
  unsure (1)..(511): unsure at all n locations
acaccacgtcgcccacgcatagggattgttatgcaaaactaancnnnncagnnnaaagatatgttcatgcgttcacgacctnctaagcacctgagcatgcagactttcgagggctcttaggaggcaatttatcttttttaatgggaagcagaaagggatcatcccctaggaatgcgccagaacacgagcgacaaaggagggaaggggacgtcacatccaggntggacaggcatgaagaacggccacccaaaaacacccagaatgaagttcgtaaggcatgaaaacgtccgattaacaacggaagaagacagaggggcagcctaaatcaacgaaaaacaggttccgcacgacatgacaacacctcccaagacccaccaataacaccaccaaaggaacgcgccgaaatcaagaggaggaccccttacgacctatgctaacccaccaggattctgagaacaatggtgaaactcaccaagaaccaccccatttacaaacaacctaacaactgccg

SEQ ID NO: 37144 - DNA, 535 bp, Glycine max
  unsure (1)..(535): unsure at all n locations
ntgattcatctcgtcncagngacactctagagtctacctgcaggcgtgcgagctcgacaaccataggtgattggtcctaacatattgtctggtacaataccggcttggcgttatcatacgtcatcatttacagcacgctcatgtacagccaattgatctgatgggtctcttccgcccgacatgatccacaccctacccgtgcccaataaggaggatgtggtggcgatcaattcttacgtacgaccccaccttccatcactgatgcatccttccttacgatatcagatagcactgccaaccatgtatcaggacaggtttcaagtctatggaccgtacaacatcttcttttgctagatttgtctgagaacaatgtatgtgacaattcatctaatgagtaggacttcccaaaatcataaactacctgtatagagtggaatgggtgctctatatcttacaatacttgtggaggcattcgccatatatattggacgagtgatgcacctcacgtactgtaccatatcttgggggtgatcag

SEQ ID NO: 37145 - DNA, 433 bp, Glycine max
gcttgaagtggaaattaaattgaatgtataattgcaaaagttgttttcatttgtcatttatcattttcgcgaatattttattgtgtaagtatcattgttctatttattgtatggataacttttttttttgtgtgtgtgttatatgatctagtagcgtatggaaaagaaccacgtctgttgggtttggaaaccataatcaattgattaattcggagtttggtcactctgagatcagcagaatgaacgaaaatacagttgaaaagttgctaaatgaataggatgtgcctagaaaacatgaccactagtacaaaacacaacaacacatagcataaaagatttatggaggcaattaattaggatacttatagcctcataacttctatacttttcagagagtatgtcatccattcatatacctagtaacatagtataa

SEQ ID NO: 37146 - DNA, 423 bp, Glycine max
  unsure (1)..(423): unsure at all n locations
agcttgtgactctaggcaatttcttttaaaattctagtcacttagaaagtcgtgacttttgaaanaatcttcagaaacaagtcacttgaagaattgtgactttaggaaatgtattttttgaaatcagtcactgttaatcgattaccattaaggtgtcatcgattacacatcaacagatgtgactcttcattttgaattgtgaaaatcttaacgttttaaaacactgagaatcggctactaccttgtggtaatcaattaccagagagtaaaactctttggtaatgattttgtgaaaacttcttatgctactcaatgttatgaaaaacttttttaatacttatcttgcatgagtcttctcttgattctcgaatcttgagtcttgaatcttgatcttgattattcttgaatctcgattcttcaatc

SEQ ID NO: 37147 - DNA, 374 bp, Glycine max
tacatgtagctgcctcggtataaacgctgtctatccttcgttaaccgttggatcttctcgaaatttggtttgcgacttcacaagacaatttaccatgatttaaccgttgggatctttgagaaagtatctggagtgtgctacaagcttccattaccgagagcgtatcttgtttaagcatgttagcctttgctttcttgtagcttaagaaaaatgccatttcttcttctctctttcttccaaatccatatctaaagttccaagtactttctgcatcacccacattcaccattaaccaccgcataccatcattgttcttcattgaaaacccacaccgagaggaacccttcaaccgaagcagaatttacaacttggct

SEQ ID NO: 37148 - DNA, 403 bp, Glycine max
  unsure (1)..(403): unsure at all n locations
agcttgctagtggagcttctatggatgctgtatctttgagcttcaatgaggtcctttaatggtgattttccaccatggagatgcagtggaagactaaggagaaattgtgagaggcggcgccatccactatggaattagccatggaagaaggagcttcaccacctagatgagccttggataagaagcttgaagaggatgcttcaatggaggataagacagagggagagaaagagagaggggggagcaccaaattgaatgaagaaatagggagagaagttgaacttttagttgtgtctcacaagactctcattcattagagttacaacaagtgttacacatgcttctatctatagactangtagcttccttgagaagctttcttgagaacacttccttgagaagc

SEQ ID NO: 37149 - DNA, 311 bp, Glycine max
  unsure (1)..(311): unsure at all n locations
gtaggtcttctttctactctctgatagtgtgtattattntnttgcttngatgaactattattattattattattattatcattattattattattatcattatcattattatgcaggctctagctgaagaccctctctttatgttgtaatgacaagagtgaacattgatattcattctttgatgttcctggtgtgcgtaggcggcgataacaaagaaaaccatttttcttttaggaagcgttaactgtcatgcggctacattgttagtgaaatgggttgacagatatgtgtatggtgaaatgcctaaatga

SEQ ID NO: 37150 - DNA, 446 bp, Glycine max
  unsure (1)..(446): unsure at all n locations
agcttgaaggtgcgtagtccaccatcttttcatagtagaatactggtaatgtgtctactatcattatcattttttctccgtcattgaggtgccacttgagctgtcaggttcttcacctttgggcgtattctttgaaagatctgtgcccctttttgcacatgttctgttgttgcatcctatccagaaccatatcaaaattgtactgatactgcctaatgaaggcaaccattatgtcctcccaagagtggactcgagaaggttccaggttagtgtaccaggtaacagctaccccagtaagattttcttggaaggaatgtatcagcagttcctcatcttttgcacatgcccccatcttccgacaatacatctttagatggttcttggngcaagtaatccccttaaacttgtcaaagtccagcaccttgaacttgagaggggtgatgata

SEQ ID NO: 37151 - DNA, 404 bp, Glycine max
  unsure (1)..(404): unsure at all n locations
ccacccagctcgcccaggcgagctaggttgctttctcctatagaacttcctggaaggcccaaatgggcttggttgctatttgcacccncttctttgctaaatacaccccttgcctttgtttgctgattctttntctgtaacgttacgaaaacttacaaattacgtaacgatacttgttttccttccgtaatgttacggaaccttacgaattacgtaatcatccctttcttgccttccgaaatgttacgaaactttacggattgcgcactaacacttccttttaatttccggcatgtcacggaacttcacggattgtgctacaatgctttcttttgacttctggcatgtctcgaaacttcacgaatngcctaacgatgggtgccaagtacctcgaagtggtcaaa

SEQ ID NO: 37152 - DNA, 390 bp, Glycine max
  unsure (1)..(390): unsure at all n locations
agcttangtattntaaagtcatgtcaataataactgatttaatttctttaataacatntaaatgccataatgattattatcaaagaaagtaaagaggagaccaaatattttaaacttgagtgtgtcgtcttagttctctatatgtatatatgagattatcgaggaaaccatccttatgtgatattctatccatagctttactttgatcacgcaaccaaaacgttatcagctttttttttttttattgatgctatcacctacggatatttttagggaagcatttgtatgaacttcctgtctttgatttacaaaatatccttctttgttgggatacaaacacatgttctaataactaacttattgcttttggatttgatatggatgacctca

SEQ ID NO: 37153 - DNA, 429 bp, Glycine max
  unsure (1)..(429): unsure at all n locations
ctctgaacgcatgataatatgttgaagatataacgcatttaataatatgtgatgtgatgganaattatggtagcatcactaaatatcaatacaagttatgcctacaaataccaaaattaaataaactcctaagaaatctgaagcaaagaagcagtatccagtatgactggaattgggtgcactaaatttcatgattatattgattttcacatattgcatatgcctaagcattagtagttttggccttctggggaaagttaaacagagtgcatgcatgatttagactaacctcaagtccagcgctattgacgagttcacgaacttcatgtttactaccttcatgaacctatgagagtccacattaaacgaagcaacacatgtcagctaggtcttctcttcatgatcggataagtctcatgctctataaag

SEQ ID NO: 37154 - DNA, 370 bp, Glycine max
  unsure (1)..(370): unsure at all n locations
ggatccttaatcacctgcggctgcagctggattcctttagtagganatctattcttcctaagatagagccaaacccagtcaccgtcattaagaactaactcttttcttcctctattgcctttagttgaatacacctttgtttggttctctatttggttcttaaccctttcatgcaacttctttacaaactctgatctagattccccttttttatgtataaaagaagtgtctagtgggaggggaatgaggtctaatggtgctaggggattgaacccatagacaacctcaaaaggggattgcttggtggttctatgaacccccctgttgtaggaaaattctacatgaggaagatacttatcccaagacttat

SEQ ID NO: 37155 - DNA, 420 bp, Glycine max
  unsure (1)..(420): unsure at all n locations
gagagaccagtcaagagtcaaaggtatgatattataggacaagttgaaggattctcaaggttcaaagagaagcttgttcaaatagttgagtaggacgaaggcgaacatgtgggcaatcatcgacaaatataaagaaaagctaaatctagctgcaacccataagcaaaggctagaggacgagcacacaaaggtatcggtcctacaagagaaaagggaagcgagggagaaagtgatagattcattagacaaagaagctttgatgtggatggataggttcgctatcactttgaatggaagtcaagagctcccaagaccattagccaaagccaacacaatggcggatatgtactcaactcccgaggaagttcatgggcttttcaattatngtcagcatatgatcaaatngatgttccatataat

SEQ ID NO: 37156 - DNA, 536 bp, Glycine max
  unsure (1)..(536): unsure at all n locations
ttggtttcactcgatcccgtgacctctcagngaacctgtagagatgcactctggaagacgcaacattcgttgtccgcgctcaccgtcttcttctcgataagcacgcgaacgtgcatactctcactctcatcttgtggccggcgctgatcacatgatcgacacgcgctttctctacgttgtacactatactcgcatgagaaaggccccttccagtcatgtcctgatgatgcatactctccgccaaccatataacacattgctctgactctgcctaatgaatgcaccctttaagctctacctctagctgtcttcttaacgttcctggtatatgacccattctctctctcacccctagatatattactggcagggaggatgagcggcttctcatcttctgcggtgtgcacatcctacgacgatacatatgtatagtgttcttggagagtgttcaacccttagacgtttcatactacgtcaccttgtactagagaggtgtgatgatatcgcgtactaggaacgactctccttagtgtgcg

SEQ ID NO: 37157 - DNA, 433 bp, Glycine max
  unsure (1)..(433): unsure at all n locations
cccttagagtcctctcacggngtggaggatgtgccatgtgctcaaaatgttcaaaatcataatgttcaaaacaacaatgctcaaaatcacaaataacataatgcttaggatgctcaaaaggtactaaatgatgtctaactaatctatgaaatgtcctatctatctcaggatcaaaaggttgtaagtcagatggattgcctctagtcatacactaaattcaacatgcacaattagttgccttcttatgcaagtaacagtgtatgtttgaactacaactacaattaaatgctatccaaataacttgaaattttgtgagcaaacttataaaatgatgagaagatagcacanaanatttcaaacgagaattcaaagtctaactatataagctaaaaatgataagttangaaaaatangagaataatacttgcaaaat

SEQ ID NO: 37158 - DNA, 465 bp, Glycine max
  unsure (1)..(465): unsure at all n locations
agcttgttgtaggtttcataatatgaaatctgaatatatatgtgcacggacgcattgtaatcgattacacacatatggtaatcgattaccatacagcaatgttgtcagacataactgcttgtaatcgattacactattatggtaatcgattaccagaggttatttgagccaaaaaataaaaacaaaaggctttctaggagagaagaagttttgagttactatcacaatactttttcatgagaaatatatataagaatactttatgaataattcttaatcatgtaattcacatatcatattatgcacgaacattaaaacatgtaaataatcaattntatcaaaacaatcaacacaagtatgaagagtattgattntattgaaatatatgaatgaatatttcatgcaaataagatgaaatcaatcaagaacatctactcatgatttcaaacaatcagaacacaaata

SEQ ID NO: 37159 - DNA, 339 bp, Glycine max
cataaatctaaattataaaatgtactaaaaacatgataataataaaactgttcaaaacacagggaaataaaaatcctgatcctgtcaatgatcctgtgcggagtctatggcatgctcattcatgtccaaatcaggagtgcctgatgatgaatcctgaggaaagggtcggactggcactggtgcagatgactcacgctgagaagaagacatgtctcgcactgcaatggaaggctttggtgtcacttgtggggtagccgctactggatcagtctcaaaaatgaaaggctcacgtggagtgtgctcatgcacctctataatgttatactcctggtacgactg

SEQ ID NO: 37160 - DNA, 438 bp, Glycine max
  unsure (1)..(438): unsure at all n locations
tgaggtccttcatgatgattntccaccatgaagatgcagcggaaggcaaaggagaagaggagaggggaggcaccatccactatggaataagtcatggaagaaggagcttcaccaccaagaatgtgccttggataagaagcttgaagaggatgctttaatggaggaaaagaaaaagagaagggggagcacgaaattgaaggaattaaagagagagagaagtggaactttgaagtgcgtctcataagactttcattcattaaagttacaaaaagtgttacacatgcttctatttatagcctaggtagcttccgtgagaaacttccttgagaagctctcttgagaagcttctttgagaagcttctctgagaagcttccttgagaagctagagcttaactacacacatctctctaataactaagctcaccttcttgagaagc

SEQ ID NO: 37161 - DNA, 393 bp, Glycine max
  unsure (1)..(393): unsure at all n locations
taagctggccgcccagctcgcncaggcgagcaaggttgcttcctccataatctacagccttctggaggaatcttctggagggcccaagtgggcctggtttctatttacacccccctttttactaaatgcaccccccttttctatttttttgtaattctttttccgtaacgttacgaaactttacgaatttcgtaacgatacttattttttcttccgcaaggttacgaacccttacgaattatgtatttactcttttttagttttcgaaaaagttacggaaacttatggattgcgcaaaaacacctcttttcgacttccgccacattacggaatttcacggatcgcgcaagcctgcttactttagatttctgagacgtctcaggacttcattta

SEQ ID NO: 37162 - DNA, 321 bp, Glycine max
  unsure (1)..(321): unsure at all n locations
atatctacaaaacatctcatggtagtattgctgtatctcanaacaaataaacacatgattntagtcctttgatctgaaaaggaagagacgaagactaataaagacattggagtacatagttaagaggaatcttcagattaataatatctctaaaggtttggtcttcaactgaatcgagtgatgtagtgtaatctatgtaagctacctcagcaagagggacaaagtttgttattgatggtgttgtatcttanaatatatagagtatcctagatctccgagagtggttgacatgcttcatgaaagtcatgattgtttccttac

SEQ ID NO: 37163 - DNA, 451 bp, Glycine max
atagttgagcttgacgcttttatctaaaaaggctgtttaaaaagcttgagcttggcctttatagtaaacaagccaagtcgagtcaagccttacataggccgagccaaaggccctcgacaagctgctcggctcatttccacccctatatggcaccataatatcaaatcatgaaaaaaaaatgatgaaaaataaaaactatccacacatatagatacaaattataacatgtctaagtataatcataaaatctaatagaatgtcaaaaaatacctaaattagcatattagagataaaattaatctagttagttactagaagttatttgaataagttagttggttactcaagttatagttattagaagttatttgagtaagttagtgtcagttacatcaagtagttattttatatctttgtataatacatcaactttataaatacttgatgaatg

SEQ ID NO: 37164 - DNA, 305 bp, Glycine max
  unsure (1)..(305): unsure at all n locations
tatagtctgaattctgggtcctcttagggactnatacaatatatccgctggctggtcattagaaccaatgaactcgatgacaatctccttggacagaagcttctctcgaatgatatgacaatcaatctctatatgcttagtcctttcatgagagactgggtttgaggcagtatgaagagcatcctgattatcacaatgcaacttcatttgcaactcttcacaaaacctcaattcttgcacaaattgtcaaatccacatgaggtcacacgttaccatagccatcgatcgatatcaggctttgcact

SEQ ID NO: 37165 - DNA, 443 bp, Glycine max
  unsure (1)..(443): unsure at all n locations
atattttactatatatgtgtgtgtcttcgtttatctctacctgtttaanaatgtgataattcactcatcatgtgttgtttatgtttggatcatgtgatgatcttaaaccttgtgtttgtgagagcaaatgactaggtgaattactttaagaaaccttgtgatggaggactctgagacacaatattttgataggatgtaacattggaacaagagtttntattttaattgcatgacgtatcaaacatgtcattntactttatttgataaacttgaacagtcttgttttaagtcataaatatttctaagaaattntatttggtaacaagtgaagcgaatgtgaacattacccacgtggactgatttacgattnntattgaataaaatngattaattagattccgcatcttatatatngttntttcatattatatgtatgtggagta

SEQ ID NO: 37166 - DNA, 455 bp, Glycine max
  unsure (1)..(455): unsure at all n locations
agcttatccncataagagtgcagaacagctggttagtcatcattgattataggaggctaatccaggtaaccaaaaaagatcattttcccctgccattcattgatcaaatgcttgagcgcttggcaagtatgtctcattacaatttttttatggtttttctggttatttacaaattcatattgctcctgaggatcaagaaaacaccacattcacctatccctttggcatttttgcctataggaggatgccctttggcctatgcaacgcctctggtaccttccaacggtgtatgcttagcattttcaatgattttttagagagttgcatagatgtgtttatggatgattttactggttatggatcctcttttgatgcatgtttggatagtctagatagagttcttaatagatgcattgaaactaaccctgtgctgaattttgaaaatgtcacttcat

SEQ ID NO: 37167 - DNA, 466 bp, Glycine max
  unsure (1)..(466): unsure at all n locations
tctaagtacttgattcttggaaagtgatgtgccatcattttcttctattntctagaccctttttgcaccattataattactgattggccttaattgtcaattaatcaggcagttttattatttgggctcatttagctaatttgatgtttttaatctaattttaggaattaatgaaacattgggcttaatccggattttggttatggacttgaagagggcaaataaagcagcgcttatcttagttaatttctaattaggaaattttgcaattntattttatgttgttcagtgtttattttcgtttgggccagagtattgtaatagagcccagtgactttgagtgactctttttaaatagcagccttgggattcgtgcaaggcattctattatgctattttcattattcagagcttttggttgaggttntcacgtntntctgttcccttgtacggttttcgtcttaat

SEQ ID NO: 37168 - DNA, 356 bp, Glycine max
agctatgcaattcggcatctatagtccgagagctctggacaattcattgtttggtcattcgcattctatcagatccttatgatataagctaagtcaatgaccagccttatgttttcctatgaggtgagagcatcatatccaactccccttgatctacacaaggatgtgattaaagctgggaagcctaaacgagaagagttagattgagccatcatggtcatttgtctagagatcaaaccgccaatgttcatgtccatccttgtgattaaaccatagaccgacctagctctatctgtgtcaaatatgaaatgagggatgtatgagctatgtttgagtacgagaagacactccatgtc

SEQ ID NO: 37169 - DNA, 207 bp, Glycine max
ggggttggaaaagaattgcaacgactaccgctgaaaatttggaattaacgccttgcagggaactaagacgacctctgatgactattggactcatctctctgtcaaagttagtagacaaatccgaaattatgggagagaaaggcccacttacaattatttacagggtaagctctgagaactaactgctccctgtaacatactttaatg

SEQ ID NO: 37170 - DNA, 409 bp, Glycine max
  unsure (1)..(409): unsure at all n locations
tattatgaaattgatgattgctatngcgccatgacctgagtgagtgattcatgtgtaatgtgactggcgattgaaaaatgaattctaaatgataaagtggtgaagtgacgtgagttgtattaaattgagttatgtgataaatacttatataatttattcggattacgtctttgtgtatttggtattttttttttataaaaatgtgataacccactctctgtgtgatatctgtgtttggatcttgtgataatctcaaaccatgtgttcgcgggagcaaatgactaggtgggtgactttaatgaacctcctgttataggatgctatgacacagtgttctaataggatgtgacattgaggataaatatttatgttaatagcatgaggttgagctattgtatcttatctcact

SEQ ID NO: 37171 - DNA, 416 bp, Glycine max
  unsure (1)..(416): unsure at all n locations
acctaagttccacattggctataaatagtgccaagatagagtatgtaagtagagggcaaccctcacccagtgagctagtttttggggttgagttaggctcaaacccacattttaactctaaatatactaaaatatgacaataaaaattgagatttatcatcttaaaaagaacataaaggaaaagaaaatatatcaccacttacaatacttccaaattagtcaattttccaagattctctggcaaggatccaataatgttgcaactcctcaatattctggcaaccaatcatacaatatgcaaagtgatagcaacaacacataagcatatctttattntcattccctgaaacactttcttatcaagacaataacttgaatagtaaaaataataatcataatcaaatcatctgactcac

SEQ ID NO: 37172 - DNA, 593 bp, Glycine max
  unsure (1)..(593): unsure at all n locations
ccccatcgatagttgattgtttaatagaantgtatnntntcnnataaannnnacagaaagngannttattcattgatgcgtgtccagccagccacgcagctgagcgtgcgactcaacgcgagagatgcagaactgctgtctcgttttattccttatccgacgctcatcctcgtaaccaagaaagatcattctcccctgccattcattgatcatacgcgagaacgctaggccaacatatctcataaccaccctattatgtggcatgcgggcatctacaaattgatatagctgctgacgaacacgaaaacaccactttctcctatacacttcgcatttttgactataggaagatactctatggcctatgcaacgcctatgggaccttccacactgtgtcggcttagcatctccaatgatccttaacagacttgcttgaaccgaggacatggaagaattgtactgtatatggatcctctatcgatgcatgcctgcatacaccccatacagctcttaatctatgcatcgaaactacccctgagcatgactttgatacttgcacttcatcgatagacaaggactagtgatagggtacg

SEQ ID NO: 37173 - DNA, 544 bp, Glycine max
  unsure (1)..(544): unsure at all n locations
ggatgttgcctcgatgcattgcagaacccatnaaattggagactgtcccctctaagcacggatgctgggaacgtgaagtgccctgatgttcgtctagactgtagaccctctgggcactagtttcatcactgataggacgcaattgtgaatcactcaggcagctttattatacactgcgcaaataatctgattcgacgatctctaatactaattatgaggcaaaaacgagacattgggctcaatgctgatattggatctggactcgcagagggcctatgaacccaccctaatctcaattcgtatctattaggaaacttagcaattttattgtactccgtcagtgatatttcattgcgggacgagcattgtatagagcccagcgactctgactgaccatctgtagatacagcctttggagtcaagcgcgcattaaactctgctattggcattatatagagctctggattgacgtctgtgaatatatcgtacactgttacagatgtcgatctcaatgcagaattctgactgtgctgtaatacaaatn

SEQ ID NO: 37174 - DNA, 476 bp, Glycine max
  unsure (1)..(476): unsure at all n locations
agctnttaacactttctacacaaaaatntaaatgatgttaatattccaattattcacataaaacggaagaattaagagaganaaattaacaattcctacataatttaatcccaaaatttacctataaatagcagttatcactaaccaaactttgtgtaagtgtaaattgaagatcttagtcaaacttaaatcacttttatgtgacttaaataaaaaggatataacaaaataggcctctcgctagatgtggaaagcaagttttcttataggccataaatttatttgctcgtctgactcatctaacccattgtgttaggccaaattgaccatttgcctaatattatataattntttgacaaggaaattaaataaaatagtaatatttcatcaaataggtgttatgattntnggagggaactatngttaactttatcactttttgtattcacactatccatatatgtgttttttatgta

SEQ ID NO: 37175 - DNA, 411 bp, Glycine max
gggtattgatatggataagactagtattcaatagactaaggaagcccaacaagctattaaggagaggcccaagtgagttagcatgaagccaaaaaattgaattgtttatattcattacagaggattattatagtggggtttattaacggaccattctaaaagttagtagtggaattctgttagaggggaattggggaaaatatatgagtgttaggattgttgtcctttatataatccttactatattggtgaaaagttatcaatgagaatattgtctatctcttctctctagtatcttcttaaaggtttctctatcctttaatttagagaattccttctacatcatcatccatttgaaacctacaaccaaacaacaatcaaaccagtgtgactctctcaaaattcaaattc

SEQ ID NO: 37176 - DNA, 354 bp, Glycine max
  unsure (1)..(354): unsure at all n locations
ttgacaagntgaagttttatcttttttttggacaatgacattctacataatttgaagccgagccacccacttcggacattacaaatattggataaagttaccatctaacattttcacataaactgaaacgatacgagactcacataaaacatgaaagtactttatcttatcacctatcattggctatgcactacaattaaacctaaaaataatatgcttataatgatgcaataaaaacctaagtggagctgcgtctagtcttccttgcctacaggcatcaaaggccatatatatctatgcaattcctacctaaatagacttccatctcttcctatttttgatctcttgagcttg

SEQ ID NO: 37177 - DNA, 430 bp, Glycine max
  unsure (1)..(430): unsure at all n locations
atgtacatggatatttcgttgaccatctntcctcattctaatggttttgcgcataatatagtcaacccaaatgtggtacttttgttatactctatttgataattgcaagatattgacaatgtgattgtgagaattgaattggattgtatttgtttagataacttcccctatcctcaagtctaactaggttggttgctttgtcgtctcaattatgatttgtgcatcgatattgtgtaccatgttagtctaaaaaactctttttatcattctttttagcgaagaaactctttttttcattctctttagcgggcgatattgcgctgtgatatcatgttataatttgtgcacaaacccaataaggaaagagtgtggactgtgctggatctatatcaagcatcaatagtgtattcttctaaagttgatatcattg

SEQ ID NO: 37178 - DNA, 454 bp, Glycine max
  unsure (1)..(454): unsure at all n locations
agctntgagacgcatgtgatcctttggcatcatcaaaacatcatcttaatcctttgtctacaatctccccctttttgatgatgacaatccctgaaatcaagacaagctatatacaagatgatagcacgttcacacaacccttactccccctatcttttgccatgtatgcctaatgataaatttctaattgatttctaacccaagtcccaagttctctcaagttctctccccctttggcaacatcaaaaagaactaagcaacacaatcaaaatccaaacagagcaaaacaataaaccataataaatccagacattgtcataaccaaccaaatcaaagtcaagaaacataatataagtgcaagattacgataactaagcaataataagccaaatacacggcgataaaccagagtactaataatacttaattaccagtaatacttagtcataatact

SEQ ID NO: 37179 - DNA, 404 bp, Glycine max
  unsure (1)..(404): unsure at all n locations
atgcctggttaacctggtaacccaactggccatgaatcaaanatctgcacctatcgccagactctgtggtttatgctcctctgccgaccaccacactgacctttgcccttntatgcaacaatctgaagcaattgaacaacctgaagcttatgctgcaaacatctacaacagacctcctcaacctcagcagcaaaatcagccacaacagaataattatgacctctccagcaataggtacaatcccagatggaggaatcatcccaaccttagatggtcaaatccttcacaatagcagcagcaacaacaacaaccttattttcaaaatgttgctggcccaagcagaccatacgttcctccaccaatccagcaacaacaataacaatagccccagaaacaacaaacag

SEQ ID NO: 37180 - DNA, 489 bp, Glycine max
  unsure (1)..(489): unsure at all n locations
agcttcctcggggccatttcctgcgaaggcaatcatttgtagagttagttctaccaagaaatgctattcttataacgaaaatggcatacgacctcccccaataacacaaacatcaatgtaaatttagagcgaactcatgcgcatactttctttcgaacattcactcgcaccagatattcttctaactaagaaaaatgcacccaggcacaatcaaggcaccttcgttacctagatcacttatatgtacttccaaggtgtatttgctacctacatcacatgcacttcctttgctaaatttacatacatgcatactcaaagcattttggctaccaaaaattgcatacgtgcacattctggtatttctaatacctatacatatacaaactntgtgaatgaatcttggtacctacacaataaggtgctacatttcatgctttattcaagtggttttgctacctaaagccgcatgcaaattcaagtatatttctt

SEQ ID NO: 37181 - DNA, 418 bp, Glycine max
  unsure (1)..(418): unsure at all n locations
gttgcgactgactgtaataatactatatcagaanaagattaataaaaaaagccaaattgtcccaaacaatgctctctcaagtaggatcaatatctgaaaaatgaaatgttaaatttagaaatctaagtaaatattgattcctcattttttaaatgttggaaagacttggaagacacaaattgcattaaaatacaaaatgcaaaacatatagtgggactgagacacattaacagcgtttcctcaactcaaaaattataataatcagaagtaaagagtatgttaagagtgtggtaacatactctcacaagctctgatcatatgactaaaattaattggcaaaaaagatatttagcagatagccaaaccaacttcactattcctagttagaaattacaatattctatattacctgctcatt

SEQ ID NO: 37182 - DNA, 449 bp, Glycine max
  unsure (1)..(449): unsure at all n locations
agcttcatacattcgtattcaatacaaccattaccaatgtaaattaattgacggtaaaaaagatatagtaaaatttgtaacctccaattgcatcaataattgtttttccttaaggcatcaagtgacatgtggtcacttattgtgacgacttgaggaccactacgacattcaaacaatatccctttaaatgatggaatcatgttaccattgcaatacacaagagcaaatacactctccatgtgtttaagccatatggtgaatatcaaataaaagtgtttagttgcatcaaactcttagtgatatttattagatgatctattgntctctcgtgacccatatcacatcaacagttcaaatgacaccaaaaacaaaaacataaacggntaagaatgtgtctatatntaatacggntggtatgcatataagaaaaaaacgattgttcaccaaat

SEQ ID NO: 37183 - DNA, 403 bp, Glycine max
  unsure (1)..(403): unsure at all n locations
tgaccagtcgctaatgacgaanaggacggttcaacatcagcatccaatggcgctttgaccctactcatggagggatgaatgcgttggtcatcaccctcatctcctgaaaaagacattccaatttatgcaaccgtgagccaacgtattctgaagaaaataaatgaacaaggagaacacaggataaacacatcataatgccccaagcaaaaatatcaagtataaagccccaaaaaatatacatattgtaaagcaaccaaatgggagagaatagcaaagatgggtacttgtagaggatatcttcttcttcttacagacgcanaatgtcgaactcaaattcagaagatccccacattgcttttgatgaataacaacagcacagaatagtggaagaggaagcactaat

SEQ ID NO: 37184 - DNA, 223 bp, Glycine max
ggcgccggtccttatacgccatatcatgatttgctcgtcagactcaaataactgacagtgatacgcctaatagcacttatgcctgcgtatataccatgcgttgacaggaacaataattgactaaaatatttacgccacgcgtgtcctcatctggaagagctgtagtcactatactactttcgtatggaaccattcaatatgggtgtttatgtaatcaacatcg

SEQ ID NO: 37185 - DNA, 363 bp, Glycine max
  unsure (1)..(363): unsure at all n locations
accgatatctcataatctattacactattgtttgagacaatgactgatttatttaggagtctttgctttaatcgattaccaagtggattaatcaattacttctatctcgttcaagtgttctggggtgaacaaaaacactntaatcaattacttaggttatctaatcgattacattgttcttgagttgctttctagatgttggaagaacattttaatcgattactttgtgaaaataattgattactctatagatttaatcgattacagacggttataactgttttctctataaataaccatcttgtgttcacatctacacatcaagagatcattacagaatactcaatacatctcagaaacaac

SEQ ID NO: 37186 - DNA, 469 bp, Glycine max
  unsure (1)..(469): unsure at all n locations
tactgctggcagtaacacctttgccatggccactaacaactccaccagtcaccagcacgtacttcattntttttctctatgtcttcttattcctcgctctcttcgatgacaaacagagcagagcagagcaaccttttcaaacagtagaaaatggtttctatgttctagttttagctttttggtttaccttttggcttttgcattcaaagagagagcacaaacaacacagaatcttgggtttgcagcgaaaatatgcagagttgcaaagaagcagagtttgaagaaacaggagggaaagtagaagggaatggcaaccaatgctaccattggttggctntatatactaagtattctggttctgattccaaggatgagacatgataaagatgagagagagagaaagaaagaaattaacgaanacaaattgacccgaagaagaataaaaataaattgcacttatttaaattga

SEQ ID NO: 37187 - DNA, 410 bp, Glycine max
  unsure (1)..(410): unsure at all n locations
catttcagtctcttaccaagtaaatggatcatttttaaggtccaacgccttataatgatcacccctcaagtaaaaaagaatcgcttgattcacgcataagaaagaactacgtaggtctgatttcctctccaaaggagggtacgtaggagcaaaagcctcgcttttgtcgacctcaaaaaataaaaagaaataaagttaaggtaacacgatttccacaattctaaaaaataggctgttgtccttcgagacaaacgtgagaggtgctaataccttcctcaagcgtaaatacaactcccgaacttagaattttctttntgaccggtttccttcggttttcccgacgttttccacanataaacgttggtggcgactccgcgcatctttcctcctttgggaagcgcacctgtgag

SEQ ID NO: 37188 - DNA, 452 bp, Glycine max
  unsure (1)..(452): unsure at all n locations
gaaggctaacaatggtgatggaggagcangaagtaaacgtaggggaagaaggagaagaggctggaaatttctggaggaaagagagagaaggtcttgcttttaacattttttttttctttttctttttcttttcctttttaattgcatttccacatgcaattttgtgattggagcaaaagggacccacctttaatttgactttgaccacgtgctcagtcataagagaagaaaaatctagacctttntggatgctgaactattgcctcgattttcatgccgtctccccaattccagttctttgcgtttctctgcacccgttggggcctattttcaatggtaggcaatatatatatatatatatatatatatatatatatatatatacactgaataataattatttaaatgtaatatttacaanaattcaaggtagaaattccaggatgtcacat

SEQ ID NO: 37189 - DNA, 302 bp, Glycine max
atacattaactattctgatcatataagccagtgtgagattatattcaaatcatgtattggcaccagcttgatatgaatgagatatttgagatttgaagggtatccttgtttggttaatttgagaactatgttaggtgatatctcctagagctgcaatttggaaagaatggtactattattgttgactactcacaaaaaaagagtgtgacaagttcatgatatcatggttcctttcttctggtccaactggttgacattaatcctttatgtaagaaatttgtagggaacacatttattctgtc

SEQ ID NO: 37190 - DNA, 489 bp, Glycine max
  unsure (1)..(489): unsure at all n locations
tgcagaatcaagacacaattgcattaaactaatcttctntgtgttcttgccttctttntaaggtagaaaactcaaaaaaatcattttcttctgtttactacatttcaattcatattttttctttaaaccatttatccaaaattaatttctttctaattattacttattttaattattggattaaacatctttttgatctttctaaatataaaaatggcttttggtcctctatttctaagagattgtcacagtacatctatatcactcatctcgttcgatataagtggagttaacggtaatgcagtttgtgacaatttaccagcacatcaagatataaatgatatattcatagtgttttaaccacacaaaaattgtccctcatccctagtcgctgaaacgaacataactccaaattattattttcttaccttantagtttgaaaacactatacactaacatctncttccttatatgtntnngtaatgtat

SEQ ID NO: 37191 - DNA, 423 bp, Glycine max
  unsure (1)..(423): unsure at all n locations
agcttcngcttattagtgcacatctccttcaataatttagcatatcttggaatttgctttattgcatccagtagaggtatgtctacctctacttttctaaatgtttccaagatctccttctttggctcttccatttttttgatggaaattgctcttggagggaatggaagagggatatgttgcttctctttagattcacctgcatagaaattggtaggtatcttactctttaaatttttgtcatcatctttttctggagtagagagaagttgggcaggttcatttgcacatgaggaagatgttgctggttgaggttcttgacactgctttcccgacctcaatgcagtggcactcacatatttgggattctggacagattgagaacgtaatctgtcacaattctgggactgttgttgattaact

SEQ ID NO: 37192 - DNA, 508 bp, Glycine max
  unsure (1)..(508): unsure at all n locations
ggatggtcttgcatcctgcgagcgcgatctctgagtcacctgcggcatgcagctttgacaggcctcgactatgcatctttatctgacctcattcaagcaccacaatatgggcttggcctcaggccaagtattatcagctgcactttagccaagctcattttactcatggcttactagcttgcgcatctcttctgctcaggctcagccgggatcagaagatattgacacaatcacctaggttggatgacaccaactatgtgaagaagctaactgctcctagtgtgtgatacctatctaccttgtgccaattgaggacaattatgcatagactgtcactccagcatgatctctactggagagagaagttttagcataattacccatgactagaaacaatcacatctttttatatgattagagcgtctgtatgagtgaagaaacgctgttttcactttaaaaacacatttctgcttcatccagagtgagagagataaatgatatttctccn

SEQ ID NO: 37193 - DNA, 335 bp, Glycine max
caccagtcaccagcacgtacttcattatttttctctatgactccttattcctcgctctcttcgatgacaaacagagcacagcctagctaccttttcaaacagtagaaaatggtttctatgttctacttttagcttttgggtttaccttctggcttttgcattcttagagagagcacaatcaacacagaatcttgtgtgtgcagcgaaaatatgcagagtcgctgagaagcagagtttgtaaaacacgacgaaagttaacggaatggcaaccatgctaccatcggttgcttatataccagatctggtctgctccacgatggaatgatgacatgaga

SEQ ID NO: 37194 - DNA, 540 bp, Glycine max
  unsure (1)..(540): unsure at all n locations
agtggaatgatcactgattccctgcataaccncacanatttatgactnanacagtgcagaatcaagacacactggcatgaagctaatcttacttgtgtgctngccttcttatcaacgtggaagactcacaataatcattttcttctgttcactacatttcaatccatattgtttctgtaaaccatacatcgcaaattaaattctatctaatcattacttattttgatgataggagtatgacgtctacctgatctttctaatgatcaaaagggcatttggtcgtgactcccttatagatagccaccgtacatttctgtcactgacctccatggatatcatgggtgttcaccgtatggctaacagtgaccactttccatccacatagatctcactgatatagttatcgaggcttaccactctacactaggtctcatccttactctatgaatgaacttatatgaactatgtatatggtagctttaagtaagctacctataactttatctgcttcataatgcactacccgttacatcactactt

SEQ ID NO: 37195 - DNA, 414 bp, Glycine max
agagctcgccctcctgccatcctaactagagctatctgctgctgccattccttactcccagaagggtgtcacagccatgcacctccttgtcatccctgatagggtctccactacggctctacgccgaatgcatatttttatcgttgctatcgatatatatatttgttgaaccataggactttggcctgctataccaccctcaataaactgactactctttatggtgagacataacgtgaaagcattctatcaaaaatcctctatagttattgtgatgaaaggatcaaagctccgtgcagttcttctgctttaccaatcaccttttaacctctgccctcggaatggatcattatctcgcggtttcaccttgaaaaagtgctttagaagagtgacacactttttatttatcacatg

SEQ ID NO: 37196 - DNA, 553 bp, Glycine max
  unsure (1)..(553): unsure at all n locations
cgacaatggnnnnnattgagtgcattcaatngccncgncacattagagaatactccaagctctaactcctcttcgagggttctgtgttataatagctagcttttctgttctagactttctcctttacacgcaatgtaacccacacttgcgttagatgttgaatctatgtcacacattccgtgtgttgtattacatttgcctgttgagacttagacttacagttcgatgtcttaatcgacacgaaggagtctaattggttgtatgctgtaagactaactcacagtacttgacacaccataagatactatttctcgtctcacataaattgtaaagtaaggtctggacgtagagtggtttaacttgttatgggagcgatattcttctatatacctaaggacaacgagaaatggttgtcttgaatcaccagggaaaccaacaccgattattaaatacgtattaatgtgtgtacttccgcgctcgctttgtgtctttaattcagcaaaacaaacaacgccccaccccccaattgttaactgttactgcgaggaatatn

SEQ ID NO: 37197 - DNA, 280 bp, Glycine max
agcttcaaatgtatttgaatttagcaccaataactaaattgtcattcaatgaataaaatagatgaggactctctcgaaaggattaaaggaacaatcaaagagtgagtaatgtcataatcatttaacaaatgaacggatcagaatgattgaatgaattaaagaaggaactatcgattcaacaaaaattatcaagtaggttttggaggttccttccatagaaatggatcttagctttagtgccattttgcttcttgaagtatttcaaaagaaccttctcttg

SEQ ID NO: 37198 - DNA, 394 bp, Glycine max
  unsure (1)..(394): unsure at all n locations
ntggcaacacaaggtgagaggctttattgggaagtgtgttggggaggagcaatctgctttcaccgaagggagatcgattctggacaatgtgctcattgcagtagaaatcattcactatcttaaatccaagaccagagggggaaatggataagtggcctgaagattgatatatgtaaggcctatgacctcgttgactggggtttctagatgcaatccttgtcaagttgtgattttgcaatcaatggaccgagtggatgatgatgtgtgtcaaaactgtttagtatgtagtggtagtgaatcatgacaaggttgatcctatctcccctgagagatctctggcaaggagatcccttctccctcttttatatatataattttagctcaaggtcttaca

SEQ ID NO: 37199 - DNA, 347 bp, Glycine max
agcttattgcttttgcagtcacttttttccacaaacttgataaatgatatttttgcagaggttggattattacttccttgtaatgaatgcgactgttttttctaatcatgattagggagggcattgtttctgatgtctcaccatgttcaggaaaattggctgggaataagcaatcaatttttttatgaagtaaataaaagcaagaccacatttctagaaattggcatttcaaatgaagatgttaatatgttgaggtaaggcagcttctattgagtgttggctttgtatactcaagttagtggtagaactagaaataatacacccgaatccagattatatttgttatc

SEQ ID NO: 37200 - DNA, 362 bp, Glycine max
ttagtcatgctgttgttcttaacatcaaacaagtacagactaacacacacctttattagcaagagcccatctttgaaagctagaggattcacccacgggccattcaccttctctaacgcatggctcttcaaattcaagaacagaggccattctccttcaatctcctcaagaggcttgcaatacactattgcccatttatagtcataataatcctcaagacaccaaacatggacaccctgctctgacacaaccacataatggagcctcccttcagattccccaatgcaggcttcgggaaccatcatgaactccgatgctggaaccggtgccagaaccaaccaagacagctcattctcaacatt

SEQ ID NO: 37201 - DNA, 357 bp, Glycine max
agctttttatccaactggtttaaggttcaagaactctagtgatggtaaagctttctccttttcttcttcttttgctttgattatattccctgagtatgaaaagttaggagggcatggtcttgcttttacaattgcatcttctaagaatctcaaggctcttccaagtcagtatcttggtcttctaaactcaactagcacagggaactcctccaaccacctctttgctgttgagtttgacactgcccaagatttttagtttggggacattgatgacaaccatgttggaattgacatcaatagcttggtctccattgcttctgcacctgtatgttactacaccgggggtgatgataattt

SEQ ID NO: 37202 - DNA, 387 bp, Glycine max
  unsure (1)..(387): unsure at all n locations
nttagcatgggcattgtgttcatccggcatatgacttaaacttgaaacaatgtggggttgaattctagaatgttggctgtaaaaaccaatattaaaacacattcataactgtgacaaaatatcctgcatcaatgatttattttttgtaatacaaaaaaaggattactacctcatgacattaattctattttgaacttcattttctttgtcaaagatatatagttgtgcaaatttgggttcttttccaggcattggtaataggctgcttatctggtggcatggttggccctgtattctaattgtaggaggtccttgatgtgtcatcattttctcctatttcttaaccctttttgtcaccattttaattaatgattatgcagttttatc

SEQ ID NO: 37203 - DNA, 344 bp, Glycine max
agcttgagctcactgttgctgccctacaaagctccacgaaatttgtcacggccatgctcttccttgtgagccctcttggtttcttgttcaagggctcttgcggttaaattatttttatctttttttgcaagatatattttcattgaatgaaaggtcattttaaggcgttagaccattaaacgatctttcgattcttttgaaaggagagaaaacattaaggcattggaccattaatgatctcttgtttttttgaaagaggtaacaaaactacgtggtgattttatgctttagaaatcaacgtttaaccaataaaagcggaaaagaccatttctaggcgttggacc

SEQ ID NO: 37204 - DNA, 403 bp, Glycine max
tcatatatttaagcaagtcatacacaagctttaaatttgactctattaaacgaatgaaccaagcttgagtggtgtgtttttttttccacaagccaagcttgagctttaaggaccaacttggttcaacttgttttacacccctattctacacccttctttgttcaaaaaataaacatacgcatcttactttttgtactgttccttcaccatttctctttgtaaataccaaggtgtaatattccaaaaatagagcattatatgtaataggaatttaccttgggggatgtcaatacccttacattttttcaaaaaaataatgaattatgtgctccaccccagacatggtgttctgggtaggtatctatttgtggcttctgcagtaaataaatgttgcaatggtttt

SEQ ID NO: 37205 - DNA, 331 bp, Glycine max
agttcatgatatgctaattgaagaagtttcaaggggtgtttatatttacctcttcatctgatttagagtctggttcttctgatgcagtgtaactgtggtttacaataatggcataaacttgaaaatcctaatgagtcattagagacatctaacaacaacattcaaaattgccccatgtgtggtgtcgcttgtcaatgttaggattcacaagcgattcttctcaaatttcagccagcctgcatcaattagactttgcaccttatgcttcaaggccccataatgctcaacggaatgcctcggggcttctacatgacaagcacacgttgcgttc

SEQ ID NO: 37206 - DNA, 388 bp, Glycine max
tctcaaggaggtgagcttagttattagaggggtgtgtgtagctaagctctagcttctcaaggaagttttctcaaagaagcttctcaaggaagttttctcaagaaagcttttcaaggaagctacctagtctataaatagaaacatgtgtaacacttgttgtaactttgatgaatgagagttttgtgagacacaactcaaagttcaacttctctcccttttttcttccttcaatttcgtgctcccccctctctctttctctccctctttcttttcctccattgaagcatcctctccaagcttcttatccaaggctcatcttggtggggaagctccttcttccatggcttattccctagtggaagacacctcctcttacctcttctccttt

SEQ ID NO: 37207 - DNA, 374 bp, Glycine max
agcttatcgtaatcgattacacaatttgtctgaagcttgcaagattatgtctcgtatcaatttaatcgattacaaccttctttttatcgattaccatgtgatataatcaattactcctctttctataagtgtttcagaagtgaacaagaacactaaaatcaatcactttgggtatctaatcgattacattgttcttaagttgtttccaggttttgggaagaacactttaatcgattaataagataatataatcgattacttcattgaattaatcgattatcttgtagatttaattgattacacgcggatataattgtcttctctataaataaccagcttgtgttcactttaagaagtttaacaatgaacgaaat

SEQ ID NO: 37208 - DNA, 361 bp, Glycine max
tccccgtggcttctttgtgaagctttctcaagaggcttctttgagaagctagatccttatctacccacacccatctatttactaaattaacctccttaaaaataattacggataaaataacacaacaaatacagtcaagcatcaaacataattattaatatatagatatatatatcagggtgttacaactctcccacccttttagaaatttcgtccccgaaatttaccttactcaaacatggatgggtgagcttctcgcatttgactttctaattcccatgtggcatcttctcctgttgcacctccccagatcaccttgaccaacggaatctctttccctctaaggtgttttgttcgccta

SEQ ID NO: 37209 - DNA, 350 bp, Glycine max
tgaactctaacgataggtaaacgttctccctttcctcgtcttgtgctatgatatactccctgaacttaaatagtgagacggggtggtcatgctattacactagcatctggcaagaatagctaggctcttccaagatagaatttggatcgatgaaactttcccagcacagggaactctctgctaacgcttcttggtagcgagtgcgatactgcgcaaaaatattacgctggcgaccttgataaaaaccactgcggaaattgccttctatagggagggctccgtgccttctgcgatggatggtatcaacccgggggggattaaatttaacccaacataatttaccctaaaaa

SEQ ID NO: 37210 - DNA, 355 bp, Glycine max
tcagctatgtgaagagcatgaagacataccattttatcttcagggaggtcatattgtcaaaagttgcgaacccttggtcaacaggtgagctcaagttgaaaaacaccaacgtggaggacaaccctgctgttaccttgaactacttcagccacccttatgatcttacgcgctgagtggagggtattcgatcggcgattaaggttgtccaaacataacacgtgtacaaacttacactttgtgtgagagagaaactgcagagaaaatgcttaaccttactgggaaggccaatatcaaccttatttccaagcgccccattgacacaaagtcagtagaacaactttgtagaaacttcgtg

SEQ ID NO: 37211 - DNA, 494 bp, Glycine max
  unsure (1)..(494): unsure at all n locations
ctctctagaactattttgtgccgntgtctccgtgcggaatattcggccaagatgaaagataattgaattgatccatggcaagccancagtgatctatgcattncgccaccggcctgaacacgtaaacaggattggttctcaatgtgacctatcacaaccttcacgccctaactgcgaaagatagactactcctgcctcgatcgtttgggggaatcgttacaaatcggccgtacagcactttctgaaaagacatcctccgcttaaatcgaggctgaaactaatagcacagtgaagctatcatacttgtttgcccatacctcagttaaatgcacgagtaacgacttttatcttcaacactacaccttggacagaaaacatattttgtcactcttagcacttaaggcaccctctttttttctgccccatttgcaaacttttttttataagaaaaattggggttacttttattacagggcgccctataagtgctactt

SEQ ID NO: 37212 - DNA, 354 bp, Glycine max
tgacttagcttgggagagttctttgttcttcttcgtcgagtaggcgcttagaaaatatatggatttatatgtgatgttcttacaattagagtgggtacgtatgaaagtgacaatttcggcgttggaccaaggaatcaactcgttgacatcggtgtggtcattgtggtgtaagatgagttgttctcagaatttcgaatatctgtttttgtatgttataaatggaaactaaacctatgagtctatcgcagttgattgaacgacatgtatcacttgttggaaatcctttgtcatgtatgctcagtggctacgaatgatagactgaaaccttacctagcatggggcaagtggaaatac

SEQ ID NO: 37213 - DNA, 351 bp, Glycine max
atacatatctatatctgtgtttaatacgccaccccctgcaatcggaattctttgggctgctttataaggagaggaaggagtgtcaacgtcttcaaagaattaatatctttcttttttcctttcactcttcagctcttgcgtctcttatgtctagttataattaaatggaatccgagttttatgtgaatgacgaagaaacttctactctatctataacgagaagctaaattctatgtcaaaggaacagatatgacatgcgagagcgttatatatatgaaaaccaaaaattgatgcaagacgtctatatagttattacatatcgctgcctaatcgcttctttaaatttctttt

SEQ ID NO: 37214 - DNA, 397 bp, Glycine max
tcactctcattcccttctccacgctgaccacatagtagagtctatttcatcaacgaatatgatagaaggtgcactttcgcgtgccatttggaaaagatttgagaccagcttttcactttctcccatccactttgaaaccaggtctgacgaagaaacactggtgaagaattaaaaagttaaaacatgtagcaaaaaaatgcccacctaacctaagcacttacatttgcgaccttatttttcaaacaaaatcactgacaagcagaactattagactcagaaattgaaaatgttaaaaataacaatgttgatgattatgtgaaatcatccatatgcacacacattcatccaccaaactcagtgcgtgtttggattaacattgaatgattcaaaaccacat

SEQ ID NO: 37215 - DNA, 391 bp, Glycine max
agctttatgaacttggaaaggaacttgaactatactatagccttctcgagctggtgtatcttgatattatgcagacgctattctcaaggaacatcactctcactttcggataatgctcatcaagttgaatggaaatcttttaacaccctcatcttgctcttggacttaaacctcatgccccagcataagggtataccattataatgattgcatatttggtcatataggcgtaattgaaagaatattatttctctattgttctcaggacagatatgtcgattattataaatggattcatagttccttcttgactttcagcttctacagtgcattcatatcaagtgataccattctcttttattgataataacatgacttctactttgaatat

SEQ ID NO: 37216 - DNA, 424 bp, Glycine max
aggacctatgaatctcagcttgtgggaaacccgctgagttctttgttagcaccgaaactctaggaggaggccaagaaactactgtgtaagattttctttttttccttgttagtgttcttgatttgtgaatctcacttaaattttgagcttaatatgtggcatgcattgtgaatcacatttttaatctttatcagctaagttgagttgtttatgtatgttgtagggcctttcaaggagaaacgaagcaatgagcttaaattctaatagctcaaaatcacatataattttcacatttgtcattgagtctttgtgtaaggtactgtcaaattttgtaattctacctaacattaccagcagttgtgtatggaaattgttgttttcctaagattcaagccaggtttatattttctctgttagttctatt

SEQ ID NO: 37217 - DNA, 361 bp, Glycine max
agcttgcccatataagaaactcttgggaacaaacaaaaatgacaagagaaaaactgtttaaacgataaattatatcactcccggcacatttgtgcagacattgccgcacctcccaagaggcagggcatatgcacatgaaccctttacatgaagacgagggtgtagtagggaaaagaaaaagcttatcatcaatatgtttaaataaatataatataatactgacaataaagggtggctagtggctgttggtacaagaagctaattcctctaaagagtttgagtatgattaagtgcccaggaaaaaatatccaaagtctcacattataatacatctaattcttcattagagatacacataaat

SEQ ID NO: 37218 - DNA, 341 bp, Glycine max
ttggaaaatgatttctatacaaaagttagtcatataaaacgactaacaatgaacctttccttaaaacatgtgctttgtttgactccataatccaaggaatagcaattttgatcgccaatactttgacaacatatccaagagatgaatgactagagcatacttatgttatgcatggcaaaagattgcataaataaagaagaagtcatgataaaaaaaaaagattgcacactgactgaatggcctaactctctaacaagtcccttgtggagtcaccaactcttgcaaactatccttcgacaggagggcaaaatggccaagagagatgggccagagcgtatgcc

SEQ ID NO: 37219 - DNA, 278 bp, Glycine max
agcttattcacatagtcacgactgtttcttatcttctttatgcataaaaacagaaacattacgcatacgcaaaagatcacgaagacgcagtgggttaaaaccataaacaacttctgaaggagaacaattagtggcgctatgaacagctttattgtaagcaaattcaacatggggtaaacaagctacccaagtttttaagttctgtctgacaactgttctaagcaaagttcccaaagggctattaacaacttccgtttgcccattacgctgggggcgac

SEQ ID NO: 37220 - DNA, 510 bp, Glycine max
  unsure (1)..(510): unsure at all n locations
tcgatattccttcncgacacncgctatattctaccgaactctattactcnnaccancnnnncntagccaaggcnngtttgatgcctgcgatagcangncacactatanaatactcaagcctctatattctatttcaagggactcgatatattacttgactcgatctgacttccgcgtaaaaagagatcgccgttaaaatatcctcacagctatggttttctatttcaaccgcttgtgtttattacggacctcaattcgtattccaactaaaaggatacttcgaaaaattcaactcacctgtgttatccaatcacgcgcgtctatttatatatagggtacacattactcacaggccaaaaaaaagggccctcttgaaaaattgccacaattcattaaacaatagccccggcgctaaatattttacgggactcgatcggacatccaaacaaaaagtaatctgtgctcgaaaatactcatcacttctgcattgaaataaaagcgcgtagataa

SEQ ID NO: 37221 - DNA, 369 bp, Glycine max
atcttacaagaatcaagatcttgattcaagacccaagattcaagaatcaagagtatatttaatcaagataagtctgaataggttttttcataaactgagtatcacatggatgtttctcaaaacatgtggaccaaagagtttttactctctgggaatcgagtaccagtcccaaaacggatttgaaaaagttttcaaatgaatttacaacgtcccactggaatttaaaaagctgtaatcgaatacaatgttttggtaatgaataccagtgcctttgaaagttgaaaatcaaattcaaatgtgaagagtcacattctttcacattaaagctttggggaatcgataaccaaggattgattttgattaaataaa

SEQ ID NO: 37222 - DNA, 412 bp, Glycine max
gcgacacaatacaacactctagcttgattacagaatgaacaatccacctcctgatggtttactagcatttagcaccattatcaatttctaataacacattttcagacacaaagcagaggcgttgctcagatagggctaacttggggaggaagtcgcgagggaacatgccacaaaaccaaatacgacttctttgtcacgaggtatcaagaaaacgaaactgacaatggcgtcgcagcagaatgtacgttaagatggtgacggcattgcagaacaacgcgggtgaagtggtgacggcgtcacaacaaaacatcgcgagttaaagtcgtgaatgagaggactgttgcgaggccgaagggtaagagtgagattatagttgaagcgcccttagcgataaacaaaattaaatatgata

SEQ ID NO: 37223 - DNA, 337 bp, Glycine max
agcttcaagaaaaagatggcctcatcaaattccttatttccagaagggaattctatcaatagacctccaatctttaatggagagggttaccactactggaaaacccgaatgcaaatttttatcgaggcaatagatctaaatatctgggaagccataaaaatagggccttatatacccaccacagtagaaagaatttcaatagatggtagttcatcaagtaaaagcataaccatagaaaaacctaaaaatagatggtctgaagaggatagaaaacgagtacaatcaacctataagcccaaaacataataacatctgccctaagaatggatgaattttt

SEQ ID NO: 37224 - DNA, 397 bp, Glycine max
tcaatggaggaagagaatgagagagagagagaaagagagagagagaaagtggcatggaaaattgaaggaagaaagggagagaagttgaactttgaagtatgtctcctaagactctcattcatcaaagttatgacaagtgttacacatgcttctatttatagcctaggtagcttccttaagaagcttccttgagaagctagagcttaactacacacacccctctaatatctaagctcacctcatgctaaaatacatgaaaatacaaaaaagtctctactacaaagactatttaaatttccctgaaatacagggctaaaaccctatactactagaatggccaaaatacaaggtcaaaaagaaggaaaacctattctaatatttacaaagaagagtggag

SEQ ID NO: 37225 - DNA, 382 bp, Glycine max
agcttatctatatgtattactcaatacaacagaggtcatcccttacatagatgctcacaaacaacatgttagccgtattcacccaaaaattaacatgataagttttgttgcaagaacataatagaactttcataccctggtttagacaaacaatcttcgtcgatcacagtgcttcgaagacattacaattgctagctgtcggtccaaatttgaatgttccaacttggaggggatatgatatcaaccagtattctttctacacaaagtcccaggatgataaaattagtgtgcagaacaacagggtcaatgttaattgtcaatcgcatcacttttgtagtgcttatgaaaataatcccattgaagcatgcatgccttattatgg

SEQ ID NO: 37226 - DNA, 336 bp, Glycine max
  unsure (1)..(336): unsure at all n locations
tgggttaaattagtctaaacttatgagggatcaagggttantactttacgcttcagcatagaacacaagaacatgatcaattagagaaatatcttcatatgcatcaacttgtttgtttgaaaaacccaacattttttttacctattgctgtcaagttttaattacttgcatttactgctttttaacgtagaatctagtttacttttgtttatattctcaattatcaatgtttttcacacaatgccctatttctgaataaaactctatcaaataagcaagttccctgtgtttgatacttggatcattccgttttaattttaaatacttggcgacccg

SEQ ID NO: 37227 - DNA, 362 bp, Glycine max
tcaatcttttgaaccgggtactttgtgtagccttccttgacgtagttcccgaaggagcatctgaaggtggaggggaacttgctggaggtgttgccatgggtcctatccaaaattaaaataagaatcaggaaacacaaagtaattacaacaacatgtaagtatcaaattgtaaataagtagaattgtaaaatgtaaaatagttaattttttgagttaaacattatttgggtatataccaccgttaaatagtcgtattctcccataaaccttcatcatgatcgttacgatttgcatgtacatcattgtctttattttcagcatttatggaaggcatctgttgggaaaaagtgggcatgttatta

SEQ ID NO: 37228 - DNA, 311 bp, Glycine max
taagctccttcaactgcacaaggctcttaatatttgaagagtatccttgtggaaccttcacccgacgaagacactggcaaaaactaatcttctctttattggacaaagtttggcaggctgggggcaagtaaattttcttcccatcaaaccttggatgcaactgcgctcttatacccatatcagctaaatcttgacgggtattcaagccatccttcgtcttgccttgaatgttaaggagcgtcccaatcacactgtcacaaacatttttctccacatgcataacatcaatacaatgtctaacgtcaagatca

SEQ ID NO: 37229 - DNA, 364 bp, Glycine max
agcttgtgtttatacagttttacaccggatagttctttttcatataagtgtttaagtggaattagagtatttgatgtataatgtttggaattttctctttgtttatacttccaaatattcagaactctgtttggttatgattatcaggcaagcaaaggatgttgttaaaggcataaagaagcggattggaagtaaaaattcaaaagtccaacttcttgcactaactggaagcaaaatagtcttgcgatacaaccttttttctctttaaactctgatgtcagtattgttctaaattcttttggatataagcatgtttgctgtaatcgcattattcaaatttcattttggcctcccaaacttcaca

SEQ ID NO: 37230 - DNA, 396 bp, Glycine max
  unsure (1)..(396): unsure at all n locations
ntgaagggcctgagcctagcctacgatgaatttttgaggcctgaacctgacctatagcctatcaaaggcttttattttggctcggtctggccttttttaaagcttatcctggcctgatagcctttttaaaagccttcttcacattaaatatttaatattcctttgctctctggagtaggaacgtaataggaaagttaaaggaaaacgaaagccaataaaaataatgaggaatataaaggggtccatgactcacacctaaattgtaattaaagtcttacttgagtataggaatagaagttatgaagcaggaatgtgaaatcaaagtttgatagttcaaaaaatattaattgtacccaanaagctatataagtatatatatatatatatatatatata

SEQ ID NO: 37231 - DNA, 399 bp, Glycine max
cgcgcgcgcgctccaacatgaggatggcctcaacatattccttatcaccggaccggaatactactaatagacctgccatatttactggaaatggttaccagtaccggaaaagccacttgcaaatttttatcgtggcctttgatgtgaatatcggtgaagccgtatatatagggtcttatattcccaccacagaacaaagaattgaaatagatgggggttcatcaagaaaaaacataaccgtataaaaacctacaaatagatggcctgaagaggatataaagcgagtacatttctacctataagccaaaaacataataacatctgccctacgaatggatgaatattttagagtttcaaattgtaagagtgctaatgaaatgtgggacactcttctattaa

SEQ ID NO: 37232 - DNA, 260 bp, Glycine max
tggattgtcttcaccgaaacaatttttctcactatatttaagcgattctcagataccaggagggttgaacgaatttgatctgccctccttcccctatttataggggaaaagagggaggtgggtgccgcccagctctcctaagccagctcaactcgcccaagcgagctgggttgcttccaccacaaggcacccccttgtgttggaacatactgcaaggcctaagtgggcctgaccgctttctacacccctggatactacat

SEQ ID NO: 37233 - DNA, 353 bp, Glycine max
caacttgcctaaattgttcatgattgacaaggtggccgatggaactacttccgccccggagtaccacagtcaccgctttaggagcgttgtacaccaccatcgcttcgaagccattaagggatggtcatttcttcgggagcgacgccttcagctcaaggacgacgagtatactgatttccaagaagaaatagggcgccggcggtgggcaccactggttactcccatggccaagtttgatccataaatagtccttgagttttatgccaatgcttggccaacaaaggagggcgtgcgtgacaagagaacctgggttatgggttaattggtacccgatttgatgcctacgcttttaa

SEQ ID NO: 37234 - DNA, 193 bp, Glycine max
tggttctctccttcagaaccttcttttcactctcttttaacctctaagacaagacattcctggtccagcacatggtcctttctttcatcaaaaaagctcaaaacttaccttttgggtcttcataaccaattcttagcttttttttccatgtctactacatagctagcaataaccctaaatgggcgttccaaat

SEQ ID NO: 37235 - DNA, 244 bp, Glycine max
ctgtatgaaattatgtcaagctactgagtgtctatggcgatggactatactcacatataatatgttgtacttagactacatgttctaaggaagaacatatataccaaatatgaacttgctacttaaaacaaatagttgaaacctcatgcggaagatattatatttatattacaaatcaggatcctatctatacatatgaaaacattgttgcacgtttgatatatcactaatattaacataatgc

SEQ ID NO: 37236 - DNA, 89 bp, Glycine max
tgacactcctgacaccgcgtgatacctgcgataactatggagagaaacgagccagcggtgcttcttgttgcgcctgctccattttcttc

SEQ ID NO: 37237 - DNA, 379 bp, Glycine max
  unsure (1)..(379): unsure at all n locations
agcttgtcctgcaaggaaagntaactcaactatccattgaaatcgctaaaagatatgccaaatttgttgtgttcctctctttggaattacatgcttatgaaggtggaactttacattttcaaatgggagggttcccagaactaaaggaactagtgctcaaacgattgtataacttgaaatcaatcgttattgataaagtagggctacaatctttgaaaaagcttcggttagagaaaatctacaacctcaagagtaccccgtggcattcaacacttggtgaaacttgaaaatctcactctctggggtgtgccaactgaagttaagcagagcattgatcccaatggaggacaagagcattggatgatccaacatgtgccta

SEQ ID NO: 37238 - DNA, 405 bp, Glycine max
  unsure (1)..(405): unsure at all n locations
tggcctcaacttctgatgtaaccatgcggcttccattctcatggaactctctatatgacatgctcccatcctcactggactccatcaatcatctccctccaacctgcacacacacacaccccataaccaccctttccacatatgttccaatttttttttgtaaccctttcatgcttcgatgccattgcacactcgtaattcacatttcagaaaaggctaaacaaaaactcatacacacatgttcaaaatcttcagaatcacaaagaaaaacacagttccccatttcacacggcattgctcaaaactgatcctagcaatgccttatggcttataggattcaactccctgcaaaactcgttnttggtgaaatggggttccatgataacagaaaaatcatcatacttt

SEQ ID NO: 37239 - DNA, 358 bp, Glycine max
agcttgtgactcctatgctcaagtgtgtgaaggatgtgtataagattcgatgaaacctgatatttataggagtgaagcgtagttggatccttatttgtagaagtgggtatgacctttgcagattattcccagcttagataatagctaaaagcgtatagataatgttagagataaacaatatcttataaataaaagttagaagataattataccttatcaataatgtgtgactttatagataattaactatctgttaatagataaatgtatttaaatatgtttaattaagggttaagtatctggctccacatggagagttaacacatgtataaagtgtgtgttttgtgggggggtccta

SEQ ID NO: 37240 - DNA, 388 bp, Glycine max
taaagatgcagctcacgtcctggatgacatcttgtatgagtgtgcctatgaagcatggaggttggagtaccaaggagtcaagtgttgtctatcagacaaggtacaatgctcttgcctgtcctcttttcatcccgagcatgttgttttccgttacaaacttgctaagaaaatgaaaaggataagtgagagattagaagaaattgctgatgaaaggactaagtttcattttactgagatggttactgacaaaagaaatggagtcttggagtggcgccaaactacctcattcatcactgaaccagaagtttatggaagagatgaagaccaggataaaattattgactttttggttggtgatgcttctcattcagaggaattatcagtctat

SEQ ID NO: 37241 - DNA, 384 bp, Glycine max
agcttattgaagacttaagacaaattatgaagaacaaagccaaaggcttagacatatgcgtaaacactttgcgtcccaatcaagttagttcaagtgatccatttaaataataaagatacaattaagttttctaaaaaatcaaagaaaggaaaacgttactgaagactaagacaaatcatgaagacaaagcctaaggcttaggtataagcgtaaacactttggataatttaagaatccctcttgagtttcatagaccaataaagtgacaaatatatgattaattgcttcatctaattcatagaaatttatgttaaaaaataataacattaatttaaataatttatgtaacactgggattttcttaatgcatgattaagtgaattt

SEQ ID NO: 37242 - DNA, 343 bp, Glycine max
tggtggccaattgtcttatagtacaagaccatttaattttcattttgtcatgaacaaaaagcagaaggggagtttgtagatgaagcaagacccctattcaggtggcaatctactatactaacaaaatgatattgctcatcttcccactccagaagtgtcccttgttcattccctcttgtttgcatcatcaataattttaactagtattaactacctccaatttttttgagttatttaatattgaaagggtgctgatgaaagcagcaaaaggtggttgtctattccaacacttcatggtttcttgaaggtttcttccttataatatttgatagaaagactctat

SEQ ID NO: 37243 - DNA, 339 bp, Glycine max
agcttcatgggagagtcaaagatcaaattgagaggaaaaataaaagctatgctaaacaagccaacaaaggaagaaagaaggttgtcttcgaacccggagattgggtttgggtgcacatgagaaaagaaaggtttccggaacagaggaaatcaaagcttcaaccaaggggagatggaccatttcaagtgcttgaaagaatcaataacaatgcttacaaagttgagctgcccggtgagtataatgttagttccaccttcaatgtctctgatttatctctttttgaagcagatggagaattctatttgaggacaaattcttcttaagagggagagaatgatg

SEQ ID NO: 37244 - DNA, 282 bp, Glycine max
tccgctttaactacgagcgtctcgatatattactggactcaagtcgagcattcatagcaataagagttattcgttcgctatgaaatttgtataatctgctatacgtgtcccaatttggacgcgttgctatatattacgggactcaatcggacattctagtaaaaagttattgctgtgagattttgctcataacttgtatttgcatttattacaagcttccgctttcaatttggagcgtttcaatatattaccggagctaatcggacatccgagtaaaaagtt

SEQ ID NO: 37245 - DNA, 385 bp, Glycine max
agcttctagatgtatgaaaatatatatagctacaaaggatatatagccatgccactatacacatatataatatattagaataaaactacctattttaaggaagctcatatatatcatatatgaacgtgctacttaaaacaaaaagttgtggccgcataagtaaataaatatatttatattacaaatcaatatcttatctatatattgaaaacatatatgcatatatgatatatcactaatttcatttcaatgcagctacaaggaattcaagcacaagaaattcggccacaagaattcgaaatctgtaattcatatcaaagcacaattttcaatcgaaagaaaaatttgcattggccaattttatttaagccgatgcacattctaa

SEQ ID NO: 37246 - DNA, 409 bp, Glycine max
cacaataaacactctagctcggactcacggagaacaatggccaagctcttttattctgtgagtttgatgatgaaaggagttgctagttgttatctcaaaataaggaagcctcctcggacataatggatccgaaccacgaagaagaaaggtttcagaatcaaggaaaaataatggtgttggaagaacctcaaggggttctcttcctagcagttctatcgctatttatggagtgacgcttttaaaatgggacaaacaatttcataagaatcacaggtccgaaatcaatcacatcacattatccttttaactctccatcgtgacacatgttccactctgcctatagaggtggaatctatgatcggttttggcatatctatgcgacagttgcccttaatacgtgccatcgagt

SEQ ID NO: 37247 - DNA, 362 bp, Glycine max
agcttaatgtacaaagagaatattttatcattactttgatagggactacacagtgcatgggcatgtaaaaagactagcaaaggcaatggttaaaggggttaactatataaaggtgttacgactaaactatggcaggcatgtgcttatgagttctaatccaattcattcatcccctttttttctttgcataaaaatgaagcattgtttttaaagtataactcaaaaccattaatggtcttgctatctgagttaagcattatgttagcccatgctccttcattgtgaccataaatgttgttcaagaagtttcaccttgattaactatcaaggaataaatttaaaaagggatggaatatattttt

SEQ ID NO: 37248 - DNA, 401 bp, Glycine max
tatgagtgcaaactgaggaagggacaacaatctatcaactcgaaacctgctgcaccacatgctcctcaagcacatctagcagaaaatgaagaagtgatagctgctgtggtagtggaggcaaacatggtcaacaacaaggtggactggattctagataccggtgcttctaaacacttatgcgccaacaaagagctttttcaccagattgaggatgctgatgacggagaatgtgttttcatgggaaattcagctacagctggagtgcttggtaaaggaaagattctccttaaacttacttctggaaaaacattatctttgagtgatgttttgtatgttccctctctgcgtaggaacctaatttctggtagttgtctaaatagaactggattaaaatggttttt

SEQ ID NO: 37249 - DNA, 301 bp, Glycine max
agcgtgtacatctgaaagcaggatatgtcctgcattctgtccaatgccccaggcaaaggctaaaaaattgcaaaccctagctaggttcacacccataagccatattataacaaaaaaataatatttttgcccaagttcttctttgaattatgtgagaatgcaggcaaagtaaggtaccaagatttcattactgttggtgccttaatgttgaaacaagcttacattatgattttgtagtagggaaaatcattatgaagctatttgctaaacatataattgagataaagaagggaaaatcatt

SEQ ID NO: 37250 - DNA, 361 bp, Glycine max
ttgaatgctctattcactggagttgacaagaatatcttcagactaatcaacacttgcacagtggccaaagatgcatgggagatcctgaaaaccactcatgaaggaacctccaaagttaagatgtccagattgcaactcttggctacaaaattcgaaaatctgaagatgaaggaggaagagtgtattcatgacttccacatgaacattcttgaaattgccaatgcttgcactgccttgggagagaggataacagatgaaaagctggtgagaaagatcctcaaatccttgcctaagagatttgacatgaaagtcactgcaatataagaggcgcaagacatttgcaacatgagagtggatgaac

SEQ ID NO: 37251 - DNA, 300 bp, Glycine max
tatggtgtacctctttcaaacctattgctatcaatatctatgccaataatccatgatgcaccaacagcttttgcgtcctctgcaacctgttagtgtaaattttgagtcataactcatattggaagccacaagaccaagcataaatttgtcaccctggtaagaaaaaaatatgttatcacctgcatttaacaagtttctgttgaccacactatgcgtttccacaggcaaatggaacaccattgtgcactatcattttatgacttgcttacatgctatgaacagaggatttatgatggaaaa

SEQ ID NO: 37252 - DNA, 383 bp, Glycine max
cttgaaaatggaatttatggcagttcatcttaaattgttgcaggtactcttccttcttcaaatactcttccttcatcttagatcgagacattgaccttgctgtcctcattgcttttgcaatcaggttactcaacacaaatcttattgacatattgttctttgattttccatagattaaatgtgtaaacatagattacattcttatccaaacgttggtttttagtttttggtcggagcaaggtaattgaaattgcttaaaatagactcaaagatgcagtaccttcaataatttaacacaaattaaatgcatctctaaataagctacaggatgcaaagaaggaaaatgcagatatgagaatcaaacatgcatctctaatctacta

SEQ ID NO: 37253 - DNA, 296 bp, Glycine max
agcctaatgtacaaagtgaatcttttatcattactatgacaggcacaacacagtgcatgggcatgccctaacactagcaaaggcaatggctaaaggggctgactgttactgggagtgacgactccaatattgaccgcatgagctttagagccataaaccaattgatctgtccactgttgctgcctgcatagcgcagaggcaccttttttcgagtataactcaacaacattaaggcccttgttgtctgatttaaccattatgttaccccatgctccttcgttgcgaccataaacgct

SEQ ID NO: 37254 - DNA, 369 bp, Glycine max
tagcttgttgacacgtaagtgtgaactcttcactatggaagatggtgaagatatacaaagccatgtttggacgcttccaaactattttaaatgcattatgttatcttaacaaagcttttgataactatgataatattgacaaaatttaaagaagcttgtccagaaagtggagaccgcaagtaacaacttaaaggattatgaagaacctgaaatctgtgtccattgcaaagctgattgggaccttcaaggttcatgagcagaaaaattaacaagtggaaggattcaaaagggaaaatacttggctcttacatctcaaaaaaaaactttttctacttgcaagagttctattcagacttgcatccaaaagct

SEQ ID NO: 37255 - DNA, 393 bp, Glycine max
agctttaccatcagattttatacatgcttcattaaaggcaattacaatccacttaaatttagtaatgatccactaacctaggaaattagaagaacttaatggctgagtgtaactgaaattgtggcaaccaaaagtcaccccaaaagccatcgagccaatcaccaattggtctcccaaaggctgatgcctaagctgccaattgggcccttattacaacttgaactaaaccaaactaaagcccctttagttgattaacccaaaacatatttttggtcagccaactttacatggattgggccattatttagacaaacaaaacactctaaaattgagacgaagtggcaccatttagtcctcctccatttgggtcatgatacaactcacaaccttgga

SEQ ID NO: 37256 - DNA, 353 bp, Glycine max
tgtatagttccccaatttatggttattttgtagtgatttttgtaaataaatcttgttttatggttaatgttgtctctagaatatttccattggatttaatgatgaaatctgtgcattttcaggtgaaaaagaggctaagttttgaattgcaaaaagtagcagttgggctaagtgcatatccaccgctaagcatagcttcagcgcgcttagtgcaatggagaattttgcagagcgtcagcatcaaagtcgtgcgctaagggcgagatcaatgcactaagcgcagcaggtgccttcagccaggctaagcgcgagtctggcgctaagcccaatttaacttactcgtgctaagcgcg

SEQ ID NO: 37257 - DNA, 386 bp, Glycine max
agctttctcacgcacatcagtccacttacaccacattctttttgacaagttcatttaaaggtgcaacaagtaaactgaggttcttcacaaatcttctataaaaagttgctaaaccataaaaaattcttaccttattagcatttttaggtacaagccattccctaattgcctttaccttttcttcatccacacttattccttttgagctaatgataaaactcaagaacaaaacatattcaaggcaaaaagaacatttttataagattggcatacaatttattttctctcaaaacattaaaaacaatgtgttcctctaatgttttgctatagatcaaaatatcatcaaaatacaccacaacaaatttcccaatgaagcacacaaaaca

SEQ ID NO: 37258 - DNA, 401 bp, Glycine max
tctgccttctcctccaggcgcttccttggtatccctaccaccccatttctattttgcttcactcagtctaactcttgtgccaagatcttgaccacttttgctacttttgccatggaagggtagaatccagaaaaaagatatggcttccttcctcctgcgagcatcccaagatcccttcgaactcttctatggttggtaccaattgaaagtccctaaacatgaagcatctgagcgactgctcatagtattgtgcgagggatgtgatggcttcaacagacacttctatcatggccaaatcccatattttcctatatgccttactaaaggcttgacgtcgaacttgatccatccgttgccctagctctttgcagctggctagttctaagttctttgacttgaca

SEQ ID NO: 37259 - DNA, 337 bp, Glycine max
ttaaggccttctaatgaggtctgtatcacatactactgttgaataataagaataatggaccgcttcttccaggctctaaagaggtaaaaactctggcatgaagtgttataaaattactggcgtctacaataacactcctatgttgtcttaattcactgtactacatcctttttagccgataatcagagcaacgggctggctattgctattctttcagaaaaatgattgcgatgcttttcactagtaacaaaccctgtaactgaattggataacacctcttacacaaataatgtggaggcttaatgcttatttctgtgccccaaactttcgcgtcatt

SEQ ID NO: 37260 - DNA, 309 bp, Glycine max
tcacaatttccatattgcaagttaaaacttatagttccatgcattaaagttgtcggcttcgatgctaccatcctttatcgctaaggaacaaaaatgtacatacagaataaagacatcggaggagggcaagatgattataagatttaacagctccctcgacatttcttctttagtcttatgggtgcacactggatttgtgctgtacaagggaaaatttacaagacatggcaaagacataaagatttggcaacatgcatttattgaagaggcagattctgatccagtgtgaatataaatgagaaatgcttg

SEQ ID NO: 37261 - DNA, 293 bp, Glycine max
agcttctcaaggaggtgagcttagttacgagaagggtgtgtgtagctaatctctagcttgccaaggaagttttctcaaagaagcttctcaaggaagttttctcaagaaagcttctcaaggaagctaccaagtctataaataaaagcatgtgtaacacttgttgtaactttgatcaatgagagtcttgtgagacacaactcaaagttcaacttctctctctttttcttccttcaatttcgtgctccccctctctctttctctctctcattcttttcctccattgaagcatcctc

SEQ ID NO: 37262 - DNA, 364 bp, Glycine max
taaggtttaaaagttcaagcatcgtgattggcacaaggagcaatttaacaggttgattgctaattttgaccaaaatgttatgaatttggactctaatgataaaattttgtgtgaagggggaatagtggatgatggtgctagattccctttgtgagtagagttttggaagtgtttaagaataaatgaaagtgttatagcccaaagatcacaggctcgatggattaaggagggtgatatgaactcccgttactttcgtttctctttaaggccgcacagagatctaactagttgattgcacttcattgtggagatcaatatatggaaagtgtggaggaaataaaggatgaagttatcagtcacttta

SEQ ID NO: 37263 - DNA, 264 bp, Glycine max
agcttaagttttaggagagcattcatccttagatcaactcttttcatttttatttccagcatcaattacttgcctttcagcacttagcttcactttgcttagataacatcacacactcagcttttatttttgagatttcatttttttttttttaatatttagcagctttttacttgctgcttattgactttattgtgcgcggagtcattttcttaccataagtggtgccacccaataaactcccccaaatttgtgacaaaattt

SEQ ID NO: 37264 - DNA, 403 bp, Glycine max
tcatgatgatgaatcaagttgattcaagaagttttgatgatgactaagatgacgacaaaaaccccaaagaatgatttcaagatttagtcaacaagttcaagatcaagataaatttcaagtttcatgagaagaaatcaagaagattcaagaatcaagagaagcttgatttcaagattcaagagaagattaattcaagattcaagagaagaaatcaagaagacttcacaagggaagtattgaaaagatttttcaaaaaacaaacatagcacaattttgtttttcaaaagagtttttctcaaaattttctaagttactagagtttttactctctagtaatcgattaccagtttcctataatcgattaccagtagcaaagtttgatttcaaaagcttttaactgaat

SEQ ID NO: 37265 - DNA, 361 bp, Glycine max
aactttactcattatatataatacattcactttacaatgttattagacaagctcatttataagtgcaaccaagcaaacatgagcgttcttcacaaaaccttctataaagaagttagtaacacataaaagtagccatccactatttaccatataaagccatcatagcatatccccaattgcctttaccaaaagctcatgccaaatttgacaattgggcccttattacaacttgaactacaccaaactaaaccccctatagctgattaacctaaaacatatgtatcggaagccaactttacatggatagtgccattatttagacaaacaaaacactctctaaataactacaaaatgggaccat

SEQ ID NO: 37266 - DNA, 316 bp, Glycine max
gctttgtcttctcctcaggcgctggattggaatcttactaccccaatactattctgcttctgtcagtctaatctctgtgccaagatctcgaccacttttgttactaatgctcatcgaacggtagaattcacaaaacagatatgtgctttcttcctcctgcgagcattccttgatcccttccaactcttctatggctggttccaattgacagttcctaatcatgaaacatctgaacgactgctcataatattgtgcgacggatgtgaaggcttcaaactacacttctatagtggccgaatcccattttttcctatat

SEQ ID NO: 37267 - DNA, 300 bp, Glycine max
agcttcttcttcttctgcactttgtcatgagcaagagtttcgtcaaacaccttgtttgaactgggcttcttggacgtcgtcaaataacttcagtctttgccatcccaacccgttgatgatgtaagcttactaccattttccatattttcacaaagatgaatggatttattaaagactcaaaataatgaaatttgggaggggggagggttataacttgtttacaaagaaagaaggtggtgcaagggaaattgatgattgattagaagccaatggattattactttatctatagagtaatat

SEQ ID NO: 37268 - DNA, 399 bp, Glycine max
ttgggaaattattattgatacatgcacgtgcttatggtactttacctaattaataaataatatacatttcatttcacatgatcgtataaaataatacttaactaaattatgtattaaaataatggttgaagcagcctgatataataaacgtagtgaatataagccatatatatgtacttaaaatgtcaaccactaatccactgttagcatgtctggatcaatggcacattgattaaaaaactaactatttttttcatggtaaaagtaaaataacagagctatttctgatttttcatgtgtttttttacgtgattttgattgcccaccatggaaccaaacacaccatacccttactgacggatttgaaagatataagtacaaagtttatttatttaatta

SEQ ID NO: 37269 - DNA, 348 bp, Glycine max
gcaggcatgcaagctgtgaggattcggtctttgccattgaaaggatcaatgtgggtctgaaaaaaggcaaatttagtcatcctacttggacgaatgagaaaactggggcaaatgaagagggtgagaaagagggagaaacccatgctgtgactgctattcctatacggccaagtttcccaccaacccaaaaatgtcattactcagccaataacaaaccttcttacccaccacccagttatccacaaaggccatccctaaatcaaccacaaaacctgtctaccgcactttcaatgaccaagaccacctttagcacaaaccaaaaaaaacaccaaccaagaaatgaatttt

SEQ ID NO: 37270 - DNA, 292 bp, Glycine max
tgagatgaggaagtgttgaagggtgaacttcctgcttttattgttgaccacagagtggtacctggagatatgtcgcgggggtcaggagaccttggggacgtcatgtggggtgctattgcccaaaaccaagcttgaccaatcccgacccaacccgggcatagtcggtcagtgagaacccgtgatgtacctatacaggcgagctcctggccgtcaacagattaaaggggcaaagaccacctaccactgatgcttgtggtggctggcccgctctgaaacgtgactgatatgtgag

SEQ ID NO: 37271 - DNA, 366 bp, Glycine max
tggtaattctcaccttaaaacagcattatcccttattacctgatccagttgcacagaaaaatgggacttccaagagtcaagatctcttaattctttcatctgctaggataactaattatttttaggtgaacagaaagtaacactatatttatgttttatatattatagacaaatattgccaaaaatatttaggaagaaacatatcataccataacatcttgtccgtcaaggaatcttctaatttcttctttgatcttctgttgaagaagatcatttctcccaatgctttggagtactctctgaaaaatcgatatttttacaatttgatactacatatactggttccaaaccagaaaatttaattcc

SEQ ID NO: 37272 - DNA, 297 bp, Glycine max
catgcaagcttactactagaatagattctgttatagtaagttcgtctaattaaaattttattgtatttatattctgataatcattagcaatgagtgctattactttggtatcttagattagtattaactagaaatagttttgtgcaataaatttattcttagtgataaacaatattaggtttaggaaaatatatctattatatttgtattttgataataattaataatgtctgttattacttccctattttaagttagctttacttagaaaaagatatgttccatcaatttattttc

SEQ ID NO: 37273 - DNA, 376 bp, Glycine max
ttagaggttagaaaataagggattttgactactgaaattgggaatatgagaacaaagaattgagaagagaaaaatgaagtgagaagtgagagtaaagaagtgagaataaagaagtttttctttgcacagctcacaagcgtgagagatcaagagtctaaagtgagaagagactctaagagtttgtgagactagaattttctccactagtcctatattccatttttagttttcccttttttataaattcaaaattgaaatttcaaatttgattttgattttgattttggagctcattggttttatttatgaacgctgaagtgactaaacattgaaggctaaacttgattagacaattcactacctcacattcatttta

SEQ ID NO: 37274 - DNA, 284 bp, Glycine max
tatatgattggtgtaaattttgacattatatatgatccttacagataaaaagaatcaatgattatatatatatatatgtgtgtgtgcgggataatataaattagaccgggttaatattagacaattattgcattatttaataatttccatccgactattatatcttgaaaacatatatggggattaaaagataattcttcctatattatacatgcgaaatttaatattactccaaaattatttactgtcctagtgttatttaaaaagatcaaggtagtataaca

SEQ ID NO: 37275 - DNA, 359 bp, Glycine max
ttagataccatattagaaaactaatggatcatattataactctaattagatcataaaaaaggagaaaagagagaagataaaattcaaagaaggaatgagaaaaatattattgaggtgattcaatcttgagttacaacactctatttatagagttatgaggttggttgcaatatagttaggtagttaggaagcaattagttagttatgacaaccatcaacaattgtcaataactaactttacaaactgacacaatgtgctaactactaacttgagatagtgtagttgaataatggacttttcaatacaatactctaacaaaagggaactcatgcttagctcttttatcctgaaaaagtta

SEQ ID NO: 37276 - DNA, 258 bp, Glycine max
agcttgctaatggaattttcaagattcatgcgatatgaaggtgactactggctcaaccatgttgattagtcttctacatcacagccatccatgctggggctcccttatgttgaataggtgtggctaataagccagtgggacttcgatatgaccttagcattaacattcatcaacttttgaggacggatttcagcccgtatatagcattttagtgcaatgcttacacccccttgctattctaatattcttctactctac

SEQ ID NO: 37277 - DNA, 189 bp, Glycine max
aatccccaagtaggattctgtctcaagacacaccgtaaaattcctgattcagagcgtgcccaaaatggtctaattccacataacaatatgtatgatataaccccaaatctccataagtctacttcaacactgtaagaactaaggagcacttcatgagcaacgctatatgcaactgtcaacaatgtcaat

SEQ ID NO: 37278 - DNA, 375 bp, Glycine max
agcttggcaacaagcaatgaacgctttggtttcctgagtggctcctttgcagagaattatctgacagaggagctcaacattcacagatccaggcttgttcctctcaactcaccatcataatatgaaacggccttgaaagatggtcctgctgatgggggtgtcactgcaataatagatgaacgtgcatacatggagctgctccttgcaaccagatgtgaatacggtcttgttgggcaagagttcaccataatgggttggggctctgcaagagcattatccatctcctctttttgaaattcacaatcagatatatcacatgcattctcccaaatattaaagatccggttttcaataaatctaagaccatcctttcta

SEQ ID NO: 37279 - DNA, 393 bp, Glycine max
  unsure (1)..(393): unsure at all n locations
tgccgcaattatgtgaaattactgacattgtagttaaaaattggtaactattttcatccaaatgaccaaaatatatcacaaaattgacattttgttccaaaagaagacactgacatttaagtccaagtaaaattactaacaaatttctccaacaaaaaaatactgacaatttgatccataaaatttttattgacgtttacgtccaaaaatgatttcttattgatatttttgtccaatctagtcagcagaccacgtttgcaatcaatattgtgacaatttgtccatctgtgccacgtaggcaacttttttaacggtaacggaagaaagtngacgacggaatatttttgtcacactcttaacattttcgaggactaaattttgcatttaaatctt

SEQ ID NO: 37280 - DNA, 312 bp, Glycine max
agcttcactgttatcaagcgagttggagactcagcatgaccacagatcaaccttcacttcccatgtctccatagacccgagtatagggcccaataactcactgtgtgtgcaaaggtgtaagtgccatgtgtgcatagaacaaacaaatatttctaaaatatgcatctaataggtagacaaccacaccaaacacaaaagcatagaaaaagagttatatgaacataagaacataaaaggaaaaggggaaacaaaataaagaaaaggtcatgataaacattgcacacagattaaatggcttaactctctaacaaa

SEQ ID NO: 37281 - DNA, 353 bp, Glycine max
tgagatgaggaagtgtagaagggtgaaacttcctgcttttactcgttgaccacagagtggtacctggagatatgtcgcgggggtcaggagaccttggggacgtcaggtagggtgctattgcccaaaaccaagcttgaccaatcccgacccaacccgggcatagtcagtcagtgagaacctgtgatgtacctaaacaagcgagctcctggcagtcaatagataaaaggaacaaagaccacaaagcagggaggcttgtggaggctggccaactgtgaattttgtgtgatatatgggttgtggcctttggtaatcgattaccaagggtgggtaatcgattacaaggcttaaaaatg

SEQ ID NO: 37282 - DNA, 363 bp, Glycine max
agcttggagaaatacaagttctggtcatatgagctattttgctagtttagtgttaggagtgtaaaggctttgtgggatcctctcacccgcagaccctttcttttgttcaaagggatgtgaacaaagtagctaatagtttggcttctttagcttccctttttgaggatagagtttggattgaggaagtttcccctcaaattctttcccttgtaaatgatgacttaagacctctagccattttcagttaattaatatcgtttacttcaaaaaaaaaatgaattgacaatatcctcctttgatgattgaaggagataccagaaggaaaaaatttttttataagtgaatttatattattttcctttc

SEQ ID NO: 37283 - DNA, 401 bp, Glycine max
  unsure (1)..(401): unsure at all n locations
ngaatgtattgatgagaataataggcatacttgaaccccttggttagccttttcttctagtaatgaatctaaccgagaggtagaaaagctatcaaaaggccatctcagatatagctctggccacaaccaccaacccgtaatgaagatttgcagccaatttgcattctcttattattaaaattgaattaggaaaccaatatatatatatatgtgtgtgtgtgtgtgtgtgtgtgtgcgtgtgtgtgtgtgtgtgtgtgtgtgtgtgagtgtgtgtgtgtgtgtgtgtgtgtgtgtgtgtgggaccaaaagaacccaagcattccctgtaaatttgtttataaaacatataaattgatattcgcccttttttctggaaacatctattgaatttctgtcgcaat

SEQ ID NO: 37284 - DNA, 537 bp, Glycine max
  unsure (1)..(537): unsure at all n locations
tcttacgcatgttctaaactctcatatcttctctctctatgttaanacctanncacaaagcgaagcattgattgatgcgttgcatgccaagcgactctctaatccaacagctgctcctaccttgatacctaaagatgtgatcccttcttagcagactcgagccatctatttcctcactcaccagtaatctcggactacgatatgactctggtggagtagaaaatccagcgcgaaagatgcaaaggctacgagactcatggttagactgttatggcctctgaaactacatctaccaattttgcgctctatcattccttttactatcaaccttttctctcaatcttaaccacaaaatgatttatctgaaataatttagaaaattcatccacttgaataactgctatctctgtcattagaaattttacctaatacactcaaatttctataatttgcgaggaatgcgtcctctcatagacacaaaaaagggcgtgtctcgcgtctaccatttatacatgccatgtaatacttccgctgtcg

SEQ ID NO: 37285 - DNA, 274 bp, Glycine max
ttcgaattatgctagtatacgatgctcggaatttccgttaatgccgacctccaccatttttgtcttgagattccattcacattgcactccataacacatcggtaagttcttcgtctggtaatggtgcaattttatagtatgcttgttaaatactgggttgaagtctactactaatagagatctaaaatatactgaaaactttgttaagcaaaactcggtggatctaatgatattcatgtagtactatatatataactaacagtacagtatttat

SEQ ID NO: 37286 - DNA, 278 bp, Glycine max
ctccccctttgtttttgaatttatgcttatcttaaaattaaattattcgctcatgtgagttcttgatttatccctatttctctccccctttggcatcaacaaaaagccaaaatgcgtatcaaacttaaagtatgcaaatatatcttaaacattcatacagcattcataaaaaatattaaccacaacatgaagtagaaaccatgaagtaacaatcataaatagattaacttataaaatccacattatcaaataacatacttgttcaacccaaccatgca

SEQ ID NO: 37287 - DNA, 358 bp, Glycine max
tataaaccaactagcttattagttaattttatcaaacataatcttagaatttttaattatcatacttaggacaataatttaggtttttttttttacttttttagctaccctaattatataattaattaagatttattatttcctttctaatttttgacatgtttcttttttaatctatgttctactttgtatataatacgatgtacaatagatatgtacatacaaatagaaaataatcatctattattccgtccatgtttcttgcattggtacactattttcttcctactaccctgtttttaagaatttttaacgaaatcgtgaaaatatttatcaatgtgggtgttttaaaaaatat

SEQ ID NO: 37288 - DNA, 334 bp, Glycine max
tatcaggacctataaaactcaagcttttgcacatgagaatattttagactgcttatttttctgcccaaaacattttatgactcaagtccttttcgtatgagtatggtcattttggccatggagaatttcatttggatttttcttttctcgaggccatgctgtcagttacgattcaaaattcagtgcttgcttttgttgaagttttctgaaaactgatattgacatctctttgatcagatgaattcagtacggatcctttgaatctcgagtgtaccctaaaagatgagaaacccatcgagcccaattcaaatattgggattgacagaatcaatga

SEQ ID NO: 37289 - DNA, 360 bp, Glycine max
aatattgatttctagaaacgaaaaagcaagtatatatatcagtgaactgagcccgaccaaggaaaaatacatcaaagaaaataaataatctagtatagctaattttataatcagataaagcttaatggattttcttgagcgacaaagtttttggaatagtttaacatataatctttcaaaaaaactaacatcctacaacctttaagagtggtagttttataaaaataatgcttttatttataaaaatacatcacatttttctagaatggtagttttataacttttctaaaaaaatcttctaaagtagctttgttgcactagtgttacttttaccgacttgataaacttttattgtatcat

SEQ ID NO: 37290 - DNA, 342 bp, Glycine max
  unsure (1)..(342): unsure at all n locations
ngcattattttatttatttattttggtgacaaatatatttttgcttgaggtctggttattacgatgaagcaagaaatgttgcccaatcttcacatcaatttgctcctttggtacatactgtggtcactacttatttactaatttatgatttaatctttcttaataatttacttatttatgacagctggcagagtggattaataaaggagggatggtacctgaagagattgcagctgccgcatcagaggaatgtgaaagaatgttgattggcattacccattgacttgtgaaatccaagtacacaaaaaattcccacaaaagatatatgaaataatgtttaag

SEQ ID NO: 37291 - DNA, 413 bp, Glycine max
  unsure (1)..(413): unsure at all n locations
cccaggatactttcgagtcgacccggcggcgtgcgggctttagcttctcatggaatttttttcaaagaagcttctccaggaagttttctcaagaaagcttctcaaggaagctacctattctataaatagaaacatgtataacacttgttgtaactttgatgaatgagagtcttgtgagacacaactcaaagttcaacttctctccctttttcttccttcaatttagttctcccccctctctctttctctccctctttcttttcctccattgaagcatcctctccaagcttcttatccaaggctcatcttagtggtgaagctccttcttccatggcttattccctagtggatggcgccgcctcttacctcttcttctttgtcttncgctgcatctcgagggtggaaaaatacca

SEQ ID NO: 37292 - DNA, 384 bp, Glycine max
ctaattcaagacaaagaaattaaagatattcaagatggatgatgaagacagtctctagagtcttaaaaagggcatattaaataggaagggaattccaattgaagtagcaaaaagtttggccaagaaatttaagttaaaaagtatttttcaacaaatttactctctggtaatcgattaccagaggatgtaatcgaataccagtggccaaaactgatttacaatagctattaaaatttgaattcaaaatttgcactgtgtaatcgattacacatatatggtaatcgattactagcagtttctgaacgttttaattcaaattttaaagcttgtaatcaattacacaaatactgtaatcgattaccagagcagattttcagaaaatat

SEQ ID NO: 37293 - DNA, 365 bp, Glycine max
agcttggtgtggattaatgtccaagatctggttgttgtttcaatcttaaactcatcaatgtttattataccatcatgaaaatcattgctcttatatattctatgccacaataaaggctgaatggactgttcataatgagactcacagataaagacaataaggttataaaaatcctaactctagccacctcaaattatgcatacactctattcttaaacctattgactctgataatagcgactacagcatcggagtcattgcatatacagactctctaatatatagcacaggaaatcactattaaaggaccagtttatttccttgaaccacaagatacatgatgtatttctcctacacttatgctg

SEQ ID NO: 37294 - DNA, 365 bp, Glycine max
tgcacagatgccttgcaattagtaaaagaaaatgctaattgcttctcccgaaactcaaaaataattacttaaggaaacgttgcaggtcatgcgggttaatgctgtgctgtgtttgagggtggggtcgttgagatttacattcatgaaataagctactgccaagaatcatgaaataagctactgccaagaatcatgaaataagctggtcaagttagtatacataaaacgtttagatcataaaacacataaaatgtttggatcctcctttttttcccatggccatgcccacttgttccaccaccaccactctttcctctataatgattttttcctcctcctaatgccatgttaacatcagggttcac

SEQ ID NO: 37295 - DNA, 240 bp, Glycine max
aattaacttaataaatctttatttttctatcaaacacactgaccaagtagtaggaaaatgtcaaataatattaacgaaaatctattgtccggatcaaatgagacccaaacataatacttcacaactataacacagtgttctattaaatgccacttgaagtacccttccaaaacataatacaatctattaaaaaataacttgcgcaccaaacaatcaaataagttgttcaacaagtaaaaa

SEQ ID NO: 37296 - DNA, 320 bp, Glycine max
aatcgaagagcatcgacatcctttcttaactgaccaatgtttaaagtagaaaacttgtctatacaatattccaaatagcaactggtcccgaatggattaattcattgccttcctctcttctaacttgaagggcccataaacttgcaacctctttaggccttcctcagttgggagaccctcctccgaacaatttaactgcgctaagacttgctcccaaggtattatatactgcaacacttgcatgcaattattatgagtcatcccaatcatcatggccaaaaatatagattacactatatagcttcccattataaaaaatg

SEQ ID NO: 37297 - DNA, 341 bp, Glycine max
agcttgttgaagaacttagaaaatatcaataacaagtttgttcgcacatcgttcgcgtgtatgatatccactcgacaaggtttgaagtagaggagaccttcaatcctattacacaatgtggtggacaaaagtgggaagttaacttgaatggtcattattgtcaatgcggaaggtattctgcgcttcactatccatgctcacatattattggagcttgtggttacgtgagcatgaactactaccaatatatagatgttgtttacacaaatgagcacatcttaaaagcttactccgcacaatggtggccgtcttggaatgaagcgaatattccttcttctaat

SEQ ID NO: 37298 - DNA, 349 bp, Glycine max
tcttcagccttccttgatgccaagtcaatgtcgattaaaggacttccatgcttttgaagaacatcttcgaccacagatacaacagagaatggcaaggcaagctctggcgccattacttggtctcaaccaaaaccaacaccaacacaaaacacagcaataaatctaatacgaatccaagatgttaactgaaagaatgtatctaatccaagccttccaaaaagagctacgatgatgatgagcaaaatggaaccgtaattgttagctaaattctgagagaaagagagaaaaagaatgaacgtatagaccctgtgattctgaaaagagctcctgcatgaagcatcagaatcac

SEQ ID NO: 37299 - DNA, 250 bp, Glycine max
agcttatcggtttaaaaggcacattgggtgtttttaatattgtgtccccctgtgaattttatttgttgttgcttttttaccttagatttctgtgaagagataacgatgcatgcatgcattagtgatggcatcttccaatcctcaaactcttggaaaaaaatcgcatcctttgttgtgttttcttccttctgtgtatgatattctggggaagacaagctgtttatgtcgttatttctgctgattatatttc

SEQ ID NO: 37300 - DNA, 331 bp, Glycine max
  unsure (1)..(331): unsure at all n locations
ngaagacaagcctgaggaagaaggtgttgatccaactggttacaaacagttggtaggctcactgagatacctctgcaatagcagaccagatatctgttatgccgtatgcgtgctgagtaaattcatgaataggccaaagaaatctcatttcttggctgtcaaaagggttctaatgtatgtgaagggaactatgcagtatggtgtgatgtttccaagtaatgttgatggtgctgagatgaaattgattggttactcacatgctgattggtgtggggacaggacatatatgagaaacacatctggctacttgctcaaatttgtggagctgctg

SEQ ID NO: 37301 - DNA, 384 bp, Glycine max
agcttatgagaacaaaattgccttaatcatttccaaatatgcatgtgaattaggaagcatcaacaagaatcaagctcaggctattgtgcaagcaatcaatggggcaaaacacaccaaatgattatgatgatggatggctcaacttctcacaaaggtaaactcatcactttcaaattaagctttcaaaactatcatgacagtagaagaaaatcaaggatttttagtcaccaaatgtcaagaactttttttttataacaattacccattttttgaacatatcctataatttaaaaaaaaacatgccaagtcttacatgcacacagaattgacccaaaatattaaactagaaatccgacgaaactaacaacattttcacaacttaca

SEQ ID NO: 37302 - DNA, 338 bp, Glycine max
tgcctcaaagaggtccaggaaggacaaggcggcctaatgaactagttccgctcctgagtatgacagtcaccgctttatgagcgctgtacaccagcagcgcttcgaggccatcaagggatggtcgtttctccgggagcgacgcgtccagctaagggacgacgagtatactgatttccaggaggaaatagggcgccggcggtggacatcactggttactcccatggtcaagttcgatccaaaaatagtccttgagttttatgctaatgcctggccaacagaggagggtgtgcgtgacatgagatcctgggtaaggggtcagtggatcccgtttgatgccg

SEQ ID NO: 37303 - DNA, 469 bp, Glycine max
ctctataccatcaacacctattttatttgaagatcaacccccaggaaatgatgatcgatcttgcacgcccgggatcttaagtcgaccggacgctgcagctggacaaaagcactatatctggttgttttactcaccaaaatagagcttactaacccccactataatatgctgccactatacagaacggtatgcatcgatacaggcctctaatacacccaattaaactatatacacaacacgtcgcccaacttctcaccccaaccattaaagtgcagaagtactcaccttccagcccaatttggccctcgatatgaccgaaatgacccccgctaattttgaaaaaatagacgatcttttcttagctcttgcaagacccctcacacgccccatttggagctctgcaccgcactaaacacgatgctcagtacctacacggaaggccgaactcaaaaggcgcataatgaaacat

SEQ ID NO: 37304 - DNA, 386 bp, Glycine max
tatagtaatcgattacacagttctttatatgtaaatgatcgatcttctcaaaagtcatctgctttaatcgagtaccaggtgatatgatcgattacttctcttttaaaagtgtttcagaggtgatcaagaacactttattcgattacatcgagaatctaatcaattatattgctcttgaaagttttccaatttttgggaagatcactttaatcgattgaaatggtcatatattcgataacttcttcgaaataatcgattacattgtgtatttaattgattaccaacagttattattgttctctctattaaatagccaccttgggttctcacttctaacaacttttgaatgagctaaaattatgagtttatttttctattccgagaag

SEQ ID NO: 37305 - DNA, 381 bp, Glycine max
agctttgccggatgatgccgatcgaacatttcccaatcgacatcatccaattgttattcagggactgaatagaataaacaatggccggtgtcggtcactatatggccccgactgatatccttcagtcgacattgcaaaatttcttttacaaacgctggccgataatgtttttttacggtcgaggaagttttttgttttggtgttgccaaaaaaatttacaatgtaggtcggctaggtttttccgtgcgagctcaaccgaggttgtgtttcggccgacacaggcatgttctcatttagtaagccaagaaaacgttagcccaccccggcacaaaaaaaaacatcattcacggaaattgatcaaaaacaatgatagcttacgtt

SEQ ID NO: 37306 - DNA, 407 bp, Glycine max
tgacctatagacactcagcttctatataagctgaaccattttatcaataaacacaagttgagttttattcagaaaattagagtttatctcttttatcttagtgagagtgattctcctaaattcttgagtgattcaagaacaccctggctgtatcaaaggactttcacaacctttgtgtgttgccctcgctggaaagagtgagtctttccttcctttcatcttcacccttgttctttcaaaccataattctagaaaatccacctctgcccagaattatctagtggccataactcccattttacgcactcaaattaagtgattcttgaggctaaattgaatttcaaaacgagacctttcaccttgttttggaatcacctcatttggatccctgtagcttcagttattac

SEQ ID NO: 37307 - DNA, 308 bp, Glycine max
accacagagtggtacctggagatatgtcgcgggggtcaggagaccttggggacgtcaggtggggtgctattgcccaaaaccaaacttgaccaatcccgacccaacccgggcatagtcggtcagtgagaacctgtgatgtacctaagcaggcgagctcctggcagtcaacagataaaaggaacaaagaccacaaagcaaggaggcttgtggtagttggccagctgtgaaacttgactgatatgtgagatatggtctctggtaatcgactaccaagggtgggttatcgattacaaggcttataaaatgaa

SEQ ID NO: 37308 - DNA, 384 bp, Glycine max
ttcgagaaattcaaatagtcataacatttaactcggatgtcaaatttcggggcataatatatcgcgacactcgaaattgaacaacgaaagctctcgagaaatttaattggtcataacttttaactcggaggtccgattcaggcgcataatttattaagacgcttgaaattgaactatgaaagctcttgagcaattcaaatggtcataacttttcacacgaaggtcagattcaggtgcataatatatcgagacgctcgaaattgaacaacggaagctctcgagaaattcaaatggtcataacttttaactcggatgtccgatttaggcgcatcacatatagagacgcttgaaatcgaacaacggaagctctcgagaaattcaaat

SEQ ID NO: 37309 - DNA, 395 bp, Glycine max
acataaatctgcacgcacgcaagcttattattggtgactcgcacgtgtgctgaccctccttgccaaaggaccaagtactgagggtaatttttaaccctctgtgaagctgtcgaagtgaaattgatatgaatccaacaagtgttagattctttgattacttgtttctaaggttttttagtagtgcatatacacgtgatgtttccttcttttgtgcctttatgtaagaatttataatttaagaatcaaaactgtgcttttgatccaattaaattgataggcactctcctacatttcatgtttttgaactacaatagggttctctaaaaaactaccatagggaaaaataaccattgacctatatgttttcgatattaagaattatcattgtcacccta

SEQ ID NO: 37310 - DNA, 314 bp, Glycine max
cctagctcaatggacttaccttgaattaattcctttgatatcccttttgagccttgtctccctttccttgttttgaagctcactacaagccttaagtgaaaaaccatgatatcaccatatccttaaggaattttggagctttggaattgttttgggaataaatgtggggggttttgtttcattggacaatatgttttggtggctatgcttcatgatgtattttgggccctactcgatgttcattgcatattggttaaatgttggacatgctgaatgaaatgttgtttctaaaggctttatagtaaaaaaaaaaa

SEQ ID NO: 37311 - DNA, 397 bp, Glycine max
agctgacgcgtgcgcgcttccttgagaagatgtgtatagaagctagagcttagctacacacacctctctaatagctaagctcacctccttgagatgagaagctagaacttaactacacaccccgtataatagctaagctcacccccatgacaaaatacatgaaaatacaaaaaaagtccctactacaaagactactcaaaatgactcgaaatacaaggctaaagccctatactactagaatggccaaaatacaaggcctaaacgaaggaaaaaaaacctattctaatatttacagagataagcgggctcatacttagcccatgggctcaaaatctaccctaaggctcatgagaaccctagggccttcccttggatctctggcccaatctacttggag

SEQ ID NO: 37312 - DNA, 374 bp, Glycine max
tgtgatcataaagtggctcaaagacttatgacacaagatgtatcaaaaatgccaaataagggaactccatagataaacagcaggagggtgtataaacaaatatccaactacttagcaacccacattgggaaagaaccatatgcagccttctaacctggaaattttttgtcttaattctattaagagacacagtccaaggttatattttcagttagactgtaactgtactgacggcagagtcagtagtctttaaatggcctctcaatagtttttctagttctaagttcatttgtaatcaataaacaagaatttatttctctctttactggtctcttgctactacacttgtaatatggtatcaagaatgtaaaatg

SEQ ID NO: 37313 - DNA, 307 bp, Glycine max
cgcaggcatgcaagcttgaaggagtgttacctcccatttttcataatagaacactggcaatgtgtctactatcattgtcatcatttctttctccgtcattgaggtgccacttgagctgccaggcctctccacctttgggtgtattctttgaaagattcatgcccctttttgcacatgttctgtagttgcatcctatccagagtcatatcaaaattgtactgattctgcctaactaatgcaaccattaggtccttccaagattggactcgggaagggtcaagattagtgtaacatgtggcggctaccc

SEQ ID NO: 37314 - DNA, 381 bp, Glycine max
tctagccaaatggacttaccttgaattaattcctttgatagcccttttgagccttgtttccctttccttgttttgaagctcactacaagccttaagtggaaaaccatgatattaccatatccttaaggaattttggagctttggaattgttttgggaataagtgtggggggtttttgtttcattggacaacttgttttgttggctatgcttcatgatgtattttgggccatacttgatgtacattgtatattggttaaatgttggacatgctgaatgaaatgttgtttctcaaaggccaaagagtaaaaaaaaaaaaaaaattctataaaaaaaattaaaaaagaaaaagaaagcactaaattgagtgaataaatcttgat

SEQ ID NO: 37315 - DNA, 270 bp, Glycine max
  unsure (1)..(270): unsure at all n locations
tgtanaaaattattaaatattataatgttgttggattgtatnaatgtgtttagnttaaatgattaaanatgttgttttaaagtatgaaggtnattaagnttgtgaattaatttaaaaaatttttgtaatanagtatgaaaagtataatttattaaattatnnnttaaaattataattgaaggacaaaanttatagtatnnagtaggtggttttagtgttatnnaattaaatgttagagttatatatnagtaatttttttaataaatgttt

SEQ ID NO: 37316 - DNA, 395 bp, Glycine max
atacttttaagagccccaaacgaatagtaccatacaaaataccccaaataattaacgatctctgtacatcgaaccaaagagaaaaggaagcttatctttttttccccctcgttttatacacatatatatacacaattttttctttttatgatgaactacttattcatttttcagaaaagaaaaggcaaaaagttcaataaattaactgtaccaataacttcaataaattatttgtaaatcagccactactttaaaaataaaagttggtcagagcccaaaggaaacatcaagaagttaaagagaaaagacacctcacaccgatacagaaagtacagattttttctatatgataaacctattgcattcatgaagtgatataatatttcgagatgttt

SEQ ID NO: 37317 - DNA, 317 bp, Glycine max
  unsure (1)..(317): unsure at all n locations
agcnttgatttcctttgttccggatacctttcttttgtcatgtgcacccaaacccaatctccgggttcgaagacaaccttctttctccctttgttggcttgtttagcatagcttttatttttcctctcaatttgatctttgactctctcatgaagctgctacacatagcgggcctttgcttgaccttctttacgctcaaaaaaagaaacattaggcatatgcaaaagatcaagaggagttagtgggttaaaaccatacacaacttcaaaaggagaacaattagtggtgctatgaacagctctattgtaagcaaattc

SEQ ID NO: 37318 - DNA, 398 bp, Glycine max
tgccgggagatgaagcttagggaaagttaacattaggggagggaagatgaagttaggtgaggaagtatgctgggtcaattgaggttacggctacagtaaatacgaagatttactttaccttgtccttttgttttttacattttagttttttattaaatatttacagaattatatttaaaatataaattaaaaaatacaaagccacatcacccaatttaacagtcaatgtttgataattaacggtcagcgcatcccattagaaggaaggacaaaaatcactgatttaaaaaatttaaaagaccaaatatctcaatttttaaacgtgaaaactgaaattatggattgacaatgatatggaaactaaaattgtagtttagtttataatataatataataat

SEQ ID NO: 37319 - DNA, 366 bp, Glycine max
  unsure (1)..(366): unsure at all n locations
agcttaacaacttgaagaggatatattntatattntatgcatataaaaataatgcgataatttgaaagatttgatttacatgggaaaacttttagtttccaaaatcaaaagatgcaaaagtcaaaaaagggttatttaagggaaaattaataattagaaaaaaaggtctcttaaatttattctaattattaaatatcccctaagtgtgagactagaacctaaataaatgggtatacttacatcaaatataccctatttttttataagtaagattaatttctccattcctttgtcttttagaactctgaaaccctttcaaggtgaataaaaattaatatgccttcttaaaaattatttaaggcaaat

SEQ ID NO: 37320 - DNA, 391 bp, Glycine max
tggaaccaaattgttattttggcctgttaatgaacgagggaaagtaagtaaatattgaggcagtaagatccctatattagatcttaaagtgtttagttactttctcacctctgctcgattagtaacatgtttgattgatcaaggataatctatatgacaattttagattttactctcccccgtatctttctagtttcctttatatcacatgtagagcagtcgtgatagagtgtgagcctgagttgaatgtgcaagtactaagtactcttgaaatatgtatgacagaagttggttaatagatacgacaagcttttttgagatatacaagatggcgtcaatgcttaaaggttgttggactacgataattctagagatgttcgtcaatcttcat

SEQ ID NO: 37321 - DNA, 267 bp, Glycine max
agcttgcaaatgaatgaagggcttggtttatggaaatatatatttatttctacctatgctctttggattatgatacactctttgaaatttgaatattttataaagcatcaaagctggagttacctgccatcacggctggacatgatgagcaccataaaaaatcattgtcattccacattggagaaataatttttaagaatcttgatttcacttaaaataatatcatactttcgtaacaacacatagccatcccagagactccatttt

SEQ ID NO: 37322 - DNA, 400 bp, Glycine max
cgaggtgttggatgtgtcgaggaatacgctcggtgggcatgtgcctatggagcttgggaattgtactgagttgtctgtgctgcttttgtctaatctttttagttcagttccggatgttaatggtactttgggggactccggggtggagcacatggttgctatgaatattgatgagtttaattacttagaaggcccggttcctgttgagattatgaaccttcctaagctgagactgctgtgggcgcctatggcgaatctggaaggcagttttatgagcagttggggcaagtgtgatagctaggagatgctaaatttggctcaaaatgatgtcactggggattttcctaatcagcttggtggctgcaagaatcttcattttcttgatttgagtgccaataac

SEQ ID NO: 37323 - DNA, 303 bp, Glycine max
atgattgtcattcctacattctagttgatgattgttttgttagttcatgacttccattcaaattttaactgtaaaaaagacccaattctgcttttggaaatcatgatatatgattaaaattaaactaggaattccaaaaataaagcgctgaggcaattagatttaaaaataaatggaagaatttatttagagttctctgatagagtttgaaatgcttttattgtagatttgaaggcattttggttctatagccaaacagaagagtcatttgtgatttccgaaggcatattttggcattatgct

SEQ ID NO: 37324 - DNA, 389 bp, Glycine max
tatgatgaagtctacttttattaagatttattatcaaattttcgtctgctcttgaaaaacaatattttcagcgagtaagaattactcttgcattgttatataatataattatggaaaaaccaccaacagatggaattccttgttaccttatatatataacgacgactacgattacaatattttcaattaaaaatattctacactactgtgtcaaataatcataaaagtacactacaaattacaaactgtaactaacctatgacacacactaaaaaatcaaccaaaaaaaactagttcatgctcaaatatttattataatacaaggtatatataataagtactcgtgttaattaactaagcgtgtaaattaagatcgaataaaccattat

SEQ ID NO: 37325 - DNA, 329 bp, Glycine max
  unsure (1)..(329): unsure at all n locations
cattggctctaacagttcttggttacttggcaaaatatgttttgggaattntagggtaagctataatgtatgatgcataatgaataatgatgctttgaactgttgcacatagttttacaaagattgcttactttaacaggggttatgtttcttatctaacctaacatttgaaaattgtaacaggttgattgtttcaatggcgtgggtcactcatataattatctacctattaattgatcctccactttctcctttcttgaatgaagttttcatcaagctagatgatgtctggggtatgttggaaagctcaggctatttttctttccttc

SEQ ID NO: 37326 - DNA, 389 bp, Glycine max
cgtggagggtgactttgctggaactggaccatttctatgtaagtggaaattttatcttttattttaaagaacaaatttgctcatgatgctcttttgatgttttagtatgatgcttgtgataattactatttactagctatagtgcttagttaacaatgaacataatttacggtgtacatattcagctcaatgcattgagcttttctcaagtgcagacaacctgatttgcatcaatgaattaaatattactagtttaggcatcatggagattcctatttgcttaggtggctctatttcatccactggctccactttatatgtgctcatgttttcctgcttttacaagatccaatgtctcttggattccaatatatatgtcttaacttctt

SEQ ID NO: 37327 - DNA, 349 bp, Glycine max
tgtaacataataatacaaattagtctcaccaaactaataacaataatggtaataagttcacattcgcaaggctggctgatttgctgaatcctcgtcgtacagctgggatttcctaggtatctccactcattcaagagtgactgtagtaattttaatttaggataaccaccatgcttctgtttctctgtcactttctaattcatcattttataatgcctataatcaataaaaaaaatcttatttttttactgcaataaaaatttgtatttatttttacgttgtataatatgtttagagtttttttaacacaaaatatttctcaattaaaaatcaaaaactaatctcttga

SEQ ID NO: 37328 - DNA, 502 bp, Glycine max
  unsure (1)..(502): unsure at all n locations
gatcactctcntcactcgctcttntaattctctatttagtttctagtccgacaattaacntcacaacgcacaattgatcattgatccctcgacacacggacaaataatactcagccgtagagtgctagagcttggttcgtttgatctgggctgactaacttaatcctcaaatttgattctgaatgactctcgtgattctatggaaactgttttaatcaatcccacgctcagcatggattcctatgaaattctctacttaaaatgcataaagcactagttttgtctaaaatacatatatttgctttatactacaactagtaaattttatcctatacactcttgatattgtcgcaatgaccctacgaataccagaatctagaggattactcacataaagagtattctttcctaaacgctcgatatcacctgtcctcatggatacaacacaaanttttacactaacgaaattccgtcactatattcccatttaccccgcaccatc

SEQ ID NO: 37329 - DNA, 406 bp, Glycine max
  unsure (1)..(406): unsure at all n locations
ggatactnttgagtctaccagcagcatccaagcgcgtcgcaattgtcatgtatttgttgaggccaacacacccaatctgtttcaaggttttagtgatgatgggtgagatgtttacttgctaaaattgttgatggaaatactgttaagacggatggtccaactatcccccggttataaagtgagaatgtgatgtcttgattggactacgagtgacactcttagagtcgcgaatgctaagtctgacttctgtggtaaatggaggttatagcgacttaatactaacttgaaatgtcatttcaaacatgtgataattgttaagctgtgcttgacagaacaactactgatcatagtgaacaaagagccattgctacggcacatttgtgtgttgaagactcaaattctgatt

SEQ ID NO: 37330 - DNA, 186 bp, Glycine max
agcacttgcctgggcaagttgctatccgaccctcccccctcattggctatcaattagtgggtgggggctccagggaagaggcccctagactgtgaatggccgatatgttctcttgctgtgccgatctatctacgttttcagacaaaaataaatggggggacgaacccttagatcactatttcactc

SEQ ID NO: 37331 - DNA, 388 bp, Glycine max
tttacatgaatgggtggctctctattaagaaggttgaacataacttggctgggttttctctcacttggaaggcttcagcataacttcatgatgccccttgatgaactcttaatgctccacaaaagactgttgaagtggagcccacttaagtgacaaacttttggaagaaacaaaaaaaaagtgacaattgtcaactcatgataagttgttgagtcattctaaggaacctttctgatgagcattatgaaggtacatcagaatggtgattctgatgttagctaagaatggatcaatatgaaagttgatccttatgatgaagttcaacttatatggctttctgaataaacatagcttcatcactcttaacacaacttcacaacacaaagca

SEQ ID NO: 37332 - DNA, 367 bp, Glycine max
agcttatccttatggcttgcctctggatttcactccccgtgccaccccggaagatttaagccaagcccctacttttgaggggcaactcccgccttatgacgactatcccgggcaagacgatgaggaaggagatacccatcttggccccctgctccacctcaaagatccgtcctcacatgaactaccccaaccgaacatagtccaccatatcccggcctcacccacacctgtaaaagaatctgttcccttcgcggaagataagggaaagattgaggcacttgaagagaggttaagagcagtcgagggccttggcaattacccattctcggatttagtggatttatgtctccggcccaatatcgtcatt

SEQ ID NO: 37333 - DNA, 393 bp, Glycine max
ttcccttccgcagtctttgactctaggaaatatttcttcagaaacttttcaacaacttcttcccaggttttcagactgttacccttaaatgagtggagccaccttttggcttctcctaccaaggaaaatgaaaatagactaagtctaatggcttcatctggcacacctgcaatctttatagtgttacggatttcaatgaatgttgccaaatgtgcataggggtctgttagtcgctttatacgactaactttggtatagaaatcattttccaaagtttgtatagttccccaatttatggttattttgtagtgatttttgtaaataaatcttgttttatggttaatgttgactctagaacatttccattgcatttaatgatgaaatttatgcatt

SEQ ID NO: 37334 - DNA, 322 bp, Glycine max
  unsure (1)..(322): unsure at all n locations
agctntgaacaaacttttacaactcataaactttagtttttggttcttggagatttcttagcaaagtttctctgaaagttatgtgattattgagttgcaaacacatttgagataaagagaggtccattcaatcaagtcttttgttcttgcatttgaatgtaaaggttgtatctctccttgactatgtttcatatggtttttacacattgttactgcatgtgcaagcgttttagtgcatgctagaataggtgtttataatttgaaactaagagtaagtttctcttacgcttanattcactaaggaccctgtgttgggtgccta

SEQ ID NO: 37335 - DNA, 396 bp, Glycine max
ttccacatccacaatgcgcgcataaacccaccatcccctgttgcccacctccaactgagctcacgtactcccacgtagcccatctcctcgtttctctcaacaccgggtccccatcaatcctctcaagcttccacaacatccaagcaaaacaacgttcaaacagcacaagctatcacagccaagcaaaacagagcaaaggcagaaaactctgctcaacacatcaaccaaaatcacagcttttctcacgtaaagaccacagtaacaattccttcgatccaattcgttaaccgttggatcgactccaaaattttactggaagtctatagtgtataagcctgcattttgaccgttgggatatactagcaaacatccagaactcattctgcactagacttt

SEQ ID NO: 37336 - DNA, 297 bp, Glycine max
agcttgtgcctcttcacgtctggaatatgaatgtatcatatagatccaaagacccttatgtgctttgctgatggcttcttcccgttccaagcttcaattggagtcttgtcttttacagacttagttggacatctgttgagtatgtaaacagcagtgtagactgcttcagcccaaaatgtgttaggtagtcccttctccttaagcatcgatctagccatcttcataaatgtgctattctttctctcggacactccattttgttgacgagaatatgcaactgtaagttggcgctcaatg

SEQ ID NO: 37337 - DNA, 396 bp, Glycine max
tctagcttatacgggcagacatcttattaactaataaagttttgatgtaatccttcattaaccctcctgcatttgtataattatcttcatctttgtaaagcacgtcaatcatgcgcacaaggttgacaacacgcaaaagaaaattcattggcacttcagtaggattaaggcatgcctcattgatgtccttccaagcactcttaaccatctcaagtagtttattaatggcatcttgccttgaggtgttatgttgcttcatatagctttcaatgcttgatgcaacgtgtcttctttcctgctcaaactttggggaaaaaaattaatactaaagaaaccaatgtttaacccgtaaagtaaaagttggtattaccaaaattataaggtaaattaaatgtc

SEQ ID NO: 37338 - DNA, 373 bp, Glycine max
agcttgttcttatcctccgatatatgggatagaaaatgaaatcagttctttttttatttattttttcgttccatcggaaaaaatccaaacaataaaaaggttccagtccactcaatctctattaaatatctagacattgtcctacgaattgttggtattttttggtatagctttctatctaaactagacgagcaatataattgagcaggtttctttaccagcatttcttttggcaggagatagtgtattctccttgctgtttttgttatctgatgatcaataatctaatatagttatgaatcctaataactctttctgaataaatgcagggattatggctggacttgcttttaaggtagctgaatgtttctct

SEQ ID NO: 37339 - DNA, 398 bp, Glycine max
  unsure (1)..(398): unsure at all n locations
tatcttanaatcaagcatccaaaacacgtaggcatgtatattgaacaacactctcataattttattttttttgttattgttcttccaatcttattcgttcttccttcgacacagacacatataagcaaaatgcattatttaaagtaaattattgttatctaaacctctgccgatcctatataataatattgcatatgcatttcttgaaatggaattttatacacatataattaagtgataagccatcatgtttaatttgtcaatcaagcatatgaactaaattattattctttagaaactaattatgaatactaattaatgaagatgattgcttagtggggaagcatacatgatgcattaactgatgaagtatgacccacanattaatatataacaca

SEQ ID NO: 37340 - DNA, 375 bp, Glycine max
agcttgcttaggtgagctccagctcgcttgggcgagctaccattgcccctagtgcccattttcctataaataggcatgctagggaggctgagaaaggttccaaggttaagaagttgagggaattgagagaagagagaaagaaaaagaagaaagaagaggaagcaaagtcgaggcactaccgaatcacgaccatgatcattgttcggcttctgggatgtgcaccggatcgcacaagtagtataaaatgataagaacctagtatcgaacactcgggcaacttgggttatttggtaagctatttaagcaaataggcgtttattgtgtaaaagtaagtgtgaatatgaacaagtctataaactatctgtgcaaaaagaa

SEQ ID NO: 37341 - DNA, 369 bp, Glycine max
tagtctctgcaacttatgtagcatgcattttcttccttgccgatgacaagggcaagtaactaccagttttaattattaacttgttgtgataagtaagcaagaattgtagagccaaacatcaatttgaggatgatatttttgagtaattatagttttctttgtgtgattaacgaaggttaataggttatgttctcactcgccatatggtcatagtcattaaacctgcaaatttatagctaaagaaactagaaaataaaaattgaaatattgaagtcctattgtagcaatagtgattcttgaatatctaggctagaatgtaagtgggtttttgcctctacaatgggagtatatgacgcgcgttaattactc

SEQ ID NO: 37342 - DNA, 498 bp, Glycine max
  unsure (1)..(498): unsure at all n locations
ttgacacctattctgtccgaatactcgtgtgataaaacaactnnnnnanncagagaagnntttgatcgtgcttggcacgcgatgcggtacaataaactgcacgcgtgcgcatcgcatcctgacggattgaccctttatttaaagacaatgactcatccacacacattatgaaaatacctcttctctagtagctctactcaacagaaataacttatatcactgtcaaaaaactgtagattgagagagttagatacagtttatacattcactatacgcaaaagtcagacattttctccgactaacagaggccattagacggatgccttccttcaccggccctggtaaaaagactgatgacgaggctgatgataaggtaatgaaagcagatcttccagagaggaaaacagcagacggaggccctggcaaatacccattctaggattatccggatgaatgtttgcgggccgaattagaattcccgccaagttcaaagagccc

SEQ ID NO: 37343 - DNA, 380 bp, Glycine max
acactataaatctcagcttgctggccgctctatggagctggtcttttacgtcatgatgtcctttaatggcgacttttcaccatggagatgcattggtagacgttcgatattacgtgatacgcgtcgccatccactaaggaatcactcatggaaaagagatctgtaccatcaaagatggggagattgtacaagcgaagcttcatgatgaattaaaagtgtttcatagatgtcttgatgataactatatattatatcacctcatgatgaccaaggtgttgacacatagcttatacgtccatcaaacaatgtgttcaggatgttcacgagatcctctattcacgagtccagattcaagagattgcgatacatgactcttgatt

SEQ ID NO: 37344 - DNA, 330 bp, Glycine max
agctttatgaggtttccttcttattattgagtatagtattcatatatttacagcgagtattttcttattcatatatatacacaattcttattgtgaaggtcactggaagagctcaaaataagaaatttttttgaattatcattcttatatcatgactcgcattaattaggctctatttccatttgttggccataaagaatttttgcttatatatgaaaaaaatagtacagtacatcaaaaacttaaagatagaatttctagctatttcaatttcgtgttttatttatttcttaattaatattgtttttggtacagcggaaactcaaatgg

SEQ ID NO: 37345 - DNA, 388 bp, Glycine max
tcactactcctatatattcttcccaaactctcatcattctcttttctcattctctccatcctttcttcattgtcataactcattcttctcatttgatcaccaagtttaatcatctccgcctctagccttgcgatttttggagatgatagagtagcatctccacttgtagaagccatacctataagaaaagttagtgtacaagtaaaaaatagaataggatctcaccactcaacttagtgttccactcaagttcacttatgtatcactctttcaagactttttcttttataatatgcactcttgccttttaccactcttgcttcttttcagttcttatgtagaatcttcaagctcaacatcaagaaatattctatgttaaatatgtcac

SEQ ID NO: 37346 - DNA, 497 bp, Glycine max
  unsure (1)..(497): unsure at all n locations
gtagccgaagatctgatcgacgttgagacatttcctttctcantctcatccnnccccnnnaagagaggannatgaatcatagcatggcaagcgannnnaaaatcaaanngaagcacgcacaccagtccaaaagaacaaatattgcatttgaacccacgcacacgacattttcacgataaattgcccccatagacaataaaagcagcatccctacctagattacttacacgtaccccacaagagtatttgtaacatagacctcacacatgtctgtggctaaagttacaagcatgcataatcaaaggaccgaaggggtacaaaaaactgggcatgtgacacaactggggtttcgaagaagaaaacacacgcacacttcatgatgaagcctgactatccacacaagaaggtggctcaattcatgcccttatattcaagctgttgacaccaagagacgatgcaaaacaagcataattgctcgccgacaaacttgaatcccg

SEQ ID NO: 37347 - DNA, 387 bp, Glycine max
  unsure (1)..(387): unsure at all n locations
ttcttgaganaacttccttgagaagcttctttgagaaaaattccttgagaagctagagcttagctacacacacccctctcataacttagctcacctccttgagaagcttccttaagaagattcctaaagttagagcttagctacacatacctctctaatagataaggtcacctccttgagatgagaagctagagcttagctacacaccccttataatagctaagctcacccccatgaaaaaatacaaaaaaaaaatctctactacaaagactactcaaaatgccttgtaatacaaggctaaaaccctatactactggaatggccaaaatataaggcccaaacgaaggaaaaacctattctaatatttacaaagataagcgggatcat

SEQ ID NO: 37348 - DNA, 366 bp, Glycine max
tgtaatctttggatccttgaagatatcttaacactttctttgcaactgactaatgctctattcctgaattactttgatatattccaagcattccaaccacaaatgccatgtcaggtcttgttcacacctgctcatacataatgctttctacaatggaagcatatggaatgtttctcatttgttccctttgaagcttatttttaggacattgattcaaactgaatatatcacctttcacaataggtgtcatgttgggtgaacaatcttcatgcaaaacatctctagaactttgatagtattggccctttgagagaacccgagaataccttgatatcagtttctatggatctctatgccaatgacata

SEQ ID NO: 37349 - DNA, 369 bp, Glycine max
cgaaagatataaaaaataagatagggtactggattttgtctgcaccaccttggtatacctcacgaattgaggcgaatctccggaattttggaccatgtacgcgtcttatacactcttcggctctaatctctaccgaattgcctgctattataagcttgattgtgaaaattaaacagagtagggaatttatttccaaaatgtctgtaaaagttgcgatctcaatttcgctaacacaatctaataggggactattgtgtaccaccgaaacttcacgatccctcaaaccttattctgactcataacatttgccaagaatggtatcggggcacgtgtaacgttacctaaagccacatttttatctttttattg

SEQ ID NO: 37350 - DNA, 388 bp, Glycine max
tctcccctattttgctataaatagggggagaagtgaagaacaaaagggttcagcctcttaggcacttctctctctctcgaaattgctgaggaaaattatttccgtgaagaaaatccaagccgaggcgcttccgtaacgtttccgtgagaaattacgcgaagattctcgaccgttcttcaagattcatcggtcgttcttcgttttcttcaatcttcaacgggtaagtacctcaaaccgagcttttcaattcattctatgtacccgtggtggtccacattttgtttcatgtatttttattctcgttttcattttctttttatacccccttttgacgtgcttaagtcatttatttaagtcatttcttcgcttaatctaaaaataaaataaa

SEQ ID NO: 37351 - DNA, 378 bp, Glycine max
tgttgaagtgaaaggccccaggcacttgcttggcatctctctgcaaacttctttctttttccatttctctttttagatttgcattttttatagttgttttatgtaagtatgcatgtattcattgaacttggagaaaatagggtaataagcggatgctacaatatggcttgaaagttgaaacttattatgcgtgtgcttggatatatgttgttttggtggttgcatgtcttcgttaattgaccaaaatgttgtgggttgtgtggctgtacttcttatatattgattctgtgagtggatattgagaagataagataggagaatcttcaaatcttcaaatctactagtgtctctagactctaatcatttgatgtactatac

SEQ ID NO: 37352 - DNA, 55 bp, Glycine max
acattctacttcccttttctctcatttctaaatatattctcttgtaattttaatc

SEQ ID NO: 37353 - DNA, 272 bp, Glycine max
agcttgttttttattgattggaaaagggtattaaaaagcaaatcaaagccttgcttttatagactcttcatgtttggccaagaggaccatttaaaagagttataacttctagaaaaacttaaaaccaatttgaaaaagtcaaaaaaccatttgaagagttacatcttttgatttattcagaaacaatcactggtaatcgattaccaaatcaatgtaatcgattacacaaagcttttatgtgaaaggatgtgagtcttcacatttgaatttga

SEQ ID NO: 37354 - DNA, 259 bp, Glycine max
agcttttttttagttgcatgcagtgcaacctgctcattcttcagtcatgctagttgggggatgcgacatctgtggtggggcccattgcggcttagcgctacactcattttcttttttttatttattaattttgttttccttgtttttgatttttggttctaatatttttctggtgtttctttgttatttcttttgtagatggcctctagaaaatgccaagctggacccagtcagccacaaggggggattccacctggga

SEQ ID NO: 37355 - DNA, 317 bp, Glycine max
ttagggaactctgaaactcatcttggaatcctacaatttttttcacatctccccggtcatctgtgatataaaaaaatctatgcttatttatttctagaatctttcataataatccacatttcaaggatattgttgcccaatttgatgttggaaaactgcaaaatacttcaaatgcctcaattatttcccacaatttgtttgactgatttcgaaggacctttgcagaatcatacttccatcttggaataccttgacctttattacaataaacttcaagggccaataccttttttttatatataaatatgtgatttgga

SEQ ID NO: 37356 - DNA, 260 bp, Glycine max
  unsure (1)..(260): unsure at all n locations
agcttgcctcntttcccttcactttcttctctttctcaaatgggtgtctaagtctgacaccatactttgtttctcacttcatttcactcattgccaaggactcagctacctgttttattttatttttttggcatctgtagtaatgatgcgtttcttaatttttgtaagtggtttgcttgagttccttcttcttgtcactgttacagtgcttggaaatttaaatgcttggatcgttttttgacctttgcagagaaaagaga

SEQ ID NO: 37357 - DNA, 271 bp, Glycine max
agctttatgcaagtcaattttcaggaggcatctcggagaggatcttttccgggcatatttgcacaaaatctcttgaactaggaagatgttgtccatcatctttctgttcttaatgaaagcagtttgagtttccccaataatagtctcaagcactggggctatgcggttggccagaattttagatacaatcttgtataacaaattacagcaagatatgggtctaaaatggttaacctgggaggcctgatcatgcttaggaataagcgcaata

SEQ ID NO: 37358 - DNA, 279 bp, Glycine max
tgaaatgaggaagtgttttagggtgaaacttcctgcttttattcgttgaccacagagtggtacctggagatatgtcgcgggggtcaggagaccttggggacgtcaggtggggtgctattgcccaaaaccaagcttgaccaatcccgacccaacccgggcatagtcagtcagtgagaacctgtgatgtacctatgcaggcgagctcctgacagtcaacagataaaaggaacaaagaccacaaagcaaggaggcttgtgtggtggctggccagctgtgaac

SEQ ID NO: 37359 - DNA, 258 bp, Glycine max
agcttttatttggaattgcgaaagccccactccatcattaggattagtacctgacatctcaaacaaacaaatcaaacgtaacaagacaattatagttgctgtttgaatacctcacccactcaagtgtatcacacaattatggcttttctctaatgaaacactcttgccttttaccactctaattccccttgagttcttaggcaattcaagagattatggccacaacaaaaaacaattcaccaatatgtgttaggtaag

SEQ ID NO: 37360 - DNA, 205 bp, Glycine max
cccccgacgaaaggagcccgaacgggcagggccgcagacccgctaacccaaagaaaagcccgcaaaaaacgcctaccaagcagggacataacacgaacagagagagacaaagaacaagagcaaatgccagcagacacccaccggaagaacaaaaaccaagccagaagaaaaaaaaccacccgacaccacgaagaaggggggccaa

SEQ ID NO: 37361 - DNA, 131 bp, Glycine max
acaaggcgagcggctggcggtctaaccaaaaaaaataaacaccgaccccaaaacaagggagcgttgtgtggggcctggccaccaaagagctctgagtgagaaaaagggaatgggccctggggatccatgac

SEQ ID NO: 37362 - DNA, 259 bp, Glycine max
agctttgttaatggcagagaaatgagcggaacactactgggaaggtaacgagcatctattatacttggttgtgtgtacatgtcatcatgttaatgttcataagattgttaaaacaagtatttcttatacaggcaactgcaagtattcaaccacaactatggcaaccttctagtggaatactgatgactaatgatataagtgatactaacccagaggatgctgtgtcatgttttgcactgtcaaagaatgattcatatgt

SEQ ID NO: 37363 - DNA, 274 bp, Glycine max
tcttaatttactcattttttaagggtggaagaagaggaatatgaagaagaagctaattgaacaactagttcttctctctagcaatatctttggacaccaaaggtgaaggcaagggccttttaattattcgctctctctctctctctcttaaaacccttcttcttggttagataatgaactgaggtgtgtatgggggtgtatatatataagtatatgagtacagtaaaagttgagggaattaggggttgtagtataaataataatagagagtggg

SEQ ID NO: 37364 - DNA, 250 bp, Glycine max
cctgcttgcacgcacgttttggttgaaaaaaaccccccacgcagaataagggaatagaaacagcgaagctgctgacgttggattaattaattcgctgttgaagaacaaagtcaaattacaggaaaagggcctatatacatattcccttataaaaccaaacccaaaatatgcacaagaacagtatgagcaataaagatgatggcgcaaaactgacccagactgacaaaagcaacataaggaatcattcttt

SEQ ID NO: 37365 - DNA, 268 bp, Glycine max
agtttgattttttcctaacgtaaacgaaggaaagtgtctattttttagaactttgagctggtcctccttataatcacagcaatgctgaagcttataactgacatatgccaatgcatgccaattccacactacgtgggggaacaataatgtgtcatgatgccaactcaacactacatgcattgggaagaagaatgatcgatttgcaagtaattaatagtagtatatatattagggaattgtagtcttctgaaaaatttcttaacttttt

SEQ ID NO: 37366 - DNA, 266 bp, Glycine max
taactggaccaaactcgattaaactggggaacccctaggctgtttgtactcttgaccttgatagaaccgtctttttaaacctaaagcatctcgaattgagtcccatgttttacctaaagtgaacaaaaatctgcgcgaaacaaaactcccacatctattatgggtggaaatggaagaatgcataaagaaatgcatatgacatatatgcaatttactaataccggagccccggaaataggctccttttcagaaacaacgtcttgggg

SEQ ID NO: 37367 - DNA, 171 bp, Glycine max
aaaaaacaaccaccccaaaagggcgcccccgcaggaaaggacccgaggaagcccgccccaaagagggccaggaaagacaaggcggccgaaagaaccaactccgctccggaagaccaaaaccacccgccccaggagcgctggacaccagcagcgccccgaaaccaacaaggg

SEQ ID NO: 37368 - DNA, 279 bp, Glycine max
tgaccaatcccgacctttcctgggcatagcctgtcagagaaaacctgtgatgtacctaaacaagcgagctcctgtcagtctaccaataaaataacaaagacctcaaaacaaggaggcttgtgtggcggctggccaccaatgagctttgagtgagaatatggatatggcctctgggggatcattaccaaaggtaggtgattggttataaggcttaaaagtgaagacatgaagctaatatggcctctggtaactcattaccaaaggagtgttatcgattac

SEQ ID NO: 37369 - DNA, 257 bp, Glycine max
agcttttttgtgtgtaacccaccattttccatagtagaatactggtaacgtgtctactatcattgccatcattttttcgttattgaggtgccacttgagctgccaggttctccccctttgggcatattctttgaaagatccgagccctctttttgcacatgttctgtagttgcatcctatctgaagccattatactgacacagcctaacgaaggcaaccattaggtccttccaagaatggactcgggaaggttccaa

SEQ ID NO: 37370 - DNA, 270 bp, Glycine max
tggttcgaggtacttttccgttgaagatcgaagaacgatgaagaacgaatgaagaacgtcgaagaacggtcgaaacctttgcgaaattcttcacggaaaacgttacggaaacgtttcggaagcgcctcggcttagattttcttcacggaaacaatttttccaagcaaattcggaagagagagaagtgccaaaggggctgaaccccttccttcttcacttcctcccctatttatagcaaaataggggaggtggttgccgcccagctcgccc

SEQ ID NO: 37371 - DNA, 270 bp, Glycine max
agcttgttttttatttacattgatgtttgtatttatgggaggaggttatatgccatttttgctttaagagtagtgtcccactggtaaaattaactttccaaatgtttgccttcgcaggaatggccccgaggaagcttgcctcaaagaggtccaggaaggacaaggcggccgaaagaactagttccgctccggagtacgatagtcaccgctttaggagcgctgtacaccagcagcgcttcgaagccatcaagggatggtcgtttctccggg

SEQ ID NO: 37372 - DNA, 281 bp, Glycine max
tcagaattcaatttctagcgtctcaatagattacgggactcaatcagacatccgagcaaaacgttattgtcatttggatttgctgagagcttcaacattcaatttcgagcgtctcgatattttacgggactcaatcagacatccgagtaaaaagttattttcgtttgaatttgctgagagcttcaacattcaatttcgagcgtctcgatatattacgggactcaatcaaacatctgagaaaaaaagttattgtcgtttgaatttgctgagagcttcaacat

SEQ ID NO: 37373 - DNA, 267 bp, Glycine max
agctttgtgttttctatgaagcttccaaatgatggatagacgaaatatgcaacacttgtgcgtgcactgctcgaattcgtcacagctcggtgctcagcgccaacaagccttccattagttatgatctgtcagatccagagaacaaataatcaaactttacttcgaagcttaagagcaattgaaattgtttaattaaattaatcattagtttttcatgatgaggcaatgataacattgacttgacattgactttatatatatttatat

SEQ ID NO: 37374 - DNA, 282 bp, Glycine max
ttttcttaagttttttcttcaacctttttctccccctttggcaacatcaaaaagccaaagaactcggaaatcaacacagttataataatggagtagcaagatataagtatcagagtattaaatacaataagccaaactcataatcaagaaataatcaaaccagaatttaaataacataaaatgtcaacaaccacaaaatatccaagactgaaatttaaaaacacaagataaataagcaaagtacttagcataataatgtaaattctaagaaactaaaagcca

SEQ ID NO: 37375 - DNA, 261 bp, Glycine max
agctttctgtctgaaaacaaagtccacattaattaactgatatatctattataagatacattttttcacgtatttttatgtgtgatcgaaagaccaaattgcacaagataatttccaaagtcattccccagcatgtgtgtgcattctatagatattaaggcatattgcatatcaattcagaaaacaatttatattttgctataaatttcagtgcactgtacaaataccatatatcattctccataaaaaaaaatatatcat

SEQ ID NO: 37376 - DNA, 278 bp, Glycine max
tgttgataacagtattttatatgttctcatttatttgctctaaggcttttagcttttggttttaagttggcagttagacggttataactgacatctctccttgaagagcttctactttatattacgggttgtaataatgtaacagaatctcatcagttttgtacattttcaataaagtttcagtgtcagaattctctcttaaattacttcaatacgcatttattcaattggcccatatcacgtgaacacttacgccataattttgaccatgaaacttt

SEQ ID NO: 37377 - DNA, 260 bp, Glycine max
agcttggactcaaagagaaacctagaatggctctatagtagtgtaaaaaaaattagactcaagaaacctctagtttttggcacttgttttcacactaattttcaatttaaatttcagaactatgattggtataaaataggcacaaattatagaacaaattttgagccaaaacaataagcacacttccttttcacttttttttttctggacactgattttcctgccaacttgtgtgatttttcgtattttttccttttatt

SEQ ID NO: 37378 - DNA, 271 bp, Glycine max
ttttgaaaagacacattttttcaaaccattttgaaaaggcccaatgggcctatatatatgtgtgtctgactctgaaaagcaagagagagatattctaagagaacttaattgttaaatgttctctcaaaaactattgggcaaacactagcaaatctattgagaattattctaggatcttcaatttgtatcatctactctaaaggagagaaatctttctattcatctcataaactcacttgtaatcaagagactggttgtctcttggattgtg

SEQ ID NO: 37379 - DNA, 273 bp, Glycine max
agcttttattataagatttctatacaaaagttagttgtataaagcgactaacaattattatccagttgtgcaaccactttatgtgttggattggaagtgggataattccgtttcccctccaaccaaattggttttagtccaatggtctggcttggctccaaaggatactacatgggaaagctatgatgccttgtgcaaatcttatatgttagcaattacagccaaccatacactatcaaaccacaaaggtgcaccaaaagacccacatacctc

SEQ ID NO: 37380 - DNA, 269 bp, Glycine max
agctttgttctaattcaaatgacaataatgatttgctcggatgtctgattgagtcccgtaatacatcgagacgctcgaaattgaatgttgaagctctcagcaaattcaaacgacaataactttttactcggatgtctgattgagtcccgtaatacatcgagacgctcgaaattgaattctgaagctctgagctaattcaaacgacaataactttttgctcggatgtctgattgagtctcgtaatctattgagacgctcgaaattgaatt

SEQ ID NO: 37381 - DNA, 277 bp, Glycine max
tcctaaaatgcttattttacttatcaataacaaacgatcatttgttgacttttgccacatatatgttacttatcatgatttctaataggctgctggcgtaatatgctaatctatcaaaatcaaactcaatacttaacacattgtgtctaacaaaatataactgggatctgtaagggatcttaagtccatgttgactgcaatgtgggcggaacctaaagaaacctggtactcgaaattaagaatctaattttgtgtaaagattctatgtctatattcc

SEQ ID NO: 37382 - DNA, 270 bp, Glycine max
agcttgtttataaaaataagcttttgaagtttgtcatttcaatttcttactcaataaatggaacattttttaagggcccaccccctaaaaagggccaccttttaagtaaaaaaaaaaaatcacttgataaaaaaaaactacgtaggtctgatttcctcgtcgcaaattgaggaatccgtaggagcaaagggaaacacccttgtcgaccacaaaaaagaaaaaatttaaaaagggtttaaaggatataaggacataaaagggaacataaaa

SEQ ID NO: 37383 - DNA, 277 bp, Glycine max
tcctaaatttaggttttatatatacaagaactttataagatacatgtgtgttaattatatactcaaactatcactatcattatacaaataatattataatatacaaccatacgcacgatataccacgacactcaatatttataattcactctatatagccaaaaattgaatccaccttaagaggattcgacctcaaagaacaattaataatatatatgtaactcccctttgatataataacaactgtaataaaatatatcaaatgaaattctaaaat

SEQ ID NO: 37384 - DNA, 257 bp, Glycine max
agcttatgaacccaaactttttagcttcaatgcaagaaaacatactcatgactaggaacccaaaatttggttttagaattagaaaagcatgaaaatagggacttgcttgtaagaatttgggctgccccatgattggtactttgcacctaagaaacgtgggaaatgcttttcaatggtgtgtagatatatgtgtaaatataaggggcataaaattcctcgccaagtatgaataaattgttttcctaaatgaatgtatg

SEQ ID NO: 37385 - DNA, 275 bp, Glycine max
tgtagtttagattttttttgagttacatgttccgcgtgatttgttgtcaactcttatttctctttatggcttccatttcactttgaattttattattgagtcctcatgtaatttattaggtacactaataataaatggacttgcatagggaaggtgattttccaagttagattctacaattgtatctttatcatcagttcatcaccaattacaagcaaacataattataacttgtatctatatcatcagttcatcaccaatttgtatctatatcc

SEQ ID NO: 37386 - DNA, 82 bp, Glycine max
agcttatgaaaaatcttgtatttatgggtgccatgtgttggatctagtggcctcggaataattaagatgggggggggggggt

SEQ ID NO: 37387 - DNA, 275 bp, Glycine max
tattcactaattgatttttttaattgcaagcttatacaaatttattaaatagaaatatacatgaaggaacttgtttacccgcaaagtaagtgcatgatctaataacctttttacatatattttttattggcacatatattttttattggtaaatgttagttgatagtttgttactttttattagtgaaagaatttaaacttactatcttttatttcttctttcgacaaccaaacgaactttatatctacatcttcttacatattttataactagc

SEQ ID NO: 37388 - DNA, 260 bp, Glycine max
taattcattctttttgttgtgagcctacgtcaaatagtttttgattactgatgtttattacataatcaaacacttgttaacatctccacctgggtttacactgtggtcatgttttcgttcatagaattcattcacaatatttgttgttgattatcgtctcctaatcagttgataatctggcatgttgttacttctattatgaatagagagagacttcgctcttattaatcacgttgaggtgtttcgagaggaaaatactt

SEQ ID NO: 37389 - DNA, 278 bp, Glycine max
tgttcgcacatcacttttatgtatgaaatccactcgacaggtttgaaatagaggagaccttctatcctataacgcaacgtggcggacaaaaatgggcagttaacttgaatggccattattggcaatgcggaaagtattctgcgcttcactattcatgttcacacattaatatttcttctttttaatcttttgtaagttcacactaaaattgaaaaaaaaaacttagagggaccaaattgaaaaattacacacttatatgaactaaaaatgaacaaaac

SEQ ID NO: 37390 - DNA, 232 bp, Glycine max
ttttttttttaatagacccatagacaattgtcaaacaacgtaatgcttgatttaccttttgtttgattgttgattttacttcgtggtagtttttttcaaagatgtggtagtaccaattattttgaattttaaatgcatacatcattattatattgcatagctaaaagcaggaaggaaattggggtctacttttacttctaatgtaaaaatggtataatttgtgaaaaaatgc

SEQ ID NO: 37391 - DNA, 276 bp, Glycine max
tgaatcggacatccttttttaaagatatgaccatttgaatttcacgtgagcttccgttgttcaatttctagtgtcaccatatgtgatgcgcctaaattggacattcgagttaaatgttttgaccatttgaatttctcaagagctaacggtgttcaattctgagtgtctcgttatgagatttgccagaatcggacatccgtgtgaaaagttatgaccatttgaatctttcaagagcttctgttgatcaatttctagcctctcaacatattatgcgcc

SEQ ID NO: 37392 - DNA, 270 bp, Glycine max
agcttttatattagctgaaccattttatcaataaacacaagttgagttttattcagaaaattagagtttatctcttttatcttagtgagagtgattctcctaaattcttgagtgattcaagaacaccttggctgtatcaaaggactttcacaacctttgtgtgttgccctcgctggaaagagtgattctttccttcctttcatcatcacccttgttctttcaaaccacaattccagaaaatccacctctgcccaaaattatctcgtggcc

SEQ ID NO: 37393 - DNA, 281 bp, Glycine max
tcattgaaaggaacttttgaacaaaaaaaaaatcaagttattttgcatagaattagtgcatcaaatcattcaaaatcacgttaaaatataatataacgtaattttagataaatcaatgttcatactatttagtctcatattaagaaattgatttcgagttaaaataattttaagtaatttttttcgtgaatatttattagtaactcttaaaataaaaacatataacatagacaatttcatttcaaattcaatcttaatcaaaattaattttgtaaaatcaa

SEQ ID NO: 37394 - DNA, 271 bp, Glycine max
tagcttctgtttgaaagtgatgaggtacaagtcctaaaggcagagcttgaaagagcctgtgtagtcgaagagaagttcaagtccatagccattaaagtctgaaaagagtatgatgaactaaaggatgtcaatatggccaccgatgaaaccttggaatgagaaaccaagaaggcccgaaaggaagaacacgaccaaatcaaatttttgaggggctttatagggcaacaatagtgagctcaaactccgaaaaggtgaaaggaatcatcacggg

SEQ ID NO: 37395 - DNA, 290 bp, Glycine max
atactccagcctttggggattgggctttttccatgaaagggaccatgggggtcttaaaaaaagaaaaattaatcatcctgcttggaccaatgaaaaaactggggccaatgaaaaaggggagaaagaagggaaaaccccttccctaactgccctttctttaccggccaattttccatttaccccacaatggcatttcttagccaaaaacaaacctcatccttacccaccgctcaattattcacaaaggccctcccttaattaaccacaaagcctgtctaccccacttccaa

SEQ ID NO: 37396 - DNA, 259 bp, Glycine max
agcttgctttagaagcttttatggaggctggatctttgagaagtttcttcaatggttattttccaccatggagatgcagcagaagataaaggagaaaaggtgagaggaggcgccatccactagggaataagccaaggaagaaggagcttcaccacgaagagagtgccttggataagaagcttagaaaggaagctgcaatagaggagcttgcttgagaaacttccttgagaagcttccttgagaagctagagcttagcta

SEQ ID NO: 37397 - DNA, 274 bp, Glycine max
tagcgatattccactttatggaaaaacagagacgaaattgcgcttagactagcagccaggtttagcgctgaacaaaattttgaaaaatttataagtgtatgaaatagtagtctcgctcagcgtacatatgtgcttagcgagttcaccattgatgttcaatagaagggatgaacgcacttagcgcgatgttagtcgcttcatacgactaacttttgtatagaaatcattttccaaagcttgtatagttttcatatttatggttattttgtagtga

SEQ ID NO: 37398 - DNA, 261 bp, Glycine max
agctttgtttatttggtcttcgccagtgaaaggatcaatgtgggtccgaaaagaggcaaatttgatcatcctactaggacgactaacaaaactggggcaaatgaagagggtgagggtgagggagaaacccatgctgtgactgccattcctgtacggccaaatttcccaccaacccaacaatatctttactcagccaataacaaactttctccttacccaccacccagttatccacaaaggccatccctaaatctaccacaa

SEQ ID NO: 37399 - DNA, 274 bp, Glycine max
ttatgtgtcttctttttttaaagatttggtggtagagaccctaactagtggttttgtgttaacttaatgtgtgtttgaattgtctcatggaaatttctggtagaacattcttgattgatccgatttgtttgcctttgagcgaaattgatgttattttgggtatggactggttatcttccaaccatgtcttgttgaactattttgataaaattgtggtgcttgatgattctggaataagtaaggataggatgtttatcttgttggtccaaatgac

SEQ ID NO: 37400 - DNA, 272 bp, Glycine max
agcttttttatgattattaaaaaggattataacatgattggattataaaggagtatgtttaaagttgtagattgtatattacatcaaacaattttcttaagttatcatctaatcaatttgatcttgaatttaaatgcgatcaaatcaaattcaatggtttaaccataattgaacaatggttgaagtggtattatattttttaatattatataatattttaagtgctaaaataatatatgattgaaaaattaggatataaaaaattataaatt

SEQ ID NO: 37401 - DNA, 283 bp, Glycine max
ttacggatttggtctttttcggtgaaaggatcaaagtgggtctggaaagaggtaaatctgaccatcttgctttgataaatgcaaaaaaaaaactggggcaaatgaagagggtgagaatgaaggagaaacccatgctgcaactgccattcctatacgaccaagtttcccactgacccaacaacccttctccttacccaccacccagttatccacaaaggtcatacctaaatcaaccacaaaacccacctaccacacaaccaacacgaacaccacctttagccca

SEQ ID NO: 37402 - DNA, 269 bp, Glycine max
cgtttgtttatatttaaattttctcaacagttttattgcatattaggcaagtcgaaaactcgattctctaaaaaaacatgaatcgatatgcatatttagacaaagaataaataagaaaaaaaaatacagcgagtaatataacagttattttgaaaaaaaaagaagatataatatgattccaggttgctgcaataggacatttttttcccactgatgctccaacaacataaaaacctgttgatacgttattttttataattataataaaa

SEQ ID NO: 37403 - DNA, 283 bp, Glycine max
tccacagacatccaatttttaacaacattcaaacagcacaagctatcacagccaaacaaaacagggcaaaggcagaaaactctgccaaaacaccaaccaaatcacagcttttctcacttaaagaccccagtaacaattctttcgatccaattcgttaaccgttggatcgactccaaaattctactggaggtctatagtacattatcctacattgtgaccgttgggatctactagcaaacatccagaacgcattttacattactctttccacaaccagcaaata

SEQ ID NO: 37404 - DNA, 267 bp, Glycine max
agctttgatgcaacatttggagaggttaatgaaacaacgagatgatgcgctccatgagaggttggatcaaatggagaatagagatcataatgaagaagaaaggaggagaagagggaatgatggtgatcctagacaaaaccaaattgatggtattaaactcaacattcctccctttaaatgaaagaatgatctggaggcctacttggagtgggagatgaaaatagagcatgtcttctcatgcaacaactatgaggaagaccaaaaggt

SEQ ID NO: 37405 - DNA, 266 bp, Glycine max
tggggaccctcttaaattcctcctcttcacgaaatactttttttcacaaaaggacctccgggggacaaaatattggcatttttattttttttgatctttcgaattaactaccagcggctccatatattacgggactgaatggaaaatcccatgcaaaaacttttgttcctataatgtgcacataaccttttttcccaatatgacacgacttagtctattaccggacttattcttaccctccgatcaaaatttaacggggcctgaat

SEQ ID NO: 37406 - DNA, 258 bp, Glycine max
agcttttattaccatgcccatatgtcattgaggcatttcaccgagcacttggtgggcgcatgttttggcatgaatagcaagagaatgggggcaatgtggaatgccccattactccataatgcaacataggcctaaggccatcccttacaaccccttaatttagcgaaaacaagcatggattcacatgtgaattgcttcacgaatttcgcaaaaaagagcaactaaagcactaaaacacatcaagggagagccaaataa

SEQ ID NO: 37407 - DNA, 259 bp, Glycine max
  unsure (1)..(259): unsure at all n locations
ttgaggcaacannngtatttgttaacgagccgncgggacgattcacctccttgaccggctggaccaaatggagaattgagatgataacgaggataaaaggagtgaaaacatggaatgatggggcttcctaaacacatctaatcgaaggtctttaaatcaacattcctgcatggataggaaacaatgatccggaggcctacttggtgggggaaattatagtgcaccatgtttcctgattcaacaacgattatgaggacca

SEQ ID NO: 37408 - DNA, 256 bp, Glycine max
  unsure (1)..(256): unsure at all n locations
agctngtatcaaaatcgaacgacaataacttttcactcggaagtccgattgagtcccgtaatatatctacacgctcgaaatttaaaaccgaagcttgtagcaaattcgaacgacaataacttttcactcggaagtccgattgagtcccgtcatatatcgagacgctcgaaatttaaaaccgaagctcgtagcaaattcgaacaacattaccttttccctcggaggtccaatggaggcccgtactttatcagaaccc

SEQ ID NO: 37409 - DNA, 270 bp, Glycine max
  unsure (1)..(270): unsure at all n locations
ttgattgtaaanntttttcttttcgatatattacgggactcaatcggacttccgagtgaaacgttattgtcgttcgaatttgctactggcttctgttttaaatttcaagcgtcttgatatattagcgggactcactcggacttccgagtgaatagttattggcgctcgaatttgctacaagcttcggttttaaatttcgagcgtctagatatattacgggactcaatccgacttccaactgaaaagttattggcgttcaattttgctaca

SEQ ID NO: 37410 - DNA, 281 bp, Glycine max
gcgcgtgcacgtgtgtatatcaaacgttttgttagagtatttcggctaagaaagactattgaaatttggggtattcttcttgagagacttgaatcttctgacattaccttgccttgatgtccccttttcctttcaatgagcttctacaaataaaaattcgtaaataaaccttgaagttttatgattggtggagggattttcaaatggtttccaatgacatatatatgagacatccctttcatacctttgtcttcgactatttttcccttataacttgcaac

SEQ ID NO: 37411 - DNA, 281 bp, Glycine max
tatcagatttataattattatgccaaatgtcaaggttttgttgttaggaagtatgatatcaaacatgataaaaaagagtcattaaattgtgatgcgttagtttgtttgcgacagaggaggattcaaaatcgaaaaacattgggatcgagtagatcggattcgagatccctggcctatgattcgaacaaaatgtccagcaaggtttcgtgtaatttaggttacaatacctcaaagtggaaagtttctatgtttcataactcccagaatcatgagtagactcc

SEQ ID NO: 37412 - DNA, 260 bp, Glycine max
agcttttatcaaattcaaacaggaataactttttactcggatgtccgattgtgtctcgtagtatatcgagcgctcgttattgaaaacagatgctcatagaaaattcaaacaacaataaatttttattcaaatgttcgattgtgtcccgtaatatatcgagatgctcaaaattgaaaacgaaagctcgtagcaaatgcaaaccagaataacttttaactcggatatccgattaagtcccgtaatatatcgtgacgctcgaa

SEQ ID NO: 37413 - DNA, 301 bp, Glycine max
ggggccccctttaaatcttcaacctggcttaaaaaaggttttttatggcaaaggaacccaagggaccaagttcccgcccgggttttaaagtcacccctttaagagcgcctgacacccgccacgcttttaaggcctctaggggagggctttttttccggagcgaacccttcaactcaagggccacaaattttcttatttccaagaagaaaaatgggccccggcggggggcccactgggttcccccattggcccaattgagcccaaaattatccctgaactttttttccaattctttgaccac

SEQ ID NO: 37414 - DNA, 258 bp, Glycine max
agcttttgtgaaattcaaatggtctaaacttttcacacggaggtccgattcgggcgcataatttatcgagacactcgaaattgaacaatgcaagctctcgagaaattcaaatggtcataacttttcaatcggaggaccgattcaggcgcataatatatcgagacactcgaaattgaacaacggaagctctcgagaatttcaaatggtcataacttttcactcggaggtccgattcaggcgcataatatatcgagacgc

SEQ ID NO: 37415 - DNA, 276 bp, Glycine max
tcaagaaaaagatgtgttctcagcaaattccttatttccagaagggaattctatcaatagacctccaatctttaatggagagggttaccacaactggaaaacccgaatgcaaatttttattgaggcaatagatctaaatatctgggaagccatagaaatagggccttatatacccaccacagtagaaagagtttcaatagatggtagttcatcaagtgaaagcataaccatagaaaaatctagagatagatggtctgaagaggatagaaaatgagt

SEQ ID NO: 37416 - DNA, 268 bp, Glycine max
agcttctgtttagcccaagtgggcctgattgctatttacaccccctttttactaaatgcacccccctttctatttttttgtaattctttttccgtaacgttacgaaactttacgaatttcgtaacgatacttattttccttctgcaaggttacgaatacttacggattatgtatttactccttttttacctttcgaagaagtcacggaaacttacggattgcgcaaaaacacctcttttcgacttccgccacattacggaatttcacg

SEQ ID NO: 37417 - DNA, 264 bp, Glycine max
tttaaggggacccttttaataccccaaccttccttaaataaggttttttatgacaaagcatcccaagggactaatttccctgccgggtattacaggcaccccttttagaacgccttaaacccgcaacgcttctaaggcctcaagggaatggcattttttccggagcgaatcctccaactcaagggccacaaaatttccgatttcccaaaagaaaaatggcccccgcggggggcaccactgggtacccccctgggccaaatttat

SEQ ID NO: 37418 - DNA, 206 bp, Glycine max
taacggggcccctaactgatttccaagaatgcaccctacctacctattaattatgctaactatgccaaagatcatgaggaagcaatgaatggggtaaacctcacacacaatgatctatgatcatctgatagactccatattcgaaggaaggctatctctttacgttgaaattgatctcctaaaaatatcatgacatggataagaga

SEQ ID NO: 37419 - DNA, 272 bp, Glycine max
tatgggtttttcttcacatgtggtacttgggggcgggctggccatagggcacaacaaggtttttcacatccacaaagcgtgcttaaacccaccatcccctgttgcccaccctcaaatgagctcacgtactcccccgttgcccaataccccccgtttttttcaacactggggcccccatcaatcctcccaagccttcccaacatcaaagttattcaacatttcaaacagcacaagctatcacagcccagcaaaacatggcaaaagcagataac

SEQ ID NO: 37420 - DNA, 261 bp, Glycine max
agctttctttttattctgcaaatagtaaaaataacagtaaccgtgttgctttctttgctatgcaaaggtacaataataatcttagcatgcgccagtgtgagccttgcccttctgctgaaaacgatgctagtgcctagtgatataacttttcaaatgtgtgggcctaattcttgccactttgatatcaaaatatataaagcgcaaagccaataaagaaaagcataaagccaacaagccatatattgagtccaaaatctctat

SEQ ID NO: 37421 - DNA, 277 bp, Glycine max
tgcagcattatcagaatatttattataaaagggtagaaagaaatgtgagtatgtgtggaagaagaaagagaatctaggcaaagcaagcacgggttggaaattcaacggagaagagagataagatgagagtatgagacagagtcagagacaatgtgggagagtgtcgctgtgtacgtgtgtatgtatatgtagtgtttgtgcaatgtgttgtgtaatagactagtagtagttggatccattattgctgattttcctaataatacactcggggtactat

SEQ ID NO: 37422 - DNA, 259 bp, Glycine max
agcttcttttgaggtgagcttagttatgagaggggtgtgtgtagctaagctctagcttctcaaggaagttttctcaaagaagcttcccaaggaagttttctcaagaaatcttctcaaggaagctacctagtctataaatagaagcatgtgtaacacttattgtaactttgatgaatgagagtcttgtgagacatacttcaaagttccacttctctccctcttttattccttcaatttcgtgctcccccctctctctttc

SEQ ID NO: 37423 - DNA, 275 bp, Glycine max
tggaaggatgcttctttgaggaaaagaaagagggagataaagagagaggggggagcacgaaattgaaggaataaaagaggtagagaagtggaactttgaagtatgtctcacaagactctcattcatcaaagttacaacaagtgttacacatgcttctatttatagactaggtagcttccttgagaagctttcttgagaaaacttccttgagaagcttctttgagaaaacttccttgagaagctagagcttagctacacacacccttctcataact

SEQ ID NO: 37424 - DNA, 283 bp, Glycine max
tagaaggttcatcatttataaagaatcccaagtgtgagatcgaagaaataggtcctgtgttggataagggaaagtaaaattaatcaaatttggcatggcgagtaatgtagatccgggatgttgagacgtccaagcaccaaaaacctttgtgcatactgctatatccaagaaagatacatggaatactccgtggtgataatttatgaggagcataatctcgcaaacaaggataaacccgacaaccaaatgggtgaaagtgagcataatttggagaaacatcatg

SEQ ID NO: 37425 - DNA, 267 bp, Glycine max
agctttttataacaaaattgcctcaatcatttccaaatatgcatgtgaattaggaagcatcaacaagaatcaagccaaggctattgtgcaagcaatcaatggggcaaaacacaccaaatgattatgatgatggatggctcaaattctcacaaaggtaaactcatcactttcaaattgagctttcaaaactatcatgacatgtagaggagaatcaaggatttcaagtcacaaaatgtcaagaacttttattttcaaaacaattaccca

SEQ ID NO: 37426 - DNA, 281 bp, Glycine max
acttgattgaatctggattctctaacgaaatcttattaatggatttcaattttaggtaagggctataaaggtaaaatgacaaataatctgaacgttgcaatcaagcacataatcaatgatgatggaaatgtggacacttttgttagacaaattacaagcttatcttatgtcacacacccaaatatcaatagttgcaaacaatcacagtttacttggtgccaacttaaagtggaattaaacaaggaatatacttaaagtgcataaaaagttaaataatgctc

SEQ ID NO: 37427 - DNA, 243 bp, Glycine max
ctggttgtttatgtgagtgaccacaaccttgggagaaccacagaccctgaacgtccttattgttatgcgaggacttagggtcatatagaacccgccacccaaatctcatactttcaatcaattgaaccctaataataaacttaagaagttggttgctaaaaccgattccgttatgcactttgcttatgatactactggtgtaagcagagtggaggagggttgggtttaggtaaacccaggccc

SEQ ID NO: 37428 - DNA, 259 bp, Glycine max
tggacgaaaagggggttttctgacctggggaactaggagggagtcgtcgatggcgtcactccaaggttttttcactgcgcactagcgcggcattaaaccgcccatgtccttgattgcgccccttttatgtgcctacttgatctcatgtgacccattccatcccaaattttaccacctgggttcccatgtgccctgattaggtcttccaagcctaatgtgatgctccatatctgacgcttctatttctttaacttttcca

SEQ ID NO: 37429 - DNA, 258 bp, Glycine max
agcttttttatggacctgggtgttgcccagtttcatcatatcttctgtaatactcatcacctctatcatatctaataattttcacatttatgtctaattgcccttttacttcattgtagtaaatttctaaggcatccattgcctaagaaatctcgggcagtaagtagacataaccgtaacgcgaataatcatcaataatggtgataaagtatcattcctttccgaaagaactaacatcaaaaggtccacaaatatcag

SEQ ID NO: 37430 - DNA, 276 bp, Glycine max
tttaactgaaatgggtctctaattaggccaatgaggaacgtattttccagtatacactatacagtaacttttctgtgctcaaagagacgaaagagtcttgaaagatgaaaacgaatgttggcatattgcaaattaacttaagatattaagataatataacaagacaccctactccccaaaataaagaacaagggataaaagttaattttcaatactgcatgactaaaagtaaaagtacagtaacacatttttattattattattattattttctgt

SEQ ID NO: 37431 - DNA, 259 bp, Glycine max
agctttttttttagcccaatagtgttcatctattctgttgccgactgcatataatttgcagcagaatgcgggaaaattggatttcctgggaagatgtattacaaaggttatattttttccgaccattcaatgcggaccacaatgcaagattccttttgtacaataagagttgtttttcaatatattacataaaattttgaatcttcattaacttgctaatcctagaacttatttagcatgttcttcaatatgcatgagt

SEQ ID NO: 37432 - DNA, 135 bp, Glycine max
gaacttagaatactcagcttgtacaattgaattttttcttacaaaggtggggggaactaaaaagagtgtggcgcttcttagtgatgacggttataataaaacgtatatgaccaaggatcctctggaatctcgcta

SEQ ID NO: 37433 - DNA, 270 bp, Glycine max
agctttttgagtagagtaatcaatcacatcacctgcatcaactgataacatttaattaggatgccattttttttcatttcctgattttattcttttcggtttatattattgggtgattgggaaaaggaaaatgcataacttggattgctggttttataattttctattgattagttactctcacttggaaggactgcaatttgtgaatttaagaacgaaataaataaaatttagtagtagataaatgttcattcattgattagtgtcact

SEQ ID NO: 37434 - DNA, 277 bp, Glycine max
ttggggacgggtactttttcactgttaccatagaggattgactttaagcccctgaggtttttggtcaactccggcatgttatcgtcattctcgggaggtgagacggagaataagatctcccgtttgtttgaccatatctgaaggagtgcggggcttgggcttgaaaaggctcttcatggtgggggaatccggaggggaatatagcaccgcctccgatgaagagcccctccgaagccccttgggtttggaggcgcacactcctatctccgcttcttta

SEQ ID NO: 37435 - DNA, 265 bp, Glycine max
agcttttttcaagtctccacttccattgatgcttggaagtttatggtctccttcggcagcagccaagattgttatctgatatataataagaacgagaattaaaagaaagatttatgaaatgtcctcatggaactccagttttttacccttctgagcaacaaggggcaaacgaacaagttggaaataaagaaaacttaaattacatacaaaattataaaatctacaagaaacaaattgtctgtgccttccatttccctttccactg

SEQ ID NO: 37436 - DNA, 277 bp, Glycine max
tttgttgctatatttttacaaagcatcccaaagggtgttggaaaaaacaggaaggatgttgctatttttagtcttgtgttagaggatattcatcatcctccattgtaacaattaatcattggtatgaggagtggtacttttggtaattcgtgaaagccaaagtcagtctttgtttctagtctttttttcattagttgattacttgatctttgcagcatctgaaaaatgctacattctgtttctgaaaggttgcaaaatgctatagtgtggtattctt

SEQ ID NO: 37437 - DNA, 242 bp, Glycine max
aatccctgggcttctttgcgaccatatgggcatgaggtccatggccatcaaaaacaccacagaaaacggcggccttggttgaagagaaattatcccagagaagcatggcatcctggctgatccctttgcgaccttgcttacagaacaaggaagcaacctgggacgaacagttcaagaataatctgccaggaactctgtggagccgcatttccatgttataatcagaggcagttctggaactg

SEQ ID NO: 37438 - DNA, 274 bp, Glycine max
tcaacaatgaaactttgcacacttacagtgactgagtatttcacttgtctacgcgtaatttgggatgagattgagaactttagacccgatcccatctgttcctgtaatatcaggtgttcctgcaacgcattcaccattatcgcgcaacggaagctcgaggatagagccatgcagttcctacgaggcctgaacgaacagtatgcaaatattcgttctcatgttcttctcatggatcccatacccactatatccaaaatattctcctatgtagctc

SEQ ID NO: 37439 - DNA, 267 bp, Glycine max
agcttgatatgaggaagtgttgaagggtgaaacttcctgcttttattgttgaccacagagtggtacctggagatatgtcgcgggggtcaggagaccttggggacgtcaggtggggtgctattgcccaaaaccaagcttgaccaatcccgacccaacccgggcatagtcggtcagtgagaacctgtgatgtacctaagcaggcgagctcctggcagtcaacagataaaaggaaaacaagaccacaaagcaaggaggcttgtggtggct

SEQ ID NO: 37440 - DNA, 276 bp, Glycine max
ttgagccaaaatcctttttctccataaaccttgacccagggtgagaatgtcaattcttaccctcggaagcaaaaaaaaaggggaaagggaaaattttcaatcatagaagaaacccataatgagaaaaaggaaattttcctttcaaggaaaaaaaaaagaaaggggaattttccattaaaaattgggtttaaatctcatagaaaactaataaattttcccatctaaaaaatggataaataaattttataataaaataggaaaaaaatttcccataaa

SEQ ID NO: 37441 - DNA, 265 bp, Glycine max
agcttgttatgaggaagtgttgaagggtgaaacttcctgcttttattgttgaccacagagtggtacctggagatatgtcgcgggggtcaggagaccttggggacgtcaggtggggtgctattgcccaaaaccaagcttgaccaatcccgacccaacctgggcatagtcggtcagtgagaacctgtgatgtacctaaacaggcgagctcctggcagtcaacagataaaaggaacaaagaccacaaagcaaggaggcttgtggtggc

SEQ ID NO: 37442 - DNA, 276 bp, Glycine max
tttggtcaatctgatgtttggtgtcttcatgctgcaaactacctcaattgtgctttgctccaatttcctttctggtatttaggaattctgattggtgtcaatcccaaaagaaaggtggtgtgggatcctataattaggaaatttgaggataggctgaataggtggaagatgggtaggggtgaccaaatcctgttctccaaagatggttgggctgaggatgggattcccctgaaagaccaatttccagaaaggcagaaattgatggtttctgggtgg

SEQ ID NO: 37443 - DNA, 261 bp, Glycine max
agtgtatgcctctaattagtggaaaacttgcagttttggggatttgtttgttcatttacgagggcaacagatgattgaaaagtttatattaaccatcctacccttcccatgctcagaccatatcgcatacacaaaaaactcatattaggtgatatgatcaagagcgtttgtctgcatgccaaaaactcaagctattagcataggtgcatgagacacagttaagccattagatatgaactactacgttgaacccaatccaca

SEQ ID NO: 37444 - DNA, 274 bp, Glycine max
taccatgtgcatgtgtttatgctcttggacattatgcatatacatatttttggtgaaatctttttgatattttgatggtactttcaacttactgacattgagaattttacaggttgactctgtttcttgctactgtaaagtagattcaggtctgaaaacagttgttggggcaaggaaatttgttccaggatcgaaattatgtatccaacctgacataaaccctaatgcacataggagcaaaaactcacgtagagagaggaccagagttcagcct

SEQ ID NO: 37445 - DNA, 262 bp, Glycine max
agcttccatcaccccctccagaggatgaaggttggtcttctggccaggccacctgtgcatcaaactccttcatgctcataatggagggcaatcccaagccctaaaggctctgcatgatgatggactaccccctatgaatgctctggagcatggagtgaagcatctgaggagtgaaaataaaatctgttggacctgtagagactagagctggaagtggaatctgtgaaggtgctggaggaatcactgggatctctgtggagga

SEQ ID NO: 37446 - DNA, 275 bp, Glycine max
tgggttcctaggcctttaattgcattcgggcactcattttaaatccttcatgctgtccctatacatataaaacagtcccacaacccaaagctcacaaaaccatgctcatatgtcgttgaggcatttcaccgagcacttggtgggcgcatgtttaggcacgaatatcaagagaatggggacaatgtggcatgcgccattacttcagaatacaccctaagccaaggccatcccttacaacccctcaattcaacaaaaacaagcaacaatttgaggat

SEQ ID NO: 37447 - DNA, 267 bp, Glycine max
agcttgttttcatatcatgctagcgtagactctaaagtaccaagaagaaagttcaatgttggggagtgcttgaatgaggagcgtggtgttgtgttttcatcatgacttgctggggccccatttgttggatacatagcatgttgtggtagtagtaaaggttactttgttttacgtgttgagggtggaatcataggtgattctcttttctacgttgtaattgagaggtgggttgagtattctaggtttctttttcattattatttatct

SEQ ID NO: 37448 - DNA, 263 bp, Glycine max
attttgttgtggaggaggcaccatgggaattaaactagcatttgaactttgagcatgtcctacattaacaccatctccttgttggtctacctgtctgaaactgccaggccaaaagaatccaacatcatcatcttccacgaaaaccagtgatccaaattggtttctctcaaattttgcaacatctctcatatcaagagccctcagtgctgccgcggaggacggcacgtgtcttcggtgcattgcaaaatgagcttcaaggccaa

SEQ ID NO: 37449 - DNA, 277 bp, Glycine max
ttcagccattgtattttttatagctcaagtgaggggtaaaagccaaaataactatatagatcttataagaaatccccataaaataagttgcttgactttttctgtgtagcatttctttttcccttcattttattaatgcttaatattttttgaggaggctgttgtgggagatctctcagtgggtttgtatgcttgggcacggaatctcctacccatagttattggcaaaagtggtaacccccaatccagggatttggttttgcagctagtggaaaag

SEQ ID NO: 37450 - DNA, 264 bp, Glycine max
agctttttttatttagttttcaccgacgaaaggatcaaagtttgtatgaaaagaggcaaatctaatcattctgcttggacaaatgaaaaatctggggcaagtgaacagggtgagaatgtgggacaaacccatgctgtgactgccattcctatatagccaaagtccccaccaacccgacaatgtcattactcacccaataataaaccttttccttacccaccacccatttatccacacaggccattcctaaaacaaccacaaagc

SEQ ID NO: 37451 - DNA, 281 bp, Glycine max
taatactacatgcttctcaaatcattccttttttctgctagcgggagcttcttctcctatcaaatcataggctctgcgagttgaatattgtccctctggatttgcaaaacactcccaactatctaaaacctgttgctggatttcaatttttgcaatatctctgaaaaagttagccgctgaggtgatctcattgtcaaacaaggctcttctccaagcaaagttccactcccaccccatgtcttgatacattcccatggatctaatgagccgatgttgctgca

SEQ ID NO: 37452 - DNA, 260 bp, Glycine max
agcttgtttgatatataacagtaatattgaacacattaaagtctgataacagtaatgttgaacgctctggagcagctcaaggactgagtgagatcagattttttcttatgaccgaaaaagttactagttagcttgtaaattagaggaactttcaatgcgaatgtttgtagtcttttattgaaccctatacatggaaactatatatacttttgataagaaaaattatgatactaggatagtgggtttattaagcaagctgg

SEQ ID NO: 37453 - DNA, 274 bp, Glycine max
tgggatccaaccctttttgtttcgatgcccgaacctattggatcggagtccgaagcaagaagccgatgcaactgcatgatggagttaaccgccacggcttcgttcggattcacctgcagcattcacgggttcacgtttttcgagccgccacgccgccacgccacgaaatgcaaatctaacattaaccgaccgcgccagctcagcgagcctgagcccgatttcgcggagcgtgtcgcggttgtcagatgagggaggcccaatgcccgtgagcctc

SEQ ID NO: 37454 - DNA, 259 bp, Glycine max
agctttttctaaatttacattgatgtttgtatttatgggaggaggttgtatgtcatttttgttttaagagtagtgtcccactggtaaaactaactttccaaatgtttgccttcgcaggaaatggccccgaggaagcttgcctcaaagaggtccaggaaggacaaggcagccgaaggaactagttccgctccggagtatgatagtcaccgctttaggagtgctgtacaccagcaacgcttcgaggccatcaagggatggt

SEQ ID NO: 37455 - DNA, 275 bp, Glycine max
tgtagcccaatggatttttcttgaattaattcctttgatagcccttttgagccttgtttcccttttcttgttttgaagctcacttcaagccttaaatgaaaaaaccatgatatcaccatatccttaaagaattctggagctttggaattgttttgggaataattgtggggggtttttgtttcattggataactcgttttgttggctatgcttcataatgtattttgggcgatacttgatgtatattgtatattggctaaatgttggacatgctga

SEQ ID NO: 37456 - DNA, 261 bp, Glycine max
agcttttttgtgcaagaaaacgaactacattttctgcattttttgaaaaaagagatgaactcgctaagcgagcatgctgcgctaagcgagttcatcagtactcattgtatataggcgttctctgaagaactcgttgagtgtgcttaacgcgctaagcgagttcatcctttgaggatgaacacttatcctcttgcttaattacctgtggctaagtgaggatgaatcgctaagcccaggttacttagaaaattttttattgat

SEQ ID NO: 37457 - DNA, 275 bp, Glycine max
tctcccctattttcttatttatagggggagaagtgaagggaaaaaatgttcagccctcctggtaattcgagatcacttgaaattagtgaaaaaaattgtttccgtgaagaaaatccaagccaaggcgcttccgtaacgtttccgtgggtgatttcgggaagattttgaaccgttcttcgttcgttcttcgtcgttcatcggtcttcaatcggtaagttcccgaaattgaacttttcaattcattctatgtacccttagtggtcctcatttgtttt

SEQ ID NO: 37458 - DNA, 163 bp, Glycine max
cgaaagacaaagatattgccgtgagaatagggccctccgatggatccccatagctcaactagaattactgaggggcaaaaataatggacttgcgttccaaggaaggaattcgcaaacttaagctttatcgctaccgattttatgccactggctataatttact

SEQ ID NO: 37459 - DNA, 275 bp, Glycine max
tatagtagataatcctttaaacaaagcaggaatgccaaatccaagaccccatccagcattgtcttgaatccacacaattaagctgcatgacacaatggcacctaggtagatagaaaagtaataccaattgaaaaatgacgctttcttaaccctttcattgggatcagtgtcatcaaattgatctgccccaaaagatggcacacatgctttcacaccaccagtcccaagcgcaatcaggtacagaccaaagtataacacagcatattgtgctggaa

SEQ ID NO: 37460 - DNA, 265 bp, Glycine max
agcttggttttgggcaatagcaccccacctgacgtccccaaggtctcctgacccccgcgacatatctccaggtaccactctgtggtcaacaataaaagaaggaagtctcacccttccacacttcctcatttcaagcttgtgggattatggggtacccatcacatgtggtactaggtggcggtcgggcgatggtgcaaaacgattctccacatccacaaatcacatataacccaccatcccctgttgcccacctccaactgagctc

SEQ ID NO: 37461 - DNA, 273 bp, Glycine max
tcaagaaaaagatggtcttatcaaattccttatttctggaagggaattctatcaatagacctccaatctttaatggagagggttaccactactagaaaacccgaatgcaaatttttatcgaggcaatagatctaaatatctgggaagccataaaaatagggccttatatacccaccacagtataaagagtttcaatagatggtagttcatcaagtgaaagcataaccatagaaaaacctatagatagatggtctgaagaggatagaaaacgag

SEQ ID NO: 37462 - DNA, 265 bp, Glycine max
agctttttatgttaccattgtcgaatgccaagatagaagctaagatataatgttcaagagacaccaagtctaaagaaaccacacccttattaaattcaaacccttttcaccctgaaatttctcaattttatcactatgttcttgaaagttgaaatttcaagaaaataccgaaataactttcaccctctaaattatcatcctacacagcacaatctaattatactccaaattacctccagaatgaactactcagtaaaggaaacct

SEQ ID NO: 37463 - DNA, 343 bp, Glycine max
tgaaaataaacggccaaagagaaagatgaacctgaacacacccataggacaccatcaaaaactcaagcccggccaaaaaaatttctccacacaaaaacaaccggggcaacgaatagggaccacaaaggccctcgagacccgaatcaaaaggcgaccgccgcgcaaagaagatactaaaaaaagcaaaagatggaggagcccaaacagccaatgcaaaccatggcaaaagagaaaacagagggggcaaaaaatcagaagaaaaagctagacacgaaccagggcagaaagacacacaaccactaataaaccaccgacaaaaacatccggaggggagccccaggca

SEQ ID NO: 37464 - DNA, 262 bp, Glycine max
agcttctatcctaatggacttaccttgaattaattcctttgatagcccttttgagccttgtttccctttccttgttttgaagctcactacaagccttaagtgaaaaaccatgatattaccatatccttaaggaattttggagctttggaattgttttgggaataagtgtggggggtttttgtttcattggacaacttgttttgttgactatgcttcatgatgtattttgggccatacttgatgtacattgtatattggttaa

SEQ ID NO: 37465 - DNA, 290 bp, Glycine max
gacactcttaaatacttcagcttctatgaaggctggttcttttaacttcaatggggtatttccaccatggacatgtagtggaagataaaaggagaacaggtgagaggaggcgtcatccactagggaataagccatggaagaaagagcttcactgccaatatagaaccttggataacaagcttagagaggaagcttcattggaggaacagacccagagaaaggaagacagaggtgggcacccgaaattcaaggacgaaaagaaggagtgacattgaactttgaagtttgtc

SEQ ID NO: 37466 - DNA, 263 bp, Glycine max
agcttgttgattatctaacgcgcaattatcagtttaattagtttttatttaggaaattttaattagtttttagttaatgttcaattgcattgaatgtggaggacaaaatttgttatctatattaattctacccagattctaacataattgcaatcgtattaatttgttgttccaacctttgtatttttttattatcattttatcatgatgattaattttcataaaaaatttaatgaattatctttaatgaaatttttactttt

SEQ ID NO: 37467 - DNA, 275 bp, Glycine max
tgtcaagatcactgttgtgcatattttcatttaatttattttttgcataacttatcaatattacttactgttacgaaaattaatttaagtctttatggttatttattcaaactaaggcgttatacgagtggtttttgaacgaatttatgatagatttgtcattatcatttatgaagcattcagtcattccgtaggattatgcacttgcttaaatttatttatctgttgactactatacaccgcattaattgagatgaattatatacttggtttta

SEQ ID NO: 37468 - DNA, 271 bp, Glycine max
agcttgtgctcctcaaccccttcctcttccagcaccaactaagtactaactaaactattgttcattattgaattaggcattcgctggaagcgatgaagatgatgcagatagttggagtgattcttgatcttactagggaaaagtactggagcgagtcattcttccctgtaatgaataggaaaactacgtgatacagtcatacaaaagattctttgtcctacactatgttcatagtatatgatggtatacttcagacagcatatgttttttt

SEQ ID NO: 37469 - DNA, 211 bp, Glycine max
tttatgagatatattttttctggtcatagccacatttctcaggggactagtatatagtaaactgaatgctttcccgcttctgggaggtatgatattggcacatggtatttttacgacattttgtatttgctaataaaaaatttcacttttacatttaccgatctcacagtatactttcctttgtttatgggtttttttttttaaactgggt

SEQ ID NO: 37470 - DNA, 262 bp, Glycine max
agctttgagccaactcaaacgataataactttttactcggatgtctgattgagtcccgtaacatatcgagacgctcgaaattgaatgttgaacctctgagccaattcaaacgacaataacttttttctcggatgtctgattgagtcccgtaacatattgagacgctcgaaattgaatgttgaacctctgagccaattcaaacgacaataactttttactcggatgtctgattgagtcccgtaacatatcgagacgctcgaaa

SEQ ID NO: 37471 - DNA, 274 bp, Glycine max
tcaacattcaattttttccgtcttgatatgttaagggactcaatcagacatccgagaaaaaagttattgtcgtttgagttggctcagagcttcaacattcaatttcgaccgtctcgatatgttaagggactcaatctgacatccgagtaaaaagttatggtcctttgtattggctcagagcttcaacattcaatttcgagcgtctcgatatgttacgggactcaatcagacatccgagaaaaaagttatcgtcgtttgagttggctcacagctt

SEQ ID NO: 37472 - DNA, 262 bp, Glycine max
agcttgttgattaggatgttttgactgacttctactcatagatccattccagtgctcatggtgatcctcctcatcattaccttctgaagagaaagaagtgatcatcaagtcttaaaagtggattgaaagagtatcaaagatatctttgaggatataacagtgacaaggcgtagtctagaagaacaaatcatatagaaaaatcttcagctaatcatgtaaagacattgtgagtgcattaatagaacaataaatggatgaccat

SEQ ID NO: 37473 - DNA, 276 bp, Glycine max
tagccccaactgagaatgtccctttagggtcacaaccaaccatgacaatggagcgtactgcctacaagagctggatggcaaagtaattccacgaatgttgaatgccacccacctgaagttctactttagcttacctacactttaaacctaatgttgtagtcttttccctaatcaagtcttatgtcccaaaagtagaaaaatcaagggttttggtttaaagggtttttaacgtggcacatctggggtaatgaaggggatttgtacttaattaaatac

SEQ ID NO: 37474 - DNA, 262 bp, Glycine max
agcttgatttgaaaatgaaattcaacaataataaaatatcatacattgcagccaaaaaaataaaatcccagatttcataattagggttcatgcataattgggagaaaagaaacctttcttggagaatcataattttcataacttatgctctaataccacatgtaaattttaaggatttcttagattaacaattgtaggaaaccaataggatcttgaaacctatgattctcacaaacaatggataaacaatgcgtatttttct

SEQ ID NO: 37475 - DNA, 275 bp, Glycine max
tatacaatagtgattttatccatgtgacttctgttgtagccaaggccaaactatgatattcagcctctgtgctggacctatcaaccacagattgatttttagaccaccatgagactagattggagccaaagaaaactgttgcttctgaaacggatcttgtgtcatttggatcagaatcccagttagcatgacagtaagcatgtagagaaagtgaaggtctagtaaaggaagggcgaaagcttaaacccaaattaatagtgcctaccaagtatctt

SEQ ID NO: 37476 - DNA, 262 bp, Glycine max
agctttctttcgatgtccccattccttgtgttaaactgacaatcattctaagggcatgcacttgttatttctgttcagattggccatctacaattcttttttaatttaaggtaggcctactttcacttatctgattagatttctgaattgtaactgatatgttggtttaatttaatctaatgaagtgtcaagcatgttttaaatggttagaaagtagaaactatgcaaataccttgattttttgcttcatgccatctgatga

SEQ ID NO: 37477 - DNA, 254 bp, Glycine max
ttagaggcagaggattgcaatgtgggaaaccatggaaaaggaaaacgaacagatggaaaggaaaatgaaagaggaagagtttattcatgagagggaatgggaagagagaatgaactacaggggttggaatggaagaagagggttgacgaggctggaatggtttttatccctaacttattataatttttcaatttaatccaaagacttgcaacatgggtttgcgtacatgaacaaagacttgtcacatatacata

SEQ ID NO: 37478 - DNA, 274 bp, Glycine max
cagcttgtatctcactgttgctgccccacaaagctccacaaaatttggctcagccatgctcttccttgcgagccctcttggtttcttgttcaagggctcttgcggtagctgcattttcttctcgtaacctggcacactctttccagacgtctgtagcgaccaacttgaatttttctttggcaagtcttgcttttcctagttcggtttttagagctcggacttctccatcctcttccggagcttcgaagttctcctcattgataattttcaactt

SEQ ID NO: 37479 - DNA, 281 bp, Glycine max
ttccgcaaaaagatctttgagggatgccgcgactgaagggaccagtgccgctcccgagtttgacagccatcgttttaagagcgctaagcaccagcagcgtttcgaggccatcaaaggatggttgttccaccgagagagacgcgtccagctcagggacgatgagtacgcagattttcaggaagagatagctcgccggcgttggacgtcgctagtcactcccatggctaagtttgacctatatatagtcctagagttttacgctaatgcttggcccacggagg

SEQ ID NO: 37480 - DNA, 260 bp, Glycine max
agctttaacattaattaaaagctcattgttgcaggggcaagcactttcggtaattttgatgcatgtgactgaacttgtcccaatttatatgaaataaaataaatgcattctcaggttttgtttgctgaatgctacaggctttgcaaaacttttttgctgctttagtctattctgcaaatactagttttgattctctgctggagtcactacttgcctgtgctaagccttctccacagtctggtggcattgctaaacaagct

SEQ ID NO: 37481 - DNA, 275 bp, Glycine max
tttggattgagttttttttatacacatcattcaattgtctattgtcacacttctccatgaaagagtattcatttaattgcccatgttgatgacatatttattacagggaatgaagttgctacaatttgtctgctgaaaaagcacttattcatccactttcattactcaaagaccttgggtgtgtaaaaaactttcttggtattgaggtgactcaatcaaacgaaagcattgttattttctcaaagaaagtatgctttggataggcttttttccaa

SEQ ID NO: 37482 - DNA, 261 bp, Glycine max
atcttttataattgtgatgtatgcatatagaagaactggattgagtggggcgactgcattggcgagcttgactaaaaactgaggagccaaaaataatgaagcttacaatatattagttaaatgtaacattttttatatcatcatattttatgagtaattttaaacatttaattatattagaaaatattttttcactttattaataatactcttcagttctttgaacgacctcaatacgtagtaaataaaaaaaaactaata

SEQ ID NO: 37483 - DNA, 264 bp, Glycine max
agcttttgtatatgcccaagtgggcctgattgctatttacaccccctttttactaaatgcacccccctttctatttttttgtaattctttttccgtaacgttacgaaactttacgaatttcgtaacgatacttattttccttctgcaaggttacgaatacttacggattatgtatttactccttttttacctttcgaagaagtcacggaaacttacggattgcgcaaaaacacctcttttcgacttccgccacattacggaatt

SEQ ID NO: 37484 - DNA, 274 bp, Glycine max
tgcctcaaagaggtttatgaaggacaaggcagccgaaggaactagttccgctccggagtatgacagtcaccgctttaggagcgctgtacaccagcagcgcttcgaggccatcaagggatggtcgtttctccgggagcgacgcgtccagctcagggacgacgagtatactgatttccaggaggaaatagggcgccggcggtgggcaccactggttactcccatggccaagtttgatccagaaatagtccttgagttttatgccaatgcttggcca

SEQ ID NO: 37485 - DNA, 260 bp, Glycine max
agcttagatcttgcatccgagtcaaacgtgtatggccgtccgaatatgcatgggcattccatttcaacttttaatcgtcatgatatattacgggcctcaatcggacatgcgagtcaaaactttagcccgtcagaattcacccgagtcttccatgttaaattttgagcgtcgcgataggttacttggcttattcgaagatccggaggaaaagttatggccgtttgtatttgcgatgggcttcaattttatcctaagagcat

SEQ ID NO: 37486 - DNA, 274 bp, Glycine max
ttgactcggatatctattgaggcccaatatatatcatcgccctcgaatatagaaatggactgaccacgcaaattcggacagccataacgtttgactcggattcccgattgaagctcataatatatcgagatgctcttaggataaaaatgaagcccatcgcaaatacaaacggccataacttttcctctggaactccgaataaggaaagtaacctatcgcgacgctcaaaatttaacatggaagactcgggtgaattccgacgggctaaagtttt

SEQ ID NO: 37487 - DNA, 265 bp, Glycine max
agcttgttttatgtttttgattttgtatactttatctacatacttgtacatgctgatgttaacatgggcacacactacgatgacatgggagcaaggatgtttataggcttgaaaactccacactcgtaataatgttcattcaatataatagaccatgttttttcccttttgtgttgcatgattgaacggctcctcatcatcaaattttgttcgtccaatatcatatcttttaacatgacaaacacaagctccaatgtgatttttt

SEQ ID NO: 37488 - DNA, 277 bp, Glycine max
tgccggcgattgatttcttgaactgcgatgtgtgtttccatagttgccaatacgggatatgatgcaataggtgatggcatcattatagtgaaaaattttggctgaaagcaaattaactcttgaaaaaaaaaggagctgcaccttatggttattatccacatcctataattaattgtcttaaagaggatataactttaatgtatacgcaaacatcccttttatttgacttacatacatatttggaacctaaattatagaagtggataaaatctttttg

SEQ ID NO: 37489 - DNA, 266 bp, Glycine max
agcttcttatccaaggctcatcttggtggtgaagctccttcttccatggcttattccctagtggatggcgcctcccttctcctcttctcctttgccttccgctgcatctccatggtgaaaaatcaccattgaaggacctcattgaagctcaaagatccagcctccatagaagctccacaagcaagcttccatcaagtggtaatcagagcacaagagcttcaagtaggtgctccttaaatctccattaattttttttgctttacctt

SEQ ID NO: 37490 - DNA, 277 bp, Glycine max
ttaaagatttaaacacttttagggtgagaagcctcttttcaaagatgacatgacattctcggcatcatcatttaatggacctagtctaacgacgtgtattaaaaataaacataaatttttttaagtagttatataaagaaaacaaaattttagtagtaaaaccaaaatgacataattcacaggtataaaaatatatttaagactaaaattaaatacatatgtaataaatctataattataaatttttaatttttatttaatatttatatatcttatc

SEQ ID NO: 37491 - DNA, 317 bp, Glycine max
  unsure (1)..(317): unsure at all n locations
ggcagtgcaagctttttttacanttttacanntgccaatgaacattgcttagaacgtcttaagggtatgactacatatcttttttctttgatacgcgcaaggggtgtgctaatgatttatgtgtacctgtgatccctgactttcctgagtatagatagttatctctggtcgaatatgagtttggattaatttagtattttttactacatgntgacttgtangttttcttttttattggcaaatgttaattgttagtatagttagtttttgttagttggttattgatagctattatatgttttcatttattatatcac

SEQ ID NO: 37492 - DNA, 282 bp, Glycine max
  unsure (1)..(282): unsure at all n locations
tttcagaataggnttttttgctgtgaccttgaccatggatggttccccaaagaagatagtatcattagcaaattggaggatgttgattggaactctattcttgcctaccatgaaactgtggtagcaatttttggacacagcttccctcatcaaacctgtcaaaccttcaccaaccaggtcaaacaaaaaaggagccaaaggatctccttgtctcaagccactttggggtttaaaatcttctgttggactttcatttactaaaacagatatggatgctgatgt

SEQ ID NO: 37493 - DNA, 262 bp, Glycine max
agcttttgctgcaaacatttataaaagaccccctcagcagcaaaaccaacaacagcggaataattatgacctttcaagcaacagatataatctaggttggagaaatcatccaaatctgagatgggcaagtcctccacaacaacaacaacctgaccctcctttccagaaggctggtggtccaagcaagccatatgttcctcctccaatatagcagcagcaacaacaacagtcacaacaaagacaacaagcaactgaggctcct

SEQ ID NO: 37494 - DNA, 275 bp, Glycine max
tagttcctagctgattctataaggctttccataagtgactaaggaacttagcatctctatctgacacagtggttctaggcaaaccatgaagtctcacaacttccctaaaaaagagttttgagatgtgagaagcttcatctaccttgtggcatggtataaagtgtgccattttgctaaacctatccaccaccacaaagatagagtctacacctctttgggttctatgaagcccaaggacaaagtccatactaatgtcgtgcacatgggataggtaa

SEQ ID NO: 37495 - DNA, 259 bp, Glycine max
agcttttttaggtaccatcaatttgattttacacaacaacaaagttggcatgccaagtgggatcagagtggatgaattgataaaatgatttgaatcaaaggttgagtcatattagcttacacatttgcactccagtaagactacaaaagacatggaactaacaaagaagaaaacgtgtatcaagaagacgactaaaggaataactttaggaatgacgacaacatgttaaatccacatccttggttttaattatgacaaa

SEQ ID NO: 37496 - DNA, 274 bp, Glycine max
tatccttccccggattttactttatacgttagtgtccattcctctcctatataaaggggatgagtttgtatgttgaggcacattgaatcgaataatactctcttcttactaaaatgactttcttataaattccttcttctctgaaactctgagttatataatgattatcatttgaaactctcaccagctagtatgctctacactcacctctttggaggatcttgtgtatcagaacgtcgaatattgatatcaattggtgggttatccctatggt

SEQ ID NO: 37497 - DNA, 264 bp, Glycine max
agctttttttgtgtgaagttagtcaaatagttgtgatcctgggtaaggttctgcaacagtatataatgtgctacttgtgtagaccataggaaatatgaacatataggagataccgaggtgtctgcaatcattaaacctctttaaaattaagtaatgatcacatgatgcattatacaaatttttcggatgagaatttatctctaataaactcattgctcgaccacccggtttggccagcagtacttgcagcagcaaattctaaaa

SEQ ID NO: 37498 - DNA, 277 bp, Glycine max
tgccgcccagttgctttctccttaagcaacccaacttccaaaattttccggaagggcatagattcaaattgctatttacacctctatctcgataagttcaccccccttctttgctgattctttttccgtaacgttacggaaccttatggattacgtaacgatacttgttttctttccgtaatgtcacaaaactttacggattacgcaaccatcccttttttttgacttccgaaatgttatggaacctaacgaattgtgcaacgattttttcttttga

SEQ ID NO: 37499 - DNA, 264 bp, Glycine max
agctttttgactataccttcgactgaacacggccgtgtttctgtctaggcccgggttcaaggcgggttgcagcaccggctccgcttccctaactgtactggaggcggttgcggtggctttatcctctatggttttctgaagttttaacatgacctccgagatagacgccatttgatcttttaaggccgatagatcggccttcatctgttcctgcatgccctcttcattatccatttttctggatcgagtgttataggggtgtgt

SEQ ID NO: 37500 - DNA, 282 bp, Glycine max
aataacattcatgtgtgttttcttaaaaagggagagaatggaggattgccttgagggtcctcacttaggcaatcatgaaacccagctccaaactcgaaaatggaggacacatgaacagccctaagcaataacattcatgtggctccgaaaaaagggtgagaatggaggattgccttgagggtcctcacttaggcaatcatgaaacacaaccccaaactcgaaagtgaaggacaaatgaacagcgctaggcaataatattcatgtggctccaaaaatgggtga

SEQ ID NO: 37501 - DNA, 269 bp, Glycine max
agcttgaggttgtgaaaagaatataggccatcagcaccaaccactccttgtaggagaattttattggtctcctgagatttcacaagacataaatgagggtgaaactcaaagaaaacagagttgtctttagcaaattgactcacacttaaacaaatttttcgaaattaaaggaacatgtaacaacttatgaagcttaaaggttatggcaatatcattaggagaaacaaaaactaaggaaccagtgttggagatacttaaaccttcaccgt

SEQ ID NO: 37502 - DNA, 279 bp, Glycine max
tgtaggattatggggtacccatcacatgtggtactaggtggcggtcgggtgatggtgcaagtcaactctccacatccacaattcacacataaacccaccatccccagttgcccaccttcactgagctcacgtactcccacgtagcccttatcctcgttcctctcaacgccgggtccccatcaatcctctcaagcttccacaacatccaagtaatacaacatccaaccatcgtgaactatcaaaaccaagaaaacagggcaaaggcagaaaactctgccc

SEQ ID NO: 37503 - DNA, 260 bp, Glycine max
agctttatcttgttcaggtgcaggtgctgctactggtggaggcacttgaatttggttgccagacctcaaggtgatggcactcacatttttcagattttgcacagtttgtgaaggcaatttgtcagaattttgggactgagcttgattcatctgagtagccatctgtcccatctgatttgtcagactctaaatgaaggctcttgtctcttgctgaaattgcatattctggatggtcatttgcctcactaactcttctaagg

SEQ ID NO: 37504 - DNA, 274 bp, Glycine max
tggagaggatgcttttatggaggaaaagaaagagggagagaaagagagaggggggagcacgaaattgaaggaataaaagaggtatagaagtggaactttgaagtatgtctcacaagactctcattcatcaaagttacaacaagtgttacacatgcttctatttatagactaggtagcttccttgataagctttcttgagaaaacttccttgagaagcttctttgagaaaacttccttgagaagctagagcttatctacacacacccctctcata

SEQ ID NO: 37505 - DNA, 264 bp, Glycine max
agcttttttctactataggaaatttgtattctactactactacaagtgaattcctttgagtatatcatttactatgtatagggtgtttctttgtcatcatttgatccatttagctgaccctgccaagtgggaaaaaagtttggttgctattgctttagggtgcttcacagccatgttcatgtgccagtgatgagtttataagtattataagacattttaatgtggcctataacttcatgatagttaggttaggactcgtagtac

SEQ ID NO: 37506 - DNA, 276 bp, Glycine max
tattagccacccatttcattgtagcttgcttatttttgaagacccttccccatatgtactcctccaaaaaagtcttgatttgagaacttcttgtaacttcaaaccatgaacaaaaaatctcccatggacatttaatttgtttaaagcgtgctctagcttgaatggtgtcaatttttgaccatttgagatctctatcatgaaaaatggcatactctcttacaacttcaataaaacagtttgatagtatcaaacttcatcccaacctccaaatgcact

SEQ ID NO: 37507 - DNA, 262 bp, Glycine max
agcttgatgtaaaatttcttgcccaagcttaagggaacaataaataagttgttactagaaatttttggagcagatttcctactatagactaggtcatcctttacatggttagttaattatcctaaataattgttgttgctaatcttataaaaaaaaacataatctcgcatagctcataggtctaatatgttattgaaggaattatgatatgctttttttctcagaggttgtaagaatgcatgctttgcataatttagatata

SEQ ID NO: 37508 - DNA, 261 bp, Glycine max
agctttgatcttccaccactgccgccaccatcatcttagatttatattttaatattattagtactttgattttcagccttgtattttggctatattattatggtatttgaacaatttactatttccttatttgcatggtatggttgaacaagtatgttatttgactatatggatttcatagataatctatttatgattgttgcttcatggttcttacttcatgatttgattgatgtttttttttctttttttttatgaatg

SEQ ID NO: 37509 - DNA, 275 bp, Glycine max
tggtggagtttaaagtataaccgtggaaggttcgagctaggatataagcccacacatgccgacataaggaaaaacaccctaaaaagaagggaccgaagcatgcgcccgcagcaagaaccgcaagtggaagggacttccttatgtcatatcatttaaagcttcatcagcgtaggctggatgtgtgaagggcggatcgccatgatcaacaatgaagtccctcaagagcaatcaaactcagtatggtcatgccctcctgagttcgagttgggaaactg

SEQ ID NO: 37510 - DNA, 277 bp, Glycine max
tgcatgccgggcggtattttgttgaggataccatgggacgaaaccccaatgctccctcatcagaatgcactgacaaattagtggtcgacaatttacaacgatgcgacagggaaaacccgggcactaaccaaattaacacatgtcgtagcacatgtcactctttgactactggaaaaaaaccaaaaacgcccgcactcaatcgcacttactaaactcgcacaacattaatggctaatggaacctaacacgcattatattaaatacacacctaagctga

SEQ ID NO: 37511 - DNA, 266 bp, Glycine max
agcttgatgtgagaaagcgtggaagagtcagtcttcttacttttgtttgttgaccacagagtggtacttggagatatgtcgcgggggtcaggagaccttggggacgtcaagtggggtgctattgcccaaaaccaagcttggctaatcccgacccaacccgggcatagtcagtcagtaagaacctgcgacgtacctaagcaggtgagctcctggcagccaaccaataaaagaacaaagtccacgaagcaaggaggcttgtgtggcgg

SEQ ID NO: 37512 - DNA, 279 bp, Glycine max
tatggtgtacctcttttaaacctattgctatcaatatctatgccaataatccatgatgcaccaacagcttttgcgtcctctgcaacctgtaagtgtaaattttgagtcataactcatattggaagccacaagaccaagcaaaaatttgtcaccctggtaagaaaaaaatatttaatcagctgcatttaacaagtttctcttgaccacactatgcgttcccacaggcaaatggaacaccattgtccactagcatttcatgacttgcttacaggctatgaa

SEQ ID NO: 37513 - DNA, 172 bp, Glycine max
gtgcgaccccgtttccttctcggaacctggcacactctttccagacgtctgtagcgaccaacttgaatttttctttggcaagccttgcttttcctagttcggtttttagagctcggacttctccatcctcttccggagcttcgaagttctcctcattgataattttcaactt

SEQ ID NO: 37514 - DNA, 260 bp, Glycine max
agctttttgagatgccttatggtaatctgaagatgctttggtaaagtccacaatctaattagagacatcaacattgaagtagtcaatgaatcttgaggcaagcacaacattaggaaattcataatccaccaggcaatgactcttcagcataatgtcttcaatcaacagtacccagttaatcttgaccttagagtgagtatgtaagtaatgaggtaaaccaacattctatcttctaaagtcagtccaccaaggcctaagag

SEQ ID NO: 37515 - DNA, 270 bp, Glycine max
ttgataaaggtaaattttttaaaccttgccattttctctttcatcttgttattcctttaccaagtttcattatgagtcttgatttaagcatgttcacgttggttttttgttacttggtgatatatgatttctatcaatacttttttgcatgtcattataactattatatttatatagctttttcattacaaatgcaatgtatttttgggacatcaattttaatggttcctcttgttgttgtcctatgttgtgtcatgttttaattcatat

SEQ ID NO: 37516 - DNA, 259 bp, Glycine max
agcttctatagaaaactacatgaagctgcctcggtaaaaattcttcccatccttcgttaaccgttggatcttctagaaattttgtttgcaacttcacaagctaattttccatgatctaaccgttgggatcttaaagaagatgtctggagtgggcttgaagcttccgttcccgagagcatctcttatttaagcatttcagcctttgctttcttgtagcttaagaaaaacgtcatttcttcttctttctttcttccaaagc

SEQ ID NO: 37517 - DNA, 273 bp, Glycine max
ttataagcgcgggttctggagacaaaggtcaagcgttcgcgatatgcgaagatgatattccgagtactttggatttggtacgaccatgccctcctgatttccagctgggaaattggcgagtggaggaacgccccggcatttacgcaacaagcataatgtaaacctttacggttttaaaagctctatagttgggcctaggctttagagtttttccttttgttaaggctttgtgtcttttgtttttgaatttataatacaaggatcttgcttcat

SEQ ID NO: 37518 - DNA, 265 bp, Glycine max
agcttatcacagcctcggaaatagaggccgccacccaatcgctaatccagatcaggcgaaagcagtagctgggatttcaaaaccctaaagtaaaaattggatttttcggggggaaattagacgaagagagaggagagagttgaatgggaactggaagagtagtggactaacatacatttaggagtaatttttaactattgagcgacaaatgagagcaataatagcattgaagattacagtttggaatatgggattctcaaacttt

SEQ ID NO: 37519 - DNA, 277 bp, Glycine max
tgcactttctgtgttttttgaacctctccttcctgaggtgttcccaaacccaatcacctagttcaagcacgactttctttctgcttttgttggcttgccttgcatagctcgcatttttcttttcaatttgagccttcatttgcttatgcagcttcttctcatacttagctttagcctgtgcgtccttatgcttaaacatagcaatgttaggcataggcaacaaatcaagaggagtcaaaggattaaatccatacattatctcaaatggtgaacaatt

SEQ ID NO: 37520 - DNA, 268 bp, Glycine max
agcttgttttttggtttagacatgattgatacatgatttgggacttgtaggatttgatttgggcaagattggatgagaggaagtgtgattttcgaaatctgcacttatgcagaattttgctgtcaaaataggtgcagcagaaattttggctttgtgcagaaaaatgcttgtgtgtgattgactgtggaaagagtagtgcagaatgagttctggatgattgctagtagatcccaacggtcaaaatgtaggcttatgtactagagacttc

SEQ ID NO: 37521 - DNA, 278 bp, Glycine max
tctgaagaaagcgattttgtacaagccctaaaggcagagcttgatagagcccgggttgtccaagagaagtttaagttcatagccatcaaagtctgaaaagagtatgatgaactaagggacgtcaatatggccaccgctgaagccttggaatgagaaaccaagaaggcctgataggaagaacacgacctaagaaaagttttgaggggctttatagggcagcaatagtgagctcaagctcctaataggtgcaaggaatcatcacgggtcaagggcatgat

SEQ ID NO: 37522 - DNA, 270 bp, Glycine max
agcttgcttgttatggaggttggatctttgagcttcaatgaggtccttcaatggtgattttccaccatggagatgcagcggaagacaaaggagaagaggtgagaggaggcgccatccactagggaataagccatggaagaaggagcttcaccaccaagatgagccttggataagaagcttggagaggatgcttcaatggaggaaaagaaagagggagagaaagagagaggggggagcacgaaattgaaggaagaaaaaaggagagaagtt

SEQ ID NO: 37523 - DNA, 278 bp, Glycine max
tcgacatctgattttaggactcggttattcgtatcagcgtcacgaaattgttggctggcatctgtaagctgcttaaataggtttgcattttccagtctcagccgttcaacctgagaaagtaatttttcaaattttcatattggaaacggaattacaataaaaaaaaaaatctagtgtcatatcaaagacctacacgattaaatttctaaaataacaaaacggaaaaaaatttgtatataaacataaattatacattgctccattaatatattataaaa

SEQ ID NO: 37524 - DNA, 258 bp, Glycine max
atctttcctgtccgatgcagcagtaatgatggcccgagttatgttggggaacggttatgaacccgaaatgggtttaggcaaagacaacgacggcataactagcctgataaatgctaaaggaaatcgtgggaaatatggtttaggctataaacccactcaggaggatataaagagaagcatcgcgggaagaaagagcggtggtcaaagcttgcggttgagacaagaaagtgaaggaagcccgccctgccacataagtag

SEQ ID NO: 37525 - DNA, 273 bp, Glycine max
tgaaactcgattttttgagggagtttgacattttttcttgagaagcctcttcatgcatgagagtctggccttggcttgaagcttttgcatgtgtaggaagttctagagagagaaaggtccaaattccagagagttctaagagattttgctatgtgaagatctacagagacgagagctcgaagcggatgccattctgagagcttgagatgagtttgtgagtgattgtgagatcctataggtgaaggagacatcctcaccacttgtatttttgca

SEQ ID NO: 37526 - DNA, 267 bp, Glycine max
attttttttattcattctatgtgcccgtagtggtccacattgtgtttcgtgcattttgattctcgttttgtttactttttataccccctgttgacgtgcttaagccattttacctaagtcatctctcgcttaacttaaaaataaaataaatttccaccgaacgtttgaattgtattatccattaacttcggttaaaataaattccgaccgttcggtcgtgccgtaaccacgttggaaatcaaaaagaggtaaaaaataatataataa

SEQ ID NO: 37527 - DNA, 276 bp, Glycine max
tattcggagaccctttaattgattgcctagcgcaggtcatgcgtcctccaccatcgagtctatagccccatggattgattgcctagcgttgttcgtctatcctccatcctcaaatcttattcggagaaccatgaattgattgcctagcgcattacatgcgtccccaaccatcaagtctggagccccacgaattgattgcctagcgttgttcgactatcctacaccctcaaatcttattcggagtcccatcaattgattgccaagctcggttcatgc

SEQ ID NO: 37528 - DNA, 412 bp, Glycine max
  unsure (1)..(412): unsure at all n locations
cttcttgagaagcttcttgagaaattttttttataagctagagcttagctacacatacctccttaataactaagctcacctccttgagaagcttccttgaaaagattcctaaagaagctagagcttagctacacacacttctctaatagttaagctcacctccttgagatgagaagctagaacttagctacacaccccctataatagctaaactcacccccaagaaaaaatacatgaaaatacaaaaaaagttcctactacaaagactactcaacatgcctcgaaatacaaagctaaaaccctatactactngaatggccaaaatacaaggccttaacgaaggaagaaacctattcttatatttacaaagataagtgggctcatacttagcccatgggctcaaatctaccct

SEQ ID NO: 37529 - DNA, 333 bp, Glycine max
actaggagagtctcttatataacagtaacagattcgttggttgaatctgttgtggttgctagagaggatgacaaggagaaactactgagcatgcttctatatgatgatgatgccatgtctaatgatatagaagtgatcacagtattgggcatgggaggtttaggaaaaacaacccttgttcaatccctttacaatgtaagtgaagtgcagaaacattttgatttgacagcttgggcatgggtgtctgatgatcttgatattctcaatggaacaaagaaaattgttgagtctctcacattgaacgagtgtcatttacttatcttggcgttttcg

SEQ ID NO: 37530 - DNA, 578 bp, Glycine max
  unsure (1)..(578): unsure at all n locations
taaaactcgcttngtgttctttattcantacaccttcttttcctcctttnccagcatggnntttgatacttgcatgacgcacactatanatactcaagcctgagaatagcaacttctcaatattaaatatcaatatntgcctcacttttattttcntattaagaaagaatctagccatttaaacgcatatatgagatctgtgagattacatcgggaaactaattataatcatactacctttaatggatatatatatatatatatatatatatatatatataattatatatatatatttcatatgcatccaatacccgattggagcagttaaaaacaaattatcatggttacataccaataatgttttttcctgttgacaataaccaaaagtgcagggctatgacagaaaaattatgtttaattgcggcctctaaagtgacaaaatgacacaactcccccctatataatatgacgaaatgatttatagtattattacgaccccacaataatatctaattggttatttaaatgaggtgagaaacaacaatatttaattgcaagagagatgtatgtacatt

SEQ ID NO: 37531 - DNA, 379 bp, Glycine max
  unsure (1)..(379): unsure at all n locations
tacagggaaaaaggctttgttttcattaagtcatcgtaaaattgatgatgatgatgataacctaaacgagtttctcgtagggatgtttctctgatcctagctaatttgattgtggtaacaaaatgattcatcaaaagagntaagaaaaactcctattgagttcttgtatttgagatacctctaaattgtaccttccttatataaacatgtagtatttaacttaaacttatcatattttttatattaaattctcacattaagtaatgccacatgatatctcttttacattcacaacaacaagttgatttgagatctatttacaacagtagcataatttaagaaaacactttccaacatatatattttatatgagatcttt

SEQ ID NO: 37532 - DNA, 501 bp, Glycine max
  unsure (1)..(501): unsure at all n locations
accacaaanttcnaanannaatnntntaacntctncccccnaaaagaggggttatgctcatgacnacncnnnnnnnaacccagcncaacaccagccaacacaagggaaaatactttccacccaaagcacccaaggagaaggacagaagcaancgaccaaacaaggcagggcaacaagcgaangcnagccacaagacgggaagagaaacggcgaagacaacaccaacgggaaaaagaaaaagaagacaaacaaaaaacacaagcaggcaggggcaacggaacccgacgaaaggcagagggaccanacgaacagacaagagcgaaaccaaagcgacgcggacacacgaaagccacaaaagaaagcagnagaaaacaaagagaggccgagcaaagaaggaagcacaagaagaaacacacaaaggagcaccccccacaacgaaaacacaaagaaaccagagaaaaccgcacgagcacaacacaaacaaccgccaggacgggaccc

SEQ ID NO: 37533 - DNA, 433 bp, Glycine max
  unsure (1)..(433): unsure at all n locations
taagtttctctacacacgnaacaagctaagtttcttgtttattaaatagcataagtaagggaatcccacttatgaaacatttaccttggattagatccttggattttgaagcttcatcaccgttaagggtaaagactcttcctgtggccttcgaacatccagtttggtcattcaggcccacaccattccgctccttcttgggatataggcaatctctctgaatatgccctttctgcttacagttgaaacaagtcatgcctttattagcacaatttgaggagatatgccctggcttaccacatttgtaacatgtgatctgagttgaggaagtagtgggtttgctaccactaacaccacccatagcaacagtcctttgattgttggggcgaataccatattgcttagagggagttgagtacggtttttccctatg

SEQ ID NO: 37534 - DNA, 292 bp, Glycine max
  unsure (1)..(292): unsure at all n locations
agctagtcgcttcttccgaatcctccctctctaactcaggtcttatctttcttttccttcanannannnatcgngatgtgtgacaattcgcgaaatttgatgcaatcttttgtctgtacgatagtgttcctcttggttgttgtatagatgaatctggtttaggatgtaacacactttgcttttattattgggcgaggcttctcttactttcatgatattagtgtttagggtgtgctggtgtcataaacaaaatcaaattaacttgttgctgcctgtactgcatagaatgtta

SEQ ID NO: 37535 - DNA, 469 bp, Glycine max
  unsure (1)..(469): unsure at all n locations
tactaagctgaagtgtttgtctttacatgcctaactcccttgtgtgatttttgtattnggtgnnatcttgtgtgttgcatcttagtacatatcaaatttttatgcatccttcatcatcatagtaagtatgaagaaaagtttctaagttagaaaggtttcttcaagaggcaaaactctctattttaatcgattacaaggttgtcataatcgattacaacaagttgtttgaagctgggagagttgagtctcgtatcggtttaatcgattacagtagtctcataatcgattacactgttgtttgagataatgaatgatatattcaagagtatctgatttaatcgattaccaagtggtttaattgattacttctcntttgtttggtagttcaaaagtgaacaagaacactttaatcgattactctgagtatctaaatgcgtacattgctgttgagttaattctagatgttggg

SEQ ID NO: 37536 - DNA, 424 bp, Glycine max
tgataagtatttgataaaacttgagccaactattgtatttataatgagattcttttaacaatttaactaagtccttatctgtgattttcttaatcttgtttgttgacttgaaacaatgtatgctttcatcaagtaaattcttttggcatcaccaaaacttgcatgattcacattctccccctttttgatgatgacagccatatgtatgtaaggagtaaaaagaatatgtatttgtgtcgatcactccccctggattttgaaataattgcttatataaaaatgttgaagattttgtagatttcatatatacaaatttttttcgacaaatagataatgccccttactatcttatctatctctccctctgtgcaacataaaaaacaaataggaaccgagatatgaaaacaatcacaattataatgaa

SEQ ID NO: 37537 - DNA, 373 bp, Glycine max
  unsure (1)..(373): unsure at all n locations
tcatcanaatgaaatgaaactacgtgttcattatattttttgaggctcggcaatcttagaaaaatccttgatgaaacacctgtcaaacccgacatgtcctataaagtctttgatgcctctgacattggttggcagatgcaatatttcaatgactgacaccctggcttcatcgacattaatgccatgaacaaagactttgcggcctaatacaatacctttagttactataaagcggcaatctttctaactgagctcaaatatttttgcaacacgctgcttcagtacagagtcaagattacaaattcataaatcacaagaagagccacacacacagacttcatccatgaacactctaatactcttctccacgaga

SEQ ID NO: 37538 - DNA, 441 bp, Glycine max
  unsure (1)..(441): unsure at all n locations
tctatataagctgaaccattntatcaataaacacttgttagttttattcagaaaattagagtttatctctnttatcttagtgagagtgattctcctaaattcttgagtgattcaagaacaccctggctgtatcaaaggactttcacaacctttgtgtgttgccctcgctggaaagagtgattctttccttcctatcatctacacccttgttctttcaaaccacaattccagaaaatccacctctgcccaaaattatctcgtgaccataactcccatttcacacactcaaattaagtgattcttgatcctaaattgaatttcaaaacgagatctttcacctcngtttggaatcacctcatttggagccctgtagcttccgttattgccatttctatatttctgtccagccaccacttaacctacgttttaccatcccattca

SEQ ID NO: 37539 - DNA, 162 bp, Glycine max
tttttattttattggtgtggggttgatagggaagataattcttaatatatttggtgttgactttgggaacatttttaggagattaagaccgtggaactcgtgaagccaactgggtgggtttatctatccttgtatggagctgatcctaggtaagttcaacgt

SEQ ID NO: 37540 - DNA, 469 bp, Glycine max
  unsure (1)..(469): unsure at all n locations
gacacatagatactcagctttagagaaactacatgaagctgcctcggaaattagttgtctcaccttcgntaaccggtggatcttctctaaaattggtctgcaacttcacaagacaattttccatgatctgaccgttacgatctttgagaagatatctggagtgtactagaagcctcttaatgaagcttctagagaaaactacatgaagctgcctcggtaaaaacgcttcccagccttcgttaaccgttggatcttctcaaaatttgttttgcaacttcacaagacaattttacatgatctgatcgttgggatatttcagaagatatctggagtgtgctagaagcttccgttcccgagagcatctcttatttaagcatttcagcctttgctttcttgtagcttaggaaaaacgtcattctttcttccanagccatntctaaagttccaagaactttcttcatcacccaca

SEQ ID NO: 37541 - DNA, 381 bp, Glycine max
  unsure (1)..(381): unsure at all n locations
tctggctgttcttatatacatccacacagaaagtgtcagtacttcatgtcatgctctctatttttcctatcaattntcttttgctctttcaatatattttttctaagcaattcagcttcaacaatgtcatgagttagtgtgtgacttcatcaatgtgcatgggacaggtacttgacgggtttcctatatttcacgggcattaatttcgttttgacatttgttgctgctattctctgtgtgtgttttgcacccacaccagcaggacctggaattcctgagatcaaagcttatcttaatggtgctgatactcccaacatgtttggtgccacaacattgattgtcaaggtacattaattatttgattgtatgcaacactgtctc

SEQ ID NO: 37542 - DNA, 398 bp, Glycine max
  unsure (1)..(398): unsure at all n locations
tatgctcctaccataagtgcctcgtggagtcattaatattcttattngcaccgccatcgacccgtacctcatcggaaacccaaacagtaccccatctgcggccgtcaactacggcattgttatctctggtatggcgtcatccttgggcgacgccctcatctgatatatcacctcaatcggcaatgtctccgagaccctatacagaaccccttccacaccttccactctgtccatgtcgatcttcaacctcttcgacatccccccatgccgtctgagagagacgaccacgacgaccacgctgctttacgtgctggcactggcgtgtagggtcacgcggcaggcattgtctggaggcgacatcagaggcaacatgggggttgtggtgacatcagtgggag

SEQ ID NO: 37543 - DNA, 361 bp, Glycine max
  unsure (1)..(361): unsure at all n locations
nntacagcagatttagtaatgacccactaacctataattttaataacttaatgccattaacctagggaattaaaacaaacttaatggctgagtgtaactgaaattgtggcaaccaaaagtcacccccaacagccaacaagtcagccaccatttggtctcccaaaaggctgatgcctaggttgccaattgggcccttattacaacttgaactaaagcccttttagttgattaacccaaaacatatttttggccagccaactttacaaggattgggccattatttagacaaactaaacacttctaaaatgaaataaagtggtgtcatttagtcctcctccatttgngccatgatacaactcac

SEQ ID NO: 37544 - DNA, 601 bp, Glycine max
  unsure (1)..(601): unsure at all n locations
tccaatatctatcncncatcgtcttttnnncatattantatatttttttctttttnnnncnccagagcgggggggtttattgccttcgatagcattgcacnncgcganannanacaanacnnaagcgncgncacnaaagacgaggaccccaaactttattttgtgtttcacncacngaagagcggccgtggccttctatgttgtagccccaggcatagagcctccaagtacttctaaaagatccttgcccttaatccttgccatgacctcataactctctacctctacaaaaagatgtgtcctcaaataggcttctccatctacatcaaaaagagttaagccagacacattaaatgtaagactcacattaaactcaccatgcaatacaatcatgtatgcatatccattcatacctgtcaggacgtaaaaaggaccatacgcctctgggcgaagcctggagttccctatgctaccaaaaacctctcattcgtatgtgaacccaaaccacatctcccggtgtggaaacaaccatattgcacccactgatccttggatacagaacacccatcctctattacataggccttgacatctaatagtc

SEQ ID NO: 37545 - DNA, 345 bp, Glycine max
  unsure (1)..(345): unsure at all n locations
tactcaagcttctgcttatgtggcagggcgggcttnctacacatccttgtctctaactctagctntgaccactattcttccttcccgcgatgcttctattcatgtccgcctgagtgggcttatagcctaaaccatacttcccacgaattccttgggtatctatcacgctagttatgccgccgttgttgttgcctaaacccatcacgggttcataaccgttcctcaacataacttcggccatcattaccgctgcatcggacatacaaagctgcccacatatggagtccactggggatatgctgaccacctctaaagactggaaagcagtatctaacgattcttttg

SEQ ID NO: 37546 - DNA, 209 bp, Glycine max
ttaacattattaaacttttgtgattttttttctaactatgtattatcattatagtactcgaggattattctatctgcccgcttagtgtctcctcactgtcatattcattattctttatcaaatagactcgagagtttgtgtcggtgctgctaacaatttactcagacagtgatgaaatcctagtcactatctattcgttgggagggtga

SEQ ID NO: 37547 - DNA, 527 bp, Glycine max
  unsure (1)..(527): unsure at all n locations
acgtcgcnnatgagtcattgattnacttgacactnccnaanactcacgctngagatgaggaagtgtcgaatggcgaaactctcagcttttattgtcttctctagactggtaccgggagatctgtggcgggggtgatgagacccttgggacatgatgtggagtgctattgcccagaaccatagcttgagcaactcgcgacgcaacccgggcatagtacgtcagtgagaagctgtgatgtacctaaacatgcgagctctccgtagtcaacagataagaggaacacataccacgtagcaatgacgcttgtcgcggctggccagctgtgaactttgactgatttgtgggttctggccattcgtaaacaagaccaacggtgggtgatcgattactgggctttcatatgtacacaagatgctcctatcgtctctagcactcgacacacactgatgtaggcaataccctcttgaacaccagcatgaagcaatgagcctctgtacctatttcatgtgtgcctgcattccatcgtt

SEQ ID NO: 37548 - DNA, 395 bp, Glycine max
cccatggaagctcctaatatctcccacactttttggtgtgggccattcttggatggccttgattctctcagggtccacttggaccccatttctaccaactacaaaacctaagaaaactatattatctacacaaaaggtacacttctctatatttgcataaagggtgttcttcctaaagactgaaagaacttgtctgagatgtcctaagtgaaaatctatgctcctactatacactaaaatatcatcaaaataaacaactacaaatctacctatgaaatcccttaagacatgatgcataagcctcataaaggtgcttggtgcattagtgaacccaaaaagcatcactagccattcatacaaaccaacactggtcttgaagcagtcttcactcatca

SEQ ID NO: 37549 - DNA, 468 bp, Glycine max
  unsure (1)..(468): unsure at all n locations
tcgtatgctcagctacagaatgctcagnctccttatgatcctgatggaattcaagnngctgatcaattgatagtctcagagttcaagaccttgtctgagctaaagcaatgttacttcaaaaaacaatntgatcctttaccagatagagcaattcttgcagctaaattaaaggagctgcaaagtgtcaacaaaacctttgagaatacagggaagaagttagaatcgcaggcagggctcaaggactctgagattatatttctccaagaaaagctagaggaagctaatgtgcacaataagtcaattgagaagagttaaatcaaagtggatcattatcagttcttgataatctccatatgtcaggactaagtcctagccattttgtcaccgctcttcgccacacagttaggtccattcggagctntgtgaaaattgttagtaatgaaatgagatctgcttggtgggatattg

SEQ ID NO: 37550 - DNA, 372 bp, Glycine max
  unsure (1)..(372): unsure at all n locations
tatgcgcatatntccttacaaacgttctctngcacaagtatatttattaaccganaaaaaatgcacccatatacaatcaaggcagcttcgttacctagattatttacacgtacttccaaggtgtatttgttacttacatcacacacatctccttggctaaattcacatacatgcatactcaaagcattttggggttccaaaaattgcacatgtgcatatcttggtatttctaatacctatacatacacaaacttcatgatgaatcttgactatctacacaataaggtgctacatctcatgctctcttcaagttttgctacctaaagccgcatgcatattcaagtatattttcctttgctgactaaaatcgta

SEQ ID NO: 37551 - DNA, 283 bp, Glycine max
  unsure (1)..(283): unsure at all n locations
cttgatgatgcgtngggtgacgatgatggtgttgtttttattacatanaactctgctagcaacatcgtggttctagccaccaattgggcgctcaatctgaaaaaattacattttaaaattaactaaaagatgtcacttaggctcaaatgcattcaagcttaactctggacaaaaaaatacatatttgaattgttctaatatgtataccagctaactaatgtatatatactcgttgttttgtaatatgaatatcgtgggcaagttatacactagatattgtctt

SEQ ID NO: 37552 - DNA, 464 bp, Glycine max
  unsure (1)..(464): unsure at all n locations
tctaatcaactctaattcagtatcagcccggcttactatctcatgttaaatgagagaaactgaccttcagatagcatagaaattgcaattcttcaggaatgaggaaaagcaaagcatttcctttcccaccttcaccacgagctgttctaccaaccctgtggatatattcctggtagcagtataaaaaaaatgtgacatagtacatcaaagtataagacttctaagaagcaaatgaaaagggatattgattgataaatagaagaatgaaaagtacctttggttcatcaggtggatcatactgcacaatccagtcctacagcacaaataaggagacaataaacataaatcttatatatgtaatgaatttcaattaacagaacagaatgctgaataaacacggttcattcaagtgttgtaaaatgtntaccattagtattagtatagaaaaccaaattaaacataga

SEQ ID NO: 37553 - DNA, 253 bp, Glycine max
tgaccacagagaggcacctggagatatgtcgcgggggtcacgagaccttggggacgtcaggtggggtgctattgcccaaaaccaagcttgaccaatcccgacccaacccgggcatagtcagtcagtgagaacctgtgatgtacctaaacaggccagctcctggcagtcaacagataaaaggaaaactagaccacaaagcaaggaggctcgtggtggctggccagctgtgaactttgtgtaatatgtggattgt

SEQ ID NO: 37554 - DNA, 478 bp, Glycine max
tcgtttagcggtggatgcacgcttagctttttgatgatctaagctcaactgtcacttttggcacttcatgacgtatcctttgtttctcctgaaactgcacagatttcatcattaaatccaatggaaatattctagagacaactctaacaataaaacaagatttatttacaaaatcactacaaaataaccataaattgtgggaactatacaagttttggaaaaatttttctatacaaaagttagtcctataatatgactaacaaactcccccaaatttacagttttgcttgtcctcaagcaaagaaagaacagttcactcgttcttaagtgacaagctacattgatcactcaaaatggtggttgcttcatagagaaattcaaccatatgaactgaatatcatggactgcttcaatcaattgatttcacaaacatgtagcttttcatagatcggaacatgcacattagagtcacaactga

SEQ ID NO: 37555 - DNA, 334 bp, Glycine max
tcttatatgattagtcaggctcagtatatattattttatacaaactctgcatgcagtatacttcaagcagattttggtgctaataagtgtcctaacatttgttacttttggggatgataataatacgcaatgtataagtagagtattagagtatttgtgtcatcctcagatttattgaacagatttggctatattatttggggatgttgtaaaaaaatgtatatatgagatgcttgtaatacttctttcaaagtaataaagataaaaaatatatgtttaatatgtgttcatttaataataagattattacgtatctattacaggagatttattc

SEQ ID NO: 37556 - DNA, 379 bp, Glycine max
  unsure (1)..(379): unsure at all n locations
cttgagggtgcgcagcccaccatctnttatagtggagattctattatgtgtctaccatcacgattatcgtctccctttccattattgggggtaccacctgtgccgccagatccctccaccttttgggcgtgttctttgaaagatccgtccccctttttgcacatgttctgtagttgcatcctatccggaaccatatcaaaattgtactgatactgcctaacaaaggcaaccattatgtcctcccaagaatggactcgggaaggttccaagttagtgtaccaagtaacagctaccccagtaaaactttcttggaaggaatgtatcagcaattcctcatcttttgcgtattcccccatcttctgacaatacatctttagat

SEQ ID NO: 37557 - DNA, 401 bp, Glycine max
tccatggattccaaacttgatgccattctcctgaaatttttttctatgatacccagacaaccctctccatcttcttcctttgcgaagtcaccacccctagtcggcaccatgccgcctctacttcctaaggtaactagccaacttttcccatcttctttctttacaaagccaccaccaacagcagcaaccacgtcgcctccaccaacagcagaaatcacgtcgcctccctttcccatggcagcttcccaccttcccgttaactccaaacaccatgcactctcctctgaccccctttgggccgccagtcaccagtcccgcacagagccccccaaccgctgcatacttcccttcaacatccgcttctccctgtatgatgtgtgtgtcgtcacaatcaaggacac

SEQ ID NO: 37558 - DNA, 362 bp, Glycine max
tgattcttactttgttatatagctctactgcattatgtttcatatataaatcacactgtatcccttagacaggttctactgaaaaagttattccatgtattatatataagtaagataatcgataataaataaaaaagtcttttaatttcctctgaatcgaattatataattataagactttttgtattcatcatcgattatcctacttttactggccgttttacaatcatttaccttctctcagaaactaatcatttacctaaattgtagttaagtagtattagataaaattttgagtcttgctttctataagaccaaaactgccacacggaacagcactaactctaaagaaaagaacgaca

SEQ ID NO: 37559 - DNA, 355 bp, Glycine max
tgaagctccttctttctgtcttattccctagtggatggtgcctcccctatcctcttctcctttgccttccgctgcatctccatggtgaaaaatcaccattgaaggacctcattgaagctcaaagatccagcctccatagaagctccacaagcaagcttccatcacttttcacacagaggtcagattcgggcacataatatgtccagatgctcggaattgaaccacggaagctctcgagtaatacaaatggtcataacatttcacacaaatgtccgattcgggcgcataatatgtcgagttgctctaaattgaacaacagaagctgtctataaattcaattggtcataaattttca

SEQ ID NO: 37560 - DNA, 374 bp, Glycine max
catttctttctcctcaaatatgttgtttattttaatatttttcttaacatgatcaattgtttcgttcatgttatataattaatggatagtagcatcatcattagtatttaataaattctctaaaacgagatcatactatgttaagacttaaaattaaattaagtaatttttttaaatgacaattaaattaagtattgacaacccttattagtccattaatgtatacttatgtttcatatagcatttgattgagcaagatgaagtgtgatcttaatggacaaaagaaagtgcatagaaaatacatactgtgatgagctctgatggtttaaaaccacctatccagaggaagcatctctcagctggtgaagtccatg

SEQ ID NO: 37561 - DNA, 354 bp, Glycine max
cctatggctgtgactgtttatgctatatctcatggactgtgatatttttctcacctctcctagtcaaaatatattatagctcaaaatatgcatgagcttgcagagagcaaatatgcagctctttacaatatgcgagaaaaccaagggcttgataaagggaatatggctgaaattgatggctatcaacactagtttagtttgatgaaatagacgtttctgagtttcaagaacccaaaatatatgtcacagtctgggtgtacattatattagctttgcaaagatatatatcttcttgttagtatacagtctgtataagctatatttcttctagacaaacaatagttggagcaattt

SEQ ID NO: 37562 - DNA, 394 bp, Glycine max
  unsure (1)..(394): unsure at all n locations
ggtatatggtcttattcaaaacaggaccactcttatttcttctctngcgttggcataatgttcaattactgtcaaggcttttggagcatctataacttgttcaactatattttcagcgacatttcggttgataagctgcaccaaatctctctttttcctctgtattctttcagcacgaaagtattttttggttttcaattgcttggcaactatagtttgtatctctcctttggtgatcttcttccggatctcatccagagaagcccccttctcaagctctgctaacaattgttttcttgcttcctcaaattccatctaattcaattaagcagtgagtgccaaaaagtatggttagagaaaatgaaatatagttntgacaatctatgtcattaat

SEQ ID NO: 37563 - DNA, 420 bp, Glycine max
  unsure (1)..(420): unsure at all n locations
ctttatgtatgatcttgtactttctatttctncgtgcattattttttgaagcactgagatgaccatttctagaatgtgggaccaattttcaatttatgcttcttgattgattggctcataattattcttgatcattgcaaagaattatctgcaatgaatctactcttatttntgcttctttcttctgcaatgaatccatgcgcccctatagactacttgtgggatggtctgaattgtacttatcccggaaatgactccccaacaatcacaactttgtaagtcgtgtttaacaatttaatatcataactttataaaactgaaatgatcacatatataaaaagcttaaatatatttttgtccttcataaatacttattgtaatgaatctctgtttacacttaaattttataaaacaatactt

SEQ ID NO: 37564 - DNA, 411 bp, Glycine max
  unsure (1)..(411): unsure at all n locations
tgtagaatcacttgtatcaacagccatatctntttaatttctattataagcctatctgcttcaaagaaaaaatcgactcatagtcaggggcgtttaacaaaatcttctgggaaagggactcattttttgaaattcaatcttgaaaggtgttcagtacatgtatggngtgagacaggtttggaaaatacaattgttccagaccccaagcgagttaattacggctcacaggggggtagagttatgctaaatgtgtcagcagatggtaccccacgcaatgcaaatataatgtccactatttccgatgaataccagaagctgaagtactctgtctctcttgaaatatttcaatatagtttgtgtgtgaacaaagagaaacagtccacacagatggaacttgaaagagcagatctg

SEQ ID NO: 37565 - DNA, 417 bp, Glycine max
  unsure (1)..(417): unsure at all n locations
tgcatgacagcgacctaacanagagcatgacacaagttttgacctaaacttagttaacatttttaatggttgcaaatacacgcacgttaaacgaaatggaagttgataacctactgttctgtaattaattcgataccattctattttggaagctcatttcactgttttccgtaagcgtgtggtccttttattagcatatgttatgaaattccttcttttattttctttctgtttgtagaaatggcaacaaatgttgtgtttctccgaatgaaaggctatctntattgtctaatccgttttgggagattcgaatntgtggacgaagtattcgtgatcgttcattctgataaaaaaataaaataaaaaaatcatggttagaatttctaaagtgaaacacatggngagagaagttgattt

SEQ ID NO: 37566 - DNA, 449 bp, Glycine max
  unsure (1)..(449): unsure at all n locations
acaaatntacgtcgttttcctctcataatattagaggtttgtatttgatttcaatattaaaatattatttttacataaaaagtcatctatattttaaaaggtcatgtaaaaattataataacctatatatatatatatatatgatttattgtaaaagacttttataataaatatcttgttatttaaatcttaatagatttatatcataaggataagatttttaaaaaatctataaatttataagatttaaaaaaatcatatagaattttaacaaacattcaaaattcaaatgataaaattaaatatctgctgtgttctattataaacaacctaaataatgaaatgccatttttaatctgttcatatctaattgtcagcttcatcatcatattcagtctatcctctgcctaacatttactaaatctttccgactgtactccaacattatg

SEQ ID NO: 37567 - DNA, 398 bp, Glycine max
  unsure (1)..(398): unsure at all n locations
aaacataagcacttagacaatgtttgttagcnggagnngctgcacatgatgtccaacgttatgtcaaagaataagatcgggctgcacaatgcacaaggctagatgaaatgtcaaatgaagaattgaagctgcatgattcacgatgtctgatacaatgtccaggacatcctgctcgaaaatactggaattgctaaaagcattgaagctgcaggatccacgatgtcggatacaatgtccaggacattctgcccgacaatactggagttgctgtacaatgcaagataaaagtcaagttgtgaagctgcaggatccacgatgtcngatacgatgtcctgacttccggcccgataatactggacatataattctgtttatttttacagattattggcagttgc

SEQ ID NO: 37568 - DNA, 398 bp, Glycine max
  unsure (1)..(398): unsure at all n locations
atagcataattaaaaccaaaacttaacccgtaaatccgtcatgtaagattaagtttcgatcctgattcaatcaagttctaaggtgatagtacatttcccaatgctaaagtcacctaactgtgcacacaagtgggtgatcagaccaaaagcatacaaacattaagcatggaatgaagcattgaacacagaaaacataatcgattagatattaggtatttacattgtggaagcaatgacttccaagattattttgatgatgccaaagaatcaagagttaagcaagttcaaaagaatcaagagtcaaaaagcttcaagaatcaagattcaagaataatcaagtttcaagagtcaagaatcaagaacantccagatcaagatacatgaatcaagagaagact

SEQ ID NO: 37569 - DNA, 365 bp, Glycine max
tcaagatacacatgcctataaacttagtcacttcacgttatgtatcacataaatttgttacacacaacaatgattgacaataaggagaaggcaacaaaaatgaagttagctcacaattaagatcaaagtagtttttaaaaaaatataatttattagtgaaattaaaaaataaaaacatgtttgtaatccaaacataccacccttgaacatgcatcctgcatgcaaaaaagtgtgtttcacagtcaagaattctttacaaatcagaagaaagtgttgaacatctgaatgcatgagcctaaagagacccacgacaatatccaagctcaattttgttatcggcaacgtacagcactgtaatcgctatt

SEQ ID NO: 37570 - DNA, 427 bp, Glycine max
  unsure (1)..(427): unsure at all n locations
cttcacaggtgaaaccaattgaagcttacanagctttaatattattgttttcagcatcctcttctgaagctaccatgtgaaaacattaacacactgcacaagaatcataaatggaagccatgtgctagcttcacgagtgctaagtattgtttttttttgcactttcattgttgcacattgattgaacaacacactgcattaaacaagcttcatgttaaatgccaaaatggtgcagttttattcaacattttccagcactctaactgcattctctacacctaatgttgctgcattaaacaagatttctgcaatctgcaatgaaaacgcgaagcaaaatggtaaaatgaatgcatctagatgtgcatgttgaagtcgagaagattcatacgacttcaaagtctgtgaactacctacgaaaatcattatt

SEQ ID NO: 37571 - DNA, 422 bp, Glycine max
  unsure (1)..(422): unsure at all n locations
tctggttagagctgctcttgaagatggccaggattattatttctctgacaaaatgggtcatggtcacttgatgatcttgtgtgactccatanaaatgtatgagttttatccatccagccagtatagttgggttcatcatcttgatcgtatgtaacagagtgcatgttgtcattattgtctaacagatgccaagtatgctctatgtgatcctgacattttacagcaaatgacctacttacttcaccataaggctacattaaaagtaatactaatgtgctatatcatgtcatgtttatttgagaatagtcttgaaattcctaacttgatacttaatatgaattgcgttgaacattctctctgatttctgttaatcttgatcattgtcttatccatttcattccaattctattaatctcattcat

SEQ ID NO: 37572 - DNA, 396 bp, Glycine max
  unsure (1)..(396): unsure at all n locations
gaagcttctttgagaaaactttcttgagaagctagatcttagctacacacacccctctcataactaagctgacctacttgagaagcttccttaagaagattcctaaagaagctagagcttagctacacacacctctctaatagctaagctcacctccttgagatgagaagctagagcttagctacacacccnctgtaatagctaagctcacccccattaaagaatacatgagaatacaaagaattccctagtacaaagactactcagaatgcctcaaaatacaagggctaaaccctatactactagaatggccaaaatacaatgcccacgcgaaggaaaacctattctaatattacaatgatagcgggctcatacttagccatgggctcgaatcta

SEQ ID NO: 37573 - DNA, 401 bp, Glycine max
cccccgcgacatatctccaggtaccactctgtggtcaacaaacaaaagtaggaagactgactcttccacgctttctcacatcaagcttagtggattatggggcacctgtcatatgtggtactaggtggcgatcaagtgatggtgcaaatcaactctcccacttacacaaatcaaacattaacgtaccatccccagttgcccaccttcaaattgaggtcacgcactcccacgtagcccgtatcctcgttcctctcaacaccgggtccacattaacccctccaagcttccacaatatcgaagcaattcaatttcaaaatatcatgaactatcctaaaccaagaaacagagtagaggcagaaaactctgtccaaacacattcaatatacagctttcctactata

SEQ ID NO: 37574 - DNA, 235 bp, Glycine max
aatcatgcttctaatcgatatttgactcgaataataaatttttgcagggagttaagagaaatacaaacaagaaagtctacgcacaatgaagtgcagaaaacaaagcgtggaatgcaacacgaatgcccgatcgccattatcatagagcttactgaatctaagattcacattggctccaaacacttaagaattaagtgcagcaattgtggagatcattgagtactatttgttatat

SEQ ID NO: 37575 - DNA, 400 bp, Glycine max
  unsure (1)..(400): unsure at all n locations
tcattagttgttgcatttcagtatcactacctctatgtattaacggtatccacttcttgcattatatatttgtttgattgttgtataactattgacattatgctccttcagtgttagcagaatatttcttggtttcaccattgactntntcatatcagcaataattatcttttcatccttagtcaatcgaccaacatatggatgttcaactaatgactttgtcatttcatgattgtgactcccacacattaacttcaccatctatcattggcctccaaccactggtttcgcacgaaacttaaagggacactcacatttcatactgtcagtatcttttcttacaaaatctttcttcctagacctatactgaccactcctttcacactcaataagaacaatg

SEQ ID NO: 37576 - DNA, 366 bp, Glycine max
tgtctcagcgtttatgcgagacagagaccaacatgttatctatatcgtcaagtaccaagaagagttaggtctagccacggcccacgagcatagaatcgcggatgagtatgcccaagtatacgcggaaaaagaggctagaggaagggtgatcgactctttacaccaagaggcaaccatgtggatggatcggtttgctcttaccttgaacgggagtcaagaacttccccgattgttagccaaggccaaggcgatggcagacacctactccgcccccgaagagattcatgggcttctcggctattgtcagcatatgatagacttaatggtccacataattagaaatcgttaggaaacttgtatggtctc

SEQ ID NO: 37577 - DNA, 432 bp, Glycine max
  unsure (1)..(432): unsure at all n locations
gaagaatgtggaaacctctagaatattctatagatgtgttaaatcttctgaaaccttatggaagagtatagaagaatacggaatagagtagaagagtgtagagattcctagaatgtgtggagcattctagagaattaatctccaccctagaatacaagtaatttccatcattcattgtggaggtggagtagtataaataagagtaggagtcttcattcctaaccatccaagacaagagtgaatccacttcttaaagtgagaaaactagaaagttagaaagcctctttgagagagaagataaatagcttgagaagtctctatccttaagcttgagtgagccatcatagaatgaatcaatnttgtaaacacatccttgtaatcctactatcattntggataatgaaagaatctccatattggagaattataatc

SEQ ID NO: 37578 - DNA, 270 bp, Glycine max
ctatacgagacatcttgccgaacgaagtcaagctatccataacttgcctgtgctccttcttgcatgccatatgtaacggagacgatgatcctgtcatgatcgacgacttggaaaatgatgtcgtaactatactgtgccagttggagatgtattttacccctgctttctttgacatcatgattcacttgattgcgcatttggtgagagacatcacatgttgaggtcttgatcatttgcggaggatgtacccgggtgagcgaaacatgaaga

SEQ ID NO: 37579 - DNA, 306 bp, Glycine max
agaaagaaagccttgtatttgttgagtctaccttcttggataaagaatatttgcttgagcaagaacccgttattaaaggaaataaatattattagaatataaattatgaacttaattaaatatttctcagtgtgaaagttgttctatatattttattaatacaaaattgcatataattaaaaaattgatttaataatgataaaatcatatataaatagttattgtgacgttaaaaatatttacatattaataaacttaaatatgaatatatatatatatatatatgtgattgcttaaaaattgatt

SEQ ID NO: 37580 - DNA, 336 bp, Glycine max
  unsure (1)..(336): unsure at all n locations
tactaagcttaagagatcatccnctcgataacatcattggtgatattcatttgngtaacaactagacattctctgaaagacttatgcaataatatggattttgtatctatgattgaacctaaaaatatgaaagaagccattatagatgataactggatcattgccatgcgagaagaattgaacccatttgaaggaaacaatgtgtggaaattagtagacaaacctgataattatactgtcataggaacaaaatgggttcttagaaataaattagatgaacatggtgtaattattagaaataaagccaggttagtagcacgagggtataatcgagaa

SEQ ID NO: 37581 - DNA, 372 bp, Glycine max
  unsure (1)..(372): unsure at all n locations
gcttctaaggaagttttctcaagaaagcttctcattgatagctacctagtctataaatagaagcatgtgtaacacttgttgtaactntgatgagtgagagtcttgtgagacatacttcaaagttccacttttctccctcttttattccttcaatttcgtgctcccccctctctctttctctccctctttcttttcctccattgaagcatccttccaagcttcttatccaaggctcatcttggtggtgaagctccttctttcatggcttattccctagtggatggcgcctcctctcacctcttcttctttgtcttccgctgcatctccatggtggaaaatcaccattaaaggacttcatttgagctcaaagat

SEQ ID NO: 37582 - DNA, 349 bp, Glycine max
  unsure (1)..(349): unsure at all n locations
ntaacctcatcgtccctacagtctntttatttgggagccaatccaatccttgtgttcggactctcagccacttatgatagccgccgatgatcccattactgcttcccctaagctctctgtcctttcttcacgccgcatcccatgccttgcgaactccttggagtaccctcgcgtttgtggtcactgaaaccccatgcgatgaaaggcatgatgctttcatctgatggcacttctctcatggggtagccaagctgtcctatggcgaggacgggattataattaatacaaccccttgttcccatcaagagaacattnggacatccttcgcatgaagatagaatcctgattc

SEQ ID NO: 37583 - DNA, 518 bp, Glycine max
  unsure (1)..(518): unsure at all n locations
tgcagtgtntttgatcttgattcttgcacnancggaacnaagcaatgtcaagcccacaagagacctactcaggtgaccgattttttattttgtaangtgggacgaacaccgcacattacggtacaactgtactttggtaaaacctgagatgagtgtttttctcagtgctatgaattggctcccctgacaagtgtacctgcgtatatgccccattagtcaaacttttcatgatgtggaatgggccctgcccaaataagctacaaatttccttccttagagagcatctttacttcactttgaactctccatgctatgatgccgactctaaagtacattaattttagccttgagaaatatttccttgaggctctatgcttttaaacccaattcttactcatgccatgaccttagtttctttaatcagatctagtcttctttaatggagtctcatctcttgtcgttgtatagtgtccatgcaagagagtctccatgttaaccggacatgacattaccatttg

SEQ ID NO: 37584 - DNA, 285 bp, Glycine max
tgtcggcagaaaaatatcagtcgtggctatataacgaccgatgtcaggtatttttgtttcaattcaatccctgaataatttttggatattgtccaataggaaatgttcgatcggcgtcatcaggtgatgctttttattttagacctgctggatcggtcatctttcctggccgacatcgactatcatttttttttatcagtgtcggcgaataatgttttttggccgacgagggctgatgtttttctagccgactaaatgagaacacgccactgttggccgaaacac

SEQ ID NO: 37585 - DNA, 231 bp, Glycine max
  unsure (1)..(231): unsure at all n locations
gcttctattgaggttggatctttgagcttcaaataagttcttcaatggtgattntcatccatggaaatgcagcaaaagataaaggagaagagatgggaggaggcgccatccactagagaataagccatggaaggagaagattcaccaccaagagagtaccttggataagaagtttatagaagaagcttcaatggatgaagagaatgtgtgagaaagaccggggggtggggg

SEQ ID NO: 37586 - DNA, 426 bp, Glycine max
  unsure (1)..(426): unsure at all n locations
gcacacaaacacaatntntaatatagtccattttatttattttaaggggttacatacatcacccttaacactacactctaactataataaaacttgagatgagtgttttttctaagtcctaggaattgcctcccctgacaagtgttcctgcttatatgccccattgttcaaacttttcatgatgtggaatggtcctgcccaattagcttacaactttccttccttagagtccttctttacttcactttgaactctccatgctaggttcccgactctaaagtccattagttttagccttgagatatatctccttgaggctctttgctttntagcctcaattcttactcttgccatgaccttagtttcttcaacaagatctagttctcttttaatggagttctcaatctcttggtcgttgtaaagtgt

SEQ ID NO: 37587 - DNA, 135 bp, Glycine max
  unsure (1)..(135): unsure at all n locations
aaaaaagccagcgcacagacaggcacccaacagnagngaacccaaacacaaannaacaaggccnnaaaccaaccncggaagggcggagccagagggagcggggggccgcacccaaagcngcaaccaaaaaggaag

SEQ ID NO: 37588 - DNA, 475 bp, Glycine max
  unsure (1)..(475): unsure at all n locations
ctaagctgttctgattttccttattctgaacaagctttattattatacttggccttcatttaactgtctttgcgcttggcggccacgctcaacaaagtactttcgacacctactgtacgttgatttgaccaatgctgttatgggaatgtttcgacaatccttcaaaaccttattgatacattctgaaaggttggttgtcatgtggccatatcgacgtccttctctatcataagccatcgtccatttttcctttgaaattcgatcaacccatgtggctatggctggactcagttcacgaaatttttgtaaattctgatcaaaaatgtgcttgcaaggagtgtacgctgcataaaaatagttatgaataacaatnttaagtatatatgaaacttatataaacgtcaccaacanataggaaatcttacccaactttttcaacatttctttgtgttggcattattgaatttccgattga

SEQ ID NO: 37589 - DNA, 459 bp, Glycine max
  unsure (1)..(459): unsure at all n locations
gctgcgcacgagctccgattcgtgagtattanattagtatactncatggaatcgattacagggatnggtaatcgattacaggcccaataagccttctggtaatcgattacaggatgttgtaatcgattacaggctgcctgttcaagtgtaatcgattacattgagtggtaatcgattaccagagcctatcctaggctagtttctaagagaatatctatatttatgctcaaatacatcttatatgactaatgttcactactaatacactaaattcaatcattcaattactatatacacaagatatcatanattctatcataaaaaccaaaattcaatacaagatctaacaaaataatctacaatcaaaaggttagatataaatcaaccaatcaatcaaccaatcaatcaaccaatcaattcctaattttctaaatctcttacatctaagagacctaattc

SEQ ID NO: 37590 - DNA, 326 bp, Glycine max
cgcgagctctgaccactgttcttccttcccgcgatgcttcttttcatgtccgcctgagtgggcttatagcctaaaccatacttcccacgatttccttgggtttttatcaggctagttatgccgccattgtctttgcctaaacccatcccgggttcataaccgttccccaacataactcggtccatcattaccgccgcatcggacagacaaggttgcccaaagagggagtccacggaggaaatgctgaccacctcaaaagactggaaagcggtttctaacgattcttctgcggcttccacataaggcatggaggatgggcagcttac

SEQ ID NO: 37591 - DNA, 463 bp, Glycine max
  unsure (1)..(463): unsure at all n locations
aagatactaagctgtcctaaatagtactcaagccttagggngcttgngttactatattaatgcttagaaagccaaatagttactgtatgagtgtttatgaatctgtcattctagcgtatgactgcttatggatatgatgaacacacaaaccacgtttctttgaatgtagggaccataagtgactaggtatttcaatgacattatgcatagcacacacaataatctctaattaaatttgacaacaaggatggtgtgataggtactatatatggcatacaatcatttggtctatatggctggcaaaaggaaccatctactgttcaactcataaaaaagataattaattagattacaaatctaattacgattagattgtggtattggagtaatctaataatatagatttcaacacccgttctcctcttgattaaatgtcaaatggtttatatgaatgtgtctaatt

SEQ ID NO: 37592 - DNA, 425 bp, Glycine max
tcgccgaatcatgactcttgacccatctgtcattgtttggtaccaagcagctagtgatgttggagagattattgtgagttgtggtgaatatcccaacgtacctcttttgggtatgcgtggcggaattagctacaacccgcttctcgctcgacgacaatttgggttcccgataaagacaaaaccaaacaactttgccttgactaatgaattctatcttaaccatggagatcattcgaacaaaagggaaagattcgcacaagcttggagcgctatccgcagactcaacagaagtcaggtgggaaagaaatcagactatgtacatgaatcttacacccagtgggttattgatatgaccaagagctttggcctaccctaccgcttacctagatacctatcgtccaccatcccaccatcatccttggcta

SEQ ID NO: 37593 - DNA, 392 bp, Glycine max
  unsure (1)..(392): unsure at all n locations
acactatgaaactaagctgcactcagacagaaattccttcttttcgtttagattgtttgccatcgcggngctggaggcaatcaaatggcttctcaacctgcgtgtggagaatgtcatcgtcgagtctaactgcatttaggtatccaacagcatccttaaaggggccaatgatctctttgaatttggctgcaccatctgtttatgctgctggaacctcttgcactttatatctgacatcaaagtcaacttctttcgtcgtggtgcanactcggtggctcacggattagtaagatcttttgttaactttgctaatcctcgtttcttcttatctgttccaagttgtattctttatcaatatcccgtgattaaataatatgagtatatatatatat

SEQ ID NO: 37594 - DNA, 455 bp, Glycine max
  unsure (1)..(455): unsure at all n locations
tgagatgaggaagtgttgaagggtgaatcttcctgcntttattgttgaccacagagtggtacctggagatatgtcgtgggggtcaggagaccttgnggacgtcaggtggggtgctattgcccaaaaccaagcttgaccaatcccgacccaacccgggcatagtcggtcagtgagaacctgtgatgtacctaaacaggcgagctcctggcagtcaacagataaaaggaacaaagaccacaaagcaaggaggcttgtggtggctggccagctgtgaattttgtgtaatatgtggattatggcctctggtaatcgattaccaagggtgggtaatcgattacaaggcttaaaattgaagacaggaggctaagatggtctctggtaatcgattaccaaggggtgtaatcgattaccaggcttataaacgaagtcaggaaacttaaggagcctctggtaat

SEQ ID NO: 37595 - DNA, 422 bp, Glycine max
ttcacttcacattccactcattagctagccggctatttttctatttttttattataattattgataacaatagtagtaataattataataacaataatcgttttaatttagtatgtaacttttttatttcacttaatattaaaaaagtaaaggcttattaattgaagttacgaagtggagcataatcgaggttaaaatattaaatccaattaacaccaacggtagtaataactaattagctcggaaaactcacttcaaaaaagaaaaatgaattcgatttgttgttgaacttaagctagcctagcaagcataactcagcttagaaattcatcaaaagctcacttccaaacacatgacaccacataaaacacatagataagatgtggcaattacatatggacaacacctcaaaaaataaaaca

SEQ ID NO: 37596 - DNA, 378 bp, Glycine max
  unsure (1)..(378): unsure at all n locations
atcctgactcaccataatacctgacccagggtgtgattgtcaatccttaccctcggaagcaaaaaaagaatagaggggaaatctccaatcaaagaaaaagagaaggaaaatttcctatgaaagcaaaaaaagaaaagaaggaaaattccccaatcaaagagtgggagaaagcataaaaagaatagaaggaaaantccccaatcaaagagtgggagaaagcataaagaaaagaaaggaaatatcccaatcaaagaatgggagaaagttaaaaaggaagaagaagaatgaatgaaagctcctgatcaaggatcgaaagataacagaagaaatgtgcatagaggtctttggacggacacatcngaacatacagaattgccc

SEQ ID NO: 37597 - DNA, 358 bp, Glycine max
actaagcttgtgaatcgattacactaattggtaatcgattacctttgactgtttctgaataaatcaaaagatgtaactcttcaaaaggtttttgactctttcaaattggttttaagtttttctaaaagttataacttctaaatggtcttcttgaccagacatgaagagtctataaaagcaagactttgttttgcatattgaattaattcattcaatactttacttttacaatcaatcctatacaagccttgaatctctttgaacttcttcttcttctttgtaccaaaagctttctgaagttgtctggttttccaaaccttgaaaacttgcgctattcatcttatcattctcttctccc

SEQ ID NO: 37598 - DNA, 393 bp, Glycine max
  unsure (1)..(393): unsure at all n locations
gaggggggagcacanaattgaaagaagaaaaagggagagaagttngaaattgagttgtgtctcacaagactctcattcattaaagttacaacaagtgttacacatgcttctatttatagactaggtagcttccttgagaagctntcttgagaaaatntccttgagaagcttctttgagaaaacttccttgagaaactagagcttagctacacacacccctctaataactaagctcacctctttgagaagagaagctagagcttagctacacacccctataaaagctaagctcacccccatgacaaaaatacatgaaaatacaaaaaaagtccctactacaaagacttctcanaatgccctgaaatacaaggctaataccctatactactagca

SEQ ID NO: 37599 - DNA, 274 bp, Glycine max
cgctttgttttgcttaaagacatgtatcttatatctctattttatttattatgacataaggaaagatatatggcctaatcgtaagtgccaaatttcactcacagaatttaagctatttgtatatacagaatcaattttagtattgaggcaacaagaaataacaagaatctctcgtgctcttaagtaatacaatctcttatttaatttagcacgcccaatcatcttcaatatatgcatgtgatgcttttcacaataagactgataaaaagtgagc

SEQ ID NO: 37600 - DNA, 396 bp, Glycine max
  unsure (1)..(396): unsure at all n locations
tgaggaagatgcacagtcagaaagcgttgatggcatcatcgaccctccatccctagtcagacgccacgtgaagtggaagatggcccgcacgaagaaaacaggggagatgatgactgaggctgcaaaggaaatcgatgagaagatcgtaagtcattttcaactaaccattagaattatatttcaatattttgtgaatntcatgtacaactgtgtgttttctgtgcaggattcctttgaggagcaggcgacacagggatctttcgtcccccatggacgttaagatgttctcactgctgctattggacatccagagcaccctggacgtgtccgtgctgctaaagccggtatcagcatcaagcaatactttggatcagctccacaaacgtnccacagctc

SEQ ID NO: 37601 - DNA, 434 bp, Glycine max
  unsure (1)..(434): unsure at all n locations
tgttctctgaatgatcaaaacagcctagaagtggcatctactatatgtgataatgctcaagatgaataccagaattaagaataaacagcctaagagtgtgttcttatttgctcctaatttgtttttgcaattgaggacaaaaatcttttccggtttacgtgatcgaaacatacatcagtggcttaaagtcatggtgctgtgcagtatacacattctcatntcaattgcatgatgtataaactgtaaggaaaacccttaagcatttccatcgattatatgatagttaccaatgtttgacagtgttttggaaagccctttcggcatatccatgtgcttgtgattgataccaagttntgaccatgctgcatgctggtactactacaattaaattgcttatggtggtgattacgagaactcttgactcattgaacgga

SEQ ID NO: 37602 - DNA, 313 bp, Glycine max
tcatcaaccatgcctggcacgaaactgatcgagtcttggcgtgcacatgccgcatttagcttgagttcaatcttcttcttttgcacaagtcttcttcgaaaagacctggatacttgcacttgctctaacgctgcggttgtatcgtgagaagggcacgctaattggtactgaccacattccttgtatcatatcttggaaggaatccaagaattgatctctttgctttccacgctctacaccgaacagaagagagcaaactatgttgaatgtgagagtcttcatcatgggcaatacctactagaaatacaaaaat

SEQ ID NO: 37603 - DNA, 412 bp, Glycine max
tcttagtctcacctgatgaaatgaatacgtggttcatcatgcactcctctaatgacaatagcatcacttctggcactaaattgctaagagttggaagccatcttctcaattaaatttctggcttcagcaaaggtcatgtctccaagggctccaccactggcaacatctatcatacttctctccatgttactgagtccttcataaaaatattggagaagaagttgctctaaaatctggtggtgagggcaactggcacataatattttaaatctctcctagtattcatataagttctctccactgagttgcctgatgcctgaaatgtcttttctgatggaagtggtcctagatgcatggaagaatttctccaacaacactctcttaatgtcatcccagctggagatggatctga

SEQ ID NO: 37604 - DNA, 239 bp, Glycine max
gaagcttatttgttgatgaagtcaacgcttccttctgaagatctcaatcttatcgtgtcatgtaacactccaaataaatcacactacaatgatagggattcagatgcaatgcacgcgtgggatgtatatatgagtgtgacttgcaagaattaattggcacttgttatacaaacacgatgcatgttcttttctgtcgctcatgtaacaccccgaacgaatcacacctcaatgacagagat

SEQ ID NO: 37605 - DNA, 461 bp, Glycine max
  unsure (1)..(461): unsure at all n locations
atcttcttcttcactacatcaagaatcaccgggttgagtcttctctggggctgtcttactggtttagctccatcctctaaatttattcgatgcatacatgtggatgggctaataccaggaatgtccgccagggtccagcctatagccttcttatgcttcttgagaactggcaacaacttctcctcttgctcatcagcaagggaggcagatataatcactggaaaactcttgctatcatccaagtaagccgtatttaaattngatggcagaggcttcaattttggtgtggttggttggacagtggtagaaggagatggtttctcagcctttacctcataaagaaagtcagaggtatgtgtacttccctgaacatggttagtcctatctgactctatnaaatcaatcttgagaggtaanacaccaccaccagacattgcatcaatatcactctcagatcactc

SEQ ID NO: 37606 - DNA, 206 bp, Glycine max
ggacacacgaaactaagctgctcgctgtctcaacgagattttgtcttttataccaaaaaccaaagatgaatattgtgttcccttaaatcttgacccatcaataaacctagatatttggttgaattgttaagaggccgccaatgattgatttattctgaatgatgattttaaacttcgcctgaatctattcgcgaatactgatgacg

SEQ ID NO: 37607 - DNA, 327 bp, Glycine max
cacatgaactaacatcactactttcatatttggctatctctttcttacacttgaacatcattggattccaatcgtttcatgactcaagaagttttgactactcccaagtgtcatttttcttgatgatattaatttcctcctccatggcttgtctccaccttttgtgtttcatagcttcttcaaaggtgaaaaactccttgtctacaaaaagacaaaacacctcattcatgacttcagtttcatcatgtatgtcttgaacgcttcttcattattcttagtctttcacttgaactcccttcggaagacgaacttcctgaattgaatgac

SEQ ID NO: 37608 - DNA, 355 bp, Glycine max
  unsure (1)..(355): unsure at all n locations
aaagtgaaattgaagctttctatgatgcttcaatggatcaaactcctcaaaacgtgtgataaaaccagcaacaacacctatgatatcctcttgagttccatgtttgacaagagcttcattccacaggtccctccaccttgtagaaagaaggctggtttctagcgatgattcatttggtagaaatgaaactatgcgacctagaatttcgtctggtaaattactaaacagatcctttcccatatggaatgaatctgttgnttcagtatggtcttgtttggactaagaatacaatgacatctatatatttgtaactntataattcatgtgaactatgcangtcacaacaaggagatat

SEQ ID NO: 37609 - DNA, 444 bp, Glycine max
  unsure (1)..(444): unsure at all n locations
gagaatctncgatnaggatgtatggttacttcttatagatcttgcctacacaatttatagtttatttcgcgtttcattatccatataatgtgctagacaaaaatatgacacactgttttgtcaaatatgatttaaccattgatagaaatatataatagcttacttgattttggtgtaactttcatgaggatagatataaatgttgaaccttctattgtgagcaatatataaattatgccgtacgtcttattgtctaagcacattataaaataaaaaacataataattttttcaaatgattattgcactttaccagtgttgngattggcttccacctaccactttatnttccttattcatgagtctgggaaattgtgttgaagctagtttcctcctatttatctgggctattatatcatgcactctaattattgcatcctacgtc

SEQ ID NO: 37610 - DNA, 206 bp, Glycine max
gatcgatcatgatgagcagcgtttgaagcaagacttatagcagatttattatcacaaaatagcatcacagagggcacatcaacttcaaagtgaataagtaacttgtttaaccacacaatttcactagtaacagaagacaaggcataatattcaacttcagtgcatgattttgaaacagggggttgtttcttataacgccaagaaag

SEQ ID NO: 37611 - DNA, 495 bp, Glycine max
  unsure (1)..(495): unsure at all n locations
agcttgtatntaataatgttntanaaatactttttttattatttgaattcttattcctttattaatatatatgtgaggggtagagggtgtcacacctctgatgatgcccacgaagaagaagatgctcccactgcgtccacgagacccgcacgtgctgtaaccaagcctagatacttacaggattacgttagttagttactcgttcattcattcacgagtttcacatgtaatgcatgcatgcttcttgccactcattaaacacgtgctgataagccgttaagagtttggtagatccccgatttcgttacgacggctacacgcttgtatctcagcaatatataagttgctgagtatctcataaaggaataagaacaagcatttcaataattaggttcaggaggaccctacctcagataagggaacnctatcactctctcatcatctctctctttcccctcctctagctctggcggaacctaacagttacctcttcac

SEQ ID NO: 37612 - DNA, 465 bp, Glycine max
tgtaagaaagcatgaagatgagagcattgtggtggtgatttccctttatgacagcattcagttctgaggttgcaccatgatgttttccttgcacctagatgtttgaatatgcctcataaaatgtatgtatgttgcatataagtaacaaaatgcctcgtgaaatgtatgtatgttgcatgtaagtaacaaatgtctcataaaatgtatctatgttgcatatatgtaaaaaaatgcctcataaaatgtatgtatgttgcatataggtaacatatgcctcataaaataccttgttaatttaggtagcaaaataccttatctatttatgtagcatacataccttatcaaattacgtagcaaaatacttgaatacacattgaaatgtagatttttacgtagcaaaaatactcgaatatgcatgaaatataatttgggtagcaaaaatacttgaatgtgcataaaatatat

SEQ ID NO: 37613 - DNA, 450 bp, Glycine max
  unsure (1)..(450): unsure at all n locations
agcttcaacattcaatatcgagcgtntcgatatatttctgtactgaatcagacatccgagtaaaaagttactgtagtttgaagttgctcacagctaaggcattcaagtccgagcgtctcgatatactgcgagactcaatcagacatccgagtaaaaagttattgtcgtttgaatntgctcagagcttcaacattcaatttcaagcgttccgatattttacaggactcaatcggatagccgagcaaaaagttattgtcatttgaatttgctcagagcttcggtattcaatttcgagcgtctcgatatattacgggactcaatcagacatccgagtcaaaagttattgtcgtttgaatatgaacagaacttcggtattccattttgagcaactcgatatattacaggactcaatcagacatccgagtaacaagttattggtcgttgatttgc

SEQ ID NO: 37614 - DNA, 370 bp, Glycine max
  unsure (1)..(370): unsure at all n locations
tgcactgtctgctgaanaatatcagtcggcgctttttaactaccgatgccgattattgtgttttctattcaatccctgaataatatttggatgatgtctattaggaaatgttcgatcggcgtcattcagtgatgcttcatttttaaacctcgatcggtcatctttcctagccaacgtcgggtagcatattttcgacacgtattggtgaataatgtttttttccgagctgggctaatgttttccttgcggagtaaatgaaaacatgccggtgtcggccgaagcagagcttccgttgagctagcacgataaaacctagccatcctacattgaanactctataagcgacaccaacaacataactttctttacc

SEQ ID NO: 37615 - DNA, 406 bp, Glycine max
  unsure (1)..(406): unsure at all n locations
cttctggcttcaattcatcagtgggctntccttctgtgtccagcatcttgggatgttcccagcctttgatgacagctttccaggttctgctatccagtgatttgagaaaggccaccatccttgctttccagtattcatagttggtcccatccagaattggtggtctgttcactggtccgccttctttctccatgttcatcagaatntatctccctagatctcactcagtgatttcgagtgcctgctctgataccaattgaaattctgatactggggacagatgtcgtacaggatgtcacgacatcacgcttcagaacatgcagattgtctttgactgtatgaacagattaaacaagtaaataacacaagagaattgttaacccagttcggtgcaacctcacctaca

SEQ ID NO: 37616 - DNA, 443 bp, Glycine max
  unsure (1)..(443): unsure at all n locations
tcgtgcannatggagaatgaatcctcaatcttagactagagagttttatgttttgaanagcagaatgagaaatccttaaatcgggtcttatttttattatttcattttctgcattcatcacttgttcttgcaggttccgaggacttcattttttatttacaaatctgagaagcaaaaaaaaaaaaagttgagattacactcgaatttgggggttccttctctcagatatggcgctctttatgatttcatgttccctactcatctttttccttgcaagtttggaggcttcattacgatctttgacatacttacacccaagcgcccacggtggatacgtttccgatagttaacttagatttgtctgtntataggtcttttagtttgatgacgatgatgggaaaggtggagtgcgatgatccttggtggttgggtgcatgagatgt

SEQ ID NO: 37617 - DNA, 208 bp, Glycine max
  unsure (1)..(208): unsure at all n locations
aacagccttctggaggaatcttctggattgcccaagtgggcctggttgctatttgcacccccttttttactaagtgcacccnccttctattttttttggtaatctttttccgtaacgttacaaaactttacgaatttcgtaacgatacttattttccttccacaaggttacgaatccttacggattatgtatttaactctttttagtt

SEQ ID NO: 37618 - DNA, 467 bp, Glycine max
  unsure (1)..(467): unsure at all n locations
tatgcgcatatttccttacgaacgatcactttgtcaagacatttatttaagaaatatgcacccatatacaatcaaggtagcttcattacctagattatttacatgtacttccaaggtgtatctgttatttacatcacacacgcctccttggctgaatttacatacatgcatactcaaagcattttggggtaccaaaaattgcacatgcgctcatcttggtatttctaatacctatacatatacaaacttcacgatgaatcttgactacctacacaataaggtgctacatttcatgcttttttcaagtttntgctacctaaagccgcatgcaaattcaagcatactttcctttgctgactaaaattgtattaaaaggtatatattctttttgtaataacatgcaacatatctatatatcntttttgtgtgagacatcttgactaccaaaaaatatatgtacatacatc

SEQ ID NO: 37619 - DNA, 460 bp, Glycine max
  unsure (1)..(460): unsure at all n locations
agctntntcgcgcactaatactgagctgtatgtttgtgttaaggtatgtggactccaaaattgatatggtagataatgaagctctaaccaagtcttttgtattagaagaatttaaatatgcccttttccaaatgcacttggataaggcgtccggacctgacagattgagcccgaccctttataaacggttttggaatgtttgtggatttgagattttctaggcttgtgtctcctggctgcatgaagggactatgcctcctcacttgaatgatactaatattgtcttaattccgaagaaggagaatccagcatctatgaaggacctttgtcctatatctttgtgcaacgtggtgtacaagatcatgctaatagtgttagccaatacgttgaagcccgtgttggataatgtatctccgcagagcaatctgtgtttgtggagaacagatctattattgataat

SEQ ID NO: 37620 - DNA, 491 bp, Glycine max
  unsure (1)..(491): unsure at all n locations
tatntatgannacatagaaagttgtaagaggtggaattagttgttgtgaccaacanagggtccggtcattatttaatagtcttaacaacaaggattaatattgtgaatgataacaaaattaaggaaccaataagttttaaaacaatatagggagattaaatataaaaaagtgtgaaatattaagtagctaaaacttagttaagtaaaaaatataagttaaaatactctttaagttttgtgtgttttgattatcttattttggtatttttatttttataaaatttaatttaatcttttatgtttttaaaatgagttaaatgattcttttgttttcaactttgggataccatcttgaaccctattatcctaanttgtgacttgaaattntgtcacattagattaatttatatgaaaactatgcaactgatgttcataaaaaanaatggacataaacataataataattacattaaaaaaataaatctaacaat

SEQ ID NO: 37621 - DNA, 484 bp, Glycine max
  unsure (1)..(484): unsure at all n locations
agcttgtacatggcaacatcaaatccttttcttctttctcaacaccaaacagtatggctgcgtgtctgaccttggcctggcaaccatatcaagctcacttgccttaccaatatcacgagcagccggttaccgtgcaccagaagttacagacaccagaaaggcagcacagccctcagatgtttacagctttggtgtggtgttgctagagcttctgactgggaaatcccctatccacacaactgctggcgatgagattatccaccttgtgaggtgggttcattcagttgtgcgcgaggagtggacagctgaagtgtttgacttatagctgatgagatatcctaacatagaagaagagatggtggaaatgttacagatagccatgtcatgtgtggttaggatgcccgatcagaggcctaagatgtctgaagtagtgaagatgatagataatgtganggcagatgatgcagatactcactcatcatct

SEQ ID NO: 37622 - DNA, 468 bp, Glycine max
actcagctggatatgaagattggagaattagactcttgtagatctttatgtcccactgtagacgatctgtagtaagttattccatgggcaatccacgaggtggtcattttctgttcaatggaaattgggcctgaccacgaagctgaaagagaaattcctcggttagatattggtcaaaacttacatatcattctagtttcaagtatttctcaggtagttaacttaagcaatatagaatgtgcaagtgaagtgactagccaaaatagtacctggaggtggagttgtcttgtgactgtgggttggttgaggcttggtaacaacaggcttaggagctggaacaacaactgcaaggaagtaactaaagctgattactatattatcatcagtacaagaaatttaacacgagaggggcatatagcgagaataatgatggcactacctggaagaagctggttatagccaccatga

SEQ ID NO: 37623 - DNA, 366 bp, Glycine max
cactctctccgggtgtcttaaaaggtaccaaaataaacaagatattgtcatgatcatcccaatcaattttcctgtaacacagttaaaattttcaatttactagaataatttaattaaactcaattgcttgttacatgaaaattaactggcaaagtaaacgccttatcgtgtgtgtatgtcagtatgtgtgttgcgtgagatttctgcacatataaacacgcgttacacatataataaccgctatctagtaatggattcataaaaattgtgtgatatatgccaatgaagagctgaatcattatgttatatctgcacacgaaagttattattacatgttaatgtagtccatgttcacttgtatataac

SEQ ID NO: 37624 - DNA, 445 bp, Glycine max
  unsure (1)..(445): unsure at all n locations
agcttaaccaaagtctatactgttttgtttgttatagctctngactactatccttgccttattcctagtgatcaaaccatgttcattcaatttatttttaaacactcatttagtgtaaatgatgttcatgtttttaaaataaggtattaattcccatatatcatttcttttaaattggntcaactcctcatgcatggacatcatccaaaacttacatttgagtgcctctcctatagacaatggttctacttgtgacacaaatgcagtatgctcacaaaataagttcaaagagtgtctagtagttactcctttttctatgtcttgcatgatgtttgctatagaaatatccattggtgctctccattccttaagaagataatcgtgctgtgatgagagccattcttgatgtttatttctcacaaactcttcactcttcgatgaactt

SEQ ID NO: 37625 - DNA, 265 bp, Glycine max
  unsure (1)..(265): unsure at all n locations
aatgctactcttaaaacaaaaatggcatacaacctcctncaataaatacaaacatcaatgtgaatttagagcaagcttatgcgcatacttcttttacgaacgttcacttgcacaagacattcttataactaagaaaaatgcacccatgtacaatcaaggcaccttcgttacctagattatttatatgtgcttccaagggtgtatttgtacctacatctcatgcactctcttggcttaatttacatacatgcgtactcaaagcatt

SEQ ID NO: 37626 - DNA, 382 bp, Glycine max
  unsure (1)..(382): unsure at all n locations
gttcctaaacaaaaataatcgaggaaacttcgccaagaatcctcattgaaaaacctttattcaaacctttcaaagttagtgagaaggctaaaagaaaaattagggaacttagaaaaactaaatccttaattgaaggcgtaggtgacaaccatagtgaattactaaacaagattggtagtttacttaaagtcattcccgataccccccaagcctcggaaaatacttccaaaatggtaacaagaagtacctccaaattaatcaatgttattaatgaagatagtgaccaaaactcagataacacaactgagatatgatcagtgtcagaaaagaatataaatccaattaaattcaaacactggaagacaccctccanattatatta

SEQ ID NO: 37627 - DNA, 459 bp, Glycine max
  unsure (1)..(459): unsure at all n locations
gtacatatatagcaggatgaanaatgttgctgacttctttctaagccaaatggttatttgaacaatgcccttactcagggacatgatcgtttgcttcttcttgccttttttctttagagacagtcttagcaatcgtaaagctgggcagatttgttgaagatagaagcctagcccacattctatcaataattaccacattgttttgtccctcagtgattctctgcataacaaagcaaccaacataatgcttctaaattctatagtttcctactcaaaattacaacttcattcacccaatcataaacttgaaaactatacttgaattggaaagtttaaatccactacattcttaacaaataaatcatattagttatgagagagcattngagcctgctgctntcacttctttaacaacaatttggttggtttcaagctcannaaatattataaatatatatg

SEQ ID NO: 37628 - DNA, 470 bp, Glycine max
  unsure (1)..(470): unsure at all n locations
tctacttatgtggcagggcgggcttccttcactatcttgtctctttcgcgagctctgaccactgtccttccttcccgcggagcttcttttcatgtccgcctgagtgggcttatagcctaaaccatacttcccacgatttccttgggtttttatcaggctagttatgccgccattgtctttgcctaaacccatcccgggttcataaccgntccccaacataactcgggccatcattaccgccgcatcggacagacaaggttgcccaaagagggagtccacggaggaaatgctgaccacctcaaaagactggaaagcggnttctaacgattcttctgcggcttccacataaagcatggaggatgggcagcttaccaagatatcttcctcgcctgatacgatgaccaagtgcccctccactacanatttcagctcttggtggagtgtagaaggcacaactcccactgagtgga

SEQ ID NO: 37629 - DNA, 477 bp, Glycine max
  unsure (1)..(477): unsure at all n locations
agcttggttcccaatgctntgttcaagctctttcaatacctataggtaaatctaggatctctatcagatactatgctagatggcacaccatgtaacctgacaacctcacttatatacaaggtggtcaacttctccaaggaaaatctgatattaatgggaatgaagtgagcagacttagtcaatctgtcaacaataacccagatagaatctaaacctctaggggttctaggtagccctaccacaaaatccatggaaatactttcccacttccactgnggtatctctaagggttgtaacttccctgaagatctctaatgttctatcttagccttctgacagactangcttgcatacacaaactcactaacccctctctttcatgtgggccaccaaaacatcgtctttaaatcctgataccatcttggagcaccaagatggatgctcaaattactccaatgtccttcctctaagatcatc

SEQ ID NO: 37630 - DNA, 471 bp, Glycine max
  unsure (1)..(471): unsure at all n locations
ataagcgcgggtctgngagacanaggtcaagtgttcgcgatatgcgaagatgatgttccgagtaccttggattnggtacgaccatgccctcctgatttccagctgggaaattggcgagtggaggaacgctccggcatttacgcgacgagcataatgtaaacctttacggttttaaaagctctatagttgggcctaggctttagagtttttccttttgttaaagctttgtcgtctttgtttttgaatttataatacaaggatctgtcttcatctgttcctggtctctacccattctcattcatttgcatgtttacttctttntctgaaatggcagatccgatgacgagtccnccgaaggtactaatacctgggacccgcctattgacttcgagcaagatatgaatcanacggaagatgaatgaaatgaggatgtgggacttcccccagaactagaaagaatggtcactcatg

SEQ ID NO: 37631 - DNA, 403 bp, Glycine max
  unsure (1)..(403): unsure at all n locations
gcaagcttaagagatcagacccctccctattgtgatattacacggagaaaagatttttttcaaaaaaagagcagagaatgaagttttcagttttcagcctccggatatctaggaggaagaaaggaaagaagatctgaaaagggctaaatgacattcaacccgaaactaaactacaaaatgaaaacaaagacagaagagaaaacaccgaacgtttcaaatataatgacttggtaaccagagaaaaagtaattactggtctccaaagtctcagaagaagaagaaaaaccaagagaaatgtagatcggagaanaaaccaaggcggtgagtgagttgacagagaaatctcactttcgttctagcagcgctaacgagtgagtggatgagttcagattcagatagttga

SEQ ID NO: 37632 - DNA, 476 bp, Glycine max
  unsure (1)..(476): unsure at all n locations
ctcagctacaggacagggattttaacttgttcttcagtatcaaacaactttcttcagcatgctgtggaccatagcagcttaatttctggagacactcgtgaagttgatcatgctntatctgttaagttgcaagttcaaaagttaataatccaagcctcctcacatgaaaatntgtgccaaaattacgtaaggtatgatctcttaacttagtaattntcggattaaatatcaaattttacacacacacacacgactggtgaaacatgggcttatcaatctttgtctcctttattntatctctntttgatgatatcaaaaggaactntcatgactntttaatgtattggtttgttaatattagaaatataatataaaaccattcgtgtggcttcatctgtcagcttatagttttaggataattggttcatgacatggaaatagagcttctatgacccattggtcttgagtttgatcct

SEQ ID NO: 37633 - DNA, 405 bp, Glycine max
  unsure (1)..(405): unsure at all n locations
gcatggttatttccagtttcctgaaaatatctaagaatcttgccaaatggcggttcttctccttcttggaaggtaccacaggatatgatacttccgcaccttcgttcanagctttttctcttttcttctctctagcttgttcacttctactcctctcttcattcttatttttttgatctttntcaatnttttcattttctttntctttttctacttctntttctttttcttggtcatttaattctttnttcttgacgagttattgtttttcttttttctgattactttcacctctcgcatcatctttctttntatcagtacctttcttttcagcaactgtcttcttggatataacactatcctcattctgcgactccacaaacctcttactccttgcattacaac

SEQ ID NO: 37634 - DNA, 314 bp, Glycine max
  unsure (1)..(314): unsure at all n locations
ctcacaagctgctcanagaagttcataagttgtaaaagctatttggatgcaagtcaaagacttgcttttatagactcttcatgtctagtcaagagaaccattggaagagttattatcttgagaaaatcttgagaaagccattggaagagttacatctcttgatcttgtattcataacttgccgcttggtatcgattaccataaccatgtaatcaattacacaatgcattgtatgacaagatgtgactcttcacaattgaatttgaatttctacgttcagatacactggtaatcgattaccaatatattgtaatc

SEQ ID NO: 37635 - DNA, 446 bp, Glycine max
  unsure (1)..(446): unsure at all n locations
cttgattcgcaacaggcatatggatcaacttgatccgtaacaagcttgcggatcatctatgtcaactacggatcaaatatagcttctgcagatcaacaaaaccctatgcggatcacgtcatagcatacacggatcaagctgaatgagatgggtgcaccagcaataatgctaggtgcacctagcaacacccatntaaatttcgtgatctattcacaagtttccgtgtttcccatcgtcaccgcttagcttaagggttttttaaccaagattttcaaaatctatctataataatttatctatcccaaaatagatccgaagcccacatcacgaaataagattggttntcaagcttcngataacacatattatcatttgatgtttcataaatggttagtttgatacaaatctaaatatattcagactcaactcctataaaatatatttat

SEQ ID NO: 37636 - DNA, 432 bp, Glycine max
ctcagctggagatgaggaagtgttgaatggtgaaactttctgctcttattgttgaccacattattggtcctggagatatgtcgcggtggtcaggagaccttgcggacgtcatgtggggtgctattgcccaaaaccaagcttgaccaatcccgacccaacccgggcataggtggtcagtgagaacctgtgatgtacctaaacacgcgagctcctgtgcctctacagattaaaggagccaagaccaccaatcaaggaggcttgtggtggctggccacctgtgaaactcgattgatatgtgagatatggactctggtaatcgattaccaatggtgggtagtcgattacagggcttatgattgaagacaggagactaagatggtctttggtgatcgaataccacggagtgtaatcgattaccacgcttcgaaacga

SEQ ID NO: 37637 - DNA, 451 bp, Glycine max
  unsure (1)..(451): unsure at all n locations
tgcagcttaatcaaatatgttttcttgttgtgttgttattaacatctaggaatgcgtgcttgaagtcaactctcatattagaacttagaagaagctgtagaaatgcatgaaggtaaatgaaacagttatatatgcagacacaaatgagtggatcagtcgtcacagccattatagttaaattatgcattatacatataaccaaaagtagtacactacacatgaagacaaaggaaggtccaattaatataaatgtgataatatatttgaagaataattttatactccatatagcatttacgaatttgaagttataggttcccaagaattcatgctactacaagtgcctntaattatcaatcatacactcgtagaacaacgctcagtgatcaatgttaaacttacaggagccaaagaagtaagaagtataatcagtaaatgtgatcactcacaa

SEQ ID NO: 37638 - DNA, 436 bp, Glycine max
  unsure (1)..(436): unsure at all n locations
tcaccatctgatgtggaanaccaaaatcaatctgctagactttataagnccaatctacattgtcataagctttcttcgtctatcttaaagcagcatctctatgcttccttttggatatgtacatgttatgtaaaatttccttgagaacaatggaattaccaatgttcctcttcccggtaaacaaaaactattatggaagcatccaatgatatcattcgataaaggccttaatcaattaacaatgtctgtgctataaatttatagattgtattacagaggccgatagacctatactccttgagagtatctagattatccgcctgtggtgttagaacaatcaaagcttcaactatttcatatataaaaaaaaagtgtctactatttctgtggaggaggaatcttatattagttaaagaagattacctcttataaacat

SEQ ID NO: 37639 - DNA, 383 bp, Glycine max
  unsure (1)..(383): unsure at all n locations
atccttagagcaccgcggctgcagctgaatgaggaagtgtaaaggtggatcttctgctttattacgtgaccacagagtggtacctggagatatgtcgcgggggtgaggagacctcggggacgtcaggtggggtgctattgcccaataccaagcttgaccaatcccgacccaacccgggcatagtcagtcagtgagaacctgtgatgtacctaaacaggcgagcttctggcagtcaacagataaaaggaacaaacaccacaaagcatggaggcttgtgtggtggctggccanctgtgaactttgagtgatatatgggatatggcctctggtaatcgattaccaagggggggtaatcgattcaaggctataaatgaagacaggag

SEQ ID NO: 37640 - DNA, 434 bp, Glycine max
  unsure (1)..(434): unsure at all n locations
gacattatatagaagtaccttcgaggttcatcccanactatttaaagtgagtgtatctgntgattttcaatcaaattggaatgacgaagatgatactgtgttcttatgtatagaaaaatcaattgtaaaactaatttaaagaaaaaatataataaaatgaaggaaccgaaatgcagttgtgctcgctggtacacgtcccttgaaggctcttgattcacaagcatcttgccaacattgatagaatataaaatgttcataactcgtcatgagactcggttggattctgccgagttaaaaataaacacaagttaattcttgaaaataaaataatcaaattgatgaatcgcgaattgccgaactttgtgaacattggttgtactagaatgcctcattcaacgcataaacaaaatgcaattcctggtcataccatcgta

SEQ ID NO: 37641 - DNA, 437 bp, Glycine max
  unsure (1)..(437): unsure at all n locations
agctntgcggatttggtcttcgccagtgtaattatctaagtggatctgaaaagaggcaaatttaatcatcctgcttagacgaatgagaaaactggggcaaataaagagggtgaggatgagggagaaacccatgatgtgactgccattcctatacggccaagtttcccaccaaacccaacaatgtcattactcagtcaataacaaaccacctccttacccaccacccagttatccacaaaggccatccctaaatcaaccacaaagcctgtctaccgcacttccaatgacgaagaccacctttagcacaaaccaaataaaacaccaaccaagaaatgaattttgcagcgaanagcctgtaggattcaccccanattccggtgtcatatgctaacttgctcccatatctacttgataacgcaatggtagccataacccct

SEQ ID NO: 37642 - DNA, 436 bp, Glycine max
  unsure (1)..(436): unsure at all n locations
aaagcccactccatcattaggattagtttctgacatctcaaacaaacaaatcaaacgtaacaagacaattatagttgctgtttgaatacctcacccactcaagtgtatcacacaattatggcttttctctaatgaaacactcttgccttttaccactctaattccccttgagttcttaggcaattcaagagattatggccacaacaaagaacaattcaccaatatgtgtaaggtaaggctagacaaggaaaaggttaaccaagaaaaaggctaacaatgtttttaggcacaaatgaaggaaataaaattcagaatttaggaattcaagtaacaatccttcatgcaaccaatatattaccttaaagagtttttgtttttaagttcttcaagcatgaaccattcagcccaatnntttttttnntttaatttgcttata

SEQ ID NO: 37643 - DNA, 423 bp, Glycine max
  unsure (1)..(423): unsure at all n locations
agcttcatgatgataaatcaagttgattcatgttttntgatgataacaaagatgatgacaaaaagcccaagagaatgatttcaagattgagtcaacaagattcaagaatcaagagaagtttgatttcaagattcaagagaagatgaattcaagtttcaagagaagaaatcaagaagacttcacacgggaagtattgaaaagatttttcaaaaaacaaactcagcaccagtttgtttttcataagagtttttctcanaattntctaagttaccagagtttttactctctggtaatcgattaccagtttcctgtaatcgattaccagtagcaaagtttgatttcaaaagctcttaactgaatttgcaacgttccaattgatttcaaaatggtgtaatcgattacaagatattggtaatcgattac

SEQ ID NO: 37644 - DNA, 276 bp, Glycine max
  unsure (1)..(276): unsure at all n locations
gtatgagaaaccgcaacaaattgacataatatataacgcacaagacgggaagggtaaacgaagcacatcaacgtcggagcaacaaagaanacactctcgtactcatcaaaatcgcagctttagtgtgttcgtccaccttctcttgcaccaaagaacagaggaagttaaatgaagaaaaaaaacaagaagaaaaaacgcagaagacgggtgggcaaatgaaaacttacgaagggtccggtcatcacaatcgcagctttaatgtgttcggccaccttc

SEQ ID NO: 37645 - DNA, 483 bp, Glycine max
  unsure (1)..(483): unsure at all n locations
agcttccaccaccacttcacaacctcttcattattcagttcacacccgtgaccccaaaaaaggctcggagatacacgccacagtgtcaccgaggtctttgcctacccaggtggttgctccatagagatccactaagcactcacacatggatagtgtgcctctcatagccatcactggtcaagttccgctgaaaatgataggcattggtcctgttctcatggatattcatgaaatcgaatggaagcatgaagaaattgagcagaagcagaaaagagttccgtgaggaagaagaaagagaatttgggatagaaaatcaactttgattcaatgaattattgcttctatgtagtttagttgttggtacaagcttttatatatataagaggaagttagttacaagtctaactaacaactaacaatcataactaactaccaactactttctaaccatagntgactctctaatgatcgacttctaacatg

SEQ ID NO: 37646 - DNA, 450 bp, Glycine max
ttcagcttcacccacctattgagcacaattaatcatggagaatcttctgaagtcataaccaattaaccattacttaaacatattaacataagaaataaatgagttaaacaaggatactgctagaatatatgaaaaattatccaaaaatatcttgattttaattttaaaataattcagaatatctaggattaggactacctgtttgggattaacttccatattttctaatgtttcatgatttgtaatcatacctagcagtagtttaaataaggattttgtaacacatataacacatcatatcaaatcaattaaaaagtcaaatttccatgtataaattttcttttatttccctttcctccctctatacttaaaaccttataattccgactgatacacagatagagacatacccattttgatgtcaaggaagctgctgtgacattaaaaaat

SEQ ID NO: 37647 - DNA, 134 bp, Glycine max
gctaccaaaaaagaaaaagaaaacaaatgttatggtttatggtcacagaaaattagatgaaggagcatatacttaaattatgaacaatataaatcaaaatcaaaatgcatatgaataaaaacacacagaactgc

SEQ ID NO: 37648 - DNA, 442 bp, Glycine max
  unsure (1)..(442): unsure at all n locations
ggagacttacaaaaataaggtgggatgaattgaaagataatggaagaaagatatattgaaatggattggccaaaatttcagaaaaggatttcccttacattggctatttgttttcctctacttcttgttggtttcttcgtgcatgaggaaacaaaatgtttcctttcttttttatatgcttcaccaactaattggccaattagaactcacttgtgcgcttggcgcgaccctcgcgctgagcgcgcatgttcaactggatcaagtgactacgtgttaagcgcaagatgcgcacttgctcgtgacagctgtatatcaatgtggctccttgctctaagaggcttgcttgggttgaacgattctgactcgctgagtgaggaggtcacgttgagcgtgacacttctattcatccatcctctntcatgtngttgttacaactcaactc

SEQ ID NO: 37649 - DNA, 437 bp, Glycine max
  unsure (1)..(437): unsure at all n locations
agcttgttctagaacgtattngcattgtcttaaaaacaaatgaatatttgtcttttgaaaagatttacaaaaaatgaattgattcaaaattcaacccacttcttatatttccctatgttttatagntatattaaaaaataaccatgagacattgaaccatcaacagatctcatttaattttatcaagaagagacattgaaccatcaacagatccattttaattttatcaagaagagacatcttcatgatgcaacttgaaaaaaaaaccatcgtttaacgagtgagacatgangaagaaaaaaactaaactattaaanaggagaaaaaaaaggaattaaacataatgttcatgggaaataaaataattattattgaaaataaagaccttatagcatanaaggatatntatattcaactaatatcataataaacttatt

SEQ ID NO: 37650 - DNA, 463 bp, Glycine max
  unsure (1)..(463): unsure at all n locations
tttatcatatcatagcattggttgttttatttttatttnttacagttagagaatatggttattttacaacatcaggtcaaatgaaaaattgaagttaatcattagcagtatttgcttcaattgcatccctttttcttccctttctgattaggaagatatttagttttcgaattgataaaattctctacatagattacagctcttaatctaatcgactgggtctgtatttgagttgcaaatgttaaatcctaanataatgttcagtgtatttggattggggtttatacaaagttcaatgcaccttacgctgaagtagtccttttgcanacgcaagttcaagagtctccaaacagagaccaaacatgctagccactactataatattgttgataataatattatgatttatgtggttaatcatcaattattntaacaccttcctactagctactactagtagctc

SEQ ID NO: 37651 - DNA, 387 bp, Glycine max
  unsure (1)..(387): unsure at all n locations
agcttctagtgggacatcttgacttgctctccaatctgacattcaccacagattctgccttcttctattttcagaatgngaatgcctctaacagcacctttgacaatgattntcttcatgcctcttaagtgcagatgtccaaatctttgatgccatattctgacttcatcttctttggaggatagacatgtggaggagtagctggtttcttggggtgtccataggtaacaattgtcctttgatctgctgcccttcattacaacttcactcttctcatttgtcaccaagcattctgactttgtgaagtttacattgaatccttcatcacacagctgactgatgctgatctaagttgcagtcagtcccttcaccagccagactttgttc

SEQ ID NO: 37652 - DNA, 458 bp, Glycine max
  unsure (1)..(458): unsure at all n locations
tggagtttccaagcgccaattcgtcttcttctntagtccagtcttcttctggcttcaattcatcagtgggctttccttctgtgtccagcatcttgggatgttcccagcctttgatgacagctttccaggttctgctatccagtgatttgaggaaggccaccattcttgctttccagtattcatagttggttccatcaagaaatggtggtctgttcactggtcctccttctttctccatgttcatcagaatttatctccctagatctcactctgtgatttcgagtgtttgctctgataccaattgaaattctgataccacgggacagatgtcgtaccggatgtcacgacatcacgcttcagaacatgcagattagatgcgtccgtntgaacagattanacaagtaaataacacaagaagattgttaacccagttcggtgcaacctcacctacatctggg

SEQ ID NO: 37653 - DNA, 483 bp, Glycine max
  unsure (1)..(483): unsure at all n locations
agcttaacaatcatgcttatggtcacacacttatatgattaaaanaagaattagtcaacacatgttaacacattgattaaacacactcatttgcaacacacctgcaagttcaaggtttttgacaacgttaatacacacatcaagttttcaagaccccttgtatcacctaacggcttgccatgacatcctaccgcacttcatgaattatagagatggctagtcttataactcatgactcaacagtggatttatggtataacaaacattaaggatgcaagacacatacaagcattattatcaagtctcatttgctcatgcaaaagaaagcacanataataattcaagcatgctcaacanagtaatcatangtaaccacacagagtggcaccagaatatgataagcacataacacactagccgaaaaattcgacctgctctgataccactaaatgtgacaccctctacctcatacatatatactaa

SEQ ID NO: 37654 - DNA, 441 bp, Glycine max
tatctcatggcagacactctaatatcagcagttgcaaacaatcacagtttacttggtgccaacttatagtggaattaaacaaggaatatacttaaagtgcataaaaaggtaaataatgctcacaataggcaatcctagcttatatcttaccctttccttgatgtcacccaaagtcggcaagtacaacttataaaattcctctctaaatgcaaccacaaacctaaataaagtttaaaaaccagcaagaataagacaattaaaatatgtgatttgtataaatttaagggacaacaagatacatctactatattatagtattttcacttttaaaggactaaagacaaattattgaccataattgatatattaccatttgcatatcactaactccctcttacttagttggtctctcaacttgcaattacaacttcattgcaactc

SEQ ID NO: 37655 - DNA, 289 bp, Glycine max
ttacacactcgcaagagacatgaactatccttacagattgctcaatgatccttttcttcctactgacatgagatttttttcaattgctaacctctctagatactctcttattatcgctgctgtcttgattgcaagtattccttatatgtcatgtttgatgcgttaccaactcctgccctcctggagtactttctacgcaggagagttcaacaatacaactgctccatcttatatgtgacatttatgatatggtaatatatatcaacctctctctctctcaccacataat

SEQ ID NO: 37656 - DNA, 227 bp, Glycine max
gctcgatccgtcacctattcttaattggaatgtccatcttgtaattcgactcctacctactgcaatcttatctacttgttttatatctcttcacctccttaccttgtcttatctgcttccgcactcatatccgactcaattcctcctccgtattctttactcactcctcctacaaacctctctagatctctcatactttctcttagctctcacgtttatacgtatcg

SEQ ID NO: 37657 - DNA, 132 bp, Glycine max
gcagcagcttacctagggaccagcaccagtggtcgtttcgttcaacgcgactcgaaagcaataaaacctgaacacgccaccttgccagattcctattaattggagacaggtgagatcctactcgaatcgtaa

SEQ ID NO: 37658 - DNA, 411 bp, Glycine max
ccgctactcccatacatataaaaacaactcttgaatctggcttctcatccagccatagtaatatcctatcatgatgggcttgatccacattttggttatgttgacccttcaaaataatcaatggaccaacagcatacattgggggtgtgtgaatttgaccatcacatattgcattaatagcatactgctctcactctgaaaaagagatatcaaagatccctttggagtccttgtacctctgagcaatgttataattagtagcatatccaccttgtttgtttaaaacagcatcaggcacaacactataatgaactggatcagggagacccggttccaaccactgatgatcagaatcatcgaatgcatcaccaactctacgtctctgaagggataacatgatattcaaaaacc

SEQ ID NO: 37659 - DNA, 490 bp, Glycine max
  unsure (1)..(490): unsure at all n locations
agctntaactgtatagggagatcacaaattctctttccaaganaatacagtagcaataatagtacagaaaatgaacagtgagattatcattaagagaaacagtactgctgatcagcaactaacaaactaaaggacaaactaaccatctaacagaataaatgcaactganattacagtgaaatgacaaacataaaatgtacagtcttatctctaataggtaagggattgaaatgtgctactatgtttaattgcaaataatcgatgtgatcagaaagtgccattctaaaatgtgaagtgtcaacaattagaaccctgtgtttcggacaaaagtggtatggatgctcactatcccccactagtcattctttgggagggtttcaaggtaggtatcataaaataatcaagtgtaaagaataacaaaataagttgaacgaaacacgcactttagccaattactaatttactatctggacagccataacattaaaag

SEQ ID NO: 37660 - DNA, 301 bp, Glycine max
gctacacactctcggaacgagtgtgccggcgtacgggaagagaatgcacctaccgcaagagccctcgaacaagagaccaagagggctcgcacggaagagtatggccgtaacaaattacgcggagctctatggcgtagcaatagtgaactcaagctgcggagggaagacagagaccaggcgcgagcccatagcatggctctgacagacgagttaatttgcttgttcataggccaaaagaagtttgtctcagcgtgtatgcgagagcgagaccaacatgctagctatcatcgccaagtaccaa

SEQ ID NO: 37661 - DNA, 461 bp, Glycine max
  unsure (1)..(461): unsure at all n locations
agctntataacttaagaaaaatttgaatacatattagtttaaaggtaagagagaatgctatgttcaaaattcatgcctttaccactttaaatactctggtatttacaggctttagtagcagataattcttatctctatatggtttttattttgcgtcttgaccatattgtctgaagttgggtgtccattggagcatttaattcaacaataaatgaattttaacttctagtcactccaaactcacaaaacactctagttatctcccttgatgagcactctgaatccgacttcagaggtcaaatcaccttttgctcagaataactctacacacaataatgacatgtctttttatgtggaaggagaagctaatcttgacttttctcttactntcttcactntgacatatcctagagagaatattcaaacattccctgcatagaggatcanacgaatagagcatt

SEQ ID NO: 37662 - DNA, 452 bp, Glycine max
  unsure (1)..(452): unsure at all n locations
tacggacctatgaatactaagcttgtagggagccacagagaatggtgaatcctaccattcttgatatggtgaagaaagaggtgatgaagctactagctgtagggatcatttagcctatgttagataaaacttgggtttcacctatccaagtggtccctaagaagtcaggcatcattgttgtggagacttaggataatgagttgatcccggctagaatgaccaatagttggcaagtttgtattaattataggagactgaaccaagcaactcgcaaggatcactttcctctctcattcgtggatcgggttttggagaggttggtaggtaaatcacactatngatttcttgatggttttataggttacatgcagattcatattgcattggaggactagcataagaccacattcacttgtccattcgacacatttgcctacaccaagatgcttatg

SEQ ID NO: 37663 - DNA, 499 bp, Glycine max
  unsure (1)..(499): unsure at all n locations
ttaagcacctgagctgcagctgccttgcccttgatatattgagggacttatggtcactatgaatgacaaattccttgggataaaggtagtgttgccatgttttcaaagcccgtactaaggcatacaactccttatcataagttgaatagttaagggtaggaccacttaacttttcactaaaataagcaattggatggccttcttgcatcaacacagccccaatcccaacatttgaagcatcacactcaatttcaaaagatttttgaaagtttggcaacgcaagtatggggacattagttagcttttgcttaagaacattgaaagcttcttcttgtttctctccccatttgaaaccaacatttntcttgagcacttcattgagaggtgctgccaatgtgctaaaatccttcacaaatcgtctataanaacttgctaagccatgaaaactcctcacctcggtcacagacttangtgtatgccattcttgaatagccctaac

SEQ ID NO: 37664 - DNA, 360 bp, Glycine max
  unsure (1)..(360): unsure at all n locations
aatgacccactaacctagaattaaaattacttaatgccattaacctagggaattaaaacaaactaaatggctgagtgtaactgaaattgttggcaaccaaaagtcacccccaacagccaacaagtcaaccaccatttggtctcccaaaaggctgatgcctaggttgccaattgggcccttattacaacttgaactaaagccctcttagttgattaacccaaaacatatttttggtcagccaactntacaaggattgtgccattatttatacaaactatacactctaaaattgaaataaagtggtgtcatttagtcctccatttgtgccatgatacaaatcacaaccttggacagcacttg

SEQ ID NO: 37665 - DNA, 498 bp, Glycine max
  unsure (1)..(498): unsure at all n locations
agcttctatatagctgaaccattntatcaataatcttcttgttgagttttattcagaaaattagagtttatctcttttatcttagtgagagtgattctcctaaattcttgagtgattcaagaacaccctggctgtatcaaaggactttcacaacctttgtgtgttgccctcgctggaaagagagattctttccttcctatcatctccacccttgttctttcaaaccacaattccagaaaatccacctctcgcccaaaatatctcgtgaccataactcccattntacacactcaaattaagtgattcttgagcctaaattgaatatcaaaacgagaccttntcacctcgtttggaatcacctcatttggagccctgtagcttccgttattgccatttctatatttctgtccagccaccacttaacctacgttntaccatcccattcatccattntatgcccgaaaccaccttattaagacccacgagattaaccacctt

SEQ ID NO: 37666 - DNA, 268 bp, Glycine max
  unsure (1)..(268): unsure at all n locations
attcacgcgcataatatatccagacgctcgaaattgaacaacgaatgctctcgataaaataaagtggtcataatttgacacacggaagtccgattcaggcgcatactatatcgacgactctctanattgaacaacgaaagctcttgagaaattcaaacgtgccaaaccttgtcacacggtagtccgattcacgcgcatattatttcgagactctccatatgatatacggaagctctcgagaaattcaaatggtcatatacttatcaca

SEQ ID NO: 37667 - DNA, 443 bp, Glycine max
  unsure (1)..(443): unsure at all n locations
agcttgtcttgtaagataatcatagtaatttatatctctatgtgaccaattggtggcaagcattaaatgccccanaaaagacatctcttcatcaatatgtagaagcaaagcttcatgatgaatcaagattgattcaaagatgttttgatgataacaaagatgatgacaaaagtgatgacaaaaagctcaaaggtcaatcaaagaatgagttcaagatgttcaagatagaatcaagagcatttcaagattcaagaggaaagttgatttcaagaatcaagaatcaagattcaaggatcaagctttcaagaatcaagatcaagattcaagactcaagattcaagaatcaagagaagacttaatcaaaataagtatgagaagggtttttcaaaaactgagtagcacatggatttttcccanaaatgtttaccgaagaagttttactc

SEQ ID NO: 37668 - DNA, 478 bp, Glycine max
  unsure (1)..(478): unsure at all n locations
ttctaggtattgatcctttcaagtactatccatcttaagatactttgcctgaggaggaagaatatacacttggagtgtatggagacaaggaactagtgctcaaagactttcccacaaggtagactattgctcctaatcccaacagtcttatattcaagcataggccaacaataaagctttcttttctttcctatgcttattttctttcactcgtatctgatcttgccattnttttgttgaagagaaatacttgagggttcatagtaccaaaaaggtgaaattgagggtggggagattggatgataagagtgcacataacgaagaaggttcggaaaagggtgaaggtattacttcccttttggtgagttgtgcgtataaaggtagcctacttcattatccttntattgaangggaaaagaaaggtagtaatgaggatttgtctacataaatgttgatggatagcanagcctatagtcta

SEQ ID NO: 37669 - DNA, 494 bp, Glycine max
  unsure (1)..(494): unsure at all n locations
agcttcacttggtcacataccaaagtgtgacaatctcttgccatccttcaatggggtgcacgatcgatcctaaagccttatgttttcttgttgtgcagaataatcaaagtttttaaaaagaaaggggaaaatcctaggatcaatattttggttgattgattaaacgttaaacggctttattgtcgtcactccaaaattgtcaagtgactaaatcaaataaaacatatactctgagggagtccccaaaaatatgtgcaaaaagataggatgaggtctcatgagttatcacgtctttcaaaaaaagatagtccatttgtgacttccaaaaaaagaaaaaaaagcanaaaaaatcaaatcacaatcacaaaaataggagagaatgtcatgagcattacataattnttatgattcannaacctttgcattactagcatttcatgatgaanggtgcatggatctgcatcctaaaaatcatgttcatattanngctatag

SEQ ID NO: 37670 - DNA, 443 bp, Glycine max
  unsure (1)..(443): unsure at all n locations
gctttggagagaacatgggaccactcattttatttcnaaaggaagtcgtatctagtcaaggtcttagagaccatacaagtttcctaacgatttctaattatgtgggccattaagtctatcatatgctgacaatagccgagaagcccatgaatctcttcgggggcggagtaggtgtctaccatcgccttggccttggctaacaatcggggaagttcttgactcccgttcaaggtaagagcaaaccgatccatccacatggttgcctcttggtgtaaagagtcgatcacccttcctctagcctctntttccgcgtatacttgggcatattcgtccgcaatcctatgctcgtgggccgcggctagacctaactcttcttggtacttggcaatgatagctagcatgttggtctccatctcgcataaacgctgagacaagcttctttt

SEQ ID NO: 37671 - DNA, 404 bp, Glycine max
  unsure (1)..(404): unsure at all n locations
gctttctcataagtgctaaaagacattcccagccaggattaactcactctaacctccacataccactaaatccagatttggccttccaactctcaaagactcactctttntccagtcacaacaacatattctcaccttctaaccctaggttaactctacccttcacctctaacagtgtttcataagtaatttcagcacataaacatcacaagcatcatcataaaaaccctaaaactgaatgggtgagcttaactcatccaaacatggtaagtgcaacatgctttcaacacatttcttcacaaaacccatcatatctgccaaaacccaatacccacgaaaatcaagggagaaagaaatccacccanacctgaaatttcaaagcccacacgtagagatgagcttca

SEQ ID NO: 37672 - DNA, 424 bp, Glycine max
  unsure (1)..(424): unsure at all n locations
actcagcttataaagtgtatcttccatgtttgatgtgtttaagttgactnttgnggtttgggaggggtggattctatagaactactataagagtgagggaaagttagcatcttggacccaaagacttctcttttccttactttcttcatcacaaagcaagttcattgagtttgatagagcctttaactaacattaatattatgttatgtgttgaatcattgatatgagttttccccctttctgttcctgatgatttggggctntgtgacttaagatgaaattatatgaatntgtcactataatatgttgttttatccttgaaatagtcttttatgtgttaagatttgtccataaaccattgaggtatgaatttatgtgtttgggaggccttgggttctgctgaaaaccctattatgacatacta

SEQ ID NO: 37673 - DNA, 315 bp, Glycine max
  unsure (1)..(315): unsure at all n locations
agctnttgtcactacacccatatctggtctttatattgactagacttaacaatgctgacaacagtgtttataacatggtgcacctagatacaaacgctctttcgaatcactttgcaaagtatcatacataggggcctgtgctagctgaaaagactcctgttcaagatcacgaatcatatactctaagcgatctcccatttctacatcaaacggttgagatcggaacccactcaggatgtttgttaattcaccatgccatatacacgttgtataattcttcttaatcctatcacacagaatatgttaccgtatgtc

SEQ ID NO: 37674 - DNA, 308 bp, Glycine max
  unsure (1)..(308): unsure at all n locations
tttttaatagtaccaaagaactacaggtatatgcactcattctgttagcttctagtgtagctcaatttctggacaaaatttgtttccaataccacgtccaagctaaatgttgaaacttttgaattgtgttccattaggtttccttgccaacagcactacaggtcatgaaatttatnagtgttctatgaatagattacatgccacaaatcacaatgtactacaaagagaaacaaacgttctttatgtggtgcatgttcctaagactgctacataatgtttaacacaagagacactccatcccttatcat

SEQ ID NO: 37675 - DNA, 627 bp, Glycine max
  unsure (1)..(627): unsure at all n locations
ccatcccgtcactatcctcatacacacgtcctaatangttntgtctacntcactantantcccctnttnngnnnntnaacagggttgtgactcgatgcactggcagngcnncgnanagnnnaccagcaggcatgcgaactngcataantaaacaagggaacaatatccttctttctggcaccacacaagctaggatggaaatacacttgaggcacaatacaagatcaaagcctatgaagatgctttatatgagaagcaccagacaaagggatgctgctcctataaagagtgcggcatgcgccgaatagaaagaagaaacaagttggcttactctctcccactacccagtaagaaataaagagattggcctaacagcgctgccttgtgttttatgagacagttaacagcataacacaatctcaaacaaatatccagtcccgaacagaaaaggatatcaacgaccaagatacgtacacgagaaacatccataagatgagaactcactcatacaagacaagacatattaataaggattgccaacacagaatataaccacagtgcaacaggcacatngcgntaccgattacatacatacacaacagcgggctctaaaaaaccatcactccc

SEQ ID NO: 37676 - DNA, 229 bp, Glycine max
  unsure (1)..(229): unsure at all n locations
attagagagccgcctagaaggttatgagatatttacatggaacgaaagatcacatgtntacatataagaggtctgatcaccttgagatgattaggtattcaaactcaaacttttctgaatgcatggatacaaggaaatccttccttaggtgtgtatttcctttatctagaggaacaatattatggaggagtgcacatgcattcgctgatgctacatccactatggaagc

SEQ ID NO: 37677 - DNA, 157 bp, Glycine max
  unsure (1)..(157): unsure at all n locations
agcttgtaagttgtaacaatcaaatattcttattctgtctntagttacgaagcacaaataattcacacttgattcatattagtcacgtatcgtcttcaatgtcttgtcttgctcaagtcgagctgggcctagagatgaaatcacaccacatttaaac

SEQ ID NO: 37678 - DNA, 442 bp, Glycine max
  unsure (1)..(442): unsure at all n locations
tattatannactaattaaaagactagaagccaacttatctggtatgtcaaaaactataaaanaaatgtactgacaattgaaataatatatacttggtgtacttaacatccaatttgtaataatttgttttaatgatctagcaatacatacttggattacaacaaaaaaaaatgtacacaaacaatcaaaatcaaactaatctaaatatgtaatcagtcgtcctgaataaagcagacctgttatttttgtttaatggttttggtatataggtatctgggagacacagatgaagctgttaaatcactgatcaaggccgtggatatactacggattactcatggcacagatacacctttcatgaaggacctcttgatgaagttggaagaagcccgtgccgaagcgtcttacagattgtcnctaaagagtatagaatgtcgaaata

SEQ ID NO: 37679 - DNA, 405 bp, Glycine max
  unsure (1)..(405): unsure at all n locations
agcttcatgacattacgaaaagataacaagtatcgttacataatccgtaaagttctgtaacattacggaaaaagaatcagcaaaaaaaggcaaagggggtgtatttagtaaataggggtgtgcaaatagcaatcangcccacttggacattccagggtgttccaatagaaggcagtgccttctggtggaagcaacccagcttgcctggccgagctgagctcgcctgggcggcaaccacctcccttttttcccctataaataggggaaagagggcagagcaaattcgttcaaccctcctggtatctggaattcacttgaaattagtgagaaaaattgtttccgtgaagaaaatccaagccgaggcacttccgtaatgattccgagacgtttctattggcaatttcg

SEQ ID NO: 37680 - DNA, 226 bp, Glycine max
cattgatggcagcccgtgtaattataagacatgggtacgagcccgaaacatttgggttcagcatctgtgccaaacaggggccaactatcacaaccaaccctttggcgggagggcgacgcgagactcattggtgcgtcttccaaggatggaacacaagtggagtccgcaccaacgcttatttgaggaaaacgttagaaaaacaaaaagcgggtctatgaattttaat

SEQ ID NO: 37681 - DNA, 435 bp, Glycine max
  unsure (1)..(435): unsure at all n locations
agcttataagaacaaaattgccttatatcattttcaaatatgcatgtgaattangacacatcaacaagaatcaagccaaggctattgtgcaagcaatcaatggggcaaaacacaccaaatgattataatgatggatggctcanattctcacaaaggtaaaatcatcactttcaaattgagctttcaaaactatcatgacatgtagagaagaatcaaggatttcaagtcacaaaatgtcaagaacttttattttcaaaacaatcacccatttcttgaacatatcctataattcaaagaanaacatgcaaagtcgtacgtgcacacaaaattgacccanaatattaaactgaaaatccgacgaaactaacaacattaacaaattaacacaactaacaaattaacaaaaccaacaaaactagcataaccaaagaacac

SEQ ID NO: 37682 - DNA, 468 bp, Glycine max
gcttgcttctcaatctccctctttttgatgatgacaacttctattatcaagaaacacacacaaactttttcctagtcgatcactcacataaattctccccctttgtttttgaatttatgcttatcttaaaaataagtcgattactcatgtgaattcttgatttaatcacatttctctccccctttggcatcaacaaaaagccaaagtgcgtatcaaacttaaggtatacaaatataacttaaacatccatacaatgttcatgaaaaaatatcaatcaaaccatgaagcaagaatcatgaagcaacaatcattataaaatccacatagccaaataacatacttaatatttgtgcgaacataccatgcaaatagggaaatagtaaattgttcaaataccataataatatagccaaaatacaaggctgaaaatcaaattactaataatattataatagaaatctaagatga

SEQ ID NO: 37683 - DNA, 445 bp, Glycine max
  unsure (1)..(445): unsure at all n locations
agcttatgtgcatatttccttacgaacgttctcttgcacaagacattctattaactaagagaaatgcacccatatacaatcaaggcagcttcgttacctagattatttacatgtacttccaaggtgtatttgttacttacatcacacacatctccttggctgaatttacatacatgcatactcaaagcattttggggtaccaaaaattgcacatgtgcacatcttggtattcctaatacctatacatacacaaacttcatgatgaatcttgactatctacacaataaggtgctacatttcatgcccttttcaagtttttgctacctaaagccgcatgcaaattcaagtatattttcctttgctgactaanantgtattcaaattaaaaggtatatatttttnttgtaatgattttctttacataacatgcaacatatttatatat

SEQ ID NO: 37684 - DNA, 318 bp, Glycine max
  unsure (1)..(318): unsure at all n locations
agctntcttaagaaaacttccttgaaaagcttctttgatataacttccttgagaagctagagtttagctacacacacccatctaanaactaagctcacctccttgagaagcttccttgagaagctagagcttagctacacacacccctctaataactaagctcacctcattaagaagagaagctagagcttagctacacacccctataatagctaagctcacccccatgacaaaaaaacatgaanatacaaaaaaaaatcctactacaaagactactcgaaatgccctgaaatacaaggctaanaccctatactacta

SEQ ID NO: 37685 - DNA, 157 bp, Glycine max
gatcttgtgaagcacttgcttattgtgtgaaaatgtcaactatgtaaccatgcatcaccctagccctaatcaggtccaacttcttttacttagatctgaaaggttaaaaagaaaatctatcttagctaagtgttatacaatgagaagagacatgagt

SEQ ID NO: 37686 - DNA, 412 bp, Glycine max
  unsure (1)..(412): unsure at all n locations
agcttgtgtggtagcaaaaatacctaggttttttctcttagattcgagtgaagtctgacgatattccgaagactacttttaggacccgttatggtcactacgagtatctagtcatgccctttggtgtgactaatgctccaggtgtgtttatggactacatgaataaagtctttcacccttactttgatagttgtgtggtagtattcatagatgaatatttggtatattcaaagactagagaggaacatgaagagcacttgaggattatgctgcttacccttangaatcgacaacttttatgctagttgtccaagtgtgagttttggttagagaaagttagtttcctagggcatgtgatatctcaagggggtatagtngtagacccctctaagatagaaagtgttcttgagtg

SEQ ID NO: 37687 - DNA, 456 bp, Glycine max
gagagagatcgatcacgagcacatagcatggtcttattagaagagttagcagcttgcttaaggtccaaaaggaacttgactcagcgtttgtgcgagacagagatcaacatgttggctatcatcaccaagtatcaataagaactaagtctagccacagcccacgagcatagggtggcaaacgagtatgcccaagtgtacgcggaaaaggaggctagaggaagggtgatcgactcgttacaccaagaggcaaccatgtggatggaccaatttgctcttaccttatacgggagtcaagaacttccccgattgctagccaaggccaaagcaatggtggacacctactccgcccccgaggagatccacagacttctcgactattgtcagcatatgatagatttaatggcccatataattaggaaccgctagggaacttgtattgtcactcagatcttgact

SEQ ID NO: 37688 - DNA, 539 bp, Glycine max
  unsure (1)..(539): unsure at all n locations
accctgactgtgnacgcgccnagagcgaccgccgctgcngctnacanngatnctnnnacggcacccatttctttcctatatgnacaacaagngacagcagccattgttttcacatgcattctcacgtttgcaaaccacaaacgcnttctttagatcactctacctgaagttacaaagtgtcttgtcaggcccacttcactattcagatagagatcagcaccacacacaccacctctaacgcttcgggacaatgtcacactttttcttcacacctttccaagagaggtacgatctgtggtctacaaaacaaancctcctccattgtaagcgtttttgcaggtgttacctttgttagaatggtaattcactcaactgctacacagcctcgagtctcaaaactggaggaaccatgttctcactgtctccactacacgaatgaacttgtaatctgagtccggatccacatgcaacagaaagatcattcttggacgcatctcatagcatattgctggcatgacacaangataatgcacctaacg

SEQ ID NO: 37689 - DNA, 387 bp, Glycine max
  unsure (1)..(387): unsure at all n locations
agcttacctaattaacctganattgagagattttgtttattaaacacacaaaatcgaagtactaagtatttattacttatacttaacagaaaatgcttataacattacaaaataaccataaattggaagagtttgatataatttacacaagttntatacacaaaagttagtcgtattcaccgactaataactctcccaaatttatagttctacttgtcttcaagcaaaaaaagaacaactcacttgtcctcaagtgacaatgacatgcagtgactattgtcataccctaatttcgtctggggattataatttgatgatatacaaccattgattggccgcttcgagatatttggcaccctttgttgacaatatgtgaagtcccgagac

SEQ ID NO: 37690 - DNA, 403 bp, Glycine max
actagatgccttggttaacctggtaatccaactggtcatgaatcaaaaatctacacctgtcgccagactccgtgggttatgctcctctgctgaccacctcataaacctttgcccttctgtgcagcaattgaacagcctgaatcttatgctgcaaataactacaatagacctcctcaacctcagcagcaaaatcagccacaacagaacaattatgacttctccagcaacatgtacaatccctggtggaggaatcatcccaaccttagatggtcgaatccttcacaacaacaacaacaacaacaacaaccttattttcagaatgttgctggcccaagcaaaccatatgttcctccaccaatccagcagcaacaacaacaacaacaacaacagccccagaaatagc

SEQ ID NO: 37691 - DNA, 386 bp, Glycine max
  unsure (1)..(386): unsure at all n locations
ggcagcaagcttgttaatccatcttctccaagagctccttgataaagaactntatgtgaatcctgagatttaacacatcaataggaaggatgaaactcaaagaaacagttattatcgcgagtgaatttactaacactaagtaaattcttggtaagggagggaactagcagtaaatttttaagggagagagtagtgtttggaaaatagggggacctaaacagatttgagcctatggaagagattcttgtacctgtgccattagccattatgatatgttcatttcctgcagcttgactgctctgaaggagaatatgtggatcattggttgcatggtgtgaagcacctgaatctggaaaccaagcctgtgaaatgttagcagtatgtgg

SEQ ID NO: 37692 - DNA, 437 bp, Glycine max
  unsure (1)..(437): unsure at all n locations
tgggagtacgtgagctcacttggaggtgggcaacaggggatggtgggtttatgcgcgcattgtggatgtggaaaacttgttgtgcaccatcgcccgaccgccacctagtaccacatgtgatgggtaccccataatcctacaagctcgagatgaggaagtgttgaagggtgaaactctctgctcttattgttgaccacagagtggtacctggagatatgtcgcggcggtcaggagaccttgcggacgtcaggtggggtgctattgcccanaaccaagcttgaccaatcccgacccaacccgggcatagtcggtcagtgagaacctgtgatgtacctaatcacgcgagctcctggcagtctacagataaaaggaaaacacgaccacaaagcaacgaggcttgtggtggctggcagctgtgaatttgtgtatatgtgatg

SEQ ID NO: 37693 - DNA, 380 bp, Glycine max
  unsure (1)..(380): unsure at all n locations
agcttataagaacaaaatngccttaatctttttctattatgcatgnngaatacgacgcatcaacaataatcaagccaaggctattgtgcaagcaatcaatgggccataacacaccatatgattataatgatggatggctcaaattctcacaaaggtaaaatcatcactttcaaattgagctttcaaaactatcatgacatgtagagaagaatcaaggatttcaagtcacaaaatgtcaagaacttttattttcaaaacaattacccatttcttgaacatatcctataattcacagaataacatgctaagtcgtacttgcacacaaaatngacccacaatattaaactgaaaatccgatgaaactaacaacattaacaaat

SEQ ID NO: 37694 - DNA, 412 bp, Glycine max
aatcattttcatatatgcatgtgtattatgacgcatcaacaagaatcaagccaatgctattgtgcaagcaatcaatgggccaaaacacaccaaatgattataatgatggatggctcaaattctcacaaaggtaaaatcatcactttcaaattgagctttcaaaactatcatgacatgtagagaagaatcaaggatttcaagtcacaaaatgtcaagaacttttattttcaaaacaattacccatttcttgaacatatcctataattcaaagaaaaacatgcaaagtcgtacgtgcacacaaaattgatccaaaatattaaactgaaaatccgacgaaactaacaacattaacaaattaacacaactaacaaattaacaaaaccaacaaaactagcataaccaaagaacacta

SEQ ID NO: 37695 - DNA, 415 bp, Glycine max
  unsure (1)..(415): unsure at all n locations
agcttcatgcttaagtatgcatggcaattcttcattattgttgntcaagacatacaagagagcttgtaacaaatcttctagacttggagtcatcacatgcaatcctcttgaacccttaccacccaccctgtcatcatgccgagactaacgaaggccatctagtatatccttcttaatgtattctgaacaaaattcaatggcttcttttgcaaagtacctctcaacaatagatgcttcacgacgatatacattatttgtataccctgttaagatctttatgtatcgctcaaccgggtacatccatctgagataaacaggaccacaccatttgatttctctgaccaaatgctcaatcaagtgaatcactgatgccagagaaagcagggtgaatatacatctccaactggcacaatat

SEQ ID NO: 37696 - DNA, 489 bp, Glycine max
  unsure (1)..(489): unsure at all n locations
ttaagcaccgcggctgcagcttaattatatatcattngcatttgtcatgttgggtctccaataccagatatcaaccattctatttttgtttgggttgagtcttcacgattcattcaagaagatggccaaaacaatcaagattgagaaatttattgggaagaataactttaacctttggcacattaagatgcatgccatgttgaaagaacaaggaatctcgatgcctttctctggccaaccttcgaatattgataaatctatttttagcaacaagaagaaaaatcacatttgctatttctcttgtcactgtctaatgaagttctctacgaattttttgaagaacaatctacttctacattatggatcaagttggagaaaatcttcatgatgaaatcaatctacaacaagttggtggtgaaataatgtctctttggtcttcacataaaggaaggtatgcctttgaaaggtcacttggatgaaagtaaactt

SEQ ID NO: 37697 - DNA, 438 bp, Glycine max
  unsure (1)..(438): unsure at all n locations
taccctcgggttatgaatatgcttcataagaaaaggaattataagagatatagaatatcaaccaatcaaagattggaggaaagcataagacaaaaagaaaaagacagacaggaatatgcagaaaggttctttgaaccagacaacatcagaacaatatgcagaattgtcaaaaagaaaagaagaaaagcaacaaaacttttgtttgaaacctgagggatgcctgaagcggtcacctccctaattaccaaccaaatctttgtgtccgcactcgttccgtgtaaaccaaaaagaatagaaagaacagacaagggaaaggccagaacacccaaaagccaatttcccccaccatatccaacttcctaaagtcctattgatccatgattacacatgttatctttgatttcataggatatgatntgcaaagncaagtcatgacat

SEQ ID NO: 37698 - DNA, 213 bp, Glycine max
agcttatatatatcgaggcgctcgtaactgacttctgaagctctcgagaaatacaaatggtcgtgatcttctactaggatgtccgattgaggctcattacatatacagacgcgtcgatatgaacaacggactctcttgagataatcaaatggacatatacttacgcgctgacgtccgatacatgcgcatcacattgtcacaccctctgaattg

SEQ ID NO: 37699 - DNA, 385 bp, Glycine max
  unsure (1)..(385): unsure at all n locations
ccgagcatgctcgacgtatgatatgcccgacatctgacatccgagcgataggttacgaccatttgaatctgtcgagagctttcgatgatcagctaccagcgtcccgacatattatgcgcccgagtcggacatccgtgtgaatacttatgaccctttgaatgtctggagaacatccgatgttcagtttctaacgtctctatatgtgatgcgcccgaatcagacatccgtgtgataagttctgaccatatgaatgtctcgagagcttccgatggttaattacgagcgtctatatatattataagcgtgaatccgacctgagtgtgaaaagttatgaccatttgagtntctcgagagctttcgtcgttcatttctagcgtctctatat

SEQ ID NO: 37700 - DNA, 352 bp, Glycine max
  unsure (1)..(352): unsure at all n locations
atcgtaaccgagcctctanttttcatcaacattaattagcaagcagtgagccttttaatactctctgtgttgcataataatcattatttaatattttaacataaattagaaaataataattcttttaatgtaatattaaatcattttttacttatatttcttatatattaaagataaataccaaaaactaaaaatgaattaatatgataataatgttaattttataaaattcgttattttctatttcttaatggatnttttttatctggacaaaataactaatacacgtgaagacaaagtgagttcatactgaatatgcttatgcaaaaagtgtttacactataacctacat

SEQ ID NO: 37701 - DNA, 268 bp, Glycine max
  unsure (1)..(268): unsure at all n locations
gttaacaatttctatattcgtagctcaatcgacatctctttgaccatgattgngtcactttaacttagttttggtctttggcaaatgattgagcttaattactaactgtggcttattataagaattttgtgctcacttgacctatctgtcttgtgcagggcctatatgacactacaaaactccaaatggagtgtgtgagtagtccctataaagctaataaagagatcttcaatttggccacaaataagcttgcgccatttctttcatt

SEQ ID NO: 37702 - DNA, 463 bp, Glycine max
  unsure (1)..(463): unsure at all n locations
agcnttgtgatttcttcaagattatcttcactatattgcatnntgctgcttcaatttggcctgcagatttcacaaataatacatttactatgcttatttggtaggtttaaattttcatttttttaagggaggtataattttttattaaaagtcattgtatttttttagaattntattttatgtgaggtcaacttaagttttttattttacacaaatgtaatttattttattgccatattatccaattcattaatttgatttagcaacacactgaatttctataagtgttaatatttagcaacatattctctagcacatcttttatatcacacattntattatagattaaaatttattaaanactacaaaattaaaagaaaaataactcattaaataagaagtgagactaannaaaaatgtgattttaataaatttaatcatcttaaatatatattaaatgagt

SEQ ID NO: 37703 - DNA, 422 bp, Glycine max
  unsure (1)..(422): unsure at all n locations
cgaagccccaattttctggatatntcaatgtactcgctaagtcttgttcattaatttggatgaatttttgggttttctgatgaagtcgctaagtcggccctgtcccactaagcgtgttcgtcatttctgtttagatttatgcttttatgtatgaactcgctaagccatcgttcttcgacttagcgagtgtttaaaattctagtttttaatttcttagctcgtatgaactcgctaagtcggccctgctgtgctaagcgagttagtttacttaggttagagtctataaggcttttggtattctggttgcggctaagtgagccatgctcgctaaccccatgcctttgttgtttgagtaagcctaggctaagcgagtcaacctcgctaagcccaaggcaatttagtgttctaaaatgttgttcatg

SEQ ID NO: 37704 - DNA, 407 bp, Glycine max
  unsure (1)..(407): unsure at all n locations
agctngcatccactagaagagaaagaacatgttattatatctttgactganaatgttagtcagtttgtcagattgattgtgaaggaatgcattgatcgtatcccggtgagagtgtgatctttaaattttgagagaaacgactatcatttagtactgatttttgcatgaatctctgaagtatggactgaatgcatgaaattgaggatgatgaaggccatgtttgattgtgatagccacttagccaaaaagctaaccgcgtgcttgaatgaattatcccttgcacccagtttaagctgaatgaattattgattgagtgaaccttgagcccatacagtgttatcttctactaccttgtcttaggttggaggagagcatcatccacaggaagcttggttcaatgtaaattt

SEQ ID NO: 37705 - DNA, 454 bp, Glycine max
  unsure (1)..(454): unsure at all n locations
tctgaagctgaacataggcagctgacttcccaagataatatgataaggaagaagctgcagcatgatctttggtcaccagcccaagctcacgagtctttaatgaggcagaaggcgagatcgcgttggattaaggagggggtcagatatctcgatattttcacatgctgattaactcccatcgaagtttgtagctttttccagaagagatttcaagaaactatgagcagcagaccagttttggatggcacctcttttcaagaaactatgttctttggggaggctactatgaaaaatgtcaagactatcaaattgattntgagggcctttgaattgtcatcgggacttaaaacaaattatgggaagaacagctttggggtgttgggccaatctgaacaatggaaattgcaagcttgccggtatctgaattgcagaatcatgcctctgcctttctctt

SEQ ID NO: 37706 - DNA, 570 bp, Glycine max
  unsure (1)..(570): unsure at all n locations
caaccaacacccgtccccttacagtgtgctctcacanttcaannaaaacnnaagaccaaagaggtgagactcgagaccgcacncnnaagaganncgagcagcaagcncancagcacccannccacagcactttacttttncaaacaagaacaacacaacgcgcgcagaacgacatgagcaaccacaacacatgagagatcatcaaccactccaaggagagagaaaataaaacaaacaaaaactcacaaaagcacacaattatgtgcacccacctcataaaacaccttggtgggaccaccctcggcatccctcgcaactggaaaagaaaggcaaaaacaccatcagaaaagagcaaagccactctcagacagagactcgacgaacgacacaaaaacacaacaacacatagagagagatcgacaggacaccctaacaccccacgagccagagagcggcaacaaacaggacgataaggagccacgcatccacgggaaacaaacaaccaccgaaaccaaatatcacaatctgcaacaaagaagaaaggagaggaaaaacacgcgaagagaaaag

SEQ ID NO: 37707 - DNA, 473 bp, Glycine max
  unsure (1)..(473): unsure at all n locations
agctngttgttgctaccccatagagcccctcttatcttgttctggccgngttcttccctacaagccctcttggtttctcgttccaaggctttggtggtagccacatttatatctctcagttcggtattcttttttcagattttcagagctgctgatttgaacctttctttaactgtttgggcttgctcgagttccaccataagggcatgcacttgttcgtcttcctccggtgcctcaacttcctctcttttagcggttctcaaacttggaagccaatccaaaccttgcacgtgggcttttaaccacttacgatagccaccgatgggcccattgttactgcccctgagttccttgtcattcttttgcaacacctcccatgccttgcagaccttctgaagtgtctccacgttggtcttattgaaacctcgtgaaatgacaggcataagctcatcctctagtagcgcccctctcat

SEQ ID NO: 37708 - DNA, 489 bp, Glycine max
  unsure (1)..(489): unsure at all n locations
gctttatggaggctggatctttgagcttcaatgatgtcctttaatggtgattttccttcatggagatgcagcggaagacaaaggagaagaggtgagaggaggcgccatccactagggaataagccatggaagaaggagcttcaccaccaagatgagccttggataagaagcttggagaggatgtttcaatagaggaaaagaanaagggagagaaagagagagaggggagcacgaaattgaaggaagataaaagggagaggagttgaattttgagttgtgtctcacaagactctcattcatcaaagttccaacaagtgttacacatgcttctatntatagactaggtagcttccttgagaagctntcttgagaaaacttccttgagaagcttctttgagaaaacttccttgagaagctagagcttagctacacacacccctctaataactaagctcacttccttgagaagattcctaaagaagctagagc

SEQ ID NO: 37709 - DNA, 442 bp, Glycine max
  unsure (1)..(442): unsure at all n locations
agcttgcagccgactcactataacggagaggtatgtttttatgactggatgaacccatatagcttactgaagcattgcttggacttggaatgtgtggagacatgtaccttgagttaagagatgacaaagatgggtatcccatggaacatggtgaattcaagtgagaagctagagatctttgggatgcattcctaagatctacggagcttctgctgatgcttagggagggggattgatggtaggaggacctaatagatggctgaacataaggtgtactggctatggagtggttacgggaaacagatggggtctgtgaagctgcccgggaaatttgtattgctgaagatgaagctagtgatgatctcgcagaatgtaaggcagaggatgccatanatgcttgccgggcaatttgtattgctgaagatgaagctagagatgatct

SEQ ID NO: 37710 - DNA, 466 bp, Glycine max
  unsure (1)..(466): unsure at all n locations
ctgcanaatagttctgtatttcccgtgtttattgcatcaatccatgcaaaagggctgattnttcccgttaggtgaacttcttaatatgttttatcattttcctgtagtccatgaatttcaacacgctcatattttacagaaggcttcctctctctctctgaaaatgttttcataaaataaagtaattagcatatgcaatgatttgtaattttntatgatctctttatactccatgaagcactgagggtcttaaaacaattctttgattctatgattatataagaacgaatatctgtctgatatcgagtgctatttatatggttttaaatagcggttgcagtgagtaagataacctttacattgcgggaaaatgcggctgatgtggccgcaattgcagtcctgatgcggatgcggtgagtcgaaataccttgacgttgtgaccacaattgccgttgcggaccaatat

SEQ ID NO: 37711 - DNA, 428 bp, Glycine max
  unsure (1)..(428): unsure at all n locations
agcttaagtcaacaatgccttataattaagatctgttgaagtatataccagggaaggtaagaagatcgggatctccaatgaanaagtcaaacttgtctttctcttggtcaaagataagggtctcatcttcattactcttcaatatgatgaagtatgggactctaataaatggagggtcattaataggatcaacaaatattggaacacctaatgaattcaccccattcttattcctggcagagacttgaatggtatctccaccataaaaattttcatttctgaagaacacaaaatatcacgattaataagaataacatatataattgaaaatcanatttatggcacanaaatgcctcgaaactcgccacattgttgataccanaggatgtcattactttctaccaactcactcatgtcaagtacatctt

SEQ ID NO: 37712 - DNA, 470 bp, Glycine max
  unsure (1)..(470): unsure at all n locations
tggattctgagttggcctcaagtttgctaaccacctactctctatttgctcgattgttcttgatttctctgcagcatttatgctcatgtttaaatgacttgacttgaaaacagtttttgtgttcattctttgcacagtagatctcccaatcacaacatgccttcttgcattttgctctaaccctctgattatcattcttcttccacctgaactccctgcctatgaatatgctatactccctcaaggcagatttaaattcagccagagtactaaactccatcactacttccaacttcatttcaccaaatcaactactttcattgtgttgaggataaactntgtgaacatcctcatcttcatcatcactactaatggngtttttgagctcctctgaatgatagccatctgtctcatattcaacttcaacttacttcctcatacaagagaagtctataaaccattcatcctca

SEQ ID NO: 37713 - DNA, 471 bp, Glycine max
  unsure (1)..(471): unsure at all n locations
agctntagctctnntcttattggataatgctttttgaggaagtctctnttcaagtggatcaaatcatttttaatgatgtatgtgtttcctcttctttagcttaataatgtccagtattttgactctaaataaaagatagagctaattattattatttattgttagaggaaattaaatcatttttattgttagagcttaataatgtccagtattagtttttgttatcctcctatatatgacaacttttgatctgactgttgttaaattaaaagattagattaaattacaatattatatacgtgctatatttattgaatcaaccacttgatacatgaaacatagttcttatgtcaggaatcaagatctagaaaaaagaaaacaaatgtacctaanaatatntctcattaactntnntttaataaatatngtattccttaaccacaaatcaataactactccatcatagattct

SEQ ID NO: 37714 - DNA, 418 bp, Glycine max
  unsure (1)..(418): unsure at all n locations
gaatgtcgttggcaaatatgtcttgagccttcttccaaaaatatcaacatgntttgaatgatctaaggatttccaaaacatttggctcaatagattgccatagcacagcacacagttgaaaatcaagtttttcccactcagctttcttgtcanttgggacagcaccaactcctttttccaaatggtcatgatattcttggccaagaaaccacaactccacttaagcagaccaagataggtagtttttccagttgaagtttgcagtaatgatagtaggggttccagaaaaggagaacacagggccggaagaagtcatttctgatcaaaaaaacgaaacccacatagagaaaaacgaggaaacgcgaggctgacacattccaagtggtcaacacggaaaaccaaaggctgaaccgtactc

SEQ ID NO: 37715 - DNA, 472 bp, Glycine max
  unsure (1)..(472): unsure at all n locations
agcttcactttgngagttcctttctcgattatggtattatataaggctctcgcccctttagatctggtagggaaatgttttattntgatacattggcactagggccgatcgacagagtccaaattgtcttggaaaaagttaaggttggtaaggatagaatcgaatatcctttggagtaatgctagcaaaaattatgtcccaagtaagaaaaacactccaaattttgattacctctgactgtctactangagtctcatgggaatctttgctntaaccatgatggcccagtaaattgagaattcaagaaaaagctaagttactatcaaaatgcttgaattgaagaaatgctttaatgtacttgttataactntcataagtacaaaattccttggtgggtgtcaggaaagtcaatngagctccttcaatcttgagttngatgtcattcgggttctctcttttaagaattatatga

SEQ ID NO: 37716 - DNA, 483 bp, Glycine max
  unsure (1)..(483): unsure at all n locations
gcacagcaacacagaatctaggtgtgctacacccctcaattcaatgggttttctaggtttgagaagtgaaattgagaatgggacaaatttgaagcaaactctcacctcacacaagtctataccatcaatttagacttgttcaaactggatttacacccaaaattccaccacactcaaaattgagtcttcaacacctaattatgccctagaaatggctctttgttcactttgatcattngtttttctctctagcacagtccaagctntctcccaagtcctaaatgacatttcaagctagtattaactcactgtaacctccatttatcacagaattcatacttaaccttccaactctcaaagcctcactctntttccactcataacatcacattcccactttctaaccctangttagttctacccttcatctctaacagttntccatcagcaatntcagtatataaacatcataaacatcatcac

SEQ ID NO: 37717 - DNA, 499 bp, Glycine max
  unsure (1)..(499): unsure at all n locations
ggatcttaagtcacctgcggctgcagcttgagataaatgccaatntcatgtatttttatccaatcctttgtccattgtaagattttgataaattcaaacctaaagtctaacccaatagataagtttaaggtttttttttttcaccataattctggtatgaaatatccatcaagatttattgataactaatttttattagaaaatctaactaattacctttaattggatctccttttttaacaatattttttccatctaaaaaaaattataatttgtgaccttatttagggaaactgattccagttatacttggacacgactagagctatagggttgacctaatagtcaaaagagaagagaaggaataagaagttatatagttgaattcttcctgctaataaaaactaacaaatgataacatatatttgtctaataaagaaaacttttagtagttntagttaaaacaatcatntaaattatgttaaaaaataatagatta

SEQ ID NO: 37718 - DNA, 430 bp, Glycine max
  unsure (1)..(430): unsure at all n locations
acatagatntattatgcacaatctttgtacataaataaagcaaataaatagtgtcatggtagaagaaatttggatacaatccaaagtgtaaaagtagtgaaacgatcgatataaacttgttacatcaaaaaatacacttacagtgaagatcctacccctcaaaatacatcaaaatctcaaaaaggatactaggatcaatgcagataactattgagtcattggcaagcataccaagtcttcaagtagtatttgataaataagagttatcgtcccacgaagacttgcgcaatacttaataaatatcataggtttttattatctaaactaacaaataaacaaggatgatttgaacataacattctacaataaagaaaaagcaaaaacaaagatacaagttatgatatttttggaattnttataaacacacaat

SEQ ID NO: 37719 - DNA, 316 bp, Glycine max
tcgattactacgcaatgtaatcgattatcagaagacaattctgaaacaaagggtttaaaaaggattttgaatttgagttttgaatcatataatcgattaccagactgtaatcgattaccagtgaagaatttcagaaaaaggttttttaaaagactcatctcttcaaatcattttgaaaaggcacgaatgacctatatatatatatgtgtgtgtctaactccgaaaagtgagaaagatatattctaagataaattaatttccaaatgccctctcacaactcttgggcagacacttgctaatctattgagaattcatt

SEQ ID NO: 37720 - DNA, 297 bp, Glycine max
  unsure (1)..(297): unsure at all n locations
agcttgtataagtactgngaaagaatcatgatattgtgtgcaagctgccctcaccaccagatttctgagcaacttcttcaatatttctatgagggacttatcaacatggagaggagtatgattgatgctgctagtggtggagctcttggtggtatgacccctgctgaggctaggaatttaattgagaagatggcttccaactcctaacagtttagtgccagaaatgatgctattgtcattagaggagtgcatgaagtagccacgaattcatcttcataagctgaaactaagaagcta

SEQ ID NO: 37721 - DNA, 445 bp, Glycine max
  unsure (1)..(445): unsure at all n locations
tcatggtgaatcaaaggtgattcaaagggagtttgatgataacaatcatgataacaaaagatgatgacaaaggtgatgacaaaaagctcaaagatcaatcaaagaacaactcaagtgaatcaaagaacaactcaagtgaatcaagaaaaattcaagagttcaagataagaattaagaagaattcaagactcaagaagaaagtttagagtcaagaatcaagattcaaggttcaagatctcaagaatcaggattcaaggttcaagatctcaagaatcaagatcaagattcaagactcaagattcaagaatcaagagaaggctcaatcaagataagtatgaaaagttnttctcanaaattgaatagcacatgattnttctcanaacatgtttaccaaagagnttttactctctggtaatcgattaccagaatggtgtaatcgattacc

SEQ ID NO: 37722 - DNA, 474 bp, Glycine max
  unsure (1)..(474): unsure at all n locations
agcttggtttgggtttactntcactcaaatatttcataattcaacaaggtagaatgttggggtccactgaaagatgtgtgtgcatactcaagtgggtgccatgaggagggtaagcaaggtgatattccagttagcgacagcacgcatatcaatatgtcgaggaaattgtgaatgtgtgcccatgagctcaaaccaatcacgtggtcttgagaattggaactgaattatttttcacaattagtatgcagggagaactttgggaaattggagtgtcgtgtaactattcagcatcagaaaaaaggggaaattgaattcaatgtaaatacttattatgatatttgcctgtgtttttgttagtactagctacaacaatgtgattatgacttanatttagactgtgagcaatgcatggattattatcttaatccagtgagccttaattatgcccaatgctagaagtgagcataatatcag

SEQ ID NO: 37723 - DNA, 310 bp, Glycine max
aagcaccgaacagtactactgtatgactagtgcattggtcagattattgtcgtgctagctacaactggtgttaaggggccagtgtcaatcataccacatcatcttcttttgtatattcattcaatcatcgacatgggaaaacttgatctacaactcctattaaatcttccatccaagtttggtcttgaatgtgaagaatgaaatagaataataaaatctctctataggtagatattgtcagccaaccaaaccatgacagattatctcgttcataatatgcgatctaacagatgttaacatggacaggatg

SEQ ID NO: 37724 - DNA, 471 bp, Glycine max
  unsure (1)..(471): unsure at all n locations
agcttagatggaanattaactctatgttctatttatgatgnncattaaccccatcctcctggcctttcctggtagcagcccttagtttgcgctgctcctccttgtaaatccggtttcgtcgttgaaactgcattaaacaaacaaaatcaacatcagcaatttagtagcctatcaaaatcttgtatctgaagaaggaagttaattttcatcagtggcaaagtaaaactgacaatttttaataatatggcattctcaaataccagtatatacttctgtcaccaaagtaagctncattgagaaaacattataaataggatagctatgtaatcaggaattctttatactaaaagctaaacactggtaattntcaatcctcccatattacccttagtatcccanacaagntatacaactttcaccccatattctgattcttgccaaaagcaacgtcttcactgctcccaaacataa

SEQ ID NO: 37725 - DNA, 413 bp, Glycine max
  unsure (1)..(413): unsure at all n locations
cgcacgtgattcactctattcttagtctgaatatttgtaagtttctgttcgaatatgggtttacatgtcttcactctgcagtacgaatgatgtgagaaatttgtaggacattttacttcaatcatttttcctttgactatcttctgaatgcagatcgcacggaatgggttttgagagaggttggggtgatactgctgaacgggtattggaaatgatgcatctgctattggatattcttcaggctcctgatccttctacactagagacttttcttgggagagtaccaatgcgtttcaatgatgctatattatctcctcatggctactttggacaagccaatgtcttgngttcgcctgacactggtgggcaagtatctcctttgtcatataccgataagactatttgagctggat

SEQ ID NO: 37726 - DNA, 506 bp, Glycine max
  unsure (1)..(506): unsure at all n locations
cgccgcatgcaagcttaaacatgtatntactctattatgtctgtatagaaatttatcagagggaacaaataacaaatgtcattcagcctccaatgaatntaacttcatcatctacctagtagtggtccacatttaagtagtagcataataggtcagttgagatattgaggagtttacaaatatcctgagtgccttactttttgcctaaccatcttttcatcaattgctattgaccttggccagaagntttcttcatataaattttggttaaattatgggactaaacagcagcataggggatccgctccttttaacccgaatttttttcttctagaaatgaggaggattgcaggatcanagaattaagtatgttctatctatgggttcatctataaggaagcattttataacataataagggtaaaggcaatgctgcaggctgcatcaacaagaaatacctaccatgattgatagttgatatatgcaaatatcaacatctttagtta

SEQ ID NO: 37727 - DNA, 370 bp, Glycine max
  unsure (1)..(370): unsure at all n locations
tcctctgagtcacctgccgcatgcaagcttggagagttgagtatcatatcggngtaattgtttatagtactctcataatcaattgccctattgtttgagacaatgaatgatctatttatgagtatctgctttaattgattaccaagtggtttaatcgattaatcttcttttgtttagtagttcataagtgaacaagaacactttaatcgattactttgagcatctaatcgattacattgttcttgagttattctcagatgttgagaaaaacactatatttgagtagagagataatctaatcgattactgtgtagatataatcgattaccggcagttataactattatctctataaacaataagcctgtgt

SEQ ID NO: 37728 - DNA, 468 bp, Glycine max
cgagataagaatctctggtagaaagatgacgcctctcgcttgtataggggctgcacttatctaacggatatgatatgatacaaataaacagatgatagtcaaggaagctctctggtattaataaaagcttctctcttctattcctagatgcctaaaaactcattgacatcattgttcatcttcatgcatagaatacaatatcctttgtgcatctcttaaaactggagaacctttctatggtcctctcaacaatttgcctaatcaatagctgatccacctcagtatcatcaaaaccacaagtgtcatcttcagcaccatctcattcatatatgctcacctccaacattgttaccttactagaaccatatgctccaccatgtcgaacccctagagcatgccaatcatttgcatatgaatcttcctcggggcatggatgccaatggtgaatctctcatagtcattatctta

SEQ ID NO: 37729 - DNA, 443 bp, Glycine max
  unsure (1)..(443): unsure at all n locations
agcttcccaatggaccagcttattatccaaatttatgttattactaagtcagaatnttgttggccttgccctcattcaaacttctatttttgctgccactatttcatttcgtagctagagataaaaacaagagccaattagaccacaaaagatccatttcttctggtattccacgcctgactatgaaaagagtaatgtatttgattatagagttttcatttaaactgaagtgaaaactggctagtagttaccatgtttaagctcactgaagtgaaccagggtgtatatcaatgtccatgactgtcaaatatgcatgcttacttgattcataacaatacctattgatttttccctctgtataatgacaataaatctaacaaacaagcaaacaagccttttcccactatgtgggattggctacatagatcctttgacatcataat

SEQ ID NO: 37730 - DNA, 490 bp, Glycine max
  unsure (1)..(490): unsure at all n locations
tgactaaatgttggaaataggtggtgcaactgtcgtttattactnttccaagtagcttaatatttatttttcaaataggtgaagaaaatggaaatctcctagtgttttaactctctcgtatttcataacacacataacactatttattttaataattacagtatttattttaatttttaataaaatatttaactttcaaaaatcaataagaaatttaaattaatgaaaaaaaatctaaactaacttgtacatatacttttgtctacaaaaccaaaataaaaatagaatctatagaaaaagttacataaatgtgtccctttatgttatttatcacctacttcaacaacaaaattttccaaacatgtttaattcaatatctaatttataagtttgtagcttgaagctagcagtaaatatgctntaatctagcttataaaatntaagggagcgtataagttntaaccttgcttatcagctattttgtcaacat

SEQ ID NO: 37731 - DNA, 276 bp, Glycine max
  unsure (1)..(276): unsure at all n locations
agcttctcgatatattatgcgcctgaatcatactctcgtttaaaagttatgaccatatgaatttctccactgtattccgngtgacaagntatgaccatttgaatttctcgatagcattcgttgtcaatttcgagcgtctcgatatattatgtgccagaatccgacttccgtgtgacaagatatgaccattngaatttgttgagagcatcctgtgctagaattcgagtatctcgatatattatgcgcctgaatcggacatccgtgtgacaagttatg

SEQ ID NO: 37732 - DNA, 411 bp, Glycine max
gctctcgagaaatgcaaatggtcatatcttatcacacggttgtccgattcacgcgcataatatatcgagacgctcgaaattgcacaacggaagccctcaagaaattcaaatggtcataacttttcacacggaagtccgattaaggtgcataatatatcgagaagcttgaaattgaacaacagaagctgtcgagaaattcaaatggtcataactattgacacagaagtcccattcaagcgcataatatatcgagacgctcgaaattgaacaacgaatgctctcgagaaattcatgtggtcataacttatcacacggaagtccgattcaggtgcataatatatcgagaagcttgaaactgaacaacggaagctctcgagatattcaaatggtcataacttatcacatggaagt

SEQ ID NO: 37733 - DNA, 476 bp, Glycine max
  unsure (1)..(476): unsure at all n locations
agcttctcaagcaagcttccatcanatggtaatcatagcacaagatcttcaagtaggtgctccttaaacctccattgttgtttcttcatttgtctccatgtatttcctcacatgtctcgtgttgaatgttgttaacatgattctttagaattttcacaaattaaacttgctataaaagctagattttattttctatggttcaaatttcttgttcttgttcttgaaccatgaattatgtttagtttaagctcctttgagttntgtattgttatgtttttttgtgcctaaaacctaaaccatcaaattcttacaaaaacattaaagtataagaaaacctcanaaatctagagtgacatgttcacctattggtagtttgtcattgaagtcatgtctagtcattaaacttgtcacataagaatccttatgntgngctaaacttaatttttcttggttctttgtctaactcatttgttcat

SEQ ID NO: 37734 - DNA, 500 bp, Glycine max
  unsure (1)..(500): unsure at all n locations
tgtaggattatggggtacccatcacatgtggtactaggtggctgtctggcgatggtgcacaacaagttttccacatccacaaagcgtgcttaaacccaccatcccctgttgcccacctccaactgagctcacgtactcccacgtagcccatacccccgtttctctcaacactgggtccccatcaatcctcccaagcttccccaacatcaaagtaatacaacattcaaacagcacaagctatcacagccaagcaaaacagggcaaaggcagaaaactctacccaaaacaccaaccaaaacacagctntcctcacttaaagaccccagtaacaattccttcgttccggttcattaaccgttggatcgaactcgaaaatttactggaagtctctagtacataagcctacatttggaccgttgggatctactagcaaacatccagaactcattctgcactactctntccacagccaatcacacacatagcattttctgacaaag

SEQ ID NO: 37735 - DNA, 454 bp, Glycine max
  unsure (1)..(454): unsure at all n locations
agcttctcttctaaccacaagacctatcttatatctcgtaacaaataataagagtgagaagaagaagaagagagagaggggagaaaccttgtagtagagggaaccggcattgaagagagggcgcagaggcttgtcaattgaagatgaaagcctgcgaagcgccattgccatcgtcatttctcgcacacacagaacagagacaaagtgtagtgtgtttgtgtgtttttgaagaagaagtcgctcgttaatcgttatcccaatcccattgcgagtgctctctatcggtttttcgcatggcgccacgcggtgggacccatcctaagattntagttcctctntttcttttttttttttntaaataaaataataattttcaacgtatcgtcttaattaggatacggccaggcaggccgtattttttctcccatgtagtaaatttcctatatacgttcat

SEQ ID NO: 37736 - DNA, 497 bp, Glycine max
  unsure (1)..(497): unsure at all n locations
taacactcaacaacacaccaagctacgtggcataaaaccaagcctactacccataatcataaaatgatcaaaaaaccaagaaaatggacagatgtcaacacctcagtcatgggcattntagtaaatttaccatactccagttttagtatatagatactgatataaaataatatcttagagaaagatatcattacatttttaaaaggttatctaaacatatgtacctaaataactggccacagatttaacaataatggactaaatgtactattagtgcttgatatatagttgaaagaaaagttcacgaaacatgcaccatagttaaacaaacaagaacacatgattactaattcaataaaaccaagtntggccttctgagggaaacacaaagactagtacaataatccataaaatagactacggtagcacaattgtagaaatgaaaagaccctcacattactctatatattattctccttacataacactctattaat

SEQ ID NO: 37737 - DNA, 375 bp, Glycine max
  unsure (1)..(375): unsure at all n locations
agcttgcttctacactntcatgtntcactactctgtaaatatatccatgatccttctcacgtggtcaaattagacgacgttcaagtaaaggagaacttgacatatgaaacattgcctttgaggatcaaggatagatggaaaaaaacttaagagggaaaaagatttcgttgatcaaggtggtctggggaggtgcagcangagacgaagcaacatgggaactaaagagtcaaatgcgagaaaccaatccagccttgtttgagtcaagtaaattttggggatgaaatttgtaaaagggtgggagagttgtaacgccctgaaatttcgataactgaaaatagatgcctgatgtatntattgtattagttaattacttaa

SEQ ID NO: 37738 - DNA, 485 bp, Glycine max
  unsure (1)..(485): unsure at all n locations
cgagatgaggaagtgttgaagggtgaaacttcctgcttttattgttgaccacagagtggtacctggagatatgtcgcgggggtcaggagaccttggggacgtcaggtggggtgctattgcccaaaaccaagcttgaccaatcccgacccaacccgggcatagtcggtcagtgagaacctgtgatgtacctaagcaggcgagctcctggcagtcaacagataaaaggaaaacaagaccacaaagcaaggaggcttgtggtggctggccagctgtgaattttgtgtaatatgtggattgtggcctctggtaatcgattaccaaaagtgagtaatcgattacaaggcttaaaattgaggacaggaggctaagatggtctctggtaatcgattaccaaggggtgtaatcgattaccangcttgaaaacgaagtcaggatacttaaggagcctctggtaatcgattaccagcctgtgtaatcgatacaca

SEQ ID NO: 37739 - DNA, 414 bp, Glycine max
  unsure (1)..(414): unsure at all n locations
agcttatggagaattgccgcaacatcatttttttcctcaggcgtctctgccttgctctctctgctcgcctcaagcctcgcaaaaacggtattctttattttattttctccaattgctatgctctccctgcacagattcctttagcttccttgccttcttttctttccacttcattactatgcacatacacttcagtggtgcccctctcctcaaaacaacttcatagtctgtattttatagtgacccccacaaccaataaaaattatcagaaaatgatggtgaatttataatacagtatgatacatctcatagagactacttntttatttgccgcaggagctggactgctcaagcttcaggatgatgtacagacatgcggatatcaagatgtacaagtgatgtgggaaatgctac

SEQ ID NO: 37740 - DNA, 491 bp, Glycine max
  unsure (1)..(491): unsure at all n locations
cttcaagtttggaaatggtggggtaatacttgattccgggacagttatctcaagactggctccatctgtgtacaaggctctgaaggcaaagttcttggaacagttttctggtttcccttcagcaccgggcttttcaattntggatacctgctttaatctcactggatatgaccaagtaaacatacctaccatcagcatgtattttgagggcaatgctgagctgaatgtggatgcaactggcatattctatntagttaaagaggatgcttcgcgggtttgtttggcgcttgctagtctttctgatgagtatgaaatggggatcattggaaactatcagcagaggaaccaaagggtgttatatgatgccaaactctctcangtaggattngctaaagagccttgcaccttcacttgaatacctcatttatntaactcanataccgaggataccattgccattaacatcttccagttacattataactatattt

SEQ ID NO: 37741 - DNA, 412 bp, Glycine max
  unsure (1)..(412): unsure at all n locations
agctttacaaaatccggcatatattatattatttagacttaatgcttaataacttcatgtacaaaaaaattattgattaatatttatataataatttttacatgaacatataataaagtatattaaaaataatttattaaatatatttttataaaataattttaaattactttattaataatatcttgaattaaattaattttattttttggaacagtaaaaactacaagtaccattcacaaaagataattctatctaagtaagggaagatcattatatgtgacaaatttctttctgtgagtgtttaacacaactccactattaaaaaaaacttanaataacaagtngttaagttcaaggattaaattganaaaaaacttttagtcacaccatanatgtaagttgtcacatt

SEQ ID NO: 37742 - DNA, 450 bp, Glycine max
  unsure (1)..(450): unsure at all n locations
ctgatttggtttagacatgattgatacatgatttgtgacttgtatgtattgatttgggcaagattggatgaggggaagtgtgattttcgaaatctgcacttatgcagaattntgctgtcaaaataggtgcagtaagattttggctttgtgcagaaaaatgcttgtgtgtgtttggctgtggaaagagtagtgcagaatgagttctggatgtttgctagtagatcccaacggtcaaaatgtatgcttatgcactatagacttccagtaaaattttggagtcgatccaacggttaatgaaccggaacgaaggaaatgtttctggggtatttgtgtgtgaaaagctgtgatttggttggtgttntgggtagagttttctgcctttgccctgttntgcttggctgtgatagcttgtgcttatttgaatgtgtattactttgatgttgggaaagc

SEQ ID NO: 37743 - DNA, 482 bp, Glycine max
  unsure (1)..(482): unsure at all n locations
agcttgcccctctccactggaatgccttacactctgttagtcaagtctttattcttttcctgcaagcccttgtagcgtgcagacagattatcatcctccatccttgcgcatgacatctaggctaagacactaccagccttgtgagacagctggcgtgctgaccttacatctctcgtgaaggggatggtggatacctaccttatggcgctcctgcctccataccgagtgagccatatccattcatttggccacctccatctccaaggacgacaccttgcgtaaagcctcttggcgtcattgtccattcttcttcagaattgccaaacttctctagaggaagactctggtggagtccatagcgttctacacccaagctgaccgaatgagggttctatcacagggtgacacanagctagctgaggtcttctacttcggtttgaatgtgtaccccacagtaaatcaacatcactggaagtgtacag

SEQ ID NO: 37744 - DNA, 415 bp, Glycine max
cgcacacgcatgagtagtatataaacgaagctctgtgtccgaagcatgcacatgctactcagagatcctatctcgtgaaacatgctcatagggtctcttacatgagatgatgcatgatactgcggaatctcgccagaaataaagctactcaataataacttatcttgccaaaaataaagctactcagtaataaattgtatcacggaccattaaaactattataagttgtgtatattgcactctatctgatgcatgaatcttatacaactgtagatatcacaacagcatacttgtggcaataaccaatacttgtgtcaagcattaccttacaccagctaactttcattcttctccattcttattgtcatgcttctatccattagctgtgttcttcattgtcaaccaatgacacatg

SEQ ID NO: 37745 - DNA, 454 bp, Glycine max
  unsure (1)..(454): unsure at all n locations
agctntctcataagtcctaaatgacatttcaagctaggattaactcactttaacctccatttaccacagaattcagacttaaccttccaactctcaaagcctcactctttttccactcataacaccacattctcactttccaaccctaggttaactcttcctttcatctctaacagttttccatgagcaatttcagtatataaacatcacaaatatcatcacaaaaaccctaaaacagaatgggtatgtttaactcatccaaacatggcaatttcaacaagctttcaaaaaatgtcttcacaaataattataacacagtagaaacctagcaagactacccatcatatctnccaaaaccccatacccacgaatatcaaaggagaaagaagtccacccaaacctgaattttcgaagtcccactcgtagccacccacttcaccaccccgaaaatgcc

SEQ ID NO: 37746 - DNA, 472 bp, Glycine max
  unsure (1)..(472): unsure at all n locations
tagcgttggagggacctggcagcgcaagtagcctctcccatggtccagagggagatcattactatgatggtggataccttgcctatgttttactatgagaaattagtgggctacatgcctgccagcttcgcagacttggtcttcgccggaaaaaggattgaggtgggtttgaagaggnggaaagttgattacatctcctcgataggtggcagaagtaggaagaccaaaatagctggggcatagaagaaagagggagattcccataccgtcacctcaacacctgcatggcccaagccaccgcaaaccctccacggtacccaccaatatacgcaacatcacccaagtttttcggctcacgccgaggtctcttccgatacggcactcacccaaccaagggcacccacacccncacagggnggagctctccggaatccagctctgactcggcctcactcagccaacaatgctcact

SEQ ID NO: 37747 - DNA, 414 bp, Glycine max
  unsure (1)..(414): unsure at all n locations
cctcatcgcccctcacagtctntagatgtgggagccaatccaatccttgtgttcggactctcagccacttatgatagccgccgatgatcccattactgcttcccctaagctctctgtcctttcttcacgccgcatcccatgccttgcgaactccttggagtaccctcgcgttgtggtcactaaaaccccgtgcgatgaaaggcgtgatgctttcgtctaatggcgctcctctcatggggtagccaagctgtcttatggcgagaacgggattataattaatacaaccccttgttcccatcaagggaacatttggacatccttcgcatgaagatagaatcttgattcttccttccttctagcgagggaaccaactaacagacgcctccccatgctagccaagaagtggtcccaatt

SEQ ID NO: 37748 - DNA, 469 bp, Glycine max
  unsure (1)..(469): unsure at all n locations
taccatanatagcttcactaatgagacananattcttgttgaattcaattntgaagcctntgtcacatagttgacttatgctcaagggattgtgcttaagtccattaacatataaaacattttttatttgtgtcctgtgctgatttcctatgtttccttctcctataattcttcccttattgttatctccaaatgtgacatatcctctttcctttgacacaaagtcagtaagtctggacttgccacctgtcatgtgcctacagtagccactatccaagtacaatagcgagtctcttgcttttagtcacacctacaagacaaaatcaattagagaaaggtggtacccaattgaggttaggttaatttacacaattaaatatttaggaatccaaacaatctangaatgtaaaatctcctaacatagcatttataagatatgtgtcctcttttcatgcaataatgacaagtc

SEQ ID NO: 37749 - DNA, 462 bp, Glycine max
  unsure (1)..(462): unsure at all n locations
agctntagagcttagggtcatgtgtactactgagggttgagaaccccgtactcaatggttgtccgagtaagatggttgtccgagtaagaatcaactcacactgaatccaggcttgatagaggtaaatacaaaaaggtggaggaaatagttttcgtaattaaaagagatatgattaagacaatgtcgtgggtgctaagtaaaatttgtataagttcattttcaaggagtcatcgaaattgactcaaatgagatgataggcaagtccaagacttatgcaactatgaagaattacttctcaaggtattaactcgcaatagtgaaatatgtcgaacatggcattccttgaaagtgcattttcctcgaagtaaantttctaaagtatattgagttttcagcctaanatgtctgagtactaaatgatcatacggagactctgaagattnttgaaattaaatactaaca

SEQ ID NO: 37750 - DNA, 454 bp, Glycine max
  unsure (1)..(454): unsure at all n locations
ttctcttaattgtcattgggcttggcgaccacgatcaataaagtactttcgacacctactatatgttgacttcaccaacgctgttattggaatgctgcgacaatctttcaacaccttattcacacattctgataagttggttgtcatgtgaccatatcgtcgtccagatgtatcgtaagccatgctccatttttcctttgagattcgatcaatccatcttgctatagctggactcaattgacgaaattnttctaagttttgatcaaacacatgcttgcaaggagtgtacgctgcatcaaatttgttatcatcaacagttgtacgtagacatgaaactcaaattaaattaatgtataaaataaaccttacccaagttcttgaacatctctttctggttcgcgttgttgaaattgcgattganattgctggctatgtgtcggacgcagtacacatg

SEQ ID NO: 37751 - DNA, 464 bp, Glycine max
  unsure (1)..(464): unsure at all n locations
agctntagaaaccctaattggtggaagaagatgttttgaagaataaaatatttgacaactttttaaattctacatcaaagtacagtctacgtgtcacaatttgggataatttgtcacattggatagtctatgtggcactaaaaatttccaacaatgcacctcactaacgacgttatttttaaatttaacgacaaagactantttgcaaaacttatgcaaagataataactattttttacattttaaaaagatagggactaatttgcaaaaggggtcaaaagtcagggaccaaaatgcctatttactctcaatataataataaactttataataaaaataataagcaatgaatataaatttcccttctaagaacctgtggataaaatatagaacgcacaatagaaagtatagaaaacagagacactcgttaacatganaaatctttcaataaaaatcatgggtca

SEQ ID NO: 37752 - DNA, 488 bp, Glycine max
  unsure (1)..(488): unsure at all n locations
ttagatgcattaaaggtnaacagacgaaaatcttgatattaggtgcatataaagctacagacatcttggaattgatacatacagacatttgtgggccatttcatacaccttcatgtaatgatcaataatattttatatcatttatagacgattactccagatatgcatacctgtttcttatatatgaaaagtcacaatctctgaatgtgttcaaaacatttaaagttgaagttgaatataaactcaacaaaagaatcaagagtgtcagatctgactgtggtggtgaatactatgacagatatgacagttcaagtgaacaacgtctgaaggcctttgctacgtacctagaggaatgtggaatcgtnccacagtacaccatgtcggggtcacctagcatgaatggtgtagctgatagacgaaatataactcttaatgatatggtcagaagcatgatttgtcattctaacttaccatagtcactctaggga

SEQ ID NO: 37753 - DNA, 395 bp, Glycine max
  unsure (1)..(395): unsure at all n locations
agcttatgaattgngctgagtttctattaagcttatattatataattgtctcgcgtggtctttaaacaagaacaaagtgtgtgtaaaattaaatgaactttgaaaaaagtaaacaaaaacatcagaagctgttaaaaactgttntaggcccgataatcctaacccaataaaggtccaacttgtttttgaaccaaatcaactaacccacacaactcanaagaattgatttgaaacttgccttatttgaaggccaatagctaggtatggaattattgtggttgggtgggcaattatgggtcggaactcgatcaaactcgattgttgagaaaatccatcatcaatgatataatcaagatactaagagacaactacaaattatccattggtaaaactat

SEQ ID NO: 37754 - DNA, 487 bp, Glycine max
  unsure (1)..(487): unsure at all n locations
ccttgcagctaaagtatgctgagtgttgaattgtgtgctttattaattatcaatttccattggaaagaaactgttcttgatgagtagcagacttgcttgatcaatacctgattacaatttgtttgtttcatgaatccagtcaggtggacccaattgtggcgtccttctctggtggggctgttggtgtgatttcagtactgatgttgattgaggctaataatgttgagcaacaagagaaaaaaatgtgcacgtattgccatggaactggtatgttcttactctttgaagatcttcattctcttaatatatctcagtcatgcacattatagacacattatgtctntcatatagttctgagaattatactgttcacatagagtgaaagttntggtggctgtaatgaatggttaattgcactcttcacttttatgatatagtgagaaatcatnttggttgcactcaaattttaatcattaggattcatatg

SEQ ID NO: 37755 - DNA, 357 bp, Glycine max
  unsure (1)..(357): unsure at all n locations
agtagtggatgttggaattggtaatccaatttttctactaatntatcttttaatttggtttatttcgtaccttctccatttctcttatttttattttctctattcttcgngacctatgtgcctttatccatcaaatctccattctttggtgtagaagggatttgcagtttatattcatttttcaacgaaaaagtcattcggttggatagaatataagaaaataaagtctgacttagtttaaattgaattgaatacattgtcaaatttaattaaaagtaatttaaattgactcgaaaaactcaaaattttcattttattaatgttatgtaaaatactatatgttaacacattaacacc

SEQ ID NO: 37756 - DNA, 477 bp, Glycine max
  unsure (1)..(477): unsure at all n locations
ctttagaaaagtnggtgattaacatggtattaaagcttgtatgactaagttgtcatgagtttaatccttgccgccctcatgcttcaaaataaaaattgaatctcatcacaaatntgggtgggcctgtgtttgcccatcctttcaacattaggggttgtgttgtagtcttgtagatataataatgacatgtgtgaaccttcacctaacaacttaatatttaaggagagttggtgattgacacaattattagtcattattataaatattattaaaagctatgtttgttctctgttggtcttttgttttccagtacatgatgggattgagaggaaaaaataaccttaattattctaatcttataactntctgaatgatctgctgcttangaataagcagtactttcacaagtaattgataagaactatgaagttatttaggaaatatntaactatacgtagaatngtatggtaattaagt

SEQ ID NO: 37757 - DNA, 466 bp, Glycine max
  unsure (1)..(466): unsure at all n locations
agcttgtaggccttggatcttcttcatcaatgatatcatctgcttcttgaagatcatggaagtggaatggagaaggaagaaagatgattggagacgccacttcaaggagaagataagtgtagaagctcaccaccataggaagccatagataagagcttgaaggttgcagaagatgaattgatggagagggagacaaggagcatgaaattttgtgcctcacaagaggtttgaactttgagggttaattctcaaatgatcaaagttgaaaaaatgcacacacatgacctctatttatagcgtaagtgtcaaacaaaattagaggggaatttgaatttctattcaaatttcacttgaatntgaaatttgaattgtggagccaaaatttcactaattatgattagtgaattntagctatggttcaacccactaatccaagatcaagtccaagattctccactaagtgtgc

SEQ ID NO: 37758 - DNA, 475 bp, Glycine max
tagacgtatggcggaaggcactagatcaaaagctctatcatcatattaaaatggaagaattgtttgcgaaatttgcagcaatagtcgaggcgaagatggtgaccttatcagagaggttagcacatctcgaagctaacagatataatccacaacaagcacaaccagaagcgacttcattttcggcatcaggatcacacacagcgtcgcatcggatgaagcttgatgtgccgagattcaatggctctgacgccacaggctggatcttcaagataacgcagttcttcgagtatcacacaacaccagatcatgagagactcacgatcgcatcattctatatggaaggttaggcattagcatggtttcaatggatgcaccggaatggtcaattatcgtcttgcccggcatttcttcatgctctccattcgcgattcgcatcaaccacatacgaagatcccactggactgctatgtaaact

SEQ ID NO: 37759 - DNA, 615 bp, Glycine max
  unsure (1)..(615): unsure at all n locations
gcgacagcatcncccacacgacaacacataaccacgcaccacttctnnttacacntaannnaaaaaaannnnnnnaaggtaatgttgcatgcatagccacgcancnnnanannnnanccgcggcaagcgagcnagagaagagcacagccaccnaanacaactatccgtttcgaaccaccggcacccagaagacacggaaataccacaacgcgcccccaccacaaagcacgggaaataatcagaaagaagatcccgccgcgaacgagaagagacacacgcacaccagacgaaccagagcaggcgagacaccccaaccgcaaacaagacgacaaccgacaacaacacaaacaggcgcaacacaagcaaacacgacaacagcatcaaacgccccgccccaagaaagacggaacggcaaaggcggaggaagaagaacgcgcacacacggatgaagccaacacccacgcaaacacagcgagacccaaccagagcaaacacatgcccagcacgaagagaggagacagcgcatccgcggcaacgagaaagacagtgaacaccaagacccagacagcagaccagcagaacacgaaaccacaacgcggaaacaaggccaaaggc

SEQ ID NO: 37760 - DNA, 339 bp, Glycine max
  unsure (1)..(339): unsure at all n locations
ctgcagctttacttatgggagggcgggctttctttactttcttgtctcaaccgcgagctttgaccaccgccctttctttccgtgatgattctctttatatctgcctgagtgggcttatagcctaacccatacttcccacgatttcctttggcatttatcaggctagttatgccgccgttgtctttgcctaaacccattccgggttcgtaaccgttccccaacataacccgggccatcattactgctgcatcggataggcaaggctgcccagagaaagagtccacggaggaaatgcttaccacctcacaagactggagagcggnttctaatgactcctct

SEQ ID NO: 37761 - DNA, 488 bp, Glycine max
  unsure (1)..(488): unsure at all n locations
tgccacccagctcaactcgcccaggcgagctatgttgcttccttccagaagcaaccgccttctggaggaatattctggaaggcccaagtgggtctggttgctatttgaaccctcanttttactaagtacacccctctgcctttntatggtgattctttttccgtaacgttacgaaactttacgaatttcgtaacaatgcttgttttctttccgtaatgttacgaaaccttacggactacgtaatcaacccctttttggtgtcaggatgtcatggaactttacgaattgcctaacgatgggtgccaagtacctcgaagtggtcaaacgaaagttgcatcccaataatggatggtccctggancacaatatggtatgacagtcatcatctacttcctccttcaaattgttgcaatagtgattgaacgtaagctatgtcctttcatatgatgcgtagtataaacattcaacttcaatattatgaataatac

SEQ ID NO: 37762 - DNA, 355 bp, Glycine max
  unsure (1)..(355): unsure at all n locations
agcttctgttttcaattacgagcgtctcgatattcttcggngctctatccgacatccgagttaaaagttattgtcgtttgatttttctaagagcttcccttttcaattacgagcgtctcgatatattacgggacacaatcggacacccgtgttaaaagttatggtcgttggaatttgctcagagcttctattttcaattacgagcgtctcgatatattacggtactcaatcggacatccgagtaaaaaggttttgtccgttgaattctctcagagcttctgttttcaatcacgagcgttctgatatattacgggactcaatcggacatccgagtaaaagtttggtcgttgaattt

SEQ ID NO: 37763 - DNA, 469 bp, Glycine max
  unsure (1)..(469): unsure at all n locations
tctggtgggacatcttgactggctttccaatctgacattcaccacagattctgtcttcttctattntcagattggggatgcctctaacagcacctttgtcaatgattttcttcatgcctcttaagagcagatgtccaaatctttgatgccatattctgacttcatcttctttggaggatagacatgtggaggagtagctggtttcttggggtgtccataggtaacaattgtcctatgatctgctgcccttcattagaacttcactcttctcatttgtcaccaagcattctgactttgtgaagtttacattgaatccttcatcacacagctgactgatgctaatcaagtttgcagtcagtcccttcaccagcagtactttgttcagactaggaagtccatcatgaactagctntcccatcccaatgatctttcctttatagccatcttcaaatgtcacataactagtgga

SEQ ID NO: 37764 - DNA, 383 bp, Glycine max
  unsure (1)..(383): unsure at all n locations
agcttgactaggcgagttgattttattcttattttcaccttagttattaatcaattctgttgagaatgagaaatcccaaagagaacatgtccggttgattttccgctttattntactaaaagggatatttttgntattatattattattttatctctttttgatttccaacgtggntactgcacgaccgaacggtcggaatttattttaaccaaagattatggatcatacaattcaaacgttcggtggaaatttaattttattttaagttaagcgagaaatgacttaagtaaaatgacttaagcacgtcaataggggggtataaaaagtaaatgagatgagaataataatacacgaaacacaatgtggacccccatgggtaca

SEQ ID NO: 37765 - DNA, 466 bp, Glycine max
  unsure (1)..(466): unsure at all n locations
cgacactacaatgttagagctggatgagtcatttgcataaatgataatagaaaatattgttaagtctgctgctgcaactagtcaagatgagtntgtgtccaactgtcataccctaatttcgtccggggacctttgcttgatgacatgcgaccattctttggtcctcgtgaggtgcttggcacccatcattaagcgatttgtgaaattccaggacatgccgaaaaaccaaaaaaatattgatgcagaatccgtaagtttccgtgacacaccggagatcaaatggaagcatcgttgcataattaagtgaggttccgtaacattccgtaagttaaaaaggggatgattatgtaatccgcaaggttccgtcacattacggaaagaaaacaagtatcgttacgaaattcgtaagtgttcgtaactttacgaanaaagaatcaccaaaaacagcagaaggggatgtacttag

SEQ ID NO: 37766 - DNA, 313 bp, Glycine max
  unsure (1)..(313): unsure at all n locations
atttaaaaagactttctaaaaagctagaacttgatctctataataaacaaatcaagtcgaactttagataggtcaaggcaaagactacaagctgctcgactcattntttttcatccctatatgtggatgcaatcctcgtatttaatttctataaataaacaaatataataaacaaaataaagattcaacaacatgcatcacgtacgtgatacgtcgatctttcatgtacagaatacttgtgtttttctttctgagagcttaacagcgatcgaacaccctgaagaaatcttactcctacatcctaggaagatat

SEQ ID NO: 37767 - DNA, 439 bp, Glycine max
  unsure (1)..(439): unsure at all n locations
agctngcatgacaagttaataattgcttaatttatatttaggaaatcaaattcatcctcatttcccagcatgatctgcataagcaaatatgacaaatatcatctgctcttttgcaatttgaatgagatcctgaaaaccactgtatttctaaaaggctgacggatatctaataggattgcacataataataacaaagaattccagtacatctaatatattgaagtttacaatggattagtagagggatcttgactacgtttgaccgaaagcaaagggacacaaaacacatttttccctttattatatgaattaataactatgacaatactaaaattggagaaaacatgcaagtttcgcatccatgaatccatgcccatcatacattatcataggatacaaaaacctaccgaaagaatatgcaccacaacgttnntaacat

SEQ ID NO: 37768 - DNA, 457 bp, Glycine max
  unsure (1)..(457): unsure at all n locations
tgatacaaggggtgaaaatgtgtatntctnggtataagtgatgtgtgcaaaacatataaattgtacaaccctctcaccaaaaagattgtgaccagcagagatattatctttgatgaagaaggaacttggcattggagtggccaacagctntctccaacatatttagaagctagttttgaagatggggatcatattacaacaccaactataattgaaactttggtgaaaagtactgaataagaagctaaatctcgtgacctcgtattcgaaaaaggcctacttggatgagggattttgaggtaactggaattaatcaaattgataatcctattactcattttgctgtatttgcaaatcgtgatcccacaacctctgagaatgttgtcaaagaagaataatggtgtaacgcaatggatgaggaaattgcagctatagaaagacatgacacatgggaact

SEQ ID NO: 37769 - DNA, 322 bp, Glycine max
actttgtatgttaactcatgcataataatatatgtggttcacttccatcttgctcttctttatctttgtacattttttattccttttttgttcttttttaatgtctattacgctaaaattgatagcttaaaagatgtttagtttaaaaatttttttgaagagagaacaaaagctctgtctgaattttccttcaactttatgttgtatttgcagctatgactattcaagatatggagcatatacaggaaaaggatgtaactcctctgaaatcctgttttcccctaaatacttttgtagtttggatcaaaacgaaattttcttt

SEQ ID NO: 37770 - DNA, 153 bp, Glycine max
aagtgcacccgtgtgcaatcaacgcacctcagatacctagatcattgatatgtacttccgaggggtattggttacccacatcttatgcactttcatggctaaatgtatattcatgcctgctcaatgcatacggggtgcgcgaaaattgaacac

SEQ ID NO: 37771 - DNA, 114 bp, Glycine max
  unsure (1)..(114): unsure at all n locations
ccagagcagnagaaacaccacggaagaccccggggaacaggcaccccccnccaaaaancaagaaagccgaaggacgcccacanagcacccagcaccgagaaaaaggaaaccccc

SEQ ID NO: 37772 - DNA, 343 bp, Glycine max
  unsure (1)..(343): unsure at all n locations
tcacttaaaaacccnncctagtagtctttgttagatgagtatattagctgggcaacttcacttaaaaaatctaatatagtataatagcctatatcacatctttgtgaatcgtctattctggtacgcatcacctcttctgtcaggcatttgtggagaggggctgatgaaaagtcccacatcaccaatggtctcaatttttggggtgcaacttatatatttgttgggcaacatttcacttaatgccaattggttttaggatgaaatctagcagnagatatgtttatagtgattcattgagtaatcatgccaaattgcattttattatatctcatgttttcttcac

SEQ ID NO: 37773 - DNA, 187 bp, Glycine max
  unsure (1)..(187): unsure at all n locations
agcnnaaagtaacnnaanagtagnctattgntttttgaaggggggaagggagaaggggaacgaanganaacccccgcaccgcagacaaggggnccangccnagncnccaccccaccacaccncaacagcgccaagaaaaaaaggacaccgaaaaacggcccaagcagcagacaacaaacccgacaaa

SEQ ID NO: 37774 - DNA, 321 bp, Glycine max
ggcttttggtgttggtgattttaaaccttgggagaaaggaggagcagggagtgcgacttgggaaatactagttgggaaagacactcggagaaggcaattttggaaaagtcaagttggccacggacactcattctggcaaactatttgctgttaagatccttgactagagcaagatcattgacctcaataacattgatcaggtctggatcaattacttcctcaattattgctgatcattcttttttaaggtggatttggaatgggcttttacaaattgggagttttcaaactcgggttgagtcccacttcatgggaagagtt

SEQ ID NO: 37775 - DNA, 347 bp, Glycine max
tccattttcaattaccacgtctcgatatattacgggacccaattggacatgcgagcacaaagttattgtcgtttgacttttctcagagcttttattctgaatttcgagcgtctcgatatactacgggacacaatcggacatccgagtaaaaagttattgtcgtttgattttgctcagagcttctgttctgaatttccagggtgtcgatataccacttgccaccatcggacatccgagtaaaaagttattgtcgtttgaatttgctcagagcttttgttttcacatttgagcgtctcgatatataacgagactcaatcggacatccgagtaaaaagttattatcgttt

SEQ ID NO: 37776 - DNA, 314 bp, Glycine max
taacagacaaactcacctgaggaacttgagttgttttaccattcccatcatatgaaacctccaatccttcttttaatagatgaacaacccttctacgcttttccttcatagtctcatcctacaaatgtatgatggcaccagtaaacaaacagtctcaacactaaataatttttccataaaactatcactgtttcaacaatacaaacccgatttatattgcatgaagatggcaaaagaggatatgcatactctggaagtgtgttttcacagaaataaaataaaaataaaaattcaaacttcggtcaacaacttaa

SEQ ID NO: 37777 - DNA, 344 bp, Glycine max
  unsure (1)..(344): unsure at all n locations
aaccattgtctatgagtaccttcgcgacaacatggnccatacatctgacagacacatgtagagccttgttgtgccctctcccctcagcgggaatctcttcttccgcaaacgcgatatagttattggtggttatatgattaacaatgccttcaaaacccttaactgagatgtcgtgtgctacatgggcttcgttgaggacttttatcaacagtgcacgatgaggctcggagtttatgagcaattcgagcaaagatattcttgccggagttttattcagttgctcaactactttaaactcgctttgttggatgagacgaaggaactcatgagcctcttccaaagtc

SEQ ID NO: 37778 - DNA, 333 bp, Glycine max
caacccgggcatagttctgtcagtgagaacctgtgatgtacctaaacaggcgagcttctggcagtcaacagataaaaggaacaaagaccacaaagcaagggggcttgtggtggctggccagctgtgaactttgattgatatgtgggttatggcctctggtaatcgattaccaagggtgggtaatcgattacaaggcttaaaaatgaagacaggaggctaagatggtctctggtaatcgattaccacgtggtgtaatcgattaccaggcttgaaaacgaggtcaggaagccatgagggcttctggtaatcgattaccaagggggtgtaatcgat

SEQ ID NO: 37779 - DNA, 344 bp, Glycine max
  unsure (1)..(344): unsure at all n locations
tatatatgcngnnggtcactaacatacttatagtattctagtcactcaaaataaataattaggggtgaaatacaataagtggatattaatatccaaaatgtgcattaatatataaatcacacaaatacacaatcccacaattcatatttttttttcattttcaattttctttcaccaaattttatcaaagaaattgaaaagtcaaagctaacattgttaaataaataaaaaattgaaagagtgctaatgaatgtgcccttttttgcttttatcataccctaatttcgttcggggaccttcacttcctaacattttgattcttactagcggaattgagttgcttg

SEQ ID NO: 37780 - DNA, 266 bp, Glycine max
  unsure (1)..(266): unsure at all n locations
ctaacacgcannnggagcgtctcgatattttatgggactcactcagacatccgagtaaaaagttattgtcgctcgaattggctcacagcttcaacattcaatttcgagcgtctcgttatattacgggactcaattagacatccgactaaaaagctatcgtcgcttggatttgctcagaggctaaacattcaatttcaagcgtcccaatataatacgtgactgaataagccatccgactaaaaagatattgccagtcgaattggctc

SEQ ID NO: 37781 - DNA, 343 bp, Glycine max
  unsure (1)..(343): unsure at all n locations
tgaacgtgtgtanccaccatctttttatagttgaatactagtgatgtgtctactatcattgatatcattttttctccgccattgaggtgccacttgagcttccaggtctctttacctttgggcgtattctttgaaagatctgtgcccctttttgcacatgttctgttgttgcatcctatccggaaccatatcaaaattgtactgatactgcctaacgaaggcaaccattaggtccttccaagagtggactctagaaggttccaagatagtgtaccaggtaacagctaccccagtaatattttcttggaaggaatgtatcaccaattcctcatcttttgcgtat

SEQ ID NO: 37782 - DNA, 332 bp, Glycine max
ttttaattaaccattccaccgacatgaatattacctcttcaccatcagagttggcaatgtcatcaggctgagagtcctcatcatctaaacttacgtccagagttgggtctgccttgctggtgaacgcattggccattacacataggttggcttcttcttcaccatcctcgtcaaatgaggaattgtacaagtcctaccaagagctcatgaggctcgtctttttgggcttgaagaatttcttcttcttatcctttacctattcaaggtcaggacattccaacttgaagcgccctagtttctagcattcatcccatatgattggatctttctct

SEQ ID NO: 37783 - DNA, 332 bp, Glycine max
atctttgattgtctttaatctttcatccactacatcgtaagttctcgagccagattcaaagcttgcattcctttgatgttttcactgccttcatactcttgcttcaaaaaattatagattctgtgtgccattatcatcgtcattattctggtcaaaatgactagagatacaactgtgaacaaaattgatttggctttggactttcgaagccttctttctttgtgacttttcatttgggcaacaatgagattatttggcaaaggaggaacttcatagacctcttgtactgcttcccatacatcattagcatcaagatatgctgtcattttgac

SEQ ID NO: 37784 - DNA, 337 bp, Glycine max
  unsure (1)..(337): unsure at all n locations
tgcctnnnaatgtccaggattgacaaggcggccgatggaactatttccgccccggagtacgactgctaccgctttatgagcgttgtacaccagcagcgctttgaagccatcaagggatggtcgtttctaccggagcgacgcgtccagctcatggacaacgagtatactgattttcaggaggaaacatggcgccggcggggggcaccactggttactcgtatggccaattttgatccaaaagtaggccttgaatattatgccaatgcttggcccacagaggagggcgtgcgtgacatgagatcctgtgtcacgggtcaatagatcccgtgactatgcc

SEQ ID NO: 37785 - DNA, 378 bp, Glycine max
agcttgccctagttaagattattaattttattcattaaatgacagtacatttgtttcatgttttgctgttttacaaaaagagctaaaactactctgttgcacttcgtctacatatacctcaacattactatgcttaataaaatttggtgatcttagtaaaacataaagcactttctcaaatattaagatcaaataacattcagcgtatccaagagatgcagccaaaataaataatgagaacattaaaaaactgaattacctcacttaaaatgagaacccctttcttggatgcttgacacgcaacaaattcatagctgacaagattcattccatcccttaaagatgtaacaagtgctacatctaaattcgatgtgagtc

SEQ ID NO: 37786 - DNA, 331 bp, Glycine max
gtgtgagtttaattctgtactatagtgaaccctttgtgaagggttatgccataggttaatttggtcaatttttcaaaattgtaatatttcataacttttccccacttcaggccattgaattatgtgatatatatccacggttgtagggatttggagcattcatattcaccttagaaaataaggggcatgtcatgttaggcagaatccataaaggcgtcgcattaaataattgtctttttgaggtctgaagacggcgaatagactcggataactgagataataatatactaatcacataattacaattttttttaaaaatcaaacaaaaaag

SEQ ID NO: 37787 - DNA, 312 bp, Glycine max
ctttccattgctaaatacaaagcatttgtaaccaaaaacatgaacgtgtgaaattttgggtgttctaccattaaacagctcatatggagttttctttaaaatgggtcttattaaagcccttttcatgatatagcatgcagtgttaacagcttcagcccaaaagtattttggaagaagagtgtcatttaataaggctctagcaattttttccttacaacaactccattttgatgaggggttctaggcgcagaaaagttatgttcaatgccatgcttatcacagaataattcagaatctctattttcaaattca

SEQ ID NO: 37788 - DNA, 349 bp, Glycine max
gaccttaaaagtttatatataggacaatggactaagatgacaacgcgataacacatgggtctcatagtcatatcattagcctatcacttgtttcacatcaagacttctgcactgttactctttggatacacgatgataatcctcttgacggaaccgctgtctatatactagccttatttgataagaagctcttgaaaggagatcaaactggtgctctatccgtctcaaaggaggcaacccatgacgtgtgccttttgggaaaatatcgccaaattcgttggataatacttccacacctataaacaatgaactagcggtataacacaaacaataatgatgagacattaat

SEQ ID NO: 37789 - DNA, 376 bp, Glycine max
agcttttagtcgtgtaaatttctggactaattaataattaactgttacattgttaattggagtgtggaacttgtacatgccaaatgtgtatattgtggtggtttttttgcttgttatttttttagttgaagcttgaaattgatggcagttattattaggttacaaaatttgggtgaatggtctgttttgagatggatgttagaatgattgtttggatggttttgtttcaaaaatgggtgaaaaaactgatttgaattggatcgttgtaattaaacttaaatcgaattaatttttttttaattagttcaagaagaaaggaatacactattttataaaactaatccaattaattaaattgttgttagaaagtcagttc

SEQ ID NO: 37790 - DNA, 343 bp, Glycine max
  unsure (1)..(343): unsure at all n locations
ttctatgacatgcnnnntttataggcgattcataaaagacatttcaaaaattgccaaaccacttagcaatttactaaacaaggatgttgtgttagcatttgatgaagactgtttggaagcttttaatattctcaagaccaggctagtatctgcccctgtgattatagcactagattgggggcaagagttcgaattgatatgtgatgttagtgactatgttgtaggtgccgtacttgggcagagaaagggcagagttttccatgccatctattatgccagcaaagtcttgaatgatgcacaaatcaattatgctaccaccgagaaagaaatgttaggaattgtc

SEQ ID NO: 37791 - DNA, 324 bp, Glycine max
tttcgtcattgtctccaacggtagtggggtgccacctaggtttggggcgtcttcatcttatgataatttgcaatattcttatttgctcatgatttttgcgggtaatgtttaattatttattttttccttgtgaaataatactttaaattcttgttagcaatgttaaatgagatgattcaactatctcttagattcattacatttatgtattttggtaagttgacaagaatacatatctttgcaatctttggttttgcatttgcactatagtggattaataatagtcaatgatacacaacttttggctattcaaacatgtaacta

SEQ ID NO: 37792 - DNA, 321 bp, Glycine max
tcttccggaagactattaattcttccgttgtttcttcttccagaaacattccggatgacgttcttccggaaattgcctgtgagtatttccggaagacacaaattaatcttccggaagatatatgtcctacctcatttcccttaagctctcatattagcgtacccttgttttacctgaggaccctatagatagatctgcgtatcatatttaaccctggactatggcccattctctctataaatcagattgctaatgaatcacatcctccaacatgctgaaccataattgaattctaaagatcgagaggagacttttgatcta

SEQ ID NO: 37793 - DNA, 330 bp, Glycine max
acattccatcaactatcctgttgatgttggcaagagggtatgcggctttggggcatgccctattcagatcagtgtagtcagtgcacattcgtcatttgccattcatctttttgaccatgacaacattgacgagccaggtagaaaacctgacatctatgataaagtgtgcatgaaggagcttttcgacttcttctttgaaggctttacgtcgttcttctcccatcttctttttcttctgtgatataagtttggcttgggggaagatagcaagtttgtggtagattatgccgaggtggattcccgacatgtcaaatggctgccaagcaaata

SEQ ID NO: 37794 - DNA, 339 bp, Glycine max
cttctatagaaagggagtactaatttctctttattgcctcatctctcaatgagctagtgaagaagaatgtggcatttacttggggtgaaagataagagcaagcctttgctttgctcaaagaaaagcccaccaaggaacttgttctagctcttcccgacttttctaaaacttttgaaatgtgatgcctctggagtgggagttgcagttgtattgttacaaggtgggcacgctattgcttattttagtgcaaaacttcatggtgccaccctcaactaccccacctatgataaaaagctttatgtcttaataagatacctcaaaacttgggatcattacctt

SEQ ID NO: 37795 - DNA, 360 bp, Glycine max
  unsure (1)..(360): unsure at all n locations
cactataaaactaagcttatagaacnnnnagccttaatcatttttaaatatgcatgtgaattagggcgcatcaacaagaatcatgccaaggctattgtgcaagcaatcaatggggcaaaacacaccaaatgattataatgatggatggctcaaattctcacaaaggtaaaatcatcactttcaaattgagctttcaaaactatcatgacatgtagagaagaatcaaggatttcaagtcacaaaatgtcaagaacttttattttcaaaacaattacccatttcttgaacatatcctataattcaaagaaaaacatgcaaagtcgtacgtgcacacaaaattgacccaaaatattaaactga

SEQ ID NO: 37796 - DNA, 395 bp, Glycine max
agctgactagtgaaggaagttctatatatttttcggcgccaagatggtcatatctgtttcctgtgagacaaagttatgagctgacagatagcgctcaacttccgatgcggtagcataatgggaaattcccgcctggcctggttgcatgcctagctcagcgtaatggctaccatctcaagggtagttcacgaaagggattaccttgtgcctatgcagtacatgcgagcaaggacgcgctagcgacggtgtagggatcattggatatagctactatcagcatagcatactgtaagaaggattattttatatcgcaccatatgataattttttacagcagagtatagcatctatccgggcctattttaaattgtggaaggtgtattgtgatataactc

SEQ ID NO: 37797 - DNA, 345 bp, Glycine max
taatactgatggtacgcttttggttatttctgggacaagcaagatttggcggaatcataagggatggtcttgggaattggcacacaagttttatgggatcctgtggctttacaacttcagttcatgcagagttactcgccatctatcatggtttgaagatagctagagacaaaggaattgaaagattgatctgcaaatcatattcgaagcttgattaggacctaatcactggagaaatcaacttgtttcatcaatatttccctaccatcatgctgatccatttgttgaagcacatggattgggaggtgacctttgagcacgtgtaccgtgaagggaacaagtgtg

SEQ ID NO: 37798 - DNA, 302 bp, Glycine max
tcagatgcattaaagatgactaagggaaagttttggttacatataaggatatccaagaaaaatgggagaattacttttacatgctttccaatgatggccaagactcacgtactaatatggaggggttagaaatccaagaggaggaatgaaattggtattgttatggcataatttgcattggtgaggttaaaaaaaagtcttaaaagaatggaaagggtaaagttgttggtccaaatggtatccatattgaagtttggaagtgtatgggagaacaaggttttattcggatcactaagcttttc

SEQ ID NO: 37799 - DNA, 186 bp, Glycine max
aagaaggctaatggattggatcctacatttcactgtctgtgggagaaggacattgtgctttttgcaaacactgtctctaccgtcctaatgctgggaatttcacaaagtgattttcccaggtggcgtactaatctttaggccatcccctgactcactatccaacatttgcacattcactgtgacaag

SEQ ID NO: 37800 - DNA, 387 bp, Glycine max
agcttataagaacaaaattgtctttttatttccaaatatgcatgtgaattaggaagcatcaataagaatcaagccaaggctattgtgcaagcaatcaatggggcaaaacgcaccaaaagattatgatgatggatggctcaaattctcacaaaggtaaacttatcactttcaaattgagctttcaaaattatcatgacatgtagaggaaaaacaaggatttcaaatcacaaaatgtcaacagatttttattttcacaacaattacccatttcttgaacatatcctataattcaaagaaaaatatacaaagttgtacatgcaaacagaattgacctaaaatattaaactagaaacccaacaaaactaacaaaactaacaaatttaacac

SEQ ID NO: 37801 - DNA, 254 bp, Glycine max
tgagcttttccttttttatctaaaaagactttttaaaaagtttgagcttgacctttatagtaaacaagccgagccgagccttacataagccgagccgaagaccctcgacaagctgctcggctcatttccacccctagtaatatgcaagggtgttgaaatcaagaagaggaatgaaattggtattgtccatggcataatttgcattgttgaggttaaaaaaaagtcttaaaataatggaaagggtaaagtcgttg

SEQ ID NO: 37802 - DNA, 376 bp, Glycine max
agcttgaagctcaaggaaattcttgaagaagttctgaagaagttttggcttttacatgcccaactctcttgagtggcatttgtattggttgttatcttggttggtgcatcttagtatatttgatatctgtattgcatcatgcatcatcatggtttgttttgagaaaagtttctaagttagaaaagtttcttcaaaggcataaactctctgttttgatcgattacagcctcattgtaattgattacaacaagttgtctaaagcttgtagacttgagtctcgtatcggtttaatcgattacaactatctcataatcgattacattgttgtttgaaagaatgactgatttattcaggactctcggctttaattgattac

SEQ ID NO: 37803 - DNA, 312 bp, Glycine max
  unsure (1)..(312): unsure at all n locations
atgaataacgaatgaagaacntccaagaacggttgaaacctttgcgaaattcttcacggaaaacgttacggaaacgtttcggaagcgcctcggcttacattttcttcacggaaacgatctttccaagcaaattcgaaagagagagaagtgccaaaggggctgaacccttatcttcttcacttcctcccctatttatagcaaaataggggaggtggttgccgcccagctcgcccaggcgagccaggttgcttcttccagaagcaacagccttctggaggaatattctggagggcccaagtgggcctgggtgct

SEQ ID NO: 37804 - DNA, 376 bp, Glycine max
agcttcaccttctggtcctctttatatttgttgcatgagaaaacatgctctattttcatctcccactccaagtaggcctccggatcattcttttctttaaatggaggaatgttgagtttaataccatcaattcggttttgtctaggaacaccatcattccctcttctcctcctttcttcttcattatgatctctattctccatttgatccaacctctcatggagcgcatcatctcgttgttcattaacctctccaaatgttgcatcaaagcttgcatttggaattgcgaaagccccactccatcattatgattagtacctgacatctcagacaaacaaatcaaacgtcacaagacaattatagttgctgtttgaat

SEQ ID NO: 37805 - DNA, 344 bp, Glycine max
  unsure (1)..(344): unsure at all n locations
tcttttggaccttnnnnagcaactaactcctctttcagaaccatgctatgtgctcgtgactggtccctctcttcccttcgcagcttgagttcactattgctaccccatagagctccgcgaaatttattccggccatactcttccttgcgagccctcttggtctcttgttcaagggctcttgcggtaattgcattctcttcccgtaacccggcacactccttccgaatgtgtgttgcggccaacttgaacttctccttggcaagtttcgcctttcctaactcgcttttgagagcttggacttcttcgtcctcttccggtgcttcaaaactctcttcgctgacgac

SEQ ID NO: 37806 - DNA, 385 bp, Glycine max
agctatttatacaaggctcattttttgttgaagctccttcttccatggctgattccctagtggatggcgcctcctctcacctcttctcctttgtcttccgctgcatctccatggtggaaaatcaccattaaatgacctcattgaagctcaaagatccagcctccatagaaaccccacaagcaagcttccatcattacctcattgatcacatgacctatgtgccgaagttattcactttacaacacattttgcacatctacgacaacatttttggtttattgccacaccaatcaatgtggcaagaatatgaaagagatttgtggggtcatgatccaaggagaaagatgactgcaaagagtcgttccggttcaactcatattcctat

SEQ ID NO: 37807 - DNA, 345 bp, Glycine max
agtaagtggctttttaacccactctttattctatgaatattgctaatctgctaatggattcaatctctcctcaggatatcactattggagttgctattggatcgtctacacagatatctatgtttgtggtatggcctccaactgttattaaatgttattaagttgtttggggtatacatttaccatatctttttgtgaataaactatcctgaatttcttcttgtcatacgaggacatttcttgagtttattaactttttaaaattagttaatcagatgatgatcattggagaaagttgatggttcttgatctcttgaaaattgtagatccctttctgtgtagttg

SEQ ID NO: 37808 - DNA, 329 bp, Glycine max
cacaatgagtactttggaatatggatatatttggtgtcaccaactcttggagctgtggctggtacttgagcctataatttcattaggtacacgaataagccagcgcatgaaatcaccaagagtgcctctttcctcaaaggtggtgaagctgagtgattcaacagcaaatgcaagaatgtggttttttcttcttcattttcttatcttcaatttcaccatgcattagggttaaaatttaagaaagaattactggtttagtgtgctgaataaccctataatatagatagaggaaatgaaaaatacagtttctcctaatccatgcaacaatc

SEQ ID NO: 37809 - DNA, 377 bp, Glycine max
agcttgcatgatttacattctccccctttctcaagaaaattcttaattcttcttgatatcatcaaaatcttcatgatttacattctccccctttttgatgatgacaaccacctgtaggttaggagcaacaacaaagaaaaaatatctatttgcatatagtttactcccccttggttttgcaatgattgcttatatgagacagttgaagatttcatatttttcttatgtaaacaaattgtctcataaacaatagataatttttcttactattttatcttttatctttctctccccctttgtcaacatcaaaaacaaatcatgaatagagaggagtaaaatgttaccacttgttgcaatgtatgagaatcaagtgatac

SEQ ID NO: 37810 - DNA, 274 bp, Glycine max
gtttcataccctatcctagaatctaaatccatcgcttggcaccccccaaatgtcatgctcctggacactatccttggcgagcacacggagtgtcgtgaagatgcgcttaatggcgcctagtccaccttattcgtgccctctgtggggcgtttttctaaatgcatgtcgcaggcaacttgaacttctccctggcaagataggcctttcctaactcgcttttgagagcctggacttgttcgtcctcttccggcgcttcaaaactattttcgctgac

SEQ ID NO: 37811 - DNA, 342 bp, Glycine max
  unsure (1)..(342): unsure at all n locations
tctatagaangnnagtcctaatttctcttctattgcatcacctctcaatgagctggtgaagaagaatgtggcatttacctggggtgaaaaacaagagcaagcctttgctttgctcaaagaaaagcttactaaggcacctgttctagctcttcctgacttttctaaaacttttgagctagaatgtgatgcctctggagtgggagttggagctgtattgttacaaggtgggcaccctattgcttattttagtgaaaaacttcatagtgccaccctcaactaccccacctatgataaagagctttatgccttaataagagccctccaaacttgggaacattacct

SEQ ID NO: 37812 - DNA, 362 bp, Glycine max
agcttagatatcacatattttattatcgcgatttacaaaattaaaatgggtattttattaagccgactacaaagggaggatagttatttttttctatagtgaaattagatcatctgattaatctattctaatgattgacccaagaaagctcatattgttgagagcacatttatagaccgtgtcgtccttccatcaattctgataatcacagtgctcattatgaaaaataactccttaatcatggcgatcatttacatctcttaaccattttttaattaaaaaataatctaaatatataattaaatctaactttgaaaaataaaaaaatattgataggtgcctttctctactaattatcatta

SEQ ID NO: 37813 - DNA, 344 bp, Glycine max
tcagtgaaacccaaaactataacatattttatatgctttatgaaattaatcttcaaaattagtatcaaaattttaaattttaatatttttaaaattaatttctgaaatgtatttaatatattctaaaactaattgcaaaaatattcacttattgtcaaaataaattccagaactttatttgcagatatagttaagaggcttatagtatgtatattttgtctttcttacactgataactatataagtagttttctaatttatagcacttcggaaaaaaaatcaaaaaagaaaaactattatataagaatcgtattgatgatgaggacatcataagaaaatgttgt

SEQ ID NO: 37814 - DNA, 370 bp, Glycine max
agctttccctcttttatcatatacccctcagccaaatagaatccatcttgggcctttttcccacaactctcataaatgggagagaaatgttcatctaaagcatacaagtccctaatattatcaaatcctaaaattcgagctcctagggagcaaaacaatgtgtgtctcctagagagggcatcagctaccacatttgtttttccctttttgtatttgataacatatggaaattgctctaggtactctacccattttgcatgcctcttgtttaacttgctttgccctctaatgtacttaagtgatcgatgatcactatgaatgacaaattccttggaaacaaagtaatgttcccaagtttggagggctctta

SEQ ID NO: 37815 - DNA, 301 bp, Glycine max
gagacgctctaaattgatctttggaagctctcgagaaattccaatggtcataagttttgacgcggaggtcagattcaggcgcatagtatatcgagatgttcgaaattgaacaatggaagctctcgagaaattcaaatggtcataacttttcactcggaggtccgattcaattgcataatatatcgaaactctcgaaattgaacaacggaagctctcgagaaattcaaatggtcataacttttaactcggatgtcagattcaggcgcataatatatcgagatgctcgaaattgaacaacgga

SEQ ID NO: 37816 - DNA, 367 bp, Glycine max
agcttgaagatgttgaaatatatttgggtcatgagatggtgaatcgcgttcgctatttgtaataatattatgaatttctcaaaccccgccaccttgctagtccgcacttaaagtttcctttacgaattggcgaatttctacctttgccaattaactatatctaacatgtgcttcaatttctcctgatttaccttgctcatgttataagaaatgggtgacggaatataaaataaataaaactgaaagacatttggactatttctgtctgatcaaaatatgaatattatagtataaaaaagtcatggacaattatcttacctttttattaaggaataaagcatgcgcgaatagtgaaatatccgaatct

SEQ ID NO: 37817 - DNA, 319 bp, Glycine max
ttttattattacagagtcatagtattctttgttttacatgaaaaaacacagatgtgctttctcaaaaatgaaaataaaatacataaacactgctatattcttgattattttttcacggacaaccactaggtatctggaccgatctttgtttatgagtggaatcatggctatagtctaagacgcagagacacgaaggatcccttaaacaacaaggaaattcatttatttggctaaaccccatttacatgaagataataaagttcactgttaccataccctgtgtcgctcagatgacaaatctacatgtcacttaatgtga

SEQ ID NO: 37818 - DNA, 359 bp, Glycine max
agctttacacttatgggggttatgtttcttcggctattggaagttgcattttcacctttgccagagcatttcttgctgtgatagctggatacaagacagccactgttctcctcaataaaatgcatttgtgcatttttcaagcaccgatatcattatttgatgccaccccaagtggtcgaatcctttatagagcatgtcataatattgcataatccttcattggactaatttgaagagagaactcctttacctgatatatggcttagcgcattgttttttagaagacgacttctctctttttatttcctcatgaccataatgaatgtaattggtggctaaaacctagatttactttatct

SEQ ID NO: 37819 - DNA, 238 bp, Glycine max
ttaatcatgtgtctacccaggcacctcctgtactactgccttcccacatccatactgtgaacgccaaaatgttcaacaatcctacactacacaaatttccttcttctctcactaaaaacctcataacatacaagaccctaaaccttctatcttatgtcaggcctgatccccttgtcctacccacactgtttcaaatattcatattcattcatacatgcactcataactcacattttta

SEQ ID NO: 37820 - DNA, 381 bp, Glycine max
agcttagcctttaatgggtgtgtttctaacaatgtctagaggaaaaacatccttatggtagataacaacaacaatggtcagttcattgttgagggagcatccctcacaagaccactaggcttcataggagaggtctatccctactagaataacataatggagatgtacatcaagtccactaagtacagactctagatgatcatcacaaatggagattactcattcctaaacctgaagcagaatggatagacacagaccttgctataatgaaattgaacaaaaagctcattatactttgatatatgctttatctaggaatgagtataataagatctgcagactaaagataaccgaagagatatgggattcgttgagcatcaa

SEQ ID NO: 37821 - DNA, 328 bp, Glycine max
caatcatttgtttgttgtctttaaacggatctatttcttctcttaagcttgcgtctaaagaatgtggtcattggagcattaaatgcatgtacttcttcatttgggaaaatcactcttcttcgctggcgtgtttaacacttcaggaggaaactacttccttttgcgtcagaacaagtctatgcagcagagtgttcctttcgatggtgattgagaaatttcacaggttagcttcatttattcttcataggattcgacagatcctaagagaacgtctttgtgaaaatatatcacagacacaaaatattaaatgaagtatttaatattgtat

SEQ ID NO: 37822 - DNA, 378 bp, Glycine max
agcttgtaatcgattacaacttgtgtgttattgattaccagacatgaaaattcaaatttcaaatctgaagagtcacaattctttagaaactaactgtgtaatcgattacaacaattatgtgatcgattactagtaaggaattttcaaaaataactcccaatagtcacaactattcaaaaagtttttgaatggttatcaaaggcctataaataggtgacttgggacatgaaattttttaagagagtttttctgaacaaattgtcttatcctctcaatacaaaattgtcttataactctcaaaatattccttggccaaaatacttgcaaattcaacaaggaatcttgattgatcttcaattgtaatatccttctcttaag

SEQ ID NO: 37823 - DNA, 341 bp, Glycine max
  unsure (1)..(341): unsure at all n locations
tgtgtattgttgcntnaactaatatatggagttgtccactgctttgcctgagaataacaattgcttgaccacaacaacgctggaggcggtaagggacaatggtctttcaaataaacctgttgtacatgaacaaggattatatcatgcggtgaccgactcaaatgaaccagggaagtcattgcataattgttatactaactatattcaatgtacctgaacaaaatgatttccaaacacgtgactgacacatatcatgcggtgcccagaagaatcaggtggtggttgacttctaagtggaaaaaatgtcatgctttgttgtcgggacaacgatacaaggatta

SEQ ID NO: 37824 - DNA, 367 bp, Glycine max
agcttcttgttggagtttatttcattactttctcttgaattttttgccatatttgtggagggattgcacaacctttcgcttatgtatgttctttattgtttttctactttcgatgtccttctctagtctgttgtggagaatttcttatcgtccatatgtctctactttctttcttgtctttctaaatggggtgcccaatgcatgtagctccaaccattgtgggacttggggagggtcagatttgcataatctcacccctatatatgttaggaagttccacattacctgcctcagttcttgggatgtatcttatatatttgttgggcaacttcacctactgccaattggttttagctgatatctaaca

SEQ ID NO: 37825 - DNA, 344 bp, Glycine max
  unsure (1)..(344): unsure at all n locations
ttgtaggacagactnnaactttgtggttttggtcttcgcgggacggacttatatgcatgtctagttctacttgtaattatacttttttctatttcgagaaaccacacattatatattaatttctctcattcaatgaaacaatgaagacaaaaggcaaaataaacaattatatttttatcatttcaatttcatgtgttaaaaaatgggcatatttacgaagattccgtgtgctgtggttccgtggagagcgacgattggagatctggtgtttggtggttctattgcgtgtggtaatttgtggaagctagatgatgagtggtggttctattgcttgcgatggttat

SEQ ID NO: 37826 - DNA, 511 bp, Glycine max
  unsure (1)..(511): unsure at all n locations
gtctaaccacttttcttntcaactttacacttaantataaactcactcagaanagacnnnntttgccctttgtagcttcgagacccctgagngacctggagcatgcaagcttacagatttggtttttctgacgaatatgatcaaagcggtgtatgcgaaagaaagccaaatatgaatcatcctcccattgatgaataccaaaattgggggaaattgaaacggtaaacaaagatggagaaaccttgctatgacgggcactcctacacagtcaaataacctgtgggcccacaatgtgcttacttagccataacatctcttctcacccaataaacaacaaagggccctccccaataatacataaagcctccccgttgcacattcccggccaaaaccccagccaataaggaatttttgttcaaaaagctcggggatatacccccaaatttaaggtctttgtcaccacgcccttatatttacctgataatgcaatggtagccataactcctccccg

SEQ ID NO: 37827 - DNA, 348 bp, Glycine max
tgtagaattatggggtaccatcacatgtggtactatgtggcggtcgggcgatggtgcacaacaagctttccacatccacaatgcgcgcataaacccaccatcccctgttgcccacctccaactgagctcacgtactcccacgtagcccatctcctcgtttctctcaacaccgggtccccatcaatcctctcaagcttccacaacatccaagcaaaacaacgttcaaacagcacaagctatcacagccaagcaaaacagagcaaaggcagaaaactctgctcaacacatcaaccaaaatcacagcttttctcacgtaaagaccacagtaacaattccttcgatccaatt

SEQ ID NO: 37828 - DNA, 379 bp, Glycine max
agcttctagagcaagtttgttctctctatagctatcatgaagttacaactaatagaaccatcctaagattccattctgaggaacctttctgaagaatcattacaatcgtcattctgatgtttgctgagaatgaattcatactagatgaatttctttgatgaaattcatatagatcttttattctgaagtaacataacttcatcactcttaacacttcttcacaacttcaagtattttgaagttgattacttcacaaagacttattagaagtttaggtgttggtgtgttactgttctgtttgaggtcacactgagaaatatttagtagacctgtggactgatgcttctcatctgtgcttctgatggacaactccattatt

SEQ ID NO: 37829 - DNA, 314 bp, Glycine max
tgaaaaagaaaagggtttagccccttaggcacttctctctctctcgaaatagctgaggaaaattagttccgtgaagaaaatccaagccgaggcgcttccgtaacgtttccgtaacgtttccgtgagtaattacgcgaagattctcgaccgttcttcaagattcatcgttcgttcttcgttttcttcagtcttcaacgggtaagtacctcaaaccaagcttttcaattcattctatgtacccgtggtggtccacattttgtttcatgtatttgtattctcgttttcatttactttttatacccccttttgacgtg

SEQ ID NO: 37830 - DNA, 358 bp, Glycine max
agcttccatcaagtgctattttagctcaagagctttttgtgtcgagggaaggagcccagagtttgaggaacctcgggatttgaggtcaaatcctttgcacgatggagaggatgaggcaatctctaccccccaagggtattggatagaagactccatgaggcttaagctagagctactaaagaaggccctatagggtgtgttgctaagctcgagcttctcaaggaagcttctcaaggagatgatcttagctcttagatgggtgtgtttagctaagctctagcttttcaaggaagttttcgcaaagaagcttctcaaggaggtttttcatgaaagcttatcaaggaagctctctaatcta

SEQ ID NO: 37831 - DNA, 346 bp, Glycine max
  unsure (1)..(346): unsure at all n locations
agccagagnnnnnccatggaggctggatttttgagcttcaatgagggccttcaatggtgattttacaccatggagatgcagcaaaaggcaaaggagaagaggagaggggaggcaccatccactagggaataagccaaggaagaaggagcttcaccaccaagaattgccttggataagaagcttgaagaggatgctttaatggaggaaaagaaagagagaaggggcgagcacgaaattgaaggaataaaagagggagagaagtggaactttgaagtgtatctcataagactttcattcatcaaagttacaacaagtgttacacatgcttctatttatagactagata

SEQ ID NO: 37832 - DNA, 362 bp, Glycine max
  unsure (1)..(362): unsure at all n locations
ttgttgtttataacacacacacacatatatatatgtgtgtgtgatgattataacacacacacacatatatatgtgtgtgtgtgtgtgtgtgtgtgtgtgtgtgtgtgtgtgtgtgtgtgtgtgtgtgtgtgtgtgtgtgtgtgtgtgtgtgtgtgtttgttaatgtgtttgaatggatattataaagcctattattttgtgatttgtgagaatagtatattgtatagattttttctgtacatcatgtcttatttttttaatactaaattgacttaaatctcttaaaatattttttgactaaatacttgtgtattactaaatgtattttgattgattctaattgaaaattctttttttataan

SEQ ID NO: 37833 - DNA, 338 bp, Glycine max
  unsure (1)..(338): unsure at all n locations
tgtaatcgnnnnccggatatgaatttcgtctttgcaaccttcaaccaacttatgtgatgaattacgatcagcttgtaatcgggtaaaacaaagactttgaactactgaagaaaatttctaactttagaaactttctccttactcctacatcatgatgcatgatgcatatatgaaatgatggcgactaagttgcaacgcataatacaacaaccaatacaaatgtcactctagagagttggccatgtaaaaggcaaaacttcttcaagctttaggactaagtcttcatgttgctccccatatctctaacaaacatcattaatccattttcaacacaaatt

SEQ ID NO: 37834 - DNA, 310 bp, Glycine max
tccttacacctccattaagtaccacctttaccctctcctccattgatgcgtcttcataattaatcatgtatctcctcacatgtatcgtgctaaatgatattaacacgactacttaaaattactaccaatgaaacctgctatagaaactatatctgattttcgatggatcaaatgtcatgctcttggtcttgaaccacgaattgtgttgagcacaggttcatcggaggatctgacttgctatcttttatggttgaaacccaaactataaaatttctacaaaaacatctaaatataagaaaacctcaaaaaa

SEQ ID NO: 37835 - DNA, 323 bp, Glycine max
cttatattcttatgtcacatcctatcagagtgttgtgttccccctctagcatgaggttcttcatagtcatccacctattcatctgttcccccgaacacaaagttcaagatcatcacaggatccaaacacaaacagcacaccgagagtgagttatcacattcctaactactagagagaaacaagacaacatatagtagccaaatacaatttacttagcatatctcacattatttcatcacacgtctcattcggtttcacaacattcgcatacttaatagtcaaaacacaatatcatcaaatcaatcactatagaacaatacaca

SEQ ID NO: 37836 - DNA, 383 bp, Glycine max
agcttggagaggctggttgtgtgtggtagaggagaaaaatgaaggggttggtttgtttgtttttttttttactttttctttctttaaagctgatgtggtatgaaaattcccaaaatgtccccactaattatcaatttttttatcagtccacttactatcacttagtaagggtattttgggtatttttaaacaattttgatgttgtgcccattccacccctgtgattgtgtttgttccaccactcccggagttgtgatggctgcaccactgaactgagacgcgatagtctcgttgtagtggcccagggaagcgatgcactgcactggcgggatagtgtattgtaaaacaatcgtattttatgttgataaatcaacaattttaaa

SEQ ID NO: 37837 - DNA, 346 bp, Glycine max
ttgcatcactactagttcaactggcttttgcacattaaggtcagaatcctaagtggtacaaaaaaataagtattaaatttaatcaacaacttaacaaatattacaagtgtgtattcaaatgacaatttggcagagggattattatattacttacataagataaaggtttcactagatgtctgggccatccaatgaatgagttcacggcgtccctgacatactgaatctctgaagtgggtaacgggacaatggcttcaccatcgtatacagtgtcaacacacacccttactacatcatctccataagcaacagtgtgtatcatgccacctactccaaagacctttcc

SEQ ID NO: 37838 - DNA, 374 bp, Glycine max
  unsure (1)..(374): unsure at all n locations
agcttcaagaaaaagatggtctcagcaaattccttatttccagaagggaattctatcaatagacctccaatctttaatggagagggttaccactactggaaaacccgaatgcaaatttttattgaggcaatagatctaaatatctgggaagccatagaaatagggccttatatacccaccacagtagaaagagtttcaatagatggtagttcatcaagtgaaagcataactatagaaaaacctatagatagatggtctgaagaggatagaaaacgagtacaatacaacttaaaagccaaaaacataataacatctgccctgngaatggatgaatatttcagggtttcaaattgtaagagtgctaacgaaatgtg

SEQ ID NO: 37839 - DNA, 306 bp, Glycine max
ttaggctccaagaggattgggctagagctactgaagaaggccctagggttctcatgaacctgagggtagatttctgagcccatgggccaatgttgggtccaattatgtttgtacatattagactaggatgtcattatatttggtctttgtatttaacactccataatgtaagtagggtaccttaaaaatataggatttttcaactctggtattttagggcacctagactaggtattgtataaggggtagattagaatttcacatgcactaagtgaatatttgatgtgagtgctgggaaataaaaat

SEQ ID NO: 37840 - DNA, 373 bp, Glycine max
agcttgtagcacggctggacatgatatatgtcacggtttggtttggttcaaggataaaaggggatgtcccacattatttccatgacacaaaggcaacaattatgatttggaaattgtatgcaaaactagtcatgcatgcacctatgcggacactcaagtgtcaaaaaatttttggtcgtgtgatgctagggctcataattcattttctctattttagtcaacccagtgtttccaaaatatgttcttttatcaatttgtgcattcatccgagtctttcttgggtgtttggaaaaactttcacagcatttacccttcaactgtgtacacacatttttcaaaaactagttatgatcagtgaattctttcaaagaaa

SEQ ID NO: 37841 - DNA, 335 bp, Glycine max
  unsure (1)..(335): unsure at all n locations
tctnnctnaaagcacaattgagacatacattttgagcttgttctaaactcctcaaaatgcttactcttgatatgctctttgtatatcttccattgaaacattagcatatatgatggcttgcatagtttcctgcatattgataattgctatacatacataatttatgtatttaaaatcacatagaaatgatctatttttcctctcttttattgcttcttttgtgttaaaacattaggaatttagcttcttttgagtttttatctagtaggtgctaaagttagtcaatttatagtgattttggttgtattttttatagagatagcatgaggctcgga

SEQ ID NO: 37842 - DNA, 382 bp, Glycine max
agcttcatcaaatactatcattcgtgcaaagttaggaccttaagcacaagcttcatcaaagactatcaaaagtgcacaaccaacacctaagccataagctttataaaaaattgtcaaaagtgccaagtctgcaccaccaccaagttcttaatcacaacctgttacacatgtctttgaggattagaaagttcaccaacttggtgagatttcaagtgatgatgaacattatgttgtatgtgacattaattctgttagtttatatttgtagggaatttttttttttgggcgaggcaataactaacaaaaaagtcaagtgatttgaaagatcaatacctgttacatgaatagcacttaaggggatccaaagtctgaaaaagttaaa

SEQ ID NO: 37843 - DNA, 324 bp, Glycine max
ggagaaatgatagtctccacaaacattagtatggaaagataaacatgttatttagggtttttgtgcaaatacaaggaaaaatgctattaccatcttgctcctcttagcctcttcatcactgtcattaccatcatcaccaacagctttcctggaaaagttcatagcattcttaaatgttaagtacatcaataacaatatgcatatcagaaaagtgaaacaacaaaacaaaataaagatattggacttcaaaccttctttttgcaatggcccgatcatcaggaccagcctcagcatggccatggccatggctgtagtcaagaaccc

SEQ ID NO: 37844 - DNA, 380 bp, Glycine max
  unsure (1)..(380): unsure at all n locations
agctttggagaggttgngtgttgttctccatctatggtctatgttgggtttgtaaaggacggagtaatgatggattaaccacttgagatagtaggggagatgttgatctctgtgtgatgtgttgatgaacttatgtttttagtctaccatcatttgataccattgacaaaggagccttcacaaacttataaaggacaatttcaatagggaaagtcattgaggagtcaatcctcaaagatatggatgaccacatagagtggtacttgggggatggatcactacttgttgtttcatgagggtatggcactatgtttatggtcatgtttccagagcgccgacttggcaacctttataaatttgagatataaccgtgtggtgaa

SEQ ID NO: 37845 - DNA, 323 bp, Glycine max
attggaaaacatcatgatccataattatttaattgataaactctaggcagccatacaatggagaccaaaattgtaaatcataagataaatttatcttcaatttcattaattgataaaaattacatgtctagaagttaggcaatgaatagaatatttcaagtttctttaatgctaagttgtagtggtgccacgaagtaagggtatttcttattaaacagtagtgcttgagttatccatctctaaaaataaattataaatatctacagaattctacttgtatccatcttagcttgatggttccatccctaaccagacaggaaaaa

SEQ ID NO: 37846 - DNA, 375 bp, Glycine max
  unsure (1)..(375): unsure at all n locations
agcttgaaacctaattacggtttctcgcgcttccttcttccaccttccctggtaagaatgaatgaatgaatgaatgacctaataatcattgttaaccttaacccctttttgtgtttttgtgaatgatttctgatatgaactgaatttgatatgtgttagggtttcactgtcatatgacttttcttctgagaaagagaacttgggcaggctttggcattcttggaatttcttcttctgccactagacttgaccctacccccgaatcagggttatctatttcttccatttttttcctaaggaaaaaaacacgtttctttttctctctccattgacgagtattctttctctttgattcgntctggctgctacattttg

SEQ ID NO: 37847 - DNA, 346 bp, Glycine max
  unsure (1)..(346): unsure at all n locations
tttactgcaatcncnnnactttaccggttcccatctcttcttcatgttcatgatgacccttttggctactcatctcaaatttctcagcttgcaaccccaaaagccatttgaaacactaaattggccaaaatattgcaactttgcagcaatgaatagtgacaataaacaccctcagaaaccaaggttcttcttttgcatcgtccagagccagaagagaaaaagcagaaggacacacacacttcaaggcactttagttaagcaacctgctggttaaagcacacacagagacaagtaaaaaaaatccacgttttaacattgagcgtcagtctttgttacattacatttc

SEQ ID NO: 37848 - DNA, 502 bp, Glycine max
  unsure (1)..(502): unsure at all n locations
gctgagacaccctccgcatgcgccctgtcaacgacaaccacancaaaaaaccacacaaaggagnnnttgatgcgctgacggcacccgnngagcgananagnagaccggcacgcaggccaagcaacacagacgaggcattccatccactctcagcgaagaaacgaaacagaaacgaccggcgccacaagcagccagagccgaaacacagcattccctacacaggaagggaagtcaacgccaccagcaagggactggccacgccaccgccataaacccagaagacacaggggccggacaaaaatggacacagcaccatacaaccgccccgcccagagagacagacccaccagaaccgaaaccaacacgccccggaacgcgcctcggagagaacgaacaaggccccatcatcaaccaacacaagaaccacaggcgagcgcgaacgaaaaccaccaacaaagaaaagagcgaaaaacgccacgcgcccaggcccgaaaacgacccg

SEQ ID NO: 37849 - DNA, 306 bp, Glycine max
gaatatgcagtggttcataaagtagtgtaaggtatcttctaaagacatttttcaccagcctttaacaataaaaaacttgtgaagagaaaatgtttaagagtgtgattgatacaaaaaaaaatatcacacatataagactcacatatcatcttaataaacataatgaaaaatattaataaacagtatgttgtgtgagaaataaatgctgtcacatgaatgaataaaaaaactttatcgcaaactaaaagctaaagtcccctctcaaaaagagaacaatcctgcgagaaacagaatagatctaaaatg

SEQ ID NO: 37850 - DNA, 331 bp, Glycine max
  unsure (1)..(331): unsure at all n locations
agaggcatttgaggagctgaggaggaggcttaccaccttttccatcatgcaaccattagaatgggagcttccatgtgaatatatgtgagaagcctccaaatatgcactcggggaagttctcgacaagagagttgatagactatcacatgtcattggttacgcctcaccactctggatgcaaaccangtcaactacaccacccccgaaaaagagattgtagctattatttttgcattagataaattcagatctgtatttgttcgctcctatattactatttgtactgaccatgcaggcttgagatacttgttgaagaaacctaatgctaaac

SEQ ID NO: 37851 - DNA, 346 bp, Glycine max
tctaaactttgttcattatgaagctctgatatttcttgttagacaagtggcctcagatatcttaagaagggggggttgaattaagatattcgaaactttttcccctaattaaaaatctatcttactttttacttaagttatgaattcccttaatgacaatcttcttaaatattaattcaaatgaagcaacttgaatatgaatataaagcaataataaataaaggagattaagggaagagaaaatgcaaactcagttttatactggttcggccacacccttgtgcctacgtccagtccccaagcaacccgcttgagagttccactaacttgtaaattccttttacaa

SEQ ID NO: 37852 - DNA, 311 bp, Glycine max
gttttgtctcccacaaaggcatgatcaatggctgacatgttcacaattaactccaatgcttcttccgggggctttatatatatctttccccctgcagaaacatctagtagttacttggcttgaggtctcagcccatctataaacatattcaattgaattgcctccaagaacccatgggtgggagttcttcttaataaacctctgaacctgtacaatgctttactcatagattcatcatggaactgatgaaatgaagagattgcagctttccctttcgtagacttggactctgggaagtatttttatatgaa

SEQ ID NO: 37853 - DNA, 326 bp, Glycine max
tcaaccccatatgtgtattttttagtgttgaggcgcatgttatacttgcgaatctctctgaacacctattccaagactgtgatgtgttgggtcatgctataagacttgacagccatgtcatcaacatagacctcgatatttcatcctattttttgtttggagacccggtccatgagcctttggtacgtggcccctgtgttcttcaatccaaagggcataaccatgtagcagaaattgatgtcttcaattatgaaggcaattttttcctcgtcgggagggtgcatcctgatctggttataccctgagtaggcatctaggaaacttaa

SEQ ID NO: 37854 - DNA, 498 bp, Glycine max
  unsure (1)..(498): unsure at all n locations
cacacacctcctatcaccgtatccntatcgttcctatcactcctacacctcccaagtcaaaacagcgannttgatgcctcgtgaactcgcaagagngcatatagacagaccgactgcaggcaagccaacgagaggacaagtgtagtgtctccaantacgctccacatggcgatagtaacgacggaaaaagatggaccaaccactcgagacagaaagggagatgtggaacgatgagaaaagtgctgaatgacgaacagcctgaaacgaccatcctgaggtaaccatgccaaacgagccttcactgacttatagaggaaaatttcaatacggaaaggaaatgcagagccaacccctgaagacacggcagaacccgtacagcggtacttgggggaaggagcgacacttgatcaacatgaagggttggcccatgtgaatggccatnttctgaacacgccatcttgacggccaacataaatcgatagagaccgtcggcgcacn

SEQ ID NO: 37855 - DNA, 319 bp, Glycine max
gacacttttcagtttcctatctggctacaaaccaactctgctcaatttattgcctacactatcaattttaccgattctgagctcacactgctcttgaagcctcttagcctaaccaataatacgaaacagtagcataataaagactggttatcaaaaacaaatgcaactcccgaaagaatcagaaacgtaaaactcacaactgaacgatatatagaactcggaatgaaaggaatgatgcaccccaaaacgctaaaatgcgacaacagatataccattggaaactaacaaaaataatacaactggtaacaaaagaagaaaa

SEQ ID NO: 37856 - DNA, 375 bp, Glycine max
agcttcatgatgacgtttcattcttttttgatgatgccaaaagcccgagtgattgattcaagattgattcaagacatccagatcaagcatcaagaatccaatccatgattcaaagattcaagagaagaaatcaagaagcaacaagtcaagacttcatataggataagtattaaaagattttttcaaaaaccaaatagcacaattttgttttacaaaagaattctcccaaattttctaagttaccagagtgattactctctggtaatcgattaccagttatcagtaatcgattactagtgactagctaggttatcagtaatcgattaccagggactagcttggtttccaaaatgttttcaaatgggttgaaacatt

SEQ ID NO: 37857 - DNA, 251 bp, Glycine max
tcttacgctacatcttcatggtggaaaatcgcccttaaaggaccccattgaagctcaaagatctagcctccatagaagccccacaagcaaggttccattatctaagggcgcatagactaaatacaaagcttcaaaagtcaaaactaaccgatcgatgaatgatgaacgatgaagaatggacaaagaacgatcacgaaaacgttacagaagtgtcacggaagcgtcgaaaccatgatttgtcttattatttc

SEQ ID NO: 37858 - DNA, 238 bp, Glycine max
agcttctagatgagttttgtttgtttttctgacatcctgcgaaaagttataatcatttgaatttctccagcgctcccgttgcttaatatcgagcgtctagatattttatgtactcgaatggtacatcggggcgaagcgttatgacccttcgattttgtcgagagcttccgccattcaatttccaacggccaaatgaagtatgtcctccaaccaaacatttgagggaaatgatatgacc

SEQ ID NO: 37859 - DNA, 339 bp, Glycine max
  unsure (1)..(339): unsure at all n locations
tgtttacccnataagaatttgctttctatttagctgttcatagcaccactaattgttctccttttgaagttgtttatggttttaacccactaactcctcttgatcttttgcctatgcctaatgtttctgtttttaagcataaagaaggtcaagcaaaggcggactatgtgaagaagcttcatgagagagtcaaagatcaaattgagaggaaaaataaaagctatgctaaacaagccaacaaagggagaaagaaggttgtcttctaacccggagattgggtttgggtgcacatgagaaaagaaaggtttccggaacaaaggaaatcaaagcttcaaccaa

SEQ ID NO: 37860 - DNA, 344 bp, Glycine max
tggttacctccttttcactacatcttgatttaccgggttgagtcttctccgtggctgtcttactggtttagccccatcctctaaatttatccgatgcagacatgtgtgtcgcaacctacccgtttgcgggcgagcgatgcgagacatatgggtgcgtcttccaaaggaggaaaatgcgcggagtctccaccaatgtttattgaaaggaaaacgtttgaaaaaccaaaggaaaccgggcatgaagaatattccagattcgggagttatctttacgtttgaggaaggtattagcacctctcacgtttgtgccaaaggacaacagccttagattagaattgtgtgaa

SEQ ID NO: 37861 - DNA, 282 bp, Glycine max
ctgacatgctggaggctaagctcttttgttaccacctggcctcggctgtactccgactcgtgtaccaccctcggcgtgatctctgcgagttaccggaccatccttgtacgttaacaagcttgtagaggacgctgtcatacgcataacgatgcccatgcatcccatcattacgatgtctggcgcttcaaggacaccattgtagactatcatacactatctaccactacgctcaaatgctaggagcacttttttccttcttatgcgttttggagaatatattat

SEQ ID NO: 37862 - DNA, 318 bp, Glycine max
actcttcatatttgaatttgaatttcaacgttcaaaggcactggtaattgattaccaaaacattgtaatcgattacagctttttgaaattaattgtaacgttgtaaattcaatttgaaaactttttcaaaacaattttgctactggtaatcgattacaacaatctggtaatcgattaccagagagtaaaaactctttggtaaacatgttttgagaaaaaccatgtgctactcaatttttgagaaaaccttttcttacttatcttgattaagccttctcttgattcatgaatcttgagtcttgaatcttgatcttgatt

SEQ ID NO: 37863 - DNA, 349 bp, Glycine max
agctaggacgcatattgttctcttgtatgatatccactccacacgatttgaagtagaggagagcttcaaccctataacgcaacgtggcggacaaaagtgggcagtaaacttgaatggtcgtcattgtcaatgcggaaggtattctgcgcttcactatccatgttcacacattattgcagcttgtggttacgtgagcatgaactactaccaatatatagatgttgtttatacaaacgagcacatcttaaaagcttactccgcacaatggtggcctcttgggaatgaaacggctattcctccttttgatgacgcatggacacttatccctgacccaactacaagtcgtgcg

SEQ ID NO: 37864 - DNA, 338 bp, Glycine max
  unsure (1)..(338): unsure at all n locations
tgctnnnnagggaagctccttatatcttccacactttttggggtgggccattcttggatggccttgattttctcagggtccacttggaccccatttctaccaactacaaaccctaagaaaactatattatctacacaaaaggtacacttctctatatttgtagagagggtgtttttcctaaggactgaaagaacttgcctgagatgtccttagtgatcatctaggctcctactatacactaaaatatcatcaaaataaacaactacaaatctacctatgaaatcccttaagacatgatgcataagcctcataaaggtgtttggtgcattagtgagccc

SEQ ID NO: 37865 - DNA, 368 bp, Glycine max
agcttttacaaagtggtcttttgttttacatttaaactcgatccattgtcgataagcacctttgcgacaacatggtccatacactttaccgacacatgaagagccttgttgtgtcctctcccctctacgggaatctcttcttccgcaaacgtgatataattgttggtggttatatgattaacgatgccttcaaaaccctccatagagatatcgcgggctacatgggcatcattgaggacttttatcaacaacgtacgatgaggctcagagtttatgagcagttcaagcaacgagatccttattggagttttattcagttgcttgactaccttaaactcactttgttggatgaggcgaaggaactcatg

SEQ ID NO: 37866 - DNA, 294 bp, Glycine max
tgctagggtgattcttttttaactcttgaactgggaacgaagaagaatacttaaatatcaaccgaaacttcatctagttttgatatttgtccattaaagcggcatccaacatacattaattcgaagttggacaaattttttgaccggaaatgttagtgtaatacattttaacgcctttaattttggatgaaacatgagtgtgaattatagtgtcatacactaatttcgtcctgggattattacttgatgacaatcaacctttggttatacggtatgagatacttggcattcttt

SEQ ID NO: 37867 - DNA, 329 bp, Glycine max
atcatctctgtatttgcagtggagtcccgtaactcttcaactctggaacagatatttagatataaataaaaaaattaaaaactagggcaattacaaagaacgaaataattccattacacttacaaagaatgaaataatatcctcacttacaagttgcagcctcgagcaataattttcccatgctgcacaagaacagcaccaacaggttcctcccatgtatcagcagccttgttggcttccaaaagggcttccttcatgaacatttcatctatgcgtggctgctcaagttcacattgataggctgcttcccagtcatcaaacctatctct

SEQ ID NO: 37868 - DNA, 329 bp, Glycine max
ggacaaaatgtctcaattaaaggtctaatccttcgacaggattagtagaagtgcaactaaggtccaacacaaaaaaaaaatatagtgagtggggatattcaacgagaattaattgtagcggaaccaatgcgaatccaaattgcttattttatacagaacacgatttaattgccacgcctggaaaatgagtttgataagtttagcatggaaatgaaaaacatgaaaatggaaacataatacatgaagcggaaatttgcaagaatgcacacatatttgttacttatacaacggaattgtgaatgtttgagacacaatattgtaactttcac

SEQ ID NO: 37869 - DNA, 306 bp, Glycine max
caaacataaagccacagcatgagtgatttctaagtgcttgtgtgattcacaccacacaaatgtttgaggaaacggaaaagtgatttttggctattttttcatcgtaaaacataaatttagtacagctgaaggggaattcaaagaagtaagaaatctgagtctgtggataatgcttaacattttgttcacaaggtgaaccacatgaactttgcaaaattgagacagcaaatgtagattattgaccaaaccatattttggtctgacatctgctttcattcttactttggtccttgacattttattttt

SEQ ID NO: 37870 - DNA, 382 bp, Glycine max
agctttaggttgctcattgactccttatttctgcaaagaaggacagagatctatatggtgatctgcagaaaaacataggccatacactcttgcaacaagtgtagatttatgattcatggcaagctgagttactaggttgaccaacgcatcaagttttccttcaagctttttatttttagtacatgaagatgaatccgtggccacctcatggactcctctaagaacaataacatcatttcttgcactgaatttttgggagttggaggccatcttctcaatcaaattcctagcctcagtaggggtcatatcaccaagagctccaccactggcagcatcaatcacactcctctgcatgttgctaagtccctcatagaaatattga

SEQ ID NO: 37871 - DNA, 351 bp, Glycine max
  unsure (1)..(351): unsure at all n locations
ccgcttttctaagaatgccccnagggatgtctttcttttaattactcaatttatattgacaaaattttatactagttctttgaaaatgtgctaacccttttctctcaacatttaatagagaatacattgatttctaaaatttattattttcattggaagattttctagaaatagcttcatttgatgtaaatgaaacctaaagaaagtatagaagaaaaggcaatcattacattatatctattaagactatggttatgcggcattatagtattagcattaattactgttcactccattacacttacaccagactattatcaatctattcattcagttatacaactgacacta

SEQ ID NO: 37872 - DNA, 363 bp, Glycine max
tagcttaacaagacagttttcttttatccacagggttgtcattaatgacgtgtacagcggtttaatgcccaactgcgatgttcataaagaagatgaacattccacaaaatggatgaactcgcttagcgcaatcatactggcttaatgagtttttctggaaatgcatgtattcaaggcttaattgatgaactcgcttagcacatcaaacgcgcttagcgagttcatcgcgttttccacaaaaaacgtcgacaaagaagtatgtccacttcctcttttaggcctctattacgcccttatcagacatgcaacattgtttacactatctacacattgaactccctacaaagtcctagattttattta

SEQ ID NO: 37873 - DNA, 328 bp, Glycine max
atcgcgacgttgtttttatcgccaccctcgcgctttgcgcgagtaagtgaaattaggcttagcgccagtcttgcgctaagcccgtgatgagaattatgaaactggccaaatacaggctaaaggcccaagtggagaaggacgaatcccccgagtggagaaggatgaacgcccagatgcagaaacactatcaagactattaattgttgctaaaggcccatattaatttgaaggcccataacaaatatgttctatttttattaataatttttatttattgtaattttggcccaaactgtttagaaggcctatgtctatttttatcttttcg

SEQ ID NO: 37874 - DNA, 342 bp, Glycine max
tagacgactttgttgagtcgataatactttattatttatttggacaagtttgaatatgatgtagaagaaaatgaatgtgagcctttttcccctttgaaagacttgtttaaaaaaatgttttaaaaatacttttaattaatatttgaatttttttttattcttagtatatatgtgaggggtagagggtgtcacaccatatgtatatttctctttgtttatatgcttttttgatcaaaatgaaatggttttatgtaggagttttagtggggttttttttacgatggagtcttagtgtttcggattaattgaagaggatggtactattgtaacatcttatttttt

SEQ ID NO: 37875 - DNA, 374 bp, Glycine max
agcttgatctaaatttacattggtgtttgtatttatgggaggaggttatatgccattcttgttttaagagtagtgtcccactggtaaaactaactttccaaattgttgcctttgcaggaaatggccccgaggaagcttgcctcaaagaggtccaggaaggacaaggcagccgaaggaactagttccgctccggagtatgacagtcaccgctttaggagcgctgtacaccagcagcgctttgaggccattaagggatggtcatttctccgggagccacgcgtccagctcagggacgacgagtatactgatttccaggaggaaatagggcgccggcggtgggcaccactggttactcctatggccaagtttgatcc

SEQ ID NO: 37876 - DNA, 342 bp, Glycine max
tgggatttatgccataaacccaatgttttcaaattatgttctttcattggttcaacgaatccatccattcttatctcggttattttggaaaaaaaactcttagcgttagtttcttgtttccaaaagatatgtttgctctctacgaatgatttgtgcttcctatgaccataacatgctgaccttcgaggtctttctttctcttttctttttgtttcattttttcttatgcatgtttgcaaaaaactatacatccatcgttatctatgagaaaagcttttctctgtacacctacattcctatgtgtcgcaacctacccttcggcgggagggcgacgcgagactc

SEQ ID NO: 37877 - DNA, 484 bp, Glycine max
  unsure (1)..(484): unsure at all n locations
tacctcccacccanttcggataatctttcttttntcnacancaacaaaannatggtgatgctgccaccaccacganaataaagcgaccgcggcaagccacaagacagagggaattttttgctcccacgacaacaacgccgagagaggaagcagccgcccccgagaggcgacaagacacaaagaaagaagaagccccaaaagatccttctgacctggggcagctctgaacaacacctggcacaaggtggcaacgaactctgaaggaaccaacacgtgacacgtgcggctactcggtcaaagcccacatggatgcatagagacgaccgcccccgaaccagaggaaaaaacactaagaccccccccacagccggcgagaccacaaacaggagccagcaatgacgtgaagggaggggcgcgagacacaacccaccccctcgagacgagttccacagacagaaaaccgcgattgaccccacgagacgcg

SEQ ID NO: 37878 - DNA, 337 bp, Glycine max
  unsure (1)..(337): unsure at all n locations
aagctttnggaagccttttgtggaaaccattgatttgtgtttgggcgctatctaatcaactgggtttgtgagaaattgaaattggcggtgtgggacgctcaatgactagcggtgaatttctacccctatgggaccgttttgggaaagttgcgatcttgtgaaagagatttgagagctaatattaacgcacgggcgaggattacgtgtagtgcgttccttgccttttattgggaatttttcttctaattttataaccaaccttgtacactattatgactcgcttatagcatgttttttttgatgctgaacaacgccgaaggggattagagtaatgatt

SEQ ID NO: 37879 - DNA, 354 bp, Glycine max
agcttgatgccattttgctctagtaagtggaaatctttgagatcacgagggtcattgctacaaaaatgaaaaaagtctccatttgactcagctattgtcaacgcgactgacatgtcatcaatggcaatgagagggggtttggtgagatcagaatacggaaaaaatgtaccaacaaaatggtactagtgttgaagtgtgtgtgagagagattgctttatttctgggactattgtagctgcgaaatgacaggttggatgagggaattcatagaaaaataaacgttggcttgcagagaagaacagcccatgaatgtctaagaacgttatggggaagaaagaagtatttttactttca

SEQ ID NO: 37880 - DNA, 313 bp, Glycine max
ttaccctcggaagcaaaaaaagaatataagggaaatttccaatcaaagaaaaagagaaggaaaatttccaatgaaagcaaaaaaagaatagaagggaaatttccaatccaagaaaaaaaagaaggaaaattccccaatcaaagagtgggagaaagcaaaaagaaaagaaaggaaattcccaatcaaagagggggagaaagcaaaaaggaaagaaagaaaattcccaaccaaagaatgggagaaagtaaaaaagggaaggaaagaaagttcttgatcaaagaaactagaagaaatatgcaaagaggtctttgga

SEQ ID NO: 37881 - DNA, 127 bp, Glycine max
ggagacctggccgactaccgattctgaagtctgactcatgataaacaaaattatgacaacatcctggttttaaagcttctacacgcgcaacctctagttacttgtagggccaccacaaaagaataaa

SEQ ID NO: 37882 - DNA, 354 bp, Glycine max
agcttgaatttggtttagacattattgatacatgatttgggacttgtaggatttgatttgggcaagattggatgaggggaagtgtggttttcgaaatctgcattttgtgcagatttttgctgggaaattgtgcagcaggattttgcacaagtgcataaaaatactaggcatttgctggttgtggaaagagcagtgcagaatgagttctggatgtttgctagtagatcccaacggtcaaaatgtaggcttatgtactagagacttccagtaaaaatttggagtcgatccaacggctaacgaattggaacgaaggaattgttactggggtctttaagtgagaaaagctgtgatttt

SEQ ID NO: 37883 - DNA, 361 bp, Glycine max
  unsure (1)..(361): unsure at all n locations
ggaccttaaatctcagcttttaagcgcggnnnnaagacaaaggtttgtggtcgcgatatgcgaagatgatgttccgagtacattggatttggtacgaccatgccctcctgatttccagctgggaaattggcgagtggaggaacgccccggcatttacgcaatgagcataatgtaaacctttacggtttttaaaagctctatagttgggcctaggctttagagtttttccttttgttaaggctttgtgtcttttgtttttgaatttctaatacgaggacctttcttcatctgttcctgcgtctctacccattctcattcatttgcatgttcacttctttttttgaaacggcagatccgatga

SEQ ID NO: 37884 - DNA, 383 bp, Glycine max
cagcttaaaaccccttgttcattacttaacaagatgataattaatcacaatcgcaagcaaggtaacctaactacgtacaagagataagaatgaaaaagagaaaagggaaagaaaagctgggttgcctcccagtaagcgctattttaacgtcactagcttgacgcatcatcctgttatccaggatctaacaaggttcctacttcaaggaccttcttctcaggtctcctttcctccatcacatgtacttttagacaaacattttggctaggaggatctttgtcctcatagaacaaatcaaagctgatcttttgatcttctatgcccatctgtagcatcttctttcccatgtttaccacgcagcttgcagtagacatgaatgggcg

SEQ ID NO: 37885 - DNA, 343 bp, Glycine max
agtatagttcccccccccggttattttggagtaaattttgtaaataaatcttgttttatggttaatgttgtctctagaacatttccattggatttaatgatgaaatctgtgcatttttaggtgaaaaagaggctaagttttgaattgcaaaaagtagcagttgggctaagcacataaccaccgcttagcgcaaaggagaatctggtagagcatcaacatcaaagttgcgcgctaagctcaacatcagtgtgctacgtgtagcaggtgccttcagccaggctaagcgcaagactagcgctaagcccaattccacttcctcgcgctaagcatgagtatggcgcta

SEQ ID NO: 37886 - DNA, 378 bp, Glycine max
agcttgattattgcaaggacgtatgattgcatgctagaaaaaaaataagagaaaagcatttttgccttgcagttccatgttggggtacaatgaatgaaagaaattattgcaaggaagtggcattgcaagcttggaaacactagcagaaaactactacttaaagattttatcagattttgagaattcaagtttgatagataaaggagggccaaagtttccatttttgtccagcagttcaaagttgggctatagtgaacgaaacatgctagattactgcaatgaagtagtatcgcatgctaagaaacactaagagaaaatcactccttaagaagtttccacacattcatcctgtagttccatgttgggctacaacgaaaa

SEQ ID NO: 37887 - DNA, 213 bp, Glycine max
aaattaactggcagcgagatcacctttctccagctggcgggagaaaaaaaaagcacggaccgatcgacctttccaacaatagcgcagccagaatggataatggagcctgacgcatgcagtacattctactcacctatgcgggatgtcacacccgaatatggagcgcgctcactaaaaacaagttggacgcacgccagataaaacagccacccg

SEQ ID NO: 37888 - DNA, 178 bp, Glycine max
  unsure (1)..(178): unsure at all n locations
agcttatacaagagccttttttgtgttgngtatgcctatggaacaaacaaaggtcttgtccacacttagtaatataaccacgttagaggtagtgggatctttaatagccacataacccatagttcttgttcggagggattataaaatagacggggcgggggacttaaaaaaacaccca

SEQ ID NO: 37889 - DNA, 345 bp, Glycine max
tgcagctgttggacctttatgcaccaccttgttctggtcattggaatctttccaaccagtatttcttgtgtgcttggaagttggaaccacatgctgcctcccttctagccaccactacttttaatcctcttccctattcatctctggtcagatcaagccttccttgcccttaatttggttgtttgagtctcttacaatttctaattattaatattagtcggattttaacttattgcccatcaaggttttagtctagttgccacttgccggatctcttcttgcagttgaaccaagggtatttgagttgctgcattcatcaattacacaaggcttaatctctcagag

SEQ ID NO: 37890 - DNA, 393 bp, Glycine max
agcttctattactcttgggttatatatgtgcttcaaaaggaaaagaaaaaggaaaagaggaaagtcaaccaatcaaagattggagaaaagtagaaaagaaaaaaatagtacgaaaagtttcttttgactagaaaatgtctgaacaaacatgcagaattgttgagagcaaaaagaaaagaaaagtaacaataacaataacttggttaaagcccgagggatgcatgaagcaatcaccttcttagttaccaaccaaatcttagtgtccgcacttgttccacatcgaaccaaagagaaaagagaagaaaaacagaaaagggaaatgccagaacacccaaaagccaaattcccaccaaaatccaactttctcaaaagtcctattgatccatgattatg

SEQ ID NO: 37891 - DNA, 348 bp, Glycine max
tattatcggcgacaacgggagtttttccttgattcaattcaatgctttctttattcttctctaattgttaaatattattactagctgttgttgagaatagggattagtgtttaatttctgattatatatggcattattggttctgttgctctctggtttattttatttgtgacccaaaatcattgtaggtgtggggaagagttgtctacttttgaggttttctgatggctcattcacaacaagttttatcaccaccattgggttagtatattatgtgtagacaccttttttttatcgcttgtgaaaaatgctgcagctgtttcttgtcttgtttcaagattcttacat

SEQ ID NO: 37892 - DNA, 375 bp, Glycine max
agcttgtgtcgctaagtctagttgttcaagtttttccttagcatattcttctgcaaccttcatctattgataggctttctctatttttttccttttaggcttttgcatttcacggagttgtatcacttgatccttgaaatccctctcattcatcttcataagatcatagacaatgttgttgaatctgatgggaagttgctttactctggagatgaatccgccatctttagagtcctttactaaatacaaacaaacattatgaaggtgatacgtcttgactggatgtaacacttgaatggaatcttattggtcaacattgccacttacatcataattgaaggaggatgcctttaaattttcatgccacacaacttg

SEQ ID NO: 37893 - DNA, 327 bp, Glycine max
ggaaccttttcttaagcagaggtgtttgatttgatcccatgtttatggttgaaagttctgtttgaatcaatacttcaatatcctatcatggaggaaaatacgatgaatgcatgaaaggatgcttatgctatgcataacacaaatgcattttacagatacgagagcccaaaagatcatcttttcttacttgcaacatttggcagcacggtgccccatgtatgcatttaagaaggtgatatggaccttccaacttcctgtgacaaaatgacgaaaccaaacgcaatgcatgcgtgatgatgcaatacagacataaatgcgtaaaagcgc

SEQ ID NO: 37894 - DNA, 376 bp, Glycine max
agcttggaaagaggaattcttttcatttcttagaagaaagaaaaaaaagagacaagaggtagagtttcaacggatgagacgaaaaccagcttaatttacaatacgattttcagtattttataatttgtagcagtaccacctattagggttggggtgtgggcatattctcatagacagaaaatgggtgacatacgcatgatatgataagcttacattacgcaagtaatttttttttatatatattaattatagtatttcgtaaaatgcgctgtgcttttctttttataacttttagggtacgaaaatacctttgtttaagtgcacactagctataccaaaaaattacgatagtaaaatgtgtgttttattaaaaagt

SEQ ID NO: 37895 - DNA, 325 bp, Glycine max
aaataatgttttctttgcccaggcaagaaaggatttcgtggatgttctgtttagcttcttaacattgtctttaggaaccattgcaagacttgtggctaaagagaaatcaaatatgcagccaattgaagttcgatcactgagctcactctatcgaagtgcgaaaaatttggacaaagagtatctctgcacagttatgtgcaaagaaatgctactgcaacccaggaactcattggaagcttattgcaagaagctgaggctaaacattgacaacacaccacccacataatactttgtatgtaacgacttgatcaattgtcgacacgat

SEQ ID NO: 37896 - DNA, 350 bp, Glycine max
cttttcatagtagagtatcgataatgtgtctaccatcacgaatatcgactccctttccatcattgggggtaccacttgggccgccagatccctccaccttttaagcgtgttctttgaaagatccgcccccctttttgcaaatgttctatagttgcatcctatccggaaccatatcaaaattgtactgatactgcctaacaaaggcaaccattatgtccttccaagaatggactcgggaagattccaagttagtgtaccaggtaacagctaccccagtaagactctcttggaaggaatgtattagcaattcctcatcttttgcgtattcccccatcttctgacaatacatc

SEQ ID NO: 37897 - DNA, 343 bp, Glycine max
tcttttggaccttagcgagcaatcttcttctctttcagaaccatgctatgtgctcgcgactggtccctttcttcccttcgcaacttgagttcattattgctaccccatagagctccgcgaaatttgttccggccatactcttccttgtgagccctcttggtctcttgttcaagggctcttgcggtaattgcattctcttcccgtaacccggcacactccttccgaacgtgtgtagcagccaacttgaacttctccttggcgagtttggcctttcctaactcgcttttgagagcttggacttcttcgtcctcttccggtgcttcaaaattctcttcgctgacga

SEQ ID NO: 37898 - DNA, 107 bp, Glycine max
gaaaggaacgaggataagggctacgtggggtttcttaacctaaattaatgtgggcaattggggatggagggttcatgtttgtttcgcggatgtgtgagatttttttt

SEQ ID NO: 37899 - DNA, 342 bp, Glycine max
tttcaaccatatccattgttgaggtgattaagaatgagttgaacctttcacttgttcaggttcagttgcttggcatggaaataaatgccctgatagaaaaaataagagaaatatctgacctacctcattttccttaagttctcatattagcttacccttgttttacttgaaaccatcattgtaattcatgtgttcaatcattaacctagactatctgatcattatttctgtagtcatgaatgctaatgataacacatcaacaaaactgtatgaatcaaaattgtatttttaaaatccaattaagatttctgatctaagtagcctctagaattttagtaactg

SEQ ID NO: 37900 - DNA, 367 bp, Glycine max
agctttctagcttttcatttgtgtattttgatctccttttggtgctctaaattgtgggaatgtgctcaaatatatggggcaattttggtttgttttcttgcttgattaggttgaattaggggtttgtatgggatggccctaggcctataatgcactttgaaacaatgggacatgccacattgtccccgttctcttgctattgttacctaaacgcgcgcccaccaagtgttcggtgaaatgcctcaatggcattagcgcgtgacttttgtaaggaaacaacccatggggcattttggtttgtacatattttctattttttgggacatgtattcattcccgagaaaggctagagtaattgccccacata

SEQ ID NO: 37901 - DNA, 320 bp, Glycine max
taataaaccattttaaggtccaacaccttaaatgatcctctttgcttttattggttaaacatggacttttgaaagcctaaagtcaacacataactttgtcgctactttcaaaaaaacaagagatcattaatggtccaatgctttaatgttttctctcctttcaaaagaatcaaaagatcgtttaaatggtccaatgccttaaatgacttttttgttcagtcaaaatatatcttgcaaaaaagataaaaacaacttaaccaatgtttagttctcaaagaactacgtaggtctgatttccttatcacaattgaggaatacat

SEQ ID NO: 37902 - DNA, 358 bp, Glycine max
agctttctatatattcttgttaaggtagataaagctcttaaaaaatcttgaacatattgagagaaaaagactaaatgttcatcatatatccatctgtaagacaattctagattttttctttgtgcaaactcaaactacaaatctgtaagactaagtgttgattgtatatctgcctataatctctttgtgcttggtaagacaaagaatattgggtgttaatcaagcttgagacttgatgttttttgctaataattaaacatagttttagttgtagagacgaacctgtataactttatgtctataatctgaatttgttgataggcttgtgcttaatgcgattgttttttattttctgatt

SEQ ID NO: 37903 - DNA, 340 bp, Glycine max
tagacctcacgccagctgtccctccgttctcagcgtcatcataaactcatgaagcgatacttcggcccatttcccattctggaacgcattggcagcgttgcttaccgtttgcaactacctgaagggtctcgtatccaccccgtcttccattgttccttactacgccctcatcacagacctcttgacctcccaacctcttcccttccggcggatacttcctccccacaccctatacttgagccactagccatccttgactctcgaatggacttctctgtggaccccccaactcgtttcgttcttgttcaatgggttggtcttcctccggaagactccacgt

SEQ ID NO: 37904 - DNA, 364 bp, Glycine max
agcttggactcatgagtggttttttatgtctaagtgggttagtccttttgttgctactaatgggtttccttatggtacagatgagatcaaaagcgactccacaaacaagagcttcaaggtcaatggacaccgacttaagacattcctcacaaacccttctttagtggacatagtggtggaagagacttgcttactccaccctactcttgctccaccatgacttagggagcttttcttttcctatctgcttctttacttttattacatttgtccgattctatttgatggtttaattgcttttaatcttttacatgtgctacattgaggacaatgtgctgtttaagtatgggggggagtggtttct

SEQ ID NO: 37905 - DNA, 324 bp, Glycine max
cggaaggatcaaagcggttctgaaaagaggcaaatttaatcatcccacttggacgaatgagaaaactggggcaaatgaagagggtgagaataacagatttcattcctataattaagtaaaattttaattacaaggtgtaagtttctttatatttctcattatttttattagttttcttatttctgttaacagttcttttttctattcctattaggtttcctttattctagagcaaataaaaatcatatcctatcatatcctacattattatacaaaaatcatatcctatcatatcctattacgttcctatacaaaaatcatatc

SEQ ID NO: 37906 - DNA, 340 bp, Glycine max
cacacagccgaaacctagcaagactaaccattatatttcccccaaccccatacccacgaaatttaagagagaaagaaggccacccaaacctgaattttcgaagtcccactcgtagccacgcacttcacgaccccgaaaatgccctcctttcgcgatttggggcagaaatgatggccaaaggttgaagctttgcttggagcttcaatggagaatgaagaagaagaaaatggccacgtgagggagagagagagttgtctgaaaagtgtgggggctgagtgaagaaagagaaaagctttttggctataaataaaagaggtttctccttttctattattttatt

SEQ ID NO: 37907 - DNA, 322 bp, Glycine max
gagggtgtttcatatgttctcaagactggactaatacatttgctgcgcaagtttcatggtcttgcaggtgaagatcctcttaagcatcttaaggagttccatattgtttgttccaccatgaagccccctgatgtccaggaagatcatatctttctaaaggcttttcctcattctctggagggagtggcaaaagattggctatactaccttgctcccaggtccatttttagctgggatgaccttaagagggtgttcttggagaaattcttccctgcatctaggaccactgccatcagaaaagacatttcaagcatcaggcaac

SEQ ID NO: 37908 - DNA, 385 bp, Glycine max
agcttagaagggccgaaaggtatgattcaagggtggaaagtatggtattagaggataagttgaaggcttgtcaaaggttgaaagaagtttcaccgaacaactgagtagaacgaaagagaatatgttgacaatcattgaccagtataaagagaagctaaacctagctgctagccatgggcagagactagagaataagcatgcgaaggtattggctctgcaagtggaaagggaagtaagagagagggtgatagaatcattgcatggggaatctgtgaaatggatggatagattcgctctcactctgaatgggagtcaagagcttccaaggcttttagccagagccaaggtaatggcagatgtatactcagctcccgaggaagttcat

SEQ ID NO: 37909 - DNA, 347 bp, Glycine max
  unsure (1)..(347): unsure at all n locations
tctcccctattttnctttaatagggggagaagtgaataagaaaagggttcagccccttaggcacttctctctctttcgaatttgctgaggaaaattatttttgtgaagaaaatccaagtcgaggcgctttcgtaacgtttccgtaacgtttccgtgagtaattacgcgaagattctcgaccgttcttcaaagattcatcgttcgttcttcgttttcttcagtcttcaacgggtaagtacctcaaaccaagcttttcaattcactctatgtacccgtggtggtccacattctgcttcatgtatttttattctcgttatcatttactttttatacccttttttgacgtg

SEQ ID NO: 37910 - DNA, 319 bp, Glycine max
aattgaaccaaaagggggaaacttacttttctgagatacatagttttggcatgctcgtgtcacaatgtggtacacactgaccaaaaggaaaagccacgtggtaccatttatgcatgtccacaccgacaaatattcgagttgatcaatattacattatagagaatgtcaagaaaatgaaagttggtgcaggcacagacaaaaaacccccaagtaggtaggggggtgtgtgaaagaaaacgagagaatggaacatcacacacgcaacgggaagggaagggaatcctcacacaagactgaattaaaacatttgctaatggag

SEQ ID NO: 37911 - DNA, 348 bp, Glycine max
tcggacaactaattttacgaacataaacttatatgaattaattattatttctatactaacaagacacatatatttttttagtaatttatcacttaacaattttataatttagtgaacttaacttgaaataattaggggaagagtgatatattaaaaaaaatttccataaaacccgtcagtaagtaaaaatatgctaaaatatctcatattaattggtagatataatcaatgacttgagtaaattacaatataaagcgtgaataatcgaaatgttaactccaaggatcattacaatataaattatgaattatatgtcaacactttaaaaacttaattttattattaaaa

SEQ ID NO: 37912 - DNA, 364 bp, Glycine max
agctatttttatcttttatgttttacattaatcgatctagcttgagtttaaaaattcttgtcacaatatttggccgatcttgtatagttaaattaagagctgaaacagacctttgaatcttgggccaataaggattacaagtgaaatttaaaaataaatctagaaatccaacactgctacatatggtcattccatcaaagtacaattgatccatatacatgcggcgtaccaacaaagatgaaagtagaataatacgctttccacaattggcatgctgactttcatctgcctgctatgatttttttaaagagttgtatttatcataacgcacctccttttgatgagtttatattaacattaatcg

SEQ ID NO: 37913 - DNA, 340 bp, Glycine max
ttactccaacttgttacaaccaatattctttgtcctactaagacattgttggctctaacacaaatgagaagatttgttattttgattgcacaatgactaatggtaaattactttttgagtggtattttgtgtgagtttttgtgtcattttgcatgtatttttcttagtagaactcatgtttggacactagttttgtattgcagaagcataaccgcttaattgagtgaaaaaattaaagattacacaaatttatcaagatttgatgactttacacttgatcacggccgtggtacatttaccacgaccatggtaatcaacacaatgataataaagtgataac

SEQ ID NO: 37914 - DNA, 364 bp, Glycine max
atcttagagagggagcttttttgtggaaaagaatgagagggggggggggactaaccattatatctccccaaaccccattcccacgaaattgtatacacaataaagtccaccccaacctgaatttttcaaaacccactcgtagcctcgcacttcacgacctctaaaatgcccttctttaacgatttggcgcacaaatgatggccaaaggttgaagctttgcttggagcttctttggagaatgaagacgaacaaaatggccacctgagggagagagatacatgcctgaaaagtgtgggggctgaccgaacataaagaaaagctttttggctttaactaaaaacattgcttcttttctattatctta

SEQ ID NO: 37915 - DNA, 374 bp, Glycine max
agcttatccaaaaatcctcttgcaacaccattctttcccctgtgtcaacttccaatccatcacttaagcggaggtctatatcatccatcacaaaagtgcccgatgaggctccaagtttatgagtagtcctaacagggagatcctagcaggggttttattgagttgttcaattaccttgaactcactctgctggatgatgcgtaggaactcagttgcttcatcaacggatattccttttttgctaaagtcctattcttccttaaaaattggctcgccttgcttccctcttccacactcacctttgccttcccctttaggtctatagctcgcaccgggagctcgggtgccgcaaagattcccccgctacgagttac

SEQ ID NO: 37916 - DNA, 380 bp, Glycine max
agcttcggaagaaagtgttgttgtacaagccctaaaggcagagcttgaaagagcccgggtagtcgaagagaagttcaagtccatagccatcaaagtctgaagagagtatgatgaactaagggacgtcaatatggccaccgttgaagccttggaacgagaaaccaagaaggcccaaaaggaagaacacaaccaaaacaaagttttgaggggctttatagggcagcaatagtgagctcaagctccaaagaggtgaaaggaatcatcacgggtcaaaggcatgatcttgaaggacgagctaaaggcttgccttatgtcgaaaagaaatttgtcccaacagttaagcgagactgaagggaatatgtgggccatcatcaatgagt

SEQ ID NO: 37917 - DNA, 360 bp, Glycine max
  unsure (1)..(360): unsure at all n locations
acactatagaaactcagcttgcctctgtnttggctaggcaggtatcacaaaagaaaaggaagatgggagaagaacgactcaaagctttcagagaagaagtagaaaaactccttaatgctaacttcatcagaaaagttagatactccacatggctcgccaatgacaaatggcgaatgtgcacaaactatactgatctgaatagggtgtgccccaaagatgcaatcctctgcccaacattgacatgctagccgatggagcgtctgggctctaggtgctaagcttcttagacacttgttctggatacaactagattagaatgcacgctagagacgaggagaaaatgagattcatcactgaaga

SEQ ID NO: 37918 - DNA, 381 bp, Glycine max
agcttttatcatgcaacttacccatgtaaaactccaattcttattaaaaagcaacataaaaaacatataaagaattacatctaagttttatctttatcattattagtagcacaaaacttagatgcagtttcataaatattttgtgtggttctttgatcaaaattagagctttaccctaataacttgtaacttataatgacttttaatgtaaatctttattacaaggaagtgaaactcaaactactattggagaacaacaagttaatcatgatgatgtaaaaatttgtatgtgtatgattatttttttgatattgatatgaatgatttatcagttttattaataactaatatttataagaaaacttaactgatttaccttta

SEQ ID NO: 37919 - DNA, 344 bp, Glycine max
tggaacatattttcgaattttaggcccccttattgatttagtcaaaatatctgctggctgatcattggaattaatgaattcagtgacaatctctttagacagtagcttctcccgaataaagtgacagtcaatctctatgtgcttggttctctcatggaagactggatttgaagcaatatgaagagcagcctgattatcacaatacaacttcatttgcatcactttgcagaatttcaactcttcaagaatttgtttgacccacataagttcacatgtagctacatccatagatctatattcaacctctgcactagatctagcaacaacagtttgcttcttacttt

SEQ ID NO: 37920 - DNA, 385 bp, Glycine max
agcttgtgacttgcataaacttcttttcagtggatgacaatagaagctaaaagttaccaagcatacatcaaactgtttcaaaaagtccaactatcattttattcttaataaatgggagttaccagtataaaataaactatggctgcaaaattgtacttcaaaaaaatataaaatataacctgatcaaagacatcaatatagacttgttgcagagaatgagaactgcagaactgattaatctcatgatgaatcttgtcatatatccatgtcttatcataatgtacaccatagttgagcaatgtctcaaagacaaattccttatggagttgattcacaacctaaaagaagaatatgcatcactgctatgaaattattgaagatgtga

SEQ ID NO: 37921 - DNA, 338 bp, Glycine max
  unsure (1)..(338): unsure at all n locations
tgttatcntagacatcatgggcaagtattttaacagatgtgggtaggaaaaattcaccaaattgatagagaaaaacctaaaatcatacatcataggcagataaggcaggctaggtcccaacattatcacattcttgattttatttcttttatcttttattttgatctttaattttttatcttatcttttcttatctttatcttaatcttttatttttcttatcttttacttttatttgcttattttctttatcttctatctttatgatcttttaattcaaatcttttattttcatcttttaatctttatcttatctactatatcttcttatctttatt

SEQ ID NO: 37922 - DNA, 350 bp, Glycine max
agcttggattaaccctactctctggtaacgtcaatcctatgactgggagacaatcaggcccccacaaagaaaagttccatagttatttggggcaagaaaaaaatcctattgtccactccaattggaatgttgtcccacaatctctaaagaacctaatatgggatgacattttggtaagtgcatttaagtacacatatgtattcgattttctttaattaacttcaaaatatgatcattcactaactgttagatgacaattttgatttggagggaaagttttgatgtcaacggtcgccactagatggaggcaatttaagtctttcctcatgacaaaatatgtttatgctgac

SEQ ID NO: 37923 - DNA, 338 bp, Glycine max
  unsure (1)..(338): unsure at all n locations
tggnnnnnttgtgttactcttctcttgtatcaagaaattcatattatttattattctttttctcctctaccaattgcatcaaaagaattttttcggttttttttctcaatccttgagcaacatattaataccaagagagaccatttatatgtgtgattttaagagaaagaattgtctactcttatataagaattatgcgcaatttgaaatttatttattgatctatctttatatattatttttattacctgtaattataatcatctttaaccaattnaatatattattatactaacatttttttcaaaataaaaattacaatctattatattaaaata

SEQ ID NO: 37924 - DNA, 367 bp, Glycine max
agcttgtaacatgggatgcttatcatttttactaatcttatatatttcaaatgaaatagtgatcatcaagacaaagggaaaaattattgagagcgaagaaaaagatctagagctacctttgtttgattttgagacaatagcatttgctactagtgacttctcaagtgacaacatgcttgggcaaggtggttttggccctgtatacaaagtacgtatgcaactagtttctttgcaattaaaagctaagaacaaacaaagaacatagcctgaccttttctgtttgtcatttaccttctttgtaaatgtgaatttttaagggcacgttaccagactgacataatattgcagtcaaaggcttttatatcat

SEQ ID NO: 37925 - DNA, 341 bp, Glycine max
tggccaaagggttttggtcctgtatatatagtaagtatgcaacatattgccttgtaaattgtaattaatacagtaattaataatatatgacatagcttatcctttccatttaactatgtgaatgtgattttttcgaagggcacattaccagatggacaagatattgcagtcaaaaggctttcacaaacatctacacaaggattaacagaatttaagaatgaagttatattttgttctaaacttcaacatcgaaatcttgttaaagttcttggttgttgcatcaatgagcaggagaaattactcatctatgagtacatgccgaacaaaagcctagacttctt

SEQ ID NO: 37926 - DNA, 245 bp, Glycine max
agggggattggtaaaggctattttttaatgattaccggctctttcagctggggaggtaagatttaggaacttgtcttggtgcataatttagtttatgtgccaacactactaaaaaaagagttttttgtgatgcaattacgactttcggtccaacaaaactgtcgaagaaaattaaaatggagcatttgagtaataacaacgaaagtgtgcaccttgccaatattatggatgacattggcacaact

SEQ ID NO: 37927 - DNA, 268 bp, Glycine max
agcttccatcaagtgttaatcagagcacaagagcttcaagtaggtgctccttaaacctccattaattttttttttctttacattctcttccattggtggttcttcatttttctccatgtatctcctcacatgtcttgttctaaatgttgttaacaggattctttatagttttcatcgattaaacttgctatagaaactagatttgattttctatggttcaaatttcttgttcttgttcttgaacgatgaattgtgttgagtttacgtt

SEQ ID NO: 37928 - DNA, 267 bp, Glycine max
ttagtgggctagggtctagttttttatattttgattcaaccgagagctctagattgaaagaggaggttacttgtttaagggacaaattgacaacttcgaaagagaatgtcaagacattaaaaaatgtcatgcttgcatacatccatatgaaggaagggcatattccttttgagttgggtgctatgttttgtcataacactagtaatttagttgtaagtacttctcttattcttgtgttaaatttaatatattactaacatttgacat

SEQ ID NO: 37929 - DNA, 267 bp, Glycine max
cctgaggcatgcaagctgataactcttttttaattttccagcgacacgggagagtgcgtgtatgtaaacacttgcatcacgcttatataagtggtatcatatgtgcgagctgtgcgattgatgtcgtaggaatcaatatatgctttaagtgaacgccagggagcttacttaagagacttatccatgacatgaagtgaggttatagcgggaaagaataggttaaacggggagaaaagaacgggaaaaaactttttttttagatcgaat

SEQ ID NO: 37930 - DNA, 263 bp, Glycine max
aaaaaggctacttctattgttattcatagattgttagattcagcgtacaaatacctatttaaggctacagatgcatttaatgcaaattcatgaagcaattcctcattttgcatggatgataaaactgcaacaatatttgatggtaactagcgcaggggatattatatggcccttgttaacctgctgaatcttcatttcacacttcctcaaaaatcattgcttttaaacgagtatatccatctcataaccttacagaaaatgca

SEQ ID NO: 37931 - DNA, 212 bp, Glycine max
gggacaaaatcacagctggtgaaacaagggataccgatggaaacaagtaggatgcgagaaaagaaaacaatccacagcacatgaatgggaaataggtcactcatgactggaacaaagaaggacgaatataaaacagaaatcgaaaaagagaagaaagtcagataaaaaaagatgttccagggcacaacaaagcaattcaaaaaagatctgat

SEQ ID NO: 37932 - DNA, 267 bp, Glycine max
agcttaaggcaatttcaaaaagtataaaatagaaaatactaaatatcaaaaaggtaggagacaatgaacaaacatctaacaaattccattatctagctgtgccactactaactaactctccacccaaaagtaacagcctagtggcctagtggatatattcttcccagccttttggccttttggagatccttttgggcgtgaaatatcccctatggttctgagtgctatcaaatcaattaccggattcctttgtcgttcatcaaaaaa

SEQ ID NO: 37933 - DNA, 266 bp, Glycine max
tattaataaaaacactttttttaataaaataagcagtatttttatttttctgatgtgcttgtctaaattgcttttacttaaaataagtagttttctgctttttttaagaagcaaatcctattttgaagtgtttttttttaaatcacttattttaaagttatttcttttaagtttaaacaaactcaccctacattgaatagatttatcatttactggtaattgcaaataactcctcaactgatgccataagatgctaattctattat

SEQ ID NO: 37934 - DNA, 236 bp, Glycine max
tgcaggctgccagcttgcatattttttaatggggtattgagcataaagtatcgcgcaatgaaatcggctattgagttggggaggattgattttggaacttgtggtggtgcataagttatttcaagggcgaacactactagaaaaagagctatttgcgatgcactgactactttagggccaacaaaactgtcaaaggttataaatggtgcatttgtgtaattacaacgaaagtgtgc

SEQ ID NO: 37935 - DNA, 272 bp, Glycine max
actaagcttgaggctttgtcattgttgtttctacacaacaaccacgaatggaaaaataatgttgcttgttaatccatcccaaatcgattacactatggtgatgtataatgtggtaatttattctcatgaatggttacattgaaattattgagaaattgatgagggagattagtttgagtggtcttaatttgtattcacttgatggttgtatatgtaattgatcttaatgtagtaggtaagggaaccatgcatgtggtttcgggttaattaaa

SEQ ID NO: 37936 - DNA, 202 bp, Glycine max
ggcattatttcacggcgtttaaccgttgggagttggacaccttcttttaaattaaatttctggcttcagcatgaaaaatgttttcacaggacttcaccataggcatcatctatcatacttgttttcatattactgagtgcttcataaaaatattggagaagaagctgcgtccaaatccgatggtgagggcaattggcacata

SEQ ID NO: 37937 - DNA, 264 bp, Glycine max
tgtaggcctaggatcttcttcatctatggattcctttgcttcttggaagatgaatggcagcggaatggagaaggaagagagagaggagacgccacttcaaggagaagatgagtttagaaaaagctcaccaccataggaggtcatggataagagcctggaggaagaagatgaatgaagggagagggagagaagagcaggaaattttgtgctctaaaagagctctaaaatctgaagtttaatattcaaatgatcaaagttgaaaaa

SEQ ID NO: 37938 - DNA, 263 bp, Glycine max
agcttcaactggtgttatgtcatagggaatttgcctccttgttgatcactttttaacttaaaatttgataaagcgtgattatctttacaaaactaacgaacatgttctcaattgatttgcagcttctttattgttcatggcattctaaaaaatcatgaacaagtatgacaaggtctcatttggttctaaaagattatatatggctgcaatcttttcagttattttctttagtactaactattaataactgttaactaatgaat

SEQ ID NO: 37939 - DNA, 273 bp, Glycine max
tggatgatatagactttcctttgtcttgagctctaatggcggactagcctctgaagccttcggtgaaagacgtgccttcggtctacttgtatggtcatcgggctccaagtccggtaaacgagcctcttcgcataatgcaagggtttagggcttattacaatattccctcccggattacattcggatatgctaatatcctacgggtgaaggaggtactattagaaaaaaatgtctagtggacgcatagtcctggagactaatttatggagctta

SEQ ID NO: 37940 - DNA, 264 bp, Glycine max
agcttctcaaggaatcttcctattctataaatagaagcatgtgtaacacttgttgtaactttgatgaatgagagtcttgtgagacacaactcaaagttcaactactctccatttttcttccttcgatttcgtgctccccccttctctctttctctccctctttcttttcctccattgaagcatcctctccaagcttcttatccaaggctcatgttggtgatgaagctccttcttccatggcttattccttaatggatggtgcct

SEQ ID NO: 37941 - DNA, 261 bp, Glycine max
tgcatgatttacatctccctctttttcaagcaaattcttcttgatatcatcaaaatcttcatgatttacattctccccctttttgatgatgacaaccacctgtaggttatgagcaacaacaaagaaaatatctattcgcatatagtttactcccccttggttttacaatgattgcttatatgagacaattgaagatttcatatttttcatatataaaaagttgtctcataaaacaatagataatttttcttactattttat

SEQ ID NO: 37942 - DNA, 75 bp, Glycine max
agagaagaacctctaggaatagtttaaaaagctaccctagagtctggttactgggaaaatatgaaggagagggaa

SEQ ID NO: 37943 - DNA, 259 bp, Glycine max
agctttgagggtgcgtatcccaccatcttttcatagtagagtatcgataatgtgtctaccatcacgatcatcgtctccctttccatcattgggggtaccacctgggtcgccagatccctccaccttttgggcgtgttctttgaaagatccgtccccctttttgcaaatgttctgtagttgcatcctatccggaaccatatcaaaattgtactgatactgcctaacaaaggcaaccattaggtccttccaagaatggact

SEQ ID NO: 37944 - DNA, 256 bp, Glycine max
tattggattatggggcacccgtcatatgtggtactaggtggcgatcgggcgatggcgcaaatcaactctcccacttccacaagtcaaacataaacacaccatccctagttgcccacctttaaattgagctcacgcactcctacgtagcccttatcctcgttcctctcagcaccgggtccccatcaacccctccaagctttaaaaatatccaaacaattcaattccaattatcatgaaactaccctaaaccaagaaa

SEQ ID NO: 37945 - DNA, 269 bp, Glycine max
agcttcaagaaaaagatggcctcagcaaattccttatttccagaagggaattctatcaatagacctccaatctttaatggagagggttaccactactggaaaacccgaatgcaaatttttatcgaggcaatagatctaaatatctgggaagccattgaaatagggccttatatacccaccacagtagaaagagtttcaatagatggtagttcatcaagtgaaagcataaccatagaaaaacctagagatagatggtctgaagaggatat

SEQ ID NO: 37946 - DNA, 266 bp, Glycine max
tctgaaagctggaatcatttatcctatctccgacagccaatgggtgagtcccgtccaggtagtcccgaagaacaccggcctcacagttgtaaaaaatgagaaggaggagctgattcctactcgggtgcacaacagttggagagtctgcattgactataggaagttgaaccaggttaccaaaaaggaccattttcccctacctttcattgaccagatgcttgaacgtctggccggtaaatcacactactggtttcttgatggctttt

SEQ ID NO: 37947 - DNA, 269 bp, Glycine max
agcttgaccacattttttgtcttaaaatcatttgcacatatatgatgaatgtctcaaacattcatacacatgtggctccatccaacctcacatcaaacatcattaatcaatctcgccccacataggataggtacctcatagtacaaaatgtggaagcaatgccttttaagattattttgatgatgcaggagaatcaagagtcttacacgtttcatgaatcatgatcaagattcaagattcaagagtaatcatgatcaagattcaagatt

SEQ ID NO: 37948 - DNA, 264 bp, Glycine max
ttatatgtaagcacatgacggattttataatgtattaagggagttaaattttttatacataattatttaaaaatttaaatcccaataaataattattaaataaatagaaagtttaaaaaaatacaggataaagggatagtttccctaaattggggtcaaggaaactcagtcaccggattcaggaaacactcatagcatacttgccaacaactcaacctaagagttaagattaagacccctaaaatgttctaaaactccaaaccc

SEQ ID NO: 37949 - DNA, 263 bp, Glycine max
agctttctttgtgggttgatgggttctgtcgcgtagaatggcatgatcattggctgacatattcttaattagctcggttgcttcttccggggtcttcaactttatttttccccctgcagaagcatctagcagttgcttggtttgtggtctcatcccatctatgaacatattcaattgaattggctcggaaaacccatgggtgggagttcttcttaataaacctctgaacctctccaatgcatcactcagagattcatcaggga

SEQ ID NO: 37950 - DNA, 246 bp, Glycine max
  unsure (1)..(246): unsure at all n locations
ggaganaaatgtcaaggggtcgcgatatgcgaagatgatgttccgagtactttggatttggtatgaccatgccctcctgatttccggctgggaaattggcgagtggaagaacgccccggcatttacgcaacgagcataatgtaaacctttacggttttaaaagctctatagttgggcctaggctttagagtttttccttttgttaaggctttgtgtcttttgtttttgaatttataatacaaggat

SEQ ID NO: 37951 - DNA, 264 bp, Glycine max
agctttgaaaaacactttttattttaaatcacttggccaaacctttgctaattcaattaggaattcccttcctaatattctagtgatcatcttgatgttgtgacttgtaatcttgaagtattgtcttgaattttaatcttgaaaagcccatttgcatcaattgcaacacatcatcatgatcatcatcaaaacatcaaagccaattgcatctacacatgtgtcctccaccttcgagattggagctatgtttcacgattgcctaag

SEQ ID NO: 37952 - DNA, 247 bp, Glycine max
  unsure (1)..(247): unsure at all n locations
aggaaggacattgcagccgaaggaactagntccgctccggagtatgacagtcaccgctttaggagcgctgtacactatcagcgcttcgaggccatcaagggatggncgnnnctccgggagcgacgcgtccagctcagggacgacgagtatactgatttccaggaggaaatagggcgccggcggtgggcatcactggttactcccatggccaagtttgatccagaaatagtccttgagttttatgcca

SEQ ID NO: 37953 - DNA, 265 bp, Glycine max
agcttgagcttaggtgtttggtttgatccgacttgtttaaccacctagaaaatcgcatgacatacattttttgagaaatcaatgcagtaacttaaaacatgtgaagtcaattcagtagcttttttaacttataagatgtgagggattgtgctatgtaacaacttctccgtgatgttcatcttttctaattgattttccaactcatcatgagacacctatgaaacaatgagacattctgtatagtaatggcagtgaatgagtctaa

SEQ ID NO: 37954 - DNA, 263 bp, Glycine max
tctaaagagttctagactactctatagttcggtggcatgcggagacaccttacagttatttgcacctcgtcattcggagaccccaagtccgatgacacgcatagaccaatgtggtcatctacaccctccccggagatgtcagcgtctttcgaccgagactatttagtctcaccttttgctatccaacgacccaagagtccggtgacatgcggagacaagttacggttatccacacctcgtcattcaaaaaccccaagtctgat

SEQ ID NO: 37955 - DNA, 270 bp, Glycine max
ctgccagcttgcttgttgtgtgctgatcatcaacagaagaaataaatgttaataagaattagtttcctcctcttcccccgaaacgacaacttttgaatgacccatttcacaaaatttttaaaataaaagaatcacaaaagaaagcttattcttggttttaatttttaaaaggcaacatataatcaagatgggaacataaatactttgacacatgctactacatgctcaaaataaaaacagaaaatgaaaaaaaaaatttaaaaacagatg

SEQ ID NO: 37956 - DNA, 255 bp, Glycine max
catcataggagctgtgcacgtcaaacagagggggattccaactcttataggtgactttgagcagctgtttatggaggagtccgagtcaattgctgattatttttctccagtattggccgtactcaatcaacttaaaataaatggtgaagatgttgatgaggtgaccgtcatggaccatatacttctaactttaaatccccgtattgacttccttgttgccagcattgaacactactgggattttgagaccatgac

SEQ ID NO: 37957 - DNA, 265 bp, Glycine max
tgtgtctttgtttttttattttagaaggggattttattttatttttgaatacgaataacataaaatttgcacgaatttaaacttaaaatcattccaaacataaaaataacattacattaacttcaaacttcaaacattaaacattacattaacttaaatagagttgaaagaaataaaattagcatcaaatacgacaactaagtgatgctaattttgcgacaaggacatattatgttccatttcgattacatgcttactaaaaaca

SEQ ID NO: 37958 - DNA, 260 bp, Glycine max
agctttgtttttatattaacatcttcattgtaaacgcaccctatgagcgttaaagaatctctaattttatatcaaattgttgtttgtgaaagctaagagtggcttagtgactagataatacttgagtgctcttattttcatggggagtctaagggttgtgccagtaatggtctagagaatacttgtaagccaagaatggtagaatagaatactcgtaatcaaatttgattagtgaactagtacaaaactaatttctcttg

SEQ ID NO: 37959 - DNA, 268 bp, Glycine max
  unsure (1)..(268): unsure at all n locations
tcaagcttgcttctacacattggtaatttcatttttatttgtaaggcttaattctagccaatcaccagtgccgtgaaatcattttcttttcttttgtgagactagaaattaatgaacacaaatgcatataggaaatcaattcccaactaaacttntttttatcaaatatcacttgagatcgtttcaaggtccaacgccttaacaattctctccgcgtttcaaaatttaaaatgtcatttcaaggtccaacgccttaatgactctttgt

SEQ ID NO: 37960 - DNA, 264 bp, Glycine max
agcttcacaggtattatgggttttccaactaatcttaggcaatccttttactaaattctttttggataattttgaaatatgttttaaattgacatgcccaagttttttatgccaaatctatctttcatcttctctagatagtagacatatgacattttgttttacaagacctattagatcaatcttatacagattgttgtgtcatctgatagtaaaaaggaattgccgtcttctgtcttgactatacactggtctttgaaagac

SEQ ID NO: 37961 - DNA, 264 bp, Glycine max
tccttgagaagcaaggaaggcagcttccttgagaagctagaagggggtctcacacctataaataggtgacttgggacacaaaattcccgtttgaggtggaggttccttctttgagaattctagcagaatcgggttggaagaatcagaatgggcccaagcacgctttgatcaattgaatcttatcgaaagtaaaaggttggctaccatgagccatgggtgactatatcaaagcagagtgaaaaatgctttcgacaagagggtgca

SEQ ID NO: 37962 - DNA, 261 bp, Glycine max
aacttgcttgtggagcttctatggaggctggatctttgagcttcaatgggatcctttaatggtgattttccaccatggagatgcaccggaagacaaatgaaaggaggtgagaggaggcgccatccattaaggaataagccatggaagaaggagcttcaccaccaagatgagccttggataagaagcttggagaggatgcttcaatggaggaaaagaaagagggagataaagagagaggggggagcacgaaattgaatgaat

SEQ ID NO: 37963 - DNA, 254 bp, Glycine max
tgctgaaatagaaaattggtttgttccataccacttatctgaaacaagcaatgactttaaagttcagcacactagtgaacaatctacatttgtactaaaactactaaagatattatcttgttctttccaaggaagaaaataatctcaccgagttactatcagtgaatattatggcaccaaatttagtccttccaaacctaatcatacatgcaaaggtggtggtatcacaaaatgtttggccttaggaaggcgat

SEQ ID NO: 37964 - DNA, 260 bp, Glycine max
agcttcggaagaaagtgatgaggtacaagccctaaaggcagagcttgaaagagcccgggtagtcgaagagaagttcaagtccatagccatcaaagtatgaaaagagtatgatgaactaagggacgtcaatatggccacagctgaagccttggaatgagaaaccaagaaggcctgaaaggaagaacacgaccaaaacaaagttttgaggggctttatagggcagcaatagtgaactcaagctccgaagaggtgaaaggaat

SEQ ID NO: 37965 - DNA, 255 bp, Glycine max
tgtagaatggctagacatgatacatgtcagggtttggtttggttcaaggataaaagggatgccccacattatttccatgacacaaatgcaaaaatgatgatttggaaactttatgcaaaactggtcatgcatgcacctatgtggacactcaagtgtcaaatttttatggtcatgtgatgctagggctcaggattcatttcctctattttagtcaacccaacgtttccaaaatatgttcttttatcaatttgtgca

SEQ ID NO: 37966 - DNA, 268 bp, Glycine max
agcttcacgatatactacgggacacaatcggacatccgagtaaaaagttattgtcattttaattttcttagagcttccgttttaactacgagcggctcgatatattacgggactgaatcagacatccgaggaaaacgtttttgtcgttagaatttgctcagagcttttgttttcaatatcaagcgtctcgttatattacgggacttaattgtacatctgagttaaaatttaatggggtttgaatttgctacgaccttctctttgcaat

SEQ ID NO: 37967 - DNA, 266 bp, Glycine max
ttgagcaaattcaaacgacaataactttttactccgatgtccgattgtgtcccttagtatatcgagactctcgtaattgaaaacagaagctcgtagcaaattcaaacgacaataactttttactcagatgtccgattatgtcccgtagtttatccataccctcgtaattgaaaacagaagctcgtagtaaattcaaacgacaacaacttttaactcagatgtccgattgagtgctctaatatatcgagacgctcgaaattgaaaat

SEQ ID NO: 37968 - DNA, 263 bp, Glycine max
agcttggccccggtcaatctctttgtcatccctacttctaagtctaatgtattattggtgtatgtatcttattactgatatcaaataaaggtttatatattttataaattgtataattgaaggatgaaaatgccaataaactgttaaagttaggaatgtactggtcaataactttagcccatatatgcatgccaacatcaattttataatattttcatccatacctgttgtcaagtacatgagttccataacagatgaagatg

SEQ ID NO: 37969 - DNA, 283 bp, Glycine max
  unsure (1)..(283): unsure at all n locations
tgatttataaaatcctcaagctttgatgcaacatttggagaggttattgtaacaacgatatgatgcgctccatgagaggttggatcaaatggagaatagagatcataatgaagaagaaaggaggagaagagggaatgatggtgttcctagacaaaaccgaannganggnnnnaaacncaacanncctccatttaaaggaaagaatgatccggaggcctacnnggagggggagatgaaaatagagcatgttttctcatgcaacaactatgaggaggaccaaaag

SEQ ID NO: 37970 - DNA, 270 bp, Glycine max
catgcaagcttgtaaagtggtattttatgattaaaagaaaatataaaaaatcgctccaaaataagaagctcaatgggccacatccaagttaaaaagggtggcccaataagtggtccttatacgtgtccttcttttttagaccatatttttgggtcgcccaatttcttcaatttctccttagttttttttttcttctaattccgataggggataaattcccactatcatttttatgtattttttaaaaaaattaaacttatgatataaaga

SEQ ID NO: 37971 - DNA, 268 bp, Glycine max
  unsure (1)..(268): unsure at all n locations
gcttttgaaaattcaatttagttgtaaatattgaacggccagatcgcgttgccacttccatccgacgctccacaaagcatcgaatccagcgaacggtcacgattcattgaagagtctccacgaggaagcacgagcggaaggtaatccaatgcttcccatgcttgaagtttcctttcactgtttggttttgtttggcatnnntactactaaactatnatttcattgaaatttatattttttaaaaacttttaaattaaactacataaat

SEQ ID NO: 37972 - DNA, 267 bp, Glycine max
agcttataagaacaaaattgctttaatcatttccaaatatgcatgggaattaggacgcatcaacaagaatcaagccaaggctattgtgcaagcaatcaatggggcaaaacacaccaagtgattatgatgatagatggctcaaattctcacaaaggtaaactcatcactttcaaattgagctttcaaaactatcatgacatgtagagaagaatcaaggatttcaagtcacaaaatgtcaagaacttttattttcaaaacaattaccca

SEQ ID NO: 37973 - DNA, 268 bp, Glycine max
ttaacatgtataattaagttcgcaataatattatctgaaaaagaatattatgatgaagaagaaaaaaactatttgacaattcgtctaacatggatatttatgtcacaaaaagtaataatagctacaagagatacacttgtcaccatgataatgtccttcgaattgaaacattggagtcacatggggctacccttcttgtcaaacttcaataagtgtataaataagctgccaaagaaagtagccctgcgacaataattattcactctat

SEQ ID NO: 37974 - DNA, 265 bp, Glycine max
agcttaaacattctttttcgagcgtctcgatatattacgagtctcaatcagacatccgagtaaaaagttatggtcgtttgaattggctcagagcttcaacattcaatttcgagcgtctcgatatatttcgggactcaatcagacatccgagtaaaaagttgttgtcgtttgaattcactcagaggttcaacattcaattttgagcgtctcgatatatgacgggacttaatcagacatccgagtaaaaagttattgccgtttgaat

SEQ ID NO: 37975 - DNA, 264 bp, Glycine max
ttataagcgcgggttcgggagacaaaggcgaggcgttcgcgatatgcgaagatgatattccgagtactttggatttggtacgaccatgccctcctgatttccagctgggaaattggcgagtggaggaacgccccggcatttacgcaacaagcataatgtaaacctttacggttttaaaaagctctatagttgggcctaggctttagagttttcattttgttaaggctttgtgtcttttgtttttgaatttataatacaaggatc

SEQ ID NO: 37976 - DNA, 264 bp, Glycine max
agctttgtaggttctattatttggtacgatggtcttttaccatggtctatataatactttttacccaaacatggttgttgatttaatatttttatctaaattggcaatggcctacatagatgaaacttttgaactgtattgttcccaactcacgatcatggatactttattatttatttactttacattcttagtatgtttcaattattcctttcaggggttatataaaagcagtacgggaaattgagcagcatattcataagg

SEQ ID NO: 37977 - DNA, 262 bp, Glycine max
agcttgtattgttgttcagatcttgactagttataactttctgaataaaatgagtttgtcccatgtttttactccaaaagttagtgcgaatcaaatcactcccgcattttatctctagcatgcattcatatcattaatcgcataagcacctcttcatggcatgaacatatcgttgctgcatttgtccattatcatattccagcatcacattttacatgagtcattgcatcatcatgcatatgcgttcaacatactttttgtt

SEQ ID NO: 37978 - DNA, 262 bp, Glycine max
tgcatcagcgtgccttactgcacttagtgagttcatcactttttgatgaatatctggagttccagatgaactcggtaagccagccctgtcccactaagcgagttcatcttttctgatgaatgcttgaatgtttatgaactcgctaagtgcagttgtgcgctaagcgagtaatgtggggcagacactcagaaatttttttagtgttttcgtattcgtggctaagcgagcctgctcgctaagccactcagccctgttggttgaa

SEQ ID NO: 37979 - DNA, 99 bp, Glycine max
aagcttgacaagagtgctaaccatgtacatgtttagaatgtaattagtagaactcgagtgcttttactcccgagttaacaaattctacattcttgattc

SEQ ID NO: 37980 - DNA, 263 bp, Glycine max
agctttggaaagtgttgtttttcaccttctcgctaagccaatctgctggcttagcgagcgtccgctaagcgcaacacttctgggctaagcgcgaggaagactctggaagaagatgagttgtataggttcgctaagcacaccgcttcatctcactaagcgcaccgctttagttcatccgctaagcgagaaaggcgcgctaagccaaaaatcactaacgtgcgctaagcggtccataagtgcgctaagcgcacaagcacgaacaa

SEQ ID NO: 37981 - DNA, 264 bp, Glycine max
tgtactttgaaaattatgggtaagggacaatttagagtttaaatcgctgaactgggatcatccatttctattatccagtataattagttcatgaggttgcggtagaactggcttaccttgctgtttacatttgaggttagacaaagacaatgacagataggggttttaaggtttgcttggtgttgaaagaaggaaggggaggagaggtcatgggtttgaatccccaatcaaaaaactaacagctaacaattaacattggcggat

SEQ ID NO: 37982 - DNA, 256 bp, Glycine max
agcttgagcatatttttcatgcaatatggttggattagttttttttttttatttctctagttttttcttatctttttccatatttgagttagcttctgacataggcatttgtggcctaacatgctctttataaatgtgtgtgctataatgacatttaattaatagaggataattcaattaaggattactatgccttggtatttcttagctgtgttgagtttcagcaattgatactatccaatggctttcacgggct

SEQ ID NO: 37983 - DNA, 258 bp, Glycine max
tcttcttccatggcttattccctagtggatggtgtctcccctctcctcttctcctttgccttctgctgcatctccatggtggaaaatcaccattgaaggacctcattgaagcacaaagatccagcctccatagaagctccacaagcaagcttccatcaccttccaagctccatttccaaaagtggtgtaatgcccctcatcatccaactgccctatagatattaaatttctctttaaggcaggaatatgtctgacatt

SEQ ID NO: 37984 - DNA, 308 bp, Glycine max
  unsure (1)..(308): unsure at all n locations
atattgagaaaatngggggtgatttgaantattggtgtagttaatatttaaatagggatagttttttttaattgattttattaatatntatttggtttatttgaaaatatttttgaataagtaattatttgtttgttgtttattgagattgatgaatttatattataatttattatgtaattgattattatttttggatagattggttataattttaaaataatgaagaaataaatgtaataaagaataataaaataggttttttataaaagaggaagagaattaagtatgttttatttattaattat

SEQ ID NO: 37985 - DNA, 215 bp, Glycine max
aatatgggtggttaattatagtcagaacccctttttatttgaaattagataaatgatcttgctgccgtcattaagtattactccattctggcgttttcttctttacagaatcatcttagatgaatcagtcttttgagtgctatctagcaatttttttgaagaacacttgcctttgttatttggaaggccaacaccattagaaattccactatgcg

SEQ ID NO: 37986 - DNA, 267 bp, Glycine max
agcttgagatgaggaagtgttgaagggtgaaacttcctgcttttattgttgaccacatagtggtacctggagatatgtcacgggggtcaggagaccttggggacgtcaggtggggtgctattgcccaaaaccaagcttgaccaatcccgacccaccccgagcatagtcggtcagtgagaacctgtgatgtacctaaacaggcgagctcctggcagtcaacagataaaaggaacaaagaccacaaagcaaggaggtttgtggtggctg

SEQ ID NO: 37987 - DNA, 267 bp, Glycine max
tgtgcaaatcaagtcactcccgcattttatctctagcatgcattgtatgtcacgggaagccggaaggtccatatcaccttcttaattgtacacatggggcactgcgcccccaaatgcgcaagtaagaagagataattttccgggctctcgtgtccgtaaaatgcattcatatcatgcatcgcataagcatctcttcataacatcataatggacatatcctgcatttgtccgttatcatattccggcctcacattttgcatgagtcat

SEQ ID NO: 37988 - DNA, 266 bp, Glycine max
agcttcagcttgggtggaaccagccttctccttcacagtagtagcagcaaccagttcttcttaatctattttctccttttgaatatcatggagcttagtcatatgtgtggaagcaatgttttccaagattattttgatgatgccaaagactcaagtcaagaatcaagagtcaagcaagtttcaagaatcaagatcaagattcaagtttcaagaatcaagatcaagattcaagaataatcaagatcaagattcaagattcaagtaaa

SEQ ID NO: 37989 - DNA, 265 bp, Glycine max
tctagacaacgttcttctgaaactagtccaacttttcttgctttggtttgacccaatattcatcagacatagcatcatctatgtgctttggcttaattttagaatccaatgttatgtgctagagagaattctttgtttagactttgtccttaggatcaccaatgatctggactctagatgatgtttccttagcaagcatccagttagttctctaaccttttcaggttgatcatccattggtaggttggacgaaagttggttatga

SEQ ID NO: 37990 - DNA, 259 bp, Glycine max
agctttgcatatcctttgataaaccttcgatagtgaccagtgaggcctaagaaacctcttagctgcttgatattgagtggtgtaggccactctagaactgcatgcgccttagtagcatccatagcaactccttcacctgaaactatatgtcccaagtactctatctccaatacaccaaaagagcatttatacaacttagcaaacaaaacatttctttcaatactttgaatacaacctttatatggcataagtgttcatg

SEQ ID NO: 37991 - DNA, 266 bp, Glycine max
tagacttggccaaatgtatatgattaacaactgtcattattcaaggaatccatatagtacatggttgtcctaaaaatgggctgaaatacaaagaaaatgttttcatagtcattaactatttgaatagcatgatatatatatatatatataatataagtatgtagctttgacaaatgacaattgagtattgaccaccaatatgttgagtaaagacttatttgcacatagaataacacaaatttcaggatagtttcatttagtggcaa

SEQ ID NO: 37992 - DNA, 269 bp, Glycine max
ctgccagctttggaaattactgttttcaccttctcactaagccaatctgctggcttaccgagaatcccctaagcgcaacactcctgggctaagcgcgaggaaaaatccataagaagatgagctgtacaggttcactaagcgcaccacttcatctctctaagcgcaccgcttcagttcatccgctaagcgagaaaggcgcgctaagccaaaaatcactaacgtgcgctaagtggtacatacatgcgctaagcgcacgagcacgaacaagg

SEQ ID NO: 37993 - DNA, 274 bp, Glycine max
ctgctgctagaattaagaaataccttacttttctttaagctcaatgcggggtacgaccatccatctaccaaagcaaacaatacagctgacagtctaagtaacaataaatactccccacgaaatgggcgcctccaacatatagagtgagccgaagaacttagaaggaaaaaacttgggagataacaggggaagaaaattcaaaatgcaatgtacctgcatgctcatcatccattgtgcaacattggcagcatagatgccacattgtagaccctaa

SEQ ID NO: 37994 - DNA, 263 bp, Glycine max
ctcgggttgaaattgacgcctactacatagtgcaactcagtaccctttacatcttaaatctatctgccaatttaaagtccactgatgcaacaattacaaatgaccgtctaagtacatgaatgaaattaccgatgaaataaatgtaaattattaaccaaagtttgtttataatgtcaacaataaaccttttaatcaatgaaacaatatgcatctatatcattaaaatcatatttaacatcccatgattttaaaagctaataaat

SEQ ID NO: 37995 - DNA, 261 bp, Glycine max
tgagatgttttgaaatgacaagggccctcatggttggccgtgactattgccagaagttgtgacattttgggacgttgctgactgatcacaatgttcatgatgttgaccatggccctcttggagatgaccacgatcatactcaatgttccatggccgctatcaagtgaacttatcatgatgacttcatgaaattgttcatttttaaactttttcacttaattgggcggttatacttttgcagggtggtaacaaaaggggaaa

SEQ ID NO: 37996 - DNA, 163 bp, Glycine max
taacttttttgaaaagggacatcagaacatgagacgactacaaagaacacacacagaagactgataacgcacaaacctgcgaaaaaacggcaagccttaaattgaaaaccaaaactataaatcccagcttctcacccaaacggtacaaagagaaaaaggtagc

SEQ ID NO: 37997 - DNA, 264 bp, Glycine max
agcttaagccatattatacttaatccaacatggatctcgataaaaaatggatttactactgaaaatttttgccaactggtgagtaattttggagttctaatattggaacatatttggtcatcttatgttcaaacacaaatgtcaggtcattgcacaacatataacccacccattgagggcataatccacacctaaagcatcagctccatcaaaactgaacccaattggatcaagaccttgtgcttgcgctctatccctatcatg

SEQ ID NO: 37998 - DNA, 268 bp, Glycine max
tcgataaagacgtacgctaccttatttgacaagccacttcaaacgaagaatgttattattttcccaaagaaatctataaaaaagaaagaaagaaatatttttttaaaatagataaaatactgtcattatttttttaactaaaaacctataaaagagaatattttcacaaaaataagaaagtgattaatgacatttaaatatcattctggttacattcaagatattatacatagtaatgctattataaaatttttttttttgggggggg

SEQ ID NO: 37999 - DNA, 246 bp, Glycine max
aggttgaaaagcagtgtttgatgaataaactatctggtgttgttgttgatctgaaatcgagtggagaggaattggctttgactatacgatatctggcggaagcttattggggtgataaagatcactaacaccttcggagtattggaacctttctttggaatactatgacggaggaaacatgtgacctgctaaaaagtgtcatcgtctgttaaatcatgaataggacttttgtagcccaccttgcta

SEQ ID NO: 38000 - DNA, 237 bp, Glycine max
tgacgctttacactctaccattgtttttatttatacactaagtctttcaaatgttgctatagagacggattgcaaagcacctgtggattgtttccatgctgacactaagaatgagattgattttcatggcgcagggatcttctttcgccaatttcaaactttagagtgagtcttgtaaagagacatgttaatcatgttactcacaatgttataaggacattaagaaattatgtaaac

SEQ ID NO: 38001 - DNA, 259 bp, Glycine max
agcttgaaccctcgttgtagagcaaacaaaccgaaacacattcaccacgatggcgaccaaagcgatggaggtggtgaagggtctggacgtgaaacggtacatgggtcggtggtacgagattgcgtgtttcccgtcgaggtttcagcccagtgacggcgtcaacaccagagccacctacgctctcagagatgacggcaccgtcaacgttctcaatgagacttggagtggcggcaaaagaagcttcattgagggcactgct

SEQ ID NO: 38002 - DNA, 269 bp, Glycine max
agcttcatggtgaatcaaaggtgattcaaaggtgttttgatgataacaatgatgataacaaaagatggtgacaaaggtgatgacaaaaagctcaaagataaatcaaagaacagctcaagtgaatcaaagatcaatcaaagaacaactcaagtgaatcaagaacaattcaagagttcaagataagaatcaagaagaattcaagactcaagaagaaagtttagagtctagaatcaagtttcaaggttcaagatctcaagaatcaagatcat

SEQ ID NO: 38003 - DNA, 266 bp, Glycine max
tgcttgtggagcttctatggtggctggatctttgagcttcaatgaggtcctttaatggtgattttccacaatggagatgcagcggaagacaaaggagaagaggtgagaggaggcaccatccactagggaataagccatggaagaaggagcttcaccaccaagatgagccttggataagaagcttggagagggtgcttcaatggaggaaaagaaagagggagagaaagagagaggggggagcacgaaattgaaggaaaaaaagggag

SEQ ID NO: 38004 - DNA, 266 bp, Glycine max
agcttggacttcctgtgttttgggaacctctccttcctcaggtgtacccaaacccaatcacctggttcaagcacgactttctttctgcttttgttggcttgccttgcatagctcgcatttttcttttcaatttgaaccttcacttgctcatgcaacttcttcacatactcagctttagcctgtgcatccttatgcttaaacatagcaatgttaggcataggcaacaaatcaagaggagtcaaaggattaaatccatacactatctc

SEQ ID NO: 38005 - DNA, 267 bp, Glycine max
ttgagccaaaattctgactcaccataatccttgacccagggtgagaatgtcaatccttaccctcggaagcaaaaaaagaatagaggggaaatttccaatcaaagaaaaagagaaggaaaatttccaatgaaagcaaaaaaagaaaagaaggaaaattccccaatcaaagagtgggagaaagcaaaaaaagaaaagaaggaaaattccccaatcaaagagtgggagaaagcaaaaagaaaagaaaggaaaattcccaatcaaagaatg

SEQ ID NO: 38006 - DNA, 263 bp, Glycine max
agcttggtgacctttcacactatatccactcaaattcccataagctggaaagtcattaatggtgcaaaatatcatcgcatgcaacctaaaagtctcaccctgatttgcatcatacacatcaaccccgtctacctaaaacttacgcatgtcttcaatcaaaggagtaaggtacatatcaatatcgtttcctggctgtcttggacgtgatatcatcatagacaacataatgtatttgcgcttcatgcataacgaaggaggaaggt

SEQ ID NO: 38007 - DNA, 265 bp, Glycine max
tagctacacacacctctctaatagctaaattgacctccttgagatgagaagctagagcttaactacacaccccctataatagctaagctcacccatatgccaaaaaacatgaaaatacaaaaaagtccctactacaaagactactcaaaatgccccgaaatacaaggctaaaaccgtatactacaagaatggccaaaatacaaggcccaaacgaaggaaaaacctattcattagaataggtttatgcgaaccctagggccttccc

SEQ ID NO: 38008 - DNA, 263 bp, Glycine max
agcctttagttaattatgtgccagctggataactaacttacatactccaactactctgaactgagtacaatactcactggctccgcatacgacccttgttcacctttgtttctggcatcaattctcaggtacgtatctctagacccctctggatgatgtttaccctcatttcttcccctggcagctgtttgtgaattttcacgttttggtctcccaaatttagtagtgtttacaaacatttttaaccccccaaaaaccatgct

SEQ ID NO: 38009 - DNA, 265 bp, Glycine max
tctaccatatgattgctttgtcatcaaagcccaaggtagccaacctaatcttcttcacttcactatactcatgacatgcaaagatttggtaaactttcatctcccaatcaagatatgcctccgggtaatgcttcatttgaaaattagggaatattctcttaggaaggccatgtcaatttgataggaagatcatttacaatgacctaactaatgagattaccctcaactatcttggaactaaatttgtgttgcatcctcaaacacc

SEQ ID NO: 38010 - DNA, 267 bp, Glycine max
agcttgagatgaggatttgttgaagggtgaaacttcctgcttttattgttgaccacagagtggtacctggagatatgttgcgggggtcaagagaccttggggacgtcaggtggggtgctattgcccaaaaccaagcttgaccaatcccgacccaacccgggcatagtcggtcagtgagaacctgtgatgtacctaaacaggcgagctcctggcagtcaacagataaaaggaacaaagaccacaaagcaaggaggcttgtggtggctg

SEQ ID NO: 38011 - DNA, 268 bp, Glycine max
tcttcacatagtccgcctttgcttgactcttctttatgcttaaaaacagaaacattaggcataggcaaaagatcaagaggagttagtgggttaaaaccataaacaacttcaaaaggagaacaattagtggtgctatgaacagctctattgtaagcaaattcaacatggggtaaacaagcttcccaagtttttaagttcttcctcaaaactgtcctaagcaaagttcccaaagtcctattaacaacttccgtttgcccatcggtttgtg

SEQ ID NO: 38012 - DNA, 336 bp, Glycine max
  unsure (1)..(336): unsure at all n locations
nttgttgcctccgtatccacctcgccctcgcgatcgatctctagaaagacctagcctgcaaggcctgccaagcttcgacacttgtttctgggacacgggatgacctaggagcatcaaaaacgctagcggcatgctcaagcccatcttaaacggcacgcacgcattcttagctagaccattgagcatgtttacgttgcactacgcagcatcattgctgttccaacaccatctttcaatcaagttctggatcataaggaagcttgctgtaacaggggagggcaacgcataggctatgcaataagatgacgaagggcgcgatgctaagaagcatgagcc

SEQ ID NO: 38013 - DNA, 187 bp, Glycine max
ccattgggctgggctgctctttgaatccctattattgctcgatactctccctgccttacttatggtgattcattaggggatctgtcacaaacctgtaggaattatgaaccgagacaaaattttgggtctgtgctgctactagttcctacggattatgcatgtacttatttgtatctttccaagaagg

SEQ ID NO: 38014 - DNA, 263 bp, Glycine max
agcttgagaagactacttcagtgtggccgaaggactacgttggacactagctctaccatttagttttaagagtaattacttttatcacctaaaattgatcattttcatattgttattagaatctgagttctgtttgaatttattactcgtatcctcaggttgttaggggaaaaatctatcctatatgtatccaagcacggaatgaaagaaggcagagaaatcattactcagaaattcccttttcagtctctttgctattttgg

SEQ ID NO: 38015 - DNA, 264 bp, Glycine max
tccccttggtttcttaccttcccagaaatagcgtcccccaatagaaaccaaagcattgtgccatacatacgtaactctctctctctctctctctctctctcactctttatattaaagctttccatttcttagtttcaaaaaattttctttttctctccacagacccctctcatggcatcttcttctggtagtttagacacctctgcaagtgcaaactccttcaccaacttcaccttctccacacaccctttcatgaccacttct

SEQ ID NO: 38016 - DNA, 263 bp, Glycine max
agctttacatatattatctaattagttaatgaagtgaaaaaaaatacttcctttgaactaataagcaaaaataatgaatcacattcatcaagaaaattagttaacataatttaatattgataatctcaataaaaaaatcattttctaaaataccctttagaacaaaaaaggagaaagttgttgaaaataaaactttaattaaatgaagggtattttagagatatatcatcaaatatagaagagttagtttaaagttgcttata

SEQ ID NO: 38017 - DNA, 260 bp, Glycine max
ttaaaacaagagtatgccctttcaaccagctaagattcttcatcattaaggagtagcatattttaaattttgtatggtcattttccatacttcatttcatgcaagatagcctctacaatatttgatttcttttgtaatattcaccagcctaacctgcactagcctgatacatttccttattttcattattcattcacgagttgctacaaaatttattcatgcatgtgcagttcattcacaagtttgttgcattattcatt

SEQ ID NO: 38018 - DNA, 264 bp, Glycine max
agctttgcggatttggtcttcgccgatgaaaggatcgaagtgggtctgaaaagaggcaaatttaatcatcttgcttggacgaatgagaaaactggggcaaatgaagagggtgagaatgaaggagaaacccatgttgtaactatcgttcctacatggaaaatcccgcaccagctcaacaacatcattacttagccaatatcagcccttctcattacccaccacctagtcatccacaaaggccatccctaaatcaaccacaaaacc

SEQ ID NO: 38019 - DNA, 265 bp, Glycine max
tccatcaatggctcaggagcggacatggatgccttgtgtcttgttggaacaagtgcgaaaccaaccaaacacagagggcgggcaagcaacagatgatccgtgcgctactcttttcgtaccttcggtcaaatgtgtcaaatagatctgccaagacagctaccaccggactttccttgctatggtggtatgcaaggaaagcgtcgattgctgctaggtccaccaaaccatccacgtttggaaagaggacgaccccaaaaattagcaa

SEQ ID NO: 38020 - DNA, 261 bp, Glycine max
agcttgaagagttcctctctcgcttagaggaagaacgtgtcaagattgatgccttcaagcgcgagcttcctctctgcatgcaactcctcaccaacggtacaagtttcaatcaatcatcatcatggtttcaccaaagaaacatatcaaacgtagttgatgatattccaaattccaatgaaccaattaaaacatggaatgtcctaaaccctaaagtttcatcaataccccatgatgaaaatattatatatacttttataaaaa

SEQ ID NO: 38021 - DNA, 256 bp, Glycine max
tgtccgtctttgccgcaatgccttccaccttgccagccaagtcctttttctcttcctacaagtccttgtagcttgcagatagttcatcaccgttcaaccttgtgtgcagcaacttggccaagacactgccaaccttggcagataattagtggtttgaccttacaacttcagcgaaggcgatggtggcgttagctaacttagggcgcttttgtctccaaaccatgtgagcattagccctccatttggcaacctctat

SEQ ID NO: 38022 - DNA, 261 bp, Glycine max
agctttttctacaaccttttctccccctttggcaacataaaaaagccaaagacctcggaaattaacacagatatgataaaggagtagaaaatatataaatatcagagtataaaacacaagaagccaaacgcacaaagaagaaataatcaaaccagaatccaaataactgaaaatgtcaacaatcacaaaacatccaagactgaaatttaaaaaccacaagataaataagcaaagtacttagcataataatgtaaattctaa

SEQ ID NO: 38023 - DNA, 253 bp, Glycine max
tgctcaaaacaaaatctaacattccgatccactcaattcatacgatttctcattcaactcaatcgcagcacttcatttgtacgaaatcaaaccactgaatatcatattcaatcagtgcactggtcaaacatgcttttgtacaagctacaaacactaaaacaacataaatttaaaaggctgggatttaaaagactaatgaagcataaactaaataactgataaaataaaactgtgcataatttgcaaaaaattt

SEQ ID NO: 38024 - DNA, 266 bp, Glycine max
agcttgcatgagaagcttctatggaggttggatctttgagctttaatgaggtcctccaatggtgattttcaaccatggatatgtagcggaagataaaggataagaggtgagaggaggcgccatccactagggaataagccatggaaggaggagcttcaccaccaaaagagtgccttggacaagaagcttagagaggaagcttcaatggaggaaaagaatgagagagatagggggggggggggcacgaaattggaggaaaaaaaaga

SEQ ID NO: 38025 - DNA, 266 bp, Glycine max
tttgactttgctttgagtaagtgtttcacgcagttcataactttgactttcatctcaagttaatcaacacatccaatgcatgtaaaggaaggactctcttgctttgtaatggggcttgcctaacaaggaaaattggtttttctagatattcaaaagtaactcaaaggaaggaaagcatttagtctattctttgtttacatgatagctcataggtacccttactttgttcccttgagtagtaatttttgccactccaaacttaagca

SEQ ID NO: 38026 - DNA, 265 bp, Glycine max
agcttatttgtgacaacattgaatatctttttcttagttttccaaggactactcacatgtacatttggagttttgtagtgtcttataggccctactcaagaaagataggtcaagtaagcacaaaaatccaaaaataaaccacaattatcaattaaactcaatcatttgccaaaggccaaaactaagttaaagtgagaaaataaaggatcaaatatatatcaatcaagcaaaaaagaatagaaaaatactataaactacaagtgct

SEQ ID NO: 38027 - DNA, 265 bp, Glycine max
tacccttatggcttgcctccggacttcactccccgtgtcgctccggaagatctcttaccttcgaggggaaactctgtagatgcaattgcctttggtgttttgatgatgatcatgacgatatgatgcaattgatgcaaatgggctttttcaagattaaattcaagacaatacttcaagattacaagtcacaacatcaagatgatcactagtatattaggaagggaattcctaattgaattagcaaaaggtttggccaagtaattta

SEQ ID NO: 38028 - DNA, 265 bp, Glycine max
agcttgttaagtcttggtaagccccaattttttcttacacttggtggagcgggccactcaggaatgacctttattctcttagggttcatgggaaccccttgatcataatttaaaaaattaagaaaagtaaagcaatagaacatacctttttctgtattttcatgttgattattcctaccaaaaagtatgacaaacctaaggtgtcccatatgagtgcctaagtttgtattgaaactaaaaataagaacaaacctacctaatgagt

SEQ ID NO: 38029 - DNA, 288 bp, Glycine max
tgacactataaaaccctccagctcgaaggtaaactagatgccttggttaacctggtaacccatctggccttgaatcaaaaatctacacctgtcgccagactctgtggtttatgctcctctgccgaccaccacacagacctttgcccttctatgcaacaatctaaagcaattgaatagcctgaagcttatgctgcaaacatctacaatagaccttgtcataccctaatttcgtccggggattataatttgatgatatacaaccattgattgaccgcttcgagatgtttg

SEQ ID NO: 38030 - DNA, 260 bp, Glycine max
agctttatgagagagtttagatcaaattgagaggaaaaataaaagctatgctaaacaagccaacaaagggagaaagaaggttgtcttcgaacccggagattgggtttgggtgcacatgagaaaagaaaggttttccggaacaaaggaaatcaaagcttcaaccaaggggagatggaccatttcaagtgcttgaaagaatcaatgacaatgtttacaaagttgagctgcccggtgagtataatgttagttccaccttcaat

SEQ ID NO: 38031 - DNA, 268 bp, Glycine max
gctcgtatctaaaccaataatagttgttcttgattggagtgaagagttcgagctaatgagtgatgccaacgactatgctgtgggtgtagtgctaggacagaggcaagataagatattccatgccatctactccaaggatttgctcctcttgtgcgcctcctctcttaccataacctcgatgacaatccctaccatgcatcttcctctttcatttttctgggttttgttgtttatatctgagatccatggctcctccttcctctctatg

SEQ ID NO: 38032 - DNA, 266 bp, Glycine max
agcttgttagtgggaaattgtgaaacttaattcatcccccttcttaagttattgaggtcacttgtccaacaagtggtatcagagcacgattcttgtctaaagtttaaaaacttcaagaatagatatggtctcatctaactttctattaataggcctcttgttttcaatggcgagggttatcactattggaaaacccgaacacagatcttttttgaagccatagatttaaatatatgggaaaccattgaatttggtcccttcattcc

SEQ ID NO: 38033 - DNA, 266 bp, Glycine max
tgtcaatctggatcttgaatttggtttgccactgggttggagggaaaagtgtcaaacaaacaattttttatttcaggaaaaaattagaggtagggcaggaagttttacttttttattatgtgtggttgaatgaaataaaaaatctttgatttgttttgtgctgaatttgatgagtttggttttctattttttaaaacattttcttgcatttcttaattgtcaaaaatcatttaacacattttaaacaagtcaaacaattatatttt

SEQ ID NO: 38034 - DNA, 258 bp, Glycine max
ttcgacataggtgtgagcaagtgtttttcgcagcccataacctcgactgtcatcttaagttaatcaacacatccaatgcatgtaaaggaaggactctcttgctttgaaaaggggcttgcctaacaaggaaaattggtttttctagatattcaaaagtaactcaaaagaaggaaagcatttagcctattctttggttacaagaaagctcataggtacccttactttgttcccttgagtaataaatttaggcactccaaa

SEQ ID NO: 38035 - DNA, 263 bp, Glycine max
agcttttcaattgttaataaaatataatttaagtcaccagaatcatttatttacaattaaacactaaaaccattaaccaatacacaaatcacccttgctggatttgaactcaaacttcagtacagtcctccttagtttatcaaaccaggccctacgagcctatttgagaccatatatgcctatgagttgcacctaattgctgtaaaaatgcattaaaaggtctcaacttgatgtgtatggttgctattgatatgatgcaattc

SEQ ID NO: 38036 - DNA, 263 bp, Glycine max
tattgtaattagcattggtgttttcatcttttcttcttatttttataagcttctatcttttttttagcatatcttttcaaatatttttcaatatttttgcattttaagtttggttgttgacattatttttttaatatgatttgaacattaaattttttttatcatcatcatattggtgtaaagtattcactgactttatatataattaatctccactaaaaaccaacctaataacactaattgattcaaatttacactatatt

SEQ ID NO: 38037 - DNA, 263 bp, Glycine max
agcttgaacgaatgtaagacacatcttcttcaacctttgtgattcttgactccatttcattgaagcgcatatccacttgcaattccaaagtgtcaaacctctcaccaacaaaggtttgaagaccatcaaacctgtccataatcttccaaagaagagatgaatcttctccctcatgtccttcttcaccaacatttctagcaccctacttcacccaagagccatcatgctcctttatataaccaaaggatgctatgaatgaagcg

SEQ ID NO: 38038 - DNA, 261 bp, Glycine max
tggtatttaatagaatttggttcttttgtggattgaagagttactgggttgaaaattataaggtgtatatggagtgggtggattattctgatgtggggaacatgagatatacctttgcctttatatgcaagaattgatagtattgggagcgcctgaagcttatgctgcaaacatgaacattagaacttggcatactctaattttatttgggggggtatagttgatgatatacaaccattgattgaccgctttgagatgttt

SEQ ID NO: 38039 - DNA, 401 bp, Glycine max
  unsure (1)..(401): unsure at all n locations
ttcactcctttccctctttctattctttatcttaanctcatctcattactantnatctcacgagcggataccatttttgcatcgttcgcaccccgncccngtagtatactatacagtccgactgcccgcaagcgagctacatccttttcttgaaaaagaggatgagattcgtcccccaacgagaaaacttccttacataaatttcatgtaggcggactcttcttctagtaattttgacttaccataacctcttaagccctcttccatcccccccgagagccaattccaaacaaaacaatggaagaagcggaaaaggagaaccctggataccttcatgaaagcaggggtgaacatacctttgctagatgccatcaaacagattccaagatatgccaccgttc

SEQ ID NO: 38040 - DNA, 265 bp, Glycine max
tcaaccttgaatttggtttagacatgattgtttcatgatttgggacttgtaggaattgatttgagcacgattggatgacgggaagtgtgattctcgaaatctgcacttatgcaaaattttgctgcctaatatgcgcagcaggattttacctgggcgcaaaaaatgcttgcgtgtggttggctgtggaaagagcaatggaaaatgagtactggatgttcgctaatagatccctacggtcacaaagtatgcttatgcactatctact

SEQ ID NO: 38041 - DNA, 260 bp, Glycine max
agcttctttttttcttgaatttagttcttctaattttttattttattttagtgagttgttaatgaaattcattaagtgtttacgtaataaacaataataacatcatcattttacatcatcaaatcatgaaatcttttgtgacatgtcaataaacgtgtcattaaaaattattgttaataaataatgatatcatctaaattattatgtcatcctaatgatattattaggaactaaaaaatgatatgtttttggggactaaa

SEQ ID NO: 38042 - DNA, 263 bp, Glycine max
tttcattcgcaagattcggtggctatttcagatttttgggttgttggattctaaagttttcatgaaaatgtaatggagtaaatttcatgttttgaaatggttatttttttaaaaaaaattatatcaaaaaatataaaagtcattattttgaaaagatcatttcgactcaccacaaatattaaggacaaaatcaaaccttttaaatataagaaatcaaactaaatataataaaacaaattaaaagaactaaaagtgcatttaag

SEQ ID NO: 38043 - DNA, 259 bp, Glycine max
agcttgtccttggtttagacatgattggtacatgatttgggacttgtaggattcaatttgggcaaaattggatgagggaaagagtggttttcgaaatctgcactttatgcagaattttgctgttgaaatgtgcagcagaattttgtataagtgcagaaaaatgcttgtgtatggctggatgtgaaaagggtagtacatatggggttctggacatttgctagcagatcccaacggtaaaaatgtagacttatgtactaga

SEQ ID NO: 38044 - DNA, 256 bp, Glycine max
tgagatgaggaagtgttgaagggtgaaacttcctgcttttattgttgaccacagagtggtacctggagatatgtcgcgggggtcaggagaccttggggacgtcaggtggggtgctattgcccaaaaccaagcttgaccaatcccgacccaacccgggcatagtcggtcagtgagaacctgtgatgtacctaaacaggcgagctcctggcagtcaacagataaaaggaacaaagaccacaaagcaaggaggcttgtg

SEQ ID NO: 38045 - DNA, 261 bp, Glycine max
agctttattcaagacaaagaaattaaagatattcaagatggatgatcaagacagtctctagagtcttagaaagggtatattaaataggaagggaattccaattgaagtagcaaaaggtttggccaagaattttaagttaaaaagtctttttcaacaaatttactctttggtaatcgattaccagaggatgtaattgattaccagtggccaaaactgatttacaacagctattaaaatttgaattcaaagtttgtactgtgt

SEQ ID NO: 38046 - DNA, 256 bp, Glycine max
tgtaacagttgtgaatcatgccgaaagcatgtaaaagtagttcatcactattttcttccataactacaccggtaatgccaagattaatgtgtgtgatttgcattaaaaatgggaaataaggtcaatcattaaaagaaatgcctaaactaatggaggagactgcactgactaaagagagcacacgactctacagacttgcaattgcaatatatcagactccttataattatatttttctaatatgatttcaggttgc

SEQ ID NO: 38047 - DNA, 264 bp, Glycine max
agcttccatcaagtggtaatcataacacaagagcttcaagtaagtgctccttaaacctccattaatttttttctttaccttctcttccattgttgtttcttcatttttctccatgtatctcctcacatgtcttgttctaaatgttgataacatgattctttagagtttccaccgattaaacttgctatagaaactaatttgattttctatggttcaaatttcttgttcttgttcttgaaccatgaattgtgttgagtttacgtt

SEQ ID NO: 38048 - DNA, 265 bp, Glycine max
tgaagcatctgcatcctacaaatgcctgaattccccgttagctctcaagtaaaaagatgatttcctctttactcttctattttgtttatacaataccctaagctttgctgatgctgattcactaacaactgattgtaactaactaatggctatctaacacatgtatttgagagccttgacagtagaaacgagggactttgaagtattatgcttaatgcgtggttgtgtactcttagctaaattctgacttcaaactctagatttg

SEQ ID NO: 38049 - DNA, 265 bp, Glycine max
agcttgttacatattgttatgtcattgacttattattcaaagaaaataataagttagtcttataattaataagtgaatcaccaatttagtctctaaaatagtaatatcttgtcaaatatttttttttacaaatacaatgacaaaatgatccctaaaattataaatcatcaatctatttaatctctttgttattagctagcttcattatatcaagtgtgttagtgacaatcaattaggtacacatctaattgtagcatcctataag

SEQ ID NO: 38050 - DNA, 265 bp, Glycine max
tcaagcacaggttggctttgagaaatgttttgcaagcaattgagttggcttggatgtgagacatgtgaggaggtagcattagaactttcctgagccatgtttggcacaaaactaaaacaagcatcaccttgttgcatgtttctcatcatattattaattccataattacaagctccatcaaactgatccattgaatttgtaaaattcaccctcctattgtcatcattaaggaggatttgacttggatggttggagaaaccacttg

SEQ ID NO: 38051 - DNA, 261 bp, Glycine max
agcttctgcataattggagagttctagagagagaaaggtccaagttccagagagtttgagagaatttgttgtgtgaagatctgcatagaccagagcttgaagaggaagccgtcctgagagcttgagatgagtttgtgagtgattatgaggtcctagaggtggaggagacatccccactacttgtatttctgcaatctttcatctttctcttctctttgttggaaaggaagctaagctttccagttatggaaagctaaatcc

SEQ ID NO: 38052 - DNA, 264 bp, Glycine max
tttgagtgaaacaatgtgactcttcacatttaaatttgaatttcaacgttcaaggacactggtaatcaattaccaaaacattgtaatcgattacagccttttgaaaatatttggaacgttgtaaattcagtttgaaaactttttcaaactcattttgctactggtaatcgattacaacaatatggtaattgattactagagagtaaaaactctttggtaaaaggttttgtcaaaaactcatgtgctattcaaagttttgaaaaa

SEQ ID NO: 38053 - DNA, 266 bp, Glycine max
agcttatagggttatggggtacccgtcacatgtggtactaggtggcggtcaggcgatggtgcaagtcgactatccacatccacaaatcacacataaatccaccatccccagttggtcaccttcaactgagctcacgtactcccacgtagcccttaacctcattcttctcaacaccgggtccccatcaatccctccaagcttccacaacatccaagcaattcagtcatccaaacatcatgcactatcaaaaacaagaaaaatgggcg

SEQ ID NO: 38054 - DNA, 265 bp, Glycine max
tttgcaagagttatgactactataggaggcatgtctctctcttttcatttctttcattatttttcttctttcttcctctcttattttctttctttcatcttgacttatttcttccactattttttccctttttcttttctctggtgtttttctttccataacttgagggaactcaactcatctaagattctagataaagggtctttatgactagtacccttgccattaacactagatgaatgatgactcatgttggttcctaagt

SEQ ID NO: 38055 - DNA, 266 bp, Glycine max
agcttcatgatgatgaatcaagtagttttgataatgacaaaaagcacaaaagaatgatttcaagattgagtcaacaagttcaagatcaagattaatttcaagattcactagaagaaatcaagaggattcaagattcaagaaaagttgatttcaagattcaagaaaagacatcaagaagaatcaagattcaagagaaaatgaattcaagattcaagagaagaaatcaagaagcaacaagtcaagacttcacaagggaagtattgaaa

SEQ ID NO: 38056 - DNA, 265 bp, Glycine max
tgacattttgttttttctggtcaatgagggaagtatatatgagataaataattgaaaattttgtatacttaaaagactttccaaattgaacaatttatcattttttatatattttatgcattaatgttagaatatatttaaatatatctctaaacgaattgtttaccctataatactattaacaaaaattatttacccaaataatactcataccacattatttaaacactaattcgtttcagagtgatcttaaatcatcctaatg

SEQ ID NO: 38057 - DNA, 263 bp, Glycine max
agcttagtaaagcttggcactaacaatctccccctttggcaaattttgtctaaaacatacttagacacttcctgagcaggtacgagcagttatgcaagtgggatcagcaactttcattatcagagtaatcaagcacagcggaaattctgcaagttgcaagtcgtttccaggatgtcaagacatctcacatgacatcagctttctgcttctgctccccctgtctccatgctcttactgcagcatcttctatcagctactagtct

SEQ ID NO: 38058 - DNA, 262 bp, Glycine max
ttgagccaattaagacgacaatatctttttactcggatgactgattgagtcccgtcatatatcgagacgctcgaaattgaatgttgatgctctgagcaaattcaaacgacaataatattttactcggatgtttgattgagtcccgtaatatatcgagacgctcgaaattgaatgttgatgctctgagcaaattcaaacgacaataactttttactcggatgtctgattcagtcccgtcacatattgagatgctcgaaattga

SEQ ID NO: 38059 - DNA, 264 bp, Glycine max
agcttatcaagtggaataaggtaacaggaatatgttctgcatgatttcttttagctcaaataacagagatttaaaaattaattagaaaattatgattcataatatcatttttaactaaaagaagcattccaaattctattctgtttattttcctcttttccatagcttattgtgaatcaaacatgaataacgccatacattgaggaaaacaaattccataattttgacttttgactatctcagaaggaataaattgtaagaacc

SEQ ID NO: 38060 - DNA, 263 bp, Glycine max
tgaacttggctgctgtaataactttgtcaggtattctcagttgttctatatgcttaacatcaatgacttgtatcttcagattcatgagaatttcaaatttgtacatccttattttttttttctacacatgatacatgattctcataaaatgttggaattttctgtgattagtttctggaatactgaggttacagcgggcactatacctgtaagcaagctaaatttatcagcttgaagccatagaatcaatcaagtgtatttat

SEQ ID NO: 38061 - DNA, 251 bp, Glycine max
atcccagacaaagaatggtccatgcttccacagagcttgagagaatttgtagtgtgcaagatctgcagagaccaaaacttgaagaggaagccgtccctgaaagcttcgaaaagaattagtgagtgaaaatgatgacctagaggtggaggagacatccccactacttggaagcctgcaatcttccaactttcctcctcaactaggtggaaaggaagctaaccttgccagttatggaaagctaaaacctttgg

SEQ ID NO: 38062 - DNA, 260 bp, Glycine max
tggtgttcctaggcctaagtcctatttttggcacctatcctagtttctaaaagtcgtccctaaactcaacaacggaagccacctatgcccaagttagtcccacaaacaaaactcaccaaaatgtgctcacatgccattgaggcatttcaccgagcacttggtgggcgcacctttaggcatgaaaaagtggggaatgggggcaatgtgacatgcctaatcacttcagaatatgcaattggcctatggccatcccatacaac

SEQ ID NO: 38063 - DNA, 263 bp, Glycine max
tagcgcatatcttttggggcattgaataggctaaagcgcacgctatttcgctaagccgatgtgttatattttttagggcacgttgagcgagctgtatcccgctaagcgctcatcgttaatattagcctttatttctgcttttaaacttgaataaatttggtctaaggaattttgagttctttttagttatagatggcatcgggaaaaagggctggagcaaatgacatcccttcaacatccactccagctcctccatcaacaac

SEQ ID NO: 38064 - DNA, 227 bp, Glycine max
agctaagtattctatgacatcaggaagaaatcaccccggaggccacataatgaaaggggaaaaggtttttgttgacgaaaaagaatccatttctggagattgcgtgagtaatagaacaaaaaagaatgaccacattttaactactgatcatagccccataggacgatagggtgaaaaaaaaagcaaacgtttatattgtgaaacatctacaacgcaaaatcccacaa

SEQ ID NO: 38065 - DNA, 252 bp, Glycine max
tgcttctactggggaagctagccttagtgcttgcacttatgggaactgttggaatgttcgatatgcgatccacttgttggaactcatactggacctcctcttatttgtgcatctttatgcgagagaatttatgaagcatgctcaaatgcatacttctctatggatgtgaaaacacagggacctggatgactgtctctctgtcttttcaaaattgtttatacgagattatgaaaataatttcagaggcctgca

SEQ ID NO: 38066 - DNA, 265 bp, Glycine max
tggaggggttgatggggacccggtgctgaaaggaactaggagaagggctatgtatgtgcgcgtgagctcaatttaaaggtgggcaactggggatggtgtgcttatgcctatgcttgtgaaaatgggatatttgttttgcgccatcgcccaatcgccacctagtaccaaatatgacgggtgccccataatccaataagctcagtgtgagaaggcgtggaagagtcagtcttccaacttttattagttgaccacagagtggtacctg

SEQ ID NO: 38067 - DNA, 266 bp, Glycine max
agctttttgccgatttagtttccgccggtgaaaggatcgaagtgggtttaagaagaggcaaatttaattatcttactttgatgaataggaagcctggggaaaatggagagaataagaagaagggagaaacacatgttgtgactaccattcctacatggctaaatttcccattagcccaacaatatcaatactcagccaatatcagtccttctcattacccaccaccctaacagccaagaatgcccaatcatccataaaggccacct

SEQ ID NO: 38068 - DNA, 266 bp, Glycine max
tcgaagggaagacagagaccaatcacgagcacatagcatggtcttgaaagaagagttagttgcttgctcaaggtccaaaggaaacttgtctcagcgtttatgcgagacagagaccaacatgttagccatcgtcagcaagtaccaagaagaactaaatctagccatagcccacgagcataaagtggtggacgagtatgccctagtgtatgcggaaaaggaggctagaggaagggtgatcaaatcattacatcaagaggcaacaatgt

SEQ ID NO: 38069 - DNA, 265 bp, Glycine max
agcttttttgttcggtgttgccaaaaaatttacaatgtaggtcggctagggtttttcgtgcgagctcaaccgaggttgtgtttcggccgacattggcatgttctcatgcactcggccaagaaaacattagcccacatcgaagagaaaaataaacaaaaaccttaatcaccgatattgatcggaaaaaatgctggttgacgtcggccaggaaagatgaccgatcgaggtctaaaaataaaacgatcaccggatgacgccgatcgac

SEQ ID NO: 38070 - DNA, 264 bp, Glycine max
tgaatcggacatccgtgtgaaaagttgtgaccatttgaatttctcaagagcttcggttgttcaatttctagactctcgacatattatgcgcccgaatcggacatccgtgtaaaaagttatgaccatttgaatttctcgagagttttcgatgtttaattttgagcgtctcgatatagtataagcttgaatcggacctcagtgtgaaaagttttgaccatttaaatttcacgagagcttccgttgttcaattccgagcctctcgac

SEQ ID NO: 38071 - DNA, 267 bp, Glycine max
agcttgtaggattatggggtacccgtcatatgtggtacaaggtggcgatcgggcaatggtgcaagtcgactctccacatccacaaatcacacataaatccaccatccccagttgcacaccttcaactgagttcacgtactcccacgtagcccttatcctcgttcctctcaacactgggtccccatcaatccctccaagcttccacaacatccaagcaattcaacatccaaatatcatgaactatcaaaaaccaagaaaatagggcag

SEQ ID NO: 38072 - DNA, 265 bp, Glycine max
tggaggggttgatggggacccggtgctgagaggaacgaggagaagggctatgtatgtgcgcgtgagctcaatttaaaggtgggcaactggggatggtgtgcttatgcctatgcttgtgaaaatgggatatttgttttgcgccatcgcccaatcgccacctagtaccaaatatgacgggtgccccataatccaataagctcagtgtgagaaggcgtggaagagtcagtcttccaacttttattagttgaccacagagtggtacctg

SEQ ID NO: 38073 - DNA, 267 bp, Glycine max
agcttctcaaggaagctttctagtctataaatagaagcatgtgtaacacttgttgtaactttgatgaatgaaagtcttatgagatacacttcaaagttccacttctctccctcttttattccttcaatttcgtgctccccccttctctctttcttttcctccattaaagcatcctcttcaagcttcttatccaaggcaattctgggtggtgaagctccttcttccttggcttattccctactggatggtgcgtcccctctcctcttt

SEQ ID NO: 38074 - DNA, 265 bp, Glycine max
tcttagtttcagatgatgcatatgggtttgtagctacctcatgcactcctctaatgactatggcatcatttctggcgctaaactgctgggagttggaggccatcttctcaattaaatttctggcttcagcaggagtcatgtctccaagggctccaccactggcagcatctatcatacttctctccatattactgagtccttcataaaaatattggagaagaagctgttctgaaatctgatggtgggggaaactggcacatagttt

SEQ ID NO: 38075 - DNA, 259 bp, Glycine max
agcttcttcttctttgccacaatgcgctgcttctcagcgagaagagccattctcttagcggtcttggcatagggattgagcttcaacatcgcattgaggttggtgagagggttcttcttgagaggagctctcttaacatctttcttaatgggcctgaccacggactggacctcatcggagttaatgatgcgggccaagtccgagttaaccattctgggcctaggaagcaggtagccctttttcttctcagaagccttat

SEQ ID NO: 38076 - DNA, 258 bp, Glycine max
tattgctaaatgctaatcaatcatcaattctcacagaaatcatctgttcctgacaatgttagaaaccatcaaaccatggccatatataactgaattagaatagcagaaatcccaacagggaagaagttatatcagattccaacacctcatgatataattatttacccaaataataccaatagagaagtaaaccttctttggttctatttcctgcaaaatcgtcaagcatgcatgcatgcaaagaatgaaatactcatt

SEQ ID NO: 38077 - DNA, 259 bp, Glycine max
agcttgatgacttgtgctgagtgtatgaatgaatgttgtgtagaggggttccatggaacttgtatttatattatttgagtgtggctgatggtccttgtttgtaagagctattgtagcctttgcagataattctcagttgtagataatagccacgaacttatatatcatgttagagataaacatttgcttataaataaaaggtagaagataatcataccttgtagataatgtgtgggcttataaataattaaatgcctgc

SEQ ID NO: 38078 - DNA, 264 bp, Glycine max
ctgcttgctgtaaatttacattgatgtttgtatctattggagggggttgtatgccatttttgttttaagggtagcatttcttggtaaaaactaactttccaaatgtttgccttcacaagaaatggccccgaggaagcttgcctcaaagaggtccaggaaggacaaggcggccgaaagaactagttccgctccggagtatgacagtcaccgctttaagagcactgtacaccagcagcgcttcgaggccatcaagggatggtcgtt

SEQ ID NO: 38079 - DNA, 262 bp, Glycine max
tttagctatactgaccataaatttttacaaattgtatgcaataatgcctacaaacaaatgttgaaaggaattaatgaagcacaaatgacgaaagaaaccaatcattgttctaagtctctacaattacacttataaatgaagatccaaatttgtcaaaaaaatagaaaagggaaaattaacttgaaactatacaaaaataggtgccattagaataaaagccaaaatagacacacattgaacatgatttccaatcaaccaagtt

SEQ ID NO: 38080 - DNA, 136 bp, Glycine max
aatactcctccttctgagtgcctgcggggacactgttcttgaaccaacgatgcagagctctatttatgcctatggcgacatttatggcaatgcactggccggagatggaggccttatgcctatgcaaaaccctggg

SEQ ID NO: 38081 - DNA, 264 bp, Glycine max
agcttgtatttttttttgcgggatttgagtttctttttcatggttctcaattctcagtgggttttgtttcccccaattatttgtgtggatatatttgtttaattttattgggaaaaaccaagatagagtatataagtctggtacaactttcactttacaagccagttttgaagggttgagttaaggtcaaacccaaattctaagatagcatcaaagttatcctagatctattaatggaccacctaccatattatccacacacct

SEQ ID NO: 38082 - DNA, 265 bp, Glycine max
tatatattacaggagcatgggcattcgatccatccatctgcgctattatcttgacacctatctaatttttggatcattataagcagggacgatttgggatgccatatatataatatggcattccataatacgagttcgggaaaacacgcacacattcaatgttgagaacacaccacaatgtatttcatatcatgagaacttcgttcaaataatggtgaagaacctgttctgaaatcagatggaggggggcacgggctcatagatt

SEQ ID NO: 38083 - DNA, 260 bp, Glycine max
aggcatgcaagctattatcggtttttgcgaagagcaaatctatgacctaacttatgtttgagtgaattgaacccaccgactatttaatagtcttgaattgtatcactccattcagttttgcataaaatactcaagtaaatgaatgacttggcagacaacatagatgtgtcaagttgaaatttataatatattatgactattaaagtaaaatatctggagtttttatcaaattaagacctaaaccgttcttttttttacac

SEQ ID NO: 38084 - DNA, 169 bp, Glycine max
gcttgagagttgagatattgctagcgtgtaaaaagaatatgaagaagcactaggagatacaactaaaacacagctcatcaaacatgggtattaatgcctggccaagtattttttttctccaagaaatccacttgaaaactttattgagtgcattatactaattcataag

SEQ ID NO: 38085 - DNA, 260 bp, Glycine max
agctttgcaacagatgccactctactcaaagtttttgaaagatatgtggacaaggaagcacaaatacgttcaccaggagaatattgttgtggaaggcaactgtagtgctatgatacagaagatccttccaccaaaacacaaggacactagaagtgtgacttttccttgttcaataggtgaagtcacggtgggaaagactctcattgacttgggagccagtatcaacttaatgccactctccatgtgtagaaggttgggag

SEQ ID NO: 38086 - DNA, 254 bp, Glycine max
ttcaccagatcatattagataaatgcattcaggcaatctgcagatatatcctcccaaacgtcaaattctccgcctatatattcaacctttccatcactggcacgtggagtgaatcttcctccatggtgcaatactaaagttatattgtcattcattctacacaatcagaaaccgcaaacatggtcagatattaggaaataaaaaaacctacctcaaaaagcgcgaagacattgacattgtcaaaaagcgcgaag

SEQ ID NO: 38087 - DNA, 248 bp, Glycine max
atattttatatatatatatatatatatatatatatatatatatatatatatatatatatatatatataatcttgatgatttaacataaaaattcatgtataatatttatcttaattcaatttatcttctctcaatttctaacaataacataatgtaaaagatagaaatggaagaaagaaaaattgtgtacaaaatttattgtacaaattgtgctactgaacatgaatactatatattacactcttgtg

SEQ ID NO: 38088 - DNA, 255 bp, Glycine max
tgaatcaagtcgagttcgagtctaaaaaaagcttcatgttgagcttgagtcgaaaaaaaggttcatgttgagcttaagttgaatttcaagataagctaaatattaacaagcctaattgagctaaaccgaatttgactcagcttgactcatttctagcctagtcgcatcttatgttttttcaatgcacagtttgaattatagttaagtggattccattttgggactagtcaactaaatatctagtttgataccaag

SEQ ID NO: 38089 - DNA, 361 bp, Glycine max
  unsure (1)..(361): unsure at all n locations
tgcagctttatcccttacttaaataataggtntaatcttattatatatatgatccttatatataatagcatgtagttacgtcctttttacatttatactgagcttttaaaatcatccacttcttanaatattatcatgtcacttacggctaccgtaccagttatatattcattcatgcaggaaatattttaaataagcctttagccacctactagtctatatcaggaaatctgtagatcgtcagagatgtattgtatcatatataataaaaatccgatgagaaaatcgctccaacacttgacaagtcattgagatagcgaccctcacagttgacatccccacttccacatgcagaagcgag

SEQ ID NO: 38090 - DNA, 474 bp, Glycine max
  unsure (1)..(474): unsure at all n locations
gcatgactcttcacttaactgcactgaaaagactttatgggccctttcggaaagacctggtgccacaggcactttaacaggttttttcccccacaacctattatgacctgggtgaaggcaaagggctcttgaacctttacctattcttcatggtttaccggataatcggggggccaagaatcattacccaatggagtccattggccgaacttcatagttctgcattgcttgaggagcttatgtcattgaccacactatcccaaattttcaggtttacttttgaattttataggggtaagtaagagcccaattttttaaactcatgatctcttaatctttttggtgcggtgttaattttaatttgtgcctaaggcactatacataattactaagttgttgacanaattaaaattccctaatacctaaacctaactaaaagtctagacaattcaacaatataactcaatgtgcatg

SEQ ID NO: 38091 - DNA, 156 bp, Glycine max
gtgtgaaacatatggcttaagccaatccttttttgaaaaaagacaaagttggttcaaacttctggtactttcaatctaactacaatgctgaaggctattaattattaaaaaccgtactttttaccatactataataaaaaatctctatactatttt

SEQ ID NO: 38092 - DNA, 273 bp, Glycine max
  unsure (1)..(273): unsure at all n locations
aaacccattaatataatcctttgaacagagtttatgaaacaaaaaattcctttccaaagtgcataaacttttggaggcacacaatcactcatttatcaaactttctggattcaacggaatataccaaccaaaccacaagacttaataacaacacatatattntaagcctcggaataaaaggaaaaanagtggacacgtgtctatatattattatcaccaaatatatgggggggtgttctaaaaaaacagaggtacggttctcaattctgaaca

SEQ ID NO: 38093 - DNA, 483 bp, Glycine max
  unsure (1)..(483): unsure at all n locations
ctcaaagtatgttttctcaagaaagcctcttaaaggagctactctaatctataatagaagcatgtgtaacacttattggtactttgatgaatgagagtctngtgagacacaactcaaagttcaatgtctctccctttttcttccttcaatttcgtgctcccccctctctctttctccccctctttcttttccttcatagaagcatcctctccaaacttcttattcaaagctcatcttggtggtggaagctcttcttccatggcttattccctagtggatggcgcctcctctcacctcttcntctttgtcttccgctgcatctccatggtgggaaaataccaataaaggacctcattaaaagctcaagattcagcctacatanaagcccccaaagccagcttccatcatggtgcaatataacatccattttggcccgatccgatgtngtntttgcattnttttttacattactttgctaccacn

SEQ ID NO: 38094 - DNA, 515 bp, Glycine max
  unsure (1)..(515): unsure at all n locations
catgtcgcatgcattangcgaactatagatactttgactcccctccantgacgaagcgtganggtgtgagccactggattatctttnttctggatgaatagcgaataattatttcttggtctggataaaaaatatattatgttcctcgccttaactcagcttcatgatttttcatttcaagactaaaccggtttgaaaatccctgaagaacattaaaggtttcttccttatanggtcgaccataccaagggacgatttggaggcaagtatggacatttattatctgatgatcgcttcgaattattggtggctgtatatagataaatcatgattccaattggtcgcttactggtagatcatctatttttcccgatgccagctcaagacaccacggctataccttgagtgagtcatgacctctatatatttcaaacagttttaatcttcgtatttatggatctaaccctgatgaggcatcattacactatggatcttcagaagggaaagagagaaaa

SEQ ID NO: 38095 - DNA, 433 bp, Glycine max
  unsure (1)..(433): unsure at all n locations
cgtgtcgcatcattangcgaccttagatactaagcttcataactgcgctgccaaacttttaggatcattacattatatattatccaataccgaaggctggtctattgtgattgattaccaggaagtgttatccattaaccgaaccttaaacatggattnttcattaaaacttactatttttcacccaccaaaaccttccctttagtttaattagaaattccatattaaaacagtttaaagcatcatatctatacttcaaccttctaaaacatcaatttagacaacacattacatctatactctaaccattctaagcatcaattcagacaacacatcacatctctactataactatatcaaacatcaactagcaaacatttaactcatacatatatcaaacaccatctcaganactagtacatctagaaaatat

SEQ ID NO: 38096 - DNA, 404 bp, Glycine max
  unsure (1)..(404): unsure at all n locations
tactattttatcaattactagatgacaactgttttggtttcataaaatatgggtttactcattggacaaaactatctataacttggtttttgccaaattggttgtgaaaaacaacttcttgcgaaaagattntattntcatctaacacgttattcacccctcgtctagtgagatatctatttttcattatcttggccacatagttacntgcattgtggttctatgatttcttttatgtatgtatgatcccacatcttgaggtaaatgtattaactatattggattgggtggattttatatattatttgtagcttcaaatgatattgcggatgaaagttctaattttcagctttcaaatatacttaagcataatatgatgataccgctagagtgtagaacaacat

SEQ ID NO: 38097 - DNA, 175 bp, Glycine max
cgcgatgcttcttttcatgtccggctgagtgggcttatagcctaaaccatacttcccacgaattccttgggtatttatcaggctagttatgccgcccgtgttttttcctaaacccatcccgggttcataaccgttccccaacataactcgggccatcattaccgctgcatcggac

SEQ ID NO: 38098 - DNA, 254 bp, Glycine max
  unsure (1)..(254): unsure at all n locations
ctctatacttgaaaaaatgtgacaataaaacggcactcttaaactgacaaagccatatcagactggaaacccacgaccctgtggactttccggtcactagtgtctgcggccgacctgcaacattatgactcagaatcagtgagcgatggtataataccatgtacgaggcgtgacttgtgtgggacggccncggtngactgacaaagctataccacagatgaaacccatgcctgtggacttttccggtcactgag

SEQ ID NO: 38099 - DNA, 223 bp, Glycine max
  unsure (1)..(223): unsure at all n locations
ataattggtgagacgcactgtggataaaattgaagcccatctcanatacaaacgaccataacatttccaacggatctcctaataaggcaagtaacctatcgcgacgctcannaattaacatggaanactcgggtgaattccgacgggccaaagttntgactcgcatgtccgattgacgcccataatatatcatggtgatcaaaagtagaaatggaatgccatg

SEQ ID NO: 38100 - DNA, 106 bp, Glycine max
tcagacatctttcacaattactaaaatttttaagttcacagacatcaccattttttttttttatttgtatcaaatctgttttttttttttacaaagacaaagtact

SEQ ID NO: 38101 - DNA, 250 bp, Glycine max
tcttaccctcgagcaagaaaatagagagaagggaaatttcctatctaaggaagaaacgagatgaaaggaaattcccaatcaaagagtgggagaaagccaaaagaaaagaaagaaaattcccaatcaaagaatgggagaaagaacaagagaatgagaagaagaaggaagctctgatcatgatcgaagaaacaaagaaatggcgagggatcctggacaacatatctaacaatcagaatgtcccaatgacaaa

SEQ ID NO: 38102 - DNA, 292 bp, Glycine max
  unsure (1)..(292): unsure at all n locations
aatcttcagaaacaagtcacttgaagaattatgactcttggaaatgtatttttcgaaatcaatcactggtaatcgattaccattaaggtgtaatcgattccacatcaacagatgtgactcttcattttgaactttgaaaattaaaacgtttagaagctctggtaatcgattacatgtattgtgtaatcgattacacaagtttaaaatgatttaaaactggttaaacataagtngtaactcttgaaattgaaatctaacattttaaacactngatatcgatactaccttctgg

SEQ ID NO: 38103 - DNA, 487 bp, Glycine max
  unsure (1)..(487): unsure at all n locations
ttgtaacctcaaagcgccttgatactttgctcttagagcccatggagaaagacgaggagagatatataacgtggagcactaaattgacgatataatatggagagaaagttgaactttgagttgtgtctcacaagactcccattcatcaaaggttcaacaagtgttacacattcttctattatagacatgaagcctgtttgatacacaccataacctttttagaagctctcttttcttaaaaaaacttcttgagaagctttttgagaaaacttccttgaaagctatagttatactcacacacccttataataccttgctcaccttcttgagaagctagagctagctccccacccatcttaatactactctccctccttgccnacttcttgaaatatcaaaaatatggccttttcagacttccaaaggccccatatcaggtaaccctttctctgaatggcaatcatggccaagaaggaaacttttattt

SEQ ID NO: 38104 - DNA, 525 bp, Glycine max
  unsure (1)..(525): unsure at all n locations
cacgtgacccatggatgangcgacacataganactttgataccatgcagttacgcgcaacananaaccacaagctggccatgctcttttattatcgttaaatcatccccagcctctgtgggagttgaccttgacaccgttctattcagactggcaacaccggccgttgcatttatacctgtcagtttctgcaagatctgctttcaaacaagccatccattcgctttattaactgcatagatggtaccatcccagcctggaaaataaagggtaccatcatatatggctggtgttgcactaatgtctcttcctgcaaagaatttccacttcaatcgtanggtcagtgctggtttgggctgatcttatgctctctgtagcatatcttctggtgaaaaatctcaccatggttgaacagtcttgtgatcgagccatgncctaaagcaagaacaagttgacccatggatatgtaaatctgagtatatcctaaactatttacaaagcatnatggatgggatagttcatcatn

SEQ ID NO: 38105 - DNA, 287 bp, Glycine max
  unsure (1)..(287): unsure at all n locations
ttctatcaatagaccacctatctttaatggagagggttaccactactggagaacccgaatgcaatattttatcgacgcaatatacttaaatatntgggaagccatagaaatagggccttatatacccaccacaatggaaagagttacaatagatggttgttcatcaagtgaaagcataacaatagaaaaacctagagatagatggtctgaagaggatagaagacgatgtcaatacattttaaaagccacaagcataataacatctgccctgtgaatggatgaatatt

SEQ ID NO: 38106 - DNA, 174 bp, Glycine max
ttaagtaaaagcctttaagaattacttctggatcatacagtggcaaatggtacacagctataaattgatcaatttacctggtattataccatattgtatcatacacagtataatgttattcaattaaactgatcataccaatctgatcatctgagaattcaaatattcaagcca

SEQ ID NO: 38107 - DNA, 183 bp, Glycine max
caatctcttcttccttaacacaatttaacaataatcctgcgcgtccggtcggactaatacatattacatctcctctgcccccaagagaagcataaacacaattccaattctgaggtgccaaaaacacatctctttaaaaataaattgtgtcacgcaacgcattgcttacagtcgacatctctc

SEQ ID NO: 38108 - DNA, 254 bp, Glycine max
gataaaatgagcttatgacagcttccgttcccaccacatataagctaatatgaaaaaattcaggatttcttcttgctggctctttgcctctctgactaacttacttgtgcacgtgcttgcttgaaggaggagtactttactgtgtataaatctctatacttaggcctaatggttattgtatgagataaactgaatgcgaatacttgcatactaaatttaatttacaaattgtgatttatgagaagactagaata

SEQ ID NO: 38109 - DNA, 529 bp, Glycine max
  unsure (1)..(529): unsure at all n locations
ccgtgtcccatgattagcgacactatgatactcagcttcccacatcaaagtatacaacattcgcacagcaccagctatttcattccagccaaaccaggccaagggcgaatactctgtgtcaaacacccacccaaatcacagcttttcttacttaaagacttcaagaaccattccttcggtcccattcggtaaccggtggatcgactcgaaaattttactggaaggctctagtacttaagcctacattgtgaccggtgggatctactaacaaacattcagaacacattctgtactactcttttcacagccaaccacacaccngcatttttctgcaccaagccaaaatccttgtgcacctattttgacagcaaattctgcataagtgcagatttcgaaaatcaccctttctctcatccatctttgccanatcaaatctacaagtcccaatcatgtatcatcatgtctaaccanagtcagctntaaagacagcacacagatctaggtgcaacaccctcaattcatggttttn

SEQ ID NO: 38110 - DNA, 327 bp, Glycine max
  unsure (1)..(327): unsure at all n locations
tcagcttcatttcatttcaccatctcgatatattaccggactcattctgactttcgtgtataaacttattggcaattcaattttctcagagcttcggatcctaattttgagcatcttgatatattaccggacttatttagacatccgagtaaaaaattatttgcggtagaatttgatacgagcttccgtttttcatgtggagcatctctagataaattgtgacactctgttcggcatncganaaaaatggtattgtggtttgatatttcttagagtttccgttttcaatttggagcgtctcgatatattacgcgactcaaccggaca

SEQ ID NO: 38111 - DNA, 188 bp, Glycine max
  unsure (1)..(188): unsure at all n locations
ggcaactcccgccttatgacgactatcnccgggcagacgatgaggaaggagatacccatcttggccccctgctccacctcaaagatccgtccccacatgaactaccccaaccgaacatagtccgccattatccggcctcacccacacccgtataagaatatgttcccttcacggaagataagggaaag

SEQ ID NO: 38112 - DNA, 465 bp, Glycine max
  unsure (1)..(465): unsure at all n locations
nttgaacctcatacggccttgttctcgtctataccgtctgaacaagcagtgtccattacagatgagtccagacttggattggacgacatgccctctgatttcagctgggaatggcgagtgaggaacgccccgctttacccacgagcatatgtaacctttacggtttaaaagctctataagtgggcctacgctttagagttttcctatagttaanggcttgngtcttttggttttgaatttataatacaaggatctttcttcatctgntcctacgtctctacccattctcattcatttgccatgttacttctttttctgaaatggcagatccaatgacgagttccccgaaggtactaataccttgggacccgctatcgacttcgagcaagaaatgtaatcaacgggagatgaaggaaacgacgatgtgggacttccccanaantataaagaatggtcgccatgaag

SEQ ID NO: 38113 - DNA, 156 bp, Glycine max
ttatacatgtgcccaatacattaaaagccactcccattcggagccttggtatttctgctctttgggggggttgtaaaaatatacttgctcaaaaactagatgtcttttcatatctactgtgtatgaaaagaatggttcactgctcatctctctctt

SEQ ID NO: 38114 - DNA, 457 bp, Glycine max
  unsure (1)..(457): unsure at all n locations
cgctggttgtcgcatggttagcgacctatgatactaagcttaataacattttttttcaatgtaccgtgttggctttatatgtgacatttatttttcccacatatttttactactttttttcttgagaagaatcaattcttggaaaattatatacccctaaaaaccaaaaggttatttattttaggtaaacattgatgtttgaaaacttaaattatcctgaaatccaaatatatgtggaatatggacatatttatagtgcaatatataataactcttggtaaaaattaaatctttactttatgctatcagaaatactattattaaaataggaaaataacaaaatgtataacaaaaactctcagatatgtgcttcatcataatcggtgagaaccaactatcaccataatanatatctgtggctacaatgctattaaatgggagcgggacactnatgact

SEQ ID NO: 38115 - DNA, 351 bp, Glycine max
tctagagaaagctacatgaagctgtctcgtgtaaaacgctgcccagccttcatcaattgttggatcttctcgaaattcggccttaaacttcacaagacactcgtcaatcatctgatcattgggatctttgagaagatgtctggagtgtgctagaagcctcttaatgaagcttctagagaaaactacatgaagctgcctcggtagaaacgctgcccagccttcgttaaccgttggatcttctcgaaatttggtttgaacttcacaagacactttaccatgatttaaccgttggtatctttgagaatatatctggagtgtgctagaagcttcccgtcccgagagcatctctta

SEQ ID NO: 38116 - DNA, 348 bp, Glycine max
  unsure (1)..(348): unsure at all n locations
ctgccgctcttagcacgcgctgcactattgttcacgtcatgatcaanggtatcaacatgatgatcatctgggtgattgaatcatcaaggaagactcttcaaagcttggacgtacggaagtcgacaaacaagagactctcagattcagttttaaagatactttcatgtttcagttttaaggttactcttaaggttttgacaactagagcataaacagactgtttatttatatcttaaacacatcaatcttaccctgactttgactctattctcttaaactctagtttgtttcactgaacaatgggacatttcttcttcttgcaagatgcagacacgcgatcttgttttc

SEQ ID NO: 38117 - DNA, 494 bp, Glycine max
  unsure (1)..(494): unsure at all n locations
cgcagtgaccatgaaggcaccntnancatgaacctgcatacggccttgaactcgcttgtgcatttctaaacacgagaactctgttaaccatgagcaagttgccactttctttattgaagaattcttttaataattgggtactttggcatttgagccaattgccttaatgaaggggaaattaataagaacactttaaagcttctcaacaaatctagcaaactaccaatccttactctggctttcaattcttgagggaagggagaacttacctaaggagatgnntatacctccttctcaccctcttnttccttttggctgtcttcaataagaaccactttttctagtggtggagtggctttctctttcttctttcgctaagncatatgtnggctactcctgagtcttaccacatccacttccttcttgggaatggcttcatttgaaaagaaagatgctgactgctttgtaccagaagatatatattagcattggcn

SEQ ID NO: 38118 - DNA, 504 bp, Glycine max
  unsure (1)..(504): unsure at all n locations
nttgatacgctgctattacgtgacactatgaatctcagctcgagaggttgctttatggaggannagaagagagaggtggagcncaattgaaggatatagatggnagaagtgggactttgngtggttctcataaactttcttcatcacagtacaacaagtgttacacatgcttctatttatagactaggtagccttcttgagaagctntcttaagaaaacttccttgagaagctttcttaagaanaactcctttgagagtttctttgagaaaacttccttgagaagctagagnttagctacacacacccattctaaaactaagctcacctccttgagaagcttccttgagaagctagagcttagctacacacacccatcctaaaactaagctcacctccttgagaagctttcttgagaagctagagcttagctacacacccctattatagctaagctcaccctcatgcccaaanaacatggatatacanaaaatatctactaccg

SEQ ID NO: 38119 - DNA, 574 bp, Glycine max
  unsure (1)..(574): unsure at all n locations
tgttgaaacccttcgnannangccgncncnnnnnnnnnnnaattgatntcgngctgctatntacgtgacactatagatgactcacgcttcatgacgatgaatcaagtatgattcaagcagtnttgatgatgtcananagctcaaaagaatgatgtctagattgagtcaacaagttccagatcaagatttatgaatagacatcaagaagaatcaagattcttgagaagattaattcaagattcatgagaagaaaccaaaaagcaaccagtcaagacttcacaagggaagtatttgataagaattttcanaaaccaaacatagcacagaattttttacaagaaatatttttccannattttctaagttaccagagtatttactctcaggtaatcgattaccaattacctggtgatcgataccagtggtgaagattgattttcaaagcttttaactgaatttggcacgctccacatgttttttaatggtggtatcgataccatatatttgtaatcgattaccagtgtatcttgacatttgtattcaaanntcatttgtgaagaagcacatatttttn

SEQ ID NO: 38120 - DNA, 321 bp, Glycine max
  unsure (1)..(321): unsure at all n locations
tattatagtaagtatacaaaataaacatttagtggtttaatgattcatgaataattntcacanatataatttggaagtgtgcattattttcaacaaccatgcaacccaccataatttggattggttcttgtctttccttgatgctttcatccatgatatttgagtccaagtggtattttttttcaatcaaagcatagcacaaccaagtaccaatgaccaatgttgccatatactaaaaatgtatctacaatacatgcaaagcaaaaaaagtatgtgtcattcaataaccttacatttcaatattgattgtcaaaacataaa

SEQ ID NO: 38121 - DNA, 305 bp, Glycine max
  unsure (1)..(305): unsure at all n locations
tttgttacttacatcacacacatctccttggcttaatttacatacatgcatactcaaacattttggggaccaaaaattcacatgtgacatcttggttttctatacctatcatacacaacttcatgataatattgacttctacacaaanangctcattcatgctctttaagtttgctactaagccgatgcaaatcagattatttctttgtactanaatgataaaggatatatttttgtatgatttcttactacatcacatattattatattttggaaatttactacaaatattgtctcatcagttt

SEQ ID NO: 38122 - DNA, 534 bp, Glycine max
  unsure (1)..(534): unsure at all n locations
tagtgaacccttgtnaanncncccncannnnannttgganacantnganannacnnanannnnttttgataccttgcattacgtgatctatanaaactcaagccttgcgaaaagcttgtcgctagagctgacccatcaactgcccttactctnttagactggtgatccctaggctcttgaccttgacttgatagaacctctntttaagcgaaggccatttgactgatcccatgttttactaaagtgaacaaaaatcgatgcgaatcanaactccaacatctatcatgggtggaatggatgaatgcctgaagaaatgcatatgacacatattgcaattatgaatacnggagccagggaaattgtcttcttctagatacaacctcttgtggtacaaagtgccccacgttgtattaataaagagactccgaccgcccctggtttccaatngccggatgtatttgcaaagggcaacaccgaattaccatatacaatttcccaaattagcaaagggccggcaatatccttggagtgtat

SEQ ID NO: 38123 - DNA, 215 bp, Glycine max
  unsure (1)..(215): unsure at all n locations
ggcttataattctagacagtggggaaattgcatttgacatgaaatcatccttgatccacacaatactcttttctgncatcaaaactgatatatatccaatggatgtatgcacaatcctggtgctgagctgaaatgaggaatcctaacaaactggtttgattccggtgtgtgtgccatgagctggtatcaatcggtctttgcatggacaatctgat

SEQ ID NO: 38124 - DNA, 532 bp, Glycine max
  unsure (1)..(532): unsure at all n locations
cgtgatacccatctattagcgacacttagatacttgactcattgtgaatccaccatattaaaatggattcctgaatgggatactgcacacctttaatgaaaaaagcgagatttttctgcaccaaataactttttgtgtatcacaaagttatttattatatggaccaaagttagatgaatgccagtcgcatgatccatgtgtatgaggaaggcattgaacaattattggaagttccctccgaaagacgtcgatcagatgacgatgttantattttatccctgtataaactggttgaatcgaagacnacaagttctagatgacctacgagaacatcttttgtgtgatgaaattaagaagaaatatacgacttggatatgacatggtgaatngatagacatgcanagggggatctgantngnttgatgtnnaaatgggagaatgatataagatatgatcatgatcttgacataagctcttcacaacacatgccccatgtatgatcatggaaagtgattcgataactttttgatgg

SEQ ID NO: 38125 - DNA, 132 bp, Glycine max
tattataggtttctaatggataagtataattctctaattatccccttgctttgtagcaaggaagatgatatcgactctatatcttattaatactatcaacaaggatttaatgcctgaatggggggtgtctgt

SEQ ID NO: 38126 - DNA, 544 bp, Glycine max
  unsure (1)..(544): unsure at all n locations
ccgtgtacccatcttnangcgacacttagatactctgcttatcagtcttccctattgggtacacacacacttgcacctattgccttaccactcaactcaatacctacagtatcggatgccagaaataaggtnaatccaaccaaaatgggccttaccaaactttagaaatggtaaaaattcccagaaattcaccccggtaagaacactttcagaaggggtaattctttggattaaagaaaaagtacttgtggcctttgagtataactgccggtaagggataaagaaaatttactaacagattttctaaagctacattatttgcaaacctgggtanatagcactacctaatgattagtcatggttaaattggtaagtagaaaccagaaattaaaaagacttanaagggaatattatgatagtctaattnttcccgaatggaaaataataatactcataactatttaaaaaaaataaaatgaaatgaatattatgatccctcatattgataatttcnaacataagtagcactagttagtgatggtan

SEQ ID NO: 38127 - DNA, 497 bp, Glycine max
  unsure (1)..(497): unsure at all n locations
tctagcttacaaagctcattggatactggaacagctaaaggcttaaccaaaggaaaaatattcatcttaccttcaacgttgggtgggagcccacgttatatggatcaactttactttgatggtatgacaatatgcagntatgttggtttcccaaatctttttattactctaaccttgaatccaaattggcttgaaattggtagattacttttacctttgaatctcaaatcaacagacagaccagacattgtatcacgaattttcagattgaaatatgaacaaatgctctcagacttaacaaagggtcaattactgggaaaagtggttgcatgtaagttgactataatttttattcttaaacacaaatataagttgatcatttggccacttttctttattctataatgcagatattaatntcgaanatattacaattngactgatactttttacagatatgaaatacaaaatatacttaccatcgtaacattatcatt

SEQ ID NO: 38128 - DNA, 521 bp, Glycine max
  unsure (1)..(521): unsure at all n locations
ncacgtgatcccatgcgaanacctgncnctnttanncnatgatcacgttgcattaccgacactatgaaactcaagctagcgcatactcttgtctagcgtgcactctaggcttaagcgtatacttcanggcttagctcgcacttccaggctcggctccacttcaagcttaacgcgaagaaagccacagtgaaccctaaggcacgcttagcgagaaagcccatgttaagtgcannagtcacgtgaaaagaagctacctggccctatataggaggaggaagcagaatgganagacacaccgagtcttagagctatccaaagcttgagcatatcccttaggggaaaccctctttgttagatattcctcctttcttttattattcaccaaccccttctccatcctattagcccctaaagtgaaagtctttatgatatgagagctaaaccccattgtgggagctgcaagcaaccccttgaatggaatgtctattatattgatgcattctattcatggctcattctgc

SEQ ID NO: 38129 - DNA, 207 bp, Glycine max
aaaactacttataggtattctaactacccgtccaatagaaatagatttataatacactgagggcctaacccggtagcaaactggtatcagtttctagtgatggtacatatactagcacgtggtaccccctactaaatgctaccacggataaatttacgtcatatctggatactctgttaatggactgcttggcatttgaactgttac

SEQ ID NO: 38130 - DNA, 233 bp, Glycine max
  unsure (1)..(233): unsure at all n locations
acacaacttatataaaacactttaaccctgtttctcttcattatagaacaacttatacttaagtggtatatgagaagcatttattcaacaagttgttttccaatntaccctaaacaacttcaactacaccgaaangtncttggtgtgctttttgtttctgtcttactggctattagcagatgctacgattctcaatctcttatatccggcttctatttttcttccttctgata

SEQ ID NO: 38131 - DNA, 532 bp, Glycine max
  unsure (1)..(532): unsure at all n locations
tgtgtaccatgtttagcgcaccnanaaactttgataccattgcattacgcgacctatgatgactacgctgaacattcttttatcgtctggggtgaaaagcttccgcgatgttcatgaacattacgtgaattccatcttgttagtaccaggaagaacaagttaagtttgtggtcttaatttttgattcctgcattactcgtttctgtacggaacaaacacactggttattatatatgtgctataaagtgctagaaaggtggggttcctaaaatgtctntttgaaaaaaaaattctaataaatcatactattattactacatagactaacgtatacaaaatagncagtaggttttggtataattaaacttgacgcatataacgattttaaatagaacttttccttggggctctagagaagtatagaaactatcagggattgcagttgtatcatttgtctctttatttaatatacgaagagcattccgatggccattacctccatcaccttaaaagacaagacatttgctatatg

SEQ ID NO: 38132 - DNA, 136 bp, Glycine max
tggagtcccatgatgttttactatatgactattaagtcctcttgattacatattaattatcttgggttgctcaattatagacttatttatgctgaaaatctcccttgttgcaatcttctttccattttattttctg

SEQ ID NO: 38133 - DNA, 179 bp, Glycine max
gcactgcgctgcacttgatatagttatctaggtgtgctttcaaaaactcatgaccggctaactggacatggacttatcttcttaggctatatttgtgcgaaacttttggtgtttcttcacctcataaaacactccttagcaagaattgatacatctgcttgtgtgtgaactccaactac

SEQ ID NO: 38134 - DNA, 218 bp, Glycine max
  unsure (1)..(218): unsure at all n locations
tgtcccacattattttcatgacacgcgtgccacaatgatgaaattagaaattatgcanagctagtcatgcatgcacctatgcggacactcaagcatcaagtttggggcctgtgaactagggctatgactcagcatcaattatgcatcntccgagtcattttggtgtcggaaaatccacacatcacccttcaagtaatttgctcctaaacatatgcata

SEQ ID NO: 38135 - DNA, 72 bp, Glycine max
acaactgacactatttctttgatcttctacctaccatgaagtgcctatgatctcctaccaactggtacaaag

SEQ ID NO: 38136 - DNA, 198 bp, Glycine max
acatctccttacaataacttttagctctacctactactgagtctctcacccaaccctaaccctaccacaacatagtcgcatacattaatatattactcaacctattaatgatacatcctaatctgctataaaatacatattaaatatagaattgggcatttactgctgtgaaaaatacaattgatcacagtatcatca

SEQ ID NO: 38137 - DNA, 478 bp, Glycine max
  unsure (1)..(478): unsure at all n locations
acgtgaagcttgtaangcgcncgtganacatgatacttggatgacncaagcgnacaaggaacccctatatattttgttgttctacagcgagagaatgggattttcttgcattaagattnaatatttccggacaagccatgattatgccttggagaactatcagaatcactgaatctgtatgtaacccatataatgctgaccttcgttgtgatgagatgaacctacatgtctctcacactgatgaggctacgacagaggctattttattatgggggagaaacttctggactcattgccgctacgaatgctgtagacatctatatgctattcgccaattttattggccttttcgataaaaatatttgatcctttgctatgacttccatgctctgcgggcatccttttaagcttagtttctgatcttgtgggcacgtttgctgttttctttcgtatttgtaataatgttccgtttcacagg

SEQ ID NO: 38138 - DNA, 286 bp, Glycine max
actcgataaaattattgcgggggatggctcaaatcacatcatttcagcgctcgattatacggcctcaacagacatcagtaaagtattgcgttgatggccagacttcacataattcagcgctcaatataccgaccatcaacatcagtaaagtattgccttgattgctaacctcacattcatttagcgtcgattacggacatcaactcaaaaaatatgctttgatggtcaaatacatcatggacgccatttacgaccatcactcagaaagtatgcctgaatctaactt

SEQ ID NO: 38139 - DNA, 214 bp, Glycine max
  unsure (1)..(214): unsure at all n locations
tgtctcgatatattacgggaataattctgacatcccagtacaaagttattgttgtgtgattttgctcacagcttctggtctgaantttcaacgtcttgatgtaccactagcccacatcagacatccgagtaaaaatgtattgtcgtttcaatttgctcanagcttttgttttcaattttgagtgtctcgatatattacaagactccatcggaca

SEQ ID NO: 38140 - DNA, 121 bp, Glycine max
agcctccgaatcgatgggcttactttcactcgatgtccgattcgcgggcctaactcatgtagatgctctgaattgaacatccgaagctctcgagatattcgaatgcgcataacttttcaca

SEQ ID NO: 38141 - DNA, 151 bp, Glycine max
  unsure (1)..(151): unsure at all n locations
tactattagagcaaaccattntgctatgtttcatgtttttttgttcgtgttgtggggttgagtttgaaaaatgaacgtttgtgcttagcttcttgaactataccgnatgttgttgtttggatggcactatatcacatgaatgcattttggt

SEQ ID NO: 38142 - DNA, 223 bp, Glycine max
  unsure (1)..(223): unsure at all n locations
ggggtgatgttgcgcgtactgatgggtaccatgaggtgcttgtctgggtttgacccacgcgggtgttgaagagactgcatgggcatctccttccttcctttntgcccctgttgccccgattcttttggcattcacgtttgtggaggaaacgtaatcaaactttcctctttttaatccaacctcgattctttccccggcaaacaccagatccgcaaagctggac

SEQ ID NO: 38143 - DNA, 527 bp, Glycine max
  unsure (1)..(527): unsure at all n locations
acgcgactgagttganncccattcgtagannnccccncacnnctcgcanncnttttgatacccatagcaatnnacgncacacnatgnaatactcaagcggtaggatgctcattgactccagactgctgctaagaaggacttatttntgtatggtgatatgcgcaagataatcgacctcacactctcgcaacaggtgcagatttccgattcatggccacatgagttacttggttgaccaacgcttcgagtcttccctncagctgttgatatatcattgatggagatgaatcagtggacacctcactgactcctctactgaaatagcatattcttgctctgattgtacggagctggaaccatctctcaatcaattctcaccttaaagagtcattaccatggctctccatggcgcataatatacgctctcatgagctactcctcatataaattgccatgagcgccctactctgtgggagacaactgcccatttctgatcttgcatactatacacctcttctctaatgccg

SEQ ID NO: 38144 - DNA, 56 bp, Glycine max
agctttggggagctaatccggactctccatgcgttccttctttggaaacctcatga

SEQ ID NO: 38145 - DNA, 330 bp, Glycine max
  unsure (1)..(330): unsure at all n locations
ngtaggattatggtgtacccatcacatgtggtactaggtggttgtcgggcgatggtgcacaacaagttntccacatccacaatgcacgcataaacccaccatcccctgttgcccacctccaactgagctcacgtactcccacgtagcccatatcctcgtttctctcaataccgggtccccatcaatcctcccaagcttccacaacatccaagcaaaacaacatttatacagcacaagcttcacagccaagcaaacaggcgaaggcagaaaaactctctcacacactaaccaaatcacagtttctacttaagacccagaacaattcttcat

SEQ ID NO: 38146 - DNA, 315 bp, Glycine max
  unsure (1)..(315): unsure at all n locations
atatatggngtttaaaagtaatgggttacaatagaaatactagtaacaccttctaccatacattttttttattacactttatattattggatgaactctattgaaaattatanattttgtgagtattaatttatattcattgatagccaagctcatgatnnttataattagtatannatttaactaatagtagagagtgtgtcaaaagtatgttaaanggtatgtacaatcacgtctaactgtatacaaactcaacatctactattaagaaattataattaaggatatttttaaacatcactatgacttattaag

SEQ ID NO: 38147 - DNA, 501 bp, Glycine max
  unsure (1)..(501): unsure at all n locations
agtgtgactgtagccctaaactgacctctatacgacctattaactagtctatgctcaatgctcaagaagacgtattgttgggattgcaaagaattagacacagactctcccacacgtgcagatttctgattcatggccaagttgagttactanggtgaccaaagcatcaagttttccctcaagctttttattttcaatacatggagatgaatcatgggccacctcattggactctctaaagacaaaaacatcatttcttgcactgaattgttgggagttggaagccatcttctcaatcaaattccttacctcaatangagtcatatcaccaagggctccaccactggcagcatcaatcatacttctctacatagtgcttaatccctcatataaatattgcagaaagagctgctcacaaatcttggtggtgaggacagcttgcacacaatttcttgaatctttcccagacttataacacctctttccactaagatgcctgtn

SEQ ID NO: 38148 - DNA, 212 bp, Glycine max
  unsure (1)..(212): unsure at all n locations
ataaaccactccacttaagcctggtattgctgctctagtgggggttgtanatatactttgctcaaaactagacgactcttatatcattgctgatgcaaaaatggttcgtgctcaatctctctctcttttcttctctgtctcatcgagctgtcagcgcggacgcccagctcgtcatgtgcatacacggtaaactgggtgtatcttctgagccg

SEQ ID NO: 38149 - DNA, 168 bp, Glycine max
  unsure (1)..(168): unsure at all n locations
ntgctngacgcttctatggagaatgaagaagaagaaagctacttgagagagggagaganaaggcttctgaatttctgctttggctgagtgaggagagagaaaagctntttggttttaaaaaaataaaaagggatttcccttttttttccattattttattcaagctct

SEQ ID NO: 38150 - DNA, 146 bp, Glycine max
actcagcttaacattcaatttcgagggtctcgatatattacgggactctttcggacatccgagaaaaaagttatcgtgcattgtatttgctcagagcatcaacattcaatttcgagcgtgtcgatatattacgggactcaatcaac

SEQ ID NO: 38151 - DNA, 318 bp, Glycine max
acataaactctgaacccacggtgagaatgaaaatccttacccttcgcagccaaaaagaaaagaatgaaaattcccaatcacagagacagcaaaaagaaaagaaggaaaaattccaatcacagagaaagcaaaaagaaaagatagaaaattcccaaccaaagaatggccgaaagtaaaaaaaggaagaagaagaaggaacgacagctcctaatcaaggatcgaaagacaaccaagaaaaaatccaaaaaggtctttggaccggatataattgaacaatacagaattgccaccaaatgaacaaaaagaaagaaaggaaac

SEQ ID NO: 38152 - DNA, 315 bp, Glycine max
ttatgcttgtgacaaaatgggatacaaattatatcatccttcaactcatcggtgttaggtttctattgatgtcacctttcatgaagatgagtgatacttcattcatcctcagcttcaaggggataggattccagaagcctagtccttctctgaatacttctttccttcgaatggcattactgtatctttgcttcatgagcctgtaccaatgtgcaagtcaatcgaggctaccctttctaatgcgcatgtgatctatcacctcttcttggtgtaccacatgtaacatagataaggtcaagctacctaacgccccga

SEQ ID NO: 38153 - DNA, 319 bp, Glycine max
catcttttcatagtagagaatgagaaatgtgtctaccatcacgaacgtagctattcctttccatgagaggggggaccagctgtagccgtcatatccctgcaccttttgggcgtgtatctttgaaagatccgctcccctttatgcacaagttctgtatctggagtcctatccaagagccatatcaaaattgttcggatactgtctagcaacagcaaccattaagctcttacgggaagggacgtgtgataattcctggttacagtaccatgtaacgggtccccccataagactttattggaaggaatgtatcaactatgcc

SEQ ID NO: 38154 - DNA, 287 bp, Glycine max
agaacctttatgttgctttagctctcaatacttctctgaagcttgcattcccatcgctcttagtaccaattgccgtgttgtccctgccaacaacgttggaactgaaacccaatcttggtgtaagatccgtgtcgggtcgaataccattaataaggagagtgggtttgaaagctgaaattgatacttcaccacctttagggcgtgtaaaggaacctgcgaactagagaggccttaatcaagtgggaatgtggatgcatgaatgcactttgtgggcatactttggttca

SEQ ID NO: 38155 - DNA, 348 bp, Glycine max
gagcttagtcataaagcccttttctaataattgacctaaggtgagtagattacttttcatacctggaacaaagagtacatcagtgatgcaagactgacctccatcctttgttttgataaggaccttcccaattccttcagcagtcaagattctatcatcagcaaatttgacttggctcttcacagattgatcaaggatgaaaaaccactctcttattcctgtcatatgaatggagcaacctgtgtctatggaccaacaattatcacttgcccatgtaatttgagtagttaccattagcactacctattaagtgacatcatcttcttcctgagccaattttgcatcatc

SEQ ID NO: 38156 - DNA, 385 bp, Glycine max
gctttacatatctgcaacaagtactcatcctatcatgtaccattagttaaactaagggcttgacttttagatgctttgagatttttagcttttcaaatggatttgtcaaggaaagatatgcctttcatgactgaaatagagttaaaaacctgtgaaaattcaaagaccaaaatctcctatctggatgggtggagagatttaacaagagcagaaggaactctaattcgttagtttctatattactccaatttcaagaaatattaggaacctgaacagcataatactattagtcagcgaatcatgcatgaaaaagtgatggtaaggggttgatactatcctgcaattatatgataaactaccttatactagagtaatagactaaatc

SEQ ID NO: 38157 - DNA, 341 bp, Glycine max
agcttattgaaagcatgccttttgaagctgatgacgtaatttggagaactttgctcactaattgcaagatgcaagggaatgtagaagttgcagaaaaggcattcaattctttattgcaggtggaccctaaatattcttctgcttacgttcctttagcaaacgtatatgctatcagagggatgtggggtgaggtcacaaaaataacaagtttaatgaagaactgtaagttaaataaggagccaggttgtatctggattgaggtcacacatgaagtacactcattttttgttggagacaacgcacatccaaaatctgaagagatttatgagcaaactcatttg

SEQ ID NO: 38158 - DNA, 261 bp, Glycine max
ttatattccctacctgaactgcgctttcttttatggtgaacagatcgtgcgatctttaattaactcgatctttagttgctcggaacatatcaatctatgagagtatacttttacctgcaagaactattgctgatgaatctccttggacagccatgaccaatagacatcctattaaaaagatctagagcgccgtgatcttcatctgatctcatgttttttctttccatgagatagtgttttcttttactggacaaaagaaac

SEQ ID NO: 38159 - DNA, 358 bp, Glycine max
agctttgagccaaaatcctgatctcccataaaccttgacccagggtgagaatgtcaatccttaccctcggaagcaaaaaagaaaagaaggaaaatttcctatcgaagagaaagcaaaaagaaaagaaggaaaatttccaatcaaagagaaagcaaaaagaaaagaaagaaaattcccaatcaaagaatggaagacagttataaaaggaagaagaagaaggaaagaaagctcctaatcaaggatcgaaagaaaacagaagaaatatgcagaaaggtctttggaccggataatatctgaacaatacagaattgccaccaaatgaacaaaaagaaggaaaggaaaccatgacctaaagtgg

SEQ ID NO: 38160 - DNA, 431 bp, Glycine max
  unsure (1)..(431): unsure at all n locations
ctgaaacttgaangccnctgtttcgtagaaaactctgcgacacttatatactcatgcgattggtagcgatcctgtttagcgctctaagctaggttttgcctttattgtcgtgcgctattcccacttggaaggtaccctcttgaagattggaaacttgaatctaaaccccctcattattgattctataggtcatggcggatgaccgctaggatagggagggttctccaacttattgaaccatatgcttagtgtagaacttccttgaacatgttgctatcaaatttttgagcttgatggcatgtcctaaatctgggtgctaagctattttccttggagtttttatgccataaatgagttctttcttgttgtaacataggattagcctgaaatttgaaccagaatggagttcctataaaagtgtcaataaaaan

SEQ ID NO: 38161 - DNA, 354 bp, Glycine max
agcttgtacttggtttagacatgattgatacatgatttatgacttgtaggattcaatttgggcaaaattggatgaaggtaagagtggttttcgaaatctgcactttacgcagaattttgctgttgaaatgtgcagcagaatttttgtatatgtgcagaaaaatgcttgtgtatggctggttgtggaaagggtagtacatatggggttctgaacgtttactagcagatcccaacggtcaaaatgtagatttatgtactagagactttcagtaaaattttcgagtcgatccaacggttaacaaactgaaacgaagagaatgttactggggtatttgaatgtgaaaagctgtggtat

SEQ ID NO: 38162 - DNA, 297 bp, Glycine max
cttgggtgatgttgcgcgtactgatgggttccatgatgtgtttgctggatgtagaccctcgcggacgtttaatagacaacatgggcatctacctccttccgttttgcccctggtgccctgatttttttggcttccgcatttgttggggaaacgtaagtcaactttcctcttttgtatcctacctcagttctttccccggcgtacactatatccgaatagctggacggcatgtgacctactaacttttcatattagaacactggctgaagggctaccgttatggggatcatctctctc

SEQ ID NO: 38163 - DNA, 347 bp, Glycine max
agcttgtacttagagagagcttagcctctttggtttttgaatgaaaacattattgattcttatcaaggaagctattcctttgtggtgaatcctcctttgacatatcaatattccatggatcatggtgtcgttctattcatcttctttagcttcttcatcatttctatttttctatcttgtgttctttgaaggttaacaatggtattcttgaatttgcttttggaacaatccaaaccaagcttccatggtttggattgcatcataatccttggtcacattcctttgaaatgtgacaacacaagtattattaatctatctaaaaatcctattatgcgttctagaaccaa

SEQ ID NO: 38164 - DNA, 357 bp, Glycine max
cgatagtacgctaagcctgacatcttatgctaagcgcatattgcagaaaatttttgtgttgcaaaaagcgctaagccccatatgctcacgggactttacaacttcaagttgggcttagcacaaggctaggctaagtgcttgggttttaaaatcaaacgtcatgtgggcacgctaagcgcatctgtgcgctaagcgcgccatacgaatttcagtttttaaaaatcaaaggtagaggcactttgggtgctacctttgcacctaaacctctgccccttcctaaccctgagcaattgtgtactttctgctgcgtgcgtgtactgtttctctacacattctttgctttatttcaatcacaac

SEQ ID NO: 38165 - DNA, 346 bp, Glycine max
agcttcaccttttggtcctcctcatagttgttgcatgagaaaacatgctctattttcatctcccactccaagtaggcctccggatcattctttcctttaaatggaggaatgttgagtttaataccatcaattcggttttgtctaggaacaccatcattccctcttctcctcctttcttcttcattatgatcactattctccatttgatccaacctctcatggagcgcatcatctcgttgtttcattaacctctccaaatgttgcatcaaaggttgcatttggaattgcgaaagccccactccatcattaggattagtacctgtcatctcaaacaaacaaattaaac

SEQ ID NO: 38166 - DNA, 367 bp, Glycine max
tctggtgggacatcttgacttgctatccaatctgacattcaccactgattctgccttcctctatcttcagagtgggaatgcctctaacagcacttttgtcacggattatcttcatgcctcttaagagcagatgtccaaacctttgatgccatattctgacttcatcttctttggaggatagacatgtggaggagtagctgcgttcttggggtgtccataagtaacaattgtcctttgatctgctgcccttcattagaacttcactcttctcatttgtcaccacgcattctgactttgtgaaagtgacattgaatccttcatcacacaactgactgatgctgatcaagtttgcagtcagtcccttcac

SEQ ID NO: 38167 - DNA, 349 bp, Glycine max
agcttgtacttctatacaatggatttagactaataaactctaggggaccaaagaaaaccaaggaggaaaaaactgtgtcacggttgagacaagggacaagccatttttctcaagtacggtagtacctatcttctgacaatgtacagagacattcatcttcaaattggtgatgaattatgtaattgtgcggcaatgttaagaaacctaaggggttaattttacgtaaaatggtggttttattagccaattttcccagttgaggtccccccaaagacacatcacgtgcagtttcaaaggaaacgtgtaaaaatgaaattgtgctcccttgaatcttattatgcaaattact

SEQ ID NO: 38168 - DNA, 247 bp, Glycine max
tccaagatcacttacaaggcaatcacgttcactcacacagaaaactattgaaacaagctagactttggaacaggaagccagcatttgcattcaataaggctgttaaaaaccgcgcttgacagctaaccctttatgtggaaatagttcctttcacactcgcattgtttattttttttttttctccttttcacgggctttctctttttttcctttgggctaatcatttttcatctgcaccccttttgaa

SEQ ID NO: 38169 - DNA, 279 bp, Glycine max
tgtcttgtcgcttcttacgaatcctccctctctaactcaggtcaaatcccccctttccttcatttttattatcgtgatgggtaacaattctcgacattagatgcgatcttttgtcggtccgaaggagttccttatgggtgcataaagatgaatctggttaacgatgtagcaaattttgctttctttattgggtgaggacgttctcactcttatttctttagtttttagggagagctgggttcagaaaccaaatcaaattaatttggagctgattgaact

SEQ ID NO: 38170 - DNA, 330 bp, Glycine max
ttttttgtgttgacccaatcttaaagcatgtgcattaatttttcctcaaaagcacttgtgatttgctgattatgaatcccgctggttggaaaatagaatgatattaaaaccctcactatttcattgaatacgataataaagttgacgtattttaattattttttaatcaatattgactatcaattaaacatcagattcgcacttttttacaatataagctataacccttatacttttcagcatatacgatgaaatacccgctgcaagtgcaaaagtgtaggctactctctagggagtagataaataccagttctgtgatgcaatcccaat

SEQ ID NO: 38171 - DNA, 315 bp, Glycine max
tcctcttcttttattggagacctatgtaatttgccaactcactaacataatttgtgtatcatctaagataatttacatcctcttacctcaaacgagagtgcgcatgactattcctttcgtttatacttcaggttctgcctttccctttagtctacaaccatagactaataacctctttgatttaccctttacagcataattatatttgccttatatcttctaagggcgattcattgcgttattgtgtgacttctaatacaatatagatttgcattgagtattttctttcttatataattattattatcataaaaa

SEQ ID NO: 38172 - DNA, 356 bp, Glycine max
  unsure (1)..(356): unsure at all n locations
agctntacttaacaaagtggtatacaacaactattttgatttgactcagcccaatatgaccttatgaagccgaagttgtaatactgctagctagtgggtcttcacatggaccaaatcaggtagtaggagtgctccctagtttgggcctaaatgcaggcaatactataatagttgttgaaaagaaggttgttagaataactttagtggttgatcccaaattgggatcttaaatcactttttggtggacccataaagccacgtaggtttaaagatctcataagatctctttcattttttttctttagtggtagatctcattttgggatcttagataattttttgtagatctcacatga

SEQ ID NO: 38173 - DNA, 294 bp, Glycine max
tacccatcacatgtggtacttggtggcgggcgggctatggttctcaacatgttttccatgtggcgtccctaagtgaatgactggggaatggtattatctaaatacaaaaaccatggttatttgtgtctattcgttttcttcatcattattttgtcttttcaccattactagggtaagaagggaaatcctgactttaaagtcctgaatggcctgttcacaactttactcggagtcatttattatgttaccggtcataattctctaaaatatgtggctgtttcagaagagtagaat

SEQ ID NO: 38174 - DNA, 354 bp, Glycine max
agcttattcaaaaaattagctatactagaataaatcaaaaataaaagaataaacttattagattagatttaatataaaaaaccaatttaatctaattaaaactgaaattgtacatatatattatttataaatttatgatatcactaaaatttgtgtatattttttaatagtctcatatttatattttatttcttatatatttataaaattattaatatcttatatttataactaaatttattttcaactatttaagtgaaaatacgtatatttatcaagttaagtaaatttacttttaagagtatatatctaaagagttatattgagttacacaataacttatagaagaaaaat

SEQ ID NO: 38175 - DNA, 373 bp, Glycine max
gctatagagtttcccaacctcatacatggaaattttgattagtgggacgtgcacttcatggagaatgggaaataaagttggaatgatactgaaaagatgccaatagttgaccctttgcaaaatcaagatgagtttaattgatgatgcacccatgagaggcactagattgctctcagatatttatgaaagatgcaatgtagcagttctagaacctgcaggatattggaatgcaaaggaggatctaaaatggagtgctgcaatacaagaggagcttgtcatgattgataaaaatcagacttgggaactcgttgaaaagcctaaacacagaatagtcataggtgtgaaaggggtgtttagaacaaagctgaatgca

SEQ ID NO: 38176 - DNA, 346 bp, Glycine max
agcttgtttgccttaatttgtcttctagcttgtatgtatcatgaaatattgtctaattttatcattatgtccatattcgtggtgaaaagttgtttctattttttttataaaaaaaatactacaaattacgcaagatgaatttttattataagataattaccgtaattttaattaaatatctcattctttatatttattttttattattataacaactatccaattatatataaacatgtaggtttcgtgtggggttgatttgtatcgtatagcacttaaagaaaaaattgtcggttgccattaccggtttacagtaagtgaactttattggtgagatatttattta

SEQ ID NO: 38177 - DNA, 381 bp, Glycine max
gtaaatatattatattataattggtttttgattatacaaattttccaatattagaatgacaaaatgatattttaaatgggaaataggctgcaagtgtactttttttaataaaacatagtatgtatttgcttttgtgaatggatatagttggtccacattatttactttttttttctacttcctgttcattcaaacttccaaaaaaaaattgacatattgttctatttttacaatacacttcttgaagggaagtgtcttgtacgcaaagtgacttgagtagaagaaggctagccgtgagccacaagtgccttgtgtgcaaagtggttagaataaaaggtggacggtgacataaatctggaggctacacattacctgataacg

SEQ ID NO: 38178 - DNA, 346 bp, Glycine max
agctttggtacaaaaatcctttgttggggaaggggtacgatgatgtgttgttcacagtgatcaaccaattagttaaaccaggttcatggcccaactataaagtcccctgcaacctctcaaagcaacacattagctttgtatcgaaattcgaccaaatttgttcttctcctgtgatgatggaggacgagcataaaaagttggattctttgcctgaatttggattatcagagccagagaaatattccaaggaattggaggtggctgttagagcagtgcaaatggcgtgttccctctgccagagagtgcatgacactttgatttccaacgctcggaccaatcatcgtca

SEQ ID NO: 38179 - DNA, 370 bp, Glycine max
tggcctattctcactcctaagcactaattcattgtgcatcattacatattcttgtttcttacgtcgcttctacatttttttcaatattttatttcaaaggttagtttggtatcttaattttttgcgtgtacatttatttcttgcagattaatgcctcttttatacccactacttttttttgtgtcattcttcttaaaactagtctggcatccaatcaaatacataacaattttgtacacctcagagctatcacttgttattgtcttatccattttgttttgaaatactgtctgcagatactggacacaaatccccaattatttttccatcttcaacagcaacgattgatagaactcatccggaatggaaa

SEQ ID NO: 38180 - DNA, 350 bp, Glycine max
agctcccaagttggtataccatgtgatcactccccagccaaactctcttgaaaaaaatgcatcaagagcttctcgtctctggagtatgccctcatcttctgacagtatatttttaggtggttcttagggaaagtagtccctttgtacttatcgaaatctggcaccttgaacttcggggggatgaccacatcagacacttgacacaactccaccatgtcggcgaacgggtaatcaccaatccattcgatggcccttagcctctcctcgatgagatccaacttcttcctttcttccaccatcggaggcagtctccctactgagaagtgcagaggttgtaacgggcggtgttg

SEQ ID NO: 38181 - DNA, 372 bp, Glycine max
agcttgcaattgcattcgggcacctatttcgaatctcctatgttgtacccacatacataaaacagccccaccatcccaattttacaaaaattatattcatatatcattggggcatttcaccgagcacttggtgggcgcatgtttggacacaaattgcaagagaatggggacaatgtggcatgccccattgcttcagaatacaacataggcctaaggccttctcattcaaatccttaactcaagaaaacaagcataaaaacaaaccaaaactgccctacaaacataagcacattctcacaatttggagcaccaaaagatgaagaaaatataccaatgggaagctaaaaacatcaaggattgaatacttacttg

SEQ ID NO: 38182 - DNA, 354 bp, Glycine max
agctttcatttattttaatttatgttaccattttaagagaaaataaattaccataagaatttgcattaatgttattcacgtttaaaaatagtaatgtagctacatttgggcattaagtataataattgtaaattgattatgattacataatagatgaatatttcaatcaaatcaatttattttgaaaatcttacatgcaattttttttatttcaaaacaaattattttataaaattccagaaagccatgtgacaatgtgctttctttaaaaatattttcgtatgcatatagtatagagtatagattgacagctctatccttattggcttcttcctttatatatttataacttat

SEQ ID NO: 38183 - DNA, 345 bp, Glycine max
agctttgtgccagcatatcttgtgattgcaattgtcccatttcctctgaatgagatagaatcgccatttccaattctaactttggtgatattggttggcctcaaatctttaaagagtgctttgtcaaaagtcatatggttggtacaaccactatcaatcgaccaactttcacttgattcactactctagtaacaagtggtcacaaataattgatcttcctctttctgattagcagtctgagctccttcaccttgatgatttttattgtggcaaatcacagcttcatgccccatttggttgcacttactacattttgcatctgatctcttccaacatttgaatgga

SEQ ID NO: 38184 - DNA, 368 bp, Glycine max
tcggcctactttgttttttacagttccgaattcaaatattgagttccttttctacttctaaaatttgaaattgatcacattaattacccttcgggactgtatttcaaatatttgtttttgacattagcaaaaaaaaaaaaaacatttgtttttgaaataccgtttttgacttctaaattttgatcacattaaaaactaaaaatcacctttcactccttaacgaatcaagttgaagttgttgaaattatgttctttcgagacaaatttaataaatcctaccaaaattacagagttagtaatgcgactggtcctaaatcttttaagactaaaatgggcactatcattttgtcaaccaaaatattggcagc

SEQ ID NO: 38185 - DNA, 348 bp, Glycine max
agctaggagccatgcattgttattgcttagtgcaactcgccatcctcaaccctttttcggagccccatgaatggcgttttcgttcatgcgtccttcacccacgagtttggagccatgcgtagtgattgcttagtgcaattctccatcctttaccctttttcggagccccatgaactgcattttcgttcatgcgttctccacccaggaacttggagccatgcgtagtgattgcttagtgcaattctccatcctcaaccctttttcggagccccatgaatggcgtttttgttcatgcgtcctccacccatgagtttggagccatgtgccgtaatgtgcttaatgcaattc

SEQ ID NO: 38186 - DNA, 324 bp, Glycine max
ctgaaatccaatgtgatttttgacccaattgaccctcagcgagaatgtttatgcttttgcccataggctgcttatgaagtcaaggtaaatgcaacattttactaaggctcaaatcaatcaaaccctcaccatagtctgttttgtgcaaaccaattgaagcttacttgcagcatgaagatatgttgctatcaagtttagtgttgtcaacttgtcattcttttatagtgatgacgcctatgaactcaacatccattgtgaaaccaaaatcatgagaatccagtgtggtcaatccattgtgaagaataaaggatgcatgtgaaatac

SEQ ID NO: 38187 - DNA, 346 bp, Glycine max
agctttttatagagaatatttactaaagctaattttgatgtaacagttaggataggaatgggcacggggcttggaatcatattcagacatcatgatgcacgccaaattttggcttcaattactcatttcctccgtcattcttacaatattcgggaaccattgccaacatgaatttttcaatattttacttctagtagattgatagctgaattactttaatgtcaattttcttatttgagtcatgaattactttatctagctttaatttaatgtctttaatagctttcattaattttagttcatctttaatctttaagtttctcaactaaatgtatttgttgcattt

SEQ ID NO: 38188 - DNA, 319 bp, Glycine max
tttcaggtactatttggatatgtatccggatgtatccaagccatatcctagaaaaaacaattaaaaatcaaataaaaaaagatcggatgctttttggatacatatttgggagcatccaataagtatcatagaacagactcaaggtgtggaatagagaacaatttggggatacttttaagaaatataccaagattcaagaagagttgaataagatggaagcggacacagctgatagacaattatcccagcaggagatgatgatcaggaagcatcttcacgaggatttatggatggcggctcaatcacatgagtcattact

SEQ ID NO: 38189 - DNA, 283 bp, Glycine max
ttcttatcaaatacgttccttttagtaactttaaaatagctcatttggttagagcttatggaattagtttttaattaagttgcttacccaaatgcgtattatatccaaaataaaatgtataaaacatgcaatcttagtctgtgattgaggaagccatctctgcaacatattttggggtaaggccacaatgtatatcactcctgaaggtgcgtgaccaatccctgctcaggtgttggtatggccatggccagaaagtgcttccagttcagcttctatcgaagcc

SEQ ID NO: 38190 - DNA, 331 bp, Glycine max
agcttatccttatggcttgcctccggacttcactccccgcgccaccccggaagatttaagccaagcccctacttttgaggggcaactcccgccttatgacgactatcccgggcaagatgatgagaaaggagatacccatcttggccccctgctccacctcaaagatccgtccccacatgaactaccccaaccgaacatagtccgccatatcccggcctcacccacacccgtaaaagaatctgttcccttcgcggaagataatggaaagattgaggcgcttgaagaaaggttaagagcagtcgagggccttggcaattacccattctcggat

SEQ ID NO: 38191 - DNA, 353 bp, Glycine max
tcttttggaccttgaacaagcaatcaactcctcttttagaaccatgctatgtgctcgcgactggtccctttcttcccttcgcagcttgagttcactattgctaccccatagagctctgcgaaatttgttccggccatactcttccttgcgagccctcttggtctctcgttcaagggcccttgcggtaattgcattctcttcccgtaacccggcacactccttccgaacgtgtgtagcagccaacttgaacttctccttggcgagttatgcctttcctaactcgcttttgagagcttggacttcctcgtcctcttccggtgcttcaaaattctcttcgctgacgacttttaact

SEQ ID NO: 38192 - DNA, 351 bp, Glycine max
agctctagcctattgagattcttcatgttgctccccctatctataacaatttccctcttttttggcttggatgaggacaaactttaactatgacattgagtgcatttggagagtcttgagattggattggagactttaatccttagccttatcctgagaatttcttaacactttagaagagatttattcatcatcattatcatatgtctcaattcatcaacatatataatgatgcagggctcaatgctatgcaatgcggtcaatatgcaatatgcaataacgtatattctcccccttttggcattaacaaggccaaaaagtgtgattatacagaaaatagaactcacaagt

SEQ ID NO: 38193 - DNA, 162 bp, Glycine max
acatagtttttttaaatctctcccagtattcatataagctttctccactgagttgcccaatgcctaaaatatcctttctgatggtcgtggtcctagaagcagggaaattttttttctgagaatactctcttgaggtcatcccaacttgcgatggaccttgga

SEQ ID NO: 38194 - DNA, 352 bp, Glycine max
agcttatatgttgtcgcgtttatcgcgtgatcattgtcatacctctaagcctagaagggcgcacttagcatgaggttcgagaattttgagttagctttcttcttccctaccctctttacctttccgctatgcactttttatttccgctttacttttgtctaagttattctttttgttctttactttctcataacttactagtaaagcctaattgaatctcgtgatattagcaaggataaattttaattagtcaagacacactgaacgatcaatccaacatccaatttcaatcacaactccattaacacctcatggattttctgaaaagtaaatctgaaacatccccaacaac

SEQ ID NO: 38195 - DNA, 365 bp, Glycine max
tcacgcataagtggcgagcttaaggtatgggttgaaaatttcttgaagtttgtgcaacaaaatgcatcagtaatgggcggaaaatatttatgttcatgtctacaatgtgtgaatgggggacgactatcattgaatgacatacgatcacattgtatatgtaaggggatcattccgacatatacaaaatggatatggcgtattgaatttgcagacatgcctacagtccatcaaagtgacctggttgatgtatgaattgggaatcgtatagaagacatgatatgcgatcttggattatatggttttcatgaagcacatgcaccctattattgataacttcaaaatggagtttaaaaaaggtttgtact

SEQ ID NO: 38196 - DNA, 334 bp, Glycine max
tagcttatccttatggcgtgccttcggacttcactccccgcgccaccccggaagatttaagcccagcccctacttttgaggggcaactcccgtcttatgacgactatcccgggcaagatgatgagaaaggagatacccatcttggccccctgctccacctaagagatccgaccccacatgaactaccccagccgaacatagtccgtcatatcccggcctcacccacacccgtaaaagaatctgttcccttcgccgaagataatggaaagattgaggcgctggaacaaaggttaagagctgtcgagggccttggcaattacccattctcggattt

SEQ ID NO: 38197 - DNA, 364 bp, Glycine max
gcacagtaataagtacaatggtggccttggttgaaggaagaaaattaccgggaaattaaatgcacacgatgtgctttaatcggttgataggaaaaaaatgggtctctttcttcttatttgatcgtgaatggaagaacaaaaaacttatctaacatacaaatatcctaaatcaatatgacttttttcagcagagtgcctaagatataagatgttgtgtttctttagccaaaaatattcgtttattcttgtgttattaatcagaataatcttttactaaaagaatattgtcccactctctcacactttttgatcatggactctctcttttctctttcgattgtgtatttcacaattctcttgcaac

SEQ ID NO: 38198 - DNA, 349 bp, Glycine max
agcttgacaactccaagaccctgttggacttcttcgggtccactgggtgtcttgcaggcgcgatccctgcaaacaatagatgaaatcaaaaatcagttgagcgatgtgcatacttacctatgatgacgtgaccttgccgggggggtacgggcaccctgtaggactgatgaaggcccgtaaccagagctggaaaccccagggccctgttggacttttccgggaccactgggtgtcttgagggtgcgatccctgcaaacaatagatggtatcagaaatcaggggaactatatgcatacttacccatgacgggacgacacacaccaactgatacttttgcagggggagattg

SEQ ID NO: 38199 - DNA, 356 bp, Glycine max
ctcaagctgtgggtgaagcttcttcatacacgggtcattccatgatggatggaggcgcctgagacctgttgtgctttgtatacctctgcgactacgcgcacgaaaatcaccccttaaggacctcttagaagctctaagatccacccgactttaaagctacacaacctatgctccataatgatcctgctataagataccttatgagaaaacctgccaactaaggatgctcaccatgaatggacagtttagtaccatctagttgcgtattgagcagtaccatatatattagggttaagctgatgtgctcactagatctttgcttgctccaacaccaaggtgactggaccatgatcatg

SEQ ID NO: 38200 - DNA, 353 bp, Glycine max
agctttagaaaatatgccttgtcttatagatatcacacaacagtagcagatacagaagctgcaacaaaagtccaaatgcaaggtacaaaatccattataaaacacactacagtaaaacaagtagagagtaaaacaaattctgtaaaaatacaagtgaaatgtgttagagactcataagtcccaaaattaaaagaaaataactataaaattatatatggggtagcaaattcaagttgccagagtccattgcactgaaaacctggcacaaatgacaaaacaaaagaagattttaaaactcaatgaaaggggaggggaggctcatcaaggttaaggataattgggtccagagcaca

SEQ ID NO: 38201 - DNA, 295 bp, Glycine max
gcttgccatcgcgagacatcaggggcaagtaaatgtatagatgtgggtaggattaaatcatctgaatttgtaaagaaaaatcataaactcatacatcccaggcaagctaggcaagtcagttcccaacattatcttatcttgaatttatctttttttatctaaatctttaatctttcttatctttcacttttctaatatctttttctttatcttctaattgtatcggtaaatcttttatcttttctttaccttatcttttatctttttctatgagccattttaaagttattatctc

SEQ ID NO: 38202 - DNA, 352 bp, Glycine max
agcttatagaaaaagctgatgcataaactaattttatgtttatggaagaactttatttcatctaaagagaccctagtgaagccagctatttatgactaaagtactattttgttcttgaatttgtaacgctctaatcggttagtccttcaaattaggtaaatttgaaaagaaaaaagaagttctaaaaacttgttcccgcgactgggaatacatcgatacatgtaaaaggacacaggcactgcatgtcagtcaaaggggccaagacgtcaagttttggactagctttgttgatggaaaaccaaattaagagtttttttttttttttttttggattttagctaatttcaaggac

SEQ ID NO: 38203 - DNA, 208 bp, Glycine max
agacacactgagaaggctcatcacttacattcgttaggagggaagaacacgcttaacgcgacgagggccacttaatgcggtcatctagaaatccgaaaatttggcaattgcgatgaacaggctaagcgcacatgcgcgcttaacgtgttatcgggagttccagatagaaccacagggggctttacccctttcagacgcattgccccgt

SEQ ID NO: 38204 - DNA, 351 bp, Glycine max
agcttatatttgatacggattctactcactttggttgttgctgtctgcattagatagaacattgcaaagtacgtgatacagccatacttgactttgttatcaagcaaatttcaaaagactcctaaacaaacacagaacaacccacagctgcaatgattgttgttcaaagcttatgccattgctgatatcaatctttggataatctatttatccttctccacgtctatcggcattcactacatggcatatttatgtgtatgaaagttaattagagcgtcacaatctttctataggtggcacagtatgcatctgacagtggcaatggtaaaacggcattcaatgatgttgatg

SEQ ID NO: 38205 - DNA, 322 bp, Glycine max
tttactgcgagactctgggattattgcaagcgccatccccgtaatacttaaacggaagctacactgccaggggcggatgcgcctactaacccatgaggacaaggacctggcggaggggacatgtcctttgtaagaccggttaaaggatgaagacgcgagctggaaacgaaaaggcccggcagagatatttctgctcttctgggggcctagcggtggccacacgcgatagcaattcttggtcacaaaaaatacattcattattattatgattacaaatgtaagcaccacacggggcacctgatacttttcgatggtgagatgc

SEQ ID NO: 38206 - DNA, 372 bp, Glycine max
  unsure (1)..(372): unsure at all n locations
ntatgtctttttatgtataacccaaagattatcgcggtagtgtaaaatcctattgtgttcatataagtagtaaaaataatctatttaatgcgagtaaaattaattgttggcctaataggtaaagcacaatcgtgatttcttactaaaaaaaaagcataacatttacactgctctggagtttgtacccctgttgtaagaaagagaacatgttaagccattcttctgcggtagaattgcattttcaatcataatcattgtttggacgaaggaacataataatgaggtctacctgcagttaaatctccaatattgggcattctttccttttcatgttgtgaaatttagttaatttttgagttgttactttaatta

SEQ ID NO: 38207 - DNA, 349 bp, Glycine max
agcttatagaatatataattagagaacaatgacaattgaagaatcgattcatgtttcctttgatgagtctaatgctatttctccaagaaaggatattttagataatattgcagaatcttcagaacaaatgcatattcatggagaagattctaaaggaaaaggagaaggaagcaatgaagatcctccagtggaagtcaaagcaaataatgatattccaagagagtggaaaccttcaagagatcatccccttgacaacattattggtgatatctcaaaaggggtaacaactagacactctctcaaagatttatgtaataacatggcttttgtatctatgattgaacctaaa

SEQ ID NO: 38208 - DNA, 368 bp, Glycine max
tgtgatttcagcattataaagaaactggtcttcacatgacgattgagaggattaagagaattgtatggttttcttagatcaatctgactaagcccactaaaatcaatccttaaaacatatatgagatgctataaattaaacctgactatagtggtaatttccatatgctacataatgatagtgtaaaaagataccttttgataaattcttcaaactcaagaagctcatcattaatgtacagtttataaccatatattgagttttgagcagtaactagatatttggtttaagctttgctctctttaatctttgcttgctccagcaccaaggtgactggaccatctccatgtttgtgcaaaaaacctttc

SEQ ID NO: 38209 - DNA, 345 bp, Glycine max
agcttgagctgcagatgtcctgtgctaggtttgacatccgcgcacttagccgacgtttcaaattcaaatcagtttttttttaacatagacttggattagcatgaggacaagtccacttagcgaggtctgcagatcagaaaagctgcaactctcgctgggatctgggctggcttagctaaaatgatgcatcttaagtacagaggagcatgcgcttagctgataaggactcacttagcactcacattgccgcaaggaattcagcttagctgccatgattggcgcttagcttcatgaacctcagttatagccgtaaagaattgagcttggcggcaatgcctaatgctt

SEQ ID NO: 38210 - DNA, 369 bp, Glycine max
  unsure (1)..(369): unsure at all n locations
tgggtgatgttgcgcatactgatgggttccatgaggtgtttgctggggtttgacccacgcgggtgttgaagagacggcatgggcatctacttccttcctttttgcccctgttgccccgattcttttggcgttcacgtttgtggaggaaacgtaatcaaactttcctctcttcaatccaacctcgattctttccccggcaaacaccagatccgcaaagctggacggcatgtaacccactagcttctcatagtagaacactggcagagtgtctaccatcatggtgatcatctctctctcaaccatgggaggagctacttgtgccgccaaatacctccatcgctgcgcatattctntaaaggtttcaccctc

SEQ ID NO: 38211 - DNA, 333 bp, Glycine max
tgctttccgcgagacttacggaaagatcttagaattgatcttagcagaggtgtccatagaagccattgcatcactcacccaatactacgaccaacctttgagatgcttcacattcggagacttccaattagtaccaaccattgaagaatttgaggaaattctaggatgtcctctcgggggaagaaaaccatatctttcctccgggtgtctcccctctttgagcagaattgcaactgtggtcaaggattcagcaagaggtttggaccgcataaaacagactcggaacggcatagcgggcctaccacagaagtacctaaaagacaaggcaagggg

SEQ ID NO: 38212 - DNA, 345 bp, Glycine max
tcggatgaaagtgatgaggtacatgccctattgcaaagcttgagagagcccgggtagtcgaatagaagttcatgtccatagccatcaaagtttgaaaagagtctgatgaactaatggatgtcaatatggccaccgatgatgccttggaatgagaaaccaagatggcccgaaaggaagaacacgaccaaagccaagttttgaggggctttatagggcagcaatagtgagctcaagctccgaagaggtgaaaggaatcatcaccggtcaaaggcatgatcttgaaagacgagctaaaggcttgccttatgtcgaaaagaaatttgtcccaacagttgagcgagactg

SEQ ID NO: 38213 - DNA, 352 bp, Glycine max
gcatgcaagctcatagcctttgagaatctgatgcacaactttgaaatgatttataactctcatgtaaaggatcctcattcgatgatatataaccaaaagggactctttcactctcacttgataggtagatagtatattatgaatgaaatgtgcggcatcgacatggattctgcttgatgtaatttttaaatttataatattctttctaatatggctactaatgcacgtttagtggagaataaataactatttcttccattttccgtccttttttcttacataaaagacttgattgctgaaatgagtgcttgaaaagatttataaatcgtgaacacaagttctttctgtgaca

SEQ ID NO: 38214 - DNA, 365 bp, Glycine max
tgtcaccgacgtagtcaacatcacactaacttacttacttgaaaccctttccttaatgcatagaccaaggttaggagttcgaataagatatctaaatattcttttaacagtagttaaatgaacttcccttgtctcaaaatcttgcacgtatgcatacactgaacatgatgtcaggtttgaacacaattagatatatgagaaacgtgatcattgctctatattgggttttgtccatcttcttgaattactcatccattctaagataagttgtcgcatcctacccttctgcgggagggcgacacgtgactcgcgggatgcgtgttccatgaaaggaatacgcgcggagtctccaccaacgtttattt

SEQ ID NO: 38215 - DNA, 352 bp, Glycine max
agcttgtcctgtgcttgtgcccttgtgcttttgtgctttcttctgcctgcatttcaagtcatccctgcatcattcttgctttcatcttacatcctttactccatcataatccaagtaagtagtgcttcatttccattttcattttcatgctttgaaccttaggatagacgatttcttgctttgttagcttgccttgctgtttaggttagggtttctagctttagggtttgttattttaggatttaggttgagttgtaagcccattaggggcaatgctgctaaaaggggtgaagacccctgtgtttctatttagaaattgcgatggacacgctaagtgcgcctgctacgctta

SEQ ID NO: 38216 - DNA, 336 bp, Glycine max
  unsure (1)..(336): unsure at all n locations
tatctggnttgaagttaattgctgagacatttgattggagtcatgatgcctatgcttgtgaactttccttgcttgcaaaatgtgtagatttgctgtagtgcattatttgtggatttcaaattcatttttaggaagtttttggattgaagggcacattgcttcttggttgaataacctgtttgtacatagctgaaataaaattttcaatactagcactactggtccttttttttgcaattctattaccagcttttggtttttttatgtgtcaatttcttggcttattttacctaagaatttgaattaatttaagacatgtttctttggagataatta

SEQ ID NO: 38217 - DNA, 380 bp, Glycine max
tctataattaattaataccaaaaagtgtagtgatcattctattaagctctaaactttgtgaacttcacttgtgttaattgtaaatctttgagtgcaatgagtgggttttgcatttgtatgtctatcttataaagtgatagatagtgagcgaacctttacccttaaccaaatattttgtgtgttttatgaaaacctaaagatatgttgttgtaaagaatatttgggttgtttgtctcaaaagctaggtttaaagactacttagggccagaagtagtttgagaaataatagttataattttgtttgtataagttattgtgaaatttgatagtttattaataattgatatattcttagtggtagagataaaaataatataaaa

SEQ ID NO: 38218 - DNA, 346 bp, Glycine max
agcttcaacattcaatttcttgcgtctcgatatatgacgggactcaaccagacatccgagtaaaaagttaatttcgtttgaattggctcacagcttcaacattcaattttgagggtctcgatatattgcgggactcaatcagacatccgagtaaaacgttattgtcgtttgaattggctcagagcttcaacattcaatttcgagcgtcccgatatatgatgggactcaatcagacatccgagtaaaatgttattgtcgtttgaattggctcagagctttaacattcaatttcgagggtctcgatatattacgggactcaatcagacatccgagcaaaaacttattg

SEQ ID NO: 38219 - DNA, 350 bp, Glycine max
agcttgaaggcatgtatcccatcatcttctcatagtagaacaccggtaacatgtccattatcattgttatcatctcctttttcgtcattaggggtgctacttgagctgccagatccctccacctttgggcatattctttgaaagattcatgctcttttttacacatgctctatagttgcatcctatccggagccatatcaaaattgtactgatacttcctaataaaggcaaccattaggtccttccatgaatggactcggaagggttctagattagtatactaggtcacgactgccccagtaagactttccaagaagaaatgcatcaacaatttttcattttttgagtat

SEQ ID NO: 38220 - DNA, 361 bp, Glycine max
tccatgcttagtgtttggccgagtagtctactcgaattatggagaatatggcggatctaattaaggtaagagggaaaactttatcttctactataaagatagagatatttccaaatatcgaaagttattgaatagcagaggaaagacaagataaaatcatatctttccttatttatattatcttacaagggagattaagatcttataatccaatttcacctccataaaaagggtcatcaaggttccggtaagccaacttttgatccatcctatattatgataaatgttataactccacaccgctaacttaagcattggagtgtcttcacaggtatgtcaacttttaatccaacctatattt

SEQ ID NO: 38221 - DNA, 309 bp, Glycine max
acatgtcccacaatgtaatcccctcacatacacctctgccttaatacttaatggaaaataatttctaaagaagagtccttggttctgccctaatcgctgtagcacacattacctttgccttgatactctatggaaatcaaattctcaagaagattacttgtttatgtcttatcgctttttgcaaagcgcttaccaattctagcacgaaattctttggtattagtaatatgatttgaaacagtacctctaaagaccataggaatgccacacttaatgattataagactcatgcgaattgagcgaacccac

SEQ ID NO: 38222 - DNA, 381 bp, Glycine max
tctataattaattaataccttaaagtgtactgatcattctattaagctctaaactttgtgaacttcactcgtgttaattgtaaatctttgagtgcaatgagtgggttttgcatttgtatgtctatcttataaagtgatagatactgagcgaacctttacccttaaccaaatattttgtgtgccttatgaaaacctaaagatatgttgttgtaaagaatattggggctgtttgtctcaaaagctatgtttaaagactacttatggccataagtagcttgagaaataatagttataattttgtttgtataagttattgtgaaatttgatagtttattaataattgatatattcttacgggtagagattaaactaatataaaaa

SEQ ID NO: 38223 - DNA, 144 bp, Glycine max
tggactaatccgacggtccactcaaccccactgtcgacgaataggctcgtgctttgacttaatttcaccacctgacactatgggacccttttcacaaccccggaaatatagagctttttgaattggttcgagcatcaacattct

SEQ ID NO: 38224 - DNA, 349 bp, Glycine max
catgcaaccttgagttgcatttgatatattttgtgttgaaacaacaagatctataaaatagaaagaaaaaaaaggtgaaagctgggttgacccatttcccctcagcttgcaacttttgcagataacaaacaacaaatgaataaaaggaaatgaaataacattggagataaagtaaaccctaaagcctcttcatataccgaagcatcacgggcagcatttgaatatgcaacagcagtgttgccacaatagacatcctagttgtgaagagagtgaggatgaaaaagaagagaacaaatgagaaagtgaagactagagtatagaaaaaaaaaaggagagagcaagtacagga

SEQ ID NO: 38225 - DNA, 345 bp, Glycine max
ttctagattgcaatcctcttctcgttgcggatgaagtggtatctaatgtcaatatgtttagttctctcatcatggacttaatccttggctagacaaattgcactcgaaaaatgatagctttatcttttggaaactttaggttgctattaagactttttagccaaatgccttcctttgctacttctaccagagccatgtatttttcctctatagtggacaaggcaactgtaggtggaagtgtagccttccaattgacaagagaattaccaattataaatgcataccctgtcacaaatcatcttgcatctagatttgtagcgtagttagaatctaaatattcaaaaa

SEQ ID NO: 38226 - DNA, 59 bp, Glycine max
agcttagaataggcaagattttatactaagtacagacatctcccgtggggtttttgacc

SEQ ID NO: 38227 - DNA, 352 bp, Glycine max
agcttcttgcaaacaaatatatattgaagcggtggacacgacaagcaagatgtgatacgtacaatgataatagtgggaggcaaattgatgttgatcctaggttggagagttcaaatcgatataagcaattatgtccaatgcttatgagattgtccgatgaggcatctgactatccggaagcatgttctttagtttatcaaggggtgttagagcttagtaagaaagtggctgaaattcgattgaaccaacaaccacatggtcctcgtgattccacacgtgaagccacaaggtatgctatggagcctttggcatccaaaggaattggatttaagaagagagatggttaaaggat

SEQ ID NO: 38228 - DNA, 325 bp, Glycine max
agctttctaatccatttattttctttatggggctgaatctgcaggtgtgatagttcccccagaaaattatctgccatctgtacttcacaatcaaataaggccctcctcctaactatcttccattcccatccattaatggtgatactccccatttgcctaatgctttgcttctgttggcctgcgatttggtttaacctttggtatttctccatcaatggtactacattatgtggccacaggtcctcccaaaatttgaaggtatcgccactccccaccttccatttcctttcccttttgattgcttgattttgatgccgttgcttga

SEQ ID NO: 38229 - DNA, 376 bp, Glycine max
tcgagcttcgtatccaatgcttatcttggtggagaagttttttcttccatggcttattacctagtggatggcgccttctctcacctcttctcctttgtcttccgctgcatctgcacggtggaaaatcaccattagaggacctcattgaaactcaaagatccaccctccataaaagccccacaagcaagcttccatcaagtggtaatcagagcacaagagcttcaagtaggtgctccataaacctccattaattattttgctttaccttctctaccattgttgtttcttcattttttctccatgtatctcctcacatgttttgtgttaaatttttttaacttgattcttttgagtctccaccgattaaactcgctat

SEQ ID NO: 38230 - DNA, 355 bp, Glycine max
gagcgtgcaagctctgcctttagggcttgttcctcatcactttcttccaaagctttaacctcattggctctcacagtctttagatttgggagccaatccaatccttgcgtccggactctcagccacttatgatagtcgccgatgatcccattactgcttcccctaagctctctgtcctttcttcacgccgcatcccatgccttgcgaactccttggagtaccctcgcgttgtggtcactgaaaccccgtgcgatgaaaggcgtgatgctttcgtctaatggcactcctctcatggggtagccaagctgtcttatggcgaggacgggattataataaatacaaccccatgttccca

SEQ ID NO: 38231 - DNA, 382 bp, Glycine max
tactcaagctttagcatcctagataaaccatgatttgctgtttcccagcctcattacattcctagtaaagtccttcggattcagtttgtgtgttcttgactatatgatatgagatgaagtgcaaagattgagacttatgttggttgttgattgttgaataagcctaaacacttgtgcttgagtggaaaatagtgaccggtgaggctttggttcatgatccttccttgagacctgtcattttcactagcttatttcagttgtgtattttaatgctcatattaatatctttgaaagctgcatgttttgtgagaagctcttgattgaagcattttatggtattcattttatgtgattgaattctttggagcaaacactatttttg

SEQ ID NO: 38232 - DNA, 350 bp, Glycine max
gcaagcttgtgtcacgattcactgtgacagtcaaagagtcattcacttagaaaatcaccaaatgtaccatgagaggacagagcacatagatgtgaaactacacttcatcatagatgtgattgaatctgagaaggtgaatgtggagaagggttcaaccaaagaaaacctggctgatatgttcacaaagtccctctctagtgtcaagttcaagcactgcctgtacttgatcaatttggaagatgcctaaagcagattggtagaagtgcagccctgaatcacaaggtaaacacttgctgatttggagtcaaggtggagatttgtggtgtgtgactaaaacatacattggcaca

SEQ ID NO: 38233 - DNA, 314 bp, Glycine max
ttccctctttgaacaaatacccctccgccaattagaatccatcttgggcttttttcccacaactttcataaatgagagagaaatgttcatctaaagcttacaagtccctaatattatcaaatcctaaaatttgagctcctagggagcaaaaccatgtgtgtctcatagagagggcatcaactaccacatttgtttttccctttttgtatttgataacatatggaaatttctctaggtactctacccatttttcatgccttttgtttaacttgctttgccctctaatgtacttaagtgaatgatgatcactatga

SEQ ID NO: 38234 - DNA, 351 bp, Glycine max
agctttgaatatcattggctaaaatttcttgagccttcttccaaaaagaacgacacgttttaaatgatctaaggatatccaaaatatccggctcaactgattgccataacacagcacacaattgataatcaagcttctcccattcggctcttttgtcacttgaaacagaatcggaagctttctccaagtggtcatggtgtccttgatcgagaaaccaaagttctacggaagcataccatgaggggtaatttttccagttgagtttagcagctgtgatggttggagtcccggagaaggagaaaacatgtccaggggaagccattttgacccacaaggtgaaaccttaaggga

SEQ ID NO: 38235 - DNA, 371 bp, Glycine max
cgtaggactatggggtacccatcacatgttgtactaggtggcggtcgtgcgatggtacaaaacgattctccacatccacaaatcacgtataacccaccattccctgttgcccacctccaactgagctcacgtactcccacgtagcccttatcctcgttcctctcaacgccaggtccccatcaatcctctcaagcttgcacaacatccaggtaattccacatccaatcatcatggaccaacataaccaagcataatagggcaaaagcagaaactctgcccaaaacacaacatataatcgcagcttttcacatacaaataccccaagaacattttcttcggtctaattcgttaaccggtggatcaactcgaaa

SEQ ID NO: 38236 - DNA, 345 bp, Glycine max
agcttgtagggttaaagtcttacgattgtcacgtgctcatgcaacaattgttagccgtggctatacgagacatcttgccaaacaaagtcaggttaacgataactcgcctgtgctttttcttccatgctatatgtaacaaagtcattgatccagtcatgtttgatgagttggaaaatgaggctgtaattatactgtgctagttggagatgtattttccccctgctttctttgacatcataattcacttgattgtgcatctggtcagagaaatcaaatgttgtggtcctgtttatctacgatggatgtacccggctgagcgatacatgaagatcttaaaagggtata

SEQ ID NO: 38237 - DNA, 372 bp, Glycine max
  unsure (1)..(372): unsure at all n locations
ntntggagtagaaacatgggaccaactcattttatttttctaaggaagtcatatctagtgaaagtctaagagaccatacaagcttcctaacgatttctaattatgtgggccatttagtctatcatatgctgacaatagccgagaagcccgcgaatctcttcgggggcggagtaagtgtctgccatcgctttggccttggctaacaatcggggaagttcttgactcccgttcaaggtaaggagcaaaccgatccatccacatgggtgcctcttggtgtaaagagtcgatcacccttcctctagcctctttttccgcgtatacttgggcatattcgttcgcaatcctatgcttggggggccggggtagatctaa

SEQ ID NO: 38238 - DNA, 343 bp, Glycine max
agctttcataggtgaaatcttgtgcatccatttcccttagagtcctctcacgaggtggaggttgtgccatgttctcagaatgtgcaaaatcataatgctcagaatcagaatgctcaaaattataatgctcaagatcaggatgttcaaaatcaccaataacagaatgcacagattcaccagttatggaatgctcagaatgatcaaaaggtataaaatgatgcctaactaatctatgaaatgtcctatctatctcaggatcaaagggttgtaagtcagatggattgcctctagtcatacactacattcagcatgcacacaactagatgccttgtcatgtaaataa

SEQ ID NO: 38239 - DNA, 374 bp, Glycine max
tcttatccaaggctcatcttggtggtgaagttccttcttccatggcttattccctagtggatggcgcctcctctcacctcttctcctttgtcttccgctgcatctgcatggtggaaaatcaccattaaaggacctcattgaagctcaaagatccagcctccatagaagccccacaagcaagcttccatcaagtggtaatcagagcacaagagcttcaagtaggtgctccataaacctccattaatttttttgctttaccttctcttccattgttgtttcttcattttttctccatgtatctcctcacatgttttgtgttaaatttttttaacatgattcttttgagtttccaccgattaaacttgctatagaag

SEQ ID NO: 38240 - DNA, 342 bp, Glycine max
agcttatgctgcaaacatcttcaatagacctcctcaacctcaacaacaaaatcaaccacaacagaacaattatgacctctccagcaacaggtacaatctcaggtggaggaatcatcccaaccttagatggtcgaatccttcacaacaacagcagcaacaacaacaacaaccttatttttagaatgctgttggcccaagcagaccatacattcctccaccaatccagcagcaacaacaacaacagcaacaacccagaaacaacaaacagttgaggctcctccacaaccttcccttgaagaacttgtgaggcaaatgactatgcaaaacatgcagtttcaacaa

SEQ ID NO: 38241 - DNA, 275 bp, Glycine max
gcttcactatttgtcaacaatttctatttttgccgcaccagaaaccgggttactgcatcacgagcttatgatatcagacccaaagtccactaagccctctgtgttctgctaactcattgaaatccccacatccactgttcgacgccatgcccgaattaaagacccgttaagatgcggtatctaaaaagtgattctaagtcgttttttccccagccattgttaaccaaatgttcgtaatgcgcttcattataacagtaacaattggggggtgtgtg

SEQ ID NO: 38242 - DNA, 348 bp, Glycine max
agctttagcctttgagtattcaccatgttgctccccctatctctaacaatttccccttttttggcttggatgaggacaaactttaactatgacattgagtgcatttggagagtcttgagattggattggagactttaatccttagtcttatcctgaaaatttcttaacactttagaagagattaattcatcatcattatcatatatctcaattcatcaacatatataataatgcagtgctcaatgctatgcaatgcaatcaatatgcaatatgcaatagtgtatattctcccccttttggcattaacaaggccaaaaagtgtgattatacagaaaatagaactcacaa

SEQ ID NO: 38243 - DNA, 354 bp, Glycine max
tcttagtctcatctgatgacaatgaattcgtggctactttatgcactcctctaatgacaatagcatcacttatggcactaaattgttgggtccttcataaaaatattggaggagaagctgctcataaatctggtggtgagggcaactagcacatagttttttaaatctctcccagtattcatataggctttctccactgagttgcccaatgcctaaaatatcctttctgatggtcgtggtcctagaagcagggaaattttttttctgagaatactctcttgaggtcatcccagctcgtgatggaccttggagcaaggtaatatagccagttctttgccactccctctaaagaat

SEQ ID NO: 38244 - DNA, 324 bp, Glycine max
tttctttttccttcagggtaaaaagaactcaggtagcatagacaaatactaagttaattttgaggtagagagagagagaaaggacctctcgatttgcgagtaaacttgaatagcttcggattggggtcgtcgttggatgttgttgtcgttgtaattattagaggtgcagcatattctggtggtggtgccaaaacgacgcctataacgaactgagggctttgcgtttaacttatgggaatctgttccgtacagtttcagtgtgactctgtagctgggtgtacacagcgaggtagccatgccaatgtcaatatggccttgcgtttc

SEQ ID NO: 38245 - DNA, 324 bp, Glycine max
ttgctgatttggtcttcgccagttaaaggatcgagtggatccgtaaagaggcaaatttgatcatcctactaggacgactgaaaaaactggggcaaatgaagagggtgagaaagagggagaaacccatgctgtgactaccattcctatacggccaagtttcccaccaacccaacaatgtcattactcagccaataacaaaccctctccttacccaccacccaattatgcacaaaggccatccctaaatcaccacaaagtctgtctaccgcacttccaatgacgaaaaccacttttagcacaaaccaaaaaaaaaacccccacaaa

SEQ ID NO: 38246 - DNA, 332 bp, Glycine max
ttacttgtcctgtgctcgagcctttgcgcgtttgtgctctcttccgcctgcatttcaagccattccagcatcatttttgctttcatgttacatgcttcactccatcataatacaggtaagtagtgctccatttccattttcattttcatgctctgaatccttatgataaaccattttttgctttgataacttgccttgctgtttacgttaaggttcctaactttagggtgtgttatcctaggaactacgttgagttgaagccccattacgggcaatgctgttaaaaggggtgagcaccccagtgtttatatatacaaattgcgaaggacacc

SEQ ID NO: 38247 - DNA, 324 bp, Glycine max
tatctggtttgaagttaatcgctgatacatttgattggagtcatgatgcctatgctagtgaacattccttgcttgcaaaatgcgtagattagttgttacgcattatttgtggatttcagattcatttttaggaagttcttggattgaagggcacattgcttcttggttgaataaccatgttttacatagctgaaatagaattttcaatactagcactactgggcctttcttttgcaattctattaccagcttttggattttttatgtgtcaatttcttggcttattatacctaagatattgaattaatttaagacatgtttctt

SEQ ID NO: 38248 - DNA, 353 bp, Glycine max
agcttctaatttctatttctttaccaaaatcaaattattaatatctaggccattaatgatttgaccattatttgactacaaaattttctcgaaattatccttattctttctagagttaaacttaaaaacttaagagcttaaccatgcttaggtatcttatggtaacatctcattttctaccatttcaatagtctagaaacactacctaatcatacaacaaagcaataacattgtctaccacacacatgcatggaaaattgagattttacacaacatacttttcaaggccactacctaaagttgaaatttcaagatgttacacctactcacaaccaacaactacacttagatac

SEQ ID NO: 38249 - DNA, 382 bp, Glycine max
gctttccttaaggagaagaataagccaaatattatgccaacgacaatcttttccttgttcataataccaaaaaattcttccattccaccagagaaaggggaacatcaaccaatccgaagacaaatataatgtcttcctcaagaagcaaaaccaatggacagcagtatacatactgatgaaggcaaggtataacttcaacttctctgccaatttcttctaatacaactaaagcaaatctcaaaaatagcaatacatcccaaacaataacatccatcaaaatttgcaatttcaccatcatcactgataagaacagatctatatggaacagatttgaaaagatgaaacaaaatgttttatagataattagagatattgggttaca

SEQ ID NO: 38250 - DNA, 362 bp, Glycine max
cggatctttaacacctgccgctgccgctttttcttagggtactttgaactcaagtagcatatacaaatactaagttaattttgaggtccagagagagagagcggacctctcgatgtgcgagtgaacttgaatagcttccgattggggtctgcataggatgttgttgtcgctgtcattattagaggtgcaccatattctgggggaggtgccaaatctacgcctataaccatctgagggcttggcgattcacttatgggaatctgttccgtacagtatcaatgtgactctgtagctgggtgtacactatgaggtgaccatgccaatgtcaatatgcctttgcgattcctcaattccaactgttt

SEQ ID NO: 38251 - DNA, 389 bp, Glycine max
tcgcggatatggccttcgccagtgaaaggatctaagtggatccgaaatgttgcaaatttgatcatcctactaggacgactgagaaaactggggcaaatgaagagggtgagaaagagggagaaacccatgctgtgactaccattcctatacgggcaagtttcccaccaacccaacaatgtcattactcagccaataacaaacctcctccttacccaccacccagttattcacaaatgccatccctaaatcaaccacaaagtctgtctaccgcacttccaatgacgaagaccacttttagcacaaacaaaaaaaaaaacaccatcaaaaaggaattttgcagcaaaaagcctgtatggttcaccccaaattccgttgtcatatgctaaact

SEQ ID NO: 38252 - DNA, 323 bp, Glycine max
agctttgggcatttttaaattttattaacattatacaaggtatgtgcggatgagtcccataatatatcgaaacgctcctaatcggaaactgaaactcttaaaaaatttctacggctatatctttttactccgatgcccgacacagagtggctatattatggatggatgccccaaattgaaaacggaagctcgtatcaaatttaaacgagcgatgactttttactaagaagtctgattgattcccggaatttatcgagacgctcaagattttgatcctaacttattatagaattgaattgtcaattactttatacatggatgtg

SEQ ID NO: 38253 - DNA, 273 bp, Glycine max
agcttgagtaatatcaaatgacaataactttttatttttgatgtccagacagagtttagtaatatatcgaaatgctccaaattgaaaatggatactaataccgaattcaaacgacaataactttatacacggatgtccgattgagacccgttatatatcgagacgctaaaaatttgtaacggaatctcgtagaaaatacaaacgacaataacatttatactcttatgtcctacggagaccatttatttttagagatgctccaaattgataaca

SEQ ID NO: 38254 - DNA, 348 bp, Glycine max
agcttctacaagaagagatggttaaaaggatcaaggatggactactcatctaaagaaaagaaggaaaaaattagaaggagctgaattggagcacgttgaagattgttgaacaacatgcctgggcttagcgcatgctgtcaggcctaatgcgagtggtctagcttagcactcaccttcagcatgaatttacgagagctagatgtaaataggccttattagaggcttagttatcctcttaagcctagttctataaatactcagaaactcttaattgtagaaacctttgacataattgaaattaagcttgtgcttagagaaagcttagcctcttctatggtttttgactga

SEQ ID NO: 38255 - DNA, 389 bp, Glycine max
tcatgcttaactatgtatggcaaaacttcattatctgttgttcaagacatacaagtgagcttgtaacaaatcttctacacttggagtgatcacatgcagtcctcttgaacccttaccacccactctgtcatcatgctgagactcaggaagcccaacaggtttagctttctctaattattctgaacaaaattcaatggcttcttctacaatgtacctttcaacaatagatgcatctggatgatatagattctttgtatacccttttaagatcttcatgtatcgcttaaccgggtacatccaccgtagataaacaggaccagaacatttgatttctcttgccagatgccccatcaagggaatcatgatggtcaaaaaagtgggggaaaaaa

SEQ ID NO: 38256 - DNA, 382 bp, Glycine max
gatatctctatagacgacctcggcgcgtgcgcgctctgaagacatagagattttacttaagcactcatattcaaattctttctttaaaaatatttctgcatgattttctgtaaaatttaaaaaatctctgaaagcactttgattatcttgatagaaaaaactaaacgttgaaatcgattatccatctgaaagatgattgactgtttgtcattgtgcaaacaatcaaacaaatctcctaatttgtgtcatagccaataatggcttggtaggataaagaatattggttggcacacgctaggcgtaaagcttgagttaataagcttcaactgacagcgataaatacgtgtaacttggtgaagttactgaaacttggggtgttacc

SEQ ID NO: 38257 - DNA, 366 bp, Glycine max
aagcttgtccaatcgagtaggagaaatgccttcatattcatatctgcatattgatcaattgcaaggtacatgaaggacacgattatgagcaagagaaatagtgctcaaattatcaccaaaaattcgaggaatagtgtgagaaactttcagcttaaacaacaaggtctgaatttgttggacctctaaagtagctggagcaaggttccagtacttagcttcagtgcttgaacgagcaacaacagtttgctttttggaccaccaagaaaccatgctgggtcctaaaaagaaaaaagcattgaatgtagaccccctgtcatttggatccgaggcctaatctacatcacaataggcttgaaaaataaaaag

SEQ ID NO: 38258 - DNA, 347 bp, Glycine max
agcttctcgtcagtggtactttaagtttcatgggataatttcttcatttggttttgatgaaaaccccatggatcaatgcatataccacaaggttagtgggagtaaaatatgctttcttgttttatatgtagatgatattttacttgcagccaatgatcggggtttgctacatgaggtgaaacaatttctctctaagaattttgacatgaaggatatgggtgatgcatcttatgtcatcggcattaagattcatagagatagatctcgaggtattttgggtctatcacaggaaacctatattaacaaaattctagagagatttcggatgaaagattgttcaccaagtg

SEQ ID NO: 38259 - DNA, 307 bp, Glycine max
tatttaaatgaatttatgatgaaatttatatttccgtttgacttaagtttataaaattggtttatgatcttcttataagttcgttctaatattagtttattataaacaaaacttggtatagttaatagatcaaagttgggtccttcgaataagttggtcatgatttaattcctaactatgtgtatgaaaaaatgttctgttgagaaagtaaaagtccacttcaataatcttaatatctcaaaagagattaatctttgaatatccactattttttttaacatgcttcaatgattttatgtttaatttt

SEQ ID NO: 38260 - DNA, 350 bp, Glycine max
agcttcatggtgaatcaagattgattcaaagatgtttttatgataacaaagatgataacaaaagatgatgacaaaggtgatgacaaaaagctcaaaggtcaatcaaagaatgagttcaagatattcaagatagaatcaagaacaattcaagattcaagaggaaagttgaattcaagaatcaagaatcaagattcaagagatcaagattcaagactcaagattcaagaatcaagagaaggcttaatcaagataagtatgaaaaggttttctcaaaaattgagtagcacatggtttttctcaaaacatgtttaccaaagagtttttactctctggtaatcgattaccagatt

SEQ ID NO: 38261 - DNA, 338 bp, Glycine max
taggctaaatcagtctaaactttcgcaagctatttaagctaagtctagtccaacaagaggaatctgaggacgaagcttagtttaagttagtctaaacctagaagggttgtctaaattatgtctagtccaacaagagggatctgaggacgtgatgcaatcctccctaggaaaggaccagttaccagagccatgagcaagaggctccaagaggattgggctagagctgataaagaaggccttagggttctaatgaaccttatggtagatttttgagcccatgggtcaaggttgggtccactcttctttgtaaatattagaatagggtttttttcttcatt

SEQ ID NO: 38262 - DNA, 343 bp, Glycine max
agctgagatagttaaatctttatgataaggacgattggtatacgaaaaagtcagtgattattccaaagatttgtaatgccctgttgcttctctgcactaattatttcattagatggctgtgtgcctcaaatgaagatatacttaaattttcttaaggcctttaataataaaattgaaatcttcttaacaatcatattaggtatcttggccggaattattacataatattgctttattctctgtgtgcataggaacattgatgcgcagcccatctttgacttttgcattaatgcattcactctcatgttatagggaaagctcagttctggatctggggcacaat

SEQ ID NO: 38263 - DNA, 243 bp, Glycine max
cgacacgctaaactctgaagcgctaaagctgcattactgatgttgaggacattcgagagagcttgtaacaaatcctctacacttggagtgaacacatgccgcgctcttgaacccttaccacccaccctgtcatcacgctgagactcaagaagccctgcaggggtaactttcactaaacatcctgaacaaaaaacgacggctagttctacaatgtacctctcaacaatagatgcatctggatga

SEQ ID NO: 38264 - DNA, 346 bp, Glycine max
agcttctcaaggaggtgagcttatttatgagaggggtgtatgtagctaagctctagcttctcaaggaagttttctctaagaagctactccaggaagttttctcaagaaagcttctcaaggaagctacctagtctataaatagaagcatgtgtgacacttgttgtaactttgatgaatgaaagtcttatgagatacacttcaaagttccacttctttccctcttttattacttcaatttcgtgctccccccttctctctttcttttcctccattaaagcatcctcttcaagcttcttatccaaagcaattcttggaggagaagctccttcttccttggcttattccc

SEQ ID NO: 38265 - DNA, 142 bp, Glycine max
  unsure (1)..(142): unsure at all n locations
gcttgactactgaatggcgaaacttcgttattgaggngcatgacatttaagtgttcttgtaactgatgctgtacactcggagagctcacaaacaaaactcttgaacccttaccacccactttgtcatgaagatgagactcat

SEQ ID NO: 38266 - DNA, 351 bp, Glycine max
agcttcaaggtaacataaaataaaaataccttccaataaaagaattcaataatgcagattttccagccttcctaggcccaaaaacaaagcactgcaaaacatttctgtctgaatgctgcttcttgcgatccatgcgtcgcctcctagtcacacgaatagcagatgatggatcaccaggataaccaatgtatatcagattctccacactaaaagttgggtttagaagtgtcataagtgcccactgtccagagaaagtaatatatttgttacaataatgacaattcaatgaaaataaaatactatatgcaattaaaaggtacacaccagatatatagtcatacatacatatta

SEQ ID NO: 38267 - DNA, 330 bp, Glycine max
tgttggttataacaaactttaaccaactaactactaactaataaaattaactaccatatgaattaactaatttcaacacttcctcttaattcatattggtacaagacattactcctagcctatctctcatttccttaaatttgatacacttcaaaggctttgtcaacatgtttgctagttgatcttaagatctacaaaactcaagctcaaacttctccttattcacatgatctctcaaaaagtgaaacttggtctcaatatgtttacttctcccatgtgtcactgggtgttttgccaagtcaatagttaacctattattaattaacaatc

SEQ ID NO: 38268 - DNA, 332 bp, Glycine max
agctttgcggatttggtcttcgccagtgaaaggatcgaagtggatctgaaaagaggcaaatttaatcatcatgcttagacgaatgagaaaactggggcaaataaagagggtgaggatgagggagaaacccatgctgtgactgccattcctgtacgggcaagtttcccaccaacccaacaatatctttactcagccaataacaaactttctccttacccaccacccagttatccacaaaggccatccctaaatctaccacaaagtctgtctaccgcactttcaatgacgaacaccacctttagcacaaaccaaaaacaccaaccaagaagtga

SEQ ID NO: 38269 - DNA, 310 bp, Glycine max
tgatttgtgagtagattgtatcctgagtgtcattatgaatataaggcgatactttcgatgaaacttcgctaggataacgttcaatcgattttgctagattctgattgcagatttttgatatggtgttagtagatcgcgcttattggaatgaccacggatacagagcgctcgattggctacatcttgtttgagcagagtgtgaacgagagatcatcacgattgacctgatgaaaaatattacatggctgattcggtggcttaatgacttatacgaacggcttaagcttgctaaacacggattaaaaaatta

SEQ ID NO: 38270 - DNA, 365 bp, Glycine max
  unsure (1)..(365): unsure at all n locations
ttaagtcaccgcggctgcagcttgatgcacattnggtaggttaatgaaacaacgaaatgatgtgctccatgagaggtttgatcaaatggagaatagagatcataatgaagaagaaaggaggagaagagggaatgatggtgttcctagacaaaaccgaattgatggtataaaactcaacattcctctctttaaaggaaagaatgatccggaggcctacttggagtggaagatgaaaatagagcatgttttctcatgcaacaactataaggaggaccaaaaggtgaagcttgccaccatggagttttccaactatgctcttgtgtggtggaacaagctacaaaaggagagagcaagaaatgaagagc

SEQ ID NO: 38271 - DNA, 390 bp, Glycine max
ctaagcttgcttcacaatctccccctttttgatgatgacaacttctgaaatcaataaacacacacacactttttcctagtcaatcactcttataaatgctccccctttgtttttgaatttatgcttatcttaaaaataatttgattactcatgtgaattcttgatttaatcccatttctctccccctttggcatcaacaaaaagtcaaagtgcgtatcaaataaatttaatttaaacatccatttaatgttcataaaaaatatcaaccaaatcatgaagcaagaagtaagaaccatgaaaccatgaagcaaacaaccatgcatagataaattataaactccacatagtcaaataacatacttaataattgttcaaacataccatgcaaaa

SEQ ID NO: 38272 - DNA, 351 bp, Glycine max
agcttatcaaaaactcaaggtctgcccttggtactcatatctccaaaacccaaggtccacccttagtacatattcttgctaaacccaaggttcgcccttggtacatacctctacagaactcgaggtaccccctcagtccgcttacatgtagcaactacaatgaccatcgtcaagggtccaagttcaaccaaacgaactaccaccccactattttgcaagacttttaattaggtcaaaaccacacctactcctcataaccatcagagatctaaatgtagatcaactctaatttgttattgcgatttgattacttttttgtttatggtgccctatgtacgaattcgagtgaag

SEQ ID NO: 38273 - DNA, 297 bp, Glycine max
tctagccaaatagacttaccttgaattaattctctttgatagcccttttgtgccttgtttccctttccttgttttgaagctcactacaagccttaagtgaaaaaccatgatattaccatatccttaaggaattttggagctttggaattgttttgggaataagtgtggggggtttttgtttcattggacaacttgttttgttgactatgcttcatgatgtattttgggccatacttgatgtacattgtatattggttaaatgttggacatgctgaatgaaatgttgtttctcaaagg

SEQ ID NO: 38274 - DNA, 343 bp, Glycine max
agctttagttgagatggtgtttgaattgtttggttgcacaagaccggacgaactttgttggtcatggtaaatgcaaaaataccgaccaagaaggtaatgatgccacttcttcattgttgaggtgattgcaaacatctcatgatcgtaggatgaggcaacctacattctagacgatagtttgcagctataaaaaacaatgggtgattttcttgagataagacaatgcctactgccatgccggaagcatctatggtgacctcaaaggtgagatcaaaattggggagatgcagaacttagaagaaaagtcattgcatctttcaaagattggaaggtagcactaact

SEQ ID NO: 38275 - DNA, 339 bp, Glycine max
tgtgtaaatcatgcaggttttgatgatgtcattaagaatattttgataatgagtgtcatcatgaaaaagggggagaatatggatcaagcaggttttgataatgttgaaaagaatttgcttgataatgagtgtcatcataaaaaaaagggagaatgtggatcatgcttattttaatgatgtcgaaaagagatcacttgattgtcgtcatcaaaaagggggagaatgtgaatgtatgatgattttgatgatgctaaagaagaatcaaacaaggctgctacatttgcttcaagattaatacaagattgcttcaacaaacaaagccttgattcaagaattctt

SEQ ID NO: 38276 - DNA, 346 bp, Glycine max
agcttgtagacaacactgctgttgcagcattcaatgctgaccttttccaacctccgtcacccttgttgcccaaattcctttatctctaagtatatcagccaatacacattccatcttcaaattccatgtaaaataacttcttgtttcctcattattttttcctaaaacatttcttttgtccgtcattttttcattagatgactccattgaatttaatggcacttatttaacttgcacataacaaatattagatacaacctactttattcagttgactagtccactacataatcatagaaaatatttcaagcaaagtttttatgcaatagccaagtacataaaagtc

SEQ ID NO: 38277 - DNA, 357 bp, Glycine max
taaaaatggggctatcaacctcgagcacaatttcatcaacacgctgcttgtggttaagcttctcccaacaaccctcattcacctgacaagttgcaaacatgtgaaatgcattctctatttttgtttcgctaagtgaacacaacatatatagagcactccactcctctagatcaaaggttagtctttgtatggagacaatcacagcacagcttccagagaaatagctttacccgaggtgggatatgaagcttccaaatcaagttccaatccccttctctacacaaactgggttggtcaacaaacttctccaatataagcttgtacgtgctcctaacactaatccccatggcttacaaa

SEQ ID NO: 38278 - DNA, 288 bp, Glycine max
ttgacttctgggcattcggcgaccacgcatcaacgaagccacttctcggcgccgtactatcatgagcgactgtgaccagacgttgtgtattgagaaggtgtgcgacggtgattgccagccgtcttacttcacacatatcttgataagtgaggttgatcatgtcgcaccatatacacgatcccgatgtatgattgcagccatgccttcattttgccttatgaaaggcgatctaattcattctgctctggctggactctcttgacgaaactcttttgacctttgatagga

SEQ ID NO: 38279 - DNA, 167 bp, Glycine max
tagaagtttattatacaatggtgaatttaatgcagcgtcactcatataccccgctgcttcatgtagaaccgcatgggacgctaacaaggttcttttaggaatgaaacgtaaaaatgttgtgacctgcagctcaataatggaaactaaacgattccatgggctaggag

SEQ ID NO: 38280 - DNA, 229 bp, Glycine max
agcttggttttgggcaatatctccccacctgacgtccccaaggtgtgctgacccccgcgacatatctccatgtaccactctgtcgtcaacaataaatgcaggaatacctacacctactatacttgctccacttaagctcgctagattgtggggtacacatcacatgtcgttcttggtggcagttaatcaatcgtacgcatcattggattggaatacgaaaatcgcgcat

SEQ ID NO: 38281 - DNA, 354 bp, Glycine max
tgtcccacaagcctctcctacatttggtccatgaaaggcaaaagatagtggtctttcctcatggcttctttgagcttgaggtaatcgatgcatattctccagccagtgaaagtccttgttgggattaggtcattcttttcatcctgaatgattttcgtgccccctttctttggtaccacctggattgggcttacccaagtactatcagaaatggggtagataatccaagcctctaaaagcttgagcacctcttccttcattgatgggttaaggcttctcttgggctgtctgactggtttgtaatcttccgccatcattatggtgggcatattagaaaacggggtgaatcttttg

SEQ ID NO: 38282 - DNA, 329 bp, Glycine max
agctttatccaaaacaattatgttgcaaaaaacttacctatttcggattggtagtttgtatgcgggtttcacttggtgggatttcattctaagcctcacattagaactcatctgtacggatcaatgacctcttccaaattatcgctttaactcattgatgatcatgggtatggcccacacttccatacttataacgtcctcctcatctgtttaataaactatgagttaggtgctaacaagctatacttattttcatcaatgtaaacctaatgggaatcaacgactaatttgctgatgctagctgattgcctgcctgtttttagacccct

SEQ ID NO: 38283 - DNA, 344 bp, Glycine max
tgacactataaaactaagcttgtaggtaaagtctcacgattgcacgtgttgatgcatcaattgttagctgtggctatacgagacatcttgccaaacaaagtcaagttatccataacttgcctgtgctttttcttccatgccatatgtaacaaagtcgttgatcctgtcaagtttgatgacttggaaaatgaggtcgtaattatactgtgccaactggagatgtattttccccctgctttctttgacatcatgattcactagattgcgcatttggtgagagaaatcacatgttgaggacttcgttatttgcggaggatgtacccggttgagcgatacatgaaaat

SEQ ID NO: 38284 - DNA, 310 bp, Glycine max
agcttattaccagtttcagtttttggttttgctgcattagtatccactccctgtatgggcaacataatcaaacactgtatcagattaatgataggttaaaaagaattaatgcatcgtcaaggtgaatgttaacaaacttcgtgtatatacacgaagataaaatccactcattcgggtattatatatcatataaattattggagccacgcacgtacaaattggtctattttaattcacaacattacttattgtttaataccaacaacttaaattaattgagactagaccatgaccctcataagaaaagata

SEQ ID NO: 38285 - DNA, 260 bp, Glycine max
gtgacaccatgacccacggggataatacggatcacgcgtggcttgataatggagaacataatctgcttgagaatgagtggcatcatacaaaaaatgtagagcgcggatcatgcttatatcaatgatgtcgaaaagagatcacacgatcgccgtcctcatacacgcggagaatgtgaacgcgtgatgatattgaagatgctcaaaaagagtcacacacggctgctacattcgctccgagatgaataccagattgcttcatc

SEQ ID NO: 38286 - DNA, 346 bp, Glycine max
agcttgcacttcttcacttttcttaggaatttcagcctttttcccacttagacattttagctttgggagccaagtcatcccttgcgttctagacttcaaccacttgtgatagccgccgatgacgccattgctacttcccctaagctccttatcttttcttcccactctattccacaatttacgaattttctgaagtatcttcgcattagcttcagtgaaacttcgcgcaatgaaaggcgcgatgatttcctctgacggtgcacctctcataaggtatcctaactgtcttatggccagtatgggattataattaatacaacccctcatccccatcaaagggacattt

SEQ ID NO: 38287 - DNA, 285 bp, Glycine max
gctacaaatggagctatcaaccttgagcacacatttatcgacacgctgcttgtggggcatcttataccagcaaccctcatatcacctgacaagatgcagacatgggaaatgcattctttattatggatgaactaagagaacaacaccatatattgagcactccactccatcagatcaaaggtctgtctttgtatggagacaatcacagcacagctatcatagaaataactctacccgacgtgggatatgaagcttccaaatcaagttacaatccccatatgtaca

SEQ ID NO: 38288 - DNA, 323 bp, Glycine max
ttcttgtaggattatggggtacccctcacatgtggtactaggtggcggtcgggcgatggtgcataacaagttttccacatccacaaatcgcgcataaacccaccatcccttgttgcccacctccaactgagctcacgtactcccacgtagcccatatcttcggttctctcaacaccgggtccccatcaatcctaccaagcttccccaacatccaggtaaaacaacattcaaacagcatataactatcacagccaagaaaacaaggcaaaggcataaaactctgtccaaaacaccaaccaaaatcacagctttttttacttaaa

SEQ ID NO: 38289 - DNA, 369 bp, Glycine max
tgttcttctacaacccgacgaggttgactttctgaatggcgcgaacttcccgactcgaactcgcagttcgtgaagaaagatattggtcgatcacttcaaagaaatgaggttagtgagttaattagttaggttaagcttcttttaaccttcttttaggttaagcttcaaagaaacccagtcaataaggttaaaatcttatgttgaaggtagtgtcattgttaatattgttgtttcataagcacttatgcaaactatattgcccactaatattggtgcatctccagctccaaaggctacaagctcattagaagtttttgatataaacttagtacataatatatttgtagtatgtcctgtgtcaatcgattg

SEQ ID NO: 38290 - DNA, 129 bp, Glycine max
ttttttgtgatgtaagaatcttctgcccgtcatgatattaatcaatggctgcttgttggataattatattgttggaggttgcctaaagatatctaattatccatgcctgtgtcccacatgtgaataggg

SEQ ID NO: 38291 - DNA, 181 bp, Glycine max
caactcgtgggtgaagcttatttcattgtaactatgcatttctttcattacgggtgagattgagaaacttgcgctatcaggtgctcaagaccgttaatgtataggtttatgaaccgtatagcgcggttgcctaaatgacaaagcgtttacaattttgctaaatacggcgccaatatatcga

SEQ ID NO: 38292 - DNA, 319 bp, Glycine max
tgcttctgagttaaaagctattgcagtttgcatttgctacaagcttgcgctttcaactacgagcgtctcgatatattactggactcaatcgatcatcagagcaaaaagttattgtcgatagaatttgttcagcgcttccgttttcaatgtggagcgcctcgatatattacgggactcaatcggacatccgagtaaaaatttagttggtgatagattttgctcatagcttctatttgaatttgctacgagcttccgttttgaatttggagcgtctcaatatattatgggactcaatcggacattcgagtcaaaaggtatt

SEQ ID NO: 38293 - DNA, 370 bp, Glycine max
taggaactataaaactcagctctctctttgacctgctcatagctgtggcatgcgaacacatgctctcttatcatgacacactataggtgcggctcgagaacattccccacttcaagtggatgacagaagaatggaatactcattaatgaaacactcttgcgatcaaccactctaactcctcttgagcttttatgctcattaagagatctaggctccatcagacaacacactcacacaggagcgcataagctaggctagacatacacctgtacagatgacgcataaaaacgcgcacaaggaattgcggcacccccgatcgaatcataagattaatacctgacatctcataccaacccttcatgcgtcccat

SEQ ID NO: 38294 - DNA, 349 bp, Glycine max
agcttgtcgcttcttccgaattctccctctctaactcaggtcaaatcccccctttccttcattttttttatcgtgatgtgtaacaattcgcgaaatttgatgcaatcttttgtctgtacgatggtgttccttttggttgttttaagatgaatctggttaaggatgtagcagattttgctttttttattgggtgaggtttttcttacttttatttttttagtttttagggtgtgctggtttcagaaacaaaatcaaattagtttgttgctgtttgtactgtattgaatgttattgttggtgccaaggttttaaatatcggtcacggttgcgtcgcatttgttaatatcgc

SEQ ID NO: 38295 - DNA, 387 bp, Glycine max
ttaatcgattaccatgagcatataatcgattaccaatgttttaaaacgttagatttcaaatttcaagagtcacaacttgtgataaaacattttcaaatcatttcaaacttgtgtaatcgattacacaatacttgtaatcgattaccagtgtttctaaacgttggttttcaaatttaaacatgaagagtcacatctgttgatgtgtaattgattacactacaatggtaatcgattaccagtgacttattttgaaaaaataaattaccaaaagtcacaattcttaaagtgacttgtttctgaagattttttcaaaagtcacaacctttaagtgactagttttcaaaagagtcacaacttttagagtgactaattttcaaaagagtcaca

SEQ ID NO: 38296 - DNA, 349 bp, Glycine max
agcttctgtattcaatttcgttcatctcaatatattacgggacttaatcggacatccgagttaaaagttattgttgtttgcatttgctacgagcttccgttttcaattacgagcgtctcgatatattacgggactcaatccaacctccgagttaaaagttattgtcgtttgaatttgctacgagcttccgttttcaatttctagtgtattgatatattacgggacttgatcgaacattcgagttaaaagttattggcatttgcatttactcacagctttcgttttcaatgacgagtgtttcgatatattacgggactcatccgagttgaaagttagtgtcatttgaatt

SEQ ID NO: 38297 - DNA, 385 bp, Glycine max
tcattgcctaacaagccaacttacaacagcattccccaagagactcagcttaaggatgcacagaccaaagttgcgtatgtaaaaaaattgtatgaccaagtgaaggtgcaaattgcaaagaagaatgaaagctatgccaagctagcccaaaataaaatgaaggaagtggtacttgaacccggtgatgatcttggacatttgaggacaaatgttttccaagaaggagggaatgatgagaatcatgaaacaggccaaatacagtctaaaggcccaagtggagaaggacgaaggccctagtggagaaggacaaagcccccgagtggagaatgatgaaagcccaagtggagaaggatgaatgcccagaggcagaaacactatcaagact

SEQ ID NO: 38298 - DNA, 333 bp, Glycine max
agcttcggtattcaatttcgatcgtctcgatgtattacgtgactcaatcagacatatgagtaaaaacgttattgtcgtttgaatttgctgaaagcttcaacattcaatttcgagcatctcaatatatttcgggactcaatcctacatccgcaataaagagttattgtcgctcgaattttctgatagcttcaacattcaattaccagcgtttcgatgtattatgggactctatcagacatctgacttaaatagttattgtccttagaatttgtcccgagcttcaacattcaattaccagcgttttgacgtattacgggctccaatcaaaaattg

SEQ ID NO: 38299 - DNA, 354 bp, Glycine max
tcagcttgcatttggaattgcgaaagcccccctccatcattaggatctgctcctgctatctcaaacaaacaaatcaaacgtaacaagacaattatagttgctgtttgaatacctcacccactcaagtgtatcacacaattatggattttctctaatgaaacactcttgccttttaccactctaattccccttgagttcttaggcaattcaagagattatggccacaacaaagaacaattcaccaatatgcgtaaggtaaggctagagagacaaggaaaaggttaaccaagaaaaaggctaacaatgtttttaggcaccaatgaaagaaattaaagttaaaattttcgaattcaa

SEQ ID NO: 38300 - DNA, 343 bp, Glycine max
caacttctgaacattttcttcttttcctgtcacattataaactcaacgagtcaatgtcaatcaaaatagctaggaattgaaatgcaacttattgtaggtatcaagccaaaccttttaacgttcattttgcattaaaattcatacgtgccgttttcctgagatgatatacaatggttctcaaaaacttatttaatctcgatctttttcttaatattttacgttacgatggtgcatacctgctaccggaataatttgactttattctcattattcaatctcatctacaaaatatccttacctcaatcacaagaatgtatacggtcccaagacatagaggttgatg

SEQ ID NO: 38301 - DNA, 292 bp, Glycine max
tgtctaaattgccgggagcactattgctgcgttctcatctaaggcaaaggacactgtatgttaccctgatatgtaagaatcgtatcaatggaaaacaggttgcgcgccggccatgacttggcggagcagttgatcctcgatcctgagatcatgatcctcacgtttagctcatgctttgctttggattacatgacacacgatatgctctactgtcatacttatatattgagatgcttgttactaggtaaaggaattgtgaaacatgtcgaagaacctggtccaaatgatacct

SEQ ID NO: 38302 - DNA, 297 bp, Glycine max
tgcttatatatataaaacgaaaaaatgaagcataaatattatgttacagtatctaatgtggagtagtccatcatcaaccacaattaaaaggtgtcagatttattaaggtgtaaaatgttatcatgtaccctcccttctcaaaaaacatctgctcctcttattaaataaaaaataaaaatctttctctacccaccaagtgtttgatggttttccctgggtcacatttcttctctaactgcagctgcgacagatcttgaaaggaagaagagtcattcaatttgtcgcaacctacaagta

SEQ ID NO: 38303 - DNA, 311 bp, Glycine max
tgaaggtgtgtaagacaccattttctcatagtagaacaccgataacgtgtctactatcattgttatcatctccctttccgtcattgggggtgccacttgggctgccacatcctattctttgaaagatttgtgccactttttacccatgttttgtagctgcatccaatctagggccatatcagaattatactgatactgcctaacgaatgcaaccattaggttcttccaagaatggactcgggaaggttccagattagtattaccatgtgacggctgccccagtgagactttcctggaagaaatgcctcaac

SEQ ID NO: 38304 - DNA, 349 bp, Glycine max
agcttgcctaattaacctgttattgagagaaaatgattattaaacacacataatggaagtactaagtatttattacctatacttaatagaaaatacttataaaactacaaaataaccataaattggaagggtttgatacaatttatacaagttttatacacaaaggttagtcgtattcaccgactaacaactcccccaaatttaaagttttgcttgtcctcaagcaaaaagagaacaactcacttgtcctcaagtgacaataacatgtagtgactatgtacaaaggtgtatgcaacaaaagttattgattgcatgataagagaatggagtaaaatgccctcatcacttg

SEQ ID NO: 38305 - DNA, 362 bp, Glycine max
tggttcgaggtacttacccgttgaagatcgtataacgatgaagaacgaatgaagaacgtcgaagaacggttgaaacctttgcgagattcctcacggaaaacgttacggaaacgtttcggaagcgcctcggcttagattttcttcacggaaacaatttttccaagcaaattcgaaagagagagaagtgccaaaggggctgggatccttttcttcttcattttctcccctatttatagcaaaataggggagatgcttgccgcccagctcgcccaggcgagctcagctcgcccaggcgagcagggttgcttcctccagaagcaaccgccttctggaggaaccttctggagggcccaaatgggcct

SEQ ID NO: 38306 - DNA, 343 bp, Glycine max
agcttaatgattttgtaaaatgacatttgaactaaatcatgtttgtcataataagatttgtcttagactagttcaatcttatgcataagagtatgaaaaatttcataaaacattaaaatagtcttgtgcatataaagttggaaacaacattatgagattaatctttccgagtgcatcattgaacaacaacattctaaatattgcatttgcataacttaaactgagtttttcataataacaatattttgagaaatgcttttatttaagtaataaacttctaaacttaagaaaatgtgcattgatattaggttctcgtaatcatatcaaacatttcataataagt

SEQ ID NO: 38307 - DNA, 349 bp, Glycine max
tcttatccaagacactctcttggtggtgaagctcctccttccatgacttattccctagtagatgacgcatcctttcacctcttctcctttatcttccactgcaactccatggttgaaaataatcattgaaggaccttatttaagctcaaagatccagcctccatagaagcttctcaagcaagcttccatcaaatggtatcaaagcacaagagcttaaagtacgtgctccttaaacctccattaacctttattgttgtttcttcatttttctccatgtatctcctcacgtgtcttgtgctaaatgttgttcacatgattttttagaatttccaacattaaaacttgctat

SEQ ID NO: 38308 - DNA, 346 bp, Glycine max
agctttgaggatttggtcttcgctagtgaaaggatcgatgtgggtccggaaagaggcaaatttgatcatccgactaggacgactgagaaaactggggcaaatgaagagggtgagaaagagggagaaacccatgctgtgactgccattcctatacggccaagtttcccaccaaacccaacaatgtcattactcagtcaataacaaacctcctccttacccaccacccagttatccacaaaggccatccctaaatctaccacaaagtctttctaccgcacttccaatgacgaacaccacctttagcacaaaccaaaaacaccaaccaagaagtgaattttgcagcgag

SEQ ID NO: 38309 - DNA, 318 bp, Glycine max
tatggaatcgcgagcgccagcctgcatctttaagatatgcctactggtatctgaagcaaacttggcaaacgtaacaggacaattatggttgctgggtgaatacctcacccactcaagcgtatcacacaattatggtttttctataatgagacactctcgccttgtaccactctagttccccttgagttcttaagcagttcaagagattgtggacacatcaaagaacaattcaccaatatgcgtaaggtaatgctagagagactaggagaacgtttaccaagaaaaaggctaacaatgtttttatgctcgaatgaaaga

SEQ ID NO: 38310 - DNA, 343 bp, Glycine max
agcttgttacagaacttcttaaaaatcaagaacaagcttgttcgcacatcgttcgcgtgtatgatatccactcgacaaggtttgaagtagaggagaccttcaatcctataacgcaacgtggcggacaaaaatgggcagttaacttgaatggccattattgtcaatgcggaaggtattttgcgcttcactatccatgttcacacattattgcagcttgtggttacgtgagcatgaactactaccaatatatagatgttgtttacaccaatgagcacatcttaaaagcatactccgcacagtggtggcctcttgggaatgaagcggaaattcctccttctgatga

SEQ ID NO: 38311 - DNA, 458 bp, Glycine max
  unsure (1)..(458): unsure at all n locations
cggcatctatgncatagattganncccgttgtaanatcnantttggaaccattgaagacccttangtgacactatataagacgtcagctctaatgctagtgtcccatccataagcgtcaagtaccgtatgttactctgagatgcgggaattgtaataaaagagacatccttgcctgaagtacattacttgggatagcacttgacccatgatcacattagacagtgaaacagcgttgtaataatactgcactggaagtattctgacacatgatgcgctttgctattctaagtagattgggggaggccttttactaggtaattgttaagacgcatcaagcgaataaccctgttcaattgaagggtcgtctagaagtgcaagactatacggatttgtgtggtaacaaactatccacagccatggaacttcgtaggttttttacaattaacaaatgattggc

SEQ ID NO: 38312 - DNA, 307 bp, Glycine max
  unsure (1)..(307): unsure at all n locations
tttcttttaatatactccaatttaattttgtagtggcaaattgtgtgtgaanttacaaagaacaacaataaggatgtatatttttcttactaaaattaatctgtgtaatttttttaatccaatgatgagttttaaaatacaattattttattgacaatgaataaatggtgttactttccgctactattaagatgaagtattccaattaaaaattacattactttaccttgacttttattgatctaatcgcgaaactattacctatattattatgaggaacacacatagatggggcgagccctttatt

SEQ ID NO: 38313 - DNA, 369 bp, Glycine max
tgttctcccttctccgcgaactgcttcttcttctccggcaaggcaagcgcgaacctcgtcttcttcttctccgcgaacgaggttagtctccctaactcccctttgcttgtatcatacaacattgttatagcttgtagcagtggaaccttaggatagttaccttaggatagtaaccttagggtagaagacgagaggagaggacgccgaaaaaaatggggaaaggaggctgacggcggagacttccggaagacccgttaggggttcttccggaagttccggaagaacattttccggaaagttttcggaagaagggttcttccggaagtaaccaaacgtcttccggaagaacacttcttccggaagactccc

SEQ ID NO: 38314 - DNA, 267 bp, Glycine max
agcttccgggtaggacacacaaatattgataactatgataaattataacattaatgatttagaccctctttagatgaggagataaaataaactgagaaccttggagaaattaaaagagagtgagagagagtttttataaaagttatctgcataaattgattataatttttgttaaaaaaaaaactcagttcatgccactttttttcctcatatagagaagattatataaattggacataaaaatattatgttttaatttattacatg

SEQ ID NO: 38315 - DNA, 319 bp, Glycine max
ttcaatatcaacatgtttttagtgtactaatatgctctgagttgtatgcactcttggtacaatcattttgagctcagaacacatttggagtggggaaagaagatgaatctggtttatgtgtgatataggttgtctcctaccttctctctcatgtttcatagttgtcctatgtatttttgtaggtcccacatgtcaaactagttgataaaatagttgggtgacttctttttgaagtagagattgcttttaacttttcaattgttagctcatatattattaggccattctgatggtgtcattttcatgaacaaattctgag

SEQ ID NO: 38316 - DNA, 298 bp, Glycine max
tcaagaacaagctttttcgcacatcggtcgcgtgtatgatatacactcgactaggtttgaaatagaggaaaccttctatcctataacgcaacgtggcgaacaaaaatgggcagttaacttgaatggccattatagtcaatgcggaaggtatgttgcgctttactatccatgttcacacattattgcagcttgtggttacgtgagcatgaactactaccaatgatattgatgttgattacaccaatgagcacatcttaaaatcatactccgcacagcggaggcctcttgtgaatgaatc

SEQ ID NO: 38317 - DNA, 351 bp, Glycine max
gacacttgacactcagctttgttgaatgatgaatatgctataacggcttatgtcatataacatggtattaggtgcactcatcagattggtcctattaaggataactctggtggggcagcaacatgtttcatctgcaccatttgctaatggaacaactttgaaatataactctaaagatagcttacgagccttggttgtccattggggcaatactttatcgttcaatgctaatattttttgtttctttgaaggccattgaaatagccaaagcataacacaggatggctcttttggatggagacaaactcaacttaggtggtggaaatatataagattacttctttgggacct

SEQ ID NO: 38318 - DNA, 388 bp, Glycine max
tgtgtatctgtctccatgtagtcgtcacttgtcattcttattctcatattaactaaaaagtgttagtttgttcatgtttgaactttcttatgatcactatttatttttctaagaggttgtgtgataaaatgaaaggtagagtgaaagagaaaaatagaagaaaaaagagagaggaaaaatgctcaaatggaaagttgtcatggtattttatgattgtctcacttagaatcattcatgttattctaaccaaattttgaaaaacacatataagccgtaagacaagtgaaagaatcccaagtggaagaatcttatctttgtgatgtatttcctagctactaaaacaccagttggtggagtagtagtcaatctctatctggcatctcctatg

SEQ ID NO: 38319 - DNA, 335 bp, Glycine max
gcgtatcgcgcacaatgctcttgattcgaccgtccaagtgtaacgtggagaccatttctttacctccgacactcctatggttggattggagcatctccatatctgatggcgccgaatgggacccctatgtgccagatctaacattaactattttgaagcttaagaggctcatttgctggcgtatgcgcatatgtctgttctgatatagccatccgcctgcatgatgtatgccatgttaatttgtagcagctttcgatgataactctgccgccgccgcctgtgtcatgtgccggtagtggaacatacccgagtatcgtggtgactactcaccattc

SEQ ID NO: 38320 - DNA, 404 bp, Glycine max
  unsure (1)..(404): unsure at all n locations
ttctgccttctgggtatgacaccataatctatggctttttctctctctctcttaatcttgaacctctatctttntgtttcaagcacaagcaacaatttgtgttatcaaggctttgaagtggtggaagaagaccctaaagcctaatatgattgagatccattcagcacaagaactggtccattctttggtcaacgctggcgattcattgcttgtggttgatttctattcacctggttgtggaggctgcaaagcccttcatcctaaggtatgtttgtttttgttgtttggtgttggaaaagtcatattcttataattttctattactaacaaaatgcttcatttttttttctaggtntttcgttttttgttacaatatttgacttgctttcatcatgcgcgactag

SEQ ID NO: 38321 - DNA, 375 bp, Glycine max
atggatggtgaaataatgagtgggagtcacaatcatgaaatgacaaagttattagttggacatccatacgttggtcgattgactaaggatgaaaagacaattattattgatatgaaaaagtcaatggtgaaaccaagaaatattctgctaacgctgaaggagcacaataccaatagttatacaacaatcaaacaaatatacaatgcaagaagtgcatatctttcttccgtaagaggcagtgatactgaaatgcaacaactaatgaagcttcttgaacgagatcagtatattcattgacatagattaaaggatgaagatgttgtatgcgatatcttctagtatcatcctgatgcagtgaagttatgcaatgtctat

SEQ ID NO: 38322 - DNA, 384 bp, Glycine max
  unsure (1)..(384): unsure at all n locations
atctatcaccaccaccgccaccatcatcttagttttctattatgtgnaatattattagtactttgatttctagccgcgtatttggctatattattatgacatttgaacaatgtagtatttcttttatttgcatagtatgattgaacaattatgaattatgttatatgactatgtggcttttatatatttgatctattcatgtttcttgcttcatgattggtttagattttttcaatgaatgtcttgtgaatgattcagaatgtatgtatgttttatatttgatgcgcactttggctttttgttgatgccaaagcgggagagaaataggaatcgaatcaagaactcacataagtaattaacttaatttcaagtaagcataaactc

SEQ ID NO: 38323 - DNA, 360 bp, Glycine max
tcatggtgaatcaaaggtgattcaaaggtgttttgatgataacaatgatgataacaaaagatgatgacaaaggtgatcacataaagctcaaagatcaatcaaagaacaactcaagtgaatcaagaacaattcaagagttcaagataagaatcaagaagaattcaagacttaagaagaaagtctagagacaagaatcaagattcaaggttcaagatctcaagaatcaagatcaagattcaagaatgaagagaagactcaatcaagataagtattaaaaagtttttcaaaactttgaatagcacatgaggttttgacaaaaccttttaccaaagagtttttactctctggtaatcgattacc

SEQ ID NO: 38324 - DNA, 374 bp, Glycine max
tgaacaaccatatcggaatcacactcaatacattagaattggcaagatcaatcgtcttaattactgcaagtaacttagcacagaaagcagttttgacccccaaaggtgcctccactgcagcaacaccaggacatcctcttgttgacccatccaaaatgagagggacgccattttacttctctaatacatggagctctactaacatggccagaaactcgaaacatattaaaaatagagaactcttccattgacgagttcatggtaccgcgaaagaagttacctaacaacgagattgaggcaatgatgttactacgaatttgatgaataggccagctgcctcgttgaaaacaaaaatagtttttgttgcaccacat

SEQ ID NO: 38325 - DNA, 386 bp, Glycine max
  unsure (1)..(386): unsure at all n locations
tcattgaattggttgtgttattgaagaagatgcttcctgaacaaaacacattgcccanaaatcactacgaggcgaagaagattttatgtcctgtgggaatggagtaccaaaagatccatgcatgcactaatgattgcatattatacagaaatcagtttgcagaaatgcataagtgccccacatgtggggtatcatggtacaaagtccaggataacaaatttgttgatggtgcaagcaaaagcaatagtcatttagcaaaggtgtgctggtatcttcttataataccaaggtttaagcgattgtttactaatggacatgaagcaaaaaaccttacatggcatgtagatggcagaaaaagtgatgaattgctctgacatccagctgat

SEQ ID NO: 38326 - DNA, 388 bp, Glycine max
  unsure (1)..(388): unsure at all n locations
ttctaaacttcgttttttctgctagtagaaattctgtagaaaacaaaagtgtgctatcttttcttccttctccctctttccaaaagattcaaaggactaaccgcctgagatatcttttgtttccccttacaaagatttaagagactaaccgcctaataattctttgtcataacacattggagggtacatcctttgtggtacaagtagagcgtacatctacttaggttgtaatactgagaacaagagagggtacatctcttgtggatcagttcaagtggagtgtacatccacttggttgttcaaagagaacaagcgagggtacatcccttttggatctttgcttggtaaggattttccaaggttattggaaatctcanaaaccgatggg

SEQ ID NO: 38327 - DNA, 195 bp, Glycine max
aactaacttactggaattagttcatagagatgtatgtgataataatgctgtgttaacacgtggaagtgagagatactctattactttcatcgctgatgtcatccgatatagctatgtgtatttagttaatcacatataccagtttgtgctatagttcaaagcctataaaatagaagtagaaaattaattagaaag

SEQ ID NO: 38328 - DNA, 357 bp, Glycine max
tatagaatatataataaaagaacaatgacaattgttgaatctatacatgtttcctttgatgagtctaatgccattcttccaggaaggattttttagatgatatttcaaattccttagaagatacacatatgaatggaaatgactcttaagaaaaagatgaaggaagcaatgaagattttcaagataatggagttagagcaaataatgaacttccaagagaatggaaagcctcaagagatcattccctcgacaacattatatgtgatatatcaaaaggggtgacaactagacattctcttaatgatttatgcaataatatggcttttgtatctatgattgaacctaaaatataaaaga

SEQ ID NO: 38329 - DNA, 408 bp, Glycine max
  unsure (1)..(408): unsure at all n locations
tgagatcattaactgtcntaacaaatatcgattgacttaagacaatcgactgttaaacatggtaaatcaataaaaaagatggatgctttttttattcttttatctcgatgaaacaatataaattttaaggtaaaaaaagatggaaagtataattaaaaaaaactctcaaaaataagaaagtgtaatttcttcaattatattgcaacctcatgtgatttgattaaaaatgctttattttcttttggtattttaccattttatgctttattttattaccacatcacctaaattcactttccattcatttttaatggtaaatatattttatatctagataataattntgttaataactaatttctatcgaantaattgacttcacctttagtgagtatctctttttaatta

SEQ ID NO: 38330 - DNA, 373 bp, Glycine max
tttttatcctcaccggaatttgttttgaaacggaccctctttcgtaaattgtttttaaaaggaaccccatacagtaaatttgccaagaaattagtgttgtacccataaaataattttttaaaatgaataaaaatgttataagagataaaaaaaattgatattaattttatcattttattttttaattttatagcatcgacaatgaaaaaattatataatatttttgaaaatatataaatgcgtaaagaataattataatttgtaaaaatataagtattttgaatttttttatcatgagattatatattttataaaaatttataataattctcttctataaaaaaatttagatatattgttactgaattcagca

SEQ ID NO: 38331 - DNA, 364 bp, Glycine max
cgcttattctggtgcgatatatacttcaccaatgggtcaaagcggcttcttattctaatgtcacgagaagggtgggggttagattcataaagatggagctgatgtgtctatacgaactccctaggaagatcattactgacaatggcaccgatttgaacaacaaaatgatgcacgatatgtgcgaagatttcaagatccagcatcataactccaccccttatcgaccaaagatgaatgggtctatataagctttcaatcagaatattaagaagattgttcagaagataacggtgtcatacaaagattggcatgagatgatgcctttcaccttgcacggatatagaacctcggtgcgaacttctac

SEQ ID NO: 38332 - DNA, 400 bp, Glycine max
  unsure (1)..(400): unsure at all n locations
caagctcccaccgaagctcccgcatctgctgctntgattttgaggccaagtttatcttgattctgtccctccactgcggctccacaaccccatttcccaaagtaaggtctcgggagctaggaactgcctcctgctgatggatggggctagaaggcccatcatcctgcagctgaacattgaggttagaaggttcatctggctgccggctgcacgagtcatcagaaaccagcactaccagtggctgaactgtattcccatccaaacttgaattcacccgtggccgaggcaaattgccatcctccaatctcgaattcacttctggctgaggggactttctaccccccaattttgaactcacttgcggctgagctgtattcgcgtcctctgatcttgaactcac

SEQ ID NO: 38333 - DNA, 319 bp, Glycine max
  unsure (1)..(319): unsure at all n locations
tctgataggatttccaagtggtgaagagaacgagagagattatagcctgctttttgaatagacttcgtgtgattcctttttctctctccatgaggaatatttagcaaaacccaatggtgatgggatgcataattgaattgcaaaccangtgtctaaatntcacgatgaatctaacggttaatgagtctgtgatcgtaattttactagatagattttgagtctctacgggaaaaaagaaagctacgatacgaaggacatttatcttagctcgatattttttggcaatttccaacgatgagaatgcttgaaaatgagtttc

SEQ ID NO: 38334 - DNA, 384 bp, Glycine max
  unsure (1)..(384): unsure at all n locations
ntagtgcccttaatgttgaagcaatatttgacattcccataatgtattccatgacatctccttttcattgatacttcatggaaatcaagttctaaatgagagtacttgtttccgccttatcgctttttgcaaagcgcttctctatctcagcaagaaattctttgacactagttatatcatttgaaacagtgcccctaaagacctcaggaatgtcacgtttaatgatcataagactcatgcgatttgagtgatccaacttctcatgaagttttctctgttcagaggcattagaatccgtaggagaaaggggtttttcaatcttaacgcaaggtctaaatccatgcagccaagaacaatatacatgttctctttccggtccttaaa

SEQ ID NO: 38335 - DNA, 377 bp, Glycine max
  unsure (1)..(377): unsure at all n locations
tcggaagaaagtgatgaggtacaagccctaaaggcagagcttgaaagagcccgagtagtcgaagagaagttcaagtccatagccatcaaagtctgaaaagagtatgatgaactaagggacgtcaatatggccaccgctgaagccttggaatgagaaaccaagaaggcccgaaaggaagaacacgtgccagcaaagttttgaggggctttatagggcagcaatagcaaactcaagctccgaagaggtgaaaggaatcatcacaggtcaaaggcatgatcttgaaggacgagctaaaggcttaccttangtcgaaaagaaatttgtcccaacagttaagcgagactgaagggaatatgtgggccgtcatcgatgagtgc

SEQ ID NO: 38336 - DNA, 379 bp, Glycine max
tctgtatgcttaactatgtatggcaaaactccattactgttgctcaagacatacaagtgagcttgtaacacatcttctacacttggagtgatcacctgcagtcctcttgaacccttaccaccgactgtgtcatcatgccgagactcatgaaacccaccaggtttagccttctctaagtattctgaacaaaattcaatggcttcttttgcaatgtacctttcatcaatagatgcttgtggacgatatagattctttgtatacccttttaaaatcttcatgtatcgctcaaccgggtacatacaccggagataaacaggaccacaacatttgatttctctgaccagatgcataatcaagtgaatcatgatgcaaacaaagt

SEQ ID NO: 38337 - DNA, 385 bp, Glycine max
  unsure (1)..(385): unsure at all n locations
tctcccncaattttctataaatagggggagaagtgaagtagaaaagggttcagccccttacgcacttctctctctttcgaatttgcttagaaaaattatttccgtgaagaaaatccaagccgaggcgcttccgtaacgtttgcgagagtgatttcgcgaaggttttcgaccgttcttcgacgttcttcattcggtcttcagtcttcaacgggtaaggacctcacaccaagcctttcaattcattctatgtgcccgtggtggtccacataagggtacatgtatttttattctcgtgcccatttactttttatacccccttttgatgcgcttaagccatatatgtaagtcatatctcgcttaacctacaaataaaatacattttcac

SEQ ID NO: 38338 - DNA, 367 bp, Glycine max
  unsure (1)..(367): unsure at all n locations
ntagcttctcaaggaagttttctcatagaagcttctcaaggaatttttctcaagaaagcttctcaaggaagctacctagtctataaatagaagcatgtgtaacacttgttgtaactttgatgaatgagagtcttgtgagacacaactcanagttcaacttctctccctcttttattccttcaatttcgtgctccccccttctctctttcttttcctccattaaagcatcctcttcaagcttcttatccaaggcaattcttagtggtgaagctccttcttcctcggcttattccctagtggatggtgcctcccctctcctcttctccttttcctttccgtgcatctccatggtgtaaaatcaccattg

SEQ ID NO: 38339 - DNA, 319 bp, Glycine max
  unsure (1)..(319): unsure at all n locations
aaaaaaattttgggaacatttatgttgtttgctgccttatattctatatcatcagtttgaaccctgatgacttgacttggtggacatatatggttattctgttttgaaccctgattgatctttagtttcagttgcaacatattaaattccttaagcagtaaattttgaatgttcaattcatgtgatggggggaagtcttatgtcgatctatttagcttcatcttttacaatgaatgcatggaggatntacttgcctgctccgtngttgcagattcattgagaatcacgtccgccctttcagtcgcacttgcagttgttt

SEQ ID NO: 38340 - DNA, 404 bp, Glycine max
  unsure (1)..(404): unsure at all n locations
gtgatctatccaccaccgccaccaccatcattntagttnttctcttattttaatattactagtattttgatttccagccgtgtatttggctatattattatgacatttgaacaatatagtatttctttatttgcatggtgtgtttgaaaaattatgaattatgttatatgactatgtgatttttctatatatttgatctagtcatgtttcttgcttcatgattggtttatattttttccatgattgttgtgtgaatgattagttgtatttgtatgtttcatacttgttacgcactttggctttttattggtgccaaagggggagagaaataggggttaaatcaaggtaatgaatntaatttcaagtgaagcatatattcaaaaacaaagggggagaatggaaat

SEQ ID NO: 38341 - DNA, 387 bp, Glycine max
  unsure (1)..(387): unsure at all n locations
agcagcacacaagtnaaacttgaagtattcatctgtttcaatgtctctattgctttgtatgatagatgtaggacacctaactatattacttgtgatatggtatgattaccaaagttcacctccaagcctatgctagagcatgtctttctgaattttcatttcatgtacttcatttttgtttctacttaaatcgaaactgtgattccaaggcttttctctataactttagtttactatttatttcctcttttgactcttccgctagaattatataaaaaaaaaacttcgtaccccattgcccagaggctcttcgctatgcgaaggtatgggggagggatgttgtacgcacccttaccctcgcatatgcaaagaggctgcttacggatt

SEQ ID NO: 38342 - DNA, 397 bp, Glycine max
  unsure (1)..(397): unsure at all n locations
cggttcgtggtactcacccgttgaagatcgaagatcgatgaagaacgaatgaagaacgtcgaagaactgttgaaacctttgcgagattcctcacggaaaacgttacggaaacgtttcggaagcgcctcggcttagattttcttcacggaaacaatttttccaagcaaattcgaaagagagagaagtgccaaaggggctgggatccttttcttcttcattttctcccctatttatagcaaaataggggagatgcttgccgcccagctcgcccaggcgagctcagctcgcccaggcgagcagggttgcttcctccagaagcaaccgccttctggaggaaccttctggagggcccaaatgggcctgggtgctatttgcacccncatttttactaagttca

SEQ ID NO: 38343 - DNA, 401 bp, Glycine max
cgcacatatctcctttgatgtttaagaaaattacacatgtctttcttgtatttttaatacctacacaaactccctaaatgtcgtctcaacatttggcagtaacaagtcatatacattaacaattttgattaaaaaatattaaaatatgtttttcttccttataaatatgaaaatgtttgaaattaatcattacaaaactttttgtctatatttcattctcgcaaaatttaaatgttatttttatgtttgagactaagttcaagttactaaaatttacgtgtatgttattatagaatgtgtcaattttttcaacttttttgcatcatttatatgtataaaccatgcagaaacattgtttttgcattatataattgatgtaaaaaagtaaaaaaaaaacatga

SEQ ID NO: 38344 - DNA, 454 bp, Glycine max
  unsure (1)..(454): unsure at all n locations
tgtcagggggtttgagcttgaancccggatttgtgaccttcgaatcangcgctttgagactgcctctctaatcctgattttagcctctggacttgacagcatgtgcaccgccttgttattgaaccaggcccctacgacacggggggagcttcgatcttctgacgactttctcgggcaagacgatgaggaaggagatacccatctctgggctcagctacatctcaaacatctgtacacacgtgatctaaccaaaccgaacatagtccggcatatcccatcattacctacacccgtagaagaatatgttcccgtcacggacgatatgggaaagattgttggcgctagaaaggagttaatagcattcgatggccttgacaattgcccatgctcggacatggccgatttattgctcgtggccctcaacatcatacctcccatgttgaatgaacagaat

SEQ ID NO: 38345 - DNA, 382 bp, Glycine max
taatcccttgataattgagggtaggagatttgccctggattcagctaaggactactttccttagcacacttatgttcaatatgttggatttgccctggagatttgccctgaattttctcctttgaaaactattttatttggaaatccttcccaagacaccattgaaccactgatggaggctttggaggaagattataaagatggaaataagataaacgaatcaaggcagtttattgaaggagtattggatcttgaaaagagaatcaatagacttgatacattgacttagaaattaaatataacaaattttgtcattgttgaacaaattattagcttataaaccaaatctttcaccattgttaatatgtgttacttatttctg

SEQ ID NO: 38346 - DNA, 353 bp, Glycine max
tattttctgaatttggcacgggctcctctactggtataggctcttaggctgtggaggcctcaccccctccagaagcacaaggctggattcctggccaagccacctgtgtcagaaactcatttgtgctcataatagatggcaggcctgagctcgggagactctgcatgataatggtctgccctctgtggaggctctacatcatagagtgaagcatctctagagtaagcacaaaatctgatgcaggagcagaagaagctgggagctgaattggaaattgagctggtatggaagcaagagtggctggagtagaagaagaaggtgttgctgaagtatggtctgggtaagtagatgaa

SEQ ID NO: 38347 - DNA, 322 bp, Glycine max
tggaattcgtgttaatggacgtgaagaatactttcgatgaccattgtctctctctctctctcactatctctcgcgagaggagaggaccgcagagaaccaaaatggaaagaaaagagtataaaggtggagaggaatggacataacgatacataccttaggaaacaaggggtgagagggcagtggtgggttacaaaagtgcagaggccgggagatgaaatttccaaaatagcaaccacaaagggatggagaagcatgcaaaaggtgctaatgcagggaaaaggattgatctaaaccaacatgaattagctatagagacaaaaaa

SEQ ID NO: 38348 - DNA, 374 bp, Glycine max
  unsure (1)..(374): unsure at all n locations
agnnggtatttctttgcacaaaattgaactatgtctttcaacctttatcattgatattttagtcgtgtaactgctgccatgccatcacttgcaaataagcctgatacttattgtatttctctttaattcttagccaaaaagaaaatccctttaattctcttcacccctacaactgcatcattgaaaacatgtagccatgtttggatgagaattttatgatccctcggggcgaactttgctctttgtctttttagatgcgtgttcttcatcaactttaatattatccaacctgaattagtacaaaatggcggaccttgagattctcatatgctatttcatgtttctctttactagattgccaaccattagtacta

SEQ ID NO: 38349 - DNA, 387 bp, Glycine max
tatccttatggcttgcctctggacttcactccccgtgccaccccagaagatttaagccaagcccctactttcgaggggcagctccaaccttatgacgactatcccgggcaagacgatgaggaaggagatacccatctcggtcctctgctccacctcaaagatccgtccccccatgaactaccccaaccgaacatagtccgccatatcccagcttcacctacacccgtaaaagaatctgttcccgtcacggaagataggggaaagattgaggcgcttgaagagaggttaagagcagtcgagggccttgacaattacccattctcggatttggcggatttatgtctcgtgcccaacatcgtcatccctcccaagttcaaagtaccggac

SEQ ID NO: 38350 - DNA, 352 bp, Glycine max
  unsure (1)..(352): unsure at all n locations
tcttacaaagcatacggctttctggatgtagatgatgatatctatacagatggatcttatatatctatatatctatagatagatatatagatatagatatatagatatagatcatacaatgaagtaccgcacgagtgggtatataggaatccaaatctgccgaatcactcatgttatgatcttctacatcctaggtcttcccgttccttcatctggcttatgttcttcatgtagcattcagactgaatgactctatgaaattacgtcgctacttccacatggtacgggtaacgtaggagacatctctanttttcccgggggaatccttagaattacacaagctagcttcaat

SEQ ID NO: 38351 - DNA, 372 bp, Glycine max
  unsure (1)..(372): unsure at all n locations
tgaatcttgaatcttgatcttgattcttgaagcttgatccttgaatcatgattcttgaattcaactttcctcttgaatcttgaagtgttcttcaactntcctcttgagtcttgaattgttcttgattctatcttgaacattttgaactcattctttgattgacctttgagctttttgtcaccacctttgtcataatcttttgttatcatctaaacatctttgaatcattctttattcaccatgaaactttgcttctacaatctccccctttttgatgatgacaacttctgaaatcaagaaacacacacacacattttcctagtcgatcactcacataaattctccccctttgtttttgaatntatgcttttc

SEQ ID NO: 38352 - DNA, 373 bp, Glycine max
  unsure (1)..(373): unsure at all n locations
gtgatcgtgttgagacaaaatcacatgtntgtcatcatcaaaaagggggagaatgtgaatgtattttgatgatgtcaaaagaagaatcaaacaaggctcattttgcttcaagattaatacaagattgtttcaacaaacaaagccttgattcaagatttcttcaagatcaagtcatgcctcacaatgaaaggtttcaagtcattcaaggcacatgtaatcgattaccaatggtttgaaagtgtgtaatcgattacacatcatatgtaattgattaccagagactctgaatgttgggaattcaaattttaaatgaagggtcacaactgttcaagaaaaacaactatgtaatcgattacactaattctgtaatcga

SEQ ID NO: 38353 - DNA, 396 bp, Glycine max
tgatagcaataatacaatcattatgcatatgcctagaaagggtacagtgataacaaggttgcaataactatttcttagatttcagttcaacatgattggaccaatcgacaaagcatgtagaaattgacagaaaattactatatatctattattttatctactttctatttatctacttttctactttctatatatccactttctatatataaattctatagatggttgaaattacatttaaaaccatttttcagttgtaatagttgtttatttttaggatattttagtctttcatcatacttctctttgtcctgcttttttaaaaaagtaaaaaaaaaattgaatttcaaatttcaaattcaattgatacacaaatctctcatgcattcctttttt

SEQ ID NO: 38354 - DNA, 387 bp, Glycine max
ggtctgggagactaaggtcaagtggtcgcgatatacgaagacgatgttccgagtacattagatttggtacgaccatgccctccagatttccagctgggaaattggcgagtggaggaacgccccggcatttacgcaacgagcataatgtaaacctttacggttttaaaagctctatagttgggcctaggctttagagtttttccttttgttaaggctttgtgtcttttgttgctgattttataatacaaggatctttcttcatttgttcctacgtctctacccattctcattcatttgcatgtttacttctttttctgaaatggcagatccgatgacgagtcccccgaaggtactaatacctgtgacccgcctatcgacttcgagcaa

SEQ ID NO: 38355 - DNA, 401 bp, Glycine max
agcttagtcttatacgttatctgaattggccttgtaaatattgtgtttaatgtttcagatgatagtcaaatagaagcatgatttaatacgacattaaagatgacatttaaaaacattatttaatattgtatctgagatctgttttgcagaaaaattctcctaggacctattgaatcttatggaaaacaaatgaagtcaagatatgaaattctttattcgtcatcaaaagaagagctctactgcacatacctgctctgacaaaaaggaagtaatttcctattgtaatgttcaactcgccagcgacaaagagtggactgtctacatgaagaaaggacgtgcctttaatgcatatttagacaaagaacatgtgaagaattctacccgttgtgagacaacgggca

SEQ ID NO: 38356 - DNA, 400 bp, Glycine max
  unsure (1)..(400): unsure at all n locations
tactcagctttactttgtttgctctgtttggggtttccaagcgttagagagaaggggaagagattgtagcctccatttcactgtcaacgtgcgagactaatttctctctgcaaaacaattatttcataaatcccaacggcagtgatgtgcgaaaaatgggttttgaaggtggtgtccaaatttcacaatggtcccacggttgacgagtccgggatcgtagttttactgagatagattttaccacggtggtatccaaacatgattgattcaaaaggtgaactatcaaatccattaattactatgtacaataaaagagtttcaggagtttgacaagtttcacaagataaactntgtaaaggcaaatatcataagaatgagagttgaattgtgattntcaaaa

SEQ ID NO: 38357 - DNA, 469 bp, Glycine max
  unsure (1)..(469): unsure at all n locations
tgtaggttcntttganacctagaatccaggaattgagacctgcagtcanggatttgtagacactaaagcaaacatgatctcttctgtagagagagggtacagcttatcccaatgcgttcaatatccaactcttggacttgcagtataacgctgaacgatgccatatcgacaaatcactgcgaaagtttgcgaccaaggggtactatatgaatttggcatctctctgtcgcgactcaagttatctacatcttcggctagtatatattatcatgtttctatgacatatttctaaaaatggttaaaccatagtattgaaccaaatctcaatactgaaagtagcttatattgaaggataattcaggctgtgcctattacataggatgcgtctgctttgaaccaaaacctacaaaaagtagctggccagacgacacattgccctgtccacactgtcttatggaatgaatatgcg

SEQ ID NO: 38358 - DNA, 372 bp, Glycine max
aacaaaaaattatttgttattagttttttgtaaaacaaaaaatatgacatatgttaataaaaaccatttcatacactctgcaaaaccatttcatacagtatttgtagtgtactctcaatggaaatacacttatgagataacctctaatatttttttatcagtgaaaaactctataaaaaaaggtaaaaccaaaagacagaaactccaaggaccttataagtccaatcagctgagcccactgagcatcaacagtactccattgatccccctcaataaccaaaaaaatatgaaatacggcatgtgagaatagggtcagagaggataacattagcacagaccatgatatcaaagatggttgacagacacgaaatc

SEQ ID NO: 38359 - DNA, 362 bp, Glycine max
  unsure (1)..(362): unsure at all n locations
tgtacaagattattgcaaaggtcttggcaaatatactaggaaggtcttgagcaaggtggtggatgatagacaattggcttttttgggtgaaaggaataatatatttgatgggatcttggttgcaaatgaggttgttcatgaagctaaggttgagaaggaacatgtttcattttcaaggctgatttcaagaaagcatgtgactcggtaagataggaatttctaacctatatgctacataggctaggagtttgtagtaaatggattagatggatgtggtgtttcctacaatcttcatctacctctatccttgtaaacgggatcccaatggaagaattntatgctaaaaaaggacttcgtcaaga

SEQ ID NO: 38360 - DNA, 376 bp, Glycine max
  unsure (1)..(376): unsure at all n locations
tctcgcanagcttacggttagatctgggacctattcatggcatatgtctccacagaggccattgcctccctcgcccaatattatgaccagttgttgaggtgcttcacctttggggacttccaactatcacccacggtggaagagtttgaagaaatcctgggatgccctctgggaggaaggaaaccatacctcttctcgggattctatccctctttagctagaatttctaagatagtccaaatctcgacgcaggaattagaccacagaaagcaagtcgaaaatggggtggttggagtaccaaggaaatgtttggaagcaaaagcaagagtcttggcaggtaaaggcgaatgggccccaatcatggacatcctcacac

SEQ ID NO: 38361 - DNA, 387 bp, Glycine max
taatggtaagaaaagagcaacacacacagtcatctaataagcatcaagtatatatatatatatatatatatatatatatatatatatatatatatataaaaactgtaagtataaaataaaagtgtgtgtttctatgtaagaaaaagaaaagctaagtgcggaaaggcaagtaatagagctagaataaaaagaaaaagattgatctatggatgaatgctctcctagaacctaagcttttgcatcctagaaaaaccatgaattgattgcagcccagcctcgttacaaacctagaaaagtcctttggattcagtttgtgtgttcttgactgtatggcaagagatgaagttcaaagattgagatttattttgtttcttgattcatggataa

SEQ ID NO: 38362 - DNA, 313 bp, Glycine max
  unsure (1)..(313): unsure at all n locations
cttcgagaaatcgnngntgttgttgttggctctgttagagtcaccagaggtagatttgtggcaggaggaatcacagganatgaggaacgatttgtggcggcgggatcagagcggtgagaggtggagcggcaagaagtcaatgacaacggagctcanaacaaagcgggcggtacaactcgattccaaaccctcattatgaggccatttaaattcaaatttgaaaagctcatcataagaggaagaggaagaggcctgnaagaaagatganattttttanagcctcatangtttggcgtgtgaaatgacaagctga

SEQ ID NO: 38363 - DNA, 386 bp, Glycine max
ctctctctaaacttcttatccaaggcactctcttggtggtgaaacttctccttccatggcttattctctagtagatgacgcctcatctcacctcttctcttttatcttctgctgcaactccatggtttaaaatcaccattgaaagaccaaattgaagctcaaagatccagcctccatagaagcttctcaagtaagcttccatcagaagtcctatgagagccacatcctgaaagctctctacgggaagaactttaaggaggcaaatgggaagaagaaagtttaatacaaccttctatgtgatatggctaaaatctggtcaaacatggaacccatccatagacaacatgaggtagtaattccacctcaatagacgcgatacgaatatg

SEQ ID NO: 38364 - DNA, 387 bp, Glycine max
  unsure (1)..(387): unsure at all n locations
tcactcatgtgtccaagtcnttgatgccacagggttgaattattgacaacctcagtaattgttatcatatcctcatctgcaattatgtaaagagatcattgcttctttccatgagccacaacgagattgccttttgttaccttccaagctccatctccaaaagcggtgtaatgccccccatcatccaactgccctatagatattagatttctctttaaggcaagaatatgtctgacattatgcaatgtccatagggatccactggaagtcttgatgtcaatatcacctcttccgacaatgtcaagagattttccatctacaaggtaaacttttccaaatcttctagaaatatagttagacaataaatcttacaggactatccaagct

SEQ ID NO: 38365 - DNA, 395 bp, Glycine max
gctgtgaaatgatctacacatacgactcttatatcaccccaaccaatttattaatcatgctattgtaaatctaacatttaacactgcatttgctaacacattcacatcttacataacgaactaagaaaaattatttcatgatgaatgaagaatcacctgaacttcttcattatggaaaagtctctgtatcatttccaatatatggtcagcatgtgaacacaatgttgaataaaattcagtttctgaactagatgttgcttcttcactttgaatactttcaatcaaagaccggaactcattaaattggctttcttcttcagcatgtgcttgatagaaagaaaactttccatctactgctggaaaaataaccttgtcctctgcaatactgcattcat

SEQ ID NO: 38366 - DNA, 375 bp, Glycine max
atccaatgcagctttctgacaagcctctgaacctgtctttaaggctgtaaccagatggggaatgctaagggttgctggttcagttgctctaagtcttgggaagttggtaaatagagaatttaaggctttcagatactcgtcattcacagttccagaagcccataaatctttctcaatagcggctataagaataaaaaccttgttagaaatataaagtggggaggggtagatgtgtttctgcttaaatgaatcaccattgttcatcaatcaattctgtgaaaaaactgcacctatatacatgtaaattacgctctgaagtgcaatctgtaattgtccaaatacattaattgaatacttaaaagcaataagtgtcta

SEQ ID NO: 38367 - DNA, 385 bp, Glycine max
  unsure (1)..(385): unsure at all n locations
tctcccctantttgctataaatagggggagaagtgtaaaagaaaagggttcagccccttaggcacttctctctctctcgaatttgctgaggaaaattatttccgtcaagaaaatccaagccgaggcgcttccgtaacgtttccgtaacgtttccgtgagtaattacgcgaagattctcgaccgttcttcaagatccatcgttcgttcttcgttttcttcagtctacaacgggtaagtacctcaaaccaagcttttcaattcgttcttatgtacccgtggtggtccacattttgttgcatgtanttntattcttgttttcgtctactttntatacccccttttgacgtgcttaagccatttatttaagtcatttctcgcttaatct

SEQ ID NO: 38368 - DNA, 380 bp, Glycine max
tgcaagcttaaccatggaacggtatgagataattaaagatattgggtcaggaaactttggtgtggcaaagctggtcaaggaaaaatggagtggtgaattatatgctatcaagttcattgagagaggcttcaaggttctattttcaaattccatgtatcttttcttttgtcatatcttaatcttgtcttgtgtacatatgttttttagattgtcctttgttaatggggttctattgggttttgcagattgatgaacacgtgcaaagagagattataaatcataggtccttgaagcatcccaatatcattagatttaaagaggtacggaattggagacgtttttggtttcaatgagtataaactcaaagtgtaattatttgc

SEQ ID NO: 38369 - DNA, 381 bp, Glycine max
  unsure (1)..(381): unsure at all n locations
tatcctatctcttanaaatacagggcatccttgttttatataggcagaggacaaaacagaaaaataaaagaatagacttccatatggatttaggtcatagcccaacagcagcaacctaattgggtcctttcattttatttaattcgtgtaaactgagctctaattaatattccatatataagcagaatgagagaatatagagtaaataacaattcctataagttaatttgaatcaatagctagcttcattattcattagttggtgtcctattaaatatatcaaaatctaagctctaattaagtatttaaccatacactgactcatgcattactgtgtgttgcatatggcagttaactctgagagtactagtaactagtaag

SEQ ID NO: 38370 - DNA, 368 bp, Glycine max
tgtgctattccaagttcattaatcatacctttaatccagattgcttccttcacaccttcagctagggccatgtattatgtttcagttgttgaaagagcaacaactgattgttgatttgctttccaactgattgatgtaccaaacaaagtaaacacatatcctgttaaggacttccttgtgtctacatttcttgcaaaatctgcatctgcatagcctgtgactactgcttcatgtgttgtcttcttgtactttaaaccagctttcaaagatccatttagataccttagtgtccacttcacagcttcccaatgtgcgctgccaggatctcccatgaatttgcttataatacttataacatgagccaaatc

SEQ ID NO: 38371 - DNA, 387 bp, Glycine max
  unsure (1)..(387): unsure at all n locations
ntaatttgtcccatttaacccaagggatctttctttgaccttcttcacacccttaaaaaaaatctttgaatgttaactaatcgctttcctacttttaaagtcagtattataaagaaaaggaagaacaaagacaaagaggatagcactgaatttatgagacgaattttaccagcaaaagatataaagaccttgtatttccaaagggtcaacttagaaaatttatctaaaactgattttcaagtagcttctaacctagggttttcacaaataggaactcctaaataaacaaaaagaatgaccaacaatttacaattcaaaagattagctgaccttttccactcaataccaataaccccaaagttgctttcgaaaaagttaattttcaag

SEQ ID NO: 38372 - DNA, 371 bp, Glycine max
tctagccaaatggacttaccttgaattaattcctttgatagcccttttgagccttgtttccctttccttgttttgaagctcactacaagccttaagtgaaaaaccatgatattaccatatccttaaggaattttggagctttggaattgttttgggaataagtgtggaggggtttttgtttcattggacaacttgttttgttggctatgcttcatgatgtattttgggccatacttgatgtacattgtatattggttaaatgttggacatgctgaatgaaatgttgtttctcaaaggctaaagagtaaaaaaaaaaaaaaaaaattcgaaaaaaagaaaaagaaaagcaataaagttgagtgaataagatc

SEQ ID NO: 38373 - DNA, 360 bp, Glycine max
ctcagctttttggagtagaaacatgggaccaactcattttatttcaaaaaaagaaatcatatctagtcaaggtctgagagaccatacaagtttcctaacgatttctaattatgtgggccattaagtctatcatatgctgacaatagccgagaagcccatgaatctcttcgggggcggagtaggtgtctgccatcgccttggccttggctaacaatcggggaagttcttgactcccgttcaaggtaagagcaaaccgatccatccacatggttgcctcttggtgtaaagagtcgatcacccttcctctagcctctttttccgcatatacttgggcatactcatccgcgattctatgctcgt

SEQ ID NO: 38374 - DNA, 402 bp, Glycine max
aggctaatcccgacccaacccgggcatagtcagtcagtgagaacctgtgacgtacctaaacaggcgagctcctagcagtcaaccaataaaagaacaaagtccacggagcaaggaggcttgtgtggtggctggccagctatttattttgggtgttatctgaaaatttgcctctggtaatcgattaccattcgtgggtaatcgattacagggtttaaaaatggagacaggatgttaagtagcttctggtaatcgattaccaattgtgtgtaatcgattacacaatatgatagggcactggtagtgcagttgatccgtgatcgcgttgtgatggagtgcctaaagggtgtttgggagaccctcgaaggcaatgagaggtgccgattccgtggcacaattcgactc

SEQ ID NO: 38375 - DNA, 404 bp, Glycine max
agcttctagccaaatggacttaccttgaattaattcctttgatagcccttttgagccttgtttccctttccttgttttgaagctcactacaagccttaagtgaaaaaccatgatattaccatatccttaaggaattttggagctttggaattgttttgggaataagtgtggggggtttttgtttcattggacaacttgttttgttggctatgcttcatgatgtattttgggtcatacttgatgtacattgtatattggttaaatgttggacatgctgaatgaaatgttgtttctcaaaggctaaaaaaaaaaaaaaatcggaaagaaaaaaaaaagcaataaagttgagtgaataagatcttatatggcacaagaatgatgaaactcttggttctactcttcat

SEQ ID NO: 38376 - DNA, 380 bp, Glycine max
  unsure (1)..(380): unsure at all n locations
aacagttctctaaccattccaatccattcaaatcatacaactgctcattcaaatcattctcacactcatttcataccaaacaatcaattgcatatcattntcaatcaattcactgttcaaacacactttttgtacaagcaaacaactcaaagtgccatggataagagcttggaggaagaaggagatgaatgaagggagagggagagaagagcacggaattttgtgctctaagagagctctgaaatctgaagtttaatttttaaatgatcaaagttgaaaaaatgcacacacatggcttctatgtatagcctaagtgtcacacaaaattggagggaagattgaatttctattcaaatttttcttgaaattgaaattgaatt

SEQ ID NO: 38377 - DNA, 400 bp, Glycine max
  unsure (1)..(400): unsure at all n locations
gagttgtaagagctaaaacgtggagtaattaattcttgaaacttgttgaagttagtaaaacttgatgattagccaagaattggacgtactttcagtaagggagacgaactagtataaatctagatgtcttttatgctttcgtttctcttatgctttaaactgaccaagggttccaattagattttgttttgaaaattctatcttctttgcaaaatctattttcatcttttgaaagtgtttttgcagaaatttgttatcttacaaagnttctattcatactataactttgttttttaaaaaaaaagacttttaaaattttaaaatcacaactcaatcttccttcttgtgaatattgtctgtacgttgaaaatttaaacttatagacaaaaaataaaaaatc

SEQ ID NO: 38378 - DNA, 396 bp, Glycine max
  unsure (1)..(396): unsure at all n locations
caagcttcgatccttntttctatgaagcaaggttttatggtcaagtctaattgtccaactgtctgtttggcagcatttttttgtgcctagcctggcatattcctgcaacccactgattgcttttaaccctctgcttattcacacatacctcttgttcatttaggttggccaattcttgttttatgctcccttatctgttataggcctgattcacaaatgttgcagttattctttttggtgcggtacattacagtttatagtcctctaattntgttctcatgagtcatgactcccctcccccctccttttttgcaacttgactgttattntcattaactcgtttagttttggtagttgtaaccactgcttttgagatagtttaaattttaaacattt

SEQ ID NO: 38379 - DNA, 380 bp, Glycine max
  unsure (1)..(380): unsure at all n locations
tgggaggattgatggngacccggtgttgagagatacgaggatatgggctacgtgggagtacgtgagcttagttggaggtgggcaacaggggatggtgggtttatgcgcgctttgtggatgtggaaaactttttgtgcaccatcgcccgaccgccacctagtaccacatgtgatgggtaccccataatcctacaagcttgagataaggaagtgtagaagggtgaaacttcctgcttttatttgttgaccacagagtggtacctggagatatgtcgcggaggtcaggagaccttggggacgtcaggtggggtgctattgcccaaaaccaagcttgaccaatcccgacccaaccgggcatagtcggtcagtgagaacctgtga

SEQ ID NO: 38380 - DNA, 375 bp, Glycine max
  unsure (1)..(375): unsure at all n locations
tcaacttttttgttttttattttttaaaacattttataccaacacaaattataacaccataacaatttaaaaaatataattttttaaaacatgattattgactgtgtaatgcttgggtgtgttcacagttcagctaaacatagaaagaaaattgaaagaactgaattttttgggaaaaagaaatttaaaaaaatgataaagaaagaagcagctaggattcaaaacttcaaatggaggtcttgctaataagctcctcacaaagtggtttaaaagctactcctaggagcctttggggagtacatagtttatgtgaattttcttaanaaaatcagagactttntataagtaactatgtgactntaaatttacacctcc

SEQ ID NO: 38381 - DNA, 383 bp, Glycine max
tctaccccactaccaaatggcagagagatcaatttacactctatctgaggatatttgttatatattatagaaatgtgtccttcaaaacacaatattatgagtttgcttgcctaataatcttccattagttaaacataaacagaagagtttgactgttccggtgaccatgcattctaaaactagtgggatacctgtgccattcacctgttgatttccatgcgtgttttaaaatgacttacttatatacaaataagttgatatatatatcaaatttatcaatgcaatccacaaccacaatttatactatatcaatttttaactagaagcatagtgttcatcacaattaaagtttatcatcccgttttcaagattatattttatga

SEQ ID NO: 38382 - DNA, 380 bp, Glycine max
  unsure (1)..(380): unsure at all n locations
tgtagttntacctttntggcctctattgcgttcatgggcaaggccttggtggccaagtaggcctatataagggatatccatcccctgngtgcagtccgagttgagtaggacttggtaacgttggtggtagggggtggtatgggtctcctagatgaatgtttggtgttgacctggtcttttattacctgctaggcgggctaaagcatctgctcggtcgttttgttctctattgatgtggaccagttccttttacttggaatgctccaagatttgtttgattaagtggtagtatttctgcatttgtgtttccctagcttggaatacctcattaacttgtttggtgactagcttggagtcacttctgcacctaaatttcttta

SEQ ID NO: 38383 - DNA, 383 bp, Glycine max
tttccattttccattttccatgggttaattgtgttttccgatgtatatcggtgtatgcatttttgttagggtatatgagttttcgatttttcgtgggttatttttgtctgtgaaccattttttatgatgcatgtctatcagtgaatacgtttttgttttattcttgagtttttgcaggacaacaaaacaaaagcttaggcctttgggcattttatcattatgttatcgtttcctaaacccagatttgttgtcttttggtcttcatttttgtttggcttggtttggtatgtttggttttttcacttctttatcggcgtatgtgttctggtatgagttttcgcacgccaacaagacataaggttggaccatcgttgatgttgcat

SEQ ID NO: 38384 - DNA, 370 bp, Glycine max
  unsure (1)..(370): unsure at all n locations
tttgaattatcaatatccaaacttgcttctacacccataattcttgcacctaattggaaatatggttttgagctcatatgttacgcaagtgattatgtagttggtgttgtcttgggacaaaaaaaagaagacaaaatttttcatgctatacattatgctagtaaagtccttaatgagcatcaagtgaattatgcaacaaccaaaaatgaattactagctataatctatgcattggaaaaatttagatcttatctcatttgctctaaagtggttgtttatacagattatgcaactattaagtatcttctatctaagcccgattccaaaccaaggcttattaggtggatacttatgttgtangaatttgatc

SEQ ID NO: 38385 - DNA, 360 bp, Glycine max
  unsure (1)..(360): unsure at all n locations
tcatcagatgctgcatttcggtatcagctcctcttattgaagaacgatatgcacttcttgcattgtaaatttgctttatcgtggtgtaactgtcggcattgtgttccttcaacgttagcaagatgtttttcggtttcaccatcgactntgtcatatcagcaataattttcttttcttccttagtcaatcgcccggcgtatggatgtccaactaaggacttcgccaattcatgattatgaatcccacagatcaacttcaccatccaaccttcccctccacgcactgggtttccacgaagcctgaagggacaaccacatctcctactctcggngcttttctaacgaattctttattctacac

SEQ ID NO: 38386 - DNA, 385 bp, Glycine max
  unsure (1)..(385): unsure at all n locations
tctataattaattaataccaaaaagtgtagtgatcattctattaagctctaaactntgtgaacttcacttgtgttaattgtaaatctttgagtgcaatgagtgggttttgcatttgtatgtctatcttataaagtgatagatagtgagcgaacctttacccttaaccaaatattttgtgtgttttatgaaaacctaaagatatgttgttgtaaagaatatttgggttgtttgtctcaaaagctaggtttaaagactacttagggccagaagtagtttgagaaataatagttataattttgtttgtataagttattgtgaaatttgatagtttattaataattgatatattcttagtggtagagataaaaataatataaaaaaact

SEQ ID NO: 38387 - DNA, 398 bp, Glycine max
agctcggatattcaacctgatgagggatcgagggtttagtaatttatgctacagcatagaacacaagagcacgattgattagagaaatatatttctatgcatcagcttgtttgttagaaagacccaacatatctacctactgctgtcattttatttaccttgcattttatagtttttagcataatagtttagtttaaattctgtctgaaattatcacttatacatgttatctcaacaatgcttcaattctgaacttaatttaggctaacattagttccctgtgttcgatactcaaattcattcgttttaatattaaatacttgatgatccggtgcgctttctggtaaacccccattgaaatttccttgagacataaatgcacaaaaagtaactgcaat

SEQ ID NO: 38388 - DNA, 402 bp, Glycine max
tataagaacaaaattgcctcaatcatttccaaatatgcatgtgaattaggacgcatcaacaagaatcaagccaaggctattgtgcaagcaatcaatggggcaaaacacaccaaatgattatgatgatggatggctcaaattctcacaaaggtaaaatcatcactttcaaattgagctttcaaaactatcatgacatgtagagaagaatcaaggatttcaagtcacaaaatgtcaagaacttttattttcaaaacaattacccatttcttgaacatatcctataattcaaagaaaaacatgcaaagtcgtacgtgcacacaaaattgacccaaaatattaaactaaaaatccgacgaaactatcaacattaacaaattaacacgactaacaaattaacaaaac

SEQ ID NO: 38389 - DNA, 402 bp, Glycine max
  unsure (1)..(402): unsure at all n locations
tgtaagttgtagcaaggganaataaaggaaagtgataacatcataattcattaggagttttgtgacctttgccaattcaataggggtcggattcattctgattctggttgtattgaactccctattcataaagcccttttagcccttttagtatatgaatttatttgcaatatttccagcagaaactaattttcggtaaagaaggccaaagatatgtagagttgatcctgcataaaattagaacataacaagcaattgaagcctcaaggttaggaagtaaaagcaaaatattaattctgatctagaacagaataaccaacatagcatgcatcatctttgtttagtatagcacatgtaataattttaagttttttttttgtcatgtaagagtaagaccacata

SEQ ID NO: 38390 - DNA, 390 bp, Glycine max
  unsure (1)..(390): unsure at all n locations
gagaagctttcttgagaagattcctagagaagctagagcttagctacacacacccctttaatagctaagctcatctcttccttgagatgataagatagagcttagctacacacacaccctataataggtaagctctcccccatgccaaaatacataaaaatacaaaaaagtccctactacaaagactactcaaaatgccttgaaatataagactaaaaccatatactactagaatgaccaaaatacaaggtccaaaagaaggaaaaacctattctaatatttacaaagaagagtggacccaatcttggcccatgggatcagaaatctaccttgaggttcatgagaaccctanggccttctntaacagctctagcctaatcctctttgagg

SEQ ID NO: 38391 - DNA, 386 bp, Glycine max
ctcttggagttttagcacttgaatccagacctctgtctgaatttaaaccaacttgatcaggagaagacagtgacaggtcattcacatcatgttcaaccaaaactccagattgttgttgctcctgataaatagaataaagcagaaagtaatttatcaatgaaaagagtaaatatttataaattacaaattataattaattacgccaacaaaaggtgaagaagagaaccgagaacttacaatcccagcagctgcattaatcttcattttagaatcaagaggttgttgcttgacattatgctgagaattaccatcaacagtacctttctgagagttcttttcatccaaaattgcagatttaattggctccaatacttgttcccctttat

SEQ ID NO: 38392 - DNA, 380 bp, Glycine max
tgttcacttctactcctctcttcattcttatttttttcatcattttctttttctttttcttggccattatttctttttctttttcctgattgctttcacttctcacatcatctttcttttcatcagtaccttttttttcagtagctttcttcttggatacaacactatcctcatcctccgcctccacaaacctcttaatccttgtcatcataactttacattcctccttgggattcttttctgtattcgccataaaactgttggatgacttgtcggctatctgcctggccagttgtctcacctggacctcaaggtttttcaatgctgactcagtgcttttattattggacattgttacctgcataaactgattcaaagtc

SEQ ID NO: 38393 - DNA, 385 bp, Glycine max
tgaactagcatgattctttatggttacctcaatgttatctgaatcatcgagttagctatcttgccaaaaactacttccatttgaagcctttactgattatactaaaattcctgcatattgcataagtatcatagttgtatttgaagcctttactgattttactgaaatttttgcatattgcataggtatcatagttgtattataggctttagtccatatgttatcaacaaattttttaatcaattttttttatatgttatatgttgaagacattgctgagtagatttcaggaatatcctcaattgaacactttgtcaaagatggcaacaacattcaaagaatttttactcaactcagtgatggacagtatgattcatttaactta

SEQ ID NO: 38394 - DNA, 376 bp, Glycine max
  unsure (1)..(376): unsure at all n locations
tggataagcatctgatcatcacaaaaatttggcttctacttttatggtagttgaattcattatgggaatgatgtctaaatggatttgagggataaagaggtttaacttatctaaaaagatgtaactgatttgattgctatagttattgatatggtttaatgtttggcttattgtttcctacatcaaaggggatatggaaatagttaatgcataagcaatgaaaacaaaaggtcgcaccaactaagtaaggcaaggttggagtgttatagatcagctgaagcttaggggcataacaatgttaagctaacattgtgagtctactttctacaaacttgcatangtgaaaatggaggcatatagttgtgttttcttcaca

SEQ ID NO: 38395 - DNA, 476 bp, Glycine max
  unsure (1)..(476): unsure at all n locations
tgacaatgtcncnnntttganagccctcgctaganacctcnccnntttgagacctttgcanttgcganccgtttgctatctcagcgacactatagnanacctcttcttgtgaaagcttaaggaaccgttttagacgccactttcggtgtgggaccacacatgtgagcccacttagaggtcaaagatgagtctatcacaatccgggctggaaagaacatgtgtagagattcctacagaaaccaattgaggcttattntgggaaggttagtatattgggaatgttcctttacaattatcaactccaaatttctggggttgaccgacccactgaagcctttatgccaatagggtgattaagataaggattcccacttttgtggtaattttgacccatgattttgaattcttaatcttgaatgaataagtgaaaatgtttgaggggttttctccccctgtgggattagcatataggataa

SEQ ID NO: 38396 - DNA, 350 bp, Glycine max
  unsure (1)..(350): unsure at all n locations
tagcgtgagtatgcaagaccatgtccactccaacttctataaaagggagtcaggccaaggatgtaagatgcaattggttttgatgttgtgatgatgatcatgatgaagtgttgcaattgatgcaactgcgcttttccagattataaatttcggacaatacttccagattacaagtcacagcatcacgatgatcactagaatatcacgcagggaattcctaattgagttatcacaggcttggccaagtgatttagaatanaagtgcttttcagaggtgttactctcttggaatcgactaccagtggccaaatacatcttataacagctataaaaatttgaatgcaaatttt

SEQ ID NO: 38397 - DNA, 398 bp, Glycine max
ttatcggccttgtatggtctgaaacaagctcccatagcttggaacaagagaatagacacctttctcttgcaaattggattcatgaaatgcactactgaatatggtgtgtatgttaaaggagaaagtctttcagatatcctcatagtgtgtttatatgtggatgatttactgataacaggaaaggattgcagtgctatctcgacattcaagcaagagatgaagtctaagttcgaaatgtcagatcttggagaattatcatattttctgggcatatagttcaagaggacaaaggctggaatttttatgcaccaaagcaaatacacaattgatgtcctaaagaggtttcagatgcttgactgcaactcagttttaactcttgttgaaactagtgctgtgct

SEQ ID NO: 38398 - DNA, 381 bp, Glycine max
  unsure (1)..(381): unsure at all n locations
agctcttgctacaacctttntctccccctttggcaacatcaaaaagccaaagaactcggaaatcaacacagttataacaatggagtagcaagatataagtatcagagtattaaatacaataagccaaactcataatcaataaaataatcaaaccagaattcaaataacataaaatgtcaacaaccacaaaatatccaagactgaaatttaaaaacacaagataaataagcaaaatacttagcataataatgtaaattctaagaaactaaaaaccaaaatacacggcttataaaagataaataagcagaatctaaaatctaagaagacggaggaggtggtggaagatcgaaactctgacgaatgtatccgacatcctcttca

SEQ ID NO: 38399 - DNA, 342 bp, Glycine max
cgcctcatagaggtccaagaaggataaggcggcctttgggactagttccgctcctgagtatgacagtcaccgctttaggagcgctgtacaccagtagcgcttcgaggccatcaagggatggtcgtttcgacgggagcgacgcgtccaactcagggacgacgagtatactgatttccaggaggagatagggcaccggcggtggacatcactggttacccccatggccaagttcgatccagaaatagtccttgagttttatgccaatgcttggccaacagaagagggcgtgcgtgacatgaggtcctgggtaaggggtcagtggatcccgtttgatgccgacgc

SEQ ID NO: 38400 - DNA, 252 bp, Glycine max
  unsure (1)..(252): unsure at all n locations
caagtggtatcagagtacaagagcttcaagtaggtgctccttaaaattccattaattntcagctttaccttctcctccattgttgtttcttcatttttttctccatgcatctcagatcaaggccgtacccgaatcaaataaacattaaaatgtagtaactatgaagtgatcctaggtcgtttcccaacgagcaatgataaaccaaatgttcataatagatagtaggaaatagtaacaaattggggagggggg

SEQ ID NO: 38401 - DNA, 373 bp, Glycine max
  unsure (1)..(373): unsure at all n locations
ctntttgttcgatgttgcctaaaaaatttacaatgcagttcggctaggtttcttcgtgcgaactgaaccgaagttgtgtttcggccgactggcatgttctcattttgtcggccaggaaaacattagcccacctcggcataaaaaacatgattcaccgatattgacaggaaaagaaaaatgctagccgacgtcggccaggaaagatgaccgaccgaggtctgaaaaagaagcatgaccggatgactccggtcgaacatttcctaacagatatcatccaagtattattcagggattgaatagaaaaaacaatagccgacatcggtagttaaatagccgtgactgatatttttcggccgacattgcgcaatttctt

SEQ ID NO: 38402 - DNA, 382 bp, Glycine max
atgctcagtcagagttgttcattcacattattcctgacaagaccaacaacacattgtctatcattgacagtggtattggcatgactaaggctggtaagattaaatattttgttagtctttgtgagattatcgccaactgtgcttgttagttagtctgttttctctaatgcttgtgcgtttgatgttccagatttggtgaataacctcggtactattgcaaggtctgggaccaaggaattcatggaagccctggctgctggtgctgacgtgagcatgattgggcagttcggtgttggtttctactcggcttatcttgtagctgataagggtattgttaccacaaagcacaatgatgatgaacagtatgtctgggagtcccatg

SEQ ID NO: 38403 - DNA, 382 bp, Glycine max
  unsure (1)..(382): unsure at all n locations
taatgtcaacgggcaatcagcatgtattaaactattgatttatttattaataaaggaagcaatatgtaatatgtgctctcaacaatgtgctttagaatgtaatggagttgagtaaaataaaagcactcatattttcaactttttcttttgcagaatcttgaaacagctgttccctttgacgtattggtgacacagaattcccaagagcacattgtagaaagacagaggtctcttgggtttgaagcaatgactcatgagtcatgacaccgntgntgtttttctttcttctttataaaatctctaggtcatatatatataggtgcgacattttaagatgcaagtgaagcaaaatttaacccctggctaggtacaagcaaaaaaa

SEQ ID NO: 38404 - DNA, 366 bp, Glycine max
taatgtgacatttgatttctatgcatgacaagtctccatgagggcatattttgaacatgaacgatagagtggcaagagcatcatccatttggttttcctctctaggaatgtgatgaaatgatatatcatcgaagagcttcatcaattccttgatgtaagcctaataaggtatcaacttatggtctctagtttctcattcacctttcaactgatgaattaccaacgttgaatccctatacactttgagcaacttaaccctaaagtcaattcctactctaaatcccaaggcgcatgcttcgtactctgccatattatttgtacaatcaaaacacaatctagtcatggaaggcaaacattgtttatttg

SEQ ID NO: 38405 - DNA, 379 bp, Glycine max
tcaggctgctcaattgctccaagttgcagcatgtaagggcaaaggtctgtgtgatggtcggcagaggagcataaaccacaaactcttgtgataggtacagatttctaattcaaggctagctgggttaccaggttaactaaggcatctagtttaccttcaagcttcttggtttcagctgctgaagatgaatccgtggctacttcatgcactcctctaatgactatagcatcatttctgccactaaactgttgggagttggaagccatcttctcaattaaatttctggctttagcaggggtcatgtctccaagggctctaccactggtagcatctatcatacttctgtccatgttactgagtccttcataaaaatattgga

SEQ ID NO: 38406 - DNA, 333 bp, Glycine max
tgttgatgcggccttatcttgagatacacccattctccctccttaatctttgaaggtaggtgacgattattggcatactttgtcatgtgattctgagctttgtttagatgaaacttcaactgattaagtggttcatctctttccataagatcataagtcactgcctcaactaggacttcccctggaatgaaccttgccaaagatggggtgttagaccataaactatttcaaatggggtacacctagcagctccctggtgacatgtattataccagtattctgacatgggataaactcagtccaatgattccacaaaacctaacaacaaaacat

SEQ ID NO: 38407 - DNA, 377 bp, Glycine max
  unsure (1)..(377): unsure at all n locations
tgcantttgctattgaagaaaaaaaatttaaatatgcaatgataaaataatgaaaacaaactcagcaaaatcatgttcggctgcaaaaagtaaaaacaaaaagaagttcaatccacatgtgttgaagtaaaggaagtacatcagattcatagaatatgttcacaaattcaagtgttgtttgtgatatttctgcacacaggtataaagcaacaaagagttgttaaattccatgcttcaatattcgattagatacaaaatagtgtacaaccagtagagtttatgtttgaactattctcacaatacgatttcaaagaaatggaatgagagaaaaacaaaacatagaacaaaatacaacatccaaatgaaaggaaatgaag

SEQ ID NO: 38408 - DNA, 371 bp, Glycine max
tatgttgtccgtagataattttgtaacgtcaattgtttaattagtgagataactgatttgtcggccaatacttactatcggaaatttatatggttgtagctattcttgttcggggtgttttgttgacattaaaagaaatgggtgatagacatcaacttcttctagtagacagcttatgatgaaaaacaattccttttgcttctggatattacgttaatagatacaaaacaaactataacgaataggaagtgatgacattgtttaccttgtccaacgtaaaaatatattcaagtttccatctgccatttcttatttcttattaatatgcacctggtagtttatttatttaaatggttatttgactttcgagc

SEQ ID NO: 38409 - DNA, 421 bp, Glycine max
  unsure (1)..(421): unsure at all n locations
gcataagatagttgtccctcacggcanaggtcatgtgtgggacaatgttgatgacataataccacactaatctggcgatatcgagcatgatctctgattgattgccagaaaagagatactaatgcatccaatgcagtcattatgaccaataccttccaactttaactacgatgaaggattatgacggtactgatatgcactccgataatggcaacacttcattttgctcactaacccttggataggagacgtcactggaataatgtgcacaaaccgccatagaatacaaggctcacaccccagggtgtgatcttattcatgagatggtcgtgcaaaagagcgaggatgcctctaaagtagacaggccacaaccataagatgattttgctactatattattaacacaatggctgtgaaaacc

SEQ ID NO: 38410 - DNA, 160 bp, Glycine max
tgttataacaactttgcctcactcttagccttatatacattaaaggttggatgagaatgaagaactcatgccaaagttatggcgcacgctacaaaatgggtgcagaagacaccacatgatgattatgaacatttgggggtaagttttaaggaggtaaaat

SEQ ID NO: 38411 - DNA, 475 bp, Glycine max
  unsure (1)..(475): unsure at all n locations
aagacagtcacactgctgtcttcttcaacanaataaaatagggaaatctactctaaagatacatctaataatacccataattataataattaggattaggtaaaataaaataaaaaacattattaggtgctcttgaactattatatttcgattagttttcacgtgatatataattaagagttattgattctttttttagtaacttaaaaaatttcttctgtaaaaaaataacttaaattttttaaatgtgtcatataaaaagattgattcatatcatgaatacgtgggtggataaagatcacctaataatattttctattcaagagtagtgagaaaatttaatttaagtgacctataacgtcttagttattaagtttgtacttaattatcccaccaaaaatgaatcttattttccanagtgagtattattcaacatatgaataagggtatatttgagtgaatattataaaaaagt

SEQ ID NO: 38412 - DNA, 294 bp, Glycine max
tgtgacactactcaagcctgactcttatgagaacttcatctggtcagattttttaaaaaggaacccttaccattgccatcaaatgcaccaactcagctaaggaacaaaaagcaaggttttacatcatgaggaggtgtgttgccatgttgggttggtggcacaagcatggggattcatgaaagaagtgcacagatcttgagcttagtttttattgaattatgaccttttattggcctactttgaatactataaattcgattgtaattacaagttgactaacgtgagttataagat

SEQ ID NO: 38413 - DNA, 346 bp, Glycine max
  unsure (1)..(346): unsure at all n locations
ctaaagaaacttttctaacttaaaaacttttcttcacacaaaccttgatgatgaatgctttattttggaagccaaacttttctagtttattttgatgaagccaaagactcaagtcaagaatcaagagtcaaacatgtttcaagaattaaagagtcggtcaatcaagaaccaaaattcaattgatgattcaagagaagactcaagatatgcaagaacttctagaggagcatcaagataagtataaacaaaattcaaaagaaaagatggaatagcacaatttggtcaaaagaattattcaaagaagaatcctttactagaggtnttactctgtggatttcgatacccg

SEQ ID NO: 38414 - DNA, 277 bp, Glycine max
atactccaccttttaaaatttaaattttaatttccgaaagctgttactttcaattctaacttctagcagtggaaaacatactgtgtgtaattgattacaacattttaaaaacaaattgatattttgtaaaagtgatccaaaaatcaatttggactctggtaatcgatgagattctttggtaatagactaccatagaaaaaatatcatattttagaaatttcaaaaaacttttgtaaaatatcctttacccaaacctatgcagcatgaaataaagaat

SEQ ID NO: 38415 - DNA, 419 bp, Glycine max
  unsure (1)..(419): unsure at all n locations
agcttaaacattcaaatntgagcgtctcgttatattacaggactcaatcagacatccgagtaaaaagttattgttctttgaattggctcagaggttcaacattcaattntgagcgtctcgatatattacgggactcaatcagacatccgagtaaaaagttattgtcgtttgaattggctcagagcttcaacattcnaattcgagcgtctcaatatattacgggactcaatcagacatccgagtaaaaagttattgtcgtttgaattggctcagaggttcaacattcaatttcgagcgtctcgatatattacgggactgaaccagacatccgagntaaaagttattgtcgtttgaattggctcacagcttcaacattcaatttcgagccgctcgatatattttcggactcaatcagacat

SEQ ID NO: 38416 - DNA, 295 bp, Glycine max
acactatgcctactcaagctctaagcctattcatacgacaataactttctattcggatgcctgactgggtcccgtaatataacgaaacgctcgaaattgaatgttcaagcttatgagccaattctaacgacaataactttttactcggatgtccgattgagtctattattatatcgacacgctcgaaattgaatgttgaagctctaagcctattcaaaccactataacgttttactcggatgtccgatttcatgacaaaatatatcgggatgctcgaaattgaatgttgaacctc

SEQ ID NO: 38417 - DNA, 502 bp, Glycine max
  unsure (1)..(502): unsure at all n locations
gatcctcttagtcacctgcggcatgcaagcttanggaaattactgaggaggccaaaagttntgcaattgngaacagggctcttgctgcactatntgtacatacaccagcgggtgagctgcagcgtcaaattagatcctggcttgcagagagttntgagtttctatctttaacgggagaagatgcatcaggggggtcaactggtcagttggaacttctttcaactgcaattatggatggttggatggcgggacttggtgctgctcttcctccccacactgatgcccttggccagctattatttgaatattcaaaacgtgtctatacttctcaattacaacacttgaaggtatgcctctagttagttctgtgttgcatgacttataaatgcatacctcacaagttctcgatggaagccttgtttactttaggactttgttgagagatgacactcatacatttcattgcattcaaatattacaatagtctaaacataataccgag

SEQ ID NO: 38418 - DNA, 280 bp, Glycine max
ttgagggtgcgcagcccaccatcttttcatagtagagtgccgataatgtgtctaccatcacgattatcggctccctttccattattgggggtaccacctgggccgccagatccctccaccttttgggcgtgttctttgaaagatacgtccccctttttgcacatgttctgtagttgcatcctatccggaaccatatcaaaattgtactgatactgcctaacaaaggcaaccattaggtccttccaagaatggactcgggaaggttccaagttagtgtacc

SEQ ID NO: 38419 - DNA, 451 bp, Glycine max
  unsure (1)..(451): unsure at all n locations
agcttgagantgaacaactgatagctctcgatatattagaaggtctaccttttgacacgaagtcagattcacgcacataatatatcgagacgctcgaaattaaataacggaagctgtcgagaaattcaaatgctcattacttttcactcggaggtccgagtcaggcgcataatatatcgagacgctcgaaattgaacaacggaagctctcgagaaattcaaatggtcataacttttgacacggaggtcagcttcacgcgcataatatattgagacgctcgatattgaacaacagaagctctcgagaaattcaaatggtcataacttttgacccgaaagtcagattcaggcgcataatatatcgagacgcttgaattgagcaacggaagctctcgagaaattcatatagccataacttttcactcggatgtcagagtcaagcgcataatata

SEQ ID NO: 38420 - DNA, 271 bp, Glycine max
tttgagaaattcaaatggtcatttcttttcactcgaaggtctgatcaggcgcatcagatatagagacgctcgaaattgatcaacggaagctctcgagatattcaaatggtcataacttttagctcggaggtcggatttaggcacataatatatcgagacgcccgaaattgaacaacagaagctcttgagaaattcaaatggtcattacttttcactcggaggtccgattcaggcgcatcacctatagagacgctcaaaattgaacaacgaa

SEQ ID NO: 38421 - DNA, 372 bp, Glycine max
  unsure (1)..(372): unsure at all n locations
agcttanatcacttanacaactattcaatattgccttaccctanaaaagaaataaatcagtaaaaacacctctctaaatataaatactcaggtaacaaggttcattctataatgattgagggagggggattgtgctatttgcacttgatataaggctataagacccatatgaaccctaaaattacaaacccatggcggaatgtcaagattggattgatacatatatagagttggggaagggggtcttcactctgaaagttgccaaagacaaaacagaatgtttaaacatacatgacgtgatagaatagtacgaacaaatcgaacagcgccaacaacgaggtatttctctcttctccgtgtcagtaacaaaat

SEQ ID NO: 38422 - DNA, 273 bp, Glycine max
tagataaataaatagattgccataacttaacaataacatggctgtatatccatgtggcataagtgaccattcaagaaagtatggagccacatgaaaagtgctctcaatgcactcaaatcataaccaaccaaaaatacttattaccattttcattatttggattattaactcaaataattattataaattaatactattaaataaaatactcatatagtaattataaaaatatctagatagttgataaaaaaaaaataacaatacatatgtagg

SEQ ID NO: 38423 - DNA, 452 bp, Glycine max
agcttggggagaatggtttctgatattcgatctttagagaaatacccacaagaaaaataatttagcaaggcttcaacaacaccactaccgataaattcaaaagtagatacactatctcctttgccaagttcctttagcatgtcagatatcaccccaatcaaatactcttctgtgttactagaattatcatccagaccaaatccagaagctttaacttttccctttgccttgcttctttggtcatcaacaccagtgatcaacttcgtgcatagatttttcagatgcaaaagatcatcactaacacccacttcaacagacccaggatcagaaggaaagtacttgtctttaaaagctctagcaactgagctaacagatgcacggatactagaattagttgttggagttctacagaactggtggaaaccaacattactggactggactcttaatat

SEQ ID NO: 38424 - DNA, 272 bp, Glycine max
tcgtcctcaaaaagaagggtcttaagcaggctgccacccacggcactcgcgcaggagttggcggctattcttatctactccagccactttggtgggctggcatgcttacaagtaactaactaactcactcgctctctctgttagactcttactatgctttctcactaacaccaactctttctaattcctcacagtgcttattggggaggttgcaaattttgtcgcttatatatatgctcctgcacttctcgttactccccttggtgcactaa

SEQ ID NO: 38425 - DNA, 420 bp, Glycine max
  unsure (1)..(420): unsure at all n locations
agctnttgcaagctggaatcatttatcctatctccgacagccaatgggtgagtcccatccaggtagtcccgaagaanaccggcctcaccgtgataaaaaatgagaaggatgagcttattcctactcgagtgcagaacagttggagagtatgcattgactataggaggctgaactatgttaccaaaaaggaccattttccactgccattcattgaccagatgcttgaacgcctggcaggtaaatctcactactgtttccttgatggtttttctggttatatgcaaatcactattgctcctgaggatcagganaagaccacattcacctgccccttcggcacttttgcttataggaggatgcctttcggcctgtgcaatagccctggtaccttcctgcggtgcatgattagtatttttagtg

SEQ ID NO: 38426 - DNA, 272 bp, Glycine max
tgtgaaagaatggaaaagtttgatagcagttcattgtaagctttttaagagatttaggatcattaagagttacctcatcctcttgatttgatttagattcttcagagactatctgccatcagacataggttggcttcttcttcattagatgaggtgtcatctagatctttacaagggctcatgagacctttcttttccttggtcttatagtatttcttcttgtcttgagacttgtcttgttctgggcattcaaatttgaagtgtccaagttt

SEQ ID NO: 38427 - DNA, 469 bp, Glycine max
  unsure (1)..(469): unsure at all n locations
agctagcttggtgggcttctatggaggctggtatcttgagcttcaatgagttcctttaatggtgattntccaccatggagatgcagcggaagacaaaggagaagaggtgagaggaggcgccatccactanggaataagccatggaagaaggagcttcaccaccaagatgagccttggataagaagcttggaaggatgcttcaatggaggaaaagaaagagggagagaaagagagaggggggagcacgaaattgaaggaagaaaaagggagagaagttgaactntgtgttgggtctcacaagactctcattcatcaaagttacaacaagtgttacacatgcttctatttatagactangtagcttccttgagaagctntcttgagaaaacttccttgagaaagctctttgagaaaacttccttgagaagctagagcttagctacacacacccctctcataactaagctca

SEQ ID NO: 38428 - DNA, 281 bp, Glycine max
tttccaaagtggtcttctacattacatttaagctcgatccattgtcgataagtacctttgtgacaacgtggtccatacatctcaccgacacatgtagagccttgttgtgtcctctcccctcaacgagaatctattcttctgcaaacgcgatataattgttggtggttatatgattaacgataccttcgaaaccctccactgagatatcatgtgctacatgggcatcgttaaggaccttcatcaacagcgcacgatgaggctcggagtttatgagtagttca

SEQ ID NO: 38429 - DNA, 436 bp, Glycine max
  unsure (1)..(436): unsure at all n locations
agcttgtcacaacaatactcactaactgttttgttaccgaaaaatattgctgagaatacctcatcaccacaatttggatacaaatgcgatccacaattggttaaatacttctcattcgatgacaatggccctggtgcatttgatggttccggagcatcttgtgaaagcccgattttgaccatcaatgtggaactaatcatgaaacatangaacatttgagaaatgttgctgaatgtagccatagtttgatgatgatcaaaggtcttattgttggtaatgactaataagctttgatggctttgaaatggttggtatgaagctattattatagttcaaaagtagattatacgtctaaatgtgaaaccgccggtcttaattgatgttaatgaagaaataaagacgtaagttaattaattaatgtctacaanactaaaaa

SEQ ID NO: 38430 - DNA, 268 bp, Glycine max
tataataaataataatttataattaaatgataatggaaaattattttattatttttctctaaataaaatgtcaactgaaaacatataccagtacaataaaaacttcaaaaaactagaaacgtctagtgacaaacaaagtccacaccacgtggagattcgagtcttaaacttatgtaccttttgttatattattacaagagtaatattatactacaaaccatcctcaaacgggataatattattaaaaaataaaaatataattcttgtt

SEQ ID NO: 38431 - DNA, 379 bp, Glycine max
  unsure (1)..(379): unsure at all n locations
agctctgtgttagagctagaggtgacagtgatcaatatttataactttggtgaaagtgattggaacttggttgattaccaagaattgaacattgtcttagtgacagaaacaaaccaatataaatctctttgtgtagaaagttatctgttggctaatgctaagtcgtgattttttctttagataactacanttttactctgctataaaaacattggcatgattatgcttgtgcgaaagtctatatttaaacctactatcagacacaactattgtccaatattttacaaaaaagaaagtatgatcacaattccacccccttgtgatttntgtctgtacaaataaatatatatatgtaacaacttattnttctctctcactc

SEQ ID NO: 38432 - DNA, 267 bp, Glycine max
ttctagcttttcattggtgtattttgatctccttttggtgctctaaattgtgggaatatgctcaaatatgtggggcaattttggtttgttttcttgcttgattgggttgaattgggggtttgtatgggatggccctaagcctataatgcattttgaagcaatgggacatgccacattgtccccgttctcttgctattaatgcctaaacgcgcgcccaccaagtgttcggtgaaatgcctcaatggcattagcgcatggttttcgttg

SEQ ID NO: 38433 - DNA, 467 bp, Glycine max
  unsure (1)..(467): unsure at all n locations
agcttggcacaaagttctatgaatccaacttcctccatttcaaaacagacaatggccaaccattctacatctcttattaatggcattcccatcaacgaggcatctaaccttgggtggcagcaggctcaagttatggcaaaacccatcaattgattcaaaaattccaattaaggaaggataaaccattttcattcttgaaattccacttaaaatgcctccatcccatgcagttatagatcaaaaagatgaatgccatactccttaacagagacaccttatacatttgatacacatgtgcagaaaggagtatgggatagaaaaggaattatttaanggaaaattaaaataagaaagtgagcaacaacttttggtacaaatgtgcagaaactgaaaagtcatcacaattaacagcagacactattgaatntcatagatgacatcatgacaaaataaaagaatttgaacat

SEQ ID NO: 38434 - DNA, 278 bp, Glycine max
tagaatgggattgtagagggtgtaatttctcaccacaacgaaagcaaaggctttttttcactcaatgaactcagggtaaaagaggtgatgaaaccctttttcatcttttctgttgagactctctaatgttgggacaccagtcacaacacaaagcacaaacaaacgcgcttatgaagcaaataaataaatatcaatagatgcgtgtagttgtttaatgacttaccaatacgacttgacaagatgcgctttccatggccaaacggcgctagctcagtatg

SEQ ID NO: 38435 - DNA, 458 bp, Glycine max
  unsure (1)..(458): unsure at all n locations
agcttcatgatgaatgaagagtgattcaaagatgttntgatgataacaaagatgataacaaaagatgatgacaaaggtgatgacaaaaagctcanaggtcaatcaaagaatgagttcaagatattcaagataaaatcaagaacacatcaagattcaagaggaaagttaatttcaagaatcaagattcaagagatcaagattcaagactcatgactcaagaatcaagagaaggcttaatcaagataagtctganaaggtttatcaaaaattgagtggcacatggatttttctcanaacatgtttacgaaagaagttttactctctggttatcgattaccagagtggtgtaatcgattatcagtagcaaaatggatttgataaagttctcatatgagattacaacgtttcaattgatttcaaaaagctgtnatcgactacaatattttggtaatcgatta

SEQ ID NO: 38436 - DNA, 294 bp, Glycine max
tgtgacacactccagctctcttttggaccttgaacaagcaatcaactcctttttcagaaccatgctatgtgctcgcgactggtccctttcttcccttcgcaacttgagttcattattgctaccccatagagctccgcgaaatttgttccggccatactcttccttgcgagccctcttggtctcttgttcaagggctcttgcggtaattgcattctcttcccgtaacccggcgcactccttccgaacgtgtgtagcagccaacttgaacttctccttggcgagttttgcctttcc

SEQ ID NO: 38437 - DNA, 384 bp, Glycine max
  unsure (1)..(384): unsure at all n locations
agcttcttagtttcggattatgcaactgagtttgtagctacctcatgcactcctctaatgactataacatcatttctggcgctaaactgctgggagttggaaaccatcttctcaattaaatttctggcttcagcaggagtcatgtctccaagggctccaccactggaagcatctatcatacttctctccatattattgagtccttcataaaaatattggagaagctactccgaaatctaatggtgagggcaactggcacatagttnttttaaatctctcccagtattcatacaggctctctccactgagttgtctaatacctgagatatcctttctgatggctgtggtcctagaagcagggaaaattttttctaagaatagtct

SEQ ID NO: 38438 - DNA, 279 bp, Glycine max
tgttacaaccaatatttgtccgaccaagccactgctagctctaacacataagaaaatttgttggttagattgcacaatgactaacaccatattgtcttacaaacgaataagcaaattaaatgcatagtctcttttctcaagatgaataaagtgttttgagagcttttctaaactttacaagaatatacacagagagatttttacacagaatgaaataatgagtgcttcaaatcatgctacatatcttcaaagcttctggtatatataggccttttttaa

SEQ ID NO: 38439 - DNA, 433 bp, Glycine max
  unsure (1)..(433): unsure at all n locations
agcttcacagcggagaggagataacacctgcacttttgaaggcaattaaagattccagaattgccatcactgtgctctctgaagactntgcttcttcctcattntgcttagatgaacttacatccattgttcactgcgcccagtataatgggatgatgattataccagtgttttataaggtgtatccttctgatgtcagacaccagaagggtacttatggagaagcattggctaagcataagataagatttccagaanagttccagaattgggagatggctctgcgtcaagttgctgacttgtctggctntcatttcanatacaggtacccaatgataccaatctttttatgttttaatttttattggaattaattaagttactcgtctcacaanttaatgttcaaatattaataacagagatgaatatgagt

SEQ ID NO: 38440 - DNA, 279 bp, Glycine max
ttgtttttatacattcagtgtcatattaaaatatttttatatttgtcaaaaggaatgcttgcaatatattctgttttgtaaagaagtaaggaaatttattaaattgtgagtgaaccaaacatttcgtaaaattcacgttaattatatctaatattaaaaaataagttagaaatatattaatatttttcttgtcaaagtatagtagatcttctcggtgctagtgattttgattaatataatttaacaatctatccaaaatatgaatatgtctatatatta

SEQ ID NO: 38441 - DNA, 428 bp, Glycine max
  unsure (1)..(428): unsure at all n locations
cacgcagctgcagcttaaaggaagcggaatggaggaagacaatgagagagatagagagaaagtggcatggaaaattaaaggaagaaagggagagaagttgaactttgaaatgtgtctcacaagtttctcattcatcaaagttacaacaagtgttacacatgcttatgtttatagcctangtagctgaagcttccttgggaagcaagagttacaccccttcaatagctaagctcatcccatgccaaaatacatgaaggaagaaagcttccttgagaatcatcattgtgaagcaagtgttacacccttccaatagctaagctcacccccatgagaacacacatccctccgatagctaagctcaccccccatatacatgaaaatacaagagagtccctactacaaagactattcaaaatgccttgaaatat

SEQ ID NO: 38442 - DNA, 282 bp, Glycine max
tctggtgggacatcttgacttgctttccaatttgacatgcaccacagattctgccttcttctattttcagattaggaatgcctctaacagcacctttgtcaatgattttcttcatacctcttaagtgcagatgtccaaatctttgatgccatattttgacttcatcttctttggagaatagacatgtggaggaggaactggtttcttgaggcgtccataggtagcaattgtcctttgatctgctgcccttcattagaacttcactcttctcatttgtcacca

SEQ ID NO: 38443 - DNA, 457 bp, Glycine max
  unsure (1)..(457): unsure at all n locations
agcttagcctaagtctacaattntcanaaccgaagagagtcggagcttagctcagcatggcgcgcttagctcagcctcatcagaatgacactcaggcttagcgcatagggcgcgcttagcctaactacaaaaacttagaagacagtgagagagttgagcttagtgcagcagggcgcttagctcaacacataacaagggcttagcacagcaactgcgcttagccttattcaaaggaaaacttacagaagcaaagtggcgcttagcctgacaggtcaggcttagcgctgaacaaaaattctcanaatcttaatgtctgaacactagtcccgcttagcgaacagacgcgcttagcaggctcatcacttacattcatcagtagggatgaacgtgcttagcgcgacatggtccacttagtgcattcatcntgaaatcnncaaatttaacagttgtgatgaac

SEQ ID NO: 38444 - DNA, 272 bp, Glycine max
tatggtaaaatctgggacctagccatggcaaaagtctccacagaggccattgcctccctcgcccagtattatgaccagtcgttgaggtgtttcacttttggggacttccagctatcacccatggtggaagaatttgaagagatcctaagatgccctctttagctagaatttctaacatactccaaatctcgacgcaggaattagaccacagaaagcaagtcgaaaatggggtggttggagtatcgagaagatgtttggaggcaaaggcaaga

SEQ ID NO: 38445 - DNA, 413 bp, Glycine max
  unsure (1)..(413): unsure at all n locations
agcttatgcacggaanaagtaattatgaaattgagatgcccgaagaaacaccatttcctagttaaccatgcattaggtaccatgttcaattattttgtattttaagtgaaacgggtttatgatcccaacatggttggctcgtggtgcctaacacatgaaactaagaatgtagtgtgaagtttcacgcttcccccttttttgtttttgttttgtagaggaaaacgcanggatgagcaaacatganaacaaatggtatgcaattgtgcagatcaaaaagcttgttgaacgcatatgcatgatgatgccatgactcatgcaaaatgtgaggctggaatatgataacggacaaatgcaggatatgtccattatgatgttatgaagagatgcttatgcgatgcatgacatgaatgcat

SEQ ID NO: 38446 - DNA, 270 bp, Glycine max
tgtagggttcaccccaaattccgttgtcatatgctaaacttgatcccatatctacttgataattcaatggtagccataaccctagccaaggttcatcaacctccatttctccgagaatacgactcgaacgcaacgtgtgcttgtcacggagaagccccggggcgttccattgagcattgtagggctctgaagtgtagggtgcgaggtctaattgatgctggctgaaatttgaggagaatttcgtgtaaatcctgacattgacaagagatg

SEQ ID NO: 38447 - DNA, 190 bp, Glycine max
gctcgtcgccctcttactcgcgtgagtcaatggcccagctccgcgcgtcgcatgcattgctgttaactccgtctccacagctagctgcctcggaccgatgtgcggtaagtttaatttagttgtttgttgtgcgagctccctcatatagttctttcatacatgcctgatgcttatcatattatgaatttgt

SEQ ID NO: 38448 - DNA, 272 bp, Glycine max
ttgacagtttcttcatgagtgatatagtgggccaaagccaatttgttctccaaaagtcaaaatcgagaaccgaaacaaagcaacagagaacgaattgtgacgaacaaggagaagttaacgatgaggtgcgagatcttgtcgaccttgggtctgaagacaaagatttgagagttcgcattggagagcgagagtctcatatcgcatgacgacaactgaatgttgtcgatgttgttgttgtagaagaacttgtcctttggagcgaacatgattct

SEQ ID NO: 38449 - DNA, 383 bp, Glycine max
  unsure (1)..(383): unsure at all n locations
agcttgtgcgaatcanatcactcctgcatttcatctctaccatgcattctttctttctttacccactcctcacgtttggtttttttagggaaaaacaccataactaaacgcgccacaaggcatccctatcgcaccagatccaaatctagaacgatgggtgatcaagaggagacacaggaacagatgaaagccgacatgtcggctctgaaagaacaaatggcttccatgatggaggccatgttaggaatgaggcagctcatggagaaaaatgtggccaccgctgccgctgtcagttcggctgccgaagcaaacccaactctcttggaactgcgcaccatccttccgtaaacatagtaggacggggaagggacacattggggcat

SEQ ID NO: 38450 - DNA, 190 bp, Glycine max
tctagccaaatggacttaccttgaattaattcctttgatagcccctttgagcctatgttcccctttctttgttttgaagctcattacaagccttaagtgaaaaaccatgatatcaccttacccttaaggaattttggagctttggaattgttttgggaataagtgtgtgtgtgtgtgtgggggggggggg

SEQ ID NO: 38451 - DNA, 331 bp, Glycine max
catatcagaggcgtccatagaagcctttgtatcacttacccaatactacgaccagccctggagatgctttacattcggagacttccaattagtaccaaccattgaagaatttgaggaaattctacgatgtcctctcggaggaaggaaaccatatctttcctccgggtgtctcccctctttgagcagaattgcaactgtggtcaaagattcacccagagggtttggaccgcataaacagactcggaacggcatagcgggcctgccacagaagtacctataagacaatgcgaggggtatggccaatcaaggagactggggtcccgttatggat

SEQ ID NO: 38452 - DNA, 281 bp, Glycine max
tgcctcaaagaggtcctggaaagttaggcggccgaaggaactagttccgccccggagtacgacagtcaccgctttaggagcgttgtacaccagcagcgtttcgaagccatcaagggatggtcgtttctccgagagcgacgcgtccagctcagggaggacgagtatactgatttccaggaggaaatagggcgccggcggtgggcaccactggttactcccatggccaagtttgatccagaaatagtccttgagttttacgccaatgcttggccaacagagga

SEQ ID NO: 38453 - DNA, 392 bp, Glycine max
  unsure (1)..(392): unsure at all n locations
acaatataccttctcaacctcagcagcaaaatcaaccacagcagaacaattatgacctctctagcaacagatataaccctggatggaggaatcaccctaacctcagatggtccagccctcagcaacaacaacagcagcctgctccttccttccaaaatgctgctggcccaagcagaccatacattcctccaccaatccaacaacagcaacaaccccagaaacagacaacagttgaggcccctccacaaccttccctcgaagaacttgtgaggcatatgactatgcaaaacatgcagtntcagcaagagaccagagcctncattcagagcttaaccaatcaaatgggacaattggctacccaattgaatcaacaacagtcccagaattctgac

SEQ ID NO: 38454 - DNA, 267 bp, Glycine max
ttttgactcctgattctttggaacttgcttaactcttgtttctttggcatcatcaaaataatcttggaagtcattgcttccacaccaattactcctaattttcgaataacatgtagatatgtttttaatttttagtttataaatttttatctctaatttctattagaaaaagacgcgtgcaaaagttataaacaattctcaaacacccataaaaaagattcgcaagtgtaggttgaaattatagcctccctgaactcacaataaaaa

SEQ ID NO: 38455 - DNA, 450 bp, Glycine max
  unsure (1)..(450): unsure at all n locations
catgctgttctcttcccncacaacgcgaataacactgcaacggtgaattgttttctatctgatgaggaaccttagancgccagatagaacatcgcaacttgatccgtggcactccataangctacacttcgacaactcaggacttgactcagagctatatctgctttataacacttacaatcgaacttacaaaataggagcacaatgccaaccctaaaatagacgaaatggccgatgagaaaaacggcagatgagaataataccactgatatgtttacctatataggggccagtggatattgtatctatatagtggtacacctaatttttaagcattcacaacctggcacagcgcaaccggacggtcagaattcatttaaaccgatgttaacggatgatacgattccaacgatcagtggaaattaatatgatttttagattaggcgagag

SEQ ID NO: 38456 - DNA, 473 bp, Glycine max
  unsure (1)..(473): unsure at all n locations
agctttgctaatcttctgccgtggtgcanaagctgattgccatgtcctgtaaacagtcttgcattctgcatgatatantttgcaaattccaactctctctcagtgccaccattcccattaatacgacatgcttaaggttcgatgagatgcatttaggaacacatagtggattttgccaatctcttctccttccatcctaaaaggtggattcggctaatgagaaatgggctgaatattgctgttaacaacgcacatgaaatataattagtaaatattaaaaaggaaacatatttggcactttaaagtcaggaaacgtgatcaatgacaagattttgaagtttgggacacctgcagcctgttctcatcagtaaaatccacatagtgtaattcaatatgggataaattgtgaaattcaggaatccagctttcaatgccttcttcaccatcatccatctgcaacaacaaaatatcat

SEQ ID NO: 38457 - DNA, 278 bp, Glycine max
tttatcttaatattctcatcctgtttcaaatctattttattaagaagcattttgaacatgttggtaaattattaatgggtttgtatggtcaacaagtttttgttccatatcagtaattaatatcattaagagagtgttgggtaaacaacttaattaagcatttattaacgagcttattctgattaacaatgaaactgattggaatgagttaaaatgagcttattttaaagagcttgtggaagtcataagctattttcataagctcaattccatacaag

SEQ ID NO: 38458 - DNA, 446 bp, Glycine max
  unsure (1)..(446): unsure at all n locations
agcttaggctgcanacatttataatagaccctctcagcagcataaccaacaacagcaaaataattatgatctttcaagcaacagatacaatccaggttagagaaatcatccaaatctgggatgggcaagtcctccacaacaacaacagcctgttcctcctttccagaatgttgttggtccaagcaagccatatgttcctcctccaatacagcaacaacaacaacaacagtcacaacaaagacaacaagcaactaaggatcctccttaaccttccttagaagagttagtgagacaaatgaccatccagaatatgcnaatttagcaagagacaagagcctctattcagagtttgacaaatcagatggggcagatggctactcacttgaaccaagctcagtcccaaattctgacaaattgcttcaccactgtacataatcnaaaaatgt

SEQ ID NO: 38459 - DNA, 278 bp, Glycine max
tgtagacaacgctacggttgtagcattcaatgctgaccttttccaacctctgtcacccttgttgcccaaattcctttgatttctaagtacatcaaccaatacacgttccatctccaaatttcatgtaaaataactttttgtttcctcgttattttttcctaaaacttttcttttgcctgtcatcttttcattagatgactccattgaagttaatgtcacttatttaacctgcacataacaaatattagatgcaacctactttattcatttgactagtc

SEQ ID NO: 38460 - DNA, 396 bp, Glycine max
  unsure (1)..(396): unsure at all n locations
agcttctcgatatattatgcaccttaatcggacttccgtttgataagttatgaccatntgaatntctcgagagcttccattgttcaatttcgagcgtctcaatatattatgcgcctgaagcggagcttcgtgtgacaagttatgaccatttgaatatctcgagagattccgttgttcaatttcgagcgtctcaatatattatgcgcctgaatcggacatccgtgtgacaagttatgaccacttgaatntctcgagagcttctattgttcaatttcaagcttctcgatatattatgcgcctgaatcggacttccatgtgataaggtatgaccatntgaattctcgagagcttgcggtgttcaattcgagccgctccatatattatgcgcctgaatcg

SEQ ID NO: 38461 - DNA, 279 bp, Glycine max
tgccgccacggagttttccgactatgctcttgtgtggtggaacaagctacaaaaggagagagcaagaaatgaagagccaatggttgatacatggacagagatgaaaaagatcatgaggaagcggtatgtgccggctagttactcaagggacttgaaattcaagctccaaaaactaacccaaggcaacaagggggttgaggagtatttcaaggaaatggatgtgctcatgattcaagcaaatattgaagaagatgaggaggtaactatggctcgatttct

SEQ ID NO: 38462 - DNA, 421 bp, Glycine max
  unsure (1)..(421): unsure at all n locations
agctnggagttaatgaacttcggatttgtgatcttgaagctgaataatattatattgttagataatacaacactgtaaagtatatgaaatatcaaaataataaattggaggaatataaatgaactaaaatattataaaaataaattaatgaaacgattgaatttattgtttttttaaaccatgtattatgaatttaaatgctagataaaaaaaataatagggatatattttgtaattnttaaattattttaaaaattaaaaactagtttttttatgtaaacttgataataaaaaaaattgttctattctttntaagtggtatacctaatacaaatccttaaaaataatttggtataaataaacactatatcgtctaaacaaaaatatntcattctaataaataanaaataatatataaata

SEQ ID NO: 38463 - DNA, 280 bp, Glycine max
tttagaaggaaattgagacagaaaaagcttgtgagtgcttaattcgaaacatatttgaggcatatctagccattaatattgtaagtttgcaaaaatctacctcatccacatattttaatactttttcctttacattgctttgcttaagctgaacttggatccaaaggacaatcatattgcaaaaactacaaaaggggctctcccttgtttgagaccgattccaactttgattatgcaccactgttttaataacatcactgcaggttaaagttagactttt

SEQ ID NO: 38464 - DNA, 332 bp, Glycine max
cctcttagtcacctgcggcatgcaagcttggtgggagtaaccgacaccctataaaacgggcagaggcttgtgatcaaagccagaaaccccagtgctctgttggacttctctgggtccactgggtgtttaggaggcgtgatccctacaaattgatatatgacatctgagatcaactgggccatatgaacactcacttgggtcaagatggcatagaccagttagaactttggtagggggaggtcagaattatgatagatggggaggatgttgctgacaaacaatgtaatccaaatctgtgtcaaagtggtcatgctactgcgcatgatccacac

SEQ ID NO: 38465 - DNA, 286 bp, Glycine max
ttgatgcaacatatggagaggtttatgaaacaacgagatgatgcgctccatgagaggttggatcaaatggagaatagagatcataataaagaagaaaggaggagaagagggaatgatggtgttcctagacaaaaccgaattgatggtattaaactcaacattcccccctttaaaggaaagaatgatccggaggcctacttggagtgggagatgaaaatagagcatgttttctcatgcaacaaatatgagagggaccaaaagatgaagcttgccgccatggagtttt

SEQ ID NO: 38466 - DNA, 235 bp, Glycine max
  unsure (1)..(235): unsure at all n locations
agcttataataataaaatatttacttaaaataatccattagactaactcgcgggaagaaaaanaaatgaaagaaagaatacaatgcaagaacgaaaaacatgccaacaaaagaggaagaacaaaaaaaacaacaacatacctggaggctatggagggggagggaggccgatgaatggagaaaggaagatagtggagggggaggggcacaatgaataatataggtggggggggggg

SEQ ID NO: 38467 - DNA, 271 bp, Glycine max
ttgatagattgcaagtgtttaattagttaagaaaactatatgagggaagttaaacccaaatcatttttgtatggcaataatgctgcagtcctatgcttaatctccttacactaatctccttacacctaaacatgtacataaaaaaatgatttgatcaggtaaaaggaggaacattgagagcttctgattcattccctactggtcgacatctagttgagttatgggctccaaattcccaaaagcttccaaaaacatcagttttgaacagcat

SEQ ID NO: 38468 - DNA, 259 bp, Glycine max
  unsure (1)..(259): unsure at all n locations
agcttcgccgagtgtcctcattgaanaacctttattcaaacctttcanagttagtgataaggctaaaccgaaaattanggaacttagaataactaaatccttaattgaaggcgtaggtgacaatcatagcgaattactaaacaagattagtagttggcttaaggtcattccaaatactccccaagcttcggaaaatacttccaaaatggtaacaagaagtacctccaaattaattaatgttattaatgaagatagtgac

SEQ ID NO: 38469 - DNA, 271 bp, Glycine max
taatcccttgaaaattgagggtaggagatttgccctggattcagctaaggactactttccttagcacacttatgttcaatatgttggatttgccctggagatttgccctgaattttctcctttgaaaactattttatttggaaatccttcccaagacaccattgaaccactgatggaggctttggaggaagattataaagatggaaataagataaacgaatcaaggcagtttattgaaggagtattggatcttgaaaagagaatcaataga

SEQ ID NO: 38470 - DNA, 420 bp, Glycine max
  unsure (1)..(420): unsure at all n locations
agcttatgcacggaaaatgttattatgaaattgagatgcccgaagaaacaccatttcctagttaaccatgcattangtaccatgttcaattattttgtttttaagtgaaacgggtttatgatcccaacatggttggctcgtggtgcctaacacatgaaactaagaatgtagtgtgaagtttcacgcttcccccttttttgtttttgttttgtagaggaaaacgcaaggatgagcaaacatgataacaaatggtatgcatattggcagatcaaaaagtttgttgaacgcatatgcatgatgatgccatgactcatgccaaatgtgaggctggaatatgataacggacaaatgcacgaacgatatgttcattatgatgttatgaagagatgcttatgcgatgcatgatatgaatgcatttta

SEQ ID NO: 38471 - DNA, 272 bp, Glycine max
tccattgttcaatttcgagtgtctcgatatattatgcgcctgaatcggacctccgaatgaaaagttatgaccatttgaatttctcgagagctacctttgttcaatttcgtgcgtctcgatatattttgcgcctgaatcggacctccgagtgaaaagttatgaccatttgaatttctcgagagcttccgatgttcaatttcgagcgtcttgatatactatgcgactgaatctaacctccgtgtgaaaagttatgaccattttaatttctcaag

SEQ ID NO: 38472 - DNA, 391 bp, Glycine max
  unsure (1)..(391): unsure at all n locations
agcttgaagcataatgtaatcaggttcttaacatcaaaataagcagctntaaggcacacatcatctaagagctaatatcaaattgaagctagttataacccctaagtttagaaaagtgcacgtatgagctttaattaagcatcaaagataaagtaaattaaaacttcatggagaaaaatgggaaagaggtgaggtgaaatttaaaacgaaccatcctataacaaattttccaaccattattagggaacaaaaagaaaatgagactttcaaaacaatattatatccttagacaaaatgtctcaagaaaagcaagataaacgctaaaaggtacatatcaatcatacagaagcaagaaattatggttatttaaagcatacatgattaccataat

SEQ ID NO: 38473 - DNA, 252 bp, Glycine max
tttaaaattgccaacaatacacctttctaatgacattactttcaaatttaaccgttaaggactattttgtaacacttatgcaaagatagaaactattttttatatttcaaaaaaataggaattaatttgcaaaatagatataaaaacagagaccaaaatgtctattcactcgccgaaaaaatagataaatctgtgtttctagttcccaccggttgcaattcttgaaatacacttaattaaaacctaattcaa

SEQ ID NO: 38474 - DNA, 283 bp, Glycine max
tctaccttcatttgcatctaaacttaaatatagtgaattagcttctaccttcatccaaggttactaggataccacttcaaatgttctggttcttgtgacaccctctaccccgacatatatataaataaataaaatatattggtaaacaaaaatcaaatgggtaaaaggttcacattcatttcaattaccaaataaactcattaaaaatatattcggctcaaaataaggccgccaaatttacaaaaatattttgttaaatcagttaggtgaaataaaatagact

SEQ ID NO: 38475 - DNA, 409 bp, Glycine max
  unsure (1)..(409): unsure at all n locations
ctgcagactgagaaagagtttgtatggagcttgtatgaaaattcctatgaanagcattgggagattgaagaccggattacagaaatgcagataagggtttgcagctggcaagatgagtttggcattaatacaatgatagaagataacgatgcacgagctttgatggctgcaacagctttatattcttgcaaagagacccttgctaagtngcaagagacacaggcacaatcatctgaagaggctaaagaatcctaccaaagggttaaggaagctcgtgacatgtttgaaaccattagaggccaacttcattctaaacttttatagtcagaagaccaaggaactgaaccataaagcatagaggaagaagacatgtctagcttggaagagaaaggcatgagcctgatgtgga

SEQ ID NO: 38476 - DNA, 268 bp, Glycine max
tgcttaacaagctgttcggcaacaataatatagtctgttgtactcagattcaaaataataacagatttcagactttcagttcagaaaaccttatttctctctctctctctctcacttttctcagactattctagtttctacaaaaacaaagtatgattagaattagaaatacagaatttgaaaatacaacagaacggggaggaagataaagaacaaaaaataaaaagggataggaagaaagtaaagaggtaaaagatagacgaagggg

SEQ ID NO: 38477 - DNA, 271 bp, Glycine max
ttgaacaacggaagctctcgagaaatttgaatggtcataacatttcactcggatgttcgatccggggacataatttatcgagacgctcgaaattgaacaaccgaagctcttcgacaaattagaatgtgcgtaacttttcacgcgaatgttcgattcggggacataactcatctagacgctcgaaattgaacaacggaagctctcgagaaatttgaatggtcataagttttcacacggatgtccgattcggaacatatttatctagacatcg

SEQ ID NO: 38478 - DNA, 267 bp, Glycine max
cgccacggagttttccgactatgctcttgtgtggtggaacaagctacaaaaggagagagcaagaaatgaagagccaatggttgatacatggacggagatgaaaaagatcatgaggaagcggtatgttccggctagttactcaagggacttgaaattcaagctccaaaaactaacccaaggcaacaagggggttgaggagtatttcaaggaaatggatgtgctcatgattcaagcaaatattgaagaagatgaggaggtaactatggc

SEQ ID NO: 38479 - DNA, 461 bp, Glycine max
  unsure (1)..(461): unsure at all n locations
atcctctgagtcacctgcggctgcagcttaactagggattgaaaactngcttaaatttgatgagtatcaagcacttaatatcaattgtcgtataaagattatgtcacaatggaaatatttttctccttttccaaggcatgaatgattttcacaatttagttggaaacatctaaattttttgaattgaagataattcgttttaaaattttcctaactcaatattgtttgtaaggaattttatatagttgattatcttgatggacttatggacactgacagtgggatacgaaacattgtttcaatgtttgaaattgctaatattctatccattntttaagtacatcatcaatctgaattctcaattaatgtgatgcttggtattcaactnttatttattcataattttttcatgcctaagttggggagaaagaactatacanataagttacatcattttatgt

SEQ ID NO: 38480 - DNA, 276 bp, Glycine max
tgtgtagcgataattctagctgggaaaagattttcgcacctattacccagatgtcggtgcagcttgataatagtttcctcctcttccttggtgtagtttcctcttttgaggtttggccttaggtaattcagccaccttagtctgcaactctttccacatctcgcaagacctaacaaattaataacaacaacaacaaagtaaaaccaattacaatggattcatatatgatttagctataagctgtgcatgtatataattaaatattgaatatatggt

SEQ ID NO: 38481 - DNA, 414 bp, Glycine max
  unsure (1)..(414): unsure at all n locations
acctgcggcatgcaagcttgtaagccttcctggtgcctgtgggattagtccttctttttctatgcaatcatgtatatatatatgaggcataatatccatcccccaatccaaaaataaatntgttntatttatgttttgatcacacgtcattgaatcggtgaaagcataaataaattcacattaagtaatttttttttattcatttgcagcagtaattaagttatttttttatgagaatattaagtaatctaaccatggttaattaaggttgaatcaagtgataattaaacgtgtattttaatatttgataataaggttgaatatgtttttagtttatgttttttaatcaagttttaagtttggtaaattaatgaattttgatttcaaaaatatttttctgattcttctgtctct

SEQ ID NO: 38482 - DNA, 279 bp, Glycine max
atacatcttcccaaaaggaaattccattgcttatgggtagaaatagaattcccaaatttcaacaaatatgctgctacaattgaaaagcaatcatttttctttcgttagtttgaaagcttatcattctaggagacaaacctatccatattgaaagtaactttatgggatgcactccaaataggtcaaacatatccctagtagacaattatctgtgtcttaccttcatatagacatctatatctgggtcaggtttaatatttgcttctttctctcttctgg

SEQ ID NO: 38483 - DNA, 406 bp, Glycine max
  unsure (1)..(406): unsure at all n locations
tgttagctataagaaatatggaaaccaatatttacaatataataagattgttagtttaaggtaatgattgaaattaaattaacaaatatatttaattttttagttataaaaaatatcgaaaccaaaatttaaaatctaagataggataagattgttagtttaaaataatgattgaaataaaatttaaaaatatattagatttggtagttataataaatattgaaaccaaaatttaagatttaaaatttatttattaatccatatgttntaattattttaaattattcttttagaaatattttataaattatatttctagaaattttttacttcttttaatttatctatagaaatctatacattagaagatttgatatttaatngaatgatgtatttagatgtttat

SEQ ID NO: 38484 - DNA, 281 bp, Glycine max
tcacactaaatgaagatgtattccagctttattggtcatattcatataaaaattatataacccttttaacaattttttcttaaaactctatcactatttatctcaatttctctcaaaacccaacaattgattatataagtgccacgttcagagtagaacacgggtgtaattcaaaagtcttccttctatatatgtcttgcatgcaactataaaccaattaagttggccatcaggcccaacaaagtcacaaggattttcctgaaaagaaaaagtttacaatt

SEQ ID NO: 38485 - DNA, 353 bp, Glycine max
  unsure (1)..(353): unsure at all n locations
aaaattgtaggaaaactattgccactaaaacgttnttctattctaagaatatcataaacaagaacatatgccatatatattcattaactgaagaaagtataaatatacataccgtatctgcaaccacatgatcaagagatggaacataaccatgcaatccatcactgcctccatgaccttaaaaataaaacaaatcattccagatccatcacaaaatggtaagtacggaatggaaaaagaaatcttaaactacctatccagtccattgcatagacaccaaagttgcatgatgttaatagccttgcanagtccgcatatcttccactgaaaaatgagtgccaagtcagagaagt

SEQ ID NO: 38486 - DNA, 281 bp, Glycine max
tatcagaaggggaatggtaaaatactcacctcaagctgatattaagaaggtggcaaagtgtttcttttgcaagaagaagggacacatgaaaaagaattgccccggattccagaaatggcttgagaagaaaggtaaatcaatctcattagtatgttatgaatctaatatggttagtgttaatattaacacctggtggattgattctggatctactattcatattgcaaattctttacagggtatgcaaaacctaaggaaaccagtgggaagtgagcaaagca

SEQ ID NO: 38487 - DNA, 318 bp, Glycine max
  unsure (1)..(318): unsure at all n locations
acttcatgtgacatggagatttctgtttcgtaatccatatatcatacccaaggaaaatcaataatagacaacataagcccaaactccatatggcaagtctaaacgttttaacttgggaaatccattccctttccctaaaaagtaggccagtgcaaaagatacataaacacatggtgttccatcaccaagttcctaataatcatagatgtaatagctagaaaataaaatatggccaattccttcagttcaattgcattgcctctgcatgatacttctncaaatcagcatcaagatcatcagcagataccttttcaccac

SEQ ID NO: 38488 - DNA, 279 bp, Glycine max
taacatgcaagatgtatcgacacaacttgattcaagcacacagacatgagcgatatgagacacggactatttaatacaatagttactggaaagcataaatataatgacacctctcttgatgcaaaaaatttccagacaaattactaagtagaaaacaagtcctagtatgatagctctagaatcactaattggcctgtgaagcatgatcgctagctcactacagtcagatagcttaccaggtagcacttaccactaacaagtgactccacagagagaaaa

SEQ ID NO: 38489 - DNA, 402 bp, Glycine max
  unsure (1)..(402): unsure at all n locations
agctggcatgatntacatctctcctctttctcaagcaaattcttcttgatatcatcaaaatcttcatgatttacattctccccctttctgatgatgacaaccacctgtaggttaggagcaacaacaaagaaaatatctatttgcatatagttttactcccccttggttttacattgattgcttatatgagacaaatgaagatttcatatttntcatatataaaaagctgtctcataaaacaatagataattnttcttactattttatcttttatctttctctcccnctttgtcgacatcaaaaacanatcatgaatagagaggagaaagatgttaccacctggtgcaatgtatgagaatcaagtgataccaaaggcattataacaatcattcaatattaatc

SEQ ID NO: 38490 - DNA, 273 bp, Glycine max
ttaaattaagcataaattctaaattaaagggggagaaagagatgagtgtacggtagaaaaaaacttgtatgtatcctcttgatttcaggattgtcatcatcaaaaagggggagattatggaagcaatgactttcaagattattttgataatgccaaagaatcaagagttaagcaagttccaaagaatcaggagtcaaaaagcttcaagaatcaagtttcaaagaatcaagattcaagaataatcaactctcgagattcaatcaagtttcaaga

SEQ ID NO: 38491 - DNA, 383 bp, Glycine max
agcttgtactttaccttaggagccacatagttcggactcccacaagttgtcccacaagttgtccgaaggatactcgccccctatcagaatattcaaaagtttgaagcagtttggtattattatatcttacatgagtcgaagtcatatataaaagctaatttggtgacaagctcacctgctcaggaaatgcactcaaaccataatcggaaatctttatatttcctagtgaatcaagtaaaagattttcaggctgcacaaggcaaaaagaaaaaaagaaaattagaagatatcacaataaggacaacaaacaacttctcagatctcactcaatgcaaacctttaaatctcagtgataaactcccttactgtggcaataatctaca

SEQ ID NO: 38492 - DNA, 273 bp, Glycine max
tcattttaagttaagttaataattgtatgaattcttgatttaaataaccccaaatttttctccccctttggcatcaaccaaaaggccaaagtgcattataacataaaatcatacacaaatggataaacatacaagaaaaaaaggagaaacttataaaaatcaaacaagataataaattatccacaaatcataataaaagcatatgtatcaaataagtcataagtcatcaaaagcaaccaagtagaaccatagcataaagctactaacaagttc

SEQ ID NO: 38493 - DNA, 456 bp, Glycine max
agcttcaccaccaagaaagtgtcttggataataagcttagagaagaagcttcaatggaggaagagaatgagagagagaaaaaaagtggcatgttaaattgaaggaagaaagggagagaagctgaactttgaagtttgtctcataagactctcattcatcaaagttatgataagtgttacacatgcttctatttatagcctaggtagcttccttgggaaacttccttgacaaggttccttgagaaacttccttaagaatgttctttgagaagcttccttgagaagctagagcttaactacacatacccttctaatagctaagctcacctccttgagaagcttccttaagaagcttcattgagaagctagagcttagctacaccccacccctctatagctaagctcacctccttgagatgaaaagctagagcttagctacacatacccctctaatagc

SEQ ID NO: 38494 - DNA, 275 bp, Glycine max
taacaaacttagaaatcaagtgatcatgtattccgaaatatagggggagtaaacgaatgcacattttatctatatacatttgtttgttgcttgcttgaatcttgatttcaggtattgtattgtcatcatcaaaaagggggagattgtagatgcaattggctttgatgttttgatgatgatcatgatgatgtgttgcaattgatgcaaatgggcttttcaagattaaaattcaagacaatacttcaagattacaagtcacaacatcaaggtgatca

SEQ ID NO: 38495 - DNA, 455 bp, Glycine max
  unsure (1)..(455): unsure at all n locations
ggcagcaagcttcttataagctgaaccattttatcaataaacacaagttgagttttattcagaaaattagagtttatctcttttatcttagtgagagtgattctcctaagttcttgagtgattcaagaacaccctggctatatcaaaggactttcacaacctttgtgtattgccctcgccggaaagagtgattcttttcttcctttcatcttcaaccttgttctttcataccataattccagaaaatccacttctgcccagaattatctcgaggccataactcccattttacgcgctcaaattaagtgattcttgagcctaanatgaatttcaaaacgagatctttcacctcgttttggaatcacctcatttggagccctgtagcttgagttattgttatttctatatttcttgccaaccaccacttaacctacgttntatcatatcattctttc

SEQ ID NO: 38496 - DNA, 276 bp, Glycine max
gctgggggatggtgggatacccgccatatgtggtactaagaggggagcgggcgatggtgcatgtaaactctccggatccacgaatacacattggtccaccatccccagatggccaccttcaactgggctcacgtactcccacgtaggccttatactcgatcctgtcaacaccgggtccccatcaatggcctgacaagcttccagaacatccaagcaatttgacattcaacatcaggaactatcaaaaaccaagaaaacagggggaagggagaaaac

SEQ ID NO: 38497 - DNA, 412 bp, Glycine max
  unsure (1)..(412): unsure at all n locations
agctagctccagagattgaaggcttagtggctgccataagattaagtcttctgatcgcatgttcgttggacactagtgatcggagacttatatctacttttgcggagaggtaacataaggaaactagtagtttccatcttccagtaggagaagtgaccatcaccctggatgatgtggcatcgttgctacatttgcccattataggcgcattccatagctttgaggattttcttgtggatgaagtcgttctcctgttagtggaatttcttgaagttnagtcagaagaagctagagctgagacagtacaatgtcatgggacatatgttaggatatcctgggttgagacatttatcgtancaaatgtggcgcacgacagtggatngtagtanctcgagcatatttgtggatctag

SEQ ID NO: 38498 - DNA, 282 bp, Glycine max
tgccacccagctcgcccaggcgagcaaggttgcttcctccagaagcaacagccttctggaggaaggatctggaaggcccaagtgggccagattgctattcgtacccccctttttactaaatgcaccccctttctattttttggtaattctttttccgtaacgttacgaaactttacgaattttgtaacgatacttattttccttccgcaaggttacgaatccttacggattatgtatttactcttttttagctttagaagaagttacggaaactcacgaatt

SEQ ID NO: 38499 - DNA, 472 bp, Glycine max
  unsure (1)..(472): unsure at all n locations
agcttanngcaattttagtgaagacgttagtgattaataatgagtgtgcaggcaagtgaagtcatgattcaatattctntctaaaagattcattntccacatttgatagtaattgtttcggtttaatgtcttaacaccaaaaaaataaattntcaagacatatgtactggaactgtaaaagtatattntgctacacgtttgtaatggtatacttgtctataaataaaaactagctaattaattgattgataaaaataaatgattaattttagataaaattataattntggtctctcatcattcttaaaccacgaattttattcttctatgttttattatgactnatttgatctcttatntttttaaaaaaaaatctgcaataatttgcgctaataatcttcaantttttatnaccttatttcgtttaatctctatattttaattaactaaaactatnntttatgatatctta

SEQ ID NO: 38500 - DNA, 266 bp, Glycine max
tgaataaacaagataaattttctaagcaaaggatagaactatttttagtgctaagagtatcatccaatgactactaaggaatgtcgctttcactttgttacttctttctcgtatttcacttctttgcttcacttcatgatttgcgttgttatttatagactttagtgaattatctgttgtgggatccgtgccttctttcttgatatgactgttgtctcataccttgttgcagggtcacatggagcgctttggttgaagagataaaa

SEQ ID NO: 38501 - DNA, 404 bp, Glycine max
  unsure (1)..(404): unsure at all n locations
agctntatagtgatgtcactccctaatattctgttcaacaaggtaaaaactctgataacatataatactcattaacagtgccaataatcaggctacaagtaatacatgcttaccaactaacactatcacataaaaaaagggcaacccaatgttatgaaggtcccactgtgtgtgaggttcatggaagggtcagacccacatggtctatagcaggcacagccttttcaggaggctgatttctcgacatagaaaaaactaacgtaccctagtgtctggaggaggctcctcgccatgcaaagtatggnggaaagtcattgtatgctgtcttgcccttgcatatgcaaagaggcttgtttcctattaatatattaaatagggtacaacggacaaaattcacatttcat

SEQ ID NO: 38502 - DNA, 271 bp, Glycine max
tccccttgtttcttgcttccatatttaaagatttgagcattcttcaacaagaaagatgccaaggaaagtggatcgctacctgcagttcccattttcactggacatgtcaccttatctctcatcaacaattttaaggaatcgatttgggaacaggatctttccttttgatggggatgagctggatgcttcagatgaattgtgttcagagtttgagttgtttgccgttgtcacgcacagtggtaagctagacgctggccattatgtcacttat

SEQ ID NO: 38503 - DNA, 385 bp, Glycine max
  unsure (1)..(385): unsure at all n locations
agcttccaagaatcatgatcaagattcaagactcaagattcaagaatcaagagaagacttaatcaagataagtatgaaaaggttttttcaaaaactgagtagcacatggatttttctcaaaacatgtttaccaaagagtttttactctctggtaatcgattaccagattgttgtaatcgattaccagtagcaaaatagatttgtctccgtcttccctgctcttttactttccgctgtgcattttaatttccgcttttacttttggttaagtttctcttctactccttattctcttaacaacataagtaaaagccttagaagagntaaattttaattagtaaaggtttaggaataattaattcaaccccccttcttaattattatg

SEQ ID NO: 38504 - DNA, 420 bp, Glycine max
  unsure (1)..(420): unsure at all n locations
agctntactatgcagagaatatccaaggaaaataccttcatctgacttagcatcaaattttcctaagttatcttttccattattcaatacaaaacatttacaaccaaagatatgaagatgtgagatgtttggttttctgccattgaacaattcatatggagttttctttaaaatgggtcttattaaagccctatttaaaatgtagcacgcagtgttaacggcttcagcccaaaagtattttggaagaggagtatcatttaataaagttctagcaatctcttccaaagatctatttttcctttccacaacaccattttgttgaggggttcttggtgcagaaaagttatgctcaatcccatgcttatcacanaataattcaaattcttttatttcaaactcacccncatgatcactcctaat

SEQ ID NO: 38505 - DNA, 314 bp, Glycine max
ttctcgagagcttccgttgttcaatttcgagtgcctgtatattgatgcgcctgaatcggacatccgagtgaaaagttatgaccatttgaatttctcgagagcttcctatgtttaatttcgagcgtgtcgatatattatacgcctgaatcgaacctcagtgtaaaaagttatgaccatttgaatttctttagagcatccgttgttcattttcgagcgtctctatatgtgatgcaccttaatcggacctccgcgtgaaaagttaggaccatttgaatttctcgagagcttccgttgttcaatttcgagcgtctcga

SEQ ID NO: 38506 - DNA, 407 bp, Glycine max
  unsure (1)..(407): unsure at all n locations
atagggggaggagggaagaacaaaaacgttcaaccctcctggtatctgaggatcacttgaaattagtgaaaaaaatctgttccgtgaagaatccaagctgaggcgcttccataacgcgtccgaaacatttccgtgggagatatcgtgaagattttccgccgtctttcattcgttcttcggtcttcaaccggtaagttcctgaaatcgaacttttcaattcattctatgtacccttggtggtccccacttgttntgcgtacttttattttcatttcatttactttcgtagccccttttgacgtgctttattcatttatttaagtccttttctcgcctaatcaaaaaataaanaataattccaccgatcatttgaattgtaacatctnngtatttcttgtaaaatgaaa

SEQ ID NO: 38507 - DNA, 282 bp, Glycine max
ttagtaatatttttttacattaaaaaaaaatttcactacaaataaaacataatttagagactaaaacaatcgatcgctaaagtgataacttcagtcgctaaattgaaaattcagtcgctaaaattgttagcaatcgaaatgacgaccgaattctctgtgtcgcaaaaccctagtctctaagtccttaatcaccaaattcttattcatttccgtgcatgtttggttgctattttgtttgggaccagttcaacaaccgaaattatcggtcgctaataagtaata

SEQ ID NO: 38508 - DNA, 460 bp, Glycine max
  unsure (1)..(460): unsure at all n locations
gcttaagaatcattttcggatcaagagaaagattgttggacagttggatctctcattgtggattattgagttgaccttgcggatttaattattattaatatgaatatgccctacctttacattttaattttaattcatggaattgattgtaaggtgtcgaccaatttattttttatatgtttgtttataggtaagaattgaagatatataccaagaaatttacaattcacatacatattcaatcaattgagttagattccttattgatattgaccaatttattaatacttttatataaatgtcattattgccttaaaaaatgtcattattganacaatnggtactttttttttcgagcacgaaacaattggtacttgtttatatccacatgttgtaaatgtctatttccaaatatgtgatatagttggacagtatgtatttaagtatatttttaatttct

SEQ ID NO: 38509 - DNA, 282 bp, Glycine max
ttgacttgagtcatcaagagattataaatatgtgaccatggcatgaatttaaaagtaatctatcttttaatcttttctcaacatcattcaattctttctacagaatctttctaatttatttctcttcatctttctaatagtttttgttcaaacactttctcttccaagaaaagttctttgttcaaaaacttgttgtattcatattttccattcacttctccctttgctaaaagaacgaaggactaatcgcctaaattcttttgtgtctctcttctcccttac

SEQ ID NO: 38510 - DNA, 408 bp, Glycine max
  unsure (1)..(408): unsure at all n locations
agcttctccttcagattcatcaaacggccacatgttagagaaaaatgtactggaatgaagttccttgttaagctaccttgagaagaatgattggacatgttatacgcaattagggcatgacgatttacaggttggccacccccggttgaataaactaaaaagcacagcatcccattgcatatcacactctcattaccacctctccaccccatcaaaacttccgttaaagaggtcacccangttgcattttctgaattgtatagatgaattgagatatcccactggacaaagttctcagggacgttgttagattttacaattgccacagtataacagtgagattccctgtcactgagatngtaatgcactgtatcagaaacttcaaacctggagctcctcaagcttcct

SEQ ID NO: 38511 - DNA, 287 bp, Glycine max
tgttgatcagaaagtccaagtttgtaatcttgtgaatggaaaaacaggtgctgggagagtgttgcctgtctaattggttcaacccaactcaacttggattagttaaggtccaaggtggcttttggatgtttggtctatctttttggagcttctcctctctttgaaaggagaaaccacgccaaatacaattctaaaaaaactattaagtataaaagtggcttttttctatatgaactaaggaagaaaacattaaaaaagaagagcttttagataatctatattttagg

SEQ ID NO: 38512 - DNA, 490 bp, Glycine max
  unsure (1)..(490): unsure at all n locations
attccacctctngatactccttaatcatctcaactantataanannaaggggatggaattgaactgtagacacgacttcaggacccaggtgcccgagctgcacttgtaaggcaatatctcattctgagaatacgaacagccaagtagacgtgtctcttatggaccacgaaatgtcctctacatgtgtggacagctcctcttttaatctagccaactactctcggacttttactaccatctaactcaaatgtctctccatcccactactttctcaccgtgcatatcaatactgctctattctgggaaatgcttttttccctcaacatattttatttcactcacaatatagagaaggatctgctgtcataatggtatcataattctcaccccctaaaggtatacaatgggcaatttcggccaatntcagctttggattgtcactaacctcgttacctctttctagtcacaattactgatgacaaacacctcg

SEQ ID NO: 38513 - DNA, 269 bp, Glycine max
tgggtcatggttcagtttatgggttccttgagccttagtccatacacaatgcaaatgatagacgtgttgaatgtcaaaattacattgaaacatgggttaaggaatcccaaatagagatctacctaggagcttacttgaatcagtaagtaaaaactatgaaatgtatgttaagtatgtttgtgttatacatagctaattattgtcgaatttaggggccattggcagctagttgtgttgtgtcctacgaaggacattgtcatctggttttg

SEQ ID NO: 38514 - DNA, 431 bp, Glycine max
  unsure (1)..(431): unsure at all n locations
agcctgacaggttcaggtgcatgtgctgctactggnggaggcacttgaatttggttgccatacctcaaggtgatggcactcacattttttggattctgcacagtttgtgaaggcaaattgtcagaattttgggactgagcttggttcaactgagtatccatctgccctatctgatttgtcagactctgaatggaggctcttatctcttgcgtgaaatgcatattctggatggtcatatgcctcactaactcttctaaggaaggttgaggaagagccatagttgcttgttgctttgttgcgactactgttgttgctgctactggataggaggaagaacattggcttacttggaccancaacattctgaaaaggagggacaggctgttgttgtgtggaggactttccatctacatttgatgattcttcacctg

SEQ ID NO: 38515 - DNA, 272 bp, Glycine max
ttaaaatttgaattaaaatcggtagaaactgctggtaatcgattaccatatatgtgtaatcgattacacagtgcaaacttcgaattcaaattttaatagctgttgtaaatcactttgggccactggtaatcgattacatcctctggtaatcgattaccagagagtaaatttgttgaaaaagactttttaacttaaaattcttggccaaaccttttgctacttcaattggaattcccttcctatttaatatactctttctaagactctagaga

SEQ ID NO: 38516 - DNA, 272 bp, Glycine max
tatgacatggctaattgtaaattctttgactaaatgttgtatagattgggattcaatgtcaaatgacatcagtggatgaaaacaattatctcctctagtaatatatcaatcctagtaaacggatccctaacttctgagtttttagcttcaagaggcttgaagcagggtgatccgttgtccccttttttgttcttgatagttgatcaaggtatgatgtggctagttcatagcgcggtggagaaaggactattcaaaggtttaaaggttggaga

SEQ ID NO: 38517 - DNA, 575 bp, Glycine max
  unsure (1)..(575): unsure at all n locations
cactctccgctcactctntctgtctgtntactactctctctattntatcnnctnccacagggatgagacatatggaccattttgaacctgtgtagcaccgagatcttagaacgcactgcttgcatactagcttggatgctatcattatataccaaggttatacatatccattacagtattttatggacgccgccctacttttcttgagataacttctggatcgtggacacacaatatgtgcattgttattgtctcttaaagcaagggaatatggccgcacatgcctccatctatgtcagttcatcctctttcttttcgttctctattatgtacgacccttatattagttaattatgttacctcatcttatcatagatcttatgaataactatcttgtaagagctaagtcacagtctatgatacgattaatttatgaataattagtgatttattattccgtaaagcaatataacatggcagtcctgcggtatacattgtaacactatattgccatctttaggtatgataaacatcttgatgaaaaaatatctgatgcagttttgattgattatgtt

SEQ ID NO: 38518 - DNA, 277 bp, Glycine max
tggagaggatgcttcaatggaagattagaaagagggagagaaacagagaggggggagcccgaaattgaaggaaaaaaaagggagagaagttgaactttgaattgtgtctcacaaaactctcattcctcaaagatacaacaagtgttacacatgcctctatttataaactaggtagcttccttgagaagctttctctataaaacttccttgagaagcttcttctaaaaaacttccttgagaagctagagcttatctacacacacccctctcataacta

SEQ ID NO: 38519 - DNA, 368 bp, Glycine max
  unsure (1)..(368): unsure at all n locations
agcttgttgcaattcttctaggctgggagtcataacatgcaatcctctagaacccttacctcccactctttcgttataccgagactcgggaaccccaataggttttgcctttntaatgtactccgaacaaaacttaatagctntttttgcaacgtaccttttaacaatagatgcttcaggatagtgtaaattctttgtatacccttttatgatcttcatgtattgctcaaccgagtacttccattggtaaataaacaaaaccacaacattaatttccctcaccagatgaacaattaatagaaccatgatgctgaaaaacaaaggaaggaaatacatctccaatggacataagataataacaacctcat

SEQ ID NO: 38520 - DNA, 281 bp, Glycine max
tgtagagcatcgatcgggtgtgggtgtaggggggcacgtaaaactgcacctgctagtcaggggagcatccgttgctacccatcacgtggcggaggtgcttgccggcgtggagggcctgagccaccatgccttgcattgttgattgaatgttatggttgggtgtggtggtgcacgtcaccgtgtcttggtgtccctgcaacttcatgtgttgcattaatattcttctctttggaagcacaccaaccatatgttctcttttctttgcattcattttctttcac

SEQ ID NO: 38521 - DNA, 170 bp, Glycine max
atccttaagtcacctgcggcatgcaagcttcttagagctttcttcacaagatgcactattggcatagaacaagctgctagctaagcaaatgaaatcacttatagaaacacttagcaagctgcctgttggatcaagtggcctcagaataattaagaagggggggggggggg

SEQ ID NO: 38522 - DNA, 266 bp, Glycine max
tcaagaaaaagatggcctcaacaaattccttatttccagaagggaattctatcaatagacctccaatctttaatggagagggttaccactactggaaaacccgaatgcaaatttttatcgaggcaatagatctaaatatctgggaagccatagaaatagggccttatatacccaccacagtagaaagagtttcaatagatggtagttcatcaagtgaaagcataaccatagaaaaacctagagatagatggtctgaagaggataga

SEQ ID NO: 38523 - DNA, 182 bp, Glycine max
attctccatgcatctgctcattgaatgcagtcatcttttccatttgtatgaagccgacaaccctcacccctaattcgtctagcattgaggattgtgttttgttttgcaaaggcagtccaagaaagggcttgactctaagcctatgatcattgactacaggctacttctggacttagtcccct

SEQ ID NO: 38524 - DNA, 272 bp, Glycine max
ttatcttgtaatcgatctttgtttgtttttaaggatcctcttgcttttttttgtaacttgctgcatgttgatgtagtaggtgtttctgttttttagttttttgtctattggacgttcgtcccgtttattcataaaaaaaagatttgaaaagtaatttaataaaaggaagaataatgatatataaatcactctatactaatataacataactaatacttactatttttttttattatttatctttttctatcataatatcacatactattata

SEQ ID NO: 38525 - DNA, 331 bp, Glycine max
  unsure (1)..(331): unsure at all n locations
agcttgctntgctatnggcttcttgcttgataacaaggaatatattgaggctntaagagaagcataccattaaggttatgaccaattcctaagaagattgtttataacaatgctcatattgaatagcattgagagaccaaatcaagtgtgggatgaaacatgggagtgtctaattgatggtattcttcatcaacagagaaggataagaaacatgtcaggtaatgtaaagtaaaccttgtattcttttattgaatgcaattgttgtttaaaacttaaaaattcaattgtttatttctatccaaagatttagatattgaaacaagagttacag

SEQ ID NO: 38526 - DNA, 277 bp, Glycine max
ttgtgccattcatcaagggttacaacatgtttgggaccttggattcaagattattatttgtgagtccaactctcaatcttctttggactttatcttgaaggatctttaaagtttccatcctcatcatccgctcatcaactccattcgttttatggcagcaagaaaatggaatatttccttcgatcacacccaatattatcaaactcaaaccagtcattgacttgattggggtactaggtcactgagtcaggagtcgacccagtaagtcatcagttga

SEQ ID NO: 38527 - DNA, 400 bp, Glycine max
  unsure (1)..(400): unsure at all n locations
agcttcatctaagtaccctgctctgccaagtatatccactaaacatgaataatgagttggtctaggctccacactatagtctctagtcattttgtagaanatctctttaccctcgtccactaatccagaatgactacaagccgataaaactgcagtgaaaatgccctcatctggtgtcacacctttacctagcatttcataaaaaatggagatggcctctctccccctcccatgaattccaaatccagtaaccataaccgtacaagcaggcaaatttttctcatgcatctcatcaaacacacgacaagcacanaaccaaacttcacagttagcatacatgccaataagtgcccgtcccacaacaacattcacaacataacccctcttaacaacatatgac

SEQ ID NO: 38528 - DNA, 274 bp, Glycine max
tgcatggattgggagaaatcgaccttcgaggaatttttgcaattgtttaaatcaggtggcccctaaaagaaattatgcggatctttggatatggaggagttgtgcggtagggacttatactatgaagtaggcttattgctcggtgcaacctaatgaagatcatcaacatgctcctttgttcaaagtcttatggagtattaattgcccatcaaaggttgttgttttcggctggagactagtgtggaatagaattcaatcatgagttgagctaaag

SEQ ID NO: 38529 - DNA, 388 bp, Glycine max
  unsure (1)..(388): unsure at all n locations
agcttgtccataaaanataggctnttgaagttggtcatttcaatttctcactaagtaaaatggatcattnttaaggtccaacgccttaaaatgatcaccacttaagtaaagaatcgcttgataaaaaagaactacgtaggtctgagttcctcattaaggatacgtaggagcaaaagccccgcttttgtcgaccaccccaagagatcgttaatggtccaatgccttaacgtttctctcctttcaaaaacaagagatcgttaatggtccaacgccttaacgtttctcccctttcaaaatcaaaagaccgtttaatggttcaacaccttanatgaccttttgttcataaaaacatattntgcaaaaaagacaaaaacaacttaacaaaaca

SEQ ID NO: 38530 - DNA, 283 bp, Glycine max
ttgtgtaatcgattacactgcttttataatcgattaccagtgattgtttctgaataaatcaaaagatgtaactcttcaaaaggtttttgactttttcaaattggttttaagtttttctaaaagttataactcttctaaatggtcctcttggtcagacatgaagagtctataaaagcaaggctttgatttgcttttcaatatacttttccaatcaatcttatacaatcctttacaagccttgaatctcttggaacttcttcttcttctttgtgccaaaagcttt

SEQ ID NO: 38531 - DNA, 301 bp, Glycine max
  unsure (1)..(301): unsure at all n locations
gcaagcttaagtattgtattcccatttcttttgtacagaactcctcttcctggtggccncttaaggtaatggagaattatataggtatcttgtaagtggatttctcttggacagtgcataaataggctcaccaagctaacaaaaaaagtaatatcagaccttgtgtgagacaagtaaatcaattttccaactagacgatgatacatctccttatccacttctgcactgccatcttcattacccaatttaatgtttgaatccatgggagtacctctcaatcgacccatctaccctatatttt

SEQ ID NO: 38532 - DNA, 282 bp, Glycine max
tatccagaaagaatccaaaatatatcatactatgcttgtgcatatatactagttaagtatttttggttgatttagtatttaataccccaagtgatgtacattaaatatataaatgctgaatggagaatttaggaattattatattatcttgtaataaatctagaagaaaaaaaactctgtatctaaaaaaacaattatttaagatttttgtttttctattattgttaggaaattatttataatatgtcctcttaaaatatattatcataaatattatttatt

SEQ ID NO: 38533 - DNA, 376 bp, Glycine max
cacctgcggcatgcaagcttctcagcaagctgccatcacacaatatactaatgcacaattttgtagagatcaagtcatcatgttggttattatatagtgttatgtttaatatactcttcatttttgtctttatctttctttcaatattatttttgttcctgcttcttctttcatcactattagaaaaaatacttttaacatcgattattttagacattcaacattggttctttcatcacttatagttgggtatagtggcagaagcagtctttattttttaaaatgacttattttaagtttatacaaactgatcataaatatgtaaatatgtgattagtgattacttactggcgaagtccagtgctaatgtactcat

SEQ ID NO: 38534 - DNA, 288 bp, Glycine max
tagatcagccacgaccaactgtccatgttaacccttctactggtagaggatctggccctcataaagaaaaatttcacagttacctgggggtagtggcacgggagaaaatcactatcgttaatactacttggaaggatgtcccataaactctaaaagttcttgtatgggatgacattttggtaagtacgctaaactggttactagatatttattattggagtaacttattcaaaagtatttagaagtaacatgtaagcaaaacagagaacgtaaaataaatagagaatg

SEQ ID NO: 38535 - DNA, 217 bp, Glycine max
cgccgtgcaggcgtcgatcaattctcattatagtcaaattactacaaactctgcccattccttcgcttatatcacatatctacgcgtggcatctcgacgtgtaacgtcacctattactgctttaaaatattatgcccgtcctgtcgtcctcatggatagtgaaatcaatatacatctgccgcttggaaaccaccacattcgtgcgaaatgcataacg

SEQ ID NO: 38536 - DNA, 391 bp, Glycine max
  unsure (1)..(391): unsure at all n locations
agcttgtaatatcaatacatatgagcatgacttacgcctatgaatctaagttttggttttgaatgtaaaacagcatgaatattangacatgtttgactggtttttgattaaaatttaaattggctgcctcatgaggaataccttgcacctacgtagcgtggaaaatacctttcaatggtatgtatatatgtgaatatatatatagcatggaaatgccttgcaaagtgtgtgaatatatggcataaatataccttgcaaagtgtgaatgtatagcaaataatgcatttcaaaaatctgtatatgtaagataggtagcgtaaaaaatgcctttcaaaatatgtatatttgtgggtaggtagcataatgagcctttaaaacaatatgtacccat

SEQ ID NO: 38537 - DNA, 277 bp, Glycine max
tgtcaaagttggcaattcaaacaaggtgtctacgtcaatgttcccccctagactcatattctctagtctcaaaccataaaatgtttggtcagtgtggttgcataacaaacctctccaactacataaactagactcgttcacccagttgtttaaggcattgttattggacaaggaagctttgaacctcatcaaaatttgagcatttgtgtctcccaacaatggcacaaaacaaatattggccaacaccaacagcataagaaggcaataatatgctctt

SEQ ID NO: 38538 - DNA, 294 bp, Glycine max
agcttctagccaaatggacttacctagaattatttcctttgatagcccttctgagccttgttttcctttcctttgtttgaagctcactacaagccttaagtgaaaaaccatgatattaccatatccttaatgaatgttggagctctggaattgttttgggaataagtgtggggggtttttgttcattggacaacctgtttgttggctatgcttcatgatgtattttgggccatacttgatgtacattgtatattggttaaatgttggacatgctgaatgatatgttgtttctca

SEQ ID NO: 38539 - DNA, 278 bp, Glycine max
tcaaaagatcatccccttgacaacattattgcttatatctcaaaaggggtaacaactagacattctcttaaagatttatgcaataatatggcttttgaatctatgattgaacctaaaaatataaaagaagtcatagtagatgataactggattattgccatgcaagaagaactgaatcaatttgaaagaaacaatgtgtgggaacttgtagagaaacctaaaaattatcccatcataggaacaaaatgggtatttagaaataagttagatgaacatgg

SEQ ID NO: 38540 - DNA, 426 bp, Glycine max
  unsure (1)..(426): unsure at all n locations
agcttctcttccttcctctcgagtccttttcttcttctagtttctctctctgaactcacgttttctctctctctgcgagttccttcgagcttccaaaggtcacgcgtatcgcggaggttccctagccctcgaaagctaggtatcggtgcacttacttgtatggagtgaacaaggataccaaaatggaagcaaagcacaaaaatggtggcttgggggctgcaaaatcatgcactgccgtgagctcccacgtttttgaatgttgnggggaagttttggtgtgaagaaagctccacacccgtgccccttttttatgttttcatgtagagggtgctcaccccggcacgctaactctgtttattntttgggaaattttttgcaaaattgactacccccttggttgngcttgttattctaattctatattac

SEQ ID NO: 38541 - DNA, 285 bp, Glycine max
ctcagcttgtagaatggctagacatgatacatgtcatggtttggtttggttcaaggataaaagggatgccccacattatttccatgacacaaatgcaaaaatgatgatttggaaactttatgcaaaactggtcatgcatgcacctatgcggacactcaagtgtcaaatttttatggtcatgtgatgctagggctcaagatccatttcctctattttaatgaacccaatgtttccaacataagttcttttatcaatttgagcattcatccgagtccatttcgggcg

SEQ ID NO: 38542 - DNA, 360 bp, Glycine max
  unsure (1)..(360): unsure at all n locations
attattaggattaatcctgacatctctaacaaactaatcacacgtaacaagacaattatagttgctgttcgaatacctcacccactcaagtgtatcacacaattatggcttttctctaatgaaacactcttgccttttaccactctaattcctcttgagttcttaggcaattcaagagattatggccacaacaaagaacaattcaccaatatgtgtaaggtaaggctagacaaggaaaaggttaaccaagaaaaatgctaacaatgttnttaggctcatatgaaggaaataaaattcagaatttatgaattcaaagtacattccttcatgcaaccaatatattaacctaaagaggttttt

SEQ ID NO: 38543 - DNA, 267 bp, Glycine max
tccattttcaattaccagtgtctctatatattacgggattaattcggacatcccagtaaaaagttattgttgtttgattttgctcagagcttctgttctgaatttccaacgtcttgatgtaccactagccacaatcagacatccgagtaaaaagttattgtcgtttcaatttgctcaaagcttttgttttcaattttgagtgtctcgatatattacaagactcaatcggacatccaagtaaaaagttattatcgttagaatttgctc

SEQ ID NO: 38544 - DNA, 520 bp, Glycine max
  unsure (1)..(520): unsure at all n locations
tgtaagaggnnnagttgtgcntaggtggaccctgagaccctcgagnaccncngannnttatatngancngcagcatgcgagctcagaagaaaagacgaatttaaatttttcgtaaaagcgcaaggtctataaatatgggtctgatgctaacactagagatagatattccataaactttattgccaatgctctttagcagactctgtgcaaacactcgcaatttattgaaagcaatttctctttttattctaagaaattgaattgggactgatgggttattaaatataatgatacctatacacatcggaaaggtggctcttgcgggaatcagactctgaaaaagatttcttcataatagagtgataatctaagtgggtcggttgaggaccggatgtgacatgagaagtgtccgactagtataaagcgagttgcgttatctatcccctatctatatatgttacgcaaccaacttgcctcgatcgttaagcacacaataaactgaagcgatcttttctgcatc

SEQ ID NO: 38545 - DNA, 273 bp, Glycine max
tcttatccaatgctcatcttggtggtgaagctccttcttccatggcttattccctagtggatggtgctgcctcttacctcttctcctttgtcttccactgcatctccatggtggaaaatcaccattaaaggacctcattgaagctcaaagatccagcctccatagaagctccacaagcaagcttccatcaagcattcccttggatctctggcccaatctacttggagtcttctatccaatgcccttgtggggtaagaatgcatcattccctcc

SEQ ID NO: 38546 - DNA, 404 bp, Glycine max
  unsure (1)..(404): unsure at all n locations
agcttcatgatgaatcaagattgattcanagattgtttgatgataacaaaggtgatgacaaaaagctcanagttcaatcaaagaatgagttcaagatgttcaagatagaatcaagaacacttcaagattcaagaggaaagttgatttcaagaatcacttcaagattcaagaggaaagttgatttcaagaatcaagaatcaagattcaaggatcaagcttccaagaatcatgatcaagattcaagattcaagaggaaagttgatttcaagaatcaagaatcaagactcaaggatcaagcttccaagaatcatgatcaagattcaagactcaagattcaagaatcaagagaagacttaatcaagataagtatgaaaagggtttttcaaaaactgagtagcacatgg

SEQ ID NO: 38547 - DNA, 277 bp, Glycine max
ttgtccgcagatccctcatttaagactaggcctaaactaaacagcattattgtaatagcataattaaaaccaaaacttaatccagagatccctcatttaagactaagtttcgatcctgcttcaatcaagttctaaggcaacagtacatttctcaatgctaaaatcacctaactttgcacacaattgggtgatcaaaccaaaagcatacaaacattaagcattgaatgaagcattgaacacaaaaaacacaatcaattagatattacgtatttacatc

SEQ ID NO: 38548 - DNA, 396 bp, Glycine max
  unsure (1)..(396): unsure at all n locations
agcttgtgcanatcaagtcactcccgcattntatctctagcatgcattgtatgttggtctcgtcctttgtcacgggaagccggaagggccatatcaccttcttaattgtacacatggggcactgcgcccncaaatgcgcaagtaagaagagataattntccgggctctcgtgtccgtaaaatgcattcatatcatgcatcgcataagcatctcttcataacatcataatggacatatcctgcatttgtccgttatcatattccagcctcacattntgcatgagtcatggcatcatcatgcatatgcgttcaacaaactttntgatctgcaaaattgcataccatttgttttcatgtttgctcatccttgcgttntcctctacaaaacaaaaacaaa

SEQ ID NO: 38549 - DNA, 277 bp, Glycine max
ttatagagagccatgccaatagtatagtgaatactattgttataagtgaactctatcaacggaagaaaactctcccaacttccttttttctctaagacacatgccatcaaaaggtcctctagcgactgaatggttcgttcagtttgtccatcagtctgaggatggcaggctgaacttagtcaaagcttggttcccaatgctctgttcaggctctcccaaaatctagaggtaaacctaggatctctatcagacactatgctagatggcacaccatgta

SEQ ID NO: 38550 - DNA, 387 bp, Glycine max
  unsure (1)..(387): unsure at all n locations
agcttgtcaactcctcataccatatattgctgtctaattcctccttagaatcatcacattcagagtagtatactatagtagagactctttaaattaatactctgtcaatcaataaactctctaaaataataaatntttccggtcccgacatgggccaatgcaaaaaattggaaaactcaataaaataataagataataatctttcgtgagatccctgtattattttcggtcccaagaaaatcataaattaataattcatagaaactagaaacaaatatattacactctattgaaatatgattcaatagttgtctgtttcctttatagtcaagtctatttggagctcatctctaacttttcttattgcatccaatagctcaggtgttg

SEQ ID NO: 38551 - DNA, 281 bp, Glycine max
tctacttatgtggcagggcgggtttccttcactttcttgtttccaacgcgagctctgaccactgtccttccttcccgcgatgcttcttttcatgtccgcctgagtgggcttatagcctaaaccatacttcccacgattcccttgggtttttatcagactagttatgccgccattgtctttgcctaaacccatcccgggttcataaccgctccccaacataactcgggccatcattaccgccgcctcggacagacaaggttgcccaaagagggagtccacgg

SEQ ID NO: 38552 - DNA, 442 bp, Glycine max
  unsure (1)..(442): unsure at all n locations
agctnttcacanaacttacgataaaatctgtgacctagccatgatagaagtctccacagaggccatttcctccctcgcccagtattatgatcagccgttgagatgctttacctttggggacttccagctatcacccatggtggaagaatttgaagagatcctatgatgtcctctagggggaaggagaccatacctcttctcagggttctatccctcattagctagaatttcaaagatagttcanatctcggcgcaggaattagaccatggaaagcaagtcagaaatgggatggttggaatactgagaaaatgttnggaggcaaaaacaagaaccttggcaggtagaggcgaataggccccgttcatagacattctcgcactgttgatcttcggaggagtcctctttccanatgtgngatgggtggtggatctagcagtgatc

SEQ ID NO: 38553 - DNA, 284 bp, Glycine max
tgcggactataccttcgaccgaacacggccgtgtttctgtctaggcccggattcaaggcgggctgcagcaccggctccgcttccctaactgtactggaggcggttgcggtggctttatcctctatggttttctggagttttaacatgacctccgagatggaagccatttgatcttttaaggccgatagatcggccttcatctgttcctgcacgccctcttcattatccatttttctggatcgagtgttttaggggtgccttggtgttttcttagttatgatgaa

SEQ ID NO: 38554 - DNA, 317 bp, Glycine max
  unsure (1)..(317): unsure at all n locations
agcttgctaaagcactgctntcaactccaacttnttgaaaggtcaatgatgaanaataaagaactccatttatgcctgcaaactgctgaagtacaaaaagagtacctccaataaaggcaactgcaatcatacaaagaaaatccacagcaaattttatgcttcaaactttcaagtgccatgcacaagtaatgattataaatatgtatttgtttataaaaagagaaagttttgttttatggagctaaattcattcccctatccagctgaaactattactntaatgtacttatttttctcctgacatggtaagcaatcta

SEQ ID NO: 38555 - DNA, 285 bp, Glycine max
accgaatgggaatattgaacgtgacacatgtcatgtaatgggctatactcaagaattttggcctggattatggggacaccttttccctgtagccaaaatcacttttgttctactatttcatgctatggctatcattaccattggccgcttcaccagttggatatcaaaaatgtcttcttgcatggtaagatgcacctgtgcatcaaatgattgattgttcaaattgccattcaacgaattaggcacattgagaacaaaattagggatttcaactgtttggacaat

SEQ ID NO: 38556 - DNA, 178 bp, Glycine max
aggatccgactaacccattctcgacaaaactggcacagccacgatatttccggagtaaatataaaaagtcaccacggagataaataactgataaaatactatccacctatattaggctagcgactgatgagcttcatactgttcataactgacaaactatgggcaagattataagcca

SEQ ID NO: 38557 - DNA, 275 bp, Glycine max
taggaaaattcattaatattttagcttctcaaaccatgatactttacaaaaactgcaaacacttgccatcacagaatcaaatatgtttatggtatactactaaaagaaacactctaatacacatgttgatcaataacatgaaagttttaaagattgaagtatgtaaagttgtgcactgaacatcattaataacaacaaatagagagcatgatcagactaataagtcatgaaacaaagcaaaaatagaaacactaattggaataaatcatttacta

SEQ ID NO: 38558 - DNA, 455 bp, Glycine max
  unsure (1)..(455): unsure at all n locations
agcttaagaaaaagatggccttagcaaatttcttatttccagaagggaattctatcaatagacctccaatctttaatggagagggttaccactactggaaaacccgaatgcaaatttttattgaggcaatagatctaaatatttgggaagccatagaaatagggccttatatacgcaccacagtagaaagagtttcaatagatggtagttcatcaagtgaaagcataactatagaaaaacctanggatagatggtctgaagaggatagaaaacgagtacaatacaacttataagccaaaaacataataacatttgccctgggaatggatgaatattntanggtttcanatngtaagagtgctaaggaaatgtgggacactcttcgattaacacatgaaggaactacaaatgttaaaagatctaggattaatgcactaactcatgaatatgaatta

SEQ ID NO: 38559 - DNA, 268 bp, Glycine max
tgaagtgagaaagcgtggaagagtcagtcttcctacttttgtttcttgaccacaaagtggtacctggagatatatcgcgggggtcaggagaccttggggacgtcaggtggggtgctattgcccaaaaccaagcttgaccaatcccaacccaacccgggcatagtcagtcagtgagaacctgtgacgtacctaaacaggtgagctcctggcagtcaaccaataaaagaacaaagaccacaaagcaaggaggcttgtgtggtggctggcc

SEQ ID NO: 38560 - DNA, 470 bp, Glycine max
  unsure (1)..(470): unsure at all n locations
agcttattcattggtcgaccacctgtactgccatggtcgaccaagcccacaatgtccaacatgagggagtgtgttggaaagctaccttttacttcctaagcacaaaattgtaacagacgagtttctatcaaagagagaagccatagatttgatgccctaaagcagatacctttgcttagccaagttgtcagcaaaatgatnttgctctctaaatctaaagacataaactatactaccacacaatttactatttcatggaaagcagctatgaagttgaaagtgttaagcaatttccatggcttaatgttttgattattcacccgtccaacaactagagtagaatcaaattcttacaatatgcttaaggaagaatatcacaacacaaaatgagggcatagaggaggacctgcacttcatcctcatgagcctacanaccatttttatgacattaccaattaattccccactat

SEQ ID NO: 38561 - DNA, 278 bp, Glycine max
tattcaagcaaatttacgtatggttgtccatgttgccaaaagttatcaggggcgtggtctcagccttcaggacttattacaggtagccttttagaaattaaagaccttcctttccctgtagcaaaggctgtttagtgtatggttttcctggtttgttatattctaaattgtgaatatcattcaagaattttttggattgcctagtatttcatcaattagttaaccaagattcttgacttttcttaaatgtgaaagagatacactaggataaaaagact

SEQ ID NO: 38562 - DNA, 440 bp, Glycine max
  unsure (1)..(440): unsure at all n locations
agcttgtccaanagcttcttagtttattctatatcagctntagatgtgaagaatgctcagttgtgcaccacttatatataaaaggcactgcgcatgcaaatgagggattttgagagaaatttgacaaaactacaaatgtattagtgtatattacatagacaaatctaataccaaaagtcaacagaacattcaaatagcatttagcaaaatgacttctctttatttttagaacaatttacaatcatataatagtatgtagctatttctctctgtactatttggaaaaagttgactcggtataacaaatatctatgccctntatatttaacactcgagtgtctgtggaccatccaagtgaggactctntagaacgggtaggcctctctacccttctaatcacattcaatgaataggcgatattcctttggatcatatacact

SEQ ID NO: 38563 - DNA, 279 bp, Glycine max
tgtaactaacacgtgtataaaagtctactctaaggaaataaagtcaggcagaaagttaaccctagttcttaaggaggaagccttgccctcgaaattaaggcccatactctcttttctctctccctccctcactcgtcttcttatatctctccttccccaccatcagcgtctgtctctaacattcaatgtaaattgctagctaattgctcttgcataataaatacatataatcaatccaagggttcattcattttaaaagcgactaaaattaatttaatt

SEQ ID NO: 38564 - DNA, 333 bp, Glycine max
  unsure (1)..(333): unsure at all n locations
aaaatgggtcattttaaggtccaacgccttataatgatcacctttaagtaaaaagaatcacttgattcacgcataaaaaagaactacgtaggtctgattttctcatcccaattgaggaatgcgtangagcaaagggaaacacccttgtcgaccacaaaaagagaaaaaatagataaagggtataaaggatataaggacataaaagggaacgtaaaaatcaaagtcatgtttgcacattcgattaaaggctgccgtcccttgtgacagacgtgtggagtgctaataccttccccgcgcgtaaatacaactcccaagcctntcacttaaaagttc

SEQ ID NO: 38565 - DNA, 277 bp, Glycine max
tcaagaataatggcctcatcaaactatttatttcctgaagggaattcaataaataggcctcctatttttaatggagtgggttaccattactggaaaacccatatgcaaatttttatagaggcaatagatttaaatgtttgggatgcaattgaagtagggccttatattcccaccatggttgctgggaatacaacaatataaaagcctagagaagattggagtgaggaagaaagaagactagtacaatacaacttaaaagccaaaaacataattacat

SEQ ID NO: 38566 - DNA, 259 bp, Glycine max
tatattaatatacatacattgacatttggcaaatcatatcctgaagtttcatccaacttcacttattaaatactagtggacatttgatgtgagcatactacatataataatgttactgcttccttttaatgatataaaaatgtgtaaaaacaaattgtgacttggttagatattctatatatatctacttgctctaaaatgacagttttttttatacagaaaatgacagtttttaaattatatgtattattgatttaaa

SEQ ID NO: 38567 - DNA, 326 bp, Glycine max
  unsure (1)..(326): unsure at all n locations
aatactatgtaagcagcacattgttcactccagatccaacgccaatcaatctaacatgtcttattaccttaagaacattagaatccactgtcttaactgcaggtggcacggtgaacgctaaagcacaatctggaagatggtgaatgatcaccaccacctacatccttacaatctcccttgatatcattacatgatccatagcttaagagctgcttcttgccaaacttggccatagggaccactttggaggagcttgaagaagatganggcacgangaatggtatgatgatggcgatgagagacatcatttcttgatgaggttcatc

SEQ ID NO: 38568 - DNA, 273 bp, Glycine max
taccattcccaggttttcgaaaaataagtaaaggagaaaagaaaaataaacattactgtttacaaacagctgggttctaaatcatattcgcattttccaaatagagataactaaggccccttgagggtgccttcacaagaattagccagacatagtgagattcatacttacagtttatcggagaaaacttttggggtagagggggaaagatgcagaaaagaacttgatattattgcacatacaactattacaagcttctctttctaagtttct

SEQ ID NO: 38569 - DNA, 403 bp, Glycine max
  unsure (1)..(403): unsure at all n locations
cgttccaacatgggagatcaaatccaatccaatctcattcaaaagacaatgatagctcactgttttgttgctgccttgacttctacagttccaattcccaaatgctatgtacctacgaaatttattaattagttacctatgctatctctacacaatgatgttatatgttactagtactactacatagtagacttaaatcattaatttcctagcttaacatgaataatatttgaacaacatcaatctagctacctaaatcgcatgatgattcaattcanattaagccacattaatttctactactaactctcanagcattattattattgtcgcgtactagggtcgntgtcacattntcttaataagtttcattaaggttaaatctaatcttataagtataaat

SEQ ID NO: 38570 - DNA, 273 bp, Glycine max
taatgagtggtctgaaagccactattgcaattccaaaatttcaccttctcactagagataacaaaacctggtaaaataacacacaggtaacacttttttagaacatataaagcttgtaacatttcattcccctttcttttaaaatttgaaaagggttatgagtaaagcaacaaagtagatgaaacagctactttagcaactcagacccgcatatgaacaatggagttgtggcctgtgatctctgtgtcacctgccccggattggctaccttgt

SEQ ID NO: 38571 - DNA, 388 bp, Glycine max
  unsure (1)..(388): unsure at all n locations
acccttgatgcaacatttggagaggttaatgaaacaatgagatgatgcgctccatgagaggttggatcaaatggagaatagagatcataatgaagaagaaaggatgagaagagggaatgatggtgttcctagacaaaaccgaattgatggtattaaactcaacatttctccctttaaaggaaagaatgatccggaggcctacttggtgtgggagatgaaaatagagaattttttctcatgcaacaactatgaggaggaccaaaaggtgaagcttgctgccacggagttttcggactatgctcttgtgtggtggaacaagctataaaaggagagagcaagaaatgaanagccaatggttgatacatgggcggagatgaaaaggatcatg

SEQ ID NO: 38572 - DNA, 278 bp, Glycine max
ttaaaagaaccactccaaagttgtacacgttgcttttctcatcaactttcaaagtgtaggcatactctgcaatcaaaatttgaatttaaatcaacaactacgaataagaataatacagccacattaattgaagacaattaagataaagtcaatatgtgataaaaggaatggaaaatggcatccatttactttgacgtacatgctgcctattaatcagtttccaactatgaacatctctaacctatatctataggacttaactaattttaggttggggg

SEQ ID NO: 38573 - DNA, 438 bp, Glycine max
  unsure (1)..(438): unsure at all n locations
agctngtntaagtttcagaaagagtntgtaaaattcaaagtaacacaactcaacttatcttgtgccatctgctagttttatcgcaaattcactttgtaattntgttaacttcgcaatgacatcgttcaaaaatgtcttgaaattgctgggattgcttgtgcacctaacattttttgttaatttcaaacttctcctacgccgaaggtatgcgagttcgtggttgattcgtatggtttgtacggatgaacttgatccgtaagtataatttaaacatacaaatcanatacaaatcaagttgatccgtatgattngtacggacgaacttgatccgtatggctcatacggatcaacttgagtgaanggcatttcgcccattcacttataatgttgggtgcacctagcatcaccctcgaaatcctgtgaagaccaacagttgac

SEQ ID NO: 38574 - DNA, 284 bp, Glycine max
tataaaaatcaaacaagataataaattatcctcacattataatggaagcatatgtgcataaataacaaataagtcataagtcatcaaaacataaatcatttgtctaagtcacttgcatctagaagtcctaattttcttctaatggtgtagaaagaatctttagttagtggttttgtgaagatgtctacaagttggtttttagtatctacaaattttaaacatattcacctttttcctaagactaagtgttaattgactatcaacacttaccaagatgagttttt

SEQ ID NO: 38575 - DNA, 226 bp, Glycine max
taaattgttctgccattttcttcagccctttgttccgtctaacgcttgatgtagcatgtaaacccttaatcgccactcttttgacctaggactcgtttgactttcttgactacttatttttaagctctatttaagctacctttttgtttttaagactcgttcttccactttacttcgagccaatatccttgctctcctcaccctatgaaccgcgtacccgtgtgtt

SEQ ID NO: 38576 - DNA, 285 bp, Glycine max
tgcttgtggagcttctatggaggctggatctttgagcttcaatgaggtcctttaatggtggttttccaccatggagatgcagcggaagacaaaggagaagaggtgagaggaggcgccatccactaaggaataagccatggaagaaggagcttcaccaccaagatgagccttggataagaagcttggagaggatgcttcaatggaggaaaagaaagagggagagaaagagagaggggggagcacgaaattgaaggaagaaaaagggagagaagttgaactttgagt

SEQ ID NO: 38577 - DNA, 274 bp, Glycine max
aagattacattcccacgattgcaatgggttaccctttatcgccgccttagatgtttctattcaagcacttaccattttgagctgccatcttgccatgacataaccattacagaatgtcctaagatggaggcttgccatggaaccagaggtacctcagaacttccctttctctcattgaagaaaaatgatttcacggatgaagagagatcttatataaatgaggaaatgaaaatcattctgaaagataaatgataatgatgatgagcactttatt

SEQ ID NO: 38578 - DNA, 277 bp, Glycine max
tgcaaaattatgtctcatattggtttaatcgattacacttacatagttgtttttgagtcaatgactaatttattcaagagtctctgttttaatcaattaccatgtgatataattgattatttctctttttataagtagttcagaagttaaaaagaatactttaatcgattattttgagtatctaaccaattacattgttcttgagttgtttccaggtgtttggaagaaaactttaatcgattaaaaagataatctaatagaatacttcattgaatta

SEQ ID NO: 38579 - DNA, 450 bp, Glycine max
  unsure (1)..(450): unsure at all n locations
atccttagagacgacccgccgcatgcaagcttgtaggattatggtgtacccatcacatgtggtactangtggcggtcgggcgatggtgcacaacaagctttccacatccacaatgcgcgcataaacccaccatcccctgttgcccacctccaactgagctcacgtagcccatatcctcgtttctctcaacaccgggtccccatcaatcctctcaagcttccacaacatccaagcaatacaacattcaaacagcacaagctatcacagccaagcaaaacagagcaaaggcagaaaactctgctccacacatcaaccaaaatcacagcttttctcacttaaagaccacagtaacaattccttcgatccaattcgttaaccgttggatcgactncaaaattntactggaagtctatagtgcataagcctacattttgaccgttgggatctact

SEQ ID NO: 38580 - DNA, 273 bp, Glycine max
tgcacaaaaagtaactaaatatttttttttacaaaatgaagtaactaactaactaaattccactaataatatagagtgaatactctaaaggaagggataggccttgattaggcccatctaatcttcctaattaaactaattacacaaaacaaagcccaaactcacaacccaattattcaagtgactgaattggccaagcttaatttgaccctggaaattgctgaattggccaaagcttatttgtaaaaaaattgaatatatttttgttagact

SEQ ID NO: 38581 - DNA, 229 bp, Glycine max
  unsure (1)..(229): unsure at all n locations
ccgttgaccntnangtgaaccttgctgcctccgagatttcgactatgctcttgtgtaggggagcatgcctccaatgagagagcataaaatgaaaagcccatggttgattcatgggcggacattaaaacgattatgaagaagcggctcgtccctgctattcaatacagggatatgatatctatcttcaatactaccccaggacacagggggtgcgagtatttaatgaacg

SEQ ID NO: 38582 - DNA, 414 bp, Glycine max
  unsure (1)..(414): unsure at all n locations
agcttgttcaaacatgaatgtcgttcaaggaaaccaacaaaacttatcagaacacgagggtggggtgagcgtcacgacgcccacggcaacctgagcgcggctatgcgagactcancgttgggggtcagggacaatgccagtgacgacggcgacctgacggtgcctttgcaagagtgagcattgcgggttagggagaagcaagagggtgggtttgcaacaaactgatgagcgcaagaagttttggcttttgagtttgtaaatctaacgaaaacgacaacaactgttgtttataaaaaaccgatgttaacatatgatcgttaacatcggttnttgagaaatcaatgttaacatagaattcttaacatccgctttgacaagatcgatgttacctacgtaatgtaacatcgattttac

SEQ ID NO: 38583 - DNA, 279 bp, Glycine max
tttaatagaaaattattgcattctttcacttggtccaaacattttgacttattgactaaaataagttaatgttcaattttcttaagaaaataacatgtgaatcatagcggttgtcctcttataacgagtaatatcatctatgtattacgatatattcaatttcccaagtagtatacttgatatggtaataaaacttaatgaataaactcaatgtttatttttggtccaaaacatagatttctcaaataaatccatgtgcacctgaatatgagaaaatat

SEQ ID NO: 38584 - DNA, 458 bp, Glycine max
  unsure (1)..(458): unsure at all n locations
tgcaagctngaagaggatgctntaatggagganaataaagagagaaggggggagcacgaaattgaaggaataaaagagggaaagaagtggaactttgaagtgtatctcataagactttcattcatcaaagntacaacaagtgttacacatgcttctatttatagactaggtagcttccttgagaagctttcttaagaaaacttccttgagaagtttctttgagaaaacttccttgagaagctagagtttagctacacacacccatctaanaactaagctcacctccttgagaagctttcttgagaagctagagcttagctacacacacccatctaaaaactaagctcacctccttgagaagctttcttgagaagctntcttgagaagctagagcttagctacacacccctataatagctaagctcacccccatgacnnaaaaaacatganaatacaaa

SEQ ID NO: 38585 - DNA, 280 bp, Glycine max
tcggtattcaatttcgagcgtctcaatatattacgggactcaatcagacatccgactaaaaagttattgtcgtttgaattagctcggaggttcaaaattcaatttcgaacgtctcaatagattacgggactcaatcagacatccgagcaaaaagttattgtcgtttgaattaactcagagcttcaaaattcaatttcgatcgtctcgatatattacgggactcaatcaaacatctgagtaaaaaagttattgtcgtttgaatttgctgaaagcttcaact

SEQ ID NO: 38586 - DNA, 462 bp, Glycine max
  unsure (1)..(462): unsure at all n locations
agctntanactntgaatttaaacgttcagattctgctggtaatcgattaccatatatgtgtaatcgattacacagtgcaaattttgaattcaaatnttaatagctgttgtaaatcagttttggccactggtaatcgattacatcctctggtaatcgattaccagagagtaaatttcttgtaaaagacgttttaacttanatttcttggccaaaccttttgctacttcaattggaattcccctcctatttaatataccctttctaagactagagacttatcttgatcatccatcttgaatatctttaatttctttgtcttgaataaagctttgagacacatgtgaacctttggcatcatcaaaacattcagcttgatcctttgtctacaatctccctctttttgatgatgaacaatcctgaaatcaagacaagctatatacaagatgatagcacgttcacaca

SEQ ID NO: 38587 - DNA, 276 bp, Glycine max
tcacaaccagcgcatcctgccatggtgcacagaacccatcacaataaagattttctacatccaccataggattcaaacggttgttgttctaaaagactatcgttgctaacatctgttgaatcaaatcctctttctgttgcagagtcggggctgccttgttgcccatctccatgtccttgaaaataatgttgtttacctcctcctctgccttatagtgtcagtatctcccatcccaattgctgagaacgtattaccctaagttgcactcatctctct

SEQ ID NO: 38588 - DNA, 344 bp, Glycine max
tctacacttttattcttaggaggtattagaatatgagtttctggggagaacgagcggagttcataattattctaatatactactatctttttattttatctaaaaaaatatttctaatcttagaacatattctcaagaatatttaaattgaacagaatatatttttgaatatactcaaaaataatatttttgatcataatatttctaaaaatataatttctaagaaaatagcatgatactttgaaacatatgctgcctgtgataaaaagtaaaaaaagcccaatatgcttaaccaaatcatctaagttgcaataatatatagattccttcaacgtgagacatac

SEQ ID NO: 38589 - DNA, 268 bp, Glycine max
tctcatcaatgaaaatattgtagatatccaacaatataggaacaggtgaaagactttttttttttgtaataataatattatgtaatagataacttgttttaatgttttaatcattcaaagtgcagattggactcagtccctgtttgtgagtcattaagtcaagccatctctcagatttcatcagtttttgaagcttctactatagacaagttttttgtgaatactccagtcaagagtgtgatggaaataaatgaatttgatcgggtat

SEQ ID NO: 38590 - DNA, 414 bp, Glycine max
  unsure (1)..(414): unsure at all n locations
catgcaagcttgccgctatctcggcaggttagcatggtgcttcctccacaacaacagccgtctggaggaatcttctggatggcccaagtgggcctgtgtgctatatacacctcctttcttactaaatgcaccccccttctctatttttttgtaattctttttccgtaacgttacgaaactttactaatttcgtaacgatacttattttccttccgcaaggttacgaatcctcacggattatgtatctactcctttttggctatcaaagaagatacggaaattcacggattgcgcaaaaacacctcttttctatctccgccacattaccgaatntcacggattatgcaagcctgctctcttttggatttcagagacgtctcgagacttcacttattgcatgtcatcaagtaataa

SEQ ID NO: 38591 - DNA, 276 bp, Glycine max
tctggtgactgggaagcacgttattctgttgttttctatatcggttccttcgccaagtatgtgtatatctgtattatatttgttgttctggttgttgtttgtattttgttttgtgccgaagaaaaaaaagaagaagtagagatgagagtcgtcattgcgaaaagggcaggacggacgaaatcagtgtcctatctttgctttcctcttatctccgatgagaggtaagtaaagaggggcaactgtcataccctaattttgtccggggattattacttg

SEQ ID NO: 38592 - DNA, 293 bp, Glycine max
cttccttcaacagctattcggaatgaagtaccttttcaaaggcttgtcaaaagactcctcaattacaaatttctcacgatgttttgttgtgcttgctttccccttcctccaaccctataataagatcattctacaaccaagagctcacgaaggctactcactttctcataaaagctataagtgtcttcgcagtatatggcagaatctacatctccggagatgaataaaggagattgtctacatgtctcaaacccctggttttcaccaatcaaattactgtatggtctgcaagc

SEQ ID NO: 38593 - DNA, 362 bp, Glycine max
ttggcacacattaatttgaagcctacaacattaaataatgaagctaatactctcaggcaggcccaaaacaacagcagtacatgtaaatgcaacagaaagcagtgttccactgtttatatatactatcaaaacttgaagttaattcatgggtccaactatttgacatgctcctttattctattgacaccacttgtgttttttaaactcctatactacccatgtgcctttgtatggaatatcccttctatttctatcctaccctctaatctctcccaaattcacacacctagaccttttgatgctcttttttttctcaacccgagcattaggctttgatattatttggttctctctatagagct

SEQ ID NO: 38594 - DNA, 432 bp, Glycine max
  unsure (1)..(432): unsure at all n locations
tcaagcttgcctcanagaggtccaggatggacaaggcggccgtatgtcttgttccgctccggagtacgacagtcaccgctttatgagcgctgtacaccagcagcgcttcgaagccatcaagggatggtcgtttctccgggagcgacgcgtccagctcaaggacgacgagtatactgattttcaggaggaaatagggcgccggcagtgggcaccactggttactcctatgaccaagtctgatccagaaatagtccttgagttttatgccaatgcttggccaacagaggagggcgtgcgtgacatgagatcctgggttaggggtcagtggatcccgttcgatgccgacgctatcagccagctcctgggatatccgatggtgttggaagagggccaggaatgcgagtatggccacaggaggaaccggtctgatgg

SEQ ID NO: 38595 - DNA, 417 bp, Glycine max
agcttggctaactctataggagacatcttatatgttgctatggatatgggtccagcaccaggtactaggtctatggaaaactctatctctctcgggtggtagactgaatatatcctcaaggaacacttcaggaaactctctaacaatagagaggccacacatggaaacctttgtctgtatttctaagttggacaagatcatgtacacttgagcttcttcttttaaagatgccacaacttggttggcagagatacatcatatccttactcactccagaatcatcaaacaccacagttttatcaaaacagtttaacaagacatggttggaagataaccagcccatacccagaataacatctatttggctcaaagacaaacagatcagatcaatctagaatgttatgccagaaatttcta

SEQ ID NO: 38596 - DNA, 377 bp, Glycine max
  unsure (1)..(377): unsure at all n locations
caaactaacatgggacctgaaaaaaattacatcaaagacgcgaaacaatggagcgaagaagtctgaagaatggcctcaacactgtacctatggttccacccaattctacgacacatacatcaactggaccgatcattccatctcccgnnntngngcccctctttcaatccaatcttgaatagcatcactgatatgaggcacgacctacagaggaaaacaccatcataagaataagaataatgattctcatgacaataataatattaggaccaacatggaaaatgaaaaccttggcttataaatatcatcacantataaacatantacaaaatnnnttaagccnnncctgaacngttttgctacctantctccttttc

SEQ ID NO: 38597 - DNA, 418 bp, Glycine max
  unsure (1)..(418): unsure at all n locations
agcttaagggcccatgttctgcantttttttaatattaagtccatcacagtacgaactactaatattcgtgtcacattttttcatattttaaacgtcaaagaattcaaaaaaaaatatcgtgcaccagtttcatggacaaccacctcaaaataggagaacaaaataaaaaaaaatctatgagttggacccttgcaacaaagcttaagtgcccatgttctacattttattatattaagtccaacacattactaaaatctatgacacattttttccgcagtttaaacgacaaagaattcctagaaaaatatatcgtgcaccagttccatgaaaaaccatttcaaaataggagaacaaaatataaaaaactatgatttggaccattgcaacatagcttaagtgtccatgtttctgtatttt

SEQ ID NO: 38598 - DNA, 418 bp, Glycine max
  unsure (1)..(418): unsure at all n locations
actaagcttcttgagaaacttcctgagaagctagagcttagctacacttattcatctaaaaactaagctcacctccttgagaagcttccttgggaagctagagcttagctacacacacccatctaaaaactaagctcacctccttgacaaaatacatgaaaatacaaaaaaaaaaaaaaaagtctctactacaaagactactcaaaatgccctgaaatacaaggctaaaaccatatactaatagaatggccaaaatacaaggcccaaaagaaggaaaaatctattctaatatttacaaagaagagaggacccaaccttggtccatgggctcagaaatctaccctggaattcatgagaaccccaaggccttctttagcagctctagcccaatcctctnggagtcttctatccaataccc

SEQ ID NO: 38599 - DNA, 362 bp, Glycine max
  unsure (1)..(362): unsure at all n locations
agcttatgccataatttntttttatatatatgcatgttcattgnnggncgncaaaattaaatttctttgaacattatcgatattatttaacaattctaatattaaattttcttgagagtgattaaacctcctggtttggtctgcttcaaatcaaagaataaaaatgccattttgcaaacttctattaacttctaaatttaatatttttttaattattgtgatcatccctggatcccatgagtgattttatgaacatcatattatagtgtaaagagtaaaatgccatggagagagaccgcatacatggggtcccatgatataaattctgagacagtcttatggcccctaaattgcaatcaaca

SEQ ID NO: 38600 - DNA, 453 bp, Glycine max
  unsure (1)..(453): unsure at all n locations
tatacaattatctaagacctccaataattcagtgggctttaattagaggtgagtgctcccacctagcttgtggtacgcgggtatagtagtgtaagggatttttttacccacctacacatcctttcttctcaatatttttaaaatacacttttttttattatataaagtacattacctttcggatgctttgagaaatcaagattgaccaccccgatttctaaacatnagccttttttttataaaaataaattatttatttttaaatttatgttttaatttaaattattaaaataataaaacattatattatataaaaatattgttaagtaattttaaaaataatttttcgttaaaataattgttatttgcttaagaaaatgatgttataagtataattattcctcttatattatttaattcatacaagacttttgaagagattaaaactctcaa

SEQ ID NO: 38601 - DNA, 428 bp, Glycine max
  unsure (1)..(428): unsure at all n locations
agcttgctaaagctgaagaattcttcttttctggattgggacccggagatacttcaaacccactaggatcaaaggtggcagctgtcacagtcaatgaaatattangtctcaattcacttggcatatatatccttggcacgcatagattttgcacctaactcaccctagagggacagagattcttgtagtcttggaaggtaccctctacgttggttttgtcgcgtccaatcaaaacgacaaccgtttattcaccaaagtgctgaacaagggtgatgtgtttgtgttcccaatagggctgattcacttccagcaaaacatangttatggaaatgctttggccattgctggtcttagtagccaaaaccctggagttatttccattgcaaatgctgtgtttggatctanacctcctatctctgatgaagttc

SEQ ID NO: 38602 - DNA, 428 bp, Glycine max
  unsure (1)..(428): unsure at all n locations
ttcagcacctaatgtcatattatattgtaattgggtatcttaacataagagatttcagatggactttaatcctaatcccacaatcgaccttttcacgagatctctacttaaccctttggttaaatgatcggccaaattatgctgagttctcacaaactccactgatatcacaccatgcatgattaactcccgaatcatgttgtgtctaacacccaagtgtctagacttcccattatacacttgactatatgccttagccaaagttgcctgactatcacacctgatagacatgggaggtataggtttgggccacaatggaatctcatagatcagatttcttagccactcaacttctntaccagctgctgctaaagctacaaattcaaattccattggtgaatttgtaatgcaggtctgtttcttggatg

SEQ ID NO: 38603 - DNA, 433 bp, Glycine max
agcttatgctgcaaacatctacaatagtattcttatacctaagcagcaaaatcagccacaacaaaacaattatgacctctccagcaacaggtacaatcctaggtggaggaatcatcccaaccttagatggttgaatccttcacaacagcagcagcaataacaacaacatccttatttccataatgttgctggcccaagcagaccatacgttcctccaccaattcaacaacagcaacaaccccagaaacaacaaacagttgaggctcctccacaaccttctcttaaagaacttgtgaggcaaatgattatgcaaaacatgcagtttcaacaagaaaccagagcctccattcagagcttaactaatcagatgggacaattggctacacaattaaatcaacaacagtcccagaattctgacagattacccttttaa

SEQ ID NO: 38604 - DNA, 451 bp, Glycine max
  unsure (1)..(451): unsure at all n locations
gttgatgaaaatggtgaanaagaaaagnctatataatccttttctttactccaatgacttcaaagcattgatatcactttgcacactaaggatgactgatgagagtaaaaccaacctagggatgatatggaggcagatcagttgctcctatattagagcatcacaaaaacatgtacggacatacacaatttttggatgtcgggacacacaaatcaatttcaaaatttaactaactacatttcttatcacattaaaatcaaaataccaacctaagggtcccgaggagaacaaacacatacagctatagctacaacaatattgtgagcatcctgaccaacaaaatttatctgcangctagttagcaccgaaatgaatgtctattattggttacaaatgatcaatatctgcataacattcaataaagaagtggaacctttgaatactcttatat

SEQ ID NO: 38605 - DNA, 392 bp, Glycine max
agctctatatatgaaaatatatttaattatacataatttaaaaataatctaatttatgacagaagtgttaaacagaaatcccaacttaccataaaacagatatatatacactattgaataaaaatccctgcgtatttaactaaagaaagaaacaaaaatcccaacttaccaaaaaaaatataattgatatttaaaattatttttataaaaaatatgtataattaaatacatatattacttaccattggtggtcaatattattattcaattaattaacatttatctgttagttctattttctgtaaatatttttatcattttcaatagacattctaaccaagtgtgtcgaataactaatgttgaattaatttagttaatcaaatagcttaaat

SEQ ID NO: 38606 - DNA, 459 bp, Glycine max
  unsure (1)..(459): unsure at all n locations
actaagctcttgattttgatattgagcatnatttgttttattaaatgcacatcctttctcatgtagggaaaccactcttattagttttcatgtagaacactttagctaaaaatcacttttctttggtccaagtaggtatgcaaaatataacacatcttttgatggagtttggcaatgctttagatcttgagtttcatttattcttcataaaattcnacaaatcctaagaaaatgtctatgcaaaacaaatctcaaacacaaagtattaaatgaagtcttaaatgtcaactcttaaatgttgtatcatatcatgactttagctaactattgtctgatgcttcaaacgctgacttgtgaatcatgttctgatatcgcataatacacaanctttaacattngtatttatttggatctaatcaaataattaagagttttgattcctcttaagacacatatgtt

SEQ ID NO: 38607 - DNA, 330 bp, Glycine max
agcttctagataattggtgttgtcgagtatagttccaaagctggatctgcagcgggaggaatcgcaagatatgaggagggatctgcgatgataggactggagcgatgatagatggagtggtgagaagttgacggtgatggagctgggaatggagcgggtggtacatctccaaaatagcgttgaacggactgaaatttgatcgaggccgtacccgaatcaaataaacattaaaaatacagtatctaggaagtgatcctaggccgtctgccaacgagcaatggtcaaccaacgttcataatatatagtgataaaacactaacacattggggg

SEQ ID NO: 38608 - DNA, 439 bp, Glycine max
actcagctaacaagaccattacatatttactatttatttataatgtcactaggccccaaggatttaatcacaaatcacattccataatttcacattaaccacatgttcagaataacatatctttagtgcaacacaacatctcacactcatataattcattacccaccatcatgtaacaagtcacaatgatcattacataaacgttatgcaacagatacactaaaactcaatcctatatgtaatgtggtaccatgtcagtgaaaaacaacactaggatgcctaggagtacataacaagacacaccacccaatgggtatgtcaggtcactctcactaagtgaaatcataaggtaaataataagggtcactttgttttgctagaatgctctaaccatatgggatcaacataggcttaatggagcactcaaatcgagtgtatt

SEQ ID NO: 38609 - DNA, 393 bp, Glycine max
  unsure (1)..(393): unsure at all n locations
agctctgcttccacattntctctctctttcatcagattatagatgataatcttttgattaccagctttatcatcattctctttttacaaagcctttgccacatgggagtcatcattcttgttccacccttcttgataagtgcttccctcaggaaagaaccaagtggccttggcaatagaatcgctggaaagcaccaccttggttcccagaactttggaataatcactttgcggttggcgaactcaacattcctctataatgttctgatgagttttggatagatggtttgtgtgtcattaaaaaagtgcctcactccataaaagagnaaagtcttgttgagtttgagaccaaccttctcaagttcttggatatcgaaaaagtgttcaatgtgta

SEQ ID NO: 38610 - DNA, 428 bp, Glycine max
  unsure (1)..(428): unsure at all n locations
agcttggatttccttttagtatttaatttatccttcctaagatggagccaaacccagtcaccctcattaagaactagctcttttcttcctctattgcctttagttgaatacacctttgtttggttctctatttggttcttaaccctctcatgcatcttctttacaaattctgacctagattccccttctttatgtattaaagaagtgtccagtgggaggggaatgaggtctaacggtgttaggggattgaacccatagacaacctcaaaaggggactgcttggtggttctatgaacccccctgttgtaggcaaattctacatgaggaagatactcatcccaagacttatggttgcctttcagaagagcccttaaaagggtggataaagacctattcactacctctgtttgcccatcagnttgtggatg

SEQ ID NO: 38611 - DNA, 358 bp, Glycine max
gctgtgccgaaaggaggattgtattatgtattatttagagccagctggagaccatcaatgctttccacataatttccttgtcggaggggttcaatttgtcgcccttgttcgaggacaagaggagggaggagatgaggttcgccaccgcggggacgcccagcaccgtcatttctcggctggaggaggtggccaaggccgggaagttcgacgtcaggagtagcgagaccaaggtgaggcttcagggtcaggagcgtgggaggaaggggaagctggcgattgccgcggatatctactccgtgactccttcttttatggtgctggacgccaagaaggaccatggggataccttggagtataa

SEQ ID NO: 38612 - DNA, 415 bp, Glycine max
  unsure (1)..(415): unsure at all n locations
agctttcacaggggatattaaatatgttttagtnaattccttttagccttacttttaaatgtaatggataaggctattaggattatgggtgctgttagtcgttttatatgtgtcacaacctacccttcggcgggagggcaacgtgagactcaaggattcatcttccaagaaaggaaaatgcgcggagtcgccaccaacgtttatttgaggaaaacgtcgaaaaaaccggaaaaagacgtggtctacgaactttaagtgaaaggttcgggagttgtatttacgcacggngaaggtattagcaccccacgcgtccatcacaagggacggcaacctttaatcaagtgtgtgaatatgacttcaatatgtgttatcttcccttttctacgctttntatggctttttatgccttatatat

SEQ ID NO: 38613 - DNA, 394 bp, Glycine max
  unsure (1)..(394): unsure at all n locations
ctgaaaagagtaggaatcaccttctcgcttatccaatctgctggcttaacgagctttcgctaagtgcaacactcatgggctaagcgtgaggaagactctggaagaagatgagttgtacaagttcgctaagcgcactgcttcanttcatccgctaagcgaaaaaggcacaccctaatccnaattcantnttgtgcgctaagcggnccataattgcgctaagcgcacgagcatgaacaaggccacctatntaagcctgaaattagattttagaaagagagtttggactagggttcagagctttgcatgtctagggtttctagagagagaaaggtctaagttccaaagagtcttgagagattttgttgtgtgaaaatctgcaaaaaccaaaacttga

SEQ ID NO: 38614 - DNA, 261 bp, Glycine max
agcttgcttgtggagcttctatggaggatggatttttgttcttcaatgtggtccttcaatggtgatttttcaccatggagatgcagcggaaggcaaaggagaataggagaggggaggcaccatccactacggaataagccaaggaagaaggagcttcaccaccaacaattgccttggataagaagctagaagacgatgctttaatggaggaaaagaaagagagaaggggggagcacgaaattgaaggagataaaagaggga

SEQ ID NO: 38615 - DNA, 438 bp, Glycine max
gttagtgtgatgtttgtctacaataatttgtgctttaataataaaagttaatggattggtgggttttgtggaatatcctacctagaacctactgttgctttcaaataaggagttctcaaatgcaatctatgatgttttcatgtctcccatatcttggaagaattgatattatttattactactcatatgcatctatgataaaatcaataatgatatagcaagggaagacatctttgagctcaatagtaggtaagattagtaatttagtaataatatgataaggtgataggaatccaataaataaaagattatttttattgaattgaagagagctcaagagctgttatacaagtaagagaaagaaaccaaagtctaagatcctcagagaaaatattctccgcacatcttggatgcctaataaagtatgatttccataac

SEQ ID NO: 38616 - DNA, 434 bp, Glycine max
agcttgtgatatttatactatatatgtgtgtgtttttttttatctctacctgtttaaaaatgtgataattcactcctcatgtgttgtttatatttggatcatgtgatgatcttaaaccttgtgtttgtgagagcaaatgactaggtgaattactttaagaaaccttgtgatggaggactccgagacacaatattttgatagaatgtaacattggaacaagagtttttattttaattgcatgacgtatcaaacatgtcattttactttatttgataaacttgaacagtcttgttttaagtcataaatatttctaagaaattttatttggtaatagagaaccgaatgtgagcattacccacgtcgattgatttacgattgtattgaataaaattgatttaattagattccgcattttatatatgttgtttttttca

SEQ ID NO: 38617 - DNA, 269 bp, Glycine max
  unsure (1)..(269): unsure at all n locations
tgttccacctaaatagcataggttctcgattggtaattatccctagctatggttgctaatnngntaatctctcccacacccaagttaggaccaagtagtaaaagggtggcctaggagccaactacaactgagctcctgtattaccacgcaaaccatctactggtttctttgacaaaccaaaatcattttatatgctggagcatactgttggtcacaaagctgattctctccaccacgatgaacaatactaaggaaaacaaactatctca

SEQ ID NO: 38618 - DNA, 383 bp, Glycine max
  unsure (1)..(383): unsure at all n locations
agcttcttagtctcgcctgatgaggattattttgtggtttcttcatgcactcctctaatgataatagcatcacttctggcactaaattgctgggagttggaagccatcttctcaattaaatttctggctttagcaagggtcatgtctccaagggctccaccgctggcagcatctatcatacttctctccatgttgttgtgtccttcataaaaatattggaggagaagttgctctaaaatctggtggtgagggcaactagcacataattttttaaatctctcccaatattcatatangctctctccactnanttnnctaatgcctaaaatatcttttctaatnntnnnggtcctnnaaccangnaaaattttttctaagaatac

SEQ ID NO: 38619 - DNA, 457 bp, Glycine max
  unsure (1)..(457): unsure at all n locations
ntacatctaaagcgaacacacaattgacatgctcctgtgattctctagtcgatctcgcaagcaactcgattagactagcgattgtttaccaaatttcagcgtaaacatcaagacacggagtggggaacaaaatagtagtactacttgataataacaatatataataaaaaataaaaaaaaatttaagatatatatgcaattcancaaaataaaaacatttggggtcaataatggttggttgtatagtctataattcgatatactaacaacaaagagatgtgaacaatattgtattcaattttgcttagcagaatttgcggactgggcaaagttatgaggtcttgcttggtcggtctgcaactatagtgcatctatgctagtatgtatggtcaataaattaagtatctcttcattgtgtctaanaatgatgaggtaaattaagaattagccatctttg

SEQ ID NO: 38620 - DNA, 403 bp, Glycine max
  unsure (1)..(403): unsure at all n locations
agcttagtggcactcatcttcgaatgttttctgttaccatccacagagtgatggacagacagaagtcatgaacagagtaattgaaggttatttacgagcttttgttcatcgtaggccaacatcgtgggggaagttcttaccctgngtagaactatctcataatacttcatggaatagcagcacaggctcaaccccttatgagataacatatggacgcaagcctttttcttttccagattatattgcaagatcctctaaaattgatgcagtagatgatcttctcttgtctcgtgatgaagtgttcactactattcgccggaaattactcaaggcacaggtttccatgaagaaaactgcggatgccaaacggagagaggtaattatgagcccggcaggtgggtat

SEQ ID NO: 38621 - DNA, 458 bp, Glycine max
  unsure (1)..(458): unsure at all n locations
tcttatattgaggtgccgcagttagtgagttgaacactctatgttntgcattgaacatggaactgtccaattcataggcatccaaacatttaatagaaccaattcctacttcctcagtgatcttttcagatggaagcaaggtttccttcaaactttcttccaccaacgagatctgaaacaaataaataaagccatttgaatcggttacgatttccacaccacttttacttttcacagtttattttctcggaatccaaacagtacttaattgaaatggaataaagcttaattgcttagcgatttgcaccggaatcatatcacgaggcacatattaaccataaataataaaattgtgcatctaagctctgctactagtccgatctaagagtttccttaaataagcaatgaagaatagcacctanaaattacttgtagctngaattagataaatgatcaat

SEQ ID NO: 38622 - DNA, 443 bp, Glycine max
ctctaagtcacctgcggctgcagcttcacaacctacattaaaagagttatatctattgttcaaaataatcgggtcaaaactacaaaccagatcaggacatggcaaatacatttatatatacatataggtgaacattttgacaacattaagtgatatgacaaacaatcatgagtttcagcagggtcttagttgaaccatgagttttttgacaatattttccttgcactaaggattattgtgattaggctatatttttattttgcaaacacaagttacatcaaggacaggttatgagaagtgagttggaattgacattctcccaatcaagagcgtgccttaattcatttagaggtctcttatcaggctgcgtgaatatgaagttgatgttgatccgtctaaaagacgtggacctgagggtgaaagaatatattttgtgattctag

SEQ ID NO: 38623 - DNA, 452 bp, Glycine max
tgtaagtatgaatcacctttattctttcttctaaggatccgatcttttctgagatatccatgtctcctgttgagttgatactgtgagcagaacaaatgcatgtttcttcaattgacaaatgaacttgtataacataatgtaattacttggtaaaaactcattttttagtcatatattgataaaaaaatggagacaacaaggttagtgttggcgtaaaggttttgtgcatgattttcctccgaagctttggcttctttggaagcattctcctgtccccttacagctttagcttttccaagtatgtgaggccaattaaatgttgaatagtgaaattattgcctatttgagtcaaacatgtgcagatagacccacttatattaaacaaaaactattaaaaacaatggttggcctcaaaagtaaacatcccaacaatctattgtattgtgggatac

SEQ ID NO: 38624 - DNA, 353 bp, Glycine max
  unsure (1)..(353): unsure at all n locations
tttatgtggtcttgaatggctatcacaggcctatatatatgtgacttgagacacgaatttgctaagagagtttttcagaacaaaaaggtcttatcctcttataaagaacaatcgttttatcctcttacaaattccttggccaaattacttgtgattcaataaggaattatttgagtgctcaaattgttcaatctatctctttcaagagagatttcttcttctcttcttcttcattctgaaaagggattaagagaccgagggtctcttgttgcgaaagaattctaaacacanaggaagggttgtccttgtgtgtttagaacttgaanaggaatttacaagatagtggaactctc

SEQ ID NO: 38625 - DNA, 447 bp, Glycine max
  unsure (1)..(447): unsure at all n locations
acactataacaactcaagcttgtaggattatggagtacccatcacatgtggttctatgtggcggtcgggcgatggtgcacaacaagctttccacatccacaatgcgcgcataaacccaccatcccctgttgcccacctccaactgagctcacgtactcccacgtagcccatatcctcgtttctctcaacaccgggtccccatcaatcctctcaagcttccacaacatccaagcaaaacaacattcaaacagcacaagctattacagccaagcaaaacagagcataggcagaaaactctgccaaaacaccaaccaaatcacagctttttctcacttaagaccccagtaacaattccttccttccggttcattaaccgttggattgactcgaaaattntactggaagtctatagtgcataagcctacattggtgaccgtgggatctact

SEQ ID NO: 38626 - DNA, 379 bp, Glycine max
  unsure (1)..(379): unsure at all n locations
agcttctatgatcagtcaagattataatttggtgccctaaaagatactgcctccattttttaacagcagtggtgatcgcagcgagttcacgaacataagtttaagaagagagtaacctgnggcaaaactgcttgctaaaaaaagctatcgggtgtcttccttgggacagcaccacacccatacccgaacccgaggcgtctgtctccaccgcgaaaggttttgtgtgctaagactagagaatgtgtcatagcatgcttcaatttgttgaaggcaacatcagcttccacggtccagtggaactcttccttggtcaacagacttgtaagtggtgctgccaacattgcgtagctccttataaatcttcaataaaagccaagca

SEQ ID NO: 38627 - DNA, 409 bp, Glycine max
taggaacccaaacttgtagcttcaatgcaaggaaacttattcatggctaagaacccaaattttggtttttagaattagaaaagcatgaaaattaggacttgcttgtgagagttttcgctcgaatttgggctgccccatgtttgatactttgcatagaggtagcatggagaacaccttgcaatagtgtgtatatataggtaaataaaaggggcatgaaattctttgcaaagggtgaatgaatattgaggtcgcttcccaaatgaatgtatgatagcacggaattcccttttaaatgcaagtgtgtgcataatgcaaatagcttgccaatatgcataagtgtgagtgaaacaataaaagtttgtatgatatatatttcaaatatatgtaggtagtttgtaatagaaaatgt

SEQ ID NO: 38628 - DNA, 407 bp, Glycine max
agcttgttaaataaataaatttactttacataatctaaatttcgattttctgaaatgaatgcattgttatcccaattaaaatatcatttagttgatgacaataattaaaaaatttaataatgatagaaatggaaaaaaattataaaaatcatttatatacaattacacatgattgccaactaaattaaatgctaataattttcgtaactttcaacctttcgtaactttcctctaaaaaaaactgtgttggattccatttaggtggactttttttttagcgaaatatatatttcctttgttactaattataatattcttttttaaaaatttgtttgttcttttatataaaattctttgttaatttttaggtgcattaattattttctctttcaatattaatgagaaac

SEQ ID NO: 38629 - DNA, 428 bp, Glycine max
  unsure (1)..(428): unsure at all n locations
gacacttgaaactcagcttgctgtataaagctgagctcttttgggtttaactatagaaactcttgatgtaatactcttactatctatttaatgttattttctagtgttctttgcttctatctatgcttattatacatgcttgtggcttgatcacctatttgtatgtgtagttagactttctagtattggaaaatgctttaaaaccttacaacttgatagagcaagctaaaaatctgtatgtataggaatggagtgcagtgatctagtatattttacactatatgcttagtgcaactctgttagagcgcagttgttgaggaatcaaggacaaaagctaagagagttaagctcattcatgtgagacatcatggtctgaatattctatcggtgtaagaacactangataatgttaaatagagaaaaaacat

SEQ ID NO: 38630 - DNA, 395 bp, Glycine max
  unsure (1)..(395): unsure at all n locations
agcttctcgatatattatgctctctgaattggatttccgngngagaaggtatgaccatnggaatttctcgagagcttacttcgtgcaatatcaagcatgtcgatataatatacgacttaatcggacttccattcgataagctatgaccatttgaattcttcgagagcttccgctgatcaatttcgagcgtctccatatactatgcgccagaatcagactttcgtgatacaaggtatgaccatgggaatatcccgagagcttccgttgatcaattttgagcgtctccatatactatgcgcctgaatcggactcccgtgtgatgagagatgaccattttaattaatagagagctcgcggtgtacaataccaagcgcaactctttattatgcgcctga

SEQ ID NO: 38631 - DNA, 422 bp, Glycine max
  unsure (1)..(422): unsure at all n locations
tgagatgaggaagagtagaaaggtgaaactcctcagtttttattgttgaccacaaagcggtacctggagatatgtcgcgggggtcaagagaccttgaggacgtcaggtggggtgctattacccaaaaccaagcttgaccaatcccaacccaacccgggcatagtcagtcagtgagaacctgtgatgcacctaaccangcgagctcctggcactccacagataaaaggaacaaagaccacaaagcaaggaggcttgtggtggctggccacgtgtgaaactcgattgataggtgagatatggtctctggtaatctattaccaagggtgggtaatcgattacaaagcttaaaaatgaaagcatgaggctaagatggtctctggtaatcgattaccacngggtgtnatcgattaccaggcttaaaa

SEQ ID NO: 38632 - DNA, 386 bp, Glycine max
  unsure (1)..(386): unsure at all n locations
agctntggagtttccaagggtttattcttcttcttcttttgtccagtcttcttctggcttcaattcatcagtgggctttccttctgtgtccagcatcttgggatgttcccagcctttgatgacaactttccaggttctgctatccagtgatttgaggaaggccaccatccttgctttccagtattcatagttggttccatccagaattggtggtctgttcactggtcctccttctttctccatgttcatcagaatttatctccctagatctcactcagtgatttcgagtgcctgctctgataccaattgaaattctgatacagaggtcagatgtcgtaccggatgtcacgacatcacgcttcagaacatggagattatatttgact

SEQ ID NO: 38633 - DNA, 362 bp, Glycine max
ttatgtggcaaggcgggcttccttctctttcttttctccaacgcgagctctgaccactgtttttccttcccgcgatgcttcttttcatgttcgcctgagtgggcttatagcctaaaccatacttcccacgatctccttgggtttttatcaagctatttatgccgccattgtctttgcctaaacccatcccgggttcataaccgttccccatcatgagtggggccatcattaccgccgcatctgacaggcaaggttgcccaaagagggagtccaccgatgaaatgctgaccacctcaaaagactgtaaagcggtttctaacgattcttctgcggcttccacataaagcatggaagatgggcat

SEQ ID NO: 38634 - DNA, 426 bp, Glycine max
  unsure (1)..(426): unsure at all n locations
agcttgtctcagcgtttatgcgagacttataccaacatgttagctatcatcgccaagtacgaagaagagttaggtctagccacggcccacgagcatagaatcgcggatgagtacgctcaagtatatgcggaaaaagaggctagagggagggtgatcgactctttacaccaagaggcaaccatgtggatggatcggtttgctcttaccttgaacgggagtcaagaacttccccgattgttagctaaggccaaggcgatggcagacacctactccgcccccgaagagattcatgggcttctcggctattgtcagcatatgatagacttaatggcccacataattagaaatcgttaggaaacttgtatggtctcttagaccttgactagatatgacttcctttttgaaatanaatgagttgtcccatgt

SEQ ID NO: 38635 - DNA, 389 bp, Glycine max
tttcacttgcctactattttcccttggcatctttgcttcaaatggtgaaattatttattttattttttgtaaaaatatagttttggttgtttctcgtgtttatagggaagggaacaacacttatgcaggcaaattagtcactcataggcttcatctaggtttgacttccaatggttgaatgcttctcccctttttgttaaggatgagtttcttaggaatagaaataggccaaatgacctatttggtcctttatcgtatatgattagttcaatttgatcctttatctttctaaaaattaattttggtcctttatgttttaaaaaagaactaaaatggtcattccgtcagtacaaccttagcgccattaatgtaacttagatagtgatgac

SEQ ID NO: 38636 - DNA, 419 bp, Glycine max
  unsure (1)..(419): unsure at all n locations
agcttctaaactttgtacaagtatgattctctgataccacttgttagacaagtggcctcagatatcttaagaagggggggttgaattaagatattccaaacttttctcctaattaaaaatctatcttactttttacttaagttatgaattcccttaatgacaatcttcttaaatattaattcaaatgaagcaacttgaattatgaatataaagcaataataaataaaggagattaagggaagagaaaatgcaaactcagttttatactggttcggccacacccttgtgcctacgtccagtccccaagcaacccgcttgagagttccactaacttgtaaattccttttacaagttctaaacacacaaggacaacccttcctttgtgtntagagattctttacaacaagagactcacagtc

SEQ ID NO: 38637 - DNA, 426 bp, Glycine max
  unsure (1)..(426): unsure at all n locations
agcctcanagaggtccaggaaggacaaggcagccgaatgaactagttccgctccggagtatgacagtcaccgctttaggagcgctgtacaccagcagcgcttcgaggccatcaagggatggtcgtttctccgggagcgacgcgtccagctcagggacgacgagtatactgatttccaggaggaaatagggcgccggcggtgggcatcactggttactcccatggccaagtttgatccagaaatagtccttgagttttatgccaatgcttggccaacagaggagggcgtgcgtgacatgagatcctgggtaaggggtcagtggatcccgtttgatgccgacgctatcggccaactcctaagatatccgttggtgttggaagagggccaggaatgtgagtatggccataggatgaaccggtctgatgg

SEQ ID NO: 38638 - DNA, 437 bp, Glycine max
  unsure (1)..(437): unsure at all n locations
agcttccatgtaagaaggcaattttaacttcaaattgaagcatctcccaactaaagtgcgctgttaaggagatgatgatcctaactgtattcattttttccattggagcgaatgtctcctcataattgattccataggtttgggtgtatccctttgcaaccaaccttgccttatatcggtccaatgtgccattagcctgatatttaacggtatacatccacttataacccattgtctttttgtcttttagtctctctacaatctcccctctcatttctttccaatgcacccatttcttcattcatggctcatacccagttctcatccttcaaggcttcttgtattgatgcagggattttgatagaatcaatagctgaaataaaactatggtgctgtagagaaagatntttagtagacacaaattgngatatatgata

SEQ ID NO: 38639 - DNA, 433 bp, Glycine max
tttatacaaaagttagtcgtataattcgacttatcaacttccccaaatatacagatttgcttgtcctcaagcaaagaaagaacagttcacttgtcctcgagtgactaatacagtgaccaatcaaaagaaaatggtgtttgattcatcaaggacatcaaccatatgacctgaatatcatggaatgcttaaatcaatcacttctcacaagcatgcagcttttcaaagataggagcacaagtattagagtcacaactaaaataagctagtaagcatgacagaaatcaagggagaatcatcaaccaaaacctcacagtcattgtttcactcaactcaagtgtttaggcttattccatcataaacaaccaacacaagttccaacctttgcatttcatctcctatcatacagaaatgaacacataataatgaatccgat

SEQ ID NO: 38640 - DNA, 401 bp, Glycine max
  unsure (1)..(401): unsure at all n locations
agcttgccacgtggatatatgttatatttttaattcctaatgnccctttagntntaagaaatccttcttagtaatgttatacaactgttattagttctatctgagaaatactgaaatacattttatatgagggcacgggggcaatatccattgtacgacttaggtaccagagtcaaagctaaatataacttgaatgctttgagtggacatagaaacttatttaagccatttgcttatccctgttaattttttttagaactgtgtttgctttcagaataattgttgtgtaattgattacatattctcttactacttaggtcattacaaagagctcttgacagaagactctaccttcttctctatggtaatgcatatggggctccaagtgggaagcctgtgtg

SEQ ID NO: 38641 - DNA, 447 bp, Glycine max
ttctcattcatattcatcagacgaccacatgttggtgtttaatgtatagcaataaagctccttctcaagagtagtttgcgaagagcaatgggagatatcgtatgcaatcagcgcatgacaactttctgatggaacacccatgactgagtaaactaaaaaatatagcacaccattgcatatcacactctcattaccacctctccaccccatcaaaacctctgttgaatttgtcatcctggtctcattctttgaatcgtatatatgaattgagataccccactggacaaaatcctcagggatttgctttgatttcacaattgccactctgtaattgtgggaatttttattcattgacattgccaatgcattgtagtcacgagatttcaaacctagaggcccatcgagcttcctgtagtttttttaggtaatggagttgcacatacataa

SEQ ID NO: 38642 - DNA, 417 bp, Glycine max
  unsure (1)..(417): unsure at all n locations
agctngngatagcatttgggcgtctatttcaactttccttcgctgactctacatacataaaacaggcccaccatcccaattgtgcggaagcatattcatatatcattggggcatttcaccaagcacttgataggcgtatgtttggacataaattgcaagagatggaggcaatgtggcatgccccattgcttcagaatacaacataggcctaaggccttctcattcaaatcctcaactccacaaaacaggcatggatttcacgtgcaaattgcttcacgaattttgcaaaaaatgagcaactaaagcaccaacacacatcaatggagagccaaataaccaagggaaattgcactttcttgtggngagagaattaaagcgtgaaaagggaagctaaaactcaacaatggaagcttgggg

SEQ ID NO: 38643 - DNA, 443 bp, Glycine max
tatagacaactcaagccttttttagtaagaatgtgggctcagtctctcaaaatattaatgtcactagtctccgtgctttcaattaagtccattgcttcctcgggggttttcattttgatcttacccctagctaaagcatccaagagctgcttagattgtagtctcaacccatctatgaatatgttgagctgtattggttttgaaaaaccgtgagtgggattcttccgcaataaacctctaaatctttcaagtgcctcattcaaagattcatctggaaattggtggaaggaagagatggtagctttgccttctgcagtcttcgattcagggaagtacgtctttaagaaattttctactacttcatcccatgacttcagactgtttcctttaaaagaatgaagccatctcttagcttctccaactaaagataatgagaacagact

SEQ ID NO: 38644 - DNA, 376 bp, Glycine max
agcttatgctgcaaacatttataatagacccccttagcatcaaaatcaacaacaatagaataattatgatctttcaagcaacacatacaatccaggttggaggaatcattcaaatctgagatggacaagtactccacaacaacaacagcctgcccctcccttccagaatgttgctggtccatgcaagccatgtgttcctcctccaatgcagcaacaacaaagacaacaagcaactgaggcccctcctcaaccttccttagaagatttagtgaggcaaatgaccatctagaatatgcaatttcagcaagagacaagacctccattcagagtctaacaaatcagatggggcagatggcaactcagttgaaccaagctc

SEQ ID NO: 38645 - DNA, 448 bp, Glycine max
  unsure (1)..(448): unsure at all n locations
attttggttggggctttgctagaatctaattcttacaattttntataaaaatttctatccaatagttgctatgctaacttggtaataaatttgctcagattcaacaagacgcacattattaggttgggctaagcgattcgaaattattggtggaattgctcgaggacttctatatcttcatcaagactctagactaaaaatcattcatagggatctcaagactggtaatgttcttctcgatagtaatatgaacccaaaaatatcagattttggtatggctaggacatttgggctggatcaagatgaagcaaacacaaatagagtgatgggaacatagtaagcttttctatagttggttatttttttatttccccttttacaatggcttctagcttctcatgtggactcctgttttctatgcagtggtatatgcctcctgaatatgctg

SEQ ID NO: 38646 - DNA, 329 bp, Glycine max
cataactaattcatctattttaagttagtttattcagagcatgaggctcccaccaattgaggtctagggggagtatagaagtgcacagtaaacttaccattgcaccaaggctcaccctcaatggtgaaaagatgaaatgggaaggtatatttttcttgtcataggcaagaggtaagcttaggaggctaagccccctttgaggaaactttttcatggagacaattttttgctgatctttattacaatttttttttctgcgatctttattacaaatggacagggactactcccaaaagttagctcaagggaggagggttgtccaagtctta

SEQ ID NO: 38647 - DNA, 420 bp, Glycine max
  unsure (1)..(420): unsure at all n locations
taagtaccaaataacttgcttagcaaaaagtaaggaattattagtgttgagtatatcgntaactaatctagcagagtttcactttagaaaaattatgcttatttttcagttcttttttttttcttgagcaagaaacaccttttatagaatttagtgaagaatccgttatgggatcaatgttgagccttaatatgaccattgtctcacaattgganatnaaaacatgtggcatactctaattggcgaggataggaataaagatacagacacttgtatgtgcttcttttctacnaanaaagtgacctttaaagagatatttgtaaataccgttnttgctcttctattttggattttccttaaatgttaaatgttagcagttcaactaaagagatgcgaagctaaaaatagaataacaagatc

SEQ ID NO: 38648 - DNA, 443 bp, Glycine max
gacactatgctactcagcttgagcaattcaaacaacaataactttgatatcggtgtccgattctgtcccgtaagatatcgagacactcgtaattttaaacggaagctctgagaaaaatcaaacgacaataacttttaactcggatgtccgactgagccctgtaatatagcgagacgctcgaaattgaaaacggaagctctaagaaaagtcaaacgacaataacttttaactcggaagtccgattgagccttataatatatcgagacgctcgaaattgaaaacggaagctctaagaagagccaaaagacaataacttttaactcggatgtccgattgagtaccgtaatatatggagacgctcgtaattggaaacggatgctctaataataatctaacgacaataactcttaactcggatgtccgattgagtcccatattatatc

SEQ ID NO: 38649 - DNA, 344 bp, Glycine max
  unsure (1)..(344): unsure at all n locations
agcttgtagcacggctggacatgatatatgtctttgccacacngcgagagaacaaccagctgagagaaagaatccacgcatgaatctctgaattttagaataaaatgtataactgatgacatgatgaaggtcatgattgtgcatatacaacccttttgaccaaaaagcttaccttgaatgataattgtatcctttgcaccctttatgaactaaatgatattgttaaaaatttgaaccctaaacttaaataattatctccagataccttgattacaatctaggaaagcatatggctcatggaaaacttaccccaaatttgggggagtggaactaattggaatgct

SEQ ID NO: 38650 - DNA, 445 bp, Glycine max
caaccccatcaccccacatacctcacatatacttctctacaaaggagggggaaaacccatacacgtgtaaaaaaatattgtttgtgtgcatatagcaagcatctttcaaggaaataatttgggttgaataagattgttatgcatataagaatttttattacgagtatttaacacatttatatatttaattaaaacttaaacttaattaataattcagttgacagaatttcgtgttagtctataagaagttattaaataatctaaaatcactacatatccatggtgtcaacttactaatggtggatacaggaacatttggataggattcgaggcatcttaattcgaacaatgttcgtggtttggaattggtgatcagaattattataaaataatataaagtaaacactgaaaaaataaataaattaaacattgatgcttaattact

SEQ ID NO: 38651 - DNA, 262 bp, Glycine max
  unsure (1)..(262): unsure at all n locations
cttctnctagactcatcttctccttgaagtggcgtctcctctctctcttccatctccattccgtggtcattcatcttccaaaaagcaaaggaatccattgatgaagaagatcctaggcctacaagcttgaatggagcctacatcactgccctccggcgggggcgcgaaaaggtctctcgcatgggccaaggggtgtgtctttcattgaaggaaaacacgtggagtcaccaccaaccgttattcgaggaaaacgtcataaaaa

SEQ ID NO: 38652 - DNA, 579 bp, Glycine max
  unsure (1)..(579): unsure at all n locations
caagcgcccgtcgcgctagacggacgtgatgcgnntgtgtcatnnatgannntnnnnnnnnnnnccgagcaggggggtttgaatcgagactgagagcctcggagaacccnangaaactccagctcgcgnnnccccagaaggacatcagccagggcgagactatcaccttcctgcacgacaaacatcgtggaaacctcgcaaaaagagcacaggcggcgagcccaaccaatcgaatgcagatgacagcacttatatcccgctaccaaaatccccacagccaacgtagcaataccgntgaccacgatgatgggtatcaatccttaacactacccctcgaccatcgtagaagacaaatggagtgagcctgccacaatcaacggtaggcacacactcaagacgaaccgaagaggccgcccacctaacaagaaacgcactctgggaccacactcataatcgagaagaccaagagggagagtaggcgccgcgaccgcccacacccgcccacgaaaagtgagagcacggcagaaaagacaccagccaaacacgtgcgggccgcgatcaaacagcgaggaggggagg

SEQ ID NO: 38653 - DNA, 278 bp, Glycine max
  unsure (1)..(278): unsure at all n locations
catgcaagcntgacattcatttctgtcgtnctatatattacgggactcaatcggacatccgagtaaaaagttattgttgcttgaattttttcagagcttcaccattcaatttcgagcttttcgatatattacgggactcaatcagacatccgagtaaaaagttattgtcgtttgaatatgctcacagctgcggcattcaatttcgagcgtctcgatatattacgggactcaatcagacatccgagtaaaaagttattgtcgcttgaatttgctcagag

SEQ ID NO: 38654 - DNA, 286 bp, Glycine max
  unsure (1)..(286): unsure at all n locations
ntgatgcaacatttggagaggttaatgaaacttcatgtagatgcgctccatgagaggttggatcaaatggagaatagagatcataatgaacaacaaaggacgacaaaaaggaatgatggtgttcctagacaaaacctaattgatggtattaaactcaacattcctccatttaaaggaaaaaatgatccggaggcctacttttantgggagatgaaaatagagcatgttctctcatgcaacaactatgaggaggaccanaaagtgaagcttgccgccacggagtttt

SEQ ID NO: 38655 - DNA, 420 bp, Glycine max
agcttgaaccaaaacttgtgatagtgtgatcttacactgtgagtgaacgactagctgtgagtaataatctttgcatgaatctctgaattttagaataaaatgtataaatgaggacatgatgaaggtcatgattgtgcatatacaagccttttgaccaaaaagcttaccttgaatgataattgtatcctttgcaccctttatgaactaaatgatattgttaaaaatttgaaccctaaacttaaataattatctccagataccttgtttagaatctaggaaagcatatggttcaaggaaaatttaccccaaatttgggggagtggaactaattggaatgcaaagaaagagataaagcatcaacacacacaacacgtaagttgtttggtaacaaaaaaaagaaagaaaaagaaaagcaaaaag

SEQ ID NO: 38656 - DNA, 387 bp, Glycine max
tttgaatcttagaaaaaccattgtttattgtatcccattctcactacaagcttataaaagtccttctgattcaatttatgcattcctaactgtatgccatgagatgaagtgcaaaggttggacctcatgttagttgttaattattgattagtttaaacacttgagcttgagtgaaacagtgactatgaggcactggttaggcatccttccatgaaatctgtctgctgattagtttcattccagtgtgttgcttaataaaaatgctcttatctctcaaaatctgcatgtcttgtgaaaaaccattgattgagtcattgtatacattccttattatatgattacatgtttggtagcattaattctttgaaattatctatgcatctattt

SEQ ID NO: 38657 - DNA, 413 bp, Glycine max
  unsure (1)..(413): unsure at all n locations
agctnttatccatggcatcctatgatgttgagcttcttctagactcatcttctccttgaagtggcgtctcctctctctcttccatctccattccgttgtcattcatcttccaaaaagcaaaggaatccattgatgaagaagatcctaggcctacaagcttgaatggagcttacatcactgccctccggcgggggcgcgaaaaggtctctcgcatgggccaaggggtgtgtcttccattgaaggaaaacacgtggagtcaccaccaacgtttattcgaggaaaacgtcagaaaaaccaaaaatgaaaaaggtcgaaggtttgcatattttgaaaatgaaggtttgggagttgtttacacacggngaaggtattagcaccccacgcgcccttcataagggacaacaacctctaat

SEQ ID NO: 38658 - DNA, 450 bp, Glycine max
  unsure (1)..(450): unsure at all n locations
ntagagttntcctttgttaaagaattatgtcttttgttcttgaagttataatataatgatctttcttcatctattcatgtgcctctacccattctcattcatttgcatgtttatttccttgttacgcttaaaaagatacagtcctgcgaaggtactaataccagggacccggccgtcgatttcgggcaagaagcaagtcgggtagagaatgaagaggacgaggatgtggggcttcccccagagctggagaggataatcgcgcaggaggaccgagagatgaggccgcatcaagaagagacagaactcgtggacctaggaatcgaaagtgggaaaaaggaagtaaaaataggcacgggtatgaccacacccgtccgtaaagaattaatggccctgttgagagactaccaagacatctttgtctggtcgtaccaagatatgccttgtttgagt

SEQ ID NO: 38659 - DNA, 358 bp, Glycine max
agcttcttagtttcagatgatgcagattggtttttatctacctcatgcactcctctaatgactatggcatcatttctggcgctaaactgctgggagttggaggccatcttctcaattaaatttctggcttcagcaggagtcatgtctccaagggctccaccactggcagcatctatcatacttctctccatattactgagtccttcataaaaatattggagaagaagctgttctgaaatctaatggtgggggtaactggcacatagtttcttaaatctctcccagtactcatacaggctctctccactgagttgtctaatacctgagatatctttcctgatgggtgtggtcctggaag

SEQ ID NO: 38660 - DNA, 453 bp, Glycine max
  unsure (1)..(453): unsure at all n locations
ntaagatcaaactctnttctattntttttctctcaaatgttcttcattcttcttcctcttttcacttttgttcttttttcttgcacaaaattttgtggctcttccactggtgatgatcatggaaggctaaacattcaatcaatccaaggatccactccaagcaatgctgaatttgagttttggtttagtatttctaatttgtgtgaatgttcatctttttcttcaatcctatttttgattttcatgattatgaatattcttaggattgaaaacgaattaggttagggattcctttcctaatttcaaacttaatcacattgtttggatgatattccaacctaatttgagatctcaatgaatttagggattaattgaattgaactaactctaatggcattgattgaactntcataacatgatcattcgctacagaactatgataattcgatttgc

SEQ ID NO: 38661 - DNA, 432 bp, Glycine max
agcttccttaagaagattccttaagaatctagttcttagctacacatacctctctaatagctaagctcacctccttgagatgagaagctagagcttagctacacaccccctataatagctaagctcacccccatgacaaaaaacatgaaaataacaaaaaaaaaagtccttattacaaagacaactcaaaatgccccgaaatacaaggctaaaaccctatactactagaatggccaaaatacaaggcctagacgaaggaataacctattctaatatttagaaagataagcgggctcatacttagcccatgggctcgaaatctaccctaaggctcatgagaaccctagggcctttccttggatctctagcccaatctacttggagtcttctagccaatgcccttgcggggtaggattgcatcaagttgtagta

SEQ ID NO: 38662 - DNA, 447 bp, Glycine max
tgtagaatggctagacatgatacatgtcagggtttgtgtttggttatggataaaagggatgccccacattatttccataacacaaatgcaaaaatgatgatttggaaattttatgcaaaactggtcatgcatgcacctatgtggacgctcaagtgtcaaattttcatggtcatgtgatgctagggctcaagattcatttcctctattttaaatcaacccaatgtttccaaaatatgttcttttatcaatttgtgcattcatccaagtccatttcgggcgtccggggaaattttcacagcattcacccttcaggtgtagacacgttttttttttcaaaaatcggttatgatcaatgattttttttcaaagaaaagttggaaatcatctcttttaaaagcatgtcggttttagctagaaacttatttctctttttcacctttttcttac

SEQ ID NO: 38663 - DNA, 317 bp, Glycine max
  unsure (1)..(317): unsure at all n locations
agcttgaggagtaggatgaccggattgttcaatttatttttattcttantcatacnggatctttctaataattggcatttcatgactagggagacaaacatgatatagtatatgtgccttatgaatgaatcactatcaatcaaagagaatagactaagtcatcctactagaatgtagattactaaacggaacttctgtgatggctcaaaaatgacacgcactattcgaatgggttgatcataacatatgaagatttcgcgaatatacacgcacaacagtatattcatgataacctctaataatccaccttatttaaa

SEQ ID NO: 38664 - DNA, 452 bp, Glycine max
  unsure (1)..(452): unsure at all n locations
gcttanataagagctactaccacaattgacaatgcttactttaatgtgtagnctaacaagagtgctgagtgcatagtttatgaaatcaataaatattagttctttattggaaatcatgatggaggtgcatcgataacattaaatgcaacttcactataaaaactttctacttttgattccttaaccagtgctagtagggcactagttaacattttccaagttcaataatcataaacttcacaaagaggagataacaagtccaacctacctgatgtatagttccattagcctgtctatcttctcacactcattttcaacaaatgtacttaataatctttctctcctagaacccctcaagattccacctggcaaaaatatagagcactgaagttcaatatcaaatatgatataagtatacacagtagttgaatcgagattaagatcatgaatca

SEQ ID NO: 38665 - DNA, 359 bp, Glycine max
agcttatatccatggcatcctatgatggtgagcttcttctagactcatcttctccttgaagtggcgtctcctctctctcttccatctccattccgttgtcattcatcttccaaaaagcaaaggaatccattgatgaagaagatcctaggcctacaagcttgaatggagcttacatcactgccctccggcgggggcgcgaaaaggtctctcgcatgggccaaggggtgtgtcttccattgaaggaaaacacgtggagtcaccaccaacgtttattcgaggaacacgtcagaaaaaccaaaaatgaaaaagggccgaggtttgcatatattgaaaatgaaggtttgggagttgtttacaca

SEQ ID NO: 38666 - DNA, 460 bp, Glycine max
  unsure (1)..(460): unsure at all n locations
ntagagtttccttntgttaaaggaatatgtcttttgttcttgtatttataatataaagatctttcttcatctattcatgtgcctctacccattctcattcatttgcatgtttatttccttgttacgcttaaaaagatacagtcctgcgaaggtactaataccatggacccggccgtcgatttcgggcaagaagcaagtcgggtagagaatgaataggacgatgatgtggggcttcccccagagctggagaggataatcgcgcaggaggaccgagagatgaagccgcatcaagaagagacagaactcgtggacctaggaatcgaaagtgggaaaaaggaagtaaaaatagagcacgggtatgaccacacncgtccgtaaagaattaatggccctgttgagagactaccaagacatctttgtctggtcgtaccaagatatgcctgtgtagagttctgacatc

SEQ ID NO: 38667 - DNA, 378 bp, Glycine max
  unsure (1)..(378): unsure at all n locations
agctttattactcacctatnggcttacttatttgatgatgtgaaacaagtagctgctactattgtggcaggcaaaataaaaaaatggctattgtggccatcaaaattatagaagtggctactacgacagtggaaaaaaaaaaaaagatggatgataatgccatctaagaataagggaaagagatggatgcttatgccatccaagtaaagaaataaaagatggatattgatgccataaaaaagggaaagagatagatattgatgccatcgaagtaaagaaagaaaagatggatattgctgccatcaaagaaaaagggaaagagatggatattgatgccatctaaggaaagaaagaaacaatggatactgatgtcaccga

SEQ ID NO: 38668 - DNA, 409 bp, Glycine max
  unsure (1)..(409): unsure at all n locations
agccatccacatacaagcatataatgaaacaatcatctttcatagacttcttgtacacacatctatcaacatcactagaggaaaaaccatcactaagcaaagtctaattaaacttttcatgccattgtttttgtgcttgtttcaaacgatatggaaattttaaaagttgtcacactttgttttcttgattagtgaatttcagctatggttcaacccnctnngcggaaatcaaatgctagagtctccactaagtgtgcttaagtttcatgaagcatgtaaagcatgaaggacatgccccnnnnntttcaattgggtgtcacatgctaatgctcacctcccccttaagcttggtcaaatttaattggattgaacttgtggcatgtaattaaatttctttccaacacacaca

SEQ ID NO: 38669 - DNA, 395 bp, Glycine max
ctgcagcttctgtccctgagaaacttttcttgattacaacagggagtgaagattgctgaaaaccctagccttgcaacaagtcctagggaagtagacacggagatggacaagaaaatccgcagtattgtgagtagcattttgaaagacgcctctgttcctgatgctgagaaagatgttccaacatcctccaccccagatgttgctgtccctgaagctgatgaagatgtcccaacatcttccaccccgaatgtttctgtgcctgatgctgagaaagatgttccaacatcttccggcccaaatgctgaagtactctctttccccagcaaagagagatcaacagaggaagatgatcaagccacagaggagacccctgcaccaagggcacaagaacctgc

SEQ ID NO: 38670 - DNA, 458 bp, Glycine max
  unsure (1)..(458): unsure at all n locations
tgtaatgcgaaccaagaagaatgaaatgaacttaagatgctgttgggattatcgtctacgggccttaaacagagaaacgaatcaaggacctaaaaagggattattaaagaggttaaaaaaacggaaattgtaaaacaagaataacataataacagtattttacttgagtcataacataatttcttttatatttattatttgataatcgatacacattataagtatttagttttactatttatattgtttactagatataaaacttagacggaatatacgcgttaaccgtaaaaatcataaaaatgtctttcgatagataattatattttcatgctagattttattgacaaatacgatttttttttatcatgaatcataaaatttatattttgattgtaagttttttttatcanatatataattntcaacttaagataatngtttatatgttgacaaaa

SEQ ID NO: 38671 - DNA, 380 bp, Glycine max
  unsure (1)..(380): unsure at all n locations
agcttgagagaagttgaggattatatattgatgtctaatgggaacnngaataacttagtttttagaaattacatgttattataggtcaaaattttagaatactattgtatttacataaggataacacattgttcttacaattatttttttctaggtgtcaaagactaatcttagccatggtgtgtggttgttattagacaaaaaaaactattcttatcatttactttagcaggttagtgacttgattgttcaagattcaagtcatattaatatttgaattttgctacatttttttctatatacaaagttaatgaatcaaagttatatgaaatcctacatataatacatctgttactatactcttctctctttgaaatata

SEQ ID NO: 38672 - DNA, 383 bp, Glycine max
  unsure (1)..(383): unsure at all n locations
tatatccttacttaaacctgatgttggagatgttctattgaatgataaagacaaacgacgggtgtagttaatactttntcgttccacttcgcaaaatatatatatatagatatagatatgtatatatataggtatatctatatagagatatatattaattaagataaatacaagaaatactttatgaataaaggaaatacttaatgactatctcgaaatggggcaatcaataccgaagagagggggtgtctgttcaaagcaagtgaggattagatcatgctatagtgactactctcgtgccactgcggtctctaaggatagggtcagagacggtttggcgcacaagggagatgatatatgtgaaggaggaatgacacactatg

SEQ ID NO: 38673 - DNA, 422 bp, Glycine max
  unsure (1)..(422): unsure at all n locations
agctttaaataggctcngggttcaatttctacttttatgtaagccgagtcgagccttaaaaaaagcctatgacaggtaatgagtcaagctcaagtcatacgtattcaactcaagccgagctcaagcctagtaaagcttggcttggcttggctcatttccacccctaataatgaagaggaaatggacatttgggtgtacaacacaacctaccaaaagtgcagttctagtgaaagatgagggaatgggataaagtaagctagtcggcgcccgtcactttcctctttcattcattcattcattcatttacttttcctcacacaaattacctctgccatcaacctgcactcaccaacccaacttcttcccaaaccccaaacagaacaaaaatacaacacctttaattactctcttgctaaatatat

SEQ ID NO: 38674 - DNA, 435 bp, Glycine max
  unsure (1)..(435): unsure at all n locations
tatcctatctgttaaatacagggcatccttgtctttatantgcttggacaaaacagagaaataacagaataaacttccatatggcatttggtcacatcccaacaattcaccaccttgaactaacatccatataggacacaaactgcaccctccaaacacacatgattttaaccccaacaatctacattgagcaagcttaagcagtgatcaaacttgctctttggaactggctttgtgaacatatcagcaagattgtgcagagtgctgatcttatgaactttgattcttctctctgaccgaatgaagtgatatctaacatctatatgtttggttctatcatgatgaacctgatccttggccaagcatatagcactaatgctgtcacagtagatgttagcatattcttgattaattctgagatcatttatcagacct

SEQ ID NO: 38675 - DNA, 368 bp, Glycine max
agcttctcaagcgaataaactgcctcctactctttccaaaacccctcattctggacaatccccgcaacctccctcgccaaaggatcctccatacacatcaccttaaacccatcctccatcaccaccatttgtatcactctagcacagctcaaaatatcctccaacataggaaacaccactccaaagttcttcaacggatcacattttggcgaaggcacgcgaatcagcccaccacagtccatctcctgcatcctgcacttgaggaaaacactcctcatctgagattcattgtctataaaattggcaaccttcaaacaactctcgatcacaactctgaaaagtggcagctcgcggttaaaatccttgat

SEQ ID NO: 38676 - DNA, 375 bp, Glycine max
  unsure (1)..(375): unsure at all n locations
tataaaactcagctagcttaggtatactgatccagccttttacattaaggtctccncatgctctggcgaaggaactctatctcatccattttttgctttttgaataaacacagaatcaggagcaacagtaagaccggaattataatatatcccgggccatcttggaaacgtatggacttgattttgtttagcttccaccaacctaatacatcaaagtctggacgcgtggaacagcgatttttcaaatctgatctagctaaatttcgctgtggctctggttcctgatgaggcataaaatctttagaccttatctgacaacacagacctcctgagaattctcatcatattgggttccaaacttgcattttcagcata

SEQ ID NO: 38677 - DNA, 401 bp, Glycine max
agcttatcaggtataaactatttaaatttcgttggaataactttttataagattgaactgaaaataaataaattttggtggataaaaatcgtaacaaattgtgaaatcgtaaactcaatgaacaaagagggactaaaagtaacttttcgaaaatttgagggactaataaaaataattttttttgagaactaaaaaatacttaccgaaatttgaaagattaaaaatatatttaagccttaaatcaatcttataaaatcagcttgtaagatgaaagatgtcccacacttatatacactaatttgactatatctctagacaatgtgatctcgaacacaacctctcatgtcaaagataggatatctcgtgcgtgaagtttgcaggattggaagtttatgggtagt

SEQ ID NO: 38678 - DNA, 400 bp, Glycine max
agcttgcaattgacatatagggtcgttctaaaatgactggaacctcatggtcttcctccagatccatgaccacaaaatcagctggaaagaccttcacttttatcagaacatcctcaattaccccgtaaggtcttgtgatggatcggtcaacaagttgtaaagtcattctcgtgggcatgatttccaactctcacaaccttctacacatggagagcggcattaggttgctactggttcccaaatcaatgagagtctttctgatgtgccatcattttcttctatttcttaaaccctttttgcaccattttaattactgattagtcttaattgtcaaattaattaagcagttttattatttgggcacattgagctaatttgatgtttttaatctaatttcatg

SEQ ID NO: 38679 - DNA, 143 bp, Glycine max
tttcttaagaaacttccttgagaatctagagcttagctacatacacccatctaaaaactaagctcacctccttgagaagcttccttgagaagctagtgttggacaagtggcctcagatatcttaagaaggggggggggggggg

SEQ ID NO: 38680 - DNA, 327 bp, Glycine max
agcttaaacattcaatttcgtttctctctatatattacgggacttaatcaagcatccaagaaaaaatttattgtcgtttgaatttgctcagagattcaacattcaatttcgagcgtctcgatatattacgggactcaatcagacatccgagtaaaaagttattgtcgtttgaattggctccgagcttcaacattcaatttcgagcgtctcgatatgttacgagactcaatcagacatccgagtaaaaagctattgtcgtttgaatttgctcagagattcaacattgaatttcgagggtctcgatatattacgggactcaatcagaca

SEQ ID NO: 38681 - DNA, 442 bp, Glycine max
  unsure (1)..(442): unsure at all n locations
taacatcagaccacttccagggttctggttctacttttcatggatttgatggggcctatgcaagttgaaagccttggaggaaagaggtatgcctatgttgttgtggatgatttctccagatttacctgngtaaactttatcagagagaaatcagaaacctttgaagtattcaaagagttgagtctaagacttcaaagagagaaagactgtgtcatcaagagaatcaggagtgaccatggcagagaatttgaaaacagcaggttcactgaattctgcacatctgaaggcatcactcatgagttctctgcagccattacaccacaacagaatgggatagttgagaggaaaaacaggaccttgcaagaggctgctcgggtcatgcttcatgccaaagaacttccctataatctctgggctgaagccatgaacacagcatgttaca

SEQ ID NO: 38682 - DNA, 267 bp, Glycine max
agcgaccgcggctgcagctcagttcaatctgacaaggctatgcttatatttgctaaaccatactcaaaagtgcctctcaaatggttcaccggctgcggatccatataatattgatcttttcagcccttcaaatattatcatcactggcttcctggattcatgcctaccacgttcactattattttgcgaggacctatgttcaattcttacaatctcaatcgctctgtgaggctcattaaggaagagctgcttcccaatttactgaca

SEQ ID NO: 38683 - DNA, 430 bp, Glycine max
  unsure (1)..(430): unsure at all n locations
agcttatgcacggaaaatgaaatngagttgctcttattaaacaccatttcctagttaaccatgcattaggtaccatgttcaattattttgttttgttgttgtgtgtttttcttttagaaatgggtttatgatcccaacatggttggctcatggtgcctaacacatgcaactaagaatgtagtgtgaagtttcacgcttcccctttttttgtttttgttttgtagaggaaaacgcaaggatgagcaaacatgaaaacaaatggtatgcaattttgcagatcaaaaagtttgttgaccgcatatgcatgatgatgccatgactcatgcaaaatgtgaggctggaatatgataatggacaaatgcaggaacgatatgttcattatgatgttatgaagagatgcttatgcgatgcatgatatgaatgcatttta

SEQ ID NO: 38684 - DNA, 411 bp, Glycine max
tgagatgaggaagtgtagaagggtgaaacttcctgcttttattgttgaccacagagtggtacctggagatatgtcgcgggggtcaggagaccttggggacgtcaggtggggtgctattgcccaaaaccaagcttgaccaatcccgacccaacccgggcatagtcggtcagtgagaacctgtgatgtacctaaacaggcgagctcctggcagtcaacatataaaaggaacaaagaccacaaagcaagggggcttgtggtggctggccagctgtgaaacttgattaatatgtgagatatggtctctggtaatcgattaccaagggtgggtaatcgattacaaggcttaaaaatgaagacaggaggctaagatggtctctggtaatcgattaccacggggtgtaatcgattacc

SEQ ID NO: 38685 - DNA, 390 bp, Glycine max
  unsure (1)..(390): unsure at all n locations
agcttctttcatggacgcaccncgaattcacatttagttactcactctctcttcttacctttaaacaatgaatcaattaatctcgttccttaatttcgcatgaatgcaactccatatttgcctccgcaatcaattattcaagtaattatgattttgatcatcactcgccggttctgattatggaaggttgatgttaattttcattgttcaagtatcgttgagaggagcaagtgcgaaggagataacgagagacgcgcttcttcagaaggtctcctgcgaaagagaatntcncanntncccaaaaaaagccgcttntcctgcgctctttatataggatctatggcnnngctctcgatttctctgattttaaaaaattaccataccgcatgg

SEQ ID NO: 38686 - DNA, 333 bp, Glycine max
gcgtttatgatgttccgaggacattgaatttggtacaaccatgccctcctgatttctagctgggaaattggcgagtggaggaacgccccggcattgactcaacgagcataatgtaaacctttacggttttaaaagctctatacctgggcctaagctttagagtctttccttttgttaaggctttgagtctttaggtcgtgaattcataatacaaggatctctcttcatctagttcctacgtctctacccattctcattatgttgcatgttcacttctttatctgatacggcagatccgatgactagtcccgcgaacgtactaatacctgggac

SEQ ID NO: 38687 - DNA, 341 bp, Glycine max
  unsure (1)..(341): unsure at all n locations
agcttcacccttcgagccaaacatagttctaacttatcagctcancaccactcatcctctagacttcgccactcctcctgcacctatatcacacaactcctgcgttccttgaaccaatccccttgctcatcaatataggatctccataggagcacacgcttacacgaagatcatacatatgtgaacctatatcataacatgcgatccaactacatattaaatattatataaagccagacaatgctcaacaaaatatcatggaggaatattcgtacttacaatgcgaaggcgcgcatatccaatacgaacaccaaaaagggatgagagttatataccaccta

SEQ ID NO: 38688 - DNA, 206 bp, Glycine max
ccacctctctgcttggctccgctcaaggaacaaacaccacaaagcttagaggctcatgttctggcaggccacctgtgaatctcgcttgacacaccgcatatggccttccgttatccattaccagcgcgggctaatccattactccgctttgtacccaaatcaggacgctattacgccttatgcgcaatcactaccaaggggcgtat

SEQ ID NO: 38689 - DNA, 139 bp, Glycine max
  unsure (1)..(139): unsure at all n locations
agcttcttgccaatggtactagaagtttcatgattttcctttgatcctctnggatttaacggagaatactcgttgagtcggtatatatagtctgatagaacaactgggagtaagcgtgattatctttaacttctgtgtg

SEQ ID NO: 38690 - DNA, 453 bp, Glycine max
  unsure (1)..(453): unsure at all n locations
nttgttagacaagtggcctcagatatcttaagaagggttgttaatataagatattgcaaactatttccccaattaaaattctatttcaatttcaatgcaagttacaagttcccttaaaaatgaattcttaaataatgattcaaatagaacaatctgaatataaattaaagcaataataaataaaagagtttaagggaagataaagtgcaaactcaaatttatactggttcagccacacccttgtgcctacgtccagtccccaagcaacccgcttgagagtttcactatcttgtaatatccctttacaagttctgaacacacaaggacaatccttcctttgtgttcagatntctttacaacaagagaccttcggtctctcaatcccctttgagaatttagaaagaagagaagaataaatctctcttgaaaagatagattggcaatctgacactc

SEQ ID NO: 38691 - DNA, 406 bp, Glycine max
  unsure (1)..(406): unsure at all n locations
agcttatgcaanggggnnatttccagttcaaattatatnnaagccnattccagtcaaacagaaatacttcttataaaagacatcggtggtgttaaaaaaaaaatataaagtgtaatacaaaactttccaacagataattcattcaatgtggtccaaaggttgtttagaggttaattttaaattgaaacattaaaattgaagtccaatgcaatttcaattattgagataaacatgataaatggtactttagctcttttattcagtgatccttgcatacataatgcacaccaggaaatttagcagcaaattagatttcagtcatttgcatcagtaatgttgtcttggatcaacgctgctacataaccaatgtatttgtagcataagcaaatggggttgtaaatactac

SEQ ID NO: 38692 - DNA, 456 bp, Glycine max
  unsure (1)..(456): unsure at all n locations
agagactntaagcagtgcctgagattagaatttcattttaatactttggagtacgaaaattcaaaaactttataaaaaaaaaaaaaaaaaaaaaagtagcatgcagtgctacaacaaaagcacaggcacatatgggaaaataaatgaagtgacgtacaattaagtccttgaaagaaagaaagaaagaaaaaaaaactagtggaagctcaataatggaggaagagaaagtgtggagcacagaaagaaacagaggtgtgtgtggcttcttgtggagaaggaagaagaggaaggaggagcaggtcaatgtcaatgtgattttataaagctagaaaatgaatataatacaataattccttacgtaagagtttttaaatgtatattgtcattaatatacttgacagctaatatccaaccaagacaacatcttggtttttcggataatggttatacatatat

SEQ ID NO: 38693 - DNA, 409 bp, Glycine max
gggatccttaagcacctgcggctgcagcttgacttaagcacatatattattatatgcgaccatggcatgaatttaaataagaaatccatctttcaatcttctctttcaacatcattcaatatctttcaactttttctacaaaattttctgattcatttctcttcatctttctaaaagcttttgttcaacactttctcttccaagaaaagttctttgttcaaaaacttgtgctattcatctttttcattctcttctccctttgccaaaagaacaaagaactaaccgcctgaattcttttgtgtctctcttctcccttacaaaagattcaaaggactaactgcctgcagaatattttgattcttcccttccccttaatcaaaagaatttaaaggactaactgtctgagata

SEQ ID NO: 38694 - DNA, 396 bp, Glycine max
taagataagtaataaagaagtagcatctccttattaatctgatgagggccggccaagatgaatttctctattagaggagaaaacatagatctagagcccttctttgctattctagattttaagtcttgaagatgcttttgatacttcagtggctcaaagggattcatatcataaatccattgaccctactaatacaaatcaaaacaattataaatctcaatcatagaaggacctaatgttgttctctctcatagaaaattcaattgtattcatagaagcctctatggcatctgtatgaaaacctttctctgccaactttttaagagatcttgtgaccaagtcttctaccttatgaatatcatcttcaaaatcacccttcctttcaatgctaaattg

SEQ ID NO: 38695 - DNA, 398 bp, Glycine max
  unsure (1)..(398): unsure at all n locations
caagctaattatanngnnagtttctaattttattttcatcngcaaaaatcaccaactaatttgagaattaaaataataataaatatagtgacaattaaaaatcatcaatatttgtaaaagaaaactgctggaattcataatcctaacaatgtcaatccaattcggtggaaaagatgtaattgatgcatttctaaaaattgaagaaccaactcaaaatttttaaaaattaataaaaaaatacgtttaaatatgattggttatctctaataaatattcaattgttatgcctgcttcctaataaatttttgtttacggtgaattcttaataaaacaataattttatttttggtcattgacacttatttttagaccacgatcaattattgaattttgattta

SEQ ID NO: 38696 - DNA, 383 bp, Glycine max
  unsure (1)..(383): unsure at all n locations
ctttattcctgcacaaatgataactaggaatatcaaagtctgtcatgtgtagaccttgcgtaccatgagttctcgtggggatggaaatgtagttatgtgaggcttcatcaaaagtggtccttgggtttgtcgagccttggaccaaaaacgggccttgggttntgtagacctatgaagatcaacaagcatagagcttgggtttgacgagtcttgcttgtattgtaagtgttattctcttgcatacatggcacttaccatgggtggtgtcataccctaatttcatccaggaactatcattcactgatgttttgattctcgcttaccgaaaggtgttgttcgacaccagtttctgcacaatgtgtgggatcattcgacttttggtt

SEQ ID NO: 38697 - DNA, 370 bp, Glycine max
agcttgcctaaagaggtcctgatagtattgcggccgaaggaactagttccgctctggagtacgacagtcaccgctttaggagcgttgtacaccagcagcgtttcgaagccatcaagggatggtcgtttctccgagagcgacgcgtccagctcagggaggacgagtatactgatttccaggaggaaatagggcgccggcggtgggcaccactggttactcccatggccaagtttgatccagaaatagtccttgagttttacgccaatgcttggccaacagaggaaggcgtgcgtgacatgagatcctgggttaggggtcagtggatcccgttcgatgccgacgctatcagccagctcctgggatatcccat

SEQ ID NO: 38698 - DNA, 374 bp, Glycine max
  unsure (1)..(374): unsure at all n locations
gcaatagcacccgacctgacgttcnctttgtcttctgacccccgcgacatatctccaggtaccactctgtggtcaacgaataaaagcaggaagtttcacccttctacacttcctcatctcaagcttgtaggaatatggggtacccatcacatgtggtactatgtggcggtcgggcgatggtgcacaacaagttttccacatccccnngtgacatataaacccaccatcccatgttgcccacctccaactgagctcacgtactcccacgtagcccatatcctcgtttctctcaacaccgggtccccatcaatgctcccaagcttccccaacatccaggtaattcaacatccaaatcatcacaatctaacatacca

SEQ ID NO: 38699 - DNA, 394 bp, Glycine max
  unsure (1)..(394): unsure at all n locations
agctagcaagcaatcttataatgatngtttttattcatnagaaaaacaacagagagacctcgcaactgcaaataaaagaatatcactctaataagagtaataccaaatataacagctacgagattaagaacaaagcaaagaagacaactaacttgtgttgtttgattaaacataaaagatcacatggactcttatcggtttcaaaaggatgtgctgcctctataactgatataacgtgccaaagcctcaaatatatattttactagtggtaagaggagcactggctctgtcctgaggttagaaacacgataacatagaggagcaacttttttcagtaatgccttatcatttatgagagaaatattgttgtggggtaaacaatgagtttaacttc

SEQ ID NO: 38700 - DNA, 320 bp, Glycine max
aatattacataggtgatcctttgcaatgtggctcccattctttgagtttgcgtatatatatatggaaaagttcacagagaacttaggaaacaaaagttagtagtcattttgtatatattcgtaaagcttggaaattctgttggatgataaatcgtacatgtaatttgctcactcaaataaataactctcttttatttcttatcattccttggtgttaaaagaaaaagcattttcattataacgaaaaacactacaataaggctgttgactaacatctacagaaagtttatccttcggctttttttttatgatccaatcca

SEQ ID NO: 38701 - DNA, 410 bp, Glycine max
agctgaggggggttacgcctttgtttcctccgcccattgtttcagatgtgatcacagctacatctatggagaagaagggaaagtcattccctcctcatggacatgaaagagatgtagttcttccgataagtcaggaaaagctcatatctcttgttactgaagcaaagggtaaaaataatgcacatcaatcatggagtgaacccactgccagaagaatgccaatgccccatgacggtccagctaaatggaattcatcttgcctatcatcaaggaccctagaggatgatgcatcttcttttgccttaaaacacaaaactcaaacacaagaacagatgttaagcagtgaaagatattcatctggatctacaacaagtgatatgcaagtaaaaagggtattgtcatctatgagt

SEQ ID NO: 38702 - DNA, 380 bp, Glycine max
gtttagaggtattagttgactaattatggtttattgcttctgacttattaaggtttagggttatttgaaaagatagggttgcttgactaattgggtttaggggtatttgacaaataaaggtttagggttactcgacgaattcgaatttaagggtatttgactaatgagggtttatgtgtagttgagttaattacggtttagtgttacttggccaattagggtttatgggtatttgacaaattacggttacttgactaattaaggtttatgggtatttgaaaattaaggtttaaggttacttgacaatttggggtttaggtgtatgtgactaattaagatttataggtacttgactaattaaagtttagtggtacttgact

SEQ ID NO: 38703 - DNA, 411 bp, Glycine max
  unsure (1)..(411): unsure at all n locations
agcttgtcccagcgtttatgcgagatttagactttcattctagctatcatcgccaagtaccaagaagagttaggtctagccacggctcacgagcataggatcgtggacgagtatgcccaagtatacgcggaaaaagaggctagaggaagggtgatcgactctttacaccaagaggcaaccatgtggatggatcggtttgctcttaccttgaacgggagtcatgaacttccccgattgttagccaaggccaaggcgatggcagacacctactccgcccccgaagaaattcatgggcttctccgctattgtcagcatatgatagacttaatggcccacataattagaaatcgctaggaaacttgtatggtctctcagaccttgactagatacaactttnttgaaataaaatga

SEQ ID NO: 38704 - DNA, 450 bp, Glycine max
  unsure (1)..(450): unsure at all n locations
tctgagagtgatgactntcccttcttgagagtggtgtcttgcagtccaccattcttcttcatgtacaggtgtttgtttgaggtcatgggtctcattctccccttgactattttctattgtgctccacttgagaacttgaacatggccccttcctaattccacctaaacagttgggccatggtgaaggcctttgacattttgtgcccattcttcaacattcagcctagtttgtcgactttcttgtatttcttctagatgaagttgactggcaacattggttgggtctccttgaacaacgtgtccaagaagttatttgacttcaactcaaacgtctttcaccacttcaaggacgttntttcaaggttttggctactgatatcgtggttgatggtttaccactaatgttcaacaaggacggggagccctgcttcccattctattggcaatctg

SEQ ID NO: 38705 - DNA, 372 bp, Glycine max
  unsure (1)..(372): unsure at all n locations
agctntgataaatctgacaaagaaacgtgttnattgtctctatattaagggggtatctagtgaaggagacactagagacagtggaagcagcaaaatgcagacaatagttgttgtgatcattgtcatagtaacattgcttgtcatttctggtatgctattcgtggcacatagatgcttcaggaaaaaggaagatttgcttgagtctcctcaagaggattcagaagatgacagtttcttggagagtttaactggcatgccaatccgttacagctacactgatctagaaactgcaacaagtaacttctctgtgaggcttggagaagggggtttcggttcagtatataaaggagttctaccagatgggactcaact

SEQ ID NO: 38706 - DNA, 400 bp, Glycine max
  unsure (1)..(400): unsure at all n locations
agcttactaaaacaacgagtgatatgatcttatttntattaagggaaacaattggaaagaggatggaaaaactgaactctgtatgttgtgttaaagatacttgtagcaccagtcctgcaagtaaaacatgaaatgaaggttgttggagtgggtgtggaggaaattaagagaaaaatgcaaatctgttcattcaattggggcttaatggtggccattacatttctttacattcataaagcatattacacttttatgtaaacaaaaaaatgtattaagattttggtatttaaagcttgtaactagataagacttataaactatcaaatgttaatctaattgcatatttaggttcagcttcgaacaattaagtatcattggttaattttacatggtattagtg

SEQ ID NO: 38707 - DNA, 443 bp, Glycine max
  unsure (1)..(443): unsure at all n locations
ctcaagctagcttaagacacgatatagattnctttaatttgcactctatgttttcctctccttcaactgagaaccccattggttggtccatataaacatcctcctctaaatctctattcaaaaaggcagttttcacatccacctgatgtagctccaattcataatgggctactaatgccatgataatcctaaataaatcctttcgtgagactggagataacgtctctttataatcaatgtcatctttttgagtaaatcccttagcaacaagtctagccttgtaacgttcaaagttgccatgagagtcacatctagtcttgaagacccacttacaaccaactctgttacaaccctttggtaattctacaaggtcccaaacaccattatgttccatggaatctatctcttctttcatagcattaaccatctctcaaaattatcac

SEQ ID NO: 38708 - DNA, 403 bp, Glycine max
  unsure (1)..(403): unsure at all n locations
agctntgatgatatggactntgccggtttaatgtcaaagtgggtctaaaaagaggcaaatttaatcatcccacttggacgaatgagaaaactggggtaaatgaagagggtgagaatgagggagaagcccatgctgtgactaccattcctatacggccaagtttcccaccaacccaacaatgtcattactcagccaataacaaaccttctccttacccaccgccaagttatccacaaaggccatccctaaatcaaccacaaagtctgtctaccgcacttccaatgacgaacatcacctttagcacaatccaaaaacaccaaccaagaaattgaatttgcagcgagaaagcctgtagaattcaccccaattccagtgtcttatactgacttgctcccatgtctac

SEQ ID NO: 38709 - DNA, 445 bp, Glycine max
  unsure (1)..(445): unsure at all n locations
tagcagttcagtttcatgttgtacagaaggacatgatttcttatttaattttgattcaacacatatttcacatttcttatttttttttatcattcatattaattaaacctagttgttgcaaattcataacatacgttggattaacatgtcctaatctagcatgccatatatcataagaatcaatcaagtaagcaaaagaagatgcattctcattaatcactttagaaacatatagtacaaagagaccccgatcacaataacccatccccataaatacattattcttggccataattatcttattagactcaaacctttcgcaacaatgttatagaaacaaggtcaactctcatagagggaacctgtagcacattattcatagctagtantttcccacatatgagtntgagaagaaatatcccctttccttgaaccagagtagttc

SEQ ID NO: 38710 - DNA, 388 bp, Glycine max
agcttgttagttgtgtggagcccaccttaactgtcttgggagatttatgaggcatttttgtttggtatgaacaagttgaaccattccaaacagtaacatcttgagcaaagatctttgagtgagaaatctgcattttctgctttaaccctctctgtgagagtgacccacttttgtgttgtgcttgtaaatttgtaaaagactttagatagaagtgagatattttattcctgaatggaatccctctttcgaggtgaagacctatattttgtgcaataaacacatagatcctcatttttttttgtaagtctagtaggggctggaaaatatgaaatccaatggtgttgctagtctagttgaggctagaattgaactccagttggagaactga

SEQ ID NO: 38711 - DNA, 328 bp, Glycine max
  unsure (1)..(328): unsure at all n locations
gaaccaattcacctacaaacaatcttctggtgcacatactaatacgaacaacttttcccctatacacaaacaaatattattctgaactaaacaaatttttacaagcacatanattaatacatcctagaataatgaattaatgccttcaaactgaactatacttnnncagagtggagaaagagtgcccagcaacgggaccaaaatactttgttgaccctctttgacagttactttttacacaatttgtacttactatgtttacgcaagaagggtttaccggatagtgcaccgagtccctcagtatttaattaaaatggaatgattcgag

SEQ ID NO: 38712 - DNA, 433 bp, Glycine max
  unsure (1)..(433): unsure at all n locations
gatccttaagcaccgcggctgcagcttactgacaaaaaaatattaatcttgaaaattgattctataataagataatgaaaaaatagttgaaaaatgtttttctcatcttttttttcaagtgctctatttaccaagtttttataggaaactattttttttagaaatttgctcattactcataagataatcactttcaaatgtacttggagtacaaacaaatactagaaaacaaaaaattgtttttaaaaataacaagtaaacaaagcctaaatttccttgtattcttttgttagtcctccattcctaaatctttagttgtttagcatgttatttttgttatgaaaccttctttgttttggaactccaatatgtaattgtgcattttcttttaattatacctttatatatagnggagtaattaagtatgataagt

SEQ ID NO: 38713 - DNA, 423 bp, Glycine max
tgtagcaatcactagtaattaagaattgtactttatatatataaaacatttaaagttttgggggttatggaagtgtcggtgctgcatgattgaaaatctgtcaactttatatggactattatggtactgatttcaagcttcgattcagggagttaatttgtttcttgtgtattttgatgattgaaaactttctaaatcttactgtaagggtatgtgaccaaacttttcattttcaagtgcttataacatgtatctgtggcttttttctgcataattatccagagcagattagctgcatatatgtatctgttaacaagtttatagttgcataaatgatgcttgaaaatgaccaaagtgaatagtgttgcaggattttgctatcatggattaattgctagaattggcaaagcattttcatgtttt

SEQ ID NO: 38714 - DNA, 556 bp, Glycine max
  unsure (1)..(556): unsure at all n locations
cacatacacgacacacaattactatagaatataaaaaanacaataacctnnnnnccnnaagggcaacaggttgaatcatgtcgatgccctgcacgcccaccgnanaanncaacagcaggcangcaaacacancacaggacaagggatacacatgaacatcgcngagcaacgacangcacggcgcaccgaacacaagaggaggagagggcacnaccgaganggaacacacgcacgcaaagcagaaacaaaccgccaaacacgagcgacagagacacggacagagcacaaaacgcnagngaacaggcggcngcggaaagggangaacaaagaggggngccgacaggggccaccaaaacccaacgggggaacacgacacccaagcacgagggacaggccacanaaangacaacgcgaaccaaccgcgaaccaacgggaaagaaagaaacaggacgaggggccccaagagccgaaaagagacgaaaagggaagagagcngggcacaaggaacacgaccccgcaccggcgcacggcagagcaagaaagacacgcccgaacg

SEQ ID NO: 38715 - DNA, 455 bp, Glycine max
  unsure (1)..(455): unsure at all n locations
tctttgggactntgaacaggcaactaactcctctntcataatcatgctatgtgctcgcgactggtccctttcttcccttcgcaacttgagttcactattgctaccccatagagctccgcgaaatttgttccggccatactcttccttgcgagccctcttggtctctcgttcaagggctcttgcggtaattgcattctcttcccgtaacccggcacactccttccgaacgtgtgtagcagccaacttgaacttctccttggcgagttttgcctttcctaactcgcttttgagagcttggacttcctcgtcctcttccggtgcttcaaaattcccttcgctgacgacttttaacttggcgagccaatctaaacctcgtatgcgaactttcagccattcgtggtacccaccaatgatgccattacgaatgcctctaagctcttgatcttttcttaacg

SEQ ID NO: 38716 - DNA, 440 bp, Glycine max
  unsure (1)..(440): unsure at all n locations
gggatcttagagcaccgcggctgcagctgaacaacatnatttacatttttactcaaactttaaaagttaagttggttggattcatttacatccctattcttttttgcacttctccctaccccttaatcacgtttctcaccttattgcaagagtttggggaggtccattcctaaatttgtttctctttcttttttctgtgttggtagatccatttaagacaagacctctcggattaagcttgtctctctaaaggaaggttacaccttttcttgagcatttatatcctgcattcccaccattgcattaaataccttccattgcattttagaaagtctattccataatataaattcacattttagaacaaattttccgaaatgtaatgaaagatgcatgatgcaataatgggagtacaagatacaatagccctntttttttct

SEQ ID NO: 38717 - DNA, 192 bp, Glycine max
  unsure (1)..(192): unsure at all n locations
agacattgagttcaaagatcctgccttgcatttttttatgcagtgttttgacgggggatcatctcttcgaggctcaagctatggcttctggcctgaactcataaaacanggctcttgagtttgatcagggaaataatgtgttctatgcatgctgaagctttgaggactttccatctaactctctttatggac

SEQ ID NO: 38718 - DNA, 372 bp, Glycine max
tagctagggcctttgtgagtgagagacaattattaactgttcctttccattcaatatatgacacataatttagtagtatttgtttctctcatacgttagatagataacttaaggatgtgtcacataaaaattaggatagactataaataaatggtggtttaaaactacctaataacttctcgtgtgttctgcttacaattctaaattattcatattccataacaaaatgtatttggataaaacaacgtcggattagctctcatttcataagatgttaaaagattctcttgttggatcatgtggcctcgaaataattaagattgggggtagaatcagtattcctaacctttactattaaaatacactcttcta

SEQ ID NO: 38719 - DNA, 418 bp, Glycine max
agcttgtacttggtttagacatgattttacatgatttaggacttgcaggattcaatttgggcaaaattggatgagggcaagatggatttcgaaaatctgcactttatgcagaattttgctgtcaaatatgtgcaacagaattttggactgtgcagaaaatgcttgtgtatggctggttgtggaaagggtagtacatatggggttctggacatttgctagcagatcccaacggtcaaaatgtagacctatgtactagggacttccagtaaaattttcaattcgatccaacggtgaacgaattggaatgaaggaaatgttactggggtctttaagtaaggaaagttgtgatattggtttgtgttttgggcagagttttctgcctctgccctgttttcttggctgtgttagttcatgatgc

SEQ ID NO: 38720 - DNA, 383 bp, Glycine max
  unsure (1)..(383): unsure at all n locations
tataaatactaagctnataagtgcgggtctgggagacattgtctattgtttgcgatatgngaagaagatgttccaagtacttcggatttggtccgaccatgccctcctgatttccagctgggaaattggcgagtggaggaacgccccggcatttacgcaacaagcataatgtaaacctttacggtttttaaaagctctatagttgggcctaagctctagagttttcattttgttaaggctttgtgtcttttgtttttgaatttataatacaaggatctttcttcatctgttcctggtctctacccattctcattcatttgcatgtttacttctttntctgaaacggcagattcgatgacgagtccnccgaaggtactaatacc

SEQ ID NO: 38721 - DNA, 404 bp, Glycine max
agcttttaaccttgatttggtttaacctcttgccggtttgatttgttcccatgcttgctaaagtgagacaaaagctggtgcaaatcaaaactccgatatctcatgggtggaatggatgaatgcatgaaggaatgcatataacacagatgtaatctatgaatgcgggggtccggggaattcgtccccttcttagacacaatgtctaggggtagcaaagtgccccaacgtacgtttttaagaaggcgacacggaccctccgttggtttgtatacagaagggatcaagacagaacccatatgcgatgcctatgcaaaagacacaatgcgggaatgtacacagtatgataatattcactgaacataagcaaaagggtatatgatacttatgcatggcagtgtaaaaat

SEQ ID NO: 38722 - DNA, 425 bp, Glycine max
agcattaggaattgcgaaagccccactccatcattaatattagtacctgacatctcaaacaaacaaatcaaacgtaacaagacaattatagttgctgtttgaatacctcacccactcaagtgtatcacacaattatggcttttctctaatgaaacactcttgccttttaccactctaattccccttgagttcttaggcaattcaagagattatggccacaacaaagaacaattcaccaatatgtgtaaggtaaggctagagagacaaggaaaaggttaaccaagaaaaaggctaacaatgtttttaggcacaaatgaaggaaataaaattcagaatttaggaattcaagtaacaatccttcatgcaaccaatatattaccctaaagagaatttttttttaaaagttcttcaagcatgaaccattc

SEQ ID NO: 38723 - DNA, 432 bp, Glycine max
  unsure (1)..(432): unsure at all n locations
agcttatgcatgcaagactttcttatttcaaagtcactttaatagctcatattataaaatgacatacaaacatatgagtccagctagctatcttaaacaatatgaaacttaattttttgtgatagccttcaaactacaacaatgattattatcttcttttttaacaaatctatatttttttattacaacgtagctaatgtggtttatgttgaattcaaatttctaatatcaatttttaggatgttttagattttaaagatactatccaatctttttaagatgtttattttagaaattaatgtgttttttatgttaagtttatgatttgttataaaatagaggttttataaaaaaaattatcaagcatggaatagatangaaaattacaaattttacacgaaatattagtaaaaaaataggcttaattaaata

SEQ ID NO: 38724 - DNA, 441 bp, Glycine max
  unsure (1)..(441): unsure at all n locations
ntatgttgttggaggagttactaagggtcgaggaggtttatagccctctgcaatctgcagaagtatatgaccctcatacaggcatgtggtccctgttacctagcatgccttttgcaagagctcaagtgttgccaactgcttttttggctgacttactcaagcctattgccacaggaatggcttcatacaaaggaaggttatttgttcctcagagtttgtattgctggccattttttgttgatgttgggggtgaagtttatgatccaaatttaaattcatggcttgaaatgccaattggtatgggtgaaggctggcctgcaaggcaagctggaacgaaattgagtgttacggtcgatgatgatctatatgcacttgatccttcaaattctcttgacagtgcaaagatcaaggtatatgattatgaaggtgatacttggaaag

SEQ ID NO: 38725 - DNA, 427 bp, Glycine max
  unsure (1)..(427): unsure at all n locations
agctntacatgcagattntagtaatgactttattattctagaattaaaataacttatgccattaacctatggaattaaaagaacttaatggttgagtgtaactgaaattgtggcaaccaaaagtcaccccaaacagccaccatttggtctcccaaaaggctgatgcctaggttgccaattgngcccttattacaacttgaactaaacctaactaaagcccttttagttgattaaaccaaaacatattttggtcagccaactttacaaggattgagccattatttagacaaactaaacactctaaaattgagacaaagtggtgccatttagtcctcctccatttgggccatgatacaactcacaaccttggatgaccttcttgcatcaacacaggccccaatcccaacatttgaagcatcacactcaa

SEQ ID NO: 38726 - DNA, 445 bp, Glycine max
  unsure (1)..(445): unsure at all n locations
aagcttatagcgcgggtctgggagacaaaggtcaagtggtttcgatatacgaagacgatgttccgagtacattagaattggtacgaccatgccctccagatttccagctgggaaattggcgagtggaggaacgccccggcatttacgcaacgagcataatgtaaacctttacggttttaaaagctctatatttgggcctaggctttagagtttttccttttgttaaggctttgtgtcttttgttgttgattttataatacaaggatctttcttcatttgttcctacgtctctacccattctcattcatttgcatgtttacttctttttctgaaatggcaaatcccatgacaagtcccccgaaagtactaatacctgtgacccgcctatcgacttcgagcaanaaatgaatctaacggaagactaaggaaacaaggatgtgggact

SEQ ID NO: 38727 - DNA, 454 bp, Glycine max
  unsure (1)..(454): unsure at all n locations
tctaagtcacctgcggcatgcaagctttaaatagaaaagaatatnnaaatattgatttaaagcaaagggtgtttgctttgttgattttttttatttcatttatattaatattttttatatgtcaatttctttttataaatttagaataaaatcagtgaaatcaaatcaaataccaagtacttgagcattctattcaaaactctctcctatgcccatagctactgttcatgttacgcgaatagcaaacattattaatacatatttagcattaagtcaattatatatttaatttagttttttaaatgattgagtgttacgtataatttaagaattaattcaaatatacagattgtgtaaatatttttatgtgactatttaatcataaatcagtatttttttggtattatcttaaatttagagttaggtttttctcattaatcatcggtataaaaat

SEQ ID NO: 38728 - DNA, 461 bp, Glycine max
  unsure (1)..(461): unsure at all n locations
tggcctagcccacatcacatgttaagtgcaaagcaattgcatacaaatgctgacttttccttttaaaaaaataataaaacaaagatatttgcgggtcccatgttgctcaaaacgtttcgttttcagttttcacatcttctgtaagtacatgaacatgtcctgcaagggcgagagctggcccatntgatactgaacagtgccaaaaaggtaatcatccacggaaaggttattatcgtccaagtaattaaactgaaaatcaaacgcgttttctagctttaggtccagatcatcgttccacttggggtcgctctgcacctccctctcgcacgtgacatcgggcgaaaccacgtgctccgaactgctcgagtccgtgttcaaccttggcaccgaatccgaagtctccatgtacaattgctcatttcctagcttatgaatctctggcttcgtctcgttctcgtgct

SEQ ID NO: 38729 - DNA, 297 bp, Glycine max
caagctcaatagctaggatagcatgcacaatttctgcatgcaaagaagtttggatccccaagtgagttgcaaaacaaccaaaaaaagacccctatgattggagaagttataaaggtgccagtgacgtgagttttgctcactaccatataaatatattgctgaactgaaaaagaacgatcgtggaaccgcctttggtttctactatgccagattggggtgaccagtaagaatgcttggaagatgagaatgcaagacttgaagtagtgtctatcctgcaatctgaggcatgccttattc

SEQ ID NO: 38730 - DNA, 429 bp, Glycine max
  unsure (1)..(429): unsure at all n locations
agctttacagcagattntaagaatgactcactatcctataattaaagaaacttaatgccattaacctatggaattaaaaaaaacttaatggctgagtgtaactgaaattgtggcaaccaaaagtcacccccaacagccaacaagtcagccaccatttggtctcccaaaaggctgatgcctaggttgccaattgggcccttattacaacttgaactaaacctactaaagcccttttagttgattaacccaaaacatatttttggtccgccaactttacaaggattgngccattatttagtcaaactaaacactctaaaattgagacaaagtggtgccatttagtcctcctccatttgggccatgatacaactcacaaccttggacttttctccttgaaacttgggcttgtattcaataagatggacaaca

SEQ ID NO: 38731 - DNA, 296 bp, Glycine max
  unsure (1)..(296): unsure at all n locations
agcgcattcaatatcctgatgagggtgctccatatgttctcattattggactaatacatttgctgcccaagtttcatggtcttgcaagtgaagatcctcataagcatcttaaaganttccatattgtttgttccaccatgatacccccagatgtccaagaagatcatatctttctaaaagcttttcctcattctctggagggagtggaaaaaaaaaggcnnttctagcttgctcccaggtctattttcaactgggatgaccttaagagagtgttcttggagaannatctccctgcc

SEQ ID NO: 38732 - DNA, 309 bp, Glycine max
  unsure (1)..(309): unsure at all n locations
actccttcgcatactgttntttatcacccctgtccacgttatgaagaaacacgtgcgtcacacccgatccctttctcccacgcgccatcattgcggcggagtatatcaccgccatcctcccaggcgcggccgcaaaatatcctcgcggcccatcaatcatgatcacatcccaatcacggttgtacacctcattgggcagcgtgccaagtgccagcttacaccaccgatcacctttcagtgggtggtcagaggtgttcttgctgacaccgggacaataatctttataagaggagaggaggttcttggcct

SEQ ID NO: 38733 - DNA, 417 bp, Glycine max
  unsure (1)..(417): unsure at all n locations
tatgaggggaagataaaataaggaaaaaaaattatatttagttcttttggttggcacataaagcaaaccccactgaccacaacaaataacatacctttcttctctcgttaacccttgtctttttttctcacgaagtttagcatcatcttctccttaaccagcaaggaagttttttcctacttattgagaaagccccacatggtccttatttgggtaattttcacacacaagcaattacaacacanagtgagaagtgaggagtgaggagtgaagagtgaataattgaagagaaatgggtgctgattggggaccanttattattgctgnggctttgttcatcctcttatctccgggtgtgtgttccaatttcccgcaaggtatagggtggttgagtttggaaacatgaccactattggg

SEQ ID NO: 38734 - DNA, 401 bp, Glycine max
agctataacctcattgtctctatcagtttttatatttgggagccaatccaatccttgtgtccggactctcagccacttatgatagccaccgatgatcccattactgcttcccctaagctctctgtcctttcttcatgccgcatcccatgccttgcgaactccttggagtacctttgcattggggtcactgaaaccccgtgtaatgaaaggcgtgatgctttcgtctaatggcgctcctctcatggggtagccaagctgtcttatggcgaggacgggattataattaatacaaccccatgttcccatccagggaacatttggacatccttcgcatgaagatacaatcctgactcttccttccttctagcgagggaaccaattaacagacgccccttcatgct

SEQ ID NO: 38735 - DNA, 458 bp, Glycine max
  unsure (1)..(458): unsure at all n locations
taatcaagataagtatgaaaaggttnttttttcaaattctgagtagcacatgaatttttctcaaaacatgtttaccaaagagtttttactctctggtaatcgattaccagattattgtaatcgattaccagtaccaaaacggatttgaaaaagttttcaaattgaatttacaatgttccaattaatttcaaaaggctgtaatcgattacaatgttttggtaatcgattactagtgcctttgaacgttgaaattcaaattcaaaagtgaagagtcacatcctttcacataaaagctttgtgtaatcgattacactgatttggtaatcgattaccantgattggttatgagtaaatcaaaagatgtaactcttcaaatggtttttgactttntcaaattgggtttaagttttctaannagtataactcttcaaaatgatcctcttgaccagacatgaaga

SEQ ID NO: 38736 - DNA, 406 bp, Glycine max
  unsure (1)..(406): unsure at all n locations
agcttgaggacaaaacaaatattgttctttacttggngctatggcataccgtgctcctcagcatttgtctcggtgtctccctaagattgttcccaaattggctgaggtataacatgaagcaaacattatttttcacttctaaattccttttaagctatagattgcattaccttaacccatctcagtatttgaaggttttgactgatacacatcctaaagtccagtcagctgggcaaatggcccttcaacacgttagtcttgacttacgaactattctatccatttgattcctgcttgcttctgtgattaatgtttttaattntcatgttttttccaggtagggaatgtgatagagtccagaaatatctggtcttgtccctactctacttaagtaaattggtgtttt

SEQ ID NO: 38737 - DNA, 407 bp, Glycine max
  unsure (1)..(407): unsure at all n locations
cttttgtggaggtcttattcgagattccttattgttttcatagctatttccacttcaaaggattattattgagatggattctcttgtggcggtttgtatcatccagaaattaagatttctacaagtctgttttgttacgaccacttattgctaatatcaagacgcatctgtctatgacggatagagacccttctatctatctctcatatttataaagaggctaatataagtgcggattttnttggaaaatntaagtcaccaggataattttgttttgtccagagttgattcccgtattaacatgtaatgagcctataataaatgtttgtttttgttattttaaacaatataagaaacataaaaaccatattaattggatccaaattttttatacatcagataactta

SEQ ID NO: 38738 - DNA, 369 bp, Glycine max
  unsure (1)..(369): unsure at all n locations
agctngaatggaaacnagatttctnggtttatttggtaacccaacnggccatgaattaaaaatgtgcacctgtcgccagactctgtgctttatgctcctctgccaaccaccacacagacctttgcccttctatgcagcaacttggagcaattgaatagcctgaagcttatgctgcacacatctacaatagacctccggaacctcagtatacaaaatcaaccacaacagaacaattatgacctgtccaccaacaggaacaatcccgggtggaggaatcatcccagccttatatggtcgagtccttcacaacagctaccacaacaacgacagccttatgttcagaaagtggctggcctaagtagaccatat

SEQ ID NO: 38739 - DNA, 267 bp, Glycine max
  unsure (1)..(267): unsure at all n locations
atgaattcattctatgcacccttaggggttttttctttctntgtgtgatngcatcgtcattcatctactattgatatttcttttcaacgtcttaagcgagtttcnactaatcgtntaacccttaatctcacttaatcaatgtncaaacgaatcccaactgaatgtccggtgtgtgatctcatataatcccccttaaaataaactctatccnattgttcacgacgaaactctgttaagaacctaataataataaataataaagatatc

SEQ ID NO: 38740 - DNA, 343 bp, Glycine max
agcttgatgatgaatgtctagttgcctttcatactttgaaagaaaagcttgtatcagccccaataatgattgcacctgactggagcaaggagttcgagctaatgtgtgatgccaatgattttgttgaggatgaggttctatgatagcggcgagacaagatattccacgccatatattatgctagcaaggttttgaatgaggcacaattgagatatgcgattgttgagaaggatatgttggccatcgtctataccaacttataaccaaacttctctttatcaaatatcactcgagatcgcttcatgggtcaacgccttaacgaatcttcgttctcatattgaat

SEQ ID NO: 38741 - DNA, 326 bp, Glycine max
  unsure (1)..(326): unsure at all n locations
tcgattcgttgagagatcacaactatgccttgtctattttctntaccgcttggcacgaagttgctactatgtaaagagagagagaaagtggggaccacgaacgctttctggagcacatcttcagataagtacaatttgctagtgtcctctattgctcagagctgactgttattgtacagattgaaagataagttcccctcccttaaccantggaattaaaaatgtctagacaggataatttaaatttttccttttgtgcactatggcacgagtttcttactaancctatggacattacttgttggtgagcgtgtgcatgtcttgag

SEQ ID NO: 38742 - DNA, 426 bp, Glycine max
  unsure (1)..(426): unsure at all n locations
agcttttggcctttgtgatagttgattttttgacaatatgattcaacaatagcatagtagtcaaggataacagtgacaaaacatattgttaacttccacccaatcctatcaactcttcatatatccaccctaaaaagtaacgagtgctgaagcacaggcaaaagacaaaaagaggataaaaggtaatagaatttgagagaaagtgtaaaactgatttcattgatcagaaaaattgtcaagccaagttacaacggtctgcatcaactctatatatagagtgactaacagaaacctaaccttgacagttactaactaactagagttagaaccctaacagactgacagctcactgacagttaactgaaagcttgcagttgacaactaacacanagtaaaaaccaatacactttacttagtgggagtaac

SEQ ID NO: 38743 - DNA, 423 bp, Glycine max
  unsure (1)..(423): unsure at all n locations
ntataaaaagttggtattaatttcaaaattgtcaccgtatgctatattacatcgattatttcataaccgacttagattcaacgatgttgaatcacacttgtgtagtagtgttggttggaagcgttaaggatgtgggtaggaatgagataaagatatatagaataaagaattgtatataattaatgttaaatactaaattggatattaaattatatatttatatgttgtgtaataatataattgaatatcattttaatgcctatagtaataactattaaggaaaattttggcaaaaaaaaaaacaattaataaatcatttgaaaattgaaaaactaattagtatttgaaagtttggtggaaagttttttttaaactgcaaagttcactttataaataaattgaattcaataatatagatggcta

SEQ ID NO: 38744 - DNA, 375 bp, Glycine max
  unsure (1)..(375): unsure at all n locations
agcttttatgnataatttcatttaatctataatcgnaactatatgataagacattcaatcatagaagttatatatatgtatgggtgattgttaattaattaatagctgacgaaattttacattgtcggtgtatgaaattttttttaatgtttcctaaaagttctctgtcaaacaaaaaaatatttccttaaaatgatgtttatataatattaaatattatgtatcaaatactttatggtagaccacaatgaatttagctgtgttgttaaaataagattggagtttcgagaaaaaaaaaaaaaaaaacattgcaccactccgactatgaaatgacattagactagtttttttttttttttttttaagatgaaaatc

SEQ ID NO: 38745 - DNA, 412 bp, Glycine max
  unsure (1)..(412): unsure at all n locations
ctaagcttataaaattccncaacctgagcatataattaaaaatttataaataaatgataccgagaaagaaagaaaaatttacttcatgaaaggtagaaatagaatgctagtgaaccggctaacaaacaaaccaaattttattgacaatgcgtaaccatgcactcttccaactaatattacaagagcaccagtgacaaagctctcaatgaatgatataactattacttactctgcaaagcaatacttgacgtggaaattttggcttgaattgcaacatttcccaattaagtgttccttccttcagactacacacatgaaaattgattccttcatcaactttcttacaataataccatccctagaaatagagaataagggaattcaagtatttatgtgcaagttattgaacaat

SEQ ID NO: 38746 - DNA, 324 bp, Glycine max
agcttcaaattactaccaatattggtattgctcttttatattgagggaggagaaagttgaacatcctcaaatttgctggcactgccacaaacaagtatttgcctcataatctcctgtttcattgttctcatttccaaaaacctgaagctatgggttacctttcttgcatgtattctttctatattaattcaaccttttctaacaagagattttgatagttggtatgggaaaacatgttttacggattgataccccaaaagttggaaacggtgaagcctttgtggtagatgatcctctgagatgtcctgaggataagctcattga

SEQ ID NO: 38747 - DNA, 420 bp, Glycine max
tgcatcttccttggtcgggtacatgagcatatgcaatgctccttatactctcaagtgatcaactcttggcttcactccactccatgcttcttgtggtgtttgatctttgacattctttgttggggagcgattggacaaataaacggcacatgcaacagcttcggcccaaaattcctttggcatatttttagccttcaacatacatctagtcatattaagaatagttctattttttctctctgctaccccattttgttgtggagatctaggaaccgttagagggcgacgaatcccatatttttcacaaaattcattaaattcttttgatgtgaattcaccacctctatcggatcttatagctttgattacataaccactctccttttccacaaaacttaaaatttttaaaactcaaatgcc

SEQ ID NO: 38748 - DNA, 420 bp, Glycine max
tctaagtcaccgccgctgcagcttgggaagtacccggctctgttggttggtattggttttgctgacaaatagtgtagttgcaaacaaaatctttagtgtcaaagtacatgtgttggatcgagtggcctcagaataattaagaaggaggggtttaattaattattcctaagcctttactaattaaaaatttactcttctaaggcttttactatgttgttaagagaataaggagtagaagagaaacttaaccaaaagtaaaagcggaaattaaaatgcacagcggaaagtaaaagagtagggaagaaggagacaaacatacaagagtttttatactggttcggcaacaactcgtgcctacatccagtccccaagcgacctgcggtccttgagatttctttccaccttgtaaaaatcctttta

SEQ ID NO: 38749 - DNA, 443 bp, Glycine max
  unsure (1)..(443): unsure at all n locations
ccataactatggctacataaggattttaactcataacaaagtaggtggcagtggtggatagtgagtgagtgctgagtgctctcatacaacatgaaatataatgataatgtcatggtagagatagaaccaggaggaaacaatgatgttgaacatggaaaaggcatgatggtgatgggtgaaggtgttttanaactcancnnantnacccttttcttttggtctgattgtggaatttcttttgtttttgtaaatttctagcttgttactgcaaaagatgtttggtagactaagctttantacacactgtgtaacatcttcaagtgttgacatctcaacgacttacattctacgacacttaacatgatgacaattcactcaactttctcnntggtcnaanctctccattgatcataatcctctataggtaaacctttctgagacat

SEQ ID NO: 38750 - DNA, 368 bp, Glycine max
  unsure (1)..(368): unsure at all n locations
agctngtgctattcatctnncanncttttcttcctttttcaaaaagaattcgccaaggactaaccgcctgaattctttttgtgtctctcttctctcttttccaaaagaacaagggactaaccgcctgaattcttttgtgtctccattctcccttgtcaaagaattcaaaatgacacagtctgagaattcttttgattcttcccattccctaatacaaaagcgttcaaaggtttaaccgcctgagaattcttttgtatccccattcacaaagtatcaaaagtttaacagcctgagatctttgtcttaacacatggaagggtacatcctttgtggtacaagtagagggtacatctacttgggtttgactg

SEQ ID NO: 38751 - DNA, 509 bp, Glycine max
  unsure (1)..(509): unsure at all n locations
nttgatatcgtagcattgccagcgacagtagagaatactnacagctagcagaaccaatatagggttcaacatatgctagaagcttatgagtattaattcttggttgaaaattcggtgagtctaaacatatgatcctctgctctagtgaccataagactaacatccggtaggcctaacttgaccccaacagggacggcctaattttggtcaaccatgctataattttgatcaatcacaatgtgatttgttcaggcaacattaaacctaaccaaaggagaagtagaattctgattctcatgatacgcgaatccataattgagaaactccttaagtggtgattaaactgactctctgtgcgtataaagaacatactcggtaaggaccgctgatcgaatatactcagaggtgaaacaacatcggtgataggaggatttgtgttggaacaacaaaatgtaaagatatggtgattggtgagactgtgagatataacggaatgcaccatagtaggg

SEQ ID NO: 38752 - DNA, 433 bp, Glycine max
  unsure (1)..(433): unsure at all n locations
agctntgataccaattgagaagaacattttcattatcacattacaagttagttttgtaattggccttattgtaaacactagaccagaatcccatgctttcaatgtaggacccaagtctcatacctagcaattggatcctacaagagttgcttgattcattattgctgctattgtctctgtagaagcactttctcaccagtcatgccattatagtgtttctaaaggtagccatataatgcttcattttgctattgatacttgtttttattatattgactcatgatgtttacatttaaatgggtgttttgttcctaattcagcattattgttatgataataactatacttcccttggntgtgactttatttcctttccgttttgcaaaaggaaatcagataagcttagttcccacatcttagatgatatattata

SEQ ID NO: 38753 - DNA, 460 bp, Glycine max
  unsure (1)..(460): unsure at all n locations
tcagaccacaacaacacataatctaagtatgcaaaacttctaattaatggatttccaaagtttgagaagtgaaattgagaatgaggtaaatttggagcaaactctcacctcacacaagtctataacatcaatttaaactcgctcaaactggatttacacctaaaattccaccgaatcaaaatttgactcctcaacacccaaatttaccctaaaaatggctctttgntcactttggtcatttgtttttctctctagcacagcccaaactttctcataagtcctaaatggcatttcaagctatgattaactcactctaacctccaaataccactaaatccagatttggccttccaactctcaaagtctcactctttttccactcacaacaccatactctcaccttctaacccttgttaactctaccctgtatctctaacactttccatatgcaatttcagca

SEQ ID NO: 38754 - DNA, 395 bp, Glycine max
  unsure (1)..(395): unsure at all n locations
agctttaggagaaactatanattctaatgttgnnccnaaacaaaaatcaatagaggaaacttcgccaagaatccccattgaaaaacctttattcaaacctttcaaagttagtgagaaggctaaaagaaaaattagggaacttagaaaaactaaatccttaattgaaggcgtaagtgacaaccatagtgaatcactaaacaagattggtagtgtacttaaagtcattccagataccccccaaacctcggaaaatacttccaaaatggtaacaagaagtatctcccaattaatcaatgttattaatgaagatagtgaccaanactcagatcacacaactgagataagatcagtgtctgaaaagaatataaaatcaatttatttccaacacttggaaa

SEQ ID NO: 38755 - DNA, 189 bp, Glycine max
  unsure (1)..(189): unsure at all n locations
ttgaaactcagcttctaaagaataggtgcaactcattttttaaattcnctcccgaagggagttgaccatgttctcatatgaaaatccncgggaatctgacatttgaatattaaataccctcatcttatctcaaatctctaattcctaaataccctattctcctatgcgtaacgtactaaaaagtctaac

SEQ ID NO: 38756 - DNA, 391 bp, Glycine max
agctatggagtttccaagtgccaattcttcttcttctttagtccagtcttcttctggcttcaatccatcagtgggctttccttctgtgtccagcatcttgggatgttcccagcctttgatgacagctttccaggttctgctatccagtgatttgaggaaggccaccatccttgctttccagtattcatagttggttccatccagaattggtggtctgttcactggtcctccttctttctccatgttcatcagaatttatctccctaggtctcactcagtgatttcgagtgcctgctctgataccaattgaaattctgataccaatgccagatgtcgtacaggatgtcacgacatcacgcttcagaacatgcatattatctctgagtgtatg

SEQ ID NO: 38757 - DNA, 447 bp, Glycine max
  unsure (1)..(447): unsure at all n locations
accaaacctgacatacctagcacatggagagcaatgtaggcactctacaattctggcaaggctcaagctataggggtcagcaatttctctgtaaagaagcttcaagatttgttggatgtggcaagtgtgcctccagctgttaaccaagtggaattgcacccttcattacagcagccagaattgcatgctttctgtaaatccaagggagtgcacttatcagtgagtgtgcaaatttaaatccaaacatttatgcatgctacatgaacaatgattttaagatcggaccagtgattgaaactagttcaatggttcgactgtagttgaatcggttttatattttttaaatataatataatatttcaactaataaaataatatataattaanaaattataaattaatataaatgattaaattatatatttcgtaagataaaaattaataata

SEQ ID NO: 38758 - DNA, 420 bp, Glycine max
  unsure (1)..(420): unsure at all n locations
agcttgcaactnttggtgaagatggtatgatttttatgtgggtgcagctacaatcatttcccattttccagttttcatctttctcatccatgatgagctttcctctgttctaacttctaagtgtgggccttcaagagcaagcattccacaggaaagaaacagacccactttgctttcattaagaaagccagtgattaagtaataatgagccagctgctctcagcttcgtgggcccgcctccaattttttccaactggcacatcttcatatgcaagttgagtctaaaatagtgtaatgacacaactatcccccactcaagtgtatatgtgatagatttacaaaacatagtgatgcacgatttttatatgtntagaattccaacacacgaaacaattatttagaatggtaaaaatgttcata

SEQ ID NO: 38759 - DNA, 391 bp, Glycine max
agccacccagctcgctcaagcgagcaaggttgcttccttcagaagcaacagccttctggagggcccaagtgggcctggttgctatttgcacccctatttttactaaatacaccccctgcctttttttggtgattcttttttcgtaaagttacggaaacttacgaatttcgtaacgatacttgttttctttccgtaatattatggaaccttgcggattacataatcatcccctttttttacttacggaatgttacggaacctcactaattgtgcaacgatgcttccttttgatttccggtgtgtcacggaaccttacggattgtgcatcaataccttcttttcatttccggcatgtcccggaacttcacaaattgcctaatgatgggtgcca

SEQ ID NO: 38760 - DNA, 429 bp, Glycine max
  unsure (1)..(429): unsure at all n locations
agctnggtgaccctnanagattttggtttagtgtatncctttccatctttgtgatttgattcaaaacagcttttaacatttttctgtcacaagataaagggtctaagcaataacccaaatttggtgctcctccatatgttgtagttgcatggttgagagggaacttaggctccatagtggtcatgtggttgaaaatggggtttgtttggttctgagagaaaatggagaagcacggcacttgctcaaactcatctgcatgggtttgagtttggtcaaaacttatgtaagagtccattaacgcaggaagagttgaagatcccgtgtcctcataacagctacccatgctatgtttggctaaaacttcactggttttgtagaacaccctacacaaaacccaatctttctgcatgtacacaaggtgcaaacatt

SEQ ID NO: 38761 - DNA, 321 bp, Glycine max
tccacttcgttctaccatttgatgcccgtcttcttgtctccgtctcagatctaccaaaccatcgcacatagacactatcgattatatgttagtgattaggtttctatcaaatctaagttcttggattcttgctgctgagttatggcggacgactcaagagtggacggatgcagattaagataaagaacgtcccgccgctgctgagaatcggcttctgcggcagtgcacggtggagaacgcttacctgggacgagaagaacggtctcggaattactaaataaggtatcatgctatgatggacacaacatatattgtgaacac

SEQ ID NO: 38762 - DNA, 408 bp, Glycine max
  unsure (1)..(408): unsure at all n locations
agctcgaggganaacttgatttcttgttcaacctantaactcagcttgccatcaatcacaaatctgcacctgttgcaagagtctgtggtctatgttcttctgcagatcaccatacagatctctgtctttctttgcaacaatctggagttaatgaacaactggaagcttatgctgcaaacatttataatagacttcctcagcaacaaaaccaacaacagcaaaataattatgacctttcaagcaacagatacaatccaggttggaggaatcatccaaatctgaaatggacaagtgctccacaacaacatcagtctatccctcgtttccataatgctactggtctaagcaagccatatgttccttctccaatgcaacaacagtagcaatagtctcaacaaagaccacaag

SEQ ID NO: 38763 - DNA, 401 bp, Glycine max
  unsure (1)..(401): unsure at all n locations
tggagtagaaacatgggaccaactcattctatatctaaaaggaagncatagctagtcaagggctaagagaccatacgagtttcctaacgatttctaattatgtgggccattaagtctatcatatgctgacaatatctgacaagcccatgaatctcttcgggggcggagtaagtgtctgccatcgccttggccttggctaacaatcagggaatttcttgactcccgttcaatgtaagagcaaaccgatccatccacatggttgcctcttggtgtaaagagtctatcaccctttctctaacctcttgtttcgcatatacttgagcatactcatacgtgagtctatgctcgtgggccgtggctagacctaactcttcttcgtacttggcgatgatagctaacat

SEQ ID NO: 38764 - DNA, 370 bp, Glycine max
  unsure (1)..(370): unsure at all n locations
agcttattggcacttttcctntttggtttatttcatgaaangtcaaccacagatttgtcttgtaatttttgccaacgcttcgtggaataaaagttttatgtaacttacattatttgtggtacagattgagatggcatctttgttcgagcaccatctgaagtagtcagtgttttaaccaatctcatagagcttctgttggaacggcatgaattcccaattttcatctccagactgcttttggttgtagttcgaaatatattcttgtctgttctcaaactattaaggctatgtttgaatatttaatggtgagtggaatagaatggagtggatggtggcacaattgaatggaattaacttaaaatataaaggt

SEQ ID NO: 38765 - DNA, 155 bp, Glycine max
  unsure (1)..(155): unsure at all n locations
gcttcaacccaagactaactgataggtctntattttagctatcatagagccttcccttttgaggcataaagctctttttatgctggtttggtcttcaaagtggacatactttgtccaatcanctgatggatacttaatcacagactatctttatt

SEQ ID NO: 38766 - DNA, 338 bp, Glycine max
  unsure (1)..(338): unsure at all n locations
agcttcaatgagcatgtgggtgttacttaagtcagnctagnagaacctggatctaatagttggtctttgctatatatataacttgaaccaacagcaatagcacaaccccatgagtatgagggctgagaattatcaaatttaggtcgaacttgcaaacattggtcagaattctttgatgagcttctccatgataaaacagcagaagctccaggttgcacagtacttgctccaccctgcaagctttctgtaccttgctcagacaaagattgtcttgtacgaatccatcgtcttcgacgcacaacatcagaagctgatttggttgaaaaatgtgaagaaat

SEQ ID NO: 38767 - DNA, 411 bp, Glycine max
  unsure (1)..(411): unsure at all n locations
aggagctcaagaacagcacatgttcatagataagcttatttaaacacattgaaaatgataatcttcgattgctgcagaaattcaagaaaagaattgacaagtaatcatttctcttttagattcgctctctttctctttccctttgtagcataaaagaatagactaacattctgtaaatattcgatgctcaaaagtggtatanttaggtaatttaatgaggagacataaggttggtcaaaaggaaggagaggtaacttggtttagatcttttcttatatttctcatgtggaatcctttgggcctaaatacatgaattagattcatgtaatgctcatttactcgtttctgttcanaaaaccaaataaactaaaaaataacccnnaaccatcctctatgggcattccctgaatc

SEQ ID NO: 38768 - DNA, 358 bp, Glycine max
  unsure (1)..(358): unsure at all n locations
agcttccatcaaaatgttcggttgttgtttacgtacggngaaggtattagcaccccacacgtccatcgcaagggacgacaacctttaatcaaatgtgccaaatcatgacttcaaactttattttattttcccttttttatgttgttattttattggggtcgacaaaagcagggctcttgctcctacgtattctcaattacgatggggaactcacacctacgtagttttttaagtctgaaattttgcgtgttacattgattttatctttcttgaaagattgattttaattgcgaacaaaagtcatttaatgcgttggacctcgaaacgatgtcttatacttttaaaagtggagagaatc

SEQ ID NO: 38769 - DNA, 388 bp, Glycine max
  unsure (1)..(388): unsure at all n locations
tatggcggcaaaagataagctacttatcctgaagcatgttgaagttggtgtttaaaaacactgtatccttgaatagcagataaaggtcagcttctcaaaggcaagtaagactcctaaaattgaaaagctataattggtgcacacaaatgtttgggggccagccccattgaaatctgttggaaactcacgctattatgtctcttttatcaactagtctaccaaaaaagtatgggtttattttcttaaaaataaatctgatgtgttttctgtgtttaaaaggcgnaaaataaatatttaatatcaaacaagtcttaacggtaaaagactgaaatcttacaatggtaaggagtatgatagtcaggaagttatagacttctgttctgaacat

SEQ ID NO: 38770 - DNA, 224 bp, Glycine max
accgagatttttttttttacaattgaaattgggatgtgcaatgatcacacctagagaaccggcctaataaccctagcctcttttttataaaatttaaaagagaactgaaactttactggaaggaaaaaattgaaacgggtaggattaaagtggtgaaatggaaaattatctctgaaaaaactgaggatttatgaggactgaaaagcttattataaaaaaagttt

SEQ ID NO: 38771 - DNA, 352 bp, Glycine max
  unsure (1)..(352): unsure at all n locations
gacattgagatgctatatattgagaaatggaagttcttgagaaattcaattggtcataacttttcactcggatgtcagattcagagcaaaatatacagagacgctcgaaattgaacaacggatgctctctagaaatttaaatggtaaaatnttttcacatggatgttatattcgacacataatatatcgagacgttcgaaattcaagaattcaaaaattaaagttctcaagaaatatagagatgaaaaattatgaccatgggtgtacgaatgagacccatgatatatcgatatgctcaaaattcacaaattggtccaattcacaaattcacagagccctaacttttgacatg

SEQ ID NO: 38772 - DNA, 290 bp, Glycine max
  unsure (1)..(290): unsure at all n locations
tttgggtgcacatgataaaagataggttttcggaacaaaggaaatctaagcttcaaccaaggggagatggaccatttcaagtgcttgaaagaatcaatgacaatgcttacaaagttgagctgcccggtgagtataatgttagttccaccttcaatgtctctgatatacctctttctgatgcagatggagatattcgattgaggacaaatccttctcatgatggagagaatgatgaggacatgaccaatagcatnggcaaggatccacttgaatgacttggaggacctatg

SEQ ID NO: 38773 - DNA, 133 bp, Glycine max
  unsure (1)..(133): unsure at all n locations
agtcctattaacaacttccgttggcccatcggtttgtgggtgacaagtggttgaaaataacatttagtgcccaacttgctccacanagtcctccaaaaatgacttaggaacttagagtccctatcactaacaa

SEQ ID NO: 38774 - DNA, 454 bp, Glycine max
  unsure (1)..(454): unsure at all n locations
tggatcntgagcttattgaggtcctttaatggggattttccaccatggagatgtatctgaagacaaaggagaagaggtgagaaaaggcgccatccactatggaataagccatggaagaaggagcttcaccaccaagatgagccttggataagaagcttggagaggatgcttcaatggaggaaaagatagacggagagaaagagagaggggggagcacgaaattgaaggaagaaaaagagagagaagttgaactttgagttatgtctcacaagactctcattcatcaaagttacaacaagtgttacacatgtttccatttatagactangtagcttccttgagaagctttcttgagaaaacttccttgagaagcttctttgagagaaattccttgagaagctagagcttagctacacatacccctctcataattaagctcacctccttgagaagc

SEQ ID NO: 38775 - DNA, 154 bp, Glycine max
  unsure (1)..(154): unsure at all n locations
tattgttgaccacagagtggtacctggagatatgtcgcgggggtcaggagaccttgtggacgtcangtgggtgctattgcccaaaaccaagcttgaccaatcccgacccaacccgggcatagtcggtcagtgagaacctgtgatgtacctaagc

SEQ ID NO: 38776 - DNA, 221 bp, Glycine max
aactcgccaatggaactggcggtttgcttctgcatgcatgccctttacgtcgaaaacagatccatgcaggaaaaactttgaaaacaaccccatttgaagaaatagtttgtaaaagtaccccaaaagggcaatttgcctgcatatgccattgtggacgaccatgattaaacaaccatcaccagaatgacccttactaacctctctgatcaaaacttctttac

SEQ ID NO: 38777 - DNA, 227 bp, Glycine max
  unsure (1)..(227): unsure at all n locations
aattatntccgtgagaanatccaagtcgaggcgcttctgtaacgtttccgtgagaaactacacgaagattctcgaccgttcttcaagattcatcgttcgttcttcgtttcttcagtcttcaacgggtgagtacctcanaccaagctnttcaattcattctatgtatccgtggtggtccacatttcgtttcatggtattttattctcgttttcatttgctnttatacc

SEQ ID NO: 38778 - DNA, 426 bp, Glycine max
  unsure (1)..(426): unsure at all n locations
acaatcagtgtcatactatngatcanaacanagcatgtataaatatgcaatactagactcaaaatatgcaacaaacactagacctaaatcagtgtcacagaaattggaagaaaatattttatccaagcacaaacttcaagccttattccatgtattgtggggaagttatggctggccatatgggtagaggtgtcatanaggagcangtatggaggaagggaccttggactgctgaagaggacaagttgcttgttgagtatgtcangttgcatggtgaaggcagatggaactctgttgctatgcttgcaagtaagaaacaccaaactttnttcacntgtttgtttcttaatatatatgattggattttcacatttataagtgacaatatagcanaaaaacaactgannattgtttcaacttctactg

SEQ ID NO: 38779 - DNA, 235 bp, Glycine max
  unsure (1)..(235): unsure at all n locations
cccttcttcattctccttcttcatctttctaaaccttcattctntaatcctacttgaacaccattgttatcatcttcattttccatccaaacacatcaaactttgaaccaaataccttacattcaaccctccataaactcgtcactttctctctcattcaataaatttcataaaaaaaaggaaagaaaacctttgaagatccatcttcaacccttgtgcaaatgggtttacatca

SEQ ID NO: 38780 - DNA, 400 bp, Glycine max
  unsure (1)..(400): unsure at all n locations
gagattataaatatgtgaccatggcatgagtttcaacaataattatcatcgtcaatcatctatctttcaatcttctctcaacatcattcaatatctttcaattctgtctacagaattttctgagtctttttctcttcatctttctaaaagttttttatcgacactttttcttcaaagaaaagttctttgttcaaaaacttggggtattcatctttttcattctcttctttctttgccaaaagaacgaaggactaaccgcctgaattcttttgtatctctcttctcccttttccaaaagaacgaaggactaaccgcctgaattctnttggtctctctttccccttcaaagatcaaatgataaccgctgagaatctttgatcttccttcccttagtaaacat

SEQ ID NO: 38781 - DNA, 367 bp, Glycine max
  unsure (1)..(367): unsure at all n locations
aatgcaatagtatgtcgtanatatattgtaactgagtcacatgcttttntgttactaatatttaaaatgtttggataaacggtatctcacaatgctgtgatacatttccgcattgaaaattcgagattgttatttctagaagaaaatttgagaaatatacgcttcgatatttttgtttgacgttctttctatctttatatacatttagtttatgtctctattataattatgctttcttttattacatcactggatatgatttatattcctctctgccttccattcattcatatcacacgggttgttatgcttcagacacacgttaccacacatatctgtcacctagatagatatatcatcttatttg

SEQ ID NO: 38782 - DNA, 537 bp, Glycine max
  unsure (1)..(537): unsure at all n locations
gtgcntttgaaccgtgcatnncgcccnntatgatacgttgctatgccgcacactatggatactcaccctcgaagtcttgatcgaaaatgcctcttggcgccggtctcttctatcatcacccactgcactccgcgcttcggcgtgcaaccctgcgcgttcagcatgccacgtggcgcgcactcctcttccacgtcgtcgtcgccgtcgtcatagtagtggcactggaccgcagccgccgattcgaacccgcgctcanggcggaagaaagcctttaacggcggaactgcggaccttantcgtgcgatcgaagccatggcggcggtggcgctatttgttgtggggttatgagagagtgaaaatgggaatggctgcgcgagagataaagagagaagcctgacgtttaacgtgattttgttatttgggttatagataaaggcactgctagtgggtgaattacagaagtgcactctcggcccntggtnggacnagacgatttgcactagtagtgatggaatttcttctactctgtatggtggg

SEQ ID NO: 38783 - DNA, 190 bp, Glycine max
tgcagcttcataagggtatagagccaaagcttaagtgggctcttaacctcattattttgcttaccttccttcttgttgttcttcattttcttcatgtatctcctcacatgtctttgctaaatggttttaacatgattctttagagtttccaccgattaaacttgctatagaagctgatttgatttatatg

SEQ ID NO: 38784 - DNA, 407 bp, Glycine max
  unsure (1)..(407): unsure at all n locations
tcagacaacttgtgttatcgattacaataaggctgtaatcgatgtaaacacaatttgtgtaattgattaggataaggctgtaattgatctaaacaaagagttctttcttctgaagaaacttttctaacttagaaatttttcttctaacttactcatgataatgcatgatgcacaaaagatatgatatggactaagatgcaaaattcagtataataatcaatacaaatgccactcaagggagttgggcatgtaaaagacaaaacatcttcaagaatttgtccaaactccaagctttagtctttattttgttcatgttgctccctctatctaacaatctccccctntttggctntgatgatgctaaacttgtatatgacattgagtgcattcggagggtctgagtcttg

SEQ ID NO: 38785 - DNA, 195 bp, Glycine max
ctgtgtgtataattattattgctaaccttccagaatatatatttgtatatcatcattcattgtggtgtctttcctctgcggcatggccgatttgtcctaatttcttttataatgcagttagactcataattatacttgaggaaagtaatttattagataatttatactttttaatctaaaattgatcgtgtgaat

SEQ ID NO: 38786 - DNA, 314 bp, Glycine max
  unsure (1)..(314): unsure at all n locations
ataataagtcanaatgtgtaacacggatatttctgttatatttatttagaaaggaaaattggctgcgtgaattgctaactttcttttgttactaaactaaactatttcacaactatttggggaacttggtgatttgaatgtgatttcatggaaaagtggacgagcttttctgttntctcatgcaatgaacgttactgtaggaccaacagaagacagagaactaatgactggtcttcacactgttgctgatgtctactgttctgactgccatgaagtgcttggctggaagtatgagagagcctactaggaatcac

SEQ ID NO: 38787 - DNA, 525 bp, Glycine max
  unsure (1)..(525): unsure at all n locations
ttggagcgtgagnaccgcgcctnatgataaccttgcataacaccattgattccttagataccccgcgncntgttgattatcactggtgagaacgacatgatgatttgtaacgttatgacaaactgtctcgggagcattctaataatatctcatttgcgtcaacagacaattaatgatcaactcacctgggtcgagagcaaaatcagagtacaagatcgaatgataagaatgtcgactcatgattaaagtctggagtcgagattgatgattctcggtgcaagatctcactattcgaaatcgacatgcaacaatcatgagatggcttatccatgataaggatcaaaagtttctctgctaagcgagggctcatgattgtcacagaacatgtgtcctaaaactgtttctctcttgtgatcgcttgccggttgtctattcgactcccataccaaatattctgaaacatttaatgtgattcacggtccactaatgtaaaagctgatcattcgcaggttggttcagtccccg

SEQ ID NO: 38788 - DNA, 285 bp, Glycine max
ccttctcgcttagtcatctgccttggtgtgggcggcccaccgtctaaggcaatacatgctgagccatactacctggttggtgtccaagatggatcagttaagtatatgtttgagaagcctgcccttacgggatagatcgctcgatggcaggtgttgctatccgaatttgacatcgtctatgtcacctgaaagtgataaagggaagcaccttggcagattatctggcccaacaacctctcaatgattatcagcccatgcatcctaagtttccagatgaggacatca

SEQ ID NO: 38789 - DNA, 415 bp, Glycine max
  unsure (1)..(415): unsure at all n locations
gagattgtggagataggttagaagaatttaaggatntgcatntttcatgcacacagttcacgtagcaataaaatttcattttctgcttcaattgcaatctcgttatctgcttctgcccttgaattcattttcgttttctgctgattaatggaaggttgagtttccagtggtgttttctcttgaggatcaagcatagctctctttgaggtcttgttattactatagaattctgatcatgttttccccttcaccaattgctctgtattcgctgctattaatccatgcatgcttaatgcttggataattgtctctgtgcttaatttacgttcatgcttaatgaatcagtttgttcatgcttaatggacatgtgagagggattaattggtgtatgcgttgctaatcacataatgacaac

SEQ ID NO: 38790 - DNA, 242 bp, Glycine max
  unsure (1)..(242): unsure at all n locations
cctattacattatagatgaaggttagggtgganaacttgacaatgtctactattgtgggaaagtctctctgaccgttagtataatgattntaaaattaacggaagacttaactatgtctcctatcaacttctcaaaaaanaatgtctcttatcaatntctcaaaataaaaaaaagtttcctatcatgcttataaaaaaatgtctcctattgngagaaaatcgttcttgaccactagatatgt

SEQ ID NO: 38791 - DNA, 373 bp, Glycine max
  unsure (1)..(373): unsure at all n locations
tcatatcagagctgacagaacacatgtattgagttgaagttcataactagattgctctaagattattcttacgcaatggtcaaatccttgagcaagaccattttctggtgctggaatcacatttttcatcatcccgtgttccttatcanttacccactggtattggctgcttaattagcgatgttgatgaaactttctctttactaatattgtcttgacactggcattgataatcagtggatattgtatcaactggatcctcgactcgagtattagtgtatgtggaagttactggttgaactcatgggtggcgtgtgccatttatctttaatcacttggataacgttggatgttagttgacataattatttgc

SEQ ID NO: 38792 - DNA, 294 bp, Glycine max
gctcttagaaggtgtcctgtaatctgtcaccatatgtcgatgtgtagccttcatcatgaactatggtttgtactatctgttaattctcatgtatatatatatacaagatcagcggaataagagcaaacggacagataggaagtaagaatgctgtatgataaatgaaagcgaaatataaactgtaaagcatatataagggcacaccgaaacggcttacaaacccatgtttgtgaaaataaagaaaccgaagcggcggcagagccacacatgatcagtgaggggagaagggagata

SEQ ID NO: 38793 - DNA, 396 bp, Glycine max
  unsure (1)..(396): unsure at all n locations
ttatggtatttgtataatttgtaataattcttgttttgaggttaacgctgtctctagaacatttccattggatntaatgatgaaatctatcattttcaggtgaaaaagaggctaagttttgaattgcaaaaagtagcagttgggcaaagctcagcagttgggctaagcgcttatccaccataagtgcggcttcaacgcgcttagtgcaaaggagaatctggcagagcatccgcatcaaagtcacgtactaagcgtgagatcagtgcactaagcgcagtaggtgccttcagccaggctcagtgcaagaatggcgctaagcccaattcaacatactcacgctaagtgcgagggtcgcactaagcacaaggtcgtgaattctgagcctatataaagcat

SEQ ID NO: 38794 - DNA, 305 bp, Glycine max
atgacaatctgaattgctctagagattccattgttcaatttcgagcgtctcgatatattatgaatttgaatcggacctccgagttaaaagatatgaccatttgaatttctcgagagcttccgttgttcaatttcgagcgtctcgatatatgatgcgccagaatcggaacttcgagtgaaaagttgtgaccatatgaatttctacagagattcccgtggtcaatttctagcgtatagatatattatgcgcccgaatcggacctccgagtgataagttatgacgatttaaatttctcgagagcctct

SEQ ID NO: 38795 - DNA, 179 bp, Glycine max
aaaaaaatagaacaccgcatttggatgtttatctcttaaaaggactctattaaggctttttttcattttgcggaaaaaaaagcagaatggagagactattacctgaaataaataaaggcggtcataatgattttattaaacatgatttgggtgttggtcccttatcatgcgtggaactt

SEQ ID NO: 38796 - DNA, 337 bp, Glycine max
  unsure (1)..(337): unsure at all n locations
agaatgtattacatggtctgagactatcatggtccaggacaatctccacgtgacacataactgagaataacagaatctccacgagaccagaatcgaagctcttggtaacatgtcacacaaagattagccaggaccacggacaattggtagtctgggaccatgtaataatntaagctaaaacgggcaggatgaaactagacacagacagatttgtcattagtaaaagaaaaggagattagaccgtataggcaaatatgaacaacaaagtagactttaattgtcaacagactgcattgatggaactccaatagggttttaaaaatntaaactatgatga

SEQ ID NO: 38797 - DNA, 134 bp, Glycine max
tatatcgagacgcaagaaattgaacaacggaagctctcgagaaattcaatgctcataacttttaacacggaagtccgattcaggcgcataatatatcgagactcacgaaattgaacaacggatgctctcgagaa

SEQ ID NO: 38798 - DNA, 340 bp, Glycine max
  unsure (1)..(340): unsure at all n locations
nntgatgcaacattggagaggttaatgaaacaacgagatgatgcgctccatgagagggtggatcaaatggagaatagagatcataatgaagaagaaaggaggagaagagggaatgatggtgttcctatacaaaaccgaattgatggtattaaactcaacattcctccatttaaaggaaagaatgatccggaggcctacttggagtgggagatgaaaatagagcatgttttctcatgcaacaactatgaggaggaccagaaggtgaagcttgccgccacggagttttccgactatgctcttgtgtggtggaacaagctacanaaggagagagcaagaaatg

SEQ ID NO: 38799 - DNA, 589 bp, Glycine max
  unsure (1)..(589): unsure at all n locations
atcatgtccttganntccnttgcactnagacgagacttggagaagaatagacgtacgcaagctngaatacaatgattgggtgatgacgagtaattaaataaatgtgatgttgttgtcactctgggaggagagaattaactgcgtgatgctagcagatacacccacgaatctactgctcttcttatctgttgcagattattatttttactttttcttcgttcttttcttaacaattggggttaactactattcaccataggttctggggaccagcctgtaacctatgggtgtagttagcaatcgaactcatctggtctctgtctattctttcgatcgatgcgcatgtcacgtatattacatgaaaacaaacgcacatctataatatatcacagcctataacgcgatactctatgatatgctgtggttacgcgttactataagctacttatgttcatcattactacgaacagacttgtgatgatgtaggtatcacgaatatagactgagctcatttctcttatgtaatgagccgaccttcactccttcaatatggaacatcatgaatcacgacgcgacgtgtgacatacct

SEQ ID NO: 38800 - DNA, 306 bp, Glycine max
  unsure (1)..(306): unsure at all n locations
gcttcttactaagtcataccttgattngcatataatatgcaatgtaaaccaaggagttgcttaattctcataagaaagtgtgataagggtattcctaagtcacttaccatcactctcctcatctaaagtacccactaattggtcatccctaacctctgtcgacacattacacacaaataatgtctacatttggataatgaaattgacttgtagaaattggctgccaatagcttcccaacaagattaggtgtctcatctatgcacgtcgctaattatgactcaaaatgaccttgtgctatgctctca

SEQ ID NO: 38801 - DNA, 408 bp, Glycine max
  unsure (1)..(408): unsure at all n locations
tctccagagagtgcaattatgggaagatgtgacacatcatggcatgtattctcactagattctttctgttgaaaacagatatctaatgataatgacagtaaatgtatagcaggtagaagaacgctgtcatgagcacgagattcagatgatntaaaagtgataacagcatataatagcacagcacggataatatgtagaacaactttgcaagtggctactctggctatcccccttagaggaggatgaattntggtccactggggcaattgggtggttagtgcagagacactgcagaagcgcaagtatctttcttcagcaacttgtaaatcctttgaattccaacgtggatgatacaaatccaattctttccagaatgaccatcgcaaagagaacatactctaacataac

SEQ ID NO: 38802 - DNA, 215 bp, Glycine max
  unsure (1)..(215): unsure at all n locations
aataagcaatagctatcgacatcccatggtatgtatattaatgctatatatatggatgcaatcgtaacgtacgaggaattggacaatctcttttgttcatttgttactctttttaatatctnttggccgttacccttttgaaagaagacctatttttggttaattaatcacttaaaagatgaagataacattatcttttttcaattacgtcctta

SEQ ID NO: 38803 - DNA, 323 bp, Glycine max
ctatacaagtagccgtttggttccaaaaccgccgagccagatggaaaaccaaacaattggagagagattatggtgtcctcaaagccaattatgatgctcttaagcttaactttggcaccctcaatcaggacaacgaagccttacgaaagcaggtagaataataatacaacatagtataatatttagaagaattgatgttgagtctaattaattttaaattaaaaagtatatgtgaatgttgagtgagaaaacaaacttcatgctgaagtgtcctagtaatttttgttctgggtcgcgcctttcaatctagaaactatgctcga

SEQ ID NO: 38804 - DNA, 277 bp, Glycine max
  unsure (1)..(277): unsure at all n locations
gtggtttattcagaggaatagagtttatctcttttatcttagtgagagtgattctcctaaatcttgagtgattcaagaacaccctgtctatatcataggacattcacaacctttgtgtgttgccctcgctgganagagtgatactttccttctttcatcttcacccttgttctttcaaaccacaatttcagaaatatcacctctgtccagaattatctcgtggccataactcccatattacgcactcaaattaagtgattcttgagcctaaattgac

SEQ ID NO: 38805 - DNA, 375 bp, Glycine max
  unsure (1)..(375): unsure at all n locations
acctctccttcctcaggtgtacccaaacccaatcacctggttcaagcacgactttctttctggctttgttggcttgcttgcatagctcgcattnttcttttcaatttgaaccttcacttgctcatgcaacttcttcacatactcagctttagcctgtgcatcctttgcttaaacatagcaatgttaggcataggcaacaaatcaagaggagtcaaaggattaaatccatacactatctcaaatggtgaacaattagttgtgctatggacagcccgattataagcaaactcaacatgaggcaaacagggcttccaagatataagattttctttaaaacagtcctaagcagtgtgcctaaagtcctattgactacct

SEQ ID NO: 38806 - DNA, 263 bp, Glycine max
  unsure (1)..(263): unsure at all n locations
tagaatttgtctcccaattgagatcaattnntgttgctcagtgtgtgattttcgtacaagccattctttgttctttatgttaaagcttgcattctcaacgttntgaaaggaagattctgtttttatttctttttcttttcccttacgatcttatgctctcttgactctgcatgcttttaactntttcttttttactatatactgatgactgtactttcaatagtattattaaagggtaatttcttccaattacccttattaat

SEQ ID NO: 38807 - DNA, 453 bp, Glycine max
  unsure (1)..(453): unsure at all n locations
tattaaaaaaatttaattntaatatatattcagtataatgtttttacattattaattaatgagaaatcacgttagatataattatgactttttaagtaattataacaaaatttagcaattntttttttacaattttgctattcataacaattatattcttaagtgacaatataaaaaactgttagtacattctattctaattaaatttcattatagaaatgcaaaattagatgtgtaaaattagcaatggtttttgctntatttgcatttgatgtttgatatatgttatgagcatcaatcgataatatttcacaagatgattcctaagttagaaatgtcaccatctctagtgctgcatgacgaanatcccataaaagaatttcacattaaaatattagatgatcacaaaaataattgatcaatcaatgcttgatgacgacattacaaaaagtt

SEQ ID NO: 38808 - DNA, 332 bp, Glycine max
  unsure (1)..(332): unsure at all n locations
gctttctanagctacttattaacattatatgatatagctcctacaaaacanagaanactngctatatngaatattagattcaaacaacaattatcgtanaaaaaaaaaatcaaacattatgcataaataaccactaatacaaaaatagttgacaactntagaaagcaaatccagactggtaggctcagatctcaaaccgttttcacccaagcaagcagcatcagtacataagatntttaaatcaacatgagcatattaataaacaaaagagaatgttatactcacaccaagtcattcatatggccacccagaatacccagcatgatgatgat

SEQ ID NO: 38809 - DNA, 427 bp, Glycine max
tgtgtggtaatcaggtacgccttgtggttgatttgggtggagggtaatgagaagggctgatattgactgagtaatgatgttgttgagctggtgggaagtttggccatgtaggaatggcagcctcaacatgggttccttcctcattctcatcctcttcatttgccccagttgtctcattcatccaagcaggatgatcaaatttgcatttttttagacccgcttcgatccttttgccggcgaagaccaaatctgttaagcttgaacgtgcgtaccccaccattttttcatagtaaaacactggtgatgtgtctactattattatgatcatctctttatccgtcattggaggtgccactagagcttgctacgtctgtccacctgtgtgcgtattatttgaaagattcgtgcacacttttgtacatgttct

SEQ ID NO: 38810 - DNA, 287 bp, Glycine max
  unsure (1)..(287): unsure at all n locations
ccgcgctgatcacaggactctaccagtcgcttggagtctccgatgcacctaccaaggtgattcggccgcccatcacccgggctttattgagaagtactgcacctagagacaggctcagggtgatgctccacaggccgtatgcgcgccaccaccacctcatcaggctggcccggctgggtcgtttgacatggagcantatttactggcattggttcgacagcacgcagtcaaccaccgggcacatgtacagacacatgatggtctataccagctgagcctcagcatgc

SEQ ID NO: 38811 - DNA, 402 bp, Glycine max
  unsure (1)..(402): unsure at all n locations
ttattcagatcattagagtttatctcttttatcttactgagagtgattctcctaaattcttgagtgattcatgaacaccctgtctgtatcaaaggactttcacaacctttgtgtgttgccctcgctggaaagagtgattctttccttcctatcatctccacccttgttctttcaaaccacaattccagagaatccacctctgcccaaaattatctcgtgaccataactcccatttcacacactcaaattaagtgattcttgagcctaaattgaatgtcaaaacgagacctttcnacctcgtttggaatcacctcatatggagccctgtagcttccgttattgccatatctatatgtctgtccagccaccacttaacctacgttttaccattccattcattca

SEQ ID NO: 38812 - DNA, 491 bp, Glycine max
  unsure (1)..(491): unsure at all n locations
agaggtggtgctnttgaccgtctacctttattatgggttttctattatcactattattaaacggtgataaataaaataaaaaacctttctttataaagaaaagaagacaattttgtcttgtattcatctcataatctatgtataatcatctatgcaccacaagctattgttttactattttgaccccaaataatgacagaattttaagattgaggatgacatataaattgacaactagttctgttttttataccagaagtaaataagtatatattntttttanaaggaaactccaagtaagcactaaaaaaccacacaaaaaaacatggttgaggaaacatttgtcaaaatgacattatacaaaaaagaatgaataaactcacaaatctcaatgctctcatatttctagagaatggcaaacttagcagctcatcaactacttggttaagtatatgtttggtgttataatataagaaaatatatattcttaa

SEQ ID NO: 38813 - DNA, 305 bp, Glycine max
  unsure (1)..(305): unsure at all n locations
gtctactatcattgcatcattgtattcgtcattgaggtgccacttgagctgccangttctcacctttgggtgtatactttgaaagatctgtgcccactttttgcacatgtattgtagttgcatactatccgaagccattataccgacacgcctaacgaaggcaaccattatgtcctcccaggaatggactcgggaaggatccaagttagtgtaccatggaacaactaccccagtaagactttcttgtagtgaacgtatcaccaattcctgatctttggcgtatgcgcgcatcttccgacaataca

SEQ ID NO: 38814 - DNA, 376 bp, Glycine max
aagtgtcttatcatggtctgtatatcttcaccatcttccatagtgaagagttcatacttacgtgtcaagaagttgagcttgttgcatgttacttgtgatgatccttcatacatcagagttaatgtgcccacatttgtgttgcatttctgttgttatggatcggtgtatattctttctcagagagggagcacaatatagagtttcaagctttagagttcaacaagaacctttgtctgtaagtgtctatccataaggttcgtggaatgtcattcagttgatcattcagaggtatgtagttgccatgttctatgatcgcccatagatctatatgaatattgaaaaatgagctatatacattcctctaaagtcatgttga

SEQ ID NO: 38815 - DNA, 544 bp, Glycine max
  unsure (1)..(544): unsure at all n locations
gatgatcatgaacctgaacccgatcttaagtactccgctgcactgactgagaggaagatattcgctatgacagaatcttgactattgtcttaacatttactatgtctctttgctgatatgtaaatataaatggtatagggtattcctgtaaaacatggtctatatttacttctaagaaggataggggtaaaaatgaccatgtccttaacaaagacgttctcataaatnccagacataaatcgctcttattactagatattttgaattctttcagttctcaatgcacaaccttcagattgtngctgcgtaccctctctcttttatgcaaaaaagaaaatcaaatgctgtgangacatggatgaagttctaagaacattatatccacgacaaatggttgaattacaattataagcacacgacctatgcttcaagcctttgttgattgcttgtctactagtggcggggtttgtaataaggtatctttgcttccaaaaactatgcaatcttttcataaacatttgtttatttatacaaatgtttccct

SEQ ID NO: 38816 - DNA, 509 bp, Glycine max
  unsure (1)..(509): unsure at all n locations
cgggaagtggggtttgatagcgttgcatnacgcgacctattgantcccctgctattacgtgcactatanantactcaagcttctccttacttatcctatatatgcgggaaggagggaagatcacaggtgttccaccctcctagaatctgagattcacgttaaattaangacagacattgtctgcgtgaataaaatccaagccgaggcgcttccgttacgcttctgtgacgtttccgcgggtgaatttgcaaatatcttcaaccgatcctctcgttcgtcttcgttcttgtcgttcttcggaggacaacggaaggcctgaataaactcctcaatcttcttgtcccatacggtctgatggttgggggccttatctcattattactttccatcccctttgacgtgcttaatataatctagtattcctccctaagaaaataagcaactacctgtcatctaggtacatcctattttcgtacatgaattcacgtcgactcccaccacttaacaag

SEQ ID NO: 38817 - DNA, 565 bp, Glycine max
  unsure (1)..(565): unsure at all n locations
cacgcgggtnactttgtattcgttnccatccnganctcanaganacctgccgcatgcaagctaaggatgganantnacttgttggtgatgtataaattctcacaacggaatcgaanaatgcgaanagtagtgatcctatggctgcanactcataaattccgtgggttgactcttgaatggcgggaaaagaagtttttgtatgcaaaaacgacctcctttcttcatattgtataatttggtgcaggggatgctcgccccgcgagctaaccttgcacttttttatatgggaaacataaccatggcctccctctcttnacaagataactgttgcctactccgacttacttaagttacacataagcatcgctttacttatttataacaataatagtaataacactgtgaatcaaggaactggctgacttgacgacttctctgttgccaacccacgaaaaacgacatcggtagtctgacttatctccttgcgtccttctacgtccacaaatgaaaaccatgtgcgccactgacggtattggtactgatggttatctctctaatagctcct

SEQ ID NO: 38818 - DNA, 258 bp, Glycine max
tcgatggtctgtaatgatcacacagtgatgacctataatgtattgccgccacttcttaacggcgttggtgatggctgcaagctcgcgtacatatgttgaggatctcctagcttggtgaaaactgcttgctgaaaaaaacgattgggtgtccttcctgagatagcactgcacccatgccggaacctgatgcatctatctccacggtgaacggtttggtgaagtccggcagtgctaacaccggagtgttagtgacaacat

SEQ ID NO: 38819 - DNA, 327 bp, Glycine max
  unsure (1)..(327): unsure at all n locations
cacgttgcctaanagncactatcatgcgaaaaagatactgtgtccgatgggtatggatatcacaagattcatgcttgcctgaatgattgcacattgtacagaatcaatttgaagaattgtccaaatgccctacgtgtggggtatcacgtacaaagtcaagatgataaggattatagtagtgatgaaaactcaaagaagggccccctatagaaagtgttgtggtatctgctgatcattctaaggtttaagcgtgtntgctaataaagacgatgcttangaccttacatggcatgcatatgggagaaaatgcgacacaatggtccgtca

SEQ ID NO: 38820 - DNA, 369 bp, Glycine max
  unsure (1)..(369): unsure at all n locations
ctgctcgatcttttgcctcagagtaccccgtgatacgcgcacgtcgcgttggggttgttccactttgggacgggagactggttaatcttcccaggagtcactaatgccaactggttggtgattaaggatggaaataagtctccgtatgacatgaaaattggggcacactccacaagcttctttactagaggatttctccccgtgttggaattcatgctaggattggcctcgatggcggggcaaactccaaaagcttctatactgtagggtntccccccttttaagcctacctctattctttcacccacgaatactagatccacaaagctaaagggcatgtagcctaccaacttctcatagtagaacact

SEQ ID NO: 38821 - DNA, 298 bp, Glycine max
  unsure (1)..(298): unsure at all n locations
agcgagcatccgctaagcgccacactcctgngctaagcgctaggaagaatctagaaatgatgagttgtacaggttccctaagcgcaccgcttcatctctctaagtgcaccgctttagttcatccgctaagcaagaaaggtgcgctagccaaaaatcactaacgtgcactaagcggtccatacgtgtgctaagtgcacgagcatgaacaagggccacctattaagcctgagatcaaatnttttgaagagagtntggactatgattcagagctntgcatgtctagagtttctagagagag

SEQ ID NO: 38822 - DNA, 273 bp, Glycine max
ggaattgtgttatcataattcttttttaccacaaatgggtaaaaattttctagagcctctcacatgttcacacgtggcagtcaatgtcggagcttaacggtcaacgtccaattgaggcgtccgggaccaacattgcatgattttactaaacagggggacccaatttgtgaattaaattactgggggaccaaatgcgaaattggaccttaagtgggggaccaaaagtgcaatgtagcctatgatgtgtcattattttctcctaattcttaaccc

SEQ ID NO: 38823 - DNA, 247 bp, Glycine max
  unsure (1)..(247): unsure at all n locations
gagaaagagagaggggggagcacgaaattgaaggactcaaatacgtatacaagtggaactttgagtatgtctcacaagactctcattcatcaaagttacaacatgtgttacacatgcttctatttatagactaggtagcttccttgagaagcttcttgagaaaacttccttgagaagcttctntgagaaaacttccttgagacgctagagcttaactacacacacccctctcataactaagctcacc

SEQ ID NO: 38824 - DNA, 274 bp, Glycine max
  unsure (1)..(274): unsure at all n locations
aacccgggcatagtcggtcagtgataacctgtgatgtacctaagcaggcgagctcctggcagtcaacagataaaaggaaaacaagaccacaaagcaaggaggcttgtggtggctggccagctgtgaattttgtgtaatatgtggattgtggcctctggtaatcgattaccaagggtgggtaatcgattacaaggcttaaaaatgaagacaggaggctaagatggtctctggtaatcgattaccacggngtgtaatcgattaccaggcttgaaaa

SEQ ID NO: 38825 - DNA, 217 bp, Glycine max
attgggcaagaatggatgagaggaagtgtgattttcgaaatctgcactatgcagaatatttgctgtgaaattgtgcatcagaatttgcacaagtgcagtaaaatgcttgtgtgtggttggctgtggaaagtctagtgagaatgagttctggatgtttgctattagatcccaacggtcaaaatgtacgcttatgcactatagactatcagtaaaattt

SEQ ID NO: 38826 - DNA, 607 bp, Glycine max
  unsure (1)..(607): unsure at all n locations
gccctccatctctagaggttataaacttgttttgaattcattctgtcaacaaaagtcagcggtctttgattccttcgttacccnaanctttgataccctgtcntgcgngattgatgcgctccatatctgcgcagtatataatacatcaacttgtgatataggcggacactatgcacggcacggcgttggttggttctatggtataatggatgccccacattatatgcatgacacacacgctaaattgatgatatggaagatttatgcataaatggacaggcgtgcacttctgaggacactcaagtgtcaaagttttatggtgatgtgatactctggcctatgaattatttcctctatttctaaacaacccacagtgtccacgaaatgatcttttatcaaatagtgcgttcattcgagtccattttgggcgtccggggagatttctcagcattcacccttcaggagaagacacgcgtcttttctcttatacaataagtcatgagccatgaagattttttcaataaaaaacgaaaacgtttctattatgacacggtagtttagctaacacataatatttctatggcacgtttacttattgcgagtattg

SEQ ID NO: 38827 - DNA, 271 bp, Glycine max
  unsure (1)..(271): unsure at all n locations
ctcctatcttataaagtgggtggagattagctgtatcgactaccgcttacaactcatgaacccatcacaacattgtcaattctccttccatctctaattattcattgaaaccgacatgctcaaccatacacacgtgatcgcatntattcacacacaccgcaataagtcattttgttattgcattactttcctattcagccttggtaaagcaatagcgacttgatatttgctatgagcttcttcttgtcattcaactaccaaatgacaaatg

SEQ ID NO: 38828 - DNA, 351 bp, Glycine max
  unsure (1)..(351): unsure at all n locations
atattcgacanagtatttcggttatctatcaatattctctcttagttataagtcgaaagttgaaaagttggatactagctaatttaattacaatgattaattagattagttgataatttaataaataaatgtcaagtgacgtaaaatgatatatntaatatttctaatatatttaaatttatttctaagtattaatcatcttanaagtaggataacaatgttntaaattatgtattataaaattntgcatagggtaagttaacaaacaggggaactnttactttccctgattcaatccaaaaaaaaattatgcatggaactaaatangataatattaatttacgaaaaaca

SEQ ID NO: 38829 - DNA, 379 bp, Glycine max
  unsure (1)..(379): unsure at all n locations
agctngccgccacggagttntccgactatgctcttgtgtggtggaacaagctacanaaggagagagcaaganatgaagagccaatggttgatacatggacggagatgaataagatcatgggaagcggtatgtgccggctagttactcaagggacttgaaattcaagctccaaaaactaacccaaggcaacaagggggttgaggagtattcaaggaaatggatgtgctcatgattcaagcaaatattgaagaagatgaggaggtaactatggctcgatttcttaatggtttgactaatgatatccgtgatattgttgagctgcacgagtttgttgaaatggatgatatgcttcacaaagcaatccaagtggagcaacaat

SEQ ID NO: 38830 - DNA, 286 bp, Glycine max
tgctgaagaaggttctccttgatgtcttatagctggaggctacacatatggtggaattcctcttctcttgacactgctccttgtcatctgaaggattgctcatgttggacgacatgaatttcacactaaactatgatgggacctgagactgcaaactcataacattgaaatgatgatcgggctctgagcgtttgcactactggcatatgtgtgtatatgcgaaatggaagtgaagactcatttcccctttctttcaacatatacatggatttctcatctttgtcat

SEQ ID NO: 38831 - DNA, 370 bp, Glycine max
  unsure (1)..(370): unsure at all n locations
agctcattttaggcttctagtacactccagacatcttcgaaagatcgaacggtccgatcatggtaaatgtttgtgaagtcgaccaaagtttcgagaagatccaacggttaatgaaggctgagcagcgtttataccgaggcagcttcatgtagctttctctataagcttcattagacgcttgctctagaagcttcctcatggcttctttgagaagctctctcaagacgcttctttgagaagctagatccttatctatccacccctctattaactaaatgaacttccgtaaaaataattaccgatgaanagaacgcaacacaatctctaacagcaaacataattactaataatatatagatatatatatcag

SEQ ID NO: 38832 - DNA, 413 bp, Glycine max
  unsure (1)..(413): unsure at all n locations
gagagattcctaagtattggcatgttccacttgngcttttcccatatagcttgcatcctacatagttagaatgtgaaaagccaattatatttaacgatgtacctttgggataccacaatccaacattggtggtgtccttaaggtacttaatgatcattttaacaactgctaagtgagattccttaaagttagcttgataccttgcacacaagcaaacactaagcataatatttagttggctttcaattaagtaaaaaagtgagccaatcatacatctatactttgattcatccactaatttacctgtttcatccgaatcaagataagtggatgttgccattggagttcatgtntctttgcactcttccatgttgaatttcataattagatctatacagtatnnttgttgacat

SEQ ID NO: 38833 - DNA, 342 bp, Glycine max
  unsure (1)..(342): unsure at all n locations
ctgcaagtaactccatattgagctggtggtaagcttagtcatgatatgaaagctattcagcatcagggtaattttcacatcaatagctgagttttctcgtgaacgatagctgttgttgatgagtaatttttataatatcatggaacattaacgacttcaaaaactaactctggtatgttgaagatttcagatatgtacgaatttttcttcttttatttattgggtaaattnttcacttgtttcctcttctcaaacaatggtttctgatgctcattgacttaaaaactataagtatattcaaacttacagtcataggtgtttccttccttgactgctttctta

SEQ ID NO: 38834 - DNA, 437 bp, Glycine max
  unsure (1)..(437): unsure at all n locations
tggcactggcttgtgttggtntctgttagatatttaaatggctgctccccccatcctaaacaatacattggcaataagcttggacttggtattacctctgtagccatttggggctacagcttccatgctaagaactaaagccagcgaaattttgtgaactctcggcagatctttggccaggcttattggcagcaatatggcgctgcaacccattccactcaggttcacactctttacgttgctccggaatccaaacttgttaatgatcattgatgtaatggatggtgtaggacagaataggctacagtttgacacaaggatgtcaaagctcttggatacactntgtgtttcacaaggaggtctttgacaattctgaatagaaacgattcaccttctgcttgcgcgcgcctcatggaatcgtccggggggagctcatg

SEQ ID NO: 38835 - DNA, 140 bp, Glycine max
acatctcaacacctatgttgtgcgtcgatccagtcctgagcagaatgtcactgatcgatgaatctttcaacaccatgatttccttgattaattacatcatgatcatgtaccattgtattttgtggatgactcttaatgag

SEQ ID NO: 38836 - DNA, 350 bp, Glycine max
  unsure (1)..(350): unsure at all n locations
gtttgtggagattcagtttgatcaanaggggagaatntcaggagctgctatcataacatatntgctcgaacgatctcgtgtctgtcaagtctctgatcctgagagaaattatcattgcttttatatgctttgcgctgcaccacaagaggtacattacttccatttcggataactaatttaggcctatatagttaagatttgcttccatggtatgcgaatttgatgtaagattaagatctgcttccaagaaagtaatgattttttctctttcaattaatacaagttagttcatgaataagaatattgcttgcaagaaattaaagattggctgcatactctactattttctg

SEQ ID NO: 38837 - DNA, 162 bp, Glycine max
  unsure (1)..(162): unsure at all n locations
ccaattaanaatctatctgacttttatttaattgagttataaatgcccttaccaatgaacttcttagatattaattcaaataaaacaaattgatatgaatataaagcaataatatataaaggagtttaagggaagagaaagtgcaaactcagaattatactg

SEQ ID NO: 38838 - DNA, 301 bp, Glycine max
  unsure (1)..(301): unsure at all n locations
acttaatccgcagatccctcttgtaagaataagtttcaatcctgcttcaatcaagttctagggcaacagtacattttccaatgctaaagtcacctaactatgcacacaaatggatgatcagaccaaaagcatacaaacattaagcattgaaggaagcattgaactcaaaacataatcaattaggtattaggtatttacatcagctgttcattagaaatacccaactagggtgtttagccagccattacagaagaaaccctaacaataataagcttacaaaacctaggtatctntgcaaaag

SEQ ID NO: 38839 - DNA, 342 bp, Glycine max
  unsure (1)..(342): unsure at all n locations
gtgagacanaagctggtgcaaatcaaaactccgatatctcatgggtggaatggatgaatgcatgaaggaatgcatataacacagatgcaatctangaatgcgggggtccggggaattcatccccttcttagacacaacgtctatgggtagcaaagtgccccaacgtacgtttttaagaaggcgacacggaccctccgtgggtttgtttacacaagggatcaagacagaacccatatgcgatgcccgtgcaaagacacaatgcgggaatgtacacagtatgacgatattcactgaacataagcanaagggtatatgatacttatgcatggcagtgtgaaaaat

SEQ ID NO: 38840 - DNA, 147 bp, Glycine max
  unsure (1)..(147): unsure at all n locations
taaacataccccctcctgccgctatcgggtgctgaggaatgaataacagcatgcacatggattcatactnacggatgagaacgtgatctcaacgcaatataccttgctcattctattattagccatgaaaaacgtgcgcgaatntct

SEQ ID NO: 38841 - DNA, 114 bp, Glycine max
caatttagctgactctttgtgtcatgaaatgcactgtcagcagtttataaacttcaataatcctttattatcatcaaaacatatagtacggtatatatggacgcttatacttaa

SEQ ID NO: 38842 - DNA, 291 bp, Glycine max
acgtgggccagtttcatctcgtgactctcttgctggtccttcatttcaccgccaataacttagcatgtgcttgtcttgaattccttgacttgtgtcccttagtattagtatatctcatattctggtgactgaggaaagaaacttcataaaatcctacatacttgagccctgttggatctggaaaaacatttctgcctggtgagatgtgaatgctggtcaatatgcagcatatcgtcactggagaaactgctaacagatcatcactgaatgaagattgtcagctctggaact

SEQ ID NO: 38843 - DNA, 360 bp, Glycine max
  unsure (1)..(360): unsure at all n locations
catgatacatgtcatgtgcttggttnggttcaaggataaaagggatgccccacattatttccatgacacanatgcaaaaatgacgattggaaatgttatgcataactggttatgcatgcacctatgcggacactcaagtgtcaaatttttatggtcatgtgatgctagggctcangatcatttcctctattttagtcaacccaacgtttccaaaatatgttcttttatcaatttgtgcattcatccgagtccattntgggcgtctgggaaaatcttcacagcattcacccttcacgtgtatacacattttttcaaaaactagttatgatcagtgaattttccaaagaaaagttggagtca

SEQ ID NO: 38844 - DNA, 439 bp, Glycine max
  unsure (1)..(439): unsure at all n locations
gtcttcactgttcttcgtccgttcttcattcgttcttcggtcttcaaccggtaagtggtccaatctgagactntcaagtcatttcttgttttgttttctttcatcttcatctccgtcactttcgattttcttttcttccgcttttaacgtgctttctaccgtttatataagccgttatctcgcctaataattgataaaatgaatttcaaccgatcatttgtgttgtaatctggtttaatcactgttaaaataaaatccaatcgatcatgtacgctgtaacctcggttaaataaaagaaggaacacactataaccaaaatatcaaatatctttgaaagaatataataaataatcagatatctttgaaaaatataatgaataatcacatatctctataaaaaaatcaatgaccgtttctttaatgtcctgatgaatgctat

SEQ ID NO: 38845 - DNA, 345 bp, Glycine max
acctcatggactcctctaaggacaatagcatcatttctagcactgaattgatgggagttggaaccatcttctcaatcaggttactagcgtcaacaagagtcatatcaccaagagctccaccactggcaggatcaatcataatcctctccatgtgcagagtccctcatagaaatattgtataaggagatgcttacaaatctggtggtgaagacaacttgcacacaatttcttgaatctttcccagtactcatacaagctctctccattaagtagcctgatgcctgcaatgtctcttctgatggcagtggtgctacatgcggcgaagaatatatacaagaacaccct

SEQ ID NO: 38846 - DNA, 584 bp, Glycine max
  unsure (1)..(584): unsure at all n locations
cggattagnaccttgaaaacgtgacctctcagacacctgcggctgcagcttcagagaacgctcatgaagctgccacggtaatacgactcacancgttcggaacgcagggatantttagaacattggtctgcaacttcacaagacaatcatccatgatctgccgccgggacctttgacaagatgttcggagtgcgttataagcaccttaatgaatctcctggacgaaacctcttaatgaagcttctatacaaactatctgcagcttgctccgtactaacgctgcccagcctgtggtaaccgttgtatcttcttggaaattggttagaactacacacgacacatttgcatgatctgaccgtcgcgatctcttgaaatatgtcttgagtgtgctagcaactctcgtctctggagcatctattattaagcagtccagcctatgctctggtgaccgcaagagaactgcacctcgtcctcttatatctcaccagccaatttgatgctcgggaaattctcctctacatagcaccatagtcgccaataccaatgctgtctccaatcggaggactctcacccatacgtactcg

SEQ ID NO: 38847 - DNA, 497 bp, Glycine max
gtcgctcggcagcttctccggcatgactgtcctctactcgggccgtcaccggaacgcctgtatgaagagccagagctcgccgaatataagctccgctatggtcatgaaatccatacaaagcttggttccagtaagatgtggcttatgctgtagtaatagagaaacaagagtgccaccgagtggaataggatgtggagctgctcaaggccaaccctgattgcacggattctgtgtggaaggtcgtcatgtttaccggtcaacatgcatataattgtaaatatatatatatatatatatataacaagaggcgtaatgtttttccatcttaaaataatttcattcttcactttatatatcttcttcgatattatctcagacataataaattttattaagtatgcgtatctaatgagactgtttaaaaatactgatatttagtagtgctaacttttatattttaaattaatattgtaatgatattagaaaaatattattta

SEQ ID NO: 38848 - DNA, 174 bp, Glycine max
tttagaagcctttgtattatttcgttatgttactgtcgaaaagatgaattttttaactacaactttcgcgggtggggttggggcggcgctgggaaacccgtcctccgtgggggcatgtctgggtgtataattactatcccccaccggtttgggggcggcggcggtgctgggtac

SEQ ID NO: 38849 - DNA, 222 bp, Glycine max
catgcttatttatctccactcagtggccttggatattctttctttaagggaggaatgttgatttaataccatcaattcggttttgtgtaggaataccatcattccctcttctcctcctttcttcttcattatgatctctgttctcacattatccaacctctcatggagcgcatcatctcgttgtttcattaacctctccatatgttgcatcaaagcttgcat

SEQ ID NO: 38850 - DNA, 487 bp, Glycine max
  unsure (1)..(487): unsure at all n locations
tcaagaggatgttttaagagattcaaaggatgtaaaagtatgtaatcaatgtcttgaaaatgcaagttaaggacttgcttttatagactcttcatgtctggtcaagaaaaccattagaagagttataaccattagaaaaacttgaaaaccattggaagagttacatcttttgatttctattcaaaacttatcactggtaatcgattaccaaatcattgtaatcgattacacaaagcatttttgtgaaaggatgtgacacttcacatttgaatttgaatttcaacgttcaaacacactggttatcgattaccaaatcattgtaatcgattacaccattttgaaatcaattggaacgttgcaaattaagttgaaagctntttgaaaacaatctttgctactggtaatcaattacaataaactagtaatcgattaccggagagtaaaaactctttggtaaaatattttgtgaaaacttcatgtgctactc

SEQ ID NO: 38851 - DNA, 608 bp, Glycine max
  unsure (1)..(608): unsure at all n locations
tcatcttatctgtaatcgttataatttctactccactacaacaaacacgttgaccttgaaactgtagacccgancttanagagactgctgangcagcttgcatatctatctcaaggtttgccaactatatannatgnatncacctgcgagnagcttagcataaccgtcttctctcgctaagtccgtctttacatttcttgaagatactgcttttcataattagtctgaattccttaattagccttgcttttcttaaataggctgcttgtcataattagccacgattccttaataaacctgctttcactttgtgggcttcattgtactcactaagcatcataaattcattacttttaatactgtctacacaaaaacttagatgatgtttatttaacaattatttgctcataaggaagaataggagagctgcttgaaagtacacctgaacagccaacaatacacagagaaatacacatttaggtatttattctacgccaaataccccacattgttacataggcttcaccatcttgtcagttccggtctatataagacccgctactaacaaaccacttctatctatatttctacaaagcaaatattcatgn

SEQ ID NO: 38852 - DNA, 309 bp, Glycine max
  unsure (1)..(309): unsure at all n locations
ctacctatcgaagtttgacctttagctggaatgtacaacatgcttagtggactcataaagatcgtaaacttatagggactaactgagacatgaccacaattgagtcaatctttcaagggagggggagcatctcctagaaggactagcaccaaccatgacaaagctcaaagatggctaactgtgtaaagcctagatttatacnctaggtaatttgacccaggcctgtggtcactatttgacatataatagattatatttggcctgattaggtcatatgtagaggtcctaaatgagattttaccctgatta

SEQ ID NO: 38853 - DNA, 261 bp, Glycine max
agcacaaaatatagatgctgatcatttgagtcgatcgaacggtgtctaatgaggattcacccattctggatgatttcccggatgatcatttgtatatactgcatagtatttctgattctctttctactccctcgttgctaacattgtcaattatttagttgcttatgtttttcctccaatagcatctaacgctcaaaaagacaaaattaaaagtgatgctaagtcatttatttgggatgacccctatttgtggaaattgtg

SEQ ID NO: 38854 - DNA, 307 bp, Glycine max
  unsure (1)..(307): unsure at all n locations
atacctcttgctccatttggttcttcccatttagacattcgagtgccattcaatgctgatgttatatgaaatttaataaaacaaggacatacttatggatgctataaggcatacgtatggtaaacacataaaatagccagctataaacaaactcacaattcaaaaggcaactcctttgaacttgcaattgctgaaccagaatgtatatctatttactttagaagtggcaactgaaacatatatcttccatagatntcacacttgttaaattgcaaatcatgtcatccagagcatctaacgcaacaag

SEQ ID NO: 38855 - DNA, 350 bp, Glycine max
  unsure (1)..(350): unsure at all n locations
atatttgtcattcccataaggtattccctgacattttcattgccttgatacttcatggaaattaagttctgaagaagagacttgtttaatttccgcctcattgctttttgcacaacaattttcaatttcaacaaggaaatttttggcactagttatatcatctanaatatgccctanaagaccttagaaatgccgcacttaatgatcataagactcatgcgatntgagtgatcccacttctcatgaagtttcctctgtgcagaggtactataatccgtacgagaatggngtttctcaatccttaatganaggtctagatccatgcagccaagtacaattntcatgttctc

SEQ ID NO: 38856 - DNA, 347 bp, Glycine max
  unsure (1)..(347): unsure at all n locations
catcttgtctccgagactgagaataattgcactgtgatgcctttgcactaatgctttcttatccccatcaaccatcatctttttgagtttgacttctccatcaagtgctttcactacgccctgctgaacaagaagggctctcatcttcaatcgccatagcctaaaatcattntgccctgtgaatttttcaacctcatacttggccgagcccatttcttgaatggagcccanaatcatccacgctcaccgcatcagtttgttgtgccaagaccagatttactcattgtaacatatgagtttcttgtttgaacaagaataagcataaatgttgaaaatggatgaacaaa

SEQ ID NO: 38857 - DNA, 417 bp, Glycine max
  unsure (1)..(417): unsure at all n locations
tcagcgtctcgatatattataagcatgaatcggacctacgtgtgaaaatntatgaccattgaattatttgagagcttccgttgttcaatttcgagcgtctcgacatattatgcgcctgaatatgacttgcctgtgaaggttatgaccattgaatatctcacagagcttccgttattcaacttcgagcttctctatatgtgatccgcctaaatcagacatccgagttaatagttatgagcaattgaatttctcacaagcttctgtagttcaatttcgagcatctcgatatattatgcgcctgaatctgacatctgtgtanaaagttatgaccattntagtnctatcggagccttccgtttcaatttgagcgtctctatatgtgatgactcgaatcggacatcgagtagaagttatgac

SEQ ID NO: 38858 - DNA, 364 bp, Glycine max
  unsure (1)..(364): unsure at all n locations
gacacgcggtgatntacgtcaactcttgtgctcacttatattgtcatactgacattagagtcacgttgaccggcggagaatccctactggttatccgtataaacattcttttatgctgtctgtaaaacgaaaagcctgatagcatgcagagactaacgtcgtcttctgcgcccttcgtcaatcgcggccgactagcccgttgacacgcagagatatacgtcattttccgcgctcacaagatctgtcatactgacatttgagtcatgctgacggacggagatacccaagtggatattcgtataaacattcttttatcctgtctgttagacgaaaagcctgatagcacgcagagactaacatcgtc

SEQ ID NO: 38859 - DNA, 538 bp, Glycine max
  unsure (1)..(538): unsure at all n locations
cccgtgggccttatcgatggagctgcgagctntaacttctntggaatcttctttggaagcttcttttgaggtgagcttagttatgagaggggtgtgtgtagctaagctctagcttctcaaggaagtttttcanagaagcttctcanggaagtgttctcaagaaagcttctcaaggaagctacctagtctataaatagaagcatgtgtaacacttgttgtactttgatgaatgagagtcttgtgagacacaactcanagttcaacttctcttcctttntcttgcttcaatttcgggctcccacctctctctttctctccctctttcttttccttcattgaaacattctctctaagcttcttatacaaggctcatatttggggtagaacctccttcttcatggcttattcctagtggatgcagcctctctcacctctctccttggtttgcgctgcatctctgggggaaataccataaagacctattgagctaaagaccgcctcataaagccacaatcagctcatcactctctagaatatg

SEQ ID NO: 38860 - DNA, 384 bp, Glycine max
  unsure (1)..(384): unsure at all n locations
tcttagtttcagatgatgcacatgggtgtgtagctacctcatgcactcctctaatgactatggcatcatttctggcgctaaactgctgggagttggaagccatcttctcaattaaatttctggcttcagcaagagtcatgtctccaagggctccaccactggcagcatctatcatacttctctccatattacagagtccttcataaaaatattggagaagaagctattctgaaatctgatggtgggggcaactggcacatattctcttaaatctctcccagtactcatacaggctctctccactaagttgtctaatacctgagatatccttcctgatggctgtggtcctggaagcanggaatattttttctaagaatactctct

SEQ ID NO: 38861 - DNA, 211 bp, Glycine max
  unsure (1)..(211): unsure at all n locations
gatgagaggaagtgtgattttcgaaatctgcattatgcagaatttttgctgtgtaaatgtgcagcagaattttgcacaagtgcagaaaaatgcttgtgtgtggttggctgtggaaagtctagtcagaatgagttctggatgttngctagtagatcccaacggtcaaaatgtaggcttatgcactatagacttccagtaaaattttggagtc

SEQ ID NO: 38862 - DNA, 234 bp, Glycine max
  unsure (1)..(234): unsure at all n locations
tgtagaatggctagacatgatacatgtcacgggctgggttggntcaagggtaatagggatgccccacattattttcatgacacanatgcagaaatgatgatttggaaagtttatgctgaactggtcatgcatgcacctatgcggacactcaagtgtcaaatatttatggtcatgtgatgctaaggcttaggatttatgtcctctatcttaaatcaacccaatgatccaaaatat

SEQ ID NO: 38863 - DNA, 410 bp, Glycine max
  unsure (1)..(410): unsure at all n locations
tctggaagaataatataatttctgatgttgtttacatttagtagaggttcataactcaattgtttgaactctgtggtttttacactgtgattatagagagggagggggaaatgatttctgttgccacttaataatatttggcaagagggttgctgaaataccctatgtggctaccacggtgcacgtgacaaggattgtgtgacattttaatgaatgagattgagaatcagttgacttacttggagtataggagatgttctgcctgaagtttgagagtatgcaatagacccacctgaattctcctgcttcaaataatcaatattttgatgctcagtgatgtatcttcaatgtgctttatcctaanatattcatcaatacttctcactggcatttttgtgagatatctattt

SEQ ID NO: 38864 - DNA, 563 bp, Glycine max
  unsure (1)..(563): unsure at all n locations
ntttgaanccagtcgngananccanacannnttatgtanccatatgcnannnccnnnattgaatacccttgatatacccgngacacttnnaataatccancttntattcnanaatacatatcattacaagcttatatctttttgttcatcgatacctattctataagattggactgtttaactaaccctgctcatattaatttcacaatggaagtaaatgcgcctataaatctcattagctaatttttataattagccaatggacaattgtactaagatactctagttgataaattcataatccttgccgatagcaacgccggggtggaacccgagagctccggcttgcgattccactggaggaggacaaacgggggtttgggttttggacgggaataagggataatggtgcggangactaatgctgacttgttggcagaagacaaattcngtattgcgggcggtgagttgccccggaatacagggagagattatattgttaatgtgagataccgtcaggataaaaagaatatgattatgatgaaaatatcgcctgggttttg

SEQ ID NO: 38865 - DNA, 349 bp, Glycine max
  unsure (1)..(349): unsure at all n locations
taccttgatatacttcagctgaattctgcanagacaactgatagcctggatgaattgaactccactaatcaagttaagatatagacatggatgaaaatgctgattcttttgtggatgaatctgttatggaaaaggttctccacaagaggagtttgaggatgcgtaaatgcaaagagcttggcaggttttgtttgatttcttgaattttccatttggatattgcatntggtatcacatgtgcttggaatggaatagtaatgatcaagagtgtgtgactgttggtttantttttgtannattgttaatttcttttccattccaatttcatatccaaactatgagttagtct

SEQ ID NO: 38866 - DNA, 305 bp, Glycine max
gcctaccccgaaaatatgcttaggttccgaagtgtttgttttgtctttaaaaaataagctattgaaaagagatgtatcattttagccagtaaacaggtgagagagatccaaatacttgaaaaatgttaaaggaccatgggaataatctgaaattggcttaacgatccatacatgtagacctgttcattactttggaatagcttgtgtaagcgggagctgttaggagacttaagtataagaaatctgcttatttgggtcatggcactaaagggataattaatattggtgatttgttaatggctgat

SEQ ID NO: 38867 - DNA, 331 bp, Glycine max
  unsure (1)..(331): unsure at all n locations
gctctgataccactngctaaacaagtgacctcagatatcttaagaagggggggttgaattaatatattacaaattatttccccaattaaaattctatttaactttctattcaagttataaattcccttaataatgaatatcttagatgttgattcaaatagaacaatctgaatatgaatataaacaataataaataaaggagtttaatggaagagaaagtgcacactcagatttatactgtgtcggccacacccttgtgcctacgtccagtccccaagcaacccgcttgagagttcattatcttgtaattcctttacaagttctaacacac

SEQ ID NO: 38868 - DNA, 449 bp, Glycine max
tctctgatagccaatgtgtgagtcccgttcagggtagtttcgatgaataccggcctcgccgtgatcaaaaatgagaaggaggagttgattcctactcgggtgctgaacagttggagagtctgcattgactataggaggcagaaccaggttaccaaagaggaccattttcccctgccattcattgaccagatgcttgaacgcctggtaagtaaatctcactactgtttccttgatggtttttctagttatatgcaaatcactattgctcctaaggatcatgacaagaccacattcacctgccccttcagcacttttgcctataagaagatgccttatggcctgtgcaatgcccctggtaccttacagcggtgcatgatcaatatatttagtgattctttataacatttcctagaggtgtttatggatgatatcactgtatatggatcgtc

SEQ ID NO: 38869 - DNA, 674 bp, Glycine max
  unsure (1)..(674): unsure at all n locations
cgtctttaacagcactcagtantcttgctctntatgacgttatatgtcagtagacatcgtgncagtcactcttantgacaagtgctctanntntnnnnnnttttttatttgctctgagagccacctcntganngatctttgcaaagtctttgttgataagggcacgatgtcataacatcttctatatcatgtcaaggacaacgtctctgatccaggtttaaaatccaatgctaattggtcaattgatgtgacacataggatttaaacgcatgaagtgaagatgataactcctctggttgatgatgtgtaatggcatggtggcgattctacagcttgaagtgaattaactttttgcaagtttctctgtcaaaagtaccattagttattggaagctaactataacacatcgatgatgatgcttcatagctttataaatgggtggtgtcgacaatctaatattcataagatatgtttctaaaagtttagttgtgtactctatactntatgattatgttatcaagcttttgccgttatatatatatatatcttgacgctttgtgtggaatgatctatncaaagtgtgcttttaataagtcgtatgtataccaacactcttaatttgtatatatatactgataacatcggcaataattggtgctgcaatgtttatcttt

SEQ ID NO: 38870 - DNA, 443 bp, Glycine max
  unsure (1)..(443): unsure at all n locations
tgacactggtgaagtctcccagtaagcaccacaggccacctaacttacgtgtttcagctgcttgacagagtcccagagagctctcttgttatgaacatcacatggagcatatatgttaactatgtgaaccttctgagcctcgtgagtcaatactccttccagcaaaataacccccctgccaggaaccttcttttccactgtgaaagttttctcactccataagcacagtactccacctgttgtattagatgcgggttacattacccatgtcacttcagcgtctgcacatagagattggcacattgagttgtcaatatgctccttcttagtctcctgaagacatagcatgtctattgcggggttcttaaccattctcctaattgctgcccatttcaccccgctccctagccctctgacattgtaggatatgatnatcataggat

SEQ ID NO: 38871 - DNA, 262 bp, Glycine max
  unsure (1)..(262): unsure at all n locations
cacacgaagatacataaatcacaagttnttttttttatagganaactaattatattgatagctggcaagatgtgctcgatcgggagaatatatacatcaacgttaattcgtgacacaatctataaaacagccagagcatgccaaccaacaaaaagaatcagcaaaaacctatgaaccgaaacctgaaatcagaagcaacaacgaataacccactgcaggccacgcgttcatgatttccatgcaatgaatctttgtatatact

SEQ ID NO: 38872 - DNA, 349 bp, Glycine max
  unsure (1)..(349): unsure at all n locations
acccttcctatcttttgaccttttttttggtctataaatttttggctctttcaactccatctacttctgctcgttcctttaatgatgacttcagttatttcacacctgttttgtgtctgactatgtgcctgatcggaacacataatttgttggcacttactattatggattangactaaaggtgtaaggatgtggaataagaattttggttatttaattattaattgatcagaaacggcttttagttaaccccggcccctaagtttgaaaaattggtattctgtatgtttatacgtatcanagtttcaggcttaacctaatattcaaataatnggataataaagtaatg

SEQ ID NO: 38873 - DNA, 404 bp, Glycine max
  unsure (1)..(404): unsure at all n locations
agtgttattatgtttataatatatgtatgtcttgagagnattatgataacaaaattaattgaaaatcaattagagaacatcaacccttcaaaattgtgtcctctcatagttgaagaanaaaaagatgtcacatctaattattcattntttaagaaaagtacatgtgattgatataattaatataatttatataattctaattatagaaattgaaaccaattggtgatatcactataagataagagcacatangacaaggaatgctctgatactaaatggagtatttaatttaatgcacattcttttgaataatttcaattattatctttatataagatatatggaatctttgtattataaaacttctataggtgctgtgttcgaggatgtntctttacaatata

SEQ ID NO: 38874 - DNA, 468 bp, Glycine max
  unsure (1)..(468): unsure at all n locations
tcgtccgaaactacgtgtcgagtctgtggcgatgagattgtatacatggaaaatggngagctgtntgtggcttgtcatgtgtgtagatttcctgtttgtcgaccgtgttatgaatatgagaggagtgaagggaaccagagctgtccacaatgcaacactcgctataagcgccacaaaggttagttcagctctttaagctttgtgttatgtattaatgtattaggacaaaacatagatgcagttccttacatgcatttggtgatgttctcagattataagaattggagttttatcttgataatctgggtaataaatgtttacattaaatgtccaagtggttttgggaccaccgtgtttctgaccaaggataaaatngaaaataaaaaaatccgtcagtttgaagctgaaattctaattctgattagagaataacaaaacacctaaagaaatgcatcttagtatgataac

SEQ ID NO: 38875 - DNA, 653 bp, Glycine max
  unsure (1)..(653): unsure at all n locations
cttcgatcgtcttcgatctactctantccacctactantcacctccaaaagaaaaanaagtttgatcatganatcatgacaccccggaacctcaagacactgcnggatgtcagctattacaaacagaccgctttttgatgtcattatgatatctatacagatggatctcatatatctatatatctatagaacgataaatctcatttgatatatagcatagatcatacaatgaataccgcacgagtgggtatattggaatacaaatctgactaggcactcatgatatgaacttctacaatctacgctatccgtaccttcgtctggtgtatggtaatcatgtagcattcacactgaatgactctatgaaattacctctcttcttcacatggtacgggtgacgtatgacatatttctagttgttccgtggggaatctttataattaccacagctaagcttcagttttgctctgaccatcagatgagaggtgaataaccctggcttcgctcattagaaacattgaaacaacggtgtctcctgatctggtcgtgctctgaacagtctcgccttctcattatactatatctccgagagcacatattgttaattatgagcatctggaactaaatcttgtagtgcgaatttcatgctgttg

SEQ ID NO: 38876 - DNA, 148 bp, Glycine max
actcacacccctgcaatctctaactcatcccatgccacaatacaaaatatccctactacaaaaactactcaaaatgcctgaaatacaatgttaaaaccctatactactagggtacccttaattgtagggtaaactacatacctaacat

SEQ ID NO: 38877 - DNA, 280 bp, Glycine max
ctgagagaaccactccaagtctagatacttgggtattctcacattcttcacaacatatattatcctaaagtcattcttcttactatcatccataaaccttgtatcaagcttggtgagaacagcttgagagcactgaaattctgataccaggggacagatgtcgtacaggatgtcacgacatcacgctttagaacatgcagtttatgtgtgtccgtatgaacagattaaacaagtaataacacaagagaattgttacccagttcggtgcacctcacctaca

SEQ ID NO: 38878 - DNA, 397 bp, Glycine max
  unsure (1)..(397): unsure at all n locations
actcggagatctgattcaggcgcataatatatcgagacgctctgaaatgaacaacggaagctctcgagaaattccaatggtcattacctttaactcggagtctgatttaggcgcataatatatcaagacgctcgaaattgaacaacggaagctctctagaaattcaaatggtcataacttntcactccgagttcgattcaagtgcatgatatatccagacgctcgaaattgaacaatagaagctctcgagaaattcaaatggccataacctttaactcggaggtccgatttaggcgcataatatatcgagacgctcgaaatttaacaatggaagctcttgggcaattccaatggtcataactattaactcggacgtccgattcgagtgcaaaatata

SEQ ID NO: 38879 - DNA, 460 bp, Glycine max
  unsure (1)..(460): unsure at all n locations
tcccgacttcaacccggcatagtcggtcagtgataacctgtgatgtacctaagcaggcgagctcctggcagtcaacagataaaaggaaaacaagaccacatagcacggaggcttgtggtggctggccagctgtgaattttgtgtaatatgtggatggtggcctctggtaatcgattactaagggtgggtaatcgattacaaggcttaaaaatgaagacaggaggctaagatggtctctggtaatcgattaccacggggtgtaatcgattaccaggcttgaaaacgaggtcaggaagcctctggtaatcgattaccaaggggtgtaatcgattaccaggcttataaagggaactgggagttgatggaagcctctggtaatcgattaccagcctgtgtaatcgattacacagagaaatgggtcactggtaatcgattaccangcatgtgtaatcgattacac

SEQ ID NO: 38880 - DNA, 344 bp, Glycine max
  unsure (1)..(344): unsure at all n locations
tatggaatgagtgtttggaaatgatttgattgagcacatgtatgaatngaatgaatgtgatgattggatgactgtttggatcaagttcgccatcattagaagagaatgagcatatgattggaattatgtatgaaaatgttagtcgttgtcagattgattgtgaaggaatgcattaactgtatcctggtgagagtgtgatctctaaaatnttgatagaaacaactatcatttagtgctgattttgcgtgaatctctgagtatggatgggatcatgaacttagaatgatgaacgcatgtttgatataatagctcttagtcaaaagctaatcatatgatgatgatta

SEQ ID NO: 38881 - DNA, 337 bp, Glycine max
ttgataccgatcttgttgacatcatatcatacgcaagtcaaagtctttgtgagataattttgtggttggtcaatgcttaacaccaaagaacaatacgcagagaacactagggagcattaacatgagaacattatcttaatgggttgctaaatgcataatcgatgtattaagtagttacacaattttgccagatcaattcatagttggaaatcaatttctcattaaaacgaagataatgtaatagcgatgacaaagaatagatgggcaaatattcttaaaagtatagaagttggtttatcacaatcaactagaataataggatgctatattatataca

SEQ ID NO: 38882 - DNA, 212 bp, Glycine max
gcgaccaccaacaacacagtactttctacacctactatatgttgacctgacaatgttgttattgctatgtcgctgcaatccttccataccttatctatacatatatgagaggttccatgtcacgaggtcatatccaccacctctctatcatatgcaacggtccacttttgctatgaaatgcgagcaatccatgttgctatggctggactcac

SEQ ID NO: 38883 - DNA, 535 bp, Glycine max
  unsure (1)..(535): unsure at all n locations
ntgaaacctgcannacngnnnnaatgatatcatgaaaantcccctgatngccangaatcctcgacgntatgntgaatgctgnngggaaacagacattatcgaganattattgcatatgggttgcagacgtattggaattgatacacacatacatatgcgggtgataccatataccttaatggaaaggtcaacaatcatttatatgatacatagacaagtactctagatatacacacatgactcatatacatgataaagaacattttgggagaaatgtcttaacagttacagttgatgctgatgatcttatcatcacaagaatcatgtgtgtgagagttgagcgcggcggtgaacactatggcagatatagttcgacacctggcacttgagaggtgtgatgatattagattctagtgactactcctataggaaatatacgtttataatactccctaaatgaacttttgctttgttacaaggtctgaaccatctaaaaggagattactgatggaatgtaagcttcactaatataggg

SEQ ID NO: 38884 - DNA, 327 bp, Glycine max
  unsure (1)..(327): unsure at all n locations
agcntgatgatatacattctcccctntctcaagaaaaattttcttgacatcatcaaaatcttcatgatttacagtgcacctcattggcatggnggactcaaagcctcactttgctactcatgatgggcttcaagattatactttntgaagttgggagcttggggatcggtatatattgtacccgtgtgtggaatcattcctaattgtcatccatgtggttgtgtaagaccaccaatacttgggaagcttggtgccattgttaggccttgttatgtgtcaagtgtgacacgtagttgtgtccagtgtgaatgtcaatgatgtgaagta

SEQ ID NO: 38885 - DNA, 430 bp, Glycine max
  unsure (1)..(430): unsure at all n locations
nttaattgtgttgcactttttaaagatacttgactgaatgcaaaattctgaatgtcaaanaaataataatttacccaaacgtcaatgctaataaaatgttatgttcatggttcacctaaatcaacaaatttggtattcattggaagctagatatcaaaattggtcaacataaagagaaatgaataagtgaacaaacccttttgttgtgtatgtgaccattctattccaaataataataataataataatactaataattctatttttaattngaagtcaaacatgtaacaacttttctttcacataaacgattaaacatgatcgtgctaaaaattacgttaagttagaataaatttagatcaataataaaagaaaatatttaaccaagcttataacttaaaggaagacacacacaactagaataaacatc

SEQ ID NO: 38886 - DNA, 341 bp, Glycine max
gatgtatttgtattgtaacctgttccagcaatcgttggatctgggagaaatcatctgttctgttcctgtttctgatgaatcttatgattttcaattatcattgaatcatgaaaactcgtgtttatgttgtaaataataggaaattactgacttgtagtccttacgtatggtaggaagctaaaacttattctttcaagacaatatagtaccaatgtatgtagttgttattttgtgagagataatatttgtgttagcatcttgtatgttgtagaactattattcgagtcttaatatataatgacatgaatgcttattgctgttgtggcttacttgggacatga

SEQ ID NO: 38887 - DNA, 254 bp, Glycine max
  unsure (1)..(254): unsure at all n locations
cgtctcgatatattacggggactctaatcggtacatccgagttaaaaagttattnggtcgtttagacttttctctagaagcttccgtattttcaatttcgagccgttagaatatatcgatagaggcttcaatctgaacattttcgtagttaaaagttattggtcgtttggactatttctgagagctgtcctgttttcaatttcgagccgttcgatgtattatagggctcaatcggacatccgagttaaaagtta

SEQ ID NO: 38888 - DNA, 338 bp, Glycine max
tgaatcggatgttcgattgtgtcccataggatatctagacgctcgttatcgaaatcggaagctctaagaaaagacaaacgacaataactttaaactaggatgtccgattgcgccctgcaagatatccagacgctcgaaattgagaaccgaagctctcagataagtcaaacgacaatcactgttaactctgatgtcctattgagccctgtaatatatcgagacgctcgttattgaaaactgaagctctaagataagtctaactacaataacttttgactcggatgttcgattgagtcccgtattatatctagactctcgtaattgataacagaagctct

SEQ ID NO: 38889 - DNA, 421 bp, Glycine max
  unsure (1)..(421): unsure at all n locations
tacttactactactatattatagatagagttatgaaaaaaaaataaggataaggacacgtgtggcatatgcaacaggatgagtacacgtgcaacacatgccatcatgcatgattataaaatctaagcaacaaaggcccacgggcactatttttccgagttctgtctcccaagcaataagaccaccattttcactcacactacttttaaacaagtaaattatcttttagcaagaaaacacagacactaatatgaagagtgtttttttcttgantaacttttagttcctaataaataaaagattgtctactntagttntttanaaaagttgttagaatttaatcttttaatattatttaaatcatagaaaatacaaaagatcataaataatataatttttctagcttctaataaaaatatttc

SEQ ID NO: 38890 - DNA, 562 bp, Glycine max
  unsure (1)..(562): unsure at all n locations
agggatgtgcnntttganacgcgatgctattacgtgacactattgattactctagcttgtacgagctacttttaagtcgctactatagcgaataatagacgtttatagatgtnagtattcttctatgagacaaacatggtgactgggagagttgatacaaaaagccaccagacagaacgagaaaaacttcagactcttatatacctacattcttaggaagactctgatattttatcgataataaatatatgctaacaagcatgtttttacactaagcttggaaacaagattaaagagtctattcgaaatataagagtcatgatcttatactttcgatctatatcaaaaatcatgaagtggtctgccactaataaatgcaacgtaaatcttgaaccgagaactcttggaattttgctatcacgagcccaaaacactgatactcttctgatattcaggggccaattgatggttatgattggctgagacatgaatattatagaagaatattgcaatttgactcagattagatcgaatatatatcacatagcttatctcgaagacg

SEQ ID NO: 38891 - DNA, 345 bp, Glycine max
  unsure (1)..(345): unsure at all n locations
tctctatcctcaagctcgagtgagccaccatagggtgactcaatccaagtagagagcctctcatagagagagataaatagcttgagaagtctctatcctcaagcttgagtgagccaccatagggtgactcaatccaagtagagagcctctctgagagagagataaattgcttgggaagtctctatcctcaagcttgagtgaaccactgtagaatgagtcaatccaatgagagagcctctctgagagagaagaanaatagcttgcgaagtctttatcctcangctcgagtgagccaccatagagtgagtcaagtttgtaaacacatccttgtaaccctactatcac

SEQ ID NO: 38892 - DNA, 417 bp, Glycine max
  unsure (1)..(417): unsure at all n locations
atatacctacgcaacaagaaacacgatgatgatgtgattgaacttgaggaaggatgtctgagtactangttgatgcattaatctttacacaattttaattcaccaccatcaaacaacttcttataacatacattaaatatccttttgttgtgattgcataataacttgttcattttagtgaacataaaaacttatgtgcacttcgaatgaatgattgattttatactattggagattagaagaacataagctttaactcaagaaagcaagtgatattaacgttaagaaaaatagtgaataatgaacatgggattagttcttctatctataaatgtggaattataatctttctactcattgataaggctaatctcatacatatgtaatgtttcacaagaaatattatgcatcatttta

SEQ ID NO: 38893 - DNA, 351 bp, Glycine max
  unsure (1)..(351): unsure at all n locations
gtataagcattacaggtccaaggaaaagaagagtctcataagcacttggagaatctggacaacacacctccgatgaataatgtgaagaggaagccaacctatgnttgatggttgatacaacttttgaagaatcagaatcaaaacaagaggaggtcatcttgatgattctaaatctttaagattaccttatcatgaactactttcaaactcacccattctttcaaaagcttacaagaaaacagattaagaaactctccaaggtcatactaagctaaaaaaatccatcaatcaaaagatatcggttctttgacaganactacttataacattgatacttatgaaaacttgaaa

SEQ ID NO: 38894 - DNA, 430 bp, Glycine max
  unsure (1)..(430): unsure at all n locations
ctgctatatttcctcgttgtttctggttcatgcaggagttattaagctgtgacttacttttcctgttatgtgaaattgcagacgggcattctgggacaagaggatttcacacgatgtcaacatatatgctctgggtgaggtatgctctgtaaatcaaaaccttcaaatacttgtttcaatatgcttcgaggagcattgataattattgatcctcgcaactctaaaattatgctactaatatgaacttacaggatatgtcttcaaaatcactggtggttgtgacaaacaaggattgccaatgaagcatggagtgctaacgacctgctgtgttcatcttttgctccacagaggtagaactgtnatgaagcatcgatcttcaaattgtgatcatttatcatattataatgtgacatcatctgccacatttgtt

SEQ ID NO: 38895 - DNA, 197 bp, Glycine max
agcgacgcgtccagctcaagacgttaaagaagcgctactaggaggcaacctagtaccttttaaactctgctttgtatttgatcagctttgtttctcaagtcatagtgcgacacacctagttgcgtcatgatcctagaattaaataaaacgagcacaagctcggaaggagtcatacctcacacaatatatgtatgcgt

SEQ ID NO: 38896 - DNA, 386 bp, Glycine max
  unsure (1)..(386): unsure at all n locations
gagagtaccgataatgtgtctaccatcacgattatcgtctccctttttgcacatgttctgtagttgcatcctatccggaaccatatcagaatagtactgatactgcctaacgaaggcaaccattaggtccttccaagtatggactcgggaaggttccaagttagtgtaccaggtaacaactaccccagtaagactttcttggaagaaatgtattagcagttcctcatctttgcgtatgcccttatcttccgacaatacatctttggatggttcttggngcaagtagtccccttgtacttgtcaaagtccagcaccttgaacttgggaggggtgatgatattgggtactaagaacaactcttctagggtagcaaaggcataatcttt

SEQ ID NO: 38897 - DNA, 440 bp, Glycine max
  unsure (1)..(440): unsure at all n locations
ctgcagctagtagacattcacaccatgaatccttattattactacaccanaattcttcatgaatgatgaatttcataacattaataggatacaaactntgtttattcttataactcataaaacaattatatatatgcttggaattgatttaaaaactcttaagaaaacacttagcataataaaacactgaacatcagcagttttgaaataataataatgataaaatctaagtacattttgaaacaaatatattataataataagataaaanaatctaatatattagcaagaattgaatctcanaatggtgagtctataaaataaataagagaggtcatatntatantttcaaataatcataattaagtacgtagttataattgattgaatgtgggggtttttttagtacggataacatatnaaaatagtgttttttttaa

SEQ ID NO: 38898 - DNA, 402 bp, Glycine max
  unsure (1)..(402): unsure at all n locations
tagcacttcaagatttgatcactatttgtaccaagcttattggaagatggagacttgaaacacacattnttcaacttctagtgggagaatgcacagtaacattagatgacgtggcacttcaactaggactgcgtgtggatggaaaacaaatgactggactaacttatgttgactgtgaagacatgtgtcgtacttatctaggtgttattccacanaaatgtgatgcaatagtagggtcaatgattaaactaaaatggttgtgtgaccatatgtcacctttgttagaacaacaattataagctcatagcanaacatacattcttggattgattgggagggtattgatgtttgataaaaacatgtaaaaagctcacctaatgtatgtaactctgttgacaaatc

SEQ ID NO: 38899 - DNA, 347 bp, Glycine max
  unsure (1)..(347): unsure at all n locations
agctggtagaagctcttagaaggtgtcctgtaatctgtcaccataggcgaggttgtagccttcatcatggaactatttttgtactatctgttaattctcatgtatataatatacagagatcagcggaataagagcaaacggacagataggaagtaagaatgcagtatgataaatgaaagcgaaatataaactggtaacagatatcaagggcacaccgaaacggcttacaaacccatgtttttgaaaataaagaaaccgaagcggcggcagagccacacaggatcagtgaggggagaagggagatatganaaacagaacttgaaattantgaaaccgaaagaaaagct

SEQ ID NO: 38900 - DNA, 343 bp, Glycine max
  unsure (1)..(343): unsure at all n locations
atgatgataacaaaatatgatgacgaaggttatgacaaaaagctcaaagatcaatcaaagaaaaactccagtgaatcatagatcaattaaagaacaactcacgtgaatcaagaacaattcaagagttcaagataagaatcatgaagaattcctgactcgagaagaaagtttagagtcaagaatcaagattcaaggttcaagatctcatgaatcaagatcaagattcaagaatcaagagaaggcttaaccaagataagtatgaaaagtgtttctcataaattgagtagcacatgatttttctcaaaacatgtttaccanagaagttatactctctggtaatcga

SEQ ID NO: 38901 - DNA, 283 bp, Glycine max
cctcatgcactcctctaatgactatggcatcatttctggcactaaactgttgggagttggaggccacttctcaattaaatatctggcttcagtaggagtcatgtctccaagggctccaccactggcagcatctatcatacttctctccatattactagtccttcataaaagtattggagaagaagctgttctgaaatctgatggtggtggcaactggcacatagtttcttaaatctctcccagtactcatacaggctctctccactgagttgtctaatacctg

SEQ ID NO: 38902 - DNA, 447 bp, Glycine max
  unsure (1)..(447): unsure at all n locations
gctacttcaacatctgcctgcagntatataatattgttatatgtatttatttggatgaacatacactcattaatgcataattaagaattagacctgggctgcagtgattccttttacttcgctataatctcccttctcaagcctttgattgtctatgttaacttctttgcctctgagactgtttaactcttcaacaggccattgcaccaattgtctcccagtaaaatcgagccacacagttcgtggaatcgcctaattattntaccagacacatacatgcatattacaattcctttaatttgtataaggatacaaaaataaaacacttatagctgaatgccanacanaaaacatganagggagttagagattcagaatcgagcanagattgagtaaatctagaaatatctctctcaatccaggaaaaaaaatattgaanacatatgt

SEQ ID NO: 38903 - DNA, 218 bp, Glycine max
agaatgatgcaaaagcgggaaattaataacagacctctcttcacaagtaagtttcacacacctaccgtgttcaaaacaaagtggtgggcttaccacacatgaattcttcccaacagactaacctttcctctcttggtggtgattcagactccactacttgaacagacatttgccttcatggaaccagcattttcataaaaattggtatgcaacatttc

SEQ ID NO: 38904 - DNA, 315 bp, Glycine max
atgaacaacttgatcatgccatggggctgagttagtcatcttcgaggaacctttaaaggacttcaaaagggaacaatggaacaccggatgaatgttggcgccctcggcgagtttatacgataagctacaggccccacacaatcttcaacctaaaatgggccataatagcgcttggacaattccctaaagagccttattgcgtgttggccgacacttgcctgcgtggccatagctagaccatcacccactcccccaactggtagaccaccttccggcgctggcgatcaacatacttcttcatgagctcttgagctt

SEQ ID NO: 38905 - DNA, 354 bp, Glycine max
  unsure (1)..(354): unsure at all n locations
atactattggacttataccacacctgctctgttcacatacaactttagaagtagtaatccctcaattactcttcagagctctctcctctattttaaagggatggacactacacccttttgggatgccttttactgagggccctctaatgaagatgtttatagatactctttcggatttgactctaacatggagtgttatgctcaacgaggattcttctaatagaggtattntggattgactcttttctaaccttaccttttctatatgacactcctttcttgcaagttacttttaaaatttgtatccttatatagaccttgaatgtaataattgtagatgtcattacatgaaca

SEQ ID NO: 38906 - DNA, 320 bp, Glycine max
  unsure (1)..(320): unsure at all n locations
tctctgtgcttaatttacgttcatgcttaatggatgtttatgagtaattggtgtatgtgtcgcttaatcacataatgaatccttatgttaaatttcgcttagtaatttaatatagggttggattaagtggttaaactgataaaggataaattctcgcaacctatgataaagacttgcttgtgaatcaaggggaagcaacgtattttaattctgatattntctaattcaatcttattcattgtgtaatttacaaaagcaaataaccctccccccaatatgttactatttcttactnatctgttatgaacatatggttatca

SEQ ID NO: 38907 - DNA, 439 bp, Glycine max
  unsure (1)..(439): unsure at all n locations
aagcagatagtaagttatgtcgcctttccatgaaagttgttatcttattattnttaagaaacacgcgttattatattnttatgtccatattgatataacataatatgaaagtgcttcattccattacttttgcaagtttaccgagtacaggtcaatgtgtagtgtcagaaatacttttaaatattaatcgagcttaaactccacatattaattcagcttagccttaatgagcttatacgtataatagtaagaagtaatatgaatantatatattatcttgaggctcatggctgcgggagaatgacccctccaacccataaagaaccngcactatgaaaattataagtgttcgcgtcacgcattttatatccctttattaggccgaacatccgaaccaaataggtttaatgttaaaaccgtaaataaaaatcttttatag

SEQ ID NO: 38908 - DNA, 170 bp, Glycine max
ttgtgaggatgaaaaacatactggaaaatttgcaaggataaattccaaaccatttgatatttaaagaacaaaaaatatattttagccttgttttaatggttaaaaaaaaggagaaatgctactaacatactctttaacacactccttcatacaactttctcttatgtgtt

SEQ ID NO: 38909 - DNA, 463 bp, Glycine max
  unsure (1)..(463): unsure at all n locations
ntgttacgttgcattccggacctttgatctacgctgggtatagatatttatgcttgattaaacgcatattctgcttcatgtaagaaaaccactatgattggctctcgtgttgatcactataacaaaaaatccgttccttttagtcaaagttgatctatcacagctaaacacatctcttgatgtcggttggaaacttttataacataaacttcatgtattcttcataggattcgacacatcctgaaagaatgtcttgtgagacaatttctggaaatgacctcaaaccaagtactaatgaagtcttaatgtctcttaatatgatcaacatgattttcatattttgctgaatatcaacagagatcatgagcatatctgtattacataaacgaacttttaccggtgattatttgtatctaataaatactaaggtcttgatcatctaaaaatctttacttacaatacn

SEQ ID NO: 38910 - DNA, 370 bp, Glycine max
  unsure (1)..(370): unsure at all n locations
ttcgtcgagtgacggctggtgtgtattcctgtgttgttattgggtggatgacaattctttctgtgaagcaaccatcttccaagttggatctctctggttntcttctcttcctatcagttttgcgccgtttgaatcgcttattttcacttcgatcattgttcctcaggcgagttttcttggccatttatcgggcttgttgatggatatgctatagcatggggtttgattcatgggatgagcaattactgggcactntccttgttgggatggattgcgcttgtctctgttatgagtttgaagagatctggtgccgttgacctaaactttcttgagagttgaatctgtacagatccttctctaccatctgtgc

SEQ ID NO: 38911 - DNA, 290 bp, Glycine max
gactgctacgcatttggtatagaaaactgacgtcttatcggcctctgaaaacaggttcgcactatgaagattgaaccattatgtgctctgctcaaactcctctgtttaacccattctctgctctgttcgaatccctttgttgaacccttctgtttggtgcactttgaattgtagtcaattatgtatctatgttactgctcgttaatgtattgtatgttatatgatcacgctgggaatccatggtgctgaattgattctattgctcttgatactgtatcatttgaatatat

SEQ ID NO: 38912 - DNA, 338 bp, Glycine max
  unsure (1)..(338): unsure at all n locations
acactngtaacaacactttgcttgtcctanattatgtagattntccccttagatgtacagatgataanacttagtgaagtcacgaacaagatcacggtgaccctcaacttagtgaagcctacactattagaaattacactttcaacatcggttattaggacattctacatcagttctaaaaccgatgttaaaagtgccggtgttgaatgtatcatcgttaagatcggttntgaaaaatcgatgttaacataaatacaataacattggttgtctaaatacccaatgttaaacacaatgaactacaacaaaaaaagtgtatgcgtgatgaaagttgacat

SEQ ID NO: 38913 - DNA, 379 bp, Glycine max
cctttaaactcttcttacacggagctacttcatgtggcatcaagagcatcttcttctacgtgacgttctgttgctttctctatcattctgtgtggtcaattcactttaattccttgtacttcatcttattctccatgtatatcctgcattttcttgtggatcggcaatgctcacagtagattcaacaaaataaactgattaaatcttagatctactcttgaatctagatttttgttgattgaattctagatacattcgttcatgtatccttgtcattcttagaatatactttgaataatgagtctaattcatgcatgatatttaccacataacatgttctatatcaattcctaacaacagtcctgttgcataacttcga

SEQ ID NO: 38914 - DNA, 415 bp, Glycine max
  unsure (1)..(415): unsure at all n locations
cgtcagcgtgactcanaagttagtatgacatatcttgtgagcgcggaagataacgtaaatctccacgtgtcaacaggcttgtcggccgtgattgacgaatggcacagaagacgacgtttgtctctgcgtcctatcaggctttttgtcttacagacaacaaatactttatacggataaccactcgggtatttccgcccgtcagcgtgactcanaagtcagtatgacagatcttgtgagcgcggaagatgacgtatatctccgcatgtcaactggcttgtcggccgcgattgacgaaaggcgcataaaacgacgttagtctctgcgtgctatcagggctttcttcttacagacagcanaaagttatacggataccactcgggtatttcgcccgcagcgtgactcaaaagtaatatga

SEQ ID NO: 38915 - DNA, 83 bp, Glycine max
tcccgggtgctgcatggaagggctaatgtctgtatggtggtcagcagaggagcacaaaccacagacccttgcgacaggtacag

SEQ ID NO: 38916 - DNA, 469 bp, Glycine max
  unsure (1)..(469): unsure at all n locations
ttccttgatattccttttgagccttgtttccctttccttggtttgaagctcactacaagccttaagtgaaaaaccatgatatcaccatatccttaaggaatnttggagctttggaattgttttgggaataagtgtggggggtttttgtttcattggataatatgntttgttggctatgcttcatgatgtattntggcccatacttgatgtacattgtatattggttaaatgttggaaatgcggaatgagatagctgttctcaaatgctacagagtattaaaaaaataattaaaaaataataataattaaaaaatcgaanaagaaaaagaacaccaagagagtngagtgaataagatcttnaatggaaaaagaatgatgagactcttgnatctactctttatgttgtaaatntatctntagggcttcttatttntgtcttaatatgcacttattccccattgctcctcta

SEQ ID NO: 38917 - DNA, 83 bp, Glycine max
tcatactattataatttgaagtcgtgcatgggctatcacactttatatagcaggtcctttctttaagcacaatctgtgttggt

SEQ ID NO: 38918 - DNA, 368 bp, Glycine max
tcacaaagagaatcatcttgatatgataactctggaagttctcttacaaggctatgcttttgaagcgttgagattaacctcaagctagcatgaccaagcttcttatgtcaaacccaataatgctctttgactgagagtaggcatgaaacttttggactagacagatcaccaagtttaatcttatacagatttccttgtctcttagcctagaagagtgaagagttttccttgttctcaatgatacacatatccttgttaaaagtgacattgtatccactatcacataatttacttatgcgtaagcaaatatgcttcaaccctttaacaagcaaaacattatctatgaaggataaggaggaatacatact

SEQ ID NO: 38919 - DNA, 407 bp, Glycine max
  unsure (1)..(407): unsure at all n locations
catgaaaaagcccttcgataatatgtatgtatgtaaatatgtagcatgaaatgccttgcaaaatgttgataaaatgccttgcaaaatgttgaataaaatgccttgcaaaatatgaatatatatagcatgaaaatgccttgcataatatgaatatatatacatgaagtgccttacaaagtgtttggatgggtagcgtanaagtgtttttcaaaatatgtgtatttgtgagtaggtagcaaaagaagccttccaaaaaatgtgtgtatatatatatgatgtagcatgaaaaggtttgtcananaatatgtacatagatgtgtgtcgtacaatgcctctcaccannattttatgtgtgcanatgcatatgtgctcataaatagcgcgaccctaatatgaatnnatttata

SEQ ID NO: 38920 - DNA, 336 bp, Glycine max
  unsure (1)..(336): unsure at all n locations
tttattattcgagaacaagatctatattttattccctttacccaattaaacaccctctcaaatgtagcagaattaatattttaaaagacaagaaaaacactatagagaatgtaataataagaatacaaaataaggtgggttactatgtaagtgttgataattccttagttacataaaatctctactgatgtttcagcatagaactaanactattctttccttcaaattacagaaggctaacaagattaattttaaatttaatgaaacgaanacatagatttgttcagagattaaaaacatatcgaactccaacattttgttatcactaagaatatg

SEQ ID NO: 38921 - DNA, 210 bp, Glycine max
gagctggacaaaaataaggtgtgggtaaaaccttataaatcacactacattgacatttgtatatgatattaacaatgacatctattttgtaacctagaatatctaataaaagacacatttaatagcatgtgcaagcaactttcttaaccaggagcaaggtcacgaaccaaaccaatacacccaaatgcacatagaggagcatggtataat

SEQ ID NO: 38922 - DNA, 260 bp, Glycine max
  unsure (1)..(260): unsure at all n locations
cgagcttaaactgccacaaggtgactattntcctataaataggcatgatgggggtgttttaaagggttgaaaggtccaacattgaatggaattgagagagttaagagacaagaagaagaatgagagagaaaaagaagatgacgaagaaatgatgtcgagacgctactcaaatgcgaccgtgatcaatccctacatncgttctttgtctgtgtcttcgacgacaatcagtagtttattttcaaggatgaatgtatctatgt

SEQ ID NO: 38923 - DNA, 390 bp, Glycine max
  unsure (1)..(390): unsure at all n locations
aagagtacatggtgccacttttgatgagaggttctatcagcattttgatagatgaaataaacgcccaaacttgcgttaaagtggctggcaattctcttgggatttgcaccacctatgggcttgtttttatttaaagaaattaatgtttaataacgtgaaaactctatgattgtggctgcctcttgtctgaccaanggagtgcacaattttccatatgtatatgtgtcttaattctaattntaattaggtataatgacaccatcaattggtgntatcaattctagttttaattatgtgtaatgacaccatcaattgttgttattggtgatcatttcactcgtgtaaccaacttgatggcaattctatttatacgctgcacattttctaata

SEQ ID NO: 38924 - DNA, 312 bp, Glycine max
  unsure (1)..(312): unsure at all n locations
tcatatttctttccttcttattttatcttgttcgtaaaaattcaaatactacataaactaataatgaaaataaaaatttatttgaataaataattaattaaagttcttaaaatatttttatgagaatggggggaaacatgataaagagaaacgtaaaaaattatattcattntaaaanaatgatttttttaaattataagataattaaagattttatttcttgtgtacaaactatttgtgagcaattgtgacctagagcccaccaggtattatgttgaatgaacttattattgctgacaatgaatgaccaaa

SEQ ID NO: 38925 - DNA, 308 bp, Glycine max
  unsure (1)..(308): unsure at all n locations
ntngactgttcactaacaccaagaaaaatgcntttttcttctttgtcatctagctntcttctcttgtgatccggaatgtgagcataggcaacacacccaaaaatttggaaatgatctactgctggtctttccccgctccatgcttcctctggtgtcatattttgaacaacaagtgtgggacttctattcaaaatatgaatgctccagttgacagcttcaggctagaaagttttggaaactccactccttgtcaaaatactccgcaccatgttcttaattgtacaatttttcctctcgcacacaccatt

SEQ ID NO: 38926 - DNA, 407 bp, Glycine max
  unsure (1)..(407): unsure at all n locations
agcttcctcagggccatttcctatgagaacaagcatttagaagtntagtttacaagataatgcttatcttaacgcanaanatgtcatgctaatccctccggttagaacgaactcatgcgcacgtttaaagtaacacatttatgcacatgcgtatgtgtagaatatcctactatttatatcaacatagaggcctccaacacanttctaatgtcatacatatatacgcatttgaaaagaacacacattctcacgctcaaggcattgcgtcaaaatttacacttaactatgtcctaaacatttgctatcacaaactacctacacacactcganacatatataccatacaaactntcatttggtcactcacacttatgcatatgggcangaatattacattatgcacatac

SEQ ID NO: 38927 - DNA, 175 bp, Glycine max
agagattgaagccttcattttgtactgtcttcgtgcgaatcacttttctctcttgataaatagtatttcgtaaatcccaacggtagaagtgtttaccattgaatcgggaaccaggtgtccaaatttcatgacgatccaatggtttatgattccgggatcgtagttttactggaca

SEQ ID NO: 38928 - DNA, 252 bp, Glycine max
  unsure (1)..(252): unsure at all n locations
gtgtaatcgattaccatgcttataaatganggcagcaggttgtgaggcctctggtaatcgattaccagtctgtgtaatcgattacacagaggaatgggtcactggtaatcgattaccaggtatgtgtaatctatacacagtgcctttttcaggttttcatgtcctgaagctgtgtgattcgagtttggtctctggtaatcgattaccaaggctgtgtaatcgattaccagagatgacaagcctgaagatacc

SEQ ID NO: 38929 - DNA, 296 bp, Glycine max
catttcattacaaattggtggcataccttatggtcccatggtagaaaatggtggggtgtttgtggatgagactatattattctgcggcaaccaacttttgacgatgcttgtctgaacttgtgagcgcatcacatcttcgccacttacatttatagggtcaattgtttgcatgaataatacccgcaaccatctcattattcaccccagaaaggtaattcatttgatttaactcattggtgacactattattggtagaaccgtctgcagcgtatgatactactggtgttttactacag

SEQ ID NO: 38930 - DNA, 476 bp, Glycine max
  unsure (1)..(476): unsure at all n locations
agcttgcaattacaaatgaggggcataacaaaaagtctattatactacaaaggaagcaaaaaccaaacacaatagtgtccgtaaaaaatggttgaatttccaatggcaagtatagaacaatttattctcgtttttttttttccttttgaatacttcaaatttcattttgtctcggttaattgtgggaaagcaatattactatggtgttggcacattttcatcttgcaattgtggaagcacaagtaggatcatctttgtttgaccaactttctttaattcgacaagcctgcattggtctttcaatttggactacttctgcagcttccttctccaattgcctacaatatcttccaaacgtttctacaccaacctgaagtctaaaatctatgccaaatagaaagctcatctcgaacctgtttaattcagatgtgctcactcctccaacttttgcatagtangcattgttgtagaatctg

SEQ ID NO: 38931 - DNA, 325 bp, Glycine max
ctagaatttcctgaaaaattaccgtggttggattaaaaaattaaaacctggcaagtattttaacaggaaacccaatggatctccatggtctctgccggaaccggattggaatgcttctgggcacttctacacctgcttgagagaaagatgtattactgcattgcatgatgaaaaagttccaagcatgaattttgcaaaaacttgttccaaacatgcaccgagaaaacttcaaatgtttccaaatcaaagcaatcttcccaaaaagtttttgcccaatcacgtgcttgggtaattgattttttagacatggcattggcatcacatg

SEQ ID NO: 38932 - DNA, 546 bp, Glycine max
catataatcacgtgatataacttttattggcggaggccaattgcgttcagaggcaacataaaatgccttaaaaaatgacaccacgccctgccactcatcagacgacttgtagtagtttattaagctttcttacgacgtggaatcatttcaatacgcctgatgatacagaaatcgcggtgcatcaaaaccatgtccccatactttttatattggacgttgttggagaggggctgaatataatgtcctattcgtccaaatataaatcatatcggagatatgtacacggacatatattaatacgatggaatatgtattatgatacttgagagagtgtgaatttattaaatgaaccgcacctcatgaatagaattatatatatttgtggtgtggtgtgggatggtatatgaattatatggtatacaataagtaggtaaggtaagtgtggacatatattttccattggtattgatagttcatcatatataagaatatgatatataaataaaatgtatgattattatatattaattagcgtaatgatcatcc

SEQ ID NO: 38933 - DNA, 572 bp, Glycine max
  unsure (1)..(572): unsure at all n locations
agcttaacttccattggtgagatccaacgaggctgctcctcttgagcccacacctgcacaggttgaaccagagccagctgatccacaatctccagtggtgaatccaccttcttctcctgagcttgaagtagttcccccatctccaccttcttgtgaaaattggtgttatgaacattttggattgaatgcatgattgtgatggagtttgtgtttcttttcatgagtttaagcaagtatgttgttagacaaagaaagaacaagaatgtgaatttgcaattagaattgttagtcaatagacaggttgattgagaaagagaagcttgaaccataaccggtgagagtgcaatcttaaactgtgagtgaacgactagctttgagtaatagtctttgcatcgatctttgaaatctagaataaaatgtatgaatgaggacatgatgaaggccatgattgtatataccagccaattgactaaaaagcttaccttgaatgatanttgtatcctttgcaccccttgtgagctaaattacattttcacaattgaaccctaaacttgaataaatatctctagata

SEQ ID NO: 38934 - DNA, 601 bp, Glycine max
  unsure (1)..(601): unsure at all n locations
agcttaagggtaaaattaagaagaaacatgaccttgttcatttccactctcatgtaattaatcaaacagtctaagaatgatgcaaaagcgggaaattaaaaacagacgttctctcacaagtaagtttcacacaactcactggtacaaaacaaaggtgttggcttaccacacatgatttcttcccaacagactaaccttttcctctctttgttgtgattcagactccactacttgaacagacatttgccttcatggaaccagcattttcataaaaattggtatgcaacatttcaagtgtctaagtccttcagaaaaagcttaaaaagtgacctcataattatcatgcaattcttattcaatgacataaaatgactgaatttaaactactgaaattaaattgttgaaattaaagtaagataaagaacaacagaaactatagacaagaaaaatatagaaacaacagaccagaagaaatcttggatagacgatntaggtctcaatcttgtgtggccttggatccaatcagctactagatatgcaatatgggctcatccttagttccaacttcagtgatatctttgaccttagagggctcaccccc

SEQ ID NO: 38935 - DNA, 743 bp, Glycine max
  unsure (1)..(743): unsure at all n locations
ccgcctggaatgcgtgcaatgcgagaccggacannnnaatgaagtgcgcgatgcaacttgnccaaatgagctgggggggttttttttgtgaggggaccccatctggttaataataggtgccactggaaacctaccttccaatttttggcctccaagaatggcccccaagaagcctgctcaacaggccaggatggacagggagccaatggactatttccaaccgggaatgacagcaccgtttagaagcctgtcaccaccacgcttaaggcataagggatgggcgttttcgggaccgcccgtccgcctaggactacaagttactgattccagaagaattggcgccgccggggcatactggtactccttggccagttgatcaaaatatgcctgagttttgccatgcttgccacagaagaggcggcgtgcatgaaacctgggaagggcagggatccgttgatccaaccttcgccaccctagattccttgggttgaaagcccagaaggatatggcaatgagaccgtctatgggtcatagaggcatcccactgttgatccgggaagtttgccgctgtgtggaggcatctatcatcccccactacccccgccaattgatactgctctacacgccgccccatatatccactccttccgatgcactgtgtccccctaccgggacctccgtggcattgtctgagccctacttggggtgccccctagccctgaccaaatcctacggcagacccg

SEQ ID NO: 38936 - DNA, 653 bp, Glycine max
  unsure (1)..(653): unsure at all n locations
agcttatcatatattatatatcatatgatgatagcttgtaattgaattntacactttacttatactatttcctcataatatattagttttattaaaaagaaaattaaggtagaattaaaaggaacgtatcacttatcgctttggtattcatttggttccatgctacattgagtacattttgcttcgtaagaaatacaactttggcagcacaaaaagctttggtccataaaagctttgccttattaagaaaagaaaacaagcgataattacattgtctttacacaataagggattatatgggtgctggttttgaatctgtactgtgtatgtgctatccttggagtttttattatatatatatatatatataaaacatcggttttcaaataatcgatgttaatagctcgatttagtgcaattttaatatcggttattntaaaactgatgttgtaagtacttgacaacatcgattnttaaataaccaatgttaacaattcaatttagtgcgatntaacattgttattntaaaccgatgtcgtcaacacttgcacatcgatttaaaaaatcgatggtatataactcttttctttaaatattatatattttcaaaaatatatatgagtataatatattttataaaatatataatataa

SEQ ID NO: 38937 - DNA, 426 bp, Glycine max
  unsure (1)..(426): unsure at all n locations
agcttgaaatacagaatagaggctctgagcttaatcttacgataataactttttactcggatgtccgattgtgtcccgtagtatatcgagacgctcgaaattcaaaatagaagctctgagcaaaatcaatcgacaataacattttactcgggtgtccgattgtctcccgtagtatatcgagacgcttgatattcaaaatagaagctctgagcaaaatctaacgacaataaccttttactcggatgtccgattgtgtcccgctgtatatcgagacgctcgaaactcagaacagaagctctgagcaaaatcaatcgacaataactttttactcggatgtccgattgtgtcctgatgtatatcgagacgcttganattcagaatagaagctctgagcaatatcaaacgacaataactntttactcggat

SEQ ID NO: 38938 - DNA, 198 bp, Glycine max
agcctatggaagagaaaaagaagcgtgtggttctactttctttgttcactgaaaatccatcattaagcatcggccccttatcccctgtgtcaagacaagaaaagtgggagattacccgtacaaaccattattggcgaatgaaccttgtggccgccaacgaagtcgcagacaaaattgtgagttacttcaatgattgtt

SEQ ID NO: 38939 - DNA, 896 bp, Glycine max
  unsure (1)..(896): unsure at all n locations
gcnaacgtgttcgatggatcttgatagaacacnacnncatanantagagatgaccgcggtggcatcgcaagcgttgacctcatacgacccacacaggacgngataatntgtggagccaagaccaaaccccngggggagggacatctcatccaccctatgatatgccgcgcgaagatcaccaatgcggcctccgctaaagcgctctggactttctataaaccccgtgccatgccttgcgaacaacttggaaaacgctatcggtgcgggcacataaaccccgagcgaagaaaggcatgatgctatcttctaatgggacttctctcatggggtagccaaggcggtttatggcgagaaccggattattattattaccaccccttgttgccaaccaaggagcaattggacctccatatgaagaagaagaatactgagtcctccatccttcagcgagggacgaaataacaaacccccccctgctaaccataaatggtcccaatctcctatccttttcaaccacgagcggaacctggaacggatagagaaccctccctcctggaaaagaagtgggaaaccactccccatagaaagctggatacagcaacaaaccttgcttggttccacacatacatagtcaagggtggaaagtgatgatgccaatacacacccgactttttggggaatgaaggcaaaaaaaatgatccgtcctgnccaccaaccatcatatgatagagaggatcctcgaaaggaagaggtaaatacataaaaggggcacggcataatcgcctataatgatatacgcataatgtagcagatcccagcatgctactacacggcatcggggtagtcgatgcgcaaacaggcttatagaaattactctagtgagaacagcaatgccg

SEQ ID NO: 38940 - DNA, 508 bp, Glycine max
  unsure (1)..(508): unsure at all n locations
agcttgatccttgaatcttgattcttgattcttgaattcaactttcctcttgaatcttgaagtgttcttcaactttcctcttgagtcttgaagtgttcttgattctatcttgaacatcttgaactcattctttgattgacctttgagctttttgtcatcacctttgtcatcatctttgttatcatcaaaacatctttgaatcaatcttgattcatcatgaagctttgcttctacataaagggttagtgtaacaccccaagttttgagtactaggaatatatcttaaggaaaatccttattangacctttctgttatattttctataaattcttgttgtcatcatcgnttttggtggtgctattattattattattattattattattattattattattattattattattattattatttttggctactgcaagctgctgttcacaactattatgggtaaagtatcaagtagaagggtactctagtattgaaaacaatataccacta

SEQ ID NO: 38941 - DNA, 548 bp, Glycine max
  unsure (1)..(548): unsure at all n locations
agctntgaaaaaatattcttgggtatggttgattctcaagaaagtgaaattcctgtattttatttgattttattccgggtgagaatgttgcattcccattggaatattggaagttaccttgttatatggtattaaatttccttcccacccccacaaccatttgaatgttctaaatgagtcccaataatattaatttataactaaatatatttatgaatttatccagcaacaacattcttggctataatattcctaggaatgtaattatataccttgaaacgaatgccactaagtaagatgtttcaaagttaggaatctggatatgtttatgttatattaatggttggttgggcaattcggaagcaatactacaattagatgattattanggctcgattggtggctgttgggtactatgcactgaactagaaatagatttagtggtttgtaaccttccagcctccaaattggccccaacaatggtaattaatattcttaagatatgcatcctttttgagaaattgaattgtcgtatccaataagaaaaa

SEQ ID NO: 38942 - DNA, 470 bp, Glycine max
  unsure (1)..(470): unsure at all n locations
gaattcattaatcttcttttccaactaaaaaccattgtgagggggaagcatatgacgaaagttaagaatctttttatttgacttcccatttaggtaaacaaaatgggtagtcaaagttatgaaacccttagtattaatagatgtccataaatcagaagttaaacagatcctgccaggaatagcacacaacagttctttactgatggttttcttcctctcatatattctcaacatattagtcttaaaagtatttctagaaattggttaattgaggacacaaataacttatcaaagcctgaaactctggatacttaacaaaaatgaagggcaaattacgcctaatcattagattacacaacaattcgcgtgccatcatttgatctatctctttggccttaaactttccttgcatgtctaanatcatttgactcatatcttncaaattttttatctcacatctcccattatga

SEQ ID NO: 38943 - DNA, 395 bp, Glycine max
  unsure (1)..(395): unsure at all n locations
cagcttacatagatacggttaaatcagtaagcacccttatcttttcaatcacatagnttctttctttatcatccttccttctttctttattatctctgaaactctggtctttaaccaaactcaatgacgtcgtgtgattcatgtagcaaactcagtgaccgactcaaataaagctatgttgttgattttggtgtcgttgtttgtttattatgtaaattgcttcttagctctactttctttcttgtgtatgtacggctatgcaaaattaatagatgtataaatttgattaattatgctagttttcattaaagacgattcgaaattaataaataccaaacctagttgaattttgggtatgatgaatttgactcttttttttttctttgttctttctt

SEQ ID NO: 38944 - DNA, 557 bp, Glycine max
  unsure (1)..(557): unsure at all n locations
gcttcttgaggaagcctcttatgaagctttttgatgaatctacatgagctgccctcggaaaaatgctgccccgccctttgtaatcgttggatcttcttgaaatttggtttgcagcttcacaagacacttttccacgatcgaacccgtgggatctttggaaagatctctggagtgtgcgcgaagcttccgttcctgagagcatttctcatttaagcatttcagccgttgctttcgtgtagcttaggaaaaacaccatttcttcttctttctttcttccaaagtcatttctaatgtcccaagcactttctccatcacccacagccaccattagccaccacaaatcgccattgttctttgttgcaaccccacactgagaggaacccttcgaccgaagcggaatcttccaacttgggtcgcggtttcgacagagaatgaaaccctagtctgacctttcattntccttcgaggtaaccatggntctatgcctgtttcttgttagtttcagctagtctttgcatcttttctgactntggaaccgccattccatgtcttatgct

SEQ ID NO: 38945 - DNA, 489 bp, Glycine max
  unsure (1)..(489): unsure at all n locations
gctaacttccattggtgagatccaacgaggctgctccttttgatcccacacctgcacaggttgaaccaaaaccagctgatccacaatctccagtggtgaatccaccttcttcttctgagcttgaagtaattcccccatctccaccttcttgtgaaaattggtgttatgaacattttggattgaatgcatgattgtgatggagtttgtgtttcttttcatgagtttaagcaagtatgttgttagacaaagaaagaacaagaatgtgaatttgcaattagaattgttagtcaatagacaggttgattgagaaagagaagcttgaaccataaccggtgagagtgcaatcttaaactgtgagtgaacgactagctttgagtaatagtctttgcatcaatctttgaaatctanaataaaatgtatgaatgaggacatgatgaaggccatgattgtatatacaagccaattgactaanaangctaccttgaatga

SEQ ID NO: 38946 - DNA, 445 bp, Glycine max
attcaacgacatactttattttgatgtctgattgagtccgaatatatcgagacgctcgaaattgaatgttgatggtcgttgcaaattgaaacgacaataactttttactctgatgtctgattgagtcccgtaatatatcgagacgctcgaaattgaatcttgatgctctgagcaaattcaaacgacaataactttttactcggatgtctgattgagtcctgtaatatatcgagacgctcgaaatttaatacgaaagctatgagcaaattcaaacgacaataattttttactcggatgtctgattgagtctcgtaatatatcgacacgctcgaaattgaatgttgatgctctggtcgatttcaaacgacaataatttttcggccaacattgcagaattttttacaaacactggtcgataatatttctttatggtagacgaagtttt

SEQ ID NO: 38947 - DNA, 472 bp, Glycine max
  unsure (1)..(472): unsure at all n locations
agcttaggctttgaaaaatgtctaagtgagtttattttgatgtcagaagaacgatgctggaatagtcattgtctccttgtatgttgatgacttacttatgacaagaaagtcaaaagagctgattgaagaatttaaaggaggaatgaaagaagcctttgaaatgactaatcttggaaaaatgtcatttttcctttgtatgcaggtgcaacaagatagaggtgaagtctttgtaagtcaagaaaaatatgcaaaggaaattcatagaaagttcaagatggaggaatgcaagccaattgcaacgccaatgaatcaaaagttgaaattcagcaatgaagatggagctganaaggttgatgaaaaattgtacaggagcttaataggatgtctgatgtatttgactgcaaccaggccagacattacctatgcagtangcttgttgtcacgatatatgcactgtgctagtgagattcat

SEQ ID NO: 38948 - DNA, 521 bp, Glycine max
  unsure (1)..(521): unsure at all n locations
agcttatgaatgatatgaatcgaactcattttctatattcaatttctaattataattattatccatactttatttatttatttattttatcaagaaacatttaatgtgaatttaattaattaaaacacgtcacttagtaaatcattaaaatttatacattaattatatttttgtattaaattaaataatataataatgaaggaaaaatccctcgagaaaaacataatttatagaaatgaaccactcctctcacattaaagttctaccaacacatgtatggggcgtatacaaatattgtttttatcaggcgtatgagaatggttctatagtacccttttgagatcctatccattgttatccatattgatgatccatttttgtgctcaagagctactcatattttttatactagtaataggtataattnttatttgtaataaaatactcatacaatgttaaattggtttctagaatactttttaatgttattaatataatatntataaataggtacatttgtc

SEQ ID NO: 38949 - DNA, 590 bp, Glycine max
  unsure (1)..(590): unsure at all n locations
agcttgcttctacacttaagtgtttggggtgtagttttataaaatgttggggggagttaaaacaaaatgggcttttcaaataaaaatccgacccactttaagtgactcagtacaaaaacattgcatttcattaagcttgcgtttagtgatcacaatccatatgttggatgcatgtgtatagtgcacaagacttactaagctcattggacgataggtcctttggatgcatatcaatgtgttgagaccttccacataaatttgaaacttcattccacaagaagcatgccaagcaaactcttagcgagattaacctatcctcagtaaagggttttgtaaataaataaacaagttgatctcctgtagatacaaaatgtaattccatagtacccttctaagtgtgatcccttatgaaatggtgttttatttctatatgtttggctcatgaatgcatgatangattnttagaaagatcaatagcaacaatattatcacaaaggatagtaatggtactctcanataggttatagtcgtcaagctgatgtttaatccacaggagttgaaaacaaaaacatgcagntgatatatactct

SEQ ID NO: 38950 - DNA, 486 bp, Glycine max
  unsure (1)..(486): unsure at all n locations
agcttggaaggatgcttcaatggaggaaaagtaagatgtgagataataagagaggggggagcacgaaattgaaggaataaaagaaggagaaaagtggaactttgaagtatgtctcacaagactctcattcatcaaagttacaacaagtgttacacatgcttctatttatagattaaggagcttccttgagaaaacttccttgagaatcttctttgagaaaacttccttgagaagctagagcttagctacacacacccctctcataactaagctcacctccttgagaagcttccttaagaagattcctaaagaagctagagcttagctacacatacctctctaatagctaagctcacctccttgagatgagaagctagagcttagctacacacccnctataatagctaagctcacccccatgacaaaaaacatgataatacacaagaaagtgcttactacaaagactactcaaaatgccccgaaata

SEQ ID NO: 38951 - DNA, 470 bp, Glycine max
  unsure (1)..(470): unsure at all n locations
gctttgaaccattaaatgacaataacttttattctgatgntganngaggnctgtaatataacgagacactcgaaattgaatgttgaacctctgagcaaattcaaacgacaataactttcttctcggatgtttgattgagactcgtaatatatcgagacgctcgaagttgaatgtttaagctttgagctaattcaaacgacaataactttttactcggatgcctgattgagtcccgtgatataacgagacactcgaaattgaatgttgaacctctgagctaattcaaacgacaataacttttttctcagatgtttgattgagactcgtaatatatcgagacgctcgaagttgaatgttgaagctttgaactaattcaaacgacaataactttttactcggatgtcagattgaggcccgcatatatcgagacgctcgaaattgaatgttgaagctctgagccaattcaaacg

SEQ ID NO: 38952 - DNA, 457 bp, Glycine max
  unsure (1)..(457): unsure at all n locations
agctttattaaaaaataaattattattttttaaaatattaattttataaaataaaaaataagttttaaatattcaaaccaaattaatccaactcggcctatttatgatcaggttgatttacattaaggacgtcagtcaataaaattacataaaccttacctataaaattttgattgaattgaataataaatttaaataaatttgatccaactgacccgtgaacactggtatgaccaacctttgttggttccacactcattatttataatagagatctctacaggcaacccaatgcatggttgcgacgccaatgctacgtatagaccacaccatggctgtggagagaaggatgaaactaccagggtttcaaaaccggtccaaatttttatgctggagttattataccttgaagcaggagtctcannattttatcgtctaatacatgttgaaatttaaa

SEQ ID NO: 38953 - DNA, 991 bp, Glycine max
  unsure (1)..(991): unsure at all n locations
agaggagagggagagggagtcgaagcgaagcggcgcgcccgaaagcaacgaaaaatgcaaacgangactcaaancaacaaacacnaagaacacaaaaagaatgatgacaatcgatgcccatngcaacnccncgancnnnnanagncgaccngcaggcaggcaagcnnancnncaacgcgaacgacggacaattgaatttatttcnnnanccgcgagaaccaacccagcggaacttctcccccaaacaaggacaccccaagaggtctccactgattgcagctagacacggcaagaaaacccggacccgtggggacccgacagaaaccggcccgactatgacggggaaaacccgagaagaccgaagatggggacagggccgagtcggctccggaaagcaaaagttggacacgaccacggggacgaggatgggattactacatcggcccgaccccgaacccgaatccgggctagaagttttgcataatccaaacaaacagccgagaaatgcaacacgagagaaggccacgcgagaagccttacacaagccaagagcaggccctcaacaaggccggagactgagccggaaaaaaattaattgaacagaacgagcacaaagaaatggcggcaatcacacaattgggcaaaaacaaagcaaaaagcgttggacgaaaaaataagcctcaaaatcgaacggggacggaccggccgggaaacccgatcccaaccgggcagggatgggaaaaaaactaaaccccgcggacatggggacgggaaggggaacaggcgatagacgcgccccgaccgaaggccaaggacccgcccggacggagcgcagggcgcagaacggacagcaaagacgggcacggaaccgacagaaagagggcacgacggcgacgcgaacggggcaagacaggcaggggccggaagggggaaccgtaagcgacgcgaggcatccgcgaaacgcgcgccagcacaggggcaccgcgaggcg

SEQ ID NO: 38954 - DNA, 563 bp, Glycine max
  unsure (1)..(563): unsure at all n locations
agcttattactcatttgcaaccaaattgaagaccttcatttctaattgatccctccatattatacttaaccaatattgacctaaagataaaacaattaaaatttacattttagacccatcaacaaattttaattagttnttaaagtaaaaaataatacatatattaacaaaaaagatcgatctataactcttatttatggttaaaaaatcaatatcttttcaagtttttttaattggttttctgatttgtgtttggtatagggcccatttttataggctatttttaagccaaggctttgtggctggtttgtcttggttactttctatataccttattgaggttaaatgactattaaccagggatacatgatgggtttgttttctgttggatgggttatgctaacctttgtgccatcatcaatttatttatttgctgataaaaaaggaaagaaagcgagagaagtatagacctgtaaattctagtgctcaactggacgataatatttcaacatgcagcaagatggcagagacaaacattgcagtgttatttttaactactatat

SEQ ID NO: 38955 - DNA, 515 bp, Glycine max
agcttctcttggaccttaggcaaaccttcaactcattcttattatcaaactggctactcgtgattggtccctgtcctctctccggagcttaatgtcgctgttactaccccacatagcccctcggaatttgttccggccatgttcttccctacgagcccttatggactcttgttccaaggccctggtggtagctatatatacatctcttagctcggcattctccttttggatcttaagagttgcttatttgaacctatctttgactgtatagactgtctcgagttctaccctaagggcccgcacctcttcatattccttcgttgcttcatacttcaaccctttagtggttctgaaactcgggagccaacccagaccttgcatgtgggctatcaaccacctatggtagccgccgatgggctcgttgtactgcctacgagttctttgccttcttttgaccatctccataccttgtgaccttctgaagtgcctctacttggtgttattgacacctcctc

SEQ ID NO: 38956 - DNA, 449 bp, Glycine max
  unsure (1)..(449): unsure at all n locations
caccgcagctgcagcttgtccagctactttccatgaatcgtatttatgtttcttgngccctatatttagtgaagtatctcatgattagtcatttcggtgtttattttctctctgtgtatttttctttggccctttctggtctcaataaattgtcattcataaagtccatttaatattcattggttcaatggtgagattgaatgaacacatgtttctatggcatatctatattttctattgatactattcctaggtacttatatacatatatcctatctcttcttcatacaattagaatgtctttgatatgatttgatgtatacattatttatcataagagagtctctcagaaactcaattccagagtgtctatttacttctctttaaagttcaattttaacttggaatagctaatgctttttgcttgtggttaaccttcctggtggatg

SEQ ID NO: 38957 - DNA, 432 bp, Glycine max
agctaacttccatgggagatccaacgaggctgttccctttgtcccacacctgcacaggttgaaccagagccagctgatccacaatctccagtggtgaatccaccttcttctcctgagcttgaagtagttcccccatctccaccttcttgtgaaaattggtgttatgaacattttggattgaatgcatgattgtgatggagtttgtgtttcttttcatgagtctaagcaagtatgttggtagacaaagaaagaacaagaatgtgaattcgcaattagaattgttagtcaatagacacgttgattgagaaagagaagcttgaccataaccggtgagagtgcaatcttaatctgtgagtgaacgactagctttgagtaatagtctttgcatcaatctttgaaatctagaataaaatgtatgaatgacgacatgat

SEQ ID NO: 38958 - DNA, 830 bp, Glycine max
ttaattttagtgccgaacaacggacgacaatgcctattctaaactgcctttctccacttggcggtgccaccaggtgaaccagaaaactctgtctcttggaagagtgggaatataaatcacggcccaactcttacaatagaaagcgactgggtcctgctccgaagaaaggattattacgtatgatcaccaccactaagatgccaacccaaccatctttttcacctaaagacactagagagccccatgttgtgaatagagatgggttcggccgtaggcacgtagctcgctagcaaaacaaagcaaaggttcgctttttactcataccactactgataaagctcgacctctccacgatcctttatatagctgtgaactgtgaacatgttgagggcccccacccatacatatgatatgaccctgttttgcgacgaagaaaacccatattattttcccaaggaaaagtttccctccttatctggggctgatctggggaccaaaatagaagacgtccccgttgaggactataaccttaaagaggggtaaccacctagagatggccacacgtgcgcctgcggtctatacaatgagccccgcccaagtcgtcttatggtatacctcgaacctaactgcactcgctaagatatcacacacatagcttgagtcacgtaaaccgtaatgcgaaattaaggtgctctcccccgagtaaaaaagagtttcacaggacaatcgtgggaacgggctataacggcatgcgcctcgccatcaacttctaccgtggcgtccaatcccgcggcggatcctacaacctcccccgataacagaggacatct

SEQ ID NO: 38959 - DNA, 948 bp, Glycine max
  unsure (1)..(948): unsure at all n locations
tgcacatgaattgatgccatcgataccccgacncataantnaantgcccggcggcatgcaagctctgaggatcntggggaacgcagcacattttgtattatgtggcggacggtcaaaggggcacaaatgttatccacatgcacaaatgctcgcataaacctcacccttcctgttgcccaccttcaactgacctacgtactcccacgtagccaatattcttgtttatatcaacaccaggtccccatcaatcctctcaagctgacacaacattcaagcatgacagtcattactcagcgcatagcttttacaacctagccaaagcagagcagatgcagaaaactctgcctagacaccaacctaaaatcacatctttttccactcaaagactccataacaattgcgtcgatccaaatcgttaaccgttggatcaacttcaaaagtttactggaaggctctattacaaagcctacatttagaccgttggagctactcgcatacattagaacactatctgtactggtctttccacaacagcaaagcctagtttgttctgcctttgtccaaaacctgctgacaactacacagctaaattctgtcaaagatgcaatgttagtaaccacactgtccgatatcaaatctgtgccaatacaaaatctgctagggcccagattatggttaacttatgtctaatctgctgtgcaattgcaaacataggctcacgaaaagctggtggtggcgtacacctcaagtcaactcggtgttatatgttagacaatcgaatattatatcgggggaatcacatgcatcttcattctccacatatgtcatctgtgacgtcataaatgcggataaccggagttaatagtacatatacgccantgttaatgcgaacgcgatatcatcaatgtgtacctacaactggctctggcacatctcgcgtactcgacg

SEQ ID NO: 38960 - DNA, 466 bp, Glycine max
  unsure (1)..(466): unsure at all n locations
gctttgatggtgccacttattcttacaaaatagattgagaaaaaaaaggtagaaattagtgatactatgacatctattgaagagcangtgggtgaattggggaggcctatttacttggtcaagacaccacgcagttctgaacagaagatgataggaagcttaagttttcctctcccccctgaaaatctgaaggaagagattcctaggcttcctccggttaaactcaagtcagatgacaagcccttggttgttaattgggaggagaagtttgagcgagatggaccaacctcaaaactccctggtgctgatagcactttgcttgttggttcatatctggatgtacctattggacaggaaattaacccttcaggttagcttatatttacaacgattcaattttttcatatgatcacaaatgttttttgcctttcaattagtgggttcccttttgggcttaatagcagct

SEQ ID NO: 38961 - DNA, 607 bp, Glycine max
  unsure (1)..(607): unsure at all n locations
atccttaagtcacctgcggcatgcaagcttcataaccattaccacaccaccctactacatttctacctttagtcttggtcttagagatggcttgtgaaaccaagtcatggttggttatgtttcttgttttcttggttgctaattgcatgcaacattgtgtccacggggtgtctcaagtgccttgcctttttatctttggggactctatgtctgatagtggaaacaacaatgaacttccaaccacttcaaaatctaatttcagaccatatgggatcgactttccattaggaccaactgggagatataccaatggccgaacagaaattgacataatcagtaacatttctttacactaattaagatcctcttgtttttccttaaagtatatatttagcattcagtacagcaattaaagattntaaattcaaacctcattatgaattgttttgagttgtgatggactaccttctgttaattaactcancaattttttagtagtggtgaaagaatannaactatatttatntatagagccaagtgtcctttctcttgctctatacatttttgtcaagctcacactagagttctacaatngcagctcaatttc

SEQ ID NO: 38962 - DNA, 555 bp, Glycine max
ttttgaatcatgaatcataatttatcgaattctaagataaaaaaacatcaaaaatagcttttaatatatatataaatgataatgatgtgaatactcaatgtataatttaaactaaaaaatcgccgtaagtctcacaaaacgaaatcacaactcatactctacttgatatgtgaaacctttaatttaaagataaaagaaaagcaacggacaaccaaatatagtgcataaagagagagtgacagtgtgaaacccaatttagaaaataaaatagatatctgaatatcaagtgtgtgtgtaaaagatgaccttcattccttttattaacagcttagctataaaacatttcatttctttataagtagtaaattaaagaaaaaaaaataaaatcatgaatgttgactgtgcgtctatcgtgatcaaacatgccatcatcatgattcaattctagtatctggatcatcacatcatgatgacagtcaatattgtgattcaatctgaatgaagatccagtatatgttcttgtgactaaacaatttctactaaaaccaaactctg

SEQ ID NO: 38963 - DNA, 502 bp, Glycine max
  unsure (1)..(502): unsure at all n locations
agctttgcattaaaaactattgattggagtgtatattcttatatatgaggaacaatctgggctgacactttttgtttaacagtgacttgttgcataaaatatgtgaaggaccaaatgggcatcaatttaatcgttttaatcttgctgcgtcaaatgcttggatatttgtgtcatgtaactcagttagctatagattctttaactctgccaccaaatcaaaactgataatataaggtggcacttggtatgtccattttctattttcattttaagtgaaaatagaaaatggaaaataggtgtgaaaatatgtttgtttgactttttgaaatattttcaaaatgaggctaaaaactgaaaaggataatttatcgtttctggtgttttgaaagaaaaagaaaacaagtgagaacgcgttggcagtgtacgtaattataatccgtgtttctttctttcttttccgngataaggtcgaaactctctctgtctcttctctttcgctctc

SEQ ID NO: 38964 - DNA, 1054 bp, Glycine max
  unsure (1)..(1054): unsure at all n locations
tgcaatggattgatgcattgcagacatgcaaaancgaaaantaagtaacctcccgtctctaacggggtgctagtgagacatttatctttttttatctcgcggggccacttcactgggccaccttgtgcatatctctggacacacgtgcacgtgtccgaacgtgaatgcgatagagatcgatgccaacttcggaacacaaacacgcgggacacggtcgttcatctgtaaagatagataagtgatgctgtaaagatacgtatctcgttcgcgatcatgtatagaatgctgaagggataacacaatgttctgcgtgacttctcgtgcggttatgttacactaagcacgcatacgggacctattggttgggatgattgatgatgtgaagatgatgtgatgctagtactgactcaccacctgtcagacttccctgggagcctatcgtaccttatgttcggtggtgacctatctgagacatcacttatttaggtaagctaattctacctccttaggtcatcctagtatgctacgacaatgtctcttcttctactatgtaccatcaaaggctctacagctttggaggtgaatggattcttttttttggacgtaatataacactatactattgtgattattcgatcggttactaantataagnttttcgtaaatcggtaaccttatctacactctttattttacagacgtgagtcaacaagattctatactacgaaccatatacctcgtgctgttcggaggaagctgataatttaccgcacgtctcgtactagttaacgtcatttgtattagatgtaaacatactcctaacatactcatcgctttatttgtggtgcatgtatctgaaagatagccgattgtctggtaacagctactggtatactcatcgaacggggcttccgtggaaaatctgacgctctagtatactctgttctcgtngtcatctgtcacctcattctgcaatagtgtttcggggcntgacgtcgttgatctattatcttacctcattatgactaactttctgccagtgtcactgtctctn

SEQ ID NO: 38965 - DNA, 525 bp, Glycine max
  unsure (1)..(525): unsure at all n locations
agctttccagcctggacaaacgttgttcgctttgtatcccctaaattctctagggtgagcgtgctcttcatccctgcaattaaagttaggtgttccataagaggtccctgtatttgataattctaccctttctgatagttaaagtgcacattgaagagagatgntttcattttcttcagggtgggcgcatgttatgcacgcacgtcgcttttagacatgtgtcactcggtgagagggcacgtcttaaagatgtgttactagtttagtggggatcntttcatggcgcgggtttttagggttttggttcaactcccactagttactaaatgattgcatccatatttaaatggtggtgtatgctacgttatggtcactgtcacacttgagttctccctcattaccctctgtattattttctacaactagttgtcgtgtaagttgcacctaagagtgtcgaatttgcctttgcatgtcttatttctacgatcgaatcaaggacactcctcttttcacatgtttttgttt

SEQ ID NO: 38966 - DNA, 503 bp, Glycine max
  unsure (1)..(503): unsure at all n locations
agcttatggaagagaaaaggaagcggtaggaacaactatcatagttcactgaaaatccatcattaagcatcgaccccttatccccttgtgtcaagacaaaagaagtggaagatgacccgtacaaaccattatgggcaaatgacctctgtggcagcaaaggaagtagcagacaaaattgtgagttactttaatgtttggttacaatgtttgtgaaatacttgtgttttcccaatagccactgttatgtaattaatgaaataaactgtcgttgcatgcaggattctttagagcaacaggctacacaaggaagctttgttccacatggtcgtgaagacattctaaacacacctattggtagacctgagcatctaggacatgttcgtgttgcaaggacaggtgttacaattagccaatacttaagacaaacatcacgtgggtcgagcacttcgtctccatcaatcacccaagcacaattggttgacatcatcngtgggctaaaggat

SEQ ID NO: 38967 - DNA, 550 bp, Glycine max
gtttttgttgtgttactattccacatgttaaaccttttcaaaacatctaaaatatacttcttttggtgcatgaaaattccctgttcactgtatgcaaactccaatcctagaaagtatgataatgttcccaggtctatcatttcaaattccttcttcaaattctgttttagtgagtcaatcccaattgagctactcctagtaagtgatagatcatccacatatagacaagtgatagatcaatcccaattgagctactcctagaaagtatgataatgttcccgctccttcagcttgcataactctattgtctgcaaaccttacattactcttctgcattgcatcaaaattgacaagccaatccctatgtccagtcatatggtttgagcatccagaatctatgtaccaagtttcattattatgagattctgaatcggtaatcatcatcagcatcaagggttgttcttcaaagtctgcttcattctcttctttggccatatgtgcttgataatcattgtgtgattgattccccctgtgatctatgctacttggc

SEQ ID NO: 38968 - DNA, 540 bp, Glycine max
tttcgtgaaattgaaatggtcataacacttcactctgatgtccgattcaggcgcctcatatatcgagacgctcgaaattcaacaacggaagctctcgagaaattaaaattggcataactttccacttggatgtccgattcaagcacatcacatatggagacgctcgaaattgaagcacggaagctcttgagaaattgaaattgtcataacttttcactcggatgtccgattcaggcacatcatttattgagatgctcgaaattgaacaacggaagctctcgagaaattcaaatggtcataagttatcacacggaggtccgattcaggaacatcacatattgagacgctcgaaattgaacaacggaagctctcgagaaattcaaatggtcataagttatcacacggaggtccgattcaggaacatcacatatcgagacgctcgaaattgaacaacggaagctctcgagaaattgaaatggtcataacccttcacacggatgtccgattcaggcgcatatatatcgagacgctcgaaattga

SEQ ID NO: 38969 - DNA, 399 bp, Glycine max
tgcaagcatgcgagcttgccgcccagctcgcctaggcgagcaaggttgcttcctttttaaacaacacccttctggaggaagggtctggaatgcccaagtgggccagattgctatttgcacccccctttttactaatagcaccccccttctatttttttggtaattctgtttccgtagtgttacgaaactttacgaactttgtaacgatgcttattttcctttcgccagggtacgaatccttacggaatatgtatttactctcttttaacgttcgaagagagtcggaaactcacagattgcgcagaaacacctcttttcgacttccgccacattacgaaacttcacggatcgcgcaagcctgcttgcttttgatttccgagacagctcgggacttcattt

SEQ ID NO: 38970 - DNA, 252 bp, Glycine max
ctgcggcatgcaagcttctgatccaacacaatggattttattgtccatatatatgaccgcagcatcaaaaccaaaacggttagtctctcaaacatttacacttccttaacttttgtctattggttatatacccgatattcacattctattccaaagctgatgactatgccaaaaaatatatttttatgaatgaagatatctagcccttttttatttaggatatttccttattggggtcatcttataaacaaa

SEQ ID NO: 38971 - DNA, 382 bp, Glycine max
cttgttcattttgtacacttttaatacttttgcggtgaaccctttgaaggaagactcatgtttgttattaattcattaaaagatgaagatatcatatctcttttcaataacatccttatttttatgtcatccttaaacatcgtacatatatttattagaaataatagacaaatataatttaatagagatcaaattaagaatgttaaaatacttcacgaagactattactatctatctttacgtacctgattaggaattaaaacgtaaaaaccatttataacaaacgggttgaaattactgtacttctataataatctctaatgcattctttatatgactttcaatggttcttttacacatacgcgattaattatgttcctaa

SEQ ID NO: 38972 - DNA, 499 bp, Glycine max
agcttgatgaatctggaatgacacatgcctatcctgttatattatgggtcagccctgtgccctgagacaccatgatatgctgactcactgcgacacaacatacgacccggatacttgattcctacaaggatcatggcctaatgaataatgtgaattgattaccttgcttttaactcagcgaccgcgatatagccctttacctcttcccttcctggagcatatgcgagacaggctacccgaaccagctttctattgctatctagatggatactccgggtataatcaaattcttgttaagataggggatcaagagaaaaaacacttcacttgcctctttggactttgcaatgcaccagccacattccaaaggtgcatgaatgccatcctttttgacctggtagaaaaatgcatagaggtgtttatgcatgatttctctgtattaagagattcattcatgccatgtctcatcagctttgtaagtcctagaaagatgcattga

SEQ ID NO: 38973 - DNA, 924 bp, Glycine max
  unsure (1)..(924): unsure at all n locations
aagagggaaacacagaccaccgtgccgacacgcttatccaagagcgacacaaccgcagantggacnncacgnncccacacaagaaagttgatgcatgcatgacaaaccggaacnnnaaangaaccgccgcaagccaccncaaaaagggcacgagaggccattagcttatattaanaaccagctggggggagccgcaattaacaaaaatggggccaaaatacccggaattcccaaagccaattgtggccaatacggaaaaaaacctcaacaattccttttggcaagagatgggtaaaactcaaagaaccaccctaactataaagtcatcctaccatcctcaaagtgatggccaaacggagaaccctaaaaagactcttgaaaagcacctaaggcgctttggggatgataaacccaaggtgtggaaccccatgccagcttgggcacaaaattggtacaactcttcttaacatcacaatacggggaagaatccaattaaagctgatttggcagaaaaccgcccgaagtgggccttaacaagcccatctaaagacccggatctctccaggaaactcttgggaaaaaaaaacaactctnaataaaacctaaagggaacttgctagagcacaaaatacaggaaaagcagccgacaaaagaaacaaactctcagtggacgaggaaaaatggcttggggaaacacaaccaaataggcacaccctatgccctagaagaatcacaaaagagaagggtcctttgacccttgaagggggacagcgaacagagcaaaacagaaaactgggcgcccaacacgaattaccattcaaactaaagttaaggaacatccacagacctccaggccctaaacaaaattgcccaaatcaccgacagttggacccaaataaaagagggtgaaccacgggaaaaacc

SEQ ID NO: 38974 - DNA, 525 bp, Glycine max
  unsure (1)..(525): unsure at all n locations
agcttatgcgcatatttctctacgaacgttcacttgttcaagacatcctattaaccgaaaaaatgcacccatatacaatcaaggcagccttgttacctagattatttacacgtacttccaaggtgtatttgttacttacatcacacacatctccttggctaaattcacatacatgcatactccaagcattttggggtaccaaaaattgcacatgtgcacatcttggtatttctaatacctatacatacacaaacttcatgatgaatcttgactatctacacaataaggtgctacatttcatgccctgtttcaagtttttgctacctaaagccgcatgcaaattcaagcatattttcctttgctgactaanattgtattcaaattatatatatattttttggaatatgtttttttcatacaacattcaacatatttatatatattttttttttntgtgagacattttgactatccaaaattatatatacatacattccagtatttcgctattcatacccaaagtgc

SEQ ID NO: 38975 - DNA, 400 bp, Glycine max
  unsure (1)..(400): unsure at all n locations
agcttccactgtagtccctatatcattcgtatgatttatgcatcttgnagaatgaagcctaaagtctcgagattaggcatagacaaattgcttcttgaaaacctaggaccatgcccattaaggggataaggggacataacaatcaacatgcaaaggagaaattgtatacatgacaaacctgtactccaaatgtcggacactattagttgtcttctacaaaagccaagttcaattaggatgtaccaaaaaataaagacctaaattaaacaaaagtaaaacaacaacaacaaagaaagaaaacaccgacaatatggtagggaaccacaaaaataaagttggcatttaaagtaaccaaagaaatgaagagaaaacaaattttgccatcatctgctccatcata

SEQ ID NO: 38976 - DNA, 524 bp, Glycine max
  unsure (1)..(524): unsure at all n locations
agctttaggctcaatggccccacatagagaatggcctaggtgtagccatgacgttcaaaggtatggtggagcattaacattatcagtgaaggcctgacacttatggcatttcctcacatggatgcaacaattgctctccatagtgagctagtaatacccagttctcagaattttctaggccatggcatgtccattggtatgcgttccaaaggatcctttatgcacctctactagaatttgctcagcccctttagcatccatacaccgaagtagtaccatgtcatggttattcttgtataggatattcccactcangaagaagtcggtcgccaaccttcacaacattcttttatcgttgtcagaggcctcccgtgggcattccttgtcttcgatgtatcgnttgatattgaagtaccaaggcttaccatctttctcttcttctattaagcaacaatgtgcaagctcatcacgacatctgaattcaatgtacgacaaatctccatgcgggcttancaggaacatgg

SEQ ID NO: 38977 - DNA, 998 bp, Glycine max
  unsure (1)..(998): unsure at all n locations
catcagtagatacgcacattagcacaccacacaccacggccacaagactacgtaaacgtgagaaggaanaggacaggaaaaccaacaccaacagcaccaacggactggatgcatcgcgtcnccagcaccnctacaganaccagcangcatagcaagaccagagaatgatacacgcgatatgagcgagaaacccatttctaattacacaataagtcggatgcggcccggaaggcgaaccctggacatgacactaaagggcggagagctacaccgccgcgccaagccacgagctaatacgaccacacggaacgcggggtgcagggggcacgaccgacaataaaggacgcacaggacgcaccgtgagggatcagcgcgcaggacgcaacgaacgaacgctagggacggaccgaggggcgaaaggaaacgcaagatcgacggataggacggaacggccgacggaacaaccgaagacgaggaaggaggcgagcacgcgaggtcgcgaccgcgacacggacgggcggacgaagaccagagcgagaggacagacagcagcaagagaggaggcgcgaagcgacgaaggaaggaccgagcacggaccgaggatcgaggggatgaaggaagccaccacccaaagaaggaagcaacgatcgttaaaacgccacgaaggaaggacagaccgacgacggcaatagaacacgcgaggccgcacggtgcgagcgaagaacgcgaaggaagcgaggtacgacgcctaggaagaaggagttggcacagcaccactcaaacgggacgaacgtagagaacagaggccgaaacgccatgcgacggtacgaccccaacggaaccaaggacagccaacgcagcaacgcacgcgaccacgaacgacggagcgcacagaccgcgcaggcaacacaacggcaagcgactgcagcgaaaagcatagcaccgctacgacgcaccgcggacatgtaccggcaacccaaagcaacggcaacgcggcc

SEQ ID NO: 38978 - DNA, 588 bp, Glycine max
  unsure (1)..(588): unsure at all n locations
agcttgtccttggtttaaacatgattgatgcatgatttatgacttgtatgattcaatttgggcaaaattggatgaaggtaagagtgattttcgaattctgcactttatgcagaattttgctgtgaaatgtgcagcagaattttgtatatgtgcagaaaaatgcttgtgtatggctggctgtggaaagggtagtacacatggggttntggacatttgataacaaatcccaacggtcaagatgtagacttttgtgctagagacttccagtaaaattttcgagtcgatccaacggtgaacgaattggaacgaagagaatgttactggggtatttgtatgtgaaaagctgtgattttggtttgtgttttgggcagagttttctgcctttgccctgttttgcttggttttgtgagttcatgacaattggatgtggaactacttggatgttgtggaagcttgggaggattgatggggacccggcgttgagaggaacgatgataagagctacgtgggagtacgtgagctcagttggatgtgggcgaacaggggatggtggatttatacgtgatttgtggattgtgagaacttgtt

SEQ ID NO: 38979 - DNA, 371 bp, Glycine max
tagctttgagcaaattcaaatgacaataacttttgattctgatgtccgatagagtcccgtattatatcgagatgctcctaattgaaaatagaagctccgagccaattcaaacaacaataactgttgactcggatgtccgattgtgtcccgcaatatatcgagacgctcgaaattgaacactgaagcactgagaaaaatccaacgactatacatatttactcggatgtgcgataagggcccataaaacatcgaaacactcgtaattgaaaacagaagctctgagcgaattcgaacgacaataacctattgaactcgggtgtcgcaagtgagtccccgaataaatatctagacgcctagagattgaaatacag

SEQ ID NO: 38980 - DNA, 515 bp, Glycine max
  unsure (1)..(515): unsure at all n locations
agcttgtgttgttgtgtgctgtaaaagatgttccnctaatctaacatcctggaccaccacgtgttatctcacagactttgactgcagttatggtcaaactaatccatggctctctgcttctgggtacagattacagattacacctgtttctgttccttccattaattgctgaagggttatttctactcactaatttcctttgattaagttttataaatttgaattttaacaattaaatttaatgtatttcgaaatgagtacattttaataacaataagaataatgatatattagtaataaaatttcttaacttaatattatttattttcaaatatatatatatatatatatatatatatatatatatatatatatatatatatataaaataaaatatgtcttagctttaatattaccttttaaattatataatttacttatatatggtataatataaaaatgttatgagatagttaattatccctttcatagattataaactctatcaaataact

SEQ ID NO: 38981 - DNA, 335 bp, Glycine max
  unsure (1)..(335): unsure at all n locations
tttgcgcttagcgngacaaggcacgcttagcgcacaacataactcaaaaatttctaagagtctgagaacacattactcgcttagtgcacagacgcgcttagcgagatcacaagcaattgaactttcaatcagagaagaagaacccacttaatgggacagaaccgcgcttagcgagttcatttggaaaaccaaacgatcacagaaatgatgaactcacttaacgcgctcatcacaaattccataaaaagtagggacttctcacccctccacttatgcccctatcaagccatgtaaccctaatcaaaacgagcacatcgtatccataataaaaccgt

SEQ ID NO: 38982 - DNA, 991 bp, Glycine max
  unsure (1)..(991): unsure at all n locations
taaacgcaaagcttacttcaccgacatcaagtatacatacactccantacagtcttatacacatacatcaaacacattctacaaatagtctgggatgatgcattcgttaacactcgagaancactaatgtgtacctgcagccttccaacatgcctacccaaggatgcgtactatatctttctctctttctggggtgcgccataccctgaatcgccatgatctctctcaaggtccacctgtaccacatttcttccaactacataccctagtaaaactatattatctacaccgcaggtacacttctctgtatatgttgagagggtgtcattccataagactagaaaatcttgcctcatgatccgcctagaatcctacacgactcctactatgcacgtaaactaatgaaacaatatacgtactacacatcgtcctatgaaactccattagacatgcgtactaatgccttatataggtgcttgatgcattaatgaacccaaaaagcatcacatgcgattcagtccaaaccaacaccagatcttgcaatcagatctcaccatcttaacgcctcatactactcatctgttgataacaacgttaacaatcaattgttgtacagatatcggctcaatgaaactcagctagcaagtcacgaatgttggcacgggaaccaataccactagtgaaggatcgaatcgcatggacgatagggacctgcgccaaatctctttctttaggcacctaaaccaacgaccgtgaaagaactatcgctttataacctaccatgtcatcatacattaactaacgaaatatccgctagcgtaccgaggtaagccatggtatgatctgtagagattgacaagaatctaaatcgtcggttctataccattataaaggcaaccgacgggattattcggaatctcagcgaacactaaaggctgttacgttactgaaaggaacgtatatataaggaatcggtaggaaacggcagtcg

SEQ ID NO: 38983 - DNA, 931 bp, Glycine max
  unsure (1)..(931): unsure at all n locations
tgggaacgaccgagataaaacgatccggacacgcggcgaaagaggacgcgggggcatcatntcccacacaccacagacaccgcgattgtgcatcatgacacccggaacaataagtgaccggagctgcaaccaaggtacctgtcgcgacaaaaatattctatattcccattnataggaagaaagacccgactgtccaataatgaaagagatcacgcacgcgaacgcaaccattgagaatcacttgacgacatcgcatggcacgaaagaaccatcagccttcacgatgctatataaaaaatactgcctaagaaaaacacaataacaatcctaccacaagaaacctatatcatcatgactatataaagaatagaaagaaaaaaacgcaataatgtgacactaaaagaaaaaacattagcaatgatagacatctcaaaataagtaaacaatgtaaatgaccaccatactaaagttgagctaaaacaggatcgtcagatctgatctcacataaaaatgtgaacaaacaaaaattcaatcttagatgtcagagaaccaccaaccaggacgaaaaaaggaaccgcacatattgcgaacccaaagcagagacgatggaacgaggtatcctactaaaaccagatcgtcttgagcagtcaacatcacaaagctcaccaacaaaataaactcagcgaagaaacaaagaaacaagacaacctaaaaccggaatcaaagcccgtccggtcggnaccaagcccaaacctaacgaaccgccacgcagacacactgccaacgagctaaaaaagagaacacagcccttcgcgacgcaaggagatgcagtatcacacaaaacccaggaaaccggggggagaacagaaacgcacggcacgcaaggagagcgagaaagggcacgcaacacacgtagcaaacgcccccaacg

SEQ ID NO: 38984 - DNA, 363 bp, Glycine max
agcttcaacattcaatttcgagcatctcgatttatttctggactcagtcagacatccgagtaaaaagttattgtcgtttgaattagctcagagcttcaaaattcaatttcgatcgtcttgatatattacgggactcaatcagacatctgagtaaaaagttattgtcgtttgaatttgctgagagcttcaacattccatttcgatcgtcttaatatattacggatctcaatcagacatccgagtaaaaagttattgtcgtttgaattagctcagaggttcagaattcaatttcgagcggctcgatagattacgggactcaattagacatccgagaaaaaattattggggtttgaaatatctcac

SEQ ID NO: 38985 - DNA, 1002 bp, Glycine max
  unsure (1)..(1002): unsure at all n locations
aacgaatgacgaaagcaccccaacagcacgaagcactcgacagaatgaaagaacccaacacacacaaagaaggatgagcctgaaacgtgagacccggaacttagatgacgctgcagcagctgaaaagaaggttttgataaacaaccatgcgccaggttgaggaggaggtggaagatatatgctgaaattgcccatggaaaaacgctacaaagaaaagcacagcaaccgatgcgcggcaagcgataaaggggcgacatgagtggaaaaagaaggacgcgtgaagagacggaaggacaagactcgcattcagaggccaacggaggagaaagagagctaattcaagcccgaaatggcgaataagaacgatgaccaaactgtgactgtgctataaaaaaaaacaaatgaccgctggggacaaccgagccatttccagggcaaaagagggcgtggacgagtcgaaatttgatgccggaacatttcacgcggccaccccggtctgaacaatgcatagaccgatgctacgggacgcgggggatgcagagaaatatgcctcaacaatccacacctacctaaagtgaaacggtgcacaaacctcaggaaaccccaagaagggacgagcggggttcgcgacacgcacgaaacatagagcgggcgggtagcgacagccccacgctcggatataacccgaaaggatacaagagatacgcacttggccggaatcggtatgggcgacaaaccgacgaggaggaacgggatactccgacacgcggacggaggaagaatccgcgaggacaaacacgaccagnacgatatgggctcgcgccgatgacttaccagcgcataagaagacgacaaaagcaaatgaacgaacgcgagcggcacataccaagcaagcacacggctgatacagccgacaacggtcggcgagaatacaacaaacactactacggcgcacacataggataaaaacggcgagggagagtgatcggaacaggtccaccg

SEQ ID NO: 38986 - DNA, 979 bp, Glycine max
caggaggaacggaaagcacaccacgcaacgcacgcgacgaagcgagcgacccaaacacccacacagagaagggatgtgcgtgaatcggcggcacagaacgcaagggcccgagacacacccggagaagaaacgatgtgccaccacgacacccaacccgggcggaagcgacaatagcccacaagcgccgccaaggaacggacaagcgaagaaccgaaacccagcgaaggcagagcaaaagcaacgagaaaccgcgaagaaacaacccaagggccgaccccagggcgggacacgggaaaggagggaacaggcaaaaaaagaaagaggcaagaggccgaccgcacgacaagacactgcaccgcatacagacaaacaaggacagacaccggacgaaaaacccacgaagccacgcagaaagagacaaaagggcgcacgcgagaccaaagggggcaaacaacaaaggaagcgacccaccagaaaacggcggggaaggcgagagcacacaaaggccagcaggacgcacaagggccgaggcccgaaaaaacacagaccgctggacaagcagggccagggcaacatggacacaacccgagagcagggcacagcacagccagagacccacaaaagcagaacacacgccggcgaaccacaccagaggcaaaggagacgacgaccacgcggcgcaaggaaaccggggggctcaacacgaacgaagaggggaacccacagaaacaaacggaggaaacgggacccccacagcagagccagcaagcacagaagcaaaaccggaatgagacgcccagagaggaagggaggaggcggcggcagcggagcgagcaccaagcggaacgaaacgtccgacgaccagcggacgaaacagcccgcgacggtcgcggcgcgcgaagccaccaccggagatcacagaacgccacgacgaggcaacaccggacgcaacgacgaaggacgagaaccgacggccgct

SEQ ID NO: 38987 - DNA, 232 bp, Glycine max
aaacttcctttgagaagcttctttgagaaaacttcctagagaagctagagcttagctacacacacccttctcataactaggctcacctccttgagaagcttccttaagaatattccaaaagaagctagagcttagctacacatacctctctaatagctaagcttacctccttgagatgagaagctagagcttagctacacaccccctataatagctaagctcaccccatgac

SEQ ID NO: 38988 - DNA, 562 bp, Glycine max
  unsure (1)..(562): unsure at all n locations
tttggttcaaggataaaagggatgccccacattatttccatgacacaaatgcaaaaatgatgatttggaaattttatgcaaaactggtcatgcatgcacctatgtggacgctcaagtgtcaaatttttatggtcatgtgatgctagggctcangattcatttcctctattttaaatcaacccaatgtttccaaaatatgttcttttatcaatttgtgcattcctccaagtccctttcgggcgtctggggaaattttcacagcattcacccttcaggtgtagacacatttttctcttcaaaaatcggttatgatcaatgaattttttttcaaagaaaagttggaaatcatctcttttcanaagcatgtcgatttttagctagacaacttattttctctttntccacctttttccttacttgctttctttttttcttatttgctctctttttctttacttgctctcttntttccccttttggtctcttttccattttcattttttttcttttctatttttatttttatcatgaattttggttattttacatatatacttttgga

SEQ ID NO: 38989 - DNA, 449 bp, Glycine max
gctctgcttctgaaagagattcgattttctcaacttgaatcagtttatcatcattcttgatcctgccaaaggcaaacaatttacatctattgtccctcaaaacattaataaggttattaactgaatatggtaaatttaataaaagaaatactgtagtttaaaaaacacataaaccttcaagtgtggtgtgcagtgcaaaatataagaaatttatgaaattgcaaaaatccttatctaaacaaccagatacaaagaaaattttcaccataaagcataaaatgaaaattaccagagaagaaccaatgagccatgcatatataaaaaaaaaacagagttttgacagaaagggaaaatgaataaatgaatcttactcctgtaatcttttgcggagcatgtaacgcaaatatgcatcagttccatatgggctgatgcccatatatttacacata

SEQ ID NO: 38990 - DNA, 192 bp, Glycine max
ttacattgatggttattggaagttgttttattccatttttggtttaaaagaaacggcccactggtaaaactaacttttccaatgtttgcctttccaagaaatggcccccatgaaacttgccttaaaaaaggccaagaaagacaaagccgcccaaagaactaattccccttccgaatatgacagtcacccctt

SEQ ID NO: 38991 - DNA, 537 bp, Glycine max
  unsure (1)..(537): unsure at all n locations
agcttggccattgatcctacagagatctcactaatttttgttggtgtgtataattgggattgaagctcccacacagaagttcaacatcatgcaatcctcaaaggaagattatgatgttaacaacctttcccaatatagaaactagaaagaaagaaagaaatgaaaacaatcttcactaggcaaacattaaaaactattaaatggatgtccaactcaaaaaactatggcagcaaaggaatgtaaggcatctagagatgaacacaagttgtctggtcgagtagaacctaatgaactccaatactaaggctaaaacttccccaagtaccttaccacaattaatgccaaaaaggtggtagacaattactgaacctataacgacatacataaatntactcataaaccataagggaaggcctcaattattgacaaaaaattacaagaaaagtatntcctctgcccgtggaaaatacatcgacacgaacctataaattaactgcnactatttgtactagatctacgacagactattatttattt

SEQ ID NO: 38992 - DNA, 551 bp, Glycine max
  unsure (1)..(551): unsure at all n locations
agcttctccgaagggcatgattatntccagtttccttaaaatttctaaaaatctcgccagatgatgatctttttctttcttggaaggtaccacaggatatggtacttccacaactttttcactcctactcttctttgcattcttattatttttttcttctttttcatttttttcattttctttctttttctacttctttttctttttcttggtccttcaattctttattcttgaccattatttgttcctctttttcttgattactttcacctctcaccttatttttcttgtcatcagtaccttttttgtcagcagttttctttttatgcacaacactatcctcatcctcagcctccacaaacctcttactccttgtcatcacaactttgcattcttccttgngattatgttctgtatttgccacaaaactgttggatgacttgttagctatctgcttggccagttgtcccaccttgacctcaangttcttcagtgctgactcagtgattttatgatttgacattgttacctgcataaactgagtcatggtc

SEQ ID NO: 38993 - DNA, 547 bp, Glycine max
  unsure (1)..(547): unsure at all n locations
agcttcactctagaaagttcttcctcatttttagcatgtcattctttctgtctgttgcttcttccaacaagtcatcaactctctgccgcatctcagatatgatactatttgcaagcctttaactctatctgtaagatatttttttgcaatacatccacttgggattggcttcttgcaatctcctgcttccatgtctcatgcgattgactcaagtggggcttcacatatgacatgtcacatagttcatcttttgccatgccctgtccaatgtgtcatagaaattaagcacacaatatatatgaaggacatgtattgtcatataattaagctaataagggtaatatgtcgtcatataagaatccttggcaaaactccatcaaatagtagttaggaagatatcaggttagcttaaagtgggccttacactaattacataactaanaggatacaagacaatatatattaaagcagaataaaatcaaagtaaaaaataaaagtaaattcagntgtactgtaaccatatatatatatatatatatatatatat

SEQ ID NO: 38994 - DNA, 528 bp, Glycine max
  unsure (1)..(528): unsure at all n locations
agctntggggctgagaacctatataacagctttattgttttagttttaagagttttttgtttggagaggagaataattttaggttttgcacttccaatttttactgttcatgcgcactattcacgtagtaataaaattcgttttctgcttcaatatgcaatttcattttctgcttcaatctgcaatttcattttctactgattaatggaaggctaagtctctagcgttgttttctcttgaggatcaagcacatctctctttgaggtcttgttattactattgaattctgatcagtttttcctcttcaccaattattctgtatttgttgctattaatccatgcatgcttagtgcttgattaattatctctgtgcttaatttgcattcatgcttaatgatctgtttcgttcatgattaattggtgtatgtgttgcttaatcacataatgacaaccttatgataatattctcttagtaatntaatttaagattggattaagtggttgaactgaatanggaataaatctcgt

SEQ ID NO: 38995 - DNA, 519 bp, Glycine max
  unsure (1)..(519): unsure at all n locations
agcttcttagtttcagatgatgcagatgggtttgtatctacctcatgcactcctctaatgactatggcatcatttctggcgctaaactgctgggagttggaggccatcttctcaattaaatttctggcttcagcatgggtcatgaatccaatggctccaccactggcagcatctatcatacttctctccatattattgagtccttcataaaaatattggagaagaagctgttctgaaatctgatggtgggggcaactgacacatattttcttaaatctctcccagtactcatacaagctctctccactgagttgactaatacctgagatatccttcctgatggctgcggtcctggaagcatggaaaattcctcctaagaatactctcttaaggtcatcctagctcgtgatggaccttggagcaaagtattacagccagaccattgccactccctctaatgaatgaagaaaagccttcacaaatatgtgatcctnctggacatctggnggtttcatggtg

SEQ ID NO: 38996 - DNA, 503 bp, Glycine max
agctttgatgcaacatttggagaggtgaattttatttctagatgatgcgctccatgagaggttggatcaaatggagaatacagatcataatgaagaagaaaggaggagaagagggaatgatggtgttcctagacaaaaccgaattgatggtattaaactcaacattcctccatttaaaggaaagaatgatccggaggcctacttggagtgggagatgaaaatagagcatgtattctcatgcaacaactgaggaggacaaaaaggtgaagcttgccgccacggaattttccgactatgctcttgtgtggtggaacaagctacaaaaggagagagcaagaaatgaagagccaatggttgatacatggacggagatgaaaaagatcatgaggaagcggtatgtgccggctagttactcaagggacttgaaattcaagctccagaaactaacccaaggcaacaagggggttgaggagtatttcaaggaaatggatgtgctcatgatt

SEQ ID NO: 38997 - DNA, 400 bp, Glycine max
  unsure (1)..(400): unsure at all n locations
agcttccatttttgagtttttgcttcccttttcacgctttaattcactccccacaagtaagtgcaatttcccttggtcatttggctctccattgatgtgttttggtgctttaattgctcactttttgcaaaattcgtgaagcaatttgcatctgaatccatgcttgttttgtggagttgaggacttgaatgaggaggccttangcctatattgtattctgaagcaatggggcatggcacattgcccccattctcttgcaatttatgtccaaacatgcgcccatcaagtgctcggtgaaatgccccaatgatatatgaatatgattttgcaaaattgggatggtggggctgttttatgtatgtagagacagcatangaaagtcaaaatagatgcccaaatg

SEQ ID NO: 38998 - DNA, 417 bp, Glycine max
gctttaaattttaaattcaaaatttgcaaatttgtttcagaaatgaatttgaccactagtaatagattacgtcctctggtgatcgattaccagagagaaaataccatatatttgaaatcacaaaatgcttttgtaagatatcctttggccaaacttgtgcatcatcaattgaggaatgcattctaagttctagggactaagttcatcatttttcttgaatttctgagttcttgacttggattaaacttgagaagcgcttatctttggcatcatcaaaacttcatagcatatatgcttctacacttaggatgctccatgtatgggccaatgtggtgaggtccttccgtagaagattccacggagccccattggttatagaatgaattgttcgcccgatatggagagcttggcaatcta

SEQ ID NO: 38999 - DNA, 518 bp, Glycine max
  unsure (1)..(518): unsure at all n locations
gcttggtgggactntttgttctaacttacacagcatcactgttatgttattttccataattcttaagtgctcaatatttaaagttgtcgaaattaattctctgaaaaactggctaagttcaacaaatggcttccaaataagttttggtaatgagtcaaatgcaattggaagcaaccgttgcatgaaaacatgacaatcatgacttttcattccatgaatttttctcttgttaagatccacacaccgacctaaattggaggcatagccatctggtaactttagttctttgacccatttaagaacagcgagtctctgggatttggtcattgcataagctgcctttggtttaaagaacttgtcacgaccaacatctaccagctcaagctctttccaattacatatttctgctaagtccattcgagcattgtgtgtatccttgctttttccattgatgtccatcacaatgttaaagacattcataaacacatttatttctgtgtgcatgacatcaatgttat

SEQ ID NO: 39000 - DNA, 592 bp, Glycine max
gcttctaaagagaaacgttgttgctatatatgaaataaatttgttaacaataacaatgatataataatatgatactgcaggtgagaatgagaaaaaaggggtgcaatgcaatgttgaaaggcacaatgctgaatgcctgcaactcttgcaggaaactcaacacgtctgaatttgaaaattaaactccttgtccttacgtgtgacgctttgtttggtcggtgcagatattaatggattattactcttttctaacccgcatctctccaaattatccaattttaaccattttttttatttaatcaaatccgaagtccaaatccaagaatttttcaccccaagatataaaaaaattactcaaatactaccgcctaaaaattattcacataaataatacaaacaattatttaaggtgagaaatcagatttctcaaaccattttttcactttaattttattttttgaatagaaaccgattttataacatattattatttatcgtgcatgataaatgacgtctgatataaatattgtatcatgtacagtaaacgatttccccatggttttttttcctaaaacaaccttactagatcttg

SEQ ID NO: 39001 - DNA, 475 bp, Glycine max
  unsure (1)..(475): unsure at all n locations
agctttgagggtgcgtagcctaccatcttttcatagtagagtaccgataatgtgtttaccatcacgattatcgtctccctttttgcacatgttctggagttgcatcctatccggaaccatatcagaatagtactgatactgcctaacgaaggcaaccattangtccttccaagtatggactcgggaaggttccaagttagtgtaccaggtagcagctaccccagtaagactttcttggaagaaatgtattagcaattcctcatctttgcgtatgcccttatcttccgacaatacatctttggatggttcttggggcaagtagtccccttgtacttgtcaaagtccagcaccttgaacttgggaggggtgatgatattgggtactatgaacaactcttctaggttagcaaaggcataatctttacctccttcaatggccctgagcctttcctctntcccatttctgccatagcatg

SEQ ID NO: 39002 - DNA, 175 bp, Glycine max
gagatcctgatggtattcctcacaaacaagaaaactttcattttgttatggaaaacgggaataagggtgaacatatacctattaccccgtcccgtctttattgcgctaaggataacgtgagacatttattgcggcagaaatagataaggccgggaaatcgtgcttttttgcttcg

SEQ ID NO: 39003 - DNA, 574 bp, Glycine max
  unsure (1)..(574): unsure at all n locations
agcttaacttccattggtgagatccaacgaggctgttctctcttgagcccacacctgcacaggttgaaccagagccagctgatccacaatctccagtggtgaatccaccttcttctcctgagcttgaagtagttcccccatctccaccttcttgtgaaaattggtgttatgaacattttggattgaatgcatgattgtgatggagtttgtgtttcttttcatgagtttaagcaagtatgttgttagacaaagaaagaacaagaatgtgaatttgcaattagaattgttagtcaatagacaggttgattgagaaagagaagcttgaaccataaccggtgagagtgcaatcttaaactgtgagtgaacgactagctttgagtaatagtctttgcatcaatctttgaaatctagaataaaatgtatgaatgaggacatgatgaaggccatgattgtatatacaagccaattgactaaaaagcttaccttgaatgataattgtatcctttgcaccctttgtgagctaaattacattttcaaaaatgaaccctanacttgaataaatatctctagatac

SEQ ID NO: 39004 - DNA, 529 bp, Glycine max
  unsure (1)..(529): unsure at all n locations
gcttccctttcttggtccatattttatttatttttttccctttaancnggtacgggtcaaatatattcaaaatggtcgctgtgagttcaatctttcttaatcgatagttgattagattagaaaaattagtagactccattgactacaacgagggctgttagctataagagcacaatgctgtatgatgatattttcattgtatgttgacaaattcagatatcttgaagttaaagcaaaatctgtttaactagctctctctatcttattcatcaattatctttcacttctagaaccaaatcaatactactttaatgcattacgtgataatccaatgtcaagtagtataaacaagtgagcttcagaattcatgagtcttttcttgattgcattttgacacatcccttgggaaaacttcattgctgctactgtcgacaaatttgtttgaggtccttttatttttgtctgtaggcaactactgaatttgaacttgtctggaaatttgcacccgaaatcggcaacttatctcatc

SEQ ID NO: 39005 - DNA, 852 bp, Glycine max
  unsure (1)..(852): unsure at all n locations
ggttgggaattggtcganagcggnaccnnaanaactgcggctgcagcttgaatttctgatagaggcgttgatgttctttaaccgtgcaaattcagagaactgcatgcccccaaaggtgagcgaataaattctttggagactcttgttaacggactgttcctcaccacgaattactgcacaatctttccatacaagaagccttccctaactgtttaatgacttagattagcaccttgcttggatgtcgtcatcaactcgttcaaatgacgatcactaaaaaatctagctctcaattcttccgagaagatagactgactgtctgaccatgctagcataaacattcttgataaagcataagctgcctgaaagctttcccaggcggatattcactcttgaaatcatgacctaagaatttgtgtacccaagcttgttgtacaagagatagaaagactgatccatcaacgtttaaacatattgaacagacctgatatgacttcgttgcctaactaaaaactcgctgaatagggaaagagcctcccgaaaaaaaacaacaacctgtatagactgattgttcagattatacgcgccagatatttgaaaagtcgcgtcggggtggacatctgcccacactggtcccacgatactgatgcttgtttcatataagggctccaaacactggttggtatactgaacctcggcaggcactcgcactgcaaagccgtcttgctcatattcctaggaactggctcatagaaacagaaggaatggcgaacatttggtctaggatcaatatcatctctataacatttacgcttgtagcgcctaactgtagagagttgtgcggccacgacg

SEQ ID NO: 39006 - DNA, 342 bp, Glycine max
tcacgcttgtttcttgcggataaatctccccacagtagaaaacgacgcaaagaataatgccttatgtcactgtatatcacgactgtgagcagcccccccgtattggttgaaaaaatattaatctctaaaacacttggcggaaaggcacgcataccggtacgaccccattagctattttgatttaaacacctgcagtggaggtttcacactgcaagatacccttcttctcgaggatatcaaggaaaaggtactttcatacatttcaagggaagctattatttcgaaacatccggaaacttctattgagccaccttagaagcgcccttatatgcgttggccacc

SEQ ID NO: 39007 - DNA, 307 bp, Glycine max
actgtctcacgctaactgctgtacgcgaactgacctgtttccccattggatacctgtatcagccgccttgaatcactatattgcctgaaccatgacatagcagaatcacaatatgctttaacagttttgctaacaattgctaacaaagagataatagccctcacaatactagtagttattactaacgtctagattattcttttggaagggcagagataacattcacactccaagctttactcataatgcttcatatgagcaagatggtgtgtgcttctcttgtgcctactgctgcatcttcttccta

SEQ ID NO: 39008 - DNA, 361 bp, Glycine max
ttctttgagattaacgccttactcaccgaattaaataaaacaccgaaccccccatctccattcgttcccgctgaaaccaacaaaaacccgatggtgggcccctctccctcccatggcaacaacctcaaattcctctgcagctacagcggcaaaatcctcccccgttttcccgacaggaagctccgatactttggcggccacacccgcgtactcgccctccctcgctccgcttccttatacggtaaaaccaccaccttgtcctcccttcttgttttcccttacattgacggcgtataacagtatttgctttggcatgcttcttttcataaaaaatcatgttcaacgtgcttcggaaatgcct

SEQ ID NO: 39009 - DNA, 569 bp, Glycine max
  unsure (1)..(569): unsure at all n locations
agcttctgaagaattgattggtgttgggctttggcttaaattggagaaactcttcatgacaaaatctatctgcaacaagttgcttctgaaaaaccttttgtttggcctctgaatgagggatggtagactactagaacatcttgatgagctaaactttgttatgatgaagctacgtgacattgatgtcaagatgaaggatgaatatttgacaattgttctgttagcctctcttcatccctcctatgagaattttgtgagttctcttagtgtatgcaaggactccatcacacttgaagaagtgaagtctagtctttattctagagagctntaactaaaggcatctaggaatggtgatgaagcctctatgtctggattatcgatgactaattctgctaaagtgtagaagaagaagaagaatangaaaggaaaaggtgggtagaagaagagcaaagctgatcctaaggacacctgcaattactccagagaaccaagtcaatggaagatagatgtccaaagaaacaaagaaattttttggtattgctttgtaaaatgactcttatggaaagtga

SEQ ID NO: 39010 - DNA, 447 bp, Glycine max
agcttggccccaaacttcttgattattgtttttctcacaacccaccttttagaactcacccctactggaatttcaagataagagaaaggaatttccaactggctacaattaagaaattgagctgcatccctacaccaacccactgatttgcccacacaaccgaaatggcttttggcataatttatcttgagcctagaaaccatctgaaaacacctcatgataatttttaggactctaacattatccttggtggcagccccaaaaaatagagtatcatctgcatattagagtatgttaacttcctccttttgacttcccacttggtagctgctgaaaaggatcttagatatggctgtggtcatcaaacctgtgaggcttccactactatattgaaaagcaaaggttgtagggaatcaccctgccttaacctctctatgggatcaccct

SEQ ID NO: 39011 - DNA, 536 bp, Glycine max
  unsure (1)..(536): unsure at all n locations
gcttctaaagagaaacgttgttgctatatatgaaaaaaatatgttaaccataacaatgatataataatatgatactgcaggtgaaaatgaaagaaaaggggtgccatgcaatgttgaaaggcacaatgctgaatgcctgcaactctgcaaggaaactcaacacgtctgaatttgaaaattaaactccttgtccttacgtgtgacgctttgtttggtcggtgcagatattaatggattattactcttttctaacccgcatctctccaaattatccaattttaaccattttttttatttaatcaaatccgaagtccaaatccaagaatttttcaccccaagatataaaaaaattactcaaatactaccgcctaaaaattattcacataaataatacaaacaattatttaaggtgagaaatcagatttctcanaccattntttcactntaattntatnttttgaatagaaaccgattttataacatattattatttatcgtgcatgataaatgacggttgatatanatattgtatcatg

SEQ ID NO: 39012 - DNA, 243 bp, Glycine max
attatggggtacccatcacatgtggttctagttgtcgggcaggcgatggtgcacaacaagcgttccacattcacaatgcgcgcataaacccaccatcccctgttgcccacctccagctgagctcacgtactcccacgtagcccatatcctcgtttctctcaacaccgggtccccttctatctctgaaacttcgcaacatccagcatatcactgtcaacagcccaagctttcacggccaaccaa

SEQ ID NO: 39013 - DNA, 506 bp, Glycine max
  unsure (1)..(506): unsure at all n locations
tctaagctttctataccaccccatttctctcttctctttggcaacatcaaaaagccaaagttcgtgggaagcaattatagataatataatgaagtggacaaagattaatcataagtcataaccaaccatgagaaaatcataaaaaagtcataacccaaatataatccaaacagtcataattcanaaccacatagaatccaatcataaaagactaaagtccaaataccaaaagataaataaataaagtgcagaaaatgaaaacttaaataccatagccaaaatacacggcttattagaaatataaaattataaagtaaactctaagaaggtggaggtggtggtggaagatcgaagctatgacgaatataacccacatcttcttcaagctgtgagacggatattcattcctgcaaagcgattatccaaagtgtcaaaacgttcaccaacataagtacgaagaccccgtaactcggaaagaaactcagtcataagggctgaatcatctc

SEQ ID NO: 39014 - DNA, 562 bp, Glycine max
  unsure (1)..(562): unsure at all n locations
gcttgctaacctatggaagctcctaatatctcccattctttttggggtgggccattctggatggctttgattttcttatggtccacttggacccatttctaccaactacaaaccctaaaaacactatattatctacacaaaaagtacacttctctatatttgcatagagggtgtttttcctaaggactgaaagaacttgcctgagatgttctaagtgatcatctaggctcctactgtacactaaaatatcatcaaaataaacaactacaaaaatctacttatgaaatcccttaagacatgatgcataagcctcataaaggtgcttggtgcattagtgagcccaaaaggcatcactagccattcatacaaatcgaacttggtcttgaaagcggntttccactcatcaccctttttcatcttgatttggtgatacccacttttaagatcaattttgaaaagatattggcccatgcaactcatcaagcgaatcatcaagtctaggaatggggtgcctatactttacaatgatgatgttgatggccctgcaatctgtacacattct

SEQ ID NO: 39015 - DNA, 342 bp, Glycine max
catcagaaccaaaacggttagtctctcaaacatttacacttacttaacttttgtctattgttaatataccggatattcacattctctccaagagctgatgactatcccaaaatattatatttttatgaatgaagatatctagccctttttcatttaggtatttatccttattggggtcatcttaaacaccaaactaatgagtatgtcctgtttcttttttgttatacaaatgtttcaaacaagatattgaagtcttcactcacaaatatgtgttgttgctcatttcaagcctccacaagattgaacatgagatgtcacttttgaatacaatccatgatagat

SEQ ID NO: 39016 - DNA, 498 bp, Glycine max
  unsure (1)..(498): unsure at all n locations
atccttaagtcacctgcggctgcaagcttagcttcttagaatcttctaatgaacttctcagggagggagcttaantatgaaaggggtgtgtgtagctaaactctaacttctcaaagaaagtttctcaaagaagcctctcaaggaaagtttctcaaaaagcttctcaaagaaactacctagtctataaataaaagcatgtgtaaccacttgttgtaactttgatgaatgagagtcttgtgagacacaactcaaagttcaacttctctccctttttcttccttcaatttcgtgctcccccctctctctttctctccctctttcttttcctccattgaagcatcctctctaagcttcttatccaaggctcatcttggtggtgaagctccttcttccatggcttattccctagtggatggcgcctcctctcacctcttctcctttgtcttgcgctgcatctccatggtggaaaatcaccattaaaggacctcattgaagctc

SEQ ID NO: 39017 - DNA, 465 bp, Glycine max
  unsure (1)..(465): unsure at all n locations
agctntgcttgaagcttcaatggagaatgaagaaaattaaagctacgtgagagagggagagaaaaggcttctgaatttctgctttggctgagtgaagagagaaaaaagctttttggttttaaaaataaaaagggttttcccttttttccattattttattcaagctttgccacatgtccctatttgattggagcaaaagggcccactttctctttttgactgtgatccatactcagtcacaaaagtgagaaaaatctgacctttgaaatgctaaaatcctgcctcggtttgcgtgtcgtttctctgattccagtttctcgcgtttctctgcgtccgccggggccagttttcgaaagcaagcaatatatatatcaaaacgctcagaatgaaaccccgagcgtggtttagaggttggtttcgttaaattntaagtcgcacgccaaacgatgatttttaactaattaa

SEQ ID NO: 39018 - DNA, 437 bp, Glycine max
agcttgaaaacgaggtcaggaagctatgatttcttctggtaatcgattaccaagggggtgtaatcgattaccatgcttataaatgagggcagcaagttgtggaggcctctggtaatcgattaccagtctgtgtaatcgattacacagaggaatgggtcactggtaatcgattaccacgtatgtgtaatctattacacagtgcctttttcaggttttcatgtcctgaagctgtgtgattcgagtttggcctctggtaatcgattaccaaggctgtgtaatcgattaccagagatgaaaagccttaagataccccttttaattgcatgtagtggttatgagatgcattgtgttgcggcatagttagattcttgtgaaagagtctacccctttccttttccttcttatagatcgcgatggcggcgcaactaatccatgat

SEQ ID NO: 39019 - DNA, 529 bp, Glycine max
  unsure (1)..(529): unsure at all n locations
agcttctcttggaccttaggcaaaccttcaactcattcttcatgatcaaactgtctactcgtgattggtccctttcctctctccggagcttaaggtcgctgttactaccccacagagcccctcggaatttgttccggccatgttcttccctacgagcccttttggtctcttgttccaaggccttggtggtagctatatttacatctcttagttcggcattctccttttggatcttaagtgttgcttatttgaacctttctttgactgtttagactttctcgagttctaccctaagggcccgcacctcttcgtcttcctccgttgcttcaacttccaaccctttagtggttctcaaactcgggagccaacccagaccttgcatgtgggctntcaaccacctatggtagccgccgatgggctcgttgttactgcctccgagttctttgcccttcttttgcaccatctcccataccttgtggaccttctgaagtgcctccacgttggtgttattgacacctcgtacaataat

SEQ ID NO: 39020 - DNA, 993 bp, Glycine max
  unsure (1)..(993): unsure at all n locations
gaaaggaagaacaggggacgacgaaaagcaacatgagaagngaaacggacacacacancaacctacacacacccaaaacaacaacagattgatgcactcgatagaccatccggaaaccgganannananagaaaaaangcaggcgagcaagccaagggagcgcagccaccatttntctttaatataaaaccgcacaaagnggggaccaacacaaagaaacgctccctctccaatataggggggaccacccgggccgccacaaacccccaacctttgggccggggcctttaatgaaacagccccccttttgcgcatgggcctgagagtgcatcccaaccggaaccaaaacaaaaatgtaccgagaccggccaacaaaagcaacccataggtccttcccagaaaggaccccggaaaggtccaagataatgtaccanggaacagccacccccagaaaaacttcttggaaagaaaggatcaacaaatcctcatcctttgggtattcccccatcctctgacaatacaaccttaaaaggggcctggagacaaagaaacccctggacttgtcaaagaccaacaccctaaacctggaaagaccccggtggggaataagaacaactcttccagggagcagaggcaaaatgttacctccctcaagggcccgagccttcctccaaagaaacaacatcccactcccgccaaagaaaaaggttttaaccgcggggaaacaagaaggcaaacggggtgaaaccaaggcccccaaagggaggtgaaggggaaccacaaccgcgcgcccccaatggatatcccagccaaggccgagaacggcaaatgtgaggggagaaaaatggggcctcgccacgnaaaaaacaaggcccatacagagggggtgccggccctacagggaacgaaaggggaaaaacaacctaatgggaacgccaccccaaacggaggcgcaaacacaaacacagccctacacacagagaacgcctcccg

SEQ ID NO: 39021 - DNA, 186 bp, Glycine max
gctttgagcaaattggaatgacatttattttttgttctgatgtccgattgaggcccgtagtatatcgagatgctcgtaagtgaaaataggagctctgagccctttcagacgacaataacttttgagtcggatgctcgattgtgttccgtaatataagcagacgctcgagattgtaaactgaagcac

SEQ ID NO: 39022 - DNA, 559 bp, Glycine max
  unsure (1)..(559): unsure at all n locations
agcttatatgagcttaaaatgtaatcttttatggttttctanattaacaattataagaaaccaataagatcttgaaatatatgattctcacaaataatagataaatagtgcatctctttgtccatagtatgacttgtctccgatgcactttaattcctaggaagatgagagaaccaagattttgctttcatgattattctttctgtctctccacgtttgtgataggtagggattagagagaacatttttttgtcaagaagaggaccttatttcacgttagtgtgtattagtgccttttataaccactactcacatcaagtagcagttatctttagaaacttgtgctattcaaccaaatacaatttacgccttaattattatttatttatttattagtccctacataagtcacatgtctctcacataagacattaattttaacattctctcacttgacttatgtgacattactaaacattatggactaaataataaattgattaactaacataatgtgcataaaatgactaacccttctatacatggtacatcataattc

SEQ ID NO: 39023 - DNA, 435 bp, Glycine max
  unsure (1)..(435): unsure at all n locations
ctaaatcgactcatccnnnacattatctcnntntcctcttcatccttaatatatagtcaagagagacaaannnnnntttaaccctgaaccggaataagaantcgcgtgtaancagcttacgaactagggatttatgagaaccaaattacacgatatttcatgctaacgagcagagtgccttagcgaataaggattagccctataattacgcttaacaagtcaagggggctatggggctaagcaaaactacaaatagagaagaaagacaccttaggcatagagaagtccactaacagagtttctataactatattttgctatctattgaataaatcaattgcatcgagtgatgtaacttaatggagaagagtgaatatctgatcacaagatatataatgatgggggataggacagtgttggaatccagagttaaaa

SEQ ID NO: 39024 - DNA, 447 bp, Glycine max
  unsure (1)..(447): unsure at all n locations
tgtaagattatggtgtacctgtcatatgtggaactttgtggcgatcggacgatggagcaagtcgactctccacatgcacaaatcacacataaatccatcatccccagttgcccaccttcaactgagctcacgtactcccacgtagccccttatgctcgttcctctcaacaccgggttcccatcaatccctccaagcttccacaacatccaagcaattcaacattcaaacatcatgaactatcaaaaaccaagaaaacagggcagaggcagaaaactctgccgataacacattccaataccacaactatctctactcaaataccccagtaacattttcttcggtctgattcgttaaccgttggatcgactcgaatnatttactggaggtccttagtacataaatctacattttgaccgttgagatgtgctagaatagtccacaaccga

SEQ ID NO: 39025 - DNA, 389 bp, Glycine max
  unsure (1)..(389): unsure at all n locations
ttttgtaattgcttgctcgccttcgctgtaaagattttttctgttgtcccttgattgtgttggaagataacacgtatttaaacatctgatgtatcctgtctctcttccaggttcaattctattcatcgatatttggtacaatagtaacctcttgttggaataccgagaacacacacnaagatgattattctcctcctaacacgatttatttcatatctaagggctaaccaggaatcgatccctcgactacttggtaaaggaatacaattcactaccacttgtgtcaacccactgtaagtatgataaaatagccaaagacaagtaaaactagcctaagcatatgataaaatagtttccccaagctcggaagaattttataattgatgaaa

SEQ ID NO: 39026 - DNA, 389 bp, Glycine max
  unsure (1)..(389): unsure at all n locations
tcaagcttgtccgagcctggagaggaggagtgcatannnacctgcgccttatatcgtttccgaacngagtgctttgaaggttgggctaacatatcacccttgaaagacgtagtactgtctactatggtatgtggcatgctccacatagaaacgcccatttactaccctctgacttttgtactggcatagcttggattcaatgcaagttttatttgctcattctctcgacgagaggatgtcaaatctagagggtcggctgatctagaatcagtactgtatttaagattatgcttgactcctgctctttgtagaggacctagctataatagtacaagattgatctggttttaactgtgaggatcaaagttctcccatacgtaatatttaga

SEQ ID NO: 39027 - DNA, 556 bp, Glycine max
  unsure (1)..(556): unsure at all n locations
ccccctctctctctatcntccttaataattataaattctcactcnttcnttctctccttccatctagccaaagaannntttgaccctgacagccgtgaacttagaaacncagctcctttgtacaacnatcaacacaaggccctttaatcntagaagtcctatcaacaaacacgctataacttattttctgattgtcaatctaggaaacaaatacttacctcgtgaatcggaaatcttagacaagacatgcataactcttgtctggactgtgcagaatattcaccatctaattgttgctcgttgtgacttcaaacgaacatagaagttctgtccagtatataaagaagcaccaaaaaaatccaaggggaaggtatattcccctacatatactatgatattacacactgacattgcattctttatctatagtcgaaacaaatngtctatatcgctaatgctgaccgctgaatcatcagatatttcacatcagaacttctttctgatgtcaatcatacattattctcacaacagccacatcgaccatttaacaaatacg

SEQ ID NO: 39028 - DNA, 552 bp, Glycine max
  unsure (1)..(552): unsure at all n locations
acaccattattcactctaactgtaacgtttacaccattattcctctcatttcctacggcctcagctacgttacacccccttanccctttgatcctgcacggcccccggagtacttaaanncactagggggctactatcattacacagggtgtcctacgtttgttgctctacaactaaacacctcgggtctctcacaagagtaggaatcacaaaagacagacacaccgagactcaaagctctctcattgaatacatctgcctgaacatatctcagaagagaaaccctctctctttattcaacacaccttcgtaccttagtcatcccttgttcttacatcccgattagcccctacagtgtaaagcttcccatgaccatgagagggataactctttctggtgggagccccaacacccttgaaacgtaacttcttttatctattatgaaacacaacatccgatactataggcccctccctgccactcatcttacatgacgaatcgattatccatgcctttggtntaacggaatataccttgacaaacgggaattcg

SEQ ID NO: 39029 - DNA, 425 bp, Glycine max
agcttccatcacacatagcagggtttatcctcaattgatacctcctaagcctttcgaacaacttcctcaggttgacaaggtgttcctcctcggtcttagatttggcaattatgtcatccacgtagacctcgatctcttagtgcatcatatcgtggaacaaagctaccatagcccgttgataagttgccccggcattcttgagtccaaaggacatcaccttgtaacagaatgttccccacagggtgacgaaggtaatcttttccatatcctccgacgccatctttatctgattgtaactggagaacccgtccatgaaggaaaacaaagcgaaattggccgtattatccacgaggatatcgatatgcggaaaaggaaaattgtctttgggactggctcgattcaaatccttgatatccacacacatt

SEQ ID NO: 39030 - DNA, 435 bp, Glycine max
tttatattcttgtctttctaataggaaattgctagtggaccaatacttggcttattttgtagaacacttgttacaacttaacattaaacagaaactgcagagtggcagagataaagcttggcattcccattggtggaaggaccttagaagactttataatcagtctgatttccacagtatccagtagaatatggtatggaaggttggttgtggggacaaaatcaaattttggcaagattcttgactgagtgagggctgtaagcatttcaaaaaaagattcttggcaatatggaaggaaggttagtttattaataatattcaaagaaagattctcagagtagaacccgtgcagaccaaccctggatgggattcagttttcttctcttggccaagggcagaaggaaagccttgttgctagattctctgaagtggaaa

SEQ ID NO: 39031 - DNA, 417 bp, Glycine max
  unsure (1)..(417): unsure at all n locations
agcttagaagagttgtgcttagcgtatgtcgcatagattttaagttaccttggtcctataaaaggagtaggaagcaaaaaagaaagacacactgagactcaaagttctctattgaatacatctgcctgagcatatctcataggaaaaaccctctctctntagtcattcccccttctttctttattcatcccttttttcttccatccatattagcccctaaagtgtaaagcttctcatgaccatgagaggctaaactctctctgttgggagccccaacacccttgtaatgtaacttcttttattatctattaaatacaatttttgtttctattgtctcttttctgtttttcattntattgtatgatttgattatccatgcatttgttttagggattatacattgaaaaatggtaattt

SEQ ID NO: 39032 - DNA, 254 bp, Glycine max
ggagagggaggaagaaaaaagagaaaaggtagaagaatgaagttggagagaacgaatagagaaaatgaaaggaaaagaaaaaaggaaaagataaagaagataaaagaggaaggaggaagtaaggagtttgaagaaggaaaaaagagaaggggaagaaggaaggatgagaaaggatatataaagaggagggagaggacgaaagacggaggaaaaaggaggaaaatggaagagcgaagaggggaataggagaggga

SEQ ID NO: 39033 - DNA, 351 bp, Glycine max
  unsure (1)..(351): unsure at all n locations
ggatcattctttcctttaaatggaggagtgttgagtttaataccatcacctcagttttgtctaggaacaccatcattccctcttctcctcctttcttcttaattatgagccgctatcctccatctgagccaacctctcatggagcgcatcatctcgttgtttcattaacctctccatatgttgcatcaaagcttgcatatggaattgcgaaagccccactccatcattaggattagtacctgacatctcaaacaaacaaatcaaacgttacaagacaattataagtgctgtttgaatacctcacncactcaagttatcacacaattatggcctttctctaatgaaacactc

SEQ ID NO: 39034 - DNA, 487 bp, Glycine max
  unsure (1)..(487): unsure at all n locations
cccacacactcccctctctcctttcgnnaagtaaacccgactagcgcctaacgaacacaaagaacncacgcacgcacaaagnnnttgatcctggagaccgggaaggtgaaagccacggaacaaacaaaacgagcgcccgaataaacgatatacatcaacagccgagaaaaaggagagtcacngaaaagcccccacccaacaacaaanccagcaccccccanccaggaccacacaacaccgagaaaaaggtagcgcagaaaagctgacagcccaccataaaaagcgagcggccgaaaaaaagggacacaacagacaccgagaaaaaaaacgggcacagaaacgacagagaacacacagagcgcgagcgccgcaataaacaggaacaaaagacaccgagaaaaaggaaagcgccgaaaaggccacagacaccagcaaatcaagccgcgaacaaagcggagccccacacaccagaaaaagaaagcgccag

SEQ ID NO: 39035 - DNA, 398 bp, Glycine max
  unsure (1)..(398): unsure at all n locations
aacattcaatttgagcgtcgcgaatatgacgatacttcttttacatccgagnaaaagggtagtcgattgaatttgctcacagcttcaacattcaatttcgagcatctcgctatattacgggactcaatcagacatccgagtaaaaagtttgttgtttgaaatggctgacagccactacattcgatttcgagcgtcgcgatatatgagaggactcaatctgacatcctgagaaaaagatattgtcatttgaatttgctcagagcatcaacattgaattgcgagcgtctcgatatattacgggactcaatcatacgtccgaggaaagagatattgtcgcccgaatttgctcataggttcaacattctatattcagcgtcttgatatattacgggactcac

SEQ ID NO: 39036 - DNA, 449 bp, Glycine max
  unsure (1)..(449): unsure at all n locations
gcttgaccaatatagattaatgcaacgactataaagtgttttgcattgtggacttcctatggcagaggttcaccttataatccatcataaataataactagataagaaaacagcaacgaattttgaaaagtaagtagtgccatacaatgatgctgaataaaccttcagttaattttttacccatctaataaacaaataaaataagaaaacataaaacctatttctaaaataaatttcaataaagattaagaaattagcacgcctttaataatataactcagttcagatttcaattactcttccgagtctaccacacccctaaagacagtcagtacaaaggaaaaaaatatttagccctaaagaccaggcttgtaattcatataagcttctanaaatatacatgaattgagcaacaaaagtcaagtcttaatcctagggtcttcagcatg

SEQ ID NO: 39037 - DNA, 438 bp, Glycine max
  unsure (1)..(438): unsure at all n locations
tcaccttctggtcctcctcatagttgtggcatgagtttcatgctctattttcatctcccactccaagtaggcctccggatcattctttcctttaaatggaggaatgttgagtttaataccatcaattcggttttgtctaggaacaccatcattccctcttctcctcctttcttcttcattatgatctctattctccatttgatccaacctctcatggagcgcatcatctcgttgtttcattaacctctccatatgttgcatcaaagcttgcatttggaattgcgaaagccccactccatcattaggattagtacctgacatctcaaacaaacaaatcaaacgtaacaagacaattatagttgctgtttgaatacctcacccactcaagtgtatcacacaattatggctnttctctaatgaaacactcttgccttttac

SEQ ID NO: 39038 - DNA, 534 bp, Glycine max
  unsure (1)..(534): unsure at all n locations
ccccacacctccttccacccaatatcactctgcataccataatacctaataccagatctcatgacanctggccccnatgagcctgtaaacctgatcccaaggnaccgagcagcagcggcacacacacacanggacctttgtatacatatgggcaccagacatgattaaaccagagtaattgtgtatgcgaaacaaacagtgtaggcggcttccatctaaaccaagtggacctgccaattcaaggtccacatgtgaagaaaagcttctctcacaacaatgacaaacggcagggaattttttccaatggacatgatgatcgcctatttaaacagtgacatcttacactgtagcagttatgagatatcggaagaaagactacaatagacattgtattaaggcattatgaggaacaacgagttagttcctttctcaatgaaccatctgaaaaagctgaagctaaacatatatctcccacggtgcaagtcaacaacgattnttcatgcacagaatacatgatggaagaagagggactcg

SEQ ID NO: 39039 - DNA, 339 bp, Glycine max
  unsure (1)..(339): unsure at all n locations
gtgtnaaatatagcggcaactcctttgccttcgaacaccttgcaattacaggtgtctaagatagttttgatctccctaactatgccaaggatatagtttgttaagtgggtaatgttatctgtgctaatattaggcgtttcacccttgcagaggcatttgcggtttgtgaaaactattcccctcctgaagggttcaatccgaaagatcttcatcgccttcttgagaaggttggaagtccctcaggggtagatgatacaggtatatatacattcccttatgctaatctaacaagcactatggactgaatattagcttcataagttattatcaatactgatg

SEQ ID NO: 39040 - DNA, 423 bp, Glycine max
  unsure (1)..(423): unsure at all n locations
agcttcaacatcagaccacttccagttttctggaactacttcacatggatttgatggggcctatgcaagttgaaagccttggaggaaagaggtatgcctatgttgttgtggatgatttctccagatttacctgngtaaactttatcagagagaaatcagaaacctttgaagtattcaaagagttgagtctaagacttcaaagagagaaagactgtgtcatcaagagaatcaggagtgaccatggcagagaatttgaaaacagcaggttcactgaattctgcacatctgaaggcatcactcatgagttctctgcagccattacaccacaacagaatgggatagttgagaggaaaaacaggaccttgcaagaggctgctcgggtcatgcttcatgccaaagaacttccctataatctctgggctg

SEQ ID NO: 39041 - DNA, 439 bp, Glycine max
cttcaacattcaatttgagcgtctcgatatatgacgatactacatcatacatccgagtaaaaagttatagtcgtttgaatttgctcagagcttcaacattcaatttcgagcatctcgctatattacgggactcaatcagacatccgagtaaaaagtttgttgtttgaattggctgagagcctcaacattcaatttcgagcgtctcgatatattaagggactcaatcagacatccgagtaaaaagttattgtcgtttgaatttgctcagagcatcgacattgaattgcgagcgtctcgatatattacgggactcaatcagacatccgagtaaatagttattgtcgtcggaatttgctcagaggttcaacattcaatttcgagcgtctcgatatattacgggactcaatcagacatccgagtaaaaagttattgtcgtctg

SEQ ID NO: 39042 - DNA, 422 bp, Glycine max
agcttcttctccaccaccatggaccattgtgggccactgtgagctgttcgaacctggcaagtgtatcagatcatgcaagtagtataaaactgtaagaaccgagtatcgaactctcggtgaaccggtgttacttggtaaagctatattcagtgaataggtgtcttgtatgaaaagatatgtgtagactatgaataggtatgtaaactaactattaaaaacgaaaatcacgtgagtaatgatgtgtaaagacaagtagacaacgtgttggtcgtcctactagatgcctgatgttataaggatattctctacttaacaatgctcatgtgttctatggtatctcctgaaatgctaaaccacgatccctcgtgatagtctagcctaatcctgatcaagcatcatcctcagatccctcttgttggact

SEQ ID NO: 39043 - DNA, 425 bp, Glycine max
  unsure (1)..(425): unsure at all n locations
ntcttcccttatttggcatggagatgagcttagctttctntgtttaactcattcgttcatgagtgtatgaaatttttttagcctattctttgagttgagtcaaatctttcatgttaattagtccttaatatgttcatgaataattcttagagagtctttgattgtgaaccttttcttgaacttttaggtttccttatgattgtgtctattgtgaatttgagttttggtgattgaattgctagatgaaattttgatccaaagtgaatgttgaactcctaaaactgtggtaaataagcctagtgagcttaacatacataggaaagttgaaagtaagcctaaggcaatcaatataccatactaaaaaaattcgaagtctaaaatcgctggtgctagcagcttgaacatacgaacttgtaaaacttact

SEQ ID NO: 39044 - DNA, 420 bp, Glycine max
  unsure (1)..(420): unsure at all n locations
agcttgtgcgtttgtggcaatcccattttatagagccaagcatttgtaggacagatcggattcttattaatccctaagaagatgcctcttttctcatgaactagggagaaaaaaaaaacatggacggtgcaaaaaatagaaatgtgacaagactgcatgacaaaaatgatagaataaattaaacaagattgtgtaaatagcaaaagaattagagataaagaagtgccacagtggtgcattatccattctaatcccatggtaattcaatgaaaatggtagaataaattaaataacgagttaacacttaactgtgagccttgtccagaaataacaatttcagaaatggaattgttgattacatgataagaagtaatggaattattaaccaaaaactgcaatcacancctttttaatttatct

SEQ ID NO: 39045 - DNA, 428 bp, Glycine max
ggtaagtatttgttggtataatttgcctgttctattatgctcttaatgtctttagaggttatttcctcgttgacatcttttgttttgaatggaattgccatgacaggtttattgttactgtctttgatgtttggtagttgatattgtgttgcgggaggtaattccgattggattaactcaccatccttcacttgccaatttgttatggcatttgttgttggatcacctatgatgtcttgtttccatgggtaatctatatcctttctgatggcataagcatgaaaccaatcaaagaaaaggacattaattttgactctttcgacaaattcgtagaacttgtcttggatttgttttctgtttgtacccttgtaatgttggaaaaaccatctcctttgcggttcattctccggagaataaaaatctttcct

SEQ ID NO: 39046 - DNA, 396 bp, Glycine max
  unsure (1)..(396): unsure at all n locations
agctngtatcctctgttctataatnttaactaacgctaagcttgaatagaatacgagttgataaggtttgcagaacaaatggtgatgcctagtacgtatagcttaactttcatcggagattntaaaactcaattgccataaaatatcataacaaagatgaaaaacaaagggagagaaattcaacagaatgaaattgtttgtctattattaaaattatgcaatcagataaaagagagttacatttatattggtagtttgactaaaataatattatttcaaaagctaaaagagtatacaactagttagttagttacacatggttaattcaataaggtctgcaaaataccagcaaaagctccttaatttgattggctccgaatatttaacgcatgattc

SEQ ID NO: 39047 - DNA, 434 bp, Glycine max
  unsure (1)..(434): unsure at all n locations
gggcaattntaaggtgtaaattctcgcattgaantgatataagtttaattaaaaacatctaagaaaatgaaggaaaactcttttctaattaagacaaaaataaataaataatcttgcgagacaatatataatatgctaaaattataaatagcttacccagcagccaacaaaaacattaaattcgaacgcaaatttaattaggagaaaataaaatttctcatgtaaaacaataacctttagatggggttaattaatgtccaccaaaaaaaacagtgtatattcatatgaaaatatacttcccgtgttcctatatacaaagtacataaccttcataaaaaaattaatcattaaaattttcaacaattcatttagattttttagatttgtttataaaattattagcacctcatttgcttcatttctttctacctaat

SEQ ID NO: 39048 - DNA, 414 bp, Glycine max
  unsure (1)..(414): unsure at all n locations
agctntntggncaaaattcttgtatatgcacaatcatggccttcatcatgtattcatttatacatttcattctaaaattcagagattcatgcaaagattattactcacagctagtcgttcactcacagtttaagttcacactctcaccggttttggttcaagcttttctttctcaatcaatttgtctactgactaacaattctaaatgcaagttcatattcttgttctttctttctctaacatacacacttgttcaaactcatgaaaaggaacacaaactccatcacaatcatgcattcaattcaaaataaaagcatacaaccattttcacaaatcgataaaagtgcttcacttccatatcattaaaaaccaagttaaattgttcaaaatgcttcagaataagcaaaccaacta

SEQ ID NO: 39049 - DNA, 448 bp, Glycine max
ctataaaactcagcttgtaaccaaaacttagtactggatacaccaagtattgatagaaaagaaaaggtaaaatcaaacaagcataactcaaacaaaacaaaacaaaatcacatagtacaacaaaaacatagcagacacataatgcattggccggaagaaccaacatgctctgataccactaaatgtggcacccatttatcacttatctaataattaaataaaaataataataattttagttacgaaataaagtagtaaatttaaaactttcataattttacaataaaggttatcacatacgtaactcaaataattcaaactcaaataaaagctctaattgccaataaaatatattggcccacgcacttttggctttgcaagtccttaaaaaataattgaccttcagaaataaaatcactaatttaaaacataaactaaaaataaaaga

SEQ ID NO: 39050 - DNA, 385 bp, Glycine max
aattaaaaacatctaagagaatgaaggaaaactcttttctaattaagacaaaaataaataaataatcttgcgagacaatatataatatgctaaaattataaatagcttacccagcagccaacaaaaacattaaattcgaacgcaaatttaattaggagaaaataaaatttctcatgtaaaacaataacctttagatggggttaattaatgtccaccaaaaaaaacagtgtatattcatatgaaaatatacttcccgtgttcctatatacaaagtacataaccttcataaaaaaattaatcattaaaattttcaacaattcatttagattttttagatttgtttataaaattattagcacctcatttgcttcatttctttctacct

SEQ ID NO: 39051 - DNA, 431 bp, Glycine max
  unsure (1)..(431): unsure at all n locations
tgtataccanaacttagtactggatacactaagtttttgtgaaaagaaaaggtaaaatcaaacaagcataactcaaacaaaacaaaacaaaatcacatagtacaacaaaaacatagcagacacataatgcattggccggaagaaccaacatgctctgataccactaaatgtggcacccatttatcacttatctaataattaaataaaaataataataattttagttacgaaataaagtagtaaatttaaaactttcataattttacaataaaggttatcacatacgtaactcaaataattcaaactcaaataaaagctctaattgccaataaaatatattggcccacgcacttttggctttgcaagtccttaaaaaataattgaccttcagaaataaaatcactaatttaaaacataaactaaaaataaaa

SEQ ID NO: 39052 - DNA, 230 bp, Glycine max
  unsure (1)..(230): unsure at all n locations
gatttatgtgctgttgcatacctcagcaggaacgaagtgccanaaccatcatgaggaactggtgattcttttggaagataagaattgctaattaactttgctaaatcttgagttcccatactagtaaatgagtggtagtcaattgtacttgagaacggaatcttaaaattttgggacgaaatcttctagccagacaaagctcaacaatacgtccttacaagataaacatt

SEQ ID NO: 39053 - DNA, 255 bp, Glycine max
aatgactttttgtaagactcgaaaggtacgagcttgctaagccatgaagggaggcttagcggtcgaaaccaagctagaaaatcacagttcccatgaaaacaacaacaaaactacaaagcctatgtgagtagaacaaaaacaaactaaatgaaaaacaaaaaaaatgcaagatacacaatgcacagatgcaaaatgaatgctaaactcaatagaagccaaatatcctaagaactatgcttacatagacagtacgct

SEQ ID NO: 39054 - DNA, 434 bp, Glycine max
tatagtatgcccgagtcattcatacctatgagatgttgttgaagtattggcgatcagaattgccattccttggattacggggttgaaccaagctcatgcttttacaaaaaggttcatcaagtcaagttgaaatatggaagtaaccgtcttgcaaaattggggcaaaagatgaatcgagtcacatcactgcttcgtttactgccaaacatatttacgaatgtttatgtccttgttacttccagtttcaccttgacaaagatgtcatggaccatgttgaaaatctaaattgattcaaccccatatcctgcgtaaaaattcgcaatacttcaactgtacatcattcgcatacatccatgcttttcattggttgcattgatcattgcattctttcgttgaataataaaataaaatacaataagatgaacttaatcatt

SEQ ID NO: 39055 - DNA, 438 bp, Glycine max
gtcccttttctcgctgtttcgtgttctttgcatttttttcctattattttacttttgatcattgtcagtgtgaaaagtttttacagaagtgccttattaacataataactaaggtttttgatttgctgtgatttgaaaggtttcaagtttcaacagttctttgaactatttctgtgtgttgaagtgatagtttatctataactgcaggatatgaatatccgtgaagcagtaatgagggccgagaaagctttaaagataagcaaacgcaaggactactacaaaattttgggaatttcaaaaacagcttcggctgctgatataaaacgtgcctacaagaaactcgccttacaatggcatccagataagaacgtcgacaagagggaagaagcagaggctaaattccgagaaattgctgctgcttatgaggtctattattat

SEQ ID NO: 39056 - DNA, 436 bp, Glycine max
ctcagcttcacattcaatttcgagcgtctcgatatatgacggtactcaaccagacatccgagtaaaaagttaatttcgtttgaattggctcagagcttcaacattcaattttgagggtctcgatatattgcgggactcaatcagacatccgagtaaaacgttattgtcgtttgaattggctcggagcttcaacattcaatttcgagcgtcccgatatatgacgggactcaatcagacatccgagtaaaatgttattgtcgtttgaattggctcagagcttcaacattcaatttcgagggtctcgatatattacgggactcaatcagacatccgagtaaaaagttattgtcgtttgaattggctcagaggttcaacattcaatttcgagcgtctagatatattacgggactcaatcagacatccgagtaaaacgtta

SEQ ID NO: 39057 - DNA, 420 bp, Glycine max
agcttctgctttcaaaagtaagcggtttttcttcaatgggtctgttcctgatatatttccactcagatttggtcctttaacaactactccacatctatgttctgttgcatacctaataaaaggaatagccaaaacatataaagaactgctaattcttttggtagataagaattgctaatttaactctgcataaatcttgagttcccatactagtaaatgattggtagtcaattttacttgagtacggaattttaaaattttggaacgaaatcttttagccagataaagctcaacaattagtccttaaaaaattaacattgcccataataattggttacctacattaacaattaacccttaaatgttatagcaaccttaggcatcttcacctgactctgacttcatattgagggaaagatg

SEQ ID NO: 39058 - DNA, 428 bp, Glycine max
tagcgagttcatccaaaaatccagaaaattcatgatttcgctaaatgcatgggtcaggcttagtgagaatgactttttgtaagactcgaaaggtacgagcttgctaagccatgaaggtaggcttagcggtcgaaaccaagctagagaatcacagttcccatgaagacaacaacaaaactacaaagcctaggtgagtagaacaaaaacaaactaaatgaaaaacaaaaaaaatgcaagaaacacaatgcacagatgcaaaatgaatgctaaactcaatagaagcaaaatatcctaagaactatgcttacatagacagtacgctatgaagaggaaaagatgtggaagagaaatgcacgaaggtgaggtggtgtaggatagaaagaaagaaatggagggaatggggaaacaagagtgaagttggcagaatg

SEQ ID NO: 39059 - DNA, 319 bp, Glycine max
gtactttcattaatacctatctgtaatgcctaagggggcttttgtcaccttacatgatgaaccttttttaccaatacacctcaggttgcctaaaatccacatgcttaagtccacttacactctcaagcaccactacaccaaaactacctagttgtggccaccacatccttaaatcctcaactcctaaccttaatattttatataaactgatttttacataattgaaagtgtatcttctaatattggcaaaacaacatacaactgtgataccgtacgtataaactataattctttcatatttccatcactatattgataa

SEQ ID NO: 39060 - DNA, 249 bp, Glycine max
  unsure (1)..(249): unsure at all n locations
acaaaaaacatgtgaaagatactcaccgaaaaacgaacaagatgagggcgttgcaagagcacaataaaactttcatcaattggtttagacaaacaatctccgcagatgacagngcttcaaagacactaagcctgctagctcttgagccaaatctcaatgttccaacttgaaagggatatgataacaatcactattctttctacacaaacgcacgggatgaaaaaagatgcgcgcaaaaaaatggggcga

SEQ ID NO: 39061 - DNA, 273 bp, Glycine max
cggacttaatcccgagctcacttgacataacacattatttctcatgctatgagtcctataatcagacccaaattaagtgaacttgaccatcaacacaaactttctcggagctgatgatcgataattaacctcaatgatgtgactctagccattaacacatacttactcaagctgatgatccgtataaccaacgctcaatgaagtaactcaccatcacacatctttactgagttgatggccccattacaacctcaataagtgacttaccatcac

SEQ ID NO: 39062 - DNA, 554 bp, Glycine max
  unsure (1)..(554): unsure at all n locations
ccgccgcgtcccgccacatntcgtaacctctcacccactcactccccctgtcatccaccccacacaggancacgccnnacgantgancatgattcctgcaaacaccgaannannaaanncagcggnagaagcngaaatgacaaagcacgaccatttgntgctatccgcaaaaagaagcnggggatattagacgggccacaaaaaacaactcatttattcaatattaatgagccggggaccccccacacaataggactgcgtttgacgacacaattgatgaattatacgcttcttacacaccgatgtatgaactagactacaccttaaaaacagtgaaggagataaattgacgcacaaattagatcaaatcttaaaaacaatgaaggagaaaaaacgaaagccacatcggcgaccatatagatagcccatactctcacgcgctaagatgggtccggataaaccatatgctgaataccatcctatcggaatggcgtgaaaataccaccaccaacaaagcacaagaaaaaaatagaacacccagagacctctcaaag

SEQ ID NO: 39063 - DNA, 430 bp, Glycine max
  unsure (1)..(430): unsure at all n locations
ttagatgtcttanattgacaattgcatgtatcatctgttgctttcgtaatattagaagttttcttatattagacgtgccactaaaaacaactcatttattcaatattaatgatttggttaccctcgatacaattggactgcttttgatgatacaattgatgatttatatgcttcttacaaattgatgtatgaattagactaaatcttaaaaacagtgaaggagataaattgatgtacaaattagatcaaattttaaaaacaatgaaggagaaaaattgaaagccacattggcgactatattgatagtccatactctcacgttcttaatttgtttctggctaaactatttgctgaattccattcctatctgaattgcatganaataacaacaacaaanaagcagatgaataaaatagaatcgccaggattc

SEQ ID NO: 39064 - DNA, 413 bp, Glycine max
  unsure (1)..(413): unsure at all n locations
tgagatgaggaagtgttgaagggtgaaacttcctgcttttattgttgaccacagagtggtacctggagatatgttgcgggggtcaggagaccttggggacgtcaggtggggtgctattgcccaaaaccaagcttgaccaatcccgacccaacctgngcatagtcggtcagtgagaacctgtgatgtacctaagcaggcgagctcctggcagtcaacagataaaaggaaaacaagaccacaaagcaaggaggcttgtggtggctggccagctgtgaaacttgattgatatgtgagatatggtctctggtaatcgattaccaagggtgggtaatcgattacaaggcttaaaaatgaagacagggggctaagatggtctctggtaatcgattaccaggggatgtaatcgattacca

SEQ ID NO: 39065 - DNA, 420 bp, Glycine max
gcttcttcttcaccacccacaaccaccagtagccattacgaaccaccgttgttcttgttgaaaccccacaccgagaggaaccttccaatcagagcggaatcttccaagcttgtcttgcggtttctgtagagaatgaagcccaatctgaccttcacggttttctttgaggtaaccgtaattctacgcttgttccttgttagtttcagcttatctttgcatcttttccgactttggaaccaccattgtatgttttacgtgtcctttgaaaaaccttacagaaagagactttgtaaacgttatcttttttctgaaatgggtgttattttcgtgaccttcactgaaccccgatcacattggcatgatcggaattttaaaatgatgttccttttgtagaatttgaaacgcccttagccttttcat

SEQ ID NO: 39066 - DNA, 402 bp, Glycine max
cttctgtacatcgcgggagtgtctattaatatgttatactaacacagataaactgagggagatgtgtttcaagagattaatgtctgaacgtcaacttaccaggggtgcaggagcatccagcattacctgagtaagtccaatagtacagatatgctttctagatgaatgtctctgcctgccacatgttagtggctccagcggcggtatgatatgtatgtcaaatacgcagtgatggtcactggcaaaaaagttgatcgtggatgactcgctgattctcaaatctttcctgaaggtgtcgagtccatctaccaaatacactctttctttgtgtctatcgacccgtatttcgtagatggctacattgtatctcagatgaacaaactcgggatactgtggtgccca

SEQ ID NO: 39067 - DNA, 411 bp, Glycine max
agcttgtattggatgccacgatgcatgtggaaacataatacaaccggtggggcatccccttatgaatgacatgcatctctttatgtccttgcagactaaaattaatatggtctttgtgcctttttcttttccactattttaacttacagggggcaactctatctgcgaacgatgtacagatgtgaatggagtaaattagacctaatcaccctcatgctgtgaattgaagatatggaatagaaagcactgaaatttttaaaggatacattccaagtcttagttgcaactaaaaatctcagagctcatttctttcatacttaatgaagaatgaaaataatctatcaagtatcaactatttccaatgcatgttgcaaactcatcttgcttaaattgaaggcgtagatcaatata

SEQ ID NO: 39068 - DNA, 411 bp, Glycine max
tgatgataatacgctgccaatcttattctcagtatttctatatataatggatacattagctaatataatggaagagtctgttataatagaattgctaatacagcctaactgaatgggtggtaacaacccagtagtggaaatagtagtatattttgttaggcaggctgaaccttatgggtagtctgaaaggtgtgttggtctactggtggtccttcggggtctggtagatgctactaagctattgctattgctatcatcccctccgtcttcgaaactaaccttgttcccaatgttataagtgacacacaagttgtcccactgttcccaacttgtatcttctggcgccaaaccagtccattgtaccagaactagtttagatggtggattattggaagagtcccatttggagac

SEQ ID NO: 39069 - DNA, 416 bp, Glycine max
  unsure (1)..(416): unsure at all n locations
naagcttgaaattgctgataatagcattaatgaaagaggcagaaagctgaatgcttcaaccgagcttaccgaggaaatcacacccccacatgtttgattgctcctcttgaacttgttaatgttaacccttgtaccttcacttaagcctgcccctgtaagttgtgatatcaaatcaatgtgtgttcatatgtttgctatataatgaagctttccttgggaagtgaaatggttccaagactgtttaaattttctgctttgatatctcgttattattccctactctagatccacaaggtttgatttgataattgtgcatagtcttcactcttcagtaacatccacccttggtaaatactccctctagtctcaaattnttattattggactaanaactgaatntaaaaattatttagaaa

SEQ ID NO: 39070 - DNA, 439 bp, Glycine max
  unsure (1)..(439): unsure at all n locations
tataaaactcaagctgggctagttatggcgttatgctctttactttatttgttgcccttaagttacttgcgcaaccttgttcatcttcatgttgtgaaagaaattggggtacatattcatgtatccattctttaaagagaaacaagatggcactacatagagctgaagatttagtatttgttcatagcaacctacgacttctctcaaggaatactccacaatatcatcaagaggaaactaaaatgtgggatgtaactggagatgattttgaatcacttgatgattgtggtattcttgaaattgctagattgtctttagatgaaccagagttagagggtgtctttttcaatgatgattgctagtttgtgaaattcttgaagacttgaagttgctaattcatcatcttgctnntataattttnntgtaagaaacaaagcgt

SEQ ID NO: 39071 - DNA, 414 bp, Glycine max
agcttaatacctgaaattactaaattttaaaaggaaaaaaaaaaatcaaattagagtcttgactcctctagttccatttactcctcttcaagttaaaaaatgtccaaaatttttataataattaaattaatataaaaggacaaaaaagctttaaaaagtgtactcaaacgatagaaagcatgatttaattttttcttcttcataaaaacactttatttggagccacacccttagtcttttactatttgattcgatgcaattcgattagtgccacacccttagtcttttactatttgattcgatgcaattcgattagttatctatttgtatttataagatgaatattaaacgactttaactcttatgatatgtaaacgaatcagtatatttttatatcattgatatgaatcatac

SEQ ID NO: 39072 - DNA, 431 bp, Glycine max
tcgaatcacggggatagatttgccacaacctggtttaatgccacgacagagggtgctcgagacagggcgtaagctcgcaaattattgcaagcgtttcaatgttccatttgagttcaatgctatggcacagagatgggacaccatcaaagtggacgacctcaagatacaaaggaatgaatttgtggctgtgaactgcatgtttcagtttgagcatctgctagacgagactgtggtgttgaataatcccagggatgctgttttgagattgattaagaatgcaaatcctgacatatttgtgcatggcattgtcaacggatcctatgatgtaccattctttgtgtcatggttccgggaggctctctttcattacactgcattgtttgacatgcttgacaccaacgttgctcgcaagatcccatgaggttgatgtt

SEQ ID NO: 39073 - DNA, 445 bp, Glycine max
tctcttggacatctggtgaaagcgcacgatcatcctatgtttgtatgtaaaaccggcgaccagtaccatatttgtcagcagatagagacagtttctccattattggaccaagagggctatgtctcatggaaaccatggctaaagcaacatcctgaaacacatcatttcaaatattatcagacctaataaatacatatactatccgaattttgaaagtattaatataacaaccaggtgaggtgactacaggattaaagaatttcaccttcctaattccttcaattaggactcagtttacataatacaaatataaatataataaattaagatggtgtaatatttttttatctgaatacagttgtgatcccaacttttagatgaaacatttatcatgaaaaataaggattgaaaatgttttgacatgtatgtattagtaataagtaat

SEQ ID NO: 39074 - DNA, 437 bp, Glycine max
  unsure (1)..(437): unsure at all n locations
tctagccaaatggacttaccttgaattaattcctttgatagcccttttgagccttgtttccctttccttgttttgaagctcactacaagccttaaatgaaaaaaccatgatatcaccatatccttaaggaattttggagctttggaattgttttgggaataagtgtggggggtttttgtttcattggataacttgttttattggctatgcttcatgatgtattttgggccatacttgatgtacattgtatattggttaaatgttggacatgctgaatgaaatgttgtttctcaaaggctataaaaaaaaattcgaaaaaagaaaaagaaaagcaataaagtttagtgaataagatcttaaatggcacaagaataatgaaactcttggttctactctttatgttaaaattttatctttacttctttntaatttcttat

SEQ ID NO: 39075 - DNA, 165 bp, Glycine max
  unsure (1)..(165): unsure at all n locations
agctntgcttccacaattggtgtaggaggccgcttcgacccatttggtgaaataatctatcgccacgaggatgaagtgatgaccgttcgaagccttgggtttgatggcccctatgacatctataccccatatggaaaaaggccaaggagcgcgacatgacgttta

SEQ ID NO: 39076 - DNA, 436 bp, Glycine max
  unsure (1)..(436): unsure at all n locations
tgtctcagcgtttatgcgagacggagaccaacatgctagctatcatcgccaagtaccaagaagagttaggtctagccgcggcccacgagcataggattgcgggcgaatatgcccaagtatacgcggaaaaagaggctagaggaagggtgatcgactctttacaccaagaggcaaccatgtggatggatcggtttgctcttaccttgaacgggagtcaagaacttccccgattgttagccaaggccaaggcgatggcagacacctactccgcccccgaagagattcatgggcttctcggctattgtcagcatatgataaacttaatggcccacataattagaaatcgttaggaaacttgtatggtctctcagaccttgactagatacgacttcctttntgaaataaaatgagttgatcccatgttttactccaaaaa

SEQ ID NO: 39077 - DNA, 419 bp, Glycine max
agcttcatgtgcttaggatagagtacttcatgaaagtttgtattagagtcaagctgtgaactcaactcatttctagacatgtttttttttttctgatttctcatttagtgtcaactatccctactctaattttatttattatgttttaatatttaatcttctatacttttgtagatttaatttattgttttaaatatactatagggagattggagaaaaaagtgggaaacatgagatcaaaattagggagaagggaactgaattttttttaactaaactgaatttaggttgacaaaaagggacttttaatatcatggctgctattagaactatagtcatggccacaccaaactatctcaatctggttatttaccagatgtcacctaggctaatggttcttacttccttgttcctacaca

SEQ ID NO: 39078 - DNA, 440 bp, Glycine max
  unsure (1)..(440): unsure at all n locations
tatntatttaaaaggaaaagaaaaaaaaatggagtttctcaacaaagctcaccttataatccaggtatattattacagccattgtaaatactctaacccgtctcttgtaaatatctccccaccccattctcgcaggcaagctacaacaaagaatgcggttaagtttaaggccaaagatacagatatggcagaataactagactgaaaatatatatttcgagcaaatcaagaaacaagagagtcaaacaaacaataacagagtaacaaatgcccattacacattttaactataaagaagttctacaagttgattattgaagaaaaagattcaagaaaaatacagaaagagcatatagactagttcaatactcataattaataaacacattgaacaaaacaactctgagattattaaatatctcaatataaacagcacttat

SEQ ID NO: 39079 - DNA, 421 bp, Glycine max
  unsure (1)..(421): unsure at all n locations
agcttcaccaatgtcagtcatgttgtttcgccaatgaaatatcttcttttcttcatgtgcgtaaaaaaaaagaagccttttcaacataggatgctaaataaatgacgtcatttcatttttcgtatgaaaacccaaagttcctttcaccgtatctttttggtgcagtggacatatttggagtaccacgtgcatcgtttttttaggctgttgtttaaatcagtccggatcagagcttatcagtattaaaaaccaacttaattaataaagtaaaaaaaaatatttcacacgtgttttttttcttaattaataaagtaaaaaatcaacttaaaaatagatgcaagctacggtaatcaaatgggacatgtagtttacggtaaacaagtaacttcatatcattaaatttattaatanaatattgagt

SEQ ID NO: 39080 - DNA, 439 bp, Glycine max
gaaactccgctataagaacaaaatgcctaatcatatccaatgtcatctgtattatgaagcatcaacaagaatcaatcgaaggctattgtgcaagcaatcaatggggcaaaacacaccaaatgattatgaagatggatggctcagattctcacagaggtcaactcatcactctcaaattgagctttctaaactatcatgacttgtataggacaatcaaagatgtcaagtcacaaaatgtcaaaaactttgattttcaaaacaattacccatttcgtgaacatatcctatgattcatacaaaaacatgcaaagtcgtacatgcgcacagaattgacccaaaatattaaactaaaaatccgacgaaactaacaacattaacaaattaacacaactaacatattaacaaaaccaacaaaaccaactttaaccaaagaacactc

SEQ ID NO: 39081 - DNA, 423 bp, Glycine max
  unsure (1)..(423): unsure at all n locations
agcttgaagcatgcaattnttccagcttactctttctccaactcatcaatggcaggggctatcatcctgtatggaccacaccatggtgcaatggggtctcacttgcaatgacaatgttattccagcttgaatctgtcacagctcgcactgcaaaatagggccagccacttactactacctagattgctntatggcaaaataaaaatcataaattcaacacaaggtaaaggatattcaactattcatcactcaaggatataatatttgggtgcaaaatgttaaatgaccgatatgagttttgtacaatgattccccccgcccccctataaagagtttttatattatcatccaataataatctaacatttatgataagtttgttaacttttacattaagtccttagaagttaaactaatttctaa

SEQ ID NO: 39082 - DNA, 436 bp, Glycine max
  unsure (1)..(436): unsure at all n locations
tattttgtttgcaatatttatgttgtgtgtggattgatttctatttagaataaagtttagaccaattggaaataggcatgactgagatcacattgcatgtaactttcatgttgcttatccatattgacctatgtcattgagtgtactaatgtagtagtcattggggtctagttacatttattgatgcaatcctccctaggaagggaccaatcactagaaccatgagcaagaggctccaagaagattgggctagagctgctgaagaaggccctagggttctcatgaaccttagggtagatttctgagcccatgggccaaggttgggtccaattatctttgtacatattagactaggatgtcattatatttggtccttgtatttagggctccatattgtaggtagggtaccctagaaatataggattnttcagccctt

SEQ ID NO: 39083 - DNA, 413 bp, Glycine max
  unsure (1)..(413): unsure at all n locations
agcttggaatgagagtataggaacttaaatcacaagaataaaaagttgatcacaacaataagaaactacaattgaaagttcaaataaagtcagatatgctaggagaaaaatgttatactcaaagtattcacatggacatgctactttgctcatattcctataagtctacactatattgcaatcctcttcattctggagtcctaaaacatgtgagaaagtggattaagcagccctacaattataaggcatcttgggtgtttataccacatagcatgcaaacaaaacaggatatttatagcataattgttttcaaaacgggagcttgaactacacaaactaatcattatgcttggtttcatgtttcctaacagcagcttanacatatttatccaacacatgattgctaggaactt

SEQ ID NO: 39084 - DNA, 286 bp, Glycine max
gagcattgagatgggtgactgcgaatgtgacattgtgaataacatatgcaaacataatatagaaccattaggagaaacactatatgtgttacctccacatgtcttactatgatcttgcatactggtccgaccatgatgtcacacattgttgaacatgtggagaaaaaagtctgagggcgttgaactgacactcttcttaacatttaaggaaagacatatgatgatatgaagtgccggcaagatataattgacgtggatatgcggcgacagctgcctccaatataac

SEQ ID NO: 39085 - DNA, 352 bp, Glycine max
  unsure (1)..(352): unsure at all n locations
agcttgtgcaaatcaaatcactcctacatctcatctctagcatgcattttctttctttacccactcctcacgtntggttttttagggaaaacaccataactaaacgcgccgcaagggatccctatcgcaccagatccaaatctagaacgatgggtgatcaagaggagacgcatgaacagatgaaagccgacatgtcggctctgaaagaacaaatggcctccatgatggaggccatgttaagtatgaagcagctcatagagaagaacgcggccaccgccgccgctgtcagttcggctgccgaagcagacccgactcccttggcaactacgcaccatcctccctcaaacatagt

SEQ ID NO: 39086 - DNA, 401 bp, Glycine max
tcttatccaagacaattcttggtggtgttactccttcttccttggcttattccctagtggatggtgcctcccctctcctcttctcctttgccttccgctgcatctccatggagaaaaatcaccattgaaggacctcattggagctcaaagatccagcctccatagaatcttcacaagcaagcttccatcatttggagcttcgaccagggacgtgtctgtcctacgttttttcaaggctcgctaaggacaaaccttgagtttagcaagccttagtaaagtagacatagaaaattataaaggctaagggaggtagaattttattcaatgtaatcaattgagtacaaattcactttgtttccctatatgtgcctcgttcaaacctctcaagctaaaatcctaat

SEQ ID NO: 39087 - DNA, 173 bp, Glycine max
tacagggggtccataatcaggtcaaccctggcaacgttatattacccatggagctgggtatcttcggccacatgatcatgatttctggctgggacaaataagcggtcaactaccatattctaaggaacgatcgttttagaaaggaactgtctaggattccaactctcttgaaa

SEQ ID NO: 39088 - DNA, 453 bp, Glycine max
  unsure (1)..(453): unsure at all n locations
ctgaccatntttatacttgtaanctggatcccacagccaccgagctgcagctattcaggatatgaaaatttattgaatgccccaaaacaccggtcctttttaactatgcattacgtaccatgtggaattattgagtaacaaaatgaaatgggttgatgatcgcaacacggttggctcgtggtgcctaccacatcaaattgagaatgtaatgtgaagcttgacgctatccccttccatgttgttgttttgtataagaaaaacgccggatgaacaaacatcaattcaaaatggatgcagttttgcaaataatatcggttgctgacccttatgcatgattatgccctgactcatgcctaatgtgatgttgaatatgacaactgcccactcaaaatatgtccatgtgatgtgagaatagaggcatagcgatcctctcttgattgcattaccgacccn

SEQ ID NO: 39089 - DNA, 421 bp, Glycine max
catttactacagacctcctcaaccatagttgttatttcaaccacagcagaacaattatgacctctccagcaacagatacaatcccggatggaggaatcaccctaatctcagatggtctagccctcaacaacaacaacagcagcctgctccttcctttcaaaatgatgctggcctaagcaagccatacattcctccaccaatccaacaacagcaacagccccagaaacaacaaacagttgaggctcctccgcaaccttccctcgaagaacttgtgaggcaaatgactatgcataacatgtagtttcaacaagagaacatagcctccattcagagcttaactcgccagatgggacaattggctacacaattaaatcaacaacagtcccagaattctgacaagttgccttctcaatttgtcctg

SEQ ID NO: 39090 - DNA, 409 bp, Glycine max
  unsure (1)..(409): unsure at all n locations
cttattcatggaaaatgtaantangtgtattgatatgcccgaagaaacaccgggtgctattaaaccatgcattacgtaccatgttcaattatattgtttatacatgaaatgggattatgatccctacatggttggctcgtggcgcctatacacatgatactaacaatgtaccgtgatatttaacgctatctcctactttgtattcgttatggacaggataacacatggatgatcatacattattacaagaggtatgcaattttgcagatcaaaaagtttgttgaacgcatatgcatgatgatgccatgactcatgctaaatgtgatgctgatatatgataactgacaaatgctggatatgtccattatgatgttatgaagagatgctcatgctatgcatgatatgaatg

SEQ ID NO: 39091 - DNA, 237 bp, Glycine max
aaaatgatgctagactaagcaagccatacattccttcaccaatccaacaacaacgacagccccataaacaacaaacagttgaagctccttcacaaccttccctcgaagaactagtgaggcaaatgactatgcagaacatgtagtgccaactagagaacaaagcctccattcagagcttaactcgccagatgggacaattggctacacaattaatataacaacagtcccagaattctg

SEQ ID NO: 39092 - DNA, 457 bp, Glycine max
  unsure (1)..(457): unsure at all n locations
atgacccctntttgatctcttgacgnacgggatctcagagnccgctgcagcatgcagccngttcnngtagnancccattaatattttttccaccancaaggagagcggtttcttattaatccctaccacaacgccgtctttctgatgaactaaggagaaaaaaaaaacatggacggtgcaaacaatataaatgtggcatgactgcatgagcaaaatgatagaataaattaaacaagattgtgttaatagcaaaagaattagagataactcncggccacggatgttccacttttcttcacttaccgatgtaacatctcgtgtgctaaatgtaaaatgaccgatttgagtttattcaaagatactccctccccttaataaaagttttatatttgactgctattacctatcttatgatgggttgttacctataatgactccccctttttattatttctat

SEQ ID NO: 39093 - DNA, 228 bp, Glycine max
tgactcacatacattgctgcaactctctgttgctatccatattgacctatgcattgagtgtactaacgcctagacattgcggactattacatttatagatgcattcctccctggaagggaccaatactagaaccgtgagcatgaggctccaagaatactgggctagagctgctgcataatgccctagggttctcatgaaccttatggtatatttgtgatcccatgggc

SEQ ID NO: 39094 - DNA, 422 bp, Glycine max
  unsure (1)..(422): unsure at all n locations
agctntgataataataaattcaaccttgctctcataagattaaatacagttaggtgtacatttcttttggttaataaaaaaatcaacctaactaatgactaatggttaatattattttaattttaattttcatcattggtagtaaataaaatttaattgattataattaaacgcataagacaaaatgagatacataaaaaataaataacttttaggttaaattattaacgcataatttaaaaaacaataatttgtgtacatattaataaacacaagttgtcatctacactagagtgcctaacatggttatcaaaatcacaatttaactcataaaatcgtacgagtttacgattccgcagtccctccacaagttaaatcaagagtagaatcacaaattgagtagaatcggtagtaaactcagt

SEQ ID NO: 39095 - DNA, 402 bp, Glycine max
  unsure (1)..(402): unsure at all n locations
tgtttggttattntattntttagtttcttgttttcttttcacttaagctagctttgtcaatttgactcttatgccatacaaggagggggttagattagggtaagggatcaaatcaaatgtcgccgactgtgaagaatagtactaggttatgaggcatggcatgatcattcccaacgcacaaggcatcattgtttcctccatggtttgctttctcataaattaaatcaagtccaatctagtaatattattttcttagttattaaactgaatcgctttcacaggagaatgggactccatgcttctgaaggatttccaagactttttttttggtcaggaggaaattgccatcccagttcatactacatatgtgttgctcgttcattactatactcaatttccttt

SEQ ID NO: 39096 - DNA, 423 bp, Glycine max
  unsure (1)..(423): unsure at all n locations
agcttgtgacaacaagaggagggaactancgttgctagagctacactttacccagtacactcatcttatcgccaatagaacctatatcatggatcaagccctaggtatcaacattgtgaccatgcccaaaagagctaacaccccaccaaaggccaactactcataacattgtcggtaccaccacaatcatggccactcaatagagtaatgcaacgccttgaaggacaagataaaagaactcatcaagcttggccacctaaaggagttcatccacaagccaaaatcgtgcatgcccaagggaaggaatagacccaagtctagtcgggggagagaccaagaacatgcagaccggtcaaaaaggtggaggagtcggagccgctcaaggaagagggaaaaaagacccctcaaccaaccaaagcgagt

SEQ ID NO: 39097 - DNA, 441 bp, Glycine max
aaactccgctactccgcataatggggtctctcggaatgaagattatattttctctttgatgacgcatgaacacttatgcctgatccaactacaattcgcacgaaagatcggccaaaatcaacaagtttaaggaatgagattgagtatctcaagaccatctgaacaccgacagagatataatagatgtgaagcagaagagcacaacctgcgtcaatgtccaatgaaatcagaacgtggaagtgattcatttaattgatttatgaatgttagacaagtgacctcagatatataagacaagtaacttgtattgcgcgaagctctcttaaatgtagatagtgtgtgttcttcaatgaaatcgttagcaacattagttatattggaatgtgtccttcaatgtgttattaacattatatattattatattgtgatgtgcaacataaa

SEQ ID NO: 39098 - DNA, 425 bp, Glycine max
  unsure (1)..(425): unsure at all n locations
gagatnngcccgaagaaaacacncnnatttcctatgttannaccatgccattagggggtaccattgttcaatnntattttgtnnttttaagtgggaaatgggtttaatgaatcccaacnnatggttggctttcgtggtggcctannacacatgaaactaagaaatgtnagtggtgaagtttcacgccttccccctttctttgtttttgttttgtagaggaaaacgcaaggatgagcaaacatgaaaacaaatggtatgcaattttgcagatcaaaaagtttgttgaacgcatatgcatgatgatgccatgactcatgcaaaatgtgaggctgaaatatgataacggacaaatgcaggatatgtccattatgatgttatgaagagatgcttatgcgatgcatgatatgaatgcattttacggacac

SEQ ID NO: 39099 - DNA, 422 bp, Glycine max
  unsure (1)..(422): unsure at all n locations
tatgctgcanacatttacaacagacctcctcaacctttcagcaaaatcaaccacagcagaacaattatgacctctccagcaacagatacaatcccggatggaggaatcaccctaatctcagatggtctagccctcaacaacaacaacagcagcctgctccttcctttcaaaatgatgctggcctaagcaagccatacattcctccaccaatccaacaacagcaacagccccagaaacaacaaacagttgaggctcctccgcaaccttccctcgaagaacttgtgaggcaaatgactatgcagaacatgtagtttcaacaagagaacagagcctccattcagagcttaactcgccagatgggacaattggctacacaattaaatcaacaacagtcccagaattctgacaagttgccttctcaa

SEQ ID NO: 39100 - DNA, 418 bp, Glycine max
agcttgttcctcataagccatttatctttgagactgatccagttgctcaggaggaagcaacaactcaggagcctacttctccagttcatatctcttcagcacccattcctgaggattcccagccatcagcaccagccatggagccagagcagcccattcttcaggatgtaccagcttctccagtgctaaatttaaatgaagattagccatagaatgagtaggatgtttaatttttttttttgtttaaatttctgaaaattttgaacaatttagttattagttatttatttgctttaaattttagtcatttaaattctagttattttagtgttgattgcctgtacaaaaagcttgtttgaacaatgaaatgattgaatcatgtttctgtggtttgtttgatatgaaatgagtgtttgtg

SEQ ID NO: 39101 - DNA, 356 bp, Glycine max
tggactcatgagttgtaagttgaggtctaagtggattggtccttttgttgttactaatgtttttccttatggtacagttgagatcaaaagtgactccacaaacaagagcttcaaggtcaatggacaccgacttaagccattcctcacaaacccttctttagtggacgtagtggtggaagagacttccttactccaccctactcttcctctaccatgacttagggagtttttctttcctatctccttctttacttttattacatttgtccgattctatttgatggtttaattgcttttaatcttttaattgtgccacattgaggacaatgtgttgtttaagtgtggggggggggggg

SEQ ID NO: 39102 - DNA, 342 bp, Glycine max
  unsure (1)..(342): unsure at all n locations
agcttgacaggttcaggcgcaggtgcttctactggtggaggcacttaaatttggttgccaaacctcaaggtgatggcactcacatttttcagattctgcacagtttgtgaaggcaatttgttagaatttttggattgagcttggtttaactgagtagccatttgccccatctgatttgttagactttgaatggaggctcttgtctcttgctgaaattgcatattctggatggtcatttgcctcactaactcttctaangaaggttaaggagaggcctcagttgcttgttgtctttgttgttgttgctgttgtattggaggaggaacatatggcttgcttgga

SEQ ID NO: 39103 - DNA, 436 bp, Glycine max
tcaggctgctcaattgctccaggttgctgcatggtatgtcaaaggtctgtatggtggtcagcagagaagcacaaaccacaaacccttgcgacaggtacaaatttctgattcaaggccagcttggttaccaagttaaccaatgcatccagtttgccttcaagcttcttagtctcagatgttccagctgagtttgtagctacctcatgcactcctctaatgactatggcatcatttctggcgctaaactgctgggagttggaagccatcttctcaattaaatttatggcttcagtaggagtcatgtctccaagggctccaccactggcagcatctatcatacttctctccatattactgagtccttcataaaaatattggagaagaagctgctccgaaatctgatggtgagggcaactggcacatagttttttaaatc

SEQ ID NO: 39104 - DNA, 406 bp, Glycine max
  unsure (1)..(406): unsure at all n locations
agcttctggtgggacttcttgacttgctttccaatctgacattcaccacagattctgccttcttctattttcagattgggaatgcctctaacagcacctttgtcaatgattttcttcatgcctcttaagtgcagatgtccaaatctttgatgccatattctgacttcatcttctttggaggatagacatgtggaggagtaactggtttcttgaggtgtccataggtaacagttgtcctttgatctgctgcccttcattagaacttcactcttctcatttgtcacaaagcattctgactntgtgaagtttacattgaatccttcatcacacaactgactgatgctgatncaagttgcagtcagtcccttcaccaacagtactttgtccagactangaagtccatcat

SEQ ID NO: 39105 - DNA, 430 bp, Glycine max
tcaacctttagtgcccgtttctgccccttatcgtgttatgagagcatttttggagtcgtgaagtgcgtggctacgagtgggacttcgaaatttcacgtttgggtggacttctttctctcttaaatttcgtgggtatggggttttgggagatatgatgggtggttttgttagttttctgctgtgcgaagattatttgtgaaggcatttgctgaaaaattgttgaaattgccatgtttggatgagttatacatacccattctgttttagggttttgtgatgatgtttgtgatgttgtaggctgaaaaattgctgatggaaaactgttagagacgaatggtagaactaacctacggttagaaagtgagaatgtgatgttatgagtggaaaaagagcgagactctgacagttggaacgctaactctgaattctg

SEQ ID NO: 39106 - DNA, 413 bp, Glycine max
  unsure (1)..(413): unsure at all n locations
agcttgtaggattatgtgtgtacccatcacatgtggtactaggtggcggtcgggcgatggtgcacaacaagttttccacatccacagtgcgcgcataaacccaccatcccctgttgcccacctccaactgagctcacgtactcccacgtagccgatatcctcgtttctctcaacaccgggtccccatcaatcctcccaagcttccacaacatccaagcaaaacaacattcaaacagcacaagctatcacagccaagcaaaacagagcaaaggcagaaaactctgccaaaacaccaaccaaaatcacagcttttctcacttaaagacccccagtaacaattccttcgttccaattcgttaaccgttggatcgactcgaaaattntactggaagtctctagtacataagcctaca

SEQ ID NO: 39107 - DNA, 431 bp, Glycine max
  unsure (1)..(431): unsure at all n locations
tcaacattcaatttcgagcgtctagatatattacattattcaatcaaacatccgagtaaaatgttactgtcgtttaaatttgcttggctctccagcattaaatttcgagcgtctcgatatattacgggactatatcagacatccgagtaaaaagttgttgtcgtttgaatttgcttagagattcaacattcatcttcgagtgtctcgttatattacggngctcaattagacatccgagtaaaaagttattgtcgttggaattggctttgagcttcaatattcaattacgagggtctcgatatattacgggactcaatcagacatccgagtaaaaagttattgtcgtttgaatnttctcatagcttcatcanttcaatttgagcgtctctatatattacangactcaataagatatccgactagaaaagtat

SEQ ID NO: 39108 - DNA, 549 bp, Glycine max
  unsure (1)..(549): unsure at all n locations
ccaccaacacccncctccnncttccnnacgnngctaggatccactccctcatagacagcccnnccanncnacgctgagcatgatacgtcgagaacanggaacnaanaaacnccacggcnacanagcaangacnaaaangagatagcangtttatttcaagaagccccgngancaccacgcctagaatataacgcaaccgggaagcacaaggcggctgaaaaccactttccctataccccaggactagaaccccatttttctgaaaaactatactcagctcatccccaaacataataacatatgcacgctcaatttcaggcagccaaggtccctgctaaagaagatgcatacgaagaaaagaaggaggcaaaccgacaatctcacctggtacatgccctctgccccatgctgaataaaacgtctggctaacacagcaaccaactgcaaantaacctacgaaagagtatccggaaaacgcatgacaatatggtgggcaacaactccaatttgaacaagaggcccaagaagcttataaccataccaccagcc

SEQ ID NO: 39109 - DNA, 340 bp, Glycine max
  unsure (1)..(340): unsure at all n locations
taacgcggttcaactgctccacggagcagcatggaatggtatatgtgcgnagggcaggcagcagagaaactcataccactaacactcgcgacgggcacacatgcctgattctaggcgaacgcggataccgacgataaccaacgcaagcaatacgccttccatcatgacaacctcagaagctccaactctatgtgagctacctcatgcactcctctaatgactatggcatcatttctggcgctcaacgcgcggaagcagaagaacgccttactcaataaaagcatagcttccgaaggagtcatgtctccaaaggctccaccactggcagcatctatcatac

SEQ ID NO: 39110 - DNA, 397 bp, Glycine max
  unsure (1)..(397): unsure at all n locations
cgccagctntgagtggcattgtatttccaatagttgccatgcatctccagccattggtagaattggatggtcatacataccatcaagttcatataccctgatgctcatcataccaggccatccagtatctccatctcgagtttctgtatctggattaatatcacgaatggatgtatttgaagtctgcaatgctgtacatccccgcagcacagccaattcaaccatattcttccttttattataggaaaaccccatccttagcaacagcaagtaactcatcagaatacatgagcagaaagaattccaaaaatgagataaatagtaatgagtaaatccttattttataccttaggacaggacatccacaagaaccaacccaccgagganagaaatcttt

SEQ ID NO: 39111 - DNA, 434 bp, Glycine max
tctagcatatgcatgtacttatttgagaaagtatgattacttcaggaagccctgtgattatcatgcctagaatataatgcaactgggaagcaatggttggctgattactactttccctattccccaggacttgaaccccatttttctgaaaaactattctcagcttatccctaatcataattttatatttatgcttaatttcaggcagctaaggtccctgttaaagagtatgcatatgatgaaaagaaggtggcaaacgtacaatctcacctggtacatgcccttttccccatgcttaattaaacttttgtttaatatagtaaccaactgcaaattatcttacgaaggattatctggataattcaggagaatttggtggtcaacaatttctatttgaacaagatggcaaaagaagcttatagatcatacatatt

SEQ ID NO: 39112 - DNA, 422 bp, Glycine max
  unsure (1)..(422): unsure at all n locations
agcttaattaggtatttagatgatgtatttagagtcatgtacaatcaggagcctgtgagtatggatattacgtcatgcattggatatggtgcatagtcagtggcggtttgaagaatgaatggaacaaggtatgcatactattacaataagtaaggactttgatggtatcaaatcctacctcaatggttgatgtaggtaaccaatttcatttttaaaaacttttagtggttttcagatggaacaccattagacaatgacaccatgacgacacttcgcaagaaatgggcagcctattttctagaagttccaaagatggatgttacacaaatttagatgacataagcacattaatgtttgcaactaaacattnttcattgtttttgtgtgatgaataattattgtcagcacatttagttgaacat

SEQ ID NO: 39113 - DNA, 437 bp, Glycine max
  unsure (1)..(437): unsure at all n locations
tagttcatacatgttcaatcttttaggcacgagtcattgataattctattctcatgcaacttttgagtaatattattagaagagttagagttaaacacaaatgataagaggttaactaacatatatgatagattcaactaccttattcatagcatgaatacaaatttttattatatggtgtgtctaaatttaaaacaatagtaaaagttaacatgtgcatcatacacttatcaaatcatttgttattattattttttgtagtttttaatttttaatgaaagtttggatgtataatgaaatttaatcaaatgtaaccacttagttactaatgtaaccttaatgttacgaataattaaccaataaatacaatttgtgtgattcccttagtatagataaaattatttactcaaataacataacacnaaatttggtcacac

SEQ ID NO: 39114 - DNA, 424 bp, Glycine max
agcttcaagaaaaagatggcctcaacttatttcttatttccagaagggaattctatcaatagacctccaatctttaatggagagggttaccactactggaaaacccgaattcaaatttttatcgaggcaatagatctaaatatctgggaagccatagaaatagggccttatatacccaccacagtagaaagagtttcaatagatggtagttcatcaagtgaaagcataaccatagaaaaacctagagatagatgctctgaagaggatagaaaacgagtacaatacaacctaaaagccaaaaacataataacatctgccctaggaatggatgaatatttcagggtttcaaattgtaagagtgctaatgaaatgtgggacactcttcgattacacatgaaggaactacagatgttaatagatctag

SEQ ID NO: 39115 - DNA, 436 bp, Glycine max
  unsure (1)..(436): unsure at all n locations
nttcgattcattctatgtacccgtagtggtccatattgtgttttgtgcactttttttctcgttttgtttactttttataccccctgttgacgtgcttaagccattttacttaagtcatttctcgcttaacttaaaaataaaataaatttccaccgaacgtttgaattgtactatccattaacttcggttaaaataaattccgaccgttcggtcatgccgtaaccacgttggaaatcaaaaagaggtaaaaaataatataataatcaaaaagatatcttttagtaaaataaagcggaaaatcaagtggacattttctctttgggatttctcattcttaatcgaattgattaataactaaagtgaaactaaaggctaaaaacaattcgcctagtcaagctcgtccataaaaaataggcttttgaagtttgtcatttca

SEQ ID NO: 39116 - DNA, 403 bp, Glycine max
agcttgcagctcataatctctccattgtttgtagcaatgttgttccatttgggaattctactctaaaaatttccatgattgctaaggtacatgcgaatattacaattaatgtaaagatatcatgaagaaaaatataatcatcttcaatagatattactctcttgaactattaaatatataaggagagattcacttgcttcacttcaagagtaaatagttatttttcatttttattatttatttttttaaaaatctaatgattaagattagttacttattaaataataaaaataaaaaataactataaaagaattatctttggaataagtggatctctcctctctttacatataattagcttaattgttagttttgttgtttctcacttttatgtctattacat

SEQ ID NO: 39117 - DNA, 451 bp, Glycine max
  unsure (1)..(451): unsure at all n locations
ggacctataaaactcagcttcacataggagctgcatcatgtgtgatttatagcatcttcatctaagngaggttcttttgcttcctctatctttttattcggtcaattcactttaattccttgttcttcatcttattctccatgtatatccttcattgtcttgtgttttgatgctgtttagagtatattcaaaaaataaaccgattaaatcttagatctacacttgttcttgcatttctatggttcaaattttatatatctactcttgaatcatgtttttgtgttgattttaggttcaatcattttccagtcataatcttcttgtactgaacctttaaatctaaattttattccanaatattgattataaaaaaagcacaaaaatctaagtgtaaatcacttaatctatgttgtcttagagtcatgtntagtcataataattgtcacattat

SEQ ID NO: 39118 - DNA, 354 bp, Glycine max
  unsure (1)..(354): unsure at all n locations
agctntgaacttgaattctttgaattataatgccaatattgctactgaaactgaaattaggagtgtaaatgcgaagggtaaggaagtttcggctttggatagggatgattggaatggtaagtttttcccttgtgatgatgaactttctagcattgattatagtaaggagttaactgtgagtgcttctcctttggtggatgatgagaaggcaaatgggaaacaatggggaaaggactggtggtggagacaggatggaagtggagagttatgtattaaagactacgtaatggagtggatagggagtcagatttgtccatccaacgctgattgngatgatggtaagaacaatgttca

SEQ ID NO: 39119 - DNA, 424 bp, Glycine max
  unsure (1)..(424): unsure at all n locations
nttanagtataaagtctttcgtgataattataagtttaaattccattattgggaacctagcagtcaaaggtccttgtaatgtaatttttccttactatctatttaatgcaatgtcaatttttattgtttctttcatgtgctttattgttattgtgtagtctaatcatccatgcatctgtttagtgattatgcattgagaggtgtttaatttctaaagaactggaaaaggacatctaaacaactcattgctagggatatagtaattttgttgtctatgcatacatcttcaaacttcatgcaatttactgttttatctctgcaaaggaatttaagagaaagaatagataaattagttttttcatcgtgagggatcaaggttgagtatcatagtagacgtggatggaaattggaatattattaaata

SEQ ID NO: 39120 - DNA, 411 bp, Glycine max
agctttcataagtgaaattaggtgctttcatctctcttagagtcttctcacgaggtggaggttgagccatgttctcagtatgaaaattaatagccgaatgctcaaaatcagaatattcagaatcaccagcaacaaaatgctcaaaatgctcatgatgctcaaaatgctcaaaatgatcaggatgcacactatgcctaactaatctatgaaaggttctatctatttcaggatcaaagggttgtaaatcatctagatttcccctagtaatgcactatatgcaacaaataatgtgtttctcaacaagcacctaacaagggggtaaaactacaactatactcaaacaatatccaaattatctgatattttgtgaggaacaccctaaaatcatgaaaatatagcacagaaaatttc

SEQ ID NO: 39121 - DNA, 425 bp, Glycine max
  unsure (1)..(425): unsure at all n locations
acacatacaaactcagctgtactctggcattattaaaaacttatcacttattaagttatgacttttgaaaaaatcttcagaaacaagtcacttgaagaattgtgacttttggaaatgtattttttgaaaatagtcagtggtaatcgattacaattaaggtgcaatcaattacacatcagcagatgtgactcttcattntaaattttgaaaatcttaacgttttaaaacaatggtaatcgattactacattttggtaatcgattaccagagagtaaaactctttggtaatgattttgtgaaaacttcttgtgctactcaatgttttgaagaactttctaatacttatcttgattgagtcttctcttgattcttgaatcttgagtcttgaatcttgattcttgattcttgaatcttgaatcttgaat

SEQ ID NO: 39122 - DNA, 574 bp, Glycine max
  unsure (1)..(574): unsure at all n locations
cacccgctcccccgtctcnctctcagtctncnctnnttcactccccttcgcatnctcactaccgtccaggcccnnccnncacccgaggtganccttgaaaacctgagaccgtcgtacanaccngncgacacnanananannncagcgnntaaagaataaagncctccgcgacaattagatattttatatccactatcgggaacctagcaggcaaagggcctcgacatgtaatcaatccttactatctactcaaagcaaagccaactcttacagccgctgtcatgcgcactacagtcattgagcaatctaatcatccatgcatctgtttagcgaatacgcattgagaggcgtctaatttctaaagaactggaaaaggacatctaaacaactcattgctagggatatagtaactacgttgtctaagcatacaacttcaaacctcatgcaaactactgggctaaccctgcaaaggaatctaagagaaagactagaaaaataactttctcatcctgagggacaaggctgacatcatacgagacgcggatggaaatcggaatataccacacagagaacg

SEQ ID NO: 39123 - DNA, 565 bp, Glycine max
  unsure (1)..(565): unsure at all n locations
tcttcctccacncanncnantnattcannttttatcctacattaatccttctatcncacaaacgccccagccaggcattgancttgatacgtcgaatccngtngaatatanatannccagcgtggnnattactgactaccgagagaatgtttcactatgtcatattaagccaaaagtgcaacaggggctattctaacctaatatcaccacatgaatccaacatcccctgctgaccaactctgactgaactcacatactcgcatataacacataatcacaaatctcacaacaccgggtgcccatcaatcctcttaagcttccacatcatgcacacacaacaactttataacagcacaatctagacacatccaataccaaattagcccccgcagaatactctgataacacaataaccaagaatacaccttttctcacgaaagaaccactataacaatccgctctatccaatagggtacccactagatcgactgcaaaaatttatctggaagtctataatgtattatctaacattttgaccgcagtgcactactaacacacatacccg

SEQ ID NO: 39124 - DNA, 190 bp, Glycine max
tgaggggcacaaaatcaacacaactgcacggaaaatttgaacagcactgtacattaacagcatcagtgctaatcctatacaagtccactattgaacacctagcctcttatacatggacatttgcgctaatgctggatgaaccatttaataaaatgctgagacaaaagttctagctcccatgcactatatc

SEQ ID NO: 39125 - DNA, 115 bp, Glycine max
  unsure (1)..(115): unsure at all n locations
aaaacagaaggaagccccgcgagaagggcgcatatatctttattcacgncgaaancacggttgagatgactccgcgtcattctattatttacaggaccaccacgagcctacctct

SEQ ID NO: 39126 - DNA, 437 bp, Glycine max
  unsure (1)..(437): unsure at all n locations
ngacattaatagtttgaatatatttattacctaaattgttgtaattntatttattacatttacttgacaaattataattttgtttattattatctaagatataccatttaccgaatttcaattttaaatgggtgactacaagttgtataaaattcaccatttccatcatcaaagatttcattttaaatcttgagtaatctttatgaatataaaattatgttttattacttatttacttcactttctagcttcaaagtatctatcagaaaaataatcaagccataaacaaataaacgaatcaagcccaagcttcatatattttaaccaactcaagttgaagttttaaatttgttcagtttaaataaacgagtgaagcttgagtaacccattttcttcacaaggcaaacctaaactatagctcagctaaacttgtttac

SEQ ID NO: 39127 - DNA, 420 bp, Glycine max
  unsure (1)..(420): unsure at all n locations
agcttcctaataatgatgaacgattattaacatgtttcctaatatatattgtcttattttatatatttttaatatcactaataactaatttttaacattctatcattcaaaagtatttttaaagaaataatgaattaactttcaaatattttagtaccatattgtgaaattgtgtctaanatctttatttcatcttctaaatcacaaaattgataataaggttcaaaactaattgttaatcacgataagaatcacccatgagggaaaaaaaacctctataaagttcatttacattaaaataaactcaaagataatacagattatttttaaaagataaattttatattttaaaataaaaaggaggggtctaattaggaatgcaaataagacaagactntacttaaacaaggtctgacttat

SEQ ID NO: 39128 - DNA, 434 bp, Glycine max
  unsure (1)..(434): unsure at all n locations
gtggaattatctcactaaggggagattgcctcgtgtcttcttcttatgtgatatttntaactggttttcttctaacttgattccaaatgctgatattaaaattctgggctaacacatttggtttggtgttactctttggagtatatggaaattgagaaatatgaaagtttttgtggatgtgcagcctagtttgcaagctacttgttgtcaaattcgtaatctagttgatgaaattaaggaaagtaatagaaagaattttccccctaggcatgcatgttttgattataagaaattggatgggcaactccggaggaaggttgggttaaagggatgggtcaattagaatgggtggttactaagtctcatgtggggaagttttcagaaatgagaatgatntatgaattaggtagagttccgaactaaaagataacata

SEQ ID NO: 39129 - DNA, 419 bp, Glycine max
  unsure (1)..(419): unsure at all n locations
agctntaaaaatttactcccaagtattgttcatacttcatacccgggaatgtagtaataccttgttatacttcatttttatcctcatagtaaggggtcagaatgttatatttccatagcaatatgagagtttattttctaactcaattgcaacttccattttcactcttactttttattctaattattttgagttttaaaaaatattcctaagaatattaaaatctaaccgaacatatttttaaatttactcaagaatagcattctaggaaagtattcctatgaatgtcattctgagaatgcaatattattccttgaaacaaatgtcaccatataaactatcttttcctccatccttaaaggttaaagctatatagtaaataatacacaattatgtagagtcaagacttctattgatag

SEQ ID NO: 39130 - DNA, 437 bp, Glycine max
  unsure (1)..(437): unsure at all n locations
tgtagaattatggngtacccatcacatgtggtactatgtggcggtcgggcgatggtgcacaacaagctttccacatccacaatgcgcgcataaacccaccatcccctgttgcccacctccaactgagctcacgtactcccacgtagcccatatcctcgtttctctcaacaccgggtccccatcaatcctctcaagcttccacaacatccaagcaaaacaacattcaaacagcacaagctatcacagccaagcaaaacagagcaaaggcagaaaactctgctcaacacatcaaccaaaatcacagcttttctcacgtaaagaccacagtaacaattccttcgatccaattcgttacccgttggatcgactccaaaattttactggaagtctatagtgtataagcctacattntgaccgttgggatctactagcaaaca

SEQ ID NO: 39131 - DNA, 414 bp, Glycine max
agcttgaagctactttttaaaaagatttaaaaaaaagaaaaccaaattcttcatttaattaagatgatgaacaacttcgttggtttcttcctgcttcttttgatcactgtggccgttgctgaatacgatcatggtcctaaatatcctgaatctgaacacgagaaacatggtccatgcggaaagttcagcacacttagaattttgacgcataaactgcgtcactgtgaaaaggctgcacgagatgtgagggctcctgtttcttcacagtgttgcaaagaccttgtaaatgtcagcatcccttgcctctatgatgtcttctcttccgatgctttcaagaaagttggtgttgatcccaaaatcgcaatcaccattccccatcgttgccatttcgccaagccatagagcacaagttat

SEQ ID NO: 39132 - DNA, 425 bp, Glycine max
  unsure (1)..(425): unsure at all n locations
ctcaagcttgttctccatcttgtactgtgctatcgcttgtactgactttctgttcagtatacttctcttcaactattgcagccttgtcaagaaacctattcattaattaaattaattagtactactctggctactactattaattttaatgaattttaataggtatgttcaacacgtcaactatttcatctattagcgaacacaatattatacactaccctattaataaattaattgacataattttgtcgatggtgtccacattcttaccttttttggtgtacaaagtaacaacgtgattagaaccaaggaacttatccatagtactcaaaatccccaccattaaggcaaccctaatgggttcttgtcaaagaatttacttaattanggtttactctcttttatctanaaaaatattatataat

SEQ ID NO: 39133 - DNA, 404 bp, Glycine max
  unsure (1)..(404): unsure at all n locations
agcttgccacccagctcgcccaggcgttctaggttgcttcctccagaagcaacagccttctggaggaatcttctggagggcccaagtgggcctggttgctatttgcacccccatttttactaaatacaccccccttgcccttttttggtgattcttttttcgtaaagttacggaaacttacggatttcgcaatgatacttgttttctttctgtaatgttacggaaccttgcggattacataatcatccctttttttgacttacggaatgttacggaacctcactaattgtgcaacgatgcttccttttgatttccggtgtgtcacnggaaccttacggatgtgcatcaatactttctttcgggttccggcacatcacggaacttcacaaattgcctaatgatgg

SEQ ID NO: 39134 - DNA, 429 bp, Glycine max
tctgtaagtccgagcttaagcgagacctatggtgatcttaagtgagaaccaaatagttagctactataagttcatgcttaagcgaggccagaggtgcgcttaagcgagataagggattttagccactataagttcacgcttaagcaaggtcaagggtgggcttaagtgggcttaagcgaaaactaacaaaaagagaagtaaagaccacacttaggcatagagtaagtcgcacttaaaagaggttttctatcaagttttattttgtctatctcatttgaattttaatctaattgcttcttgatgtgtatgtaaactttaaattggatgaatgaagttgatatatcttgttattcacatgtaattcatattcatatgattggtgttgattatgggaacttgtggtatggaaaagtcccatgatgtttagat

SEQ ID NO: 39135 - DNA, 372 bp, Glycine max
agctttctattatagtgatgaggtatttaccctaaaggcaaagctggaaagagcccgggtagtcaaagagaagttcaagtccatagccatcaaagtctgaagagagtatgatgaactaatggacgtcaatatggccaccgctgaagccttggaacgaaaaaccaataaggtctgaaaggaagaacacgaccaaaacaaattttgaggggctttatatggcaccaatagtgagctcaaactccgaagaggtgaaaggaatcatcacgggtcataggcatgatctggaatgacgagctaaaggcttgccttatgtcgaaaagaaatatgtctcaacagttaaagtgagactgaaggggatatgtgggccatcat

SEQ ID NO: 39136 - DNA, 308 bp, Glycine max
tcatagttatatgatacgatccacgcaaaagaagtttttgttgcttgggtgttaaagctcattttgttttgaaaaccagttcaccctcttgggttatgagtaccatcttattcttaagcatgtgtcgaggtcatcctatcgtgtacatgcaacttccctcatgatgcaatcctacccccaagggtattggatagaaaactcgtagaggattgagctagagctgctacagaagaccctaggattctcacgaaccttcaggtatatttctgatcccatgggccatggttggggccctattctttgtaata

SEQ ID NO: 39137 - DNA, 242 bp, Glycine max
  unsure (1)..(242): unsure at all n locations
ttaatcatctgcttagacgaattagaatactggtgcaaaggaagagggtgagaatgaaggagaaacccatgctgcgactgtcgttcctaaatagaaaatcccttaccagctcaacanacatcattactcagccaatatcgaaccttctcattccccaccacccaattatccataaaggccatccctaaatcaaccacanagcctgtctaccacacaaccaatgctaaacaccacctttagca

SEQ ID NO: 39138 - DNA, 237 bp, Glycine max
ccgagaacatggatgtcaatgctaatgagtttcaaagtgatagagccatggttccatcaaagagacttcttaaattcaacacccaagaaggtctcttagcccaacaaaagttgctcggtaggaaaattgaaaaggttacactacaaattaccaatcttcctcagcagcccaagcttcaaacaactgcctctactcctatattcaattgtacataaactggtgattacaatgtttata

SEQ ID NO: 39139 - DNA, 602 bp, Glycine max
  unsure (1)..(602): unsure at all n locations
agggacgtgccctganaccattgagacactgtatccattgagtcgacgtgcangcatgcaagctactaaacgtgttaattctcaaagatcagatttgttagtcacatctgtttattggatcgagtggcctcagaataattaagaaggtggttgaagtaattattcctaaacctttactaatataaaaacttactgttgtaacgctattacttatgttgttagagaataacgagtacaacagaaacttagcaganagtccaagcagagattaagtgcacagcggaaactatacgagtccggaagaatgagacaaacacacaagagtttntatactggttcggcaacaacccgtgccaacatccagtccccaagcgacctgcggtccttgagaattctttcaaccttgtannaaatcttttacaagcaaagatccacaacggatgtgcnctcctttgtctctttgacctagtgagtgtacctcactagaactatcacagagatgtacctctctttgtccagtcacacccagtaatgtacctctactgtacacaangatgtacctcaatgtgtatacaagatgtaggccgtataccttatacttg

SEQ ID NO: 39140 - DNA, 279 bp, Glycine max
tatttcgcatagatcatatatgcaaatttcatattaatctaaaatcatttgtcacctcattcatatagattaaaattgacgtagtataaacattgtaaaatatggataatttgattatctttatgttgatgttcaattgtgacgcaatttaacacaaatgatcttagaaagatatagatataattcaacgattggattaataaaaatcatattatatattaagttataaaaatgatgtaatgattaaagaaaaatttaacaaatgagatgacatcagta

SEQ ID NO: 39141 - DNA, 258 bp, Glycine max
  unsure (1)..(258): unsure at all n locations
atagtaattnttgaatctgggcccttctagaggtttctgggaaatttcttgcttaaggttgaagtaacctagctcgcctgggcgagctaggtggccaccacaccccccgttttgttgaanaatgggattccagggctttcgggacacccgtaatgcttccgtanaattcccattactctaaataagcataattaatttaatacgggtgagacggaagagaaagaaagaagaaaatcaagtcctatatgcttccataac

SEQ ID NO: 39142 - DNA, 438 bp, Glycine max
  unsure (1)..(438): unsure at all n locations
ctacccgtatggcttgcctccggacnttcgctcccgtgccgcctcataagatntaagccaagcccctaccttcgaggggcaactcccaccttatgacgactatcccgtgcaagacgatgaggaaggagatacccacctcggccccctgctccacctcaaagatccgtccccccatgaactaccccaacgaaacatagtccgccatgtcccggcttcacccgcacccgtaaaagaatctgttcccttcgcggaagataaaggaaagattgaggcgattgaagagaggttaagagcagtcgagggcctcggcaattacccgttcttggatttagtggacttatgtctcgtacccaatattgtcattcctcccaagttcaaagtaccggactttgataagtacaaaggaacgacatgtccgaaagggcatcttcggatgta

SEQ ID NO: 39143 - DNA, 238 bp, Glycine max
tgtatctcgcaatctctcttatttaaaaaaaattcttttaaaggatatcacagtaatttaagacatgagaaccttttaagaatatataaaaaaacaaactttttctctctccgtgcctgcagagaatccctcccctctcatctcttgttcatccgacttcgagcaaggagtattttgtttccttggcacacctcctgaaacaaaaacctccaacttgtgtctaccatcacttaatccc

SEQ ID NO: 39144 - DNA, 461 bp, Glycine max
  unsure (1)..(461): unsure at all n locations
gctttgaattcctcacctatatcctttgaacatttcatggatgcaatcctttatggaaaagatcaagacattaccctagaagaagtcaagacctcaataaggaccaaggagatgcaaaaatagcaagactccaaatccgaggataatggtgaaagcctgaatatttcacggtggaggagtaaaaagaagggaccaagaggaaagaagtccatatcaaggtcaagggattcaaagaatggccagaaaacaaagttcaaatgcttcaattgtcacaaaactagtcatttcaaaaaggacttcccaaacaagactaanaagggatctatggactctgctgacatagttgaagcctctgaaggttatgagagtgcaggtgttttaatagcatcaaataccanaacacaaatagaatggattatggattctggatgctcatatcacagcagcccgagaaatgacta

SEQ ID NO: 39145 - DNA, 380 bp, Glycine max
  unsure (1)..(380): unsure at all n locations
agtcacctgcggcatgcaagcttggcatgagagcagaatgctgtggttttatagttcttggatgttcctanaatgggagggttataaattaagataaaaaattgagaaagtggaaatagttaatttaaggggtgaaatgagagaactacagataaaatgagattgtgcatgttgttgttgcgagcgatgacttggagcctggagacggcgtcctcattgacgacagcgtcggcgaccttgatgggatgatacttttctacccatggaacgttgtangcattgcttgatgatgacaatgacatgcttctgccaacggtgaacaaagggtttcaagtttcagaccagagcggagaataaacgttctaaagcccacaccctat

SEQ ID NO: 39146 - DNA, 468 bp, Glycine max
  unsure (1)..(468): unsure at all n locations
ctgtacagttgtgaatcatgccgtaagtatgtaaaagtagtttatctctgttttcttctataactacacaagtaatgccaagattaatgtgtgtgatttgcataaaaaatgggaaataaggtcagtcattaaaagaaatgcctaaactagtggaggagactgcagtgactaaagagagcacacggctctacggacttgcaattgcaatatatcagcctccttataattatatttttctaatatgattccaggttgcaagaattcttcattgagtaacctcattgagtagctatatatgcatatagctacattgttgacattnttggcaagaatacatcttggtacctctaagctaatcaacatacaaacaagagctagaagagaanaaaccatttttcacatagcctagaatgatanggnggtcatatagccctacattanatatcagtcccttaatactatatcata

SEQ ID NO: 39147 - DNA, 578 bp, Glycine max
  unsure (1)..(578): unsure at all n locations
ggccgcgtttgaacatgagnatgaatncttgagaaccgngatgcttgagtcacctgcngctgcagcttcngatggaattgttacatacaactgttattgngagctattgngtaataacttcagttgtcaagttcggtctgctaggttttatcatatcttgtntatgataagaactgacngnggaaagacatatagtatgggtgatagggaagagacccttactccacttttatgcttgtttacccgtgcagtgaataggtgtacaaaggaaacaatccataaccgaactttcgttggaggcaattgtttaataacatctccatttccaagttngattgctctatattttttactctctcgtcaataaagattccaatggttatagtactggaaatatacttgctactcttgtgatgatgcatcatatattatatcatgtgtcccttagtcttactggttgcacactcggtcttttacgtcacaatgacaggaagtgctgcccacctttatagagagcttcanctcctatgtcagctaggaaatgctctttgcttgagaattgccagtattttttcttn

SEQ ID NO: 39148 - DNA, 262 bp, Glycine max
  unsure (1)..(262): unsure at all n locations
cttatattccaataattcaatgatatcctctttcattctcacgtanataacacaataatattgtcgactaagtaagagagcaacaataaaataagaatataattaaatgaacatatattctttctttcanattaaggatattaatgtttttttgtgtgctgaatttaatgttttcttgattattatgcagaaccttataatcaatgactgtaacttgaaagggaaattatatttgtataatatttgtatataaatttttata

SEQ ID NO: 39149 - DNA, 264 bp, Glycine max
  unsure (1)..(264): unsure at all n locations
tatgaaaggggtttttcaaaactgagtagcacattggattttctcaaaacatgtntaccaanacagttttactctctggtaatcgattaccagattgttgtaatcgattactagtagcaaaatgtttttgaaaaagttttcaactgaatntacaacgttccaattgatttcaaaaagctgtaatcgattacaatgttntggtaatcgattaccagtgcctttgaacgttgaaattcanattcnaaagtgaagagtcacattctt

SEQ ID NO: 39150 - DNA, 298 bp, Glycine max
  unsure (1)..(298): unsure at all n locations
gagcgggagaaaacaaaaagagaaaatttccaatcgaagagcaggagaaaacaaaaagagaaaattcccaatcgaagagtaggagaaagcaaaaaaaggaaagaaaattcctgatcaaagatcggaagaaaacagaagaaacaagcagaaaggtctttggaccagacaatatctgaacaatacaaaattgtcacaanaaaagaaaggaaaccacgacctanagtggccctctccctttgattaccaaccaaaatcctgtgtgtcagcgactntttcgccccgcactanacaaaaacag

SEQ ID NO: 39151 - DNA, 304 bp, Glycine max
  unsure (1)..(304): unsure at all n locations
accactactggaaaacccgaatgccaaatttcattgaagcaatagacttaaacatttgngaagccatagaagttggaccttatgtacccaccatggtggctagaaatacaacaatagagaaacctanagaagagtggtttgaagaagaaagaagattagtgcagtacaatttataggctaaaaacattattatntctgccctacgaatggatgaatattntanggtttcaaattgtaagagtgctacggatatgtgggacactctacaagttacacatgaaggaacaactgatgtcaatgcaat

SEQ ID NO: 39152 - DNA, 341 bp, Glycine max
  unsure (1)..(341): unsure at all n locations
tccatgagtggggatcttatgaccgcccttcatgtacttgtctctgtttcattatttttaatagatattggtttactggcagatgaatgatagtcttcatggtaccaacataattacgcttatgagattctattgtgatgcttttgcaaaccattgcatttaaaaagactaacacattatgattagcttaatgataaagagtatcagtactatactcacagttttatattcaaatcttattgttgctatttataaataaaaaatgctatacttgntatgtanacgcagcacattatataataatntactctttctttctactanacaacatatggacatga

SEQ ID NO: 39153 - DNA, 202 bp, Glycine max
  unsure (1)..(202): unsure at all n locations
atgatgtgttgttcacagtgatcgaccaattanttaaaccaggttcatggtccaactatatagtcccctgcaacctctcatagcagcacattagctntgtatcgaaattcgaccaatatttgtcttctcctgtgatgatggaggacgagcataanaagttggattctttgcctgaattcggattatcagagccagagaaata

SEQ ID NO: 39154 - DNA, 307 bp, Glycine max
  unsure (1)..(307): unsure at all n locations
cgtcgctacgagattnttctcaatattttatctcacaggttagtttggtatcttaattgttatgcgtgtacatttatttcttgcagattaatgcctcttttatacccactacttttttttgtgtcattcttcttaaaactagtctggcatccaatcaaatacataacaattttgtacacctcagagctatcacttgttattgtcttatccattatggtttgaaatactgtctgcagatactggacacaaatccccagttatttttccatcttcaacagcaacgattgatagaactcatccggaatgg

SEQ ID NO: 39155 - DNA, 348 bp, Glycine max
  unsure (1)..(348): unsure at all n locations
agcttgaccaaccctattctatggatngactcttattaatacataatcaccatccacgatatccaggtctttcctcttcttatcctgataactcttctgcctactctgagcagttctcatcctctcttgaatcaacttaaccttcttagtggtttgttgtaccacttcagatcctaaggtgaggttctctccaagttctagccagcacaagggtgtcctacaccttctaccatacagaacttcataaggagccatgccaatggtagaatgaanactattgttataggtgaactctatcaacgacaaaagctctcccaatttccttttttgtttaatacataagctctc

SEQ ID NO: 39156 - DNA, 413 bp, Glycine max
  unsure (1)..(413): unsure at all n locations
tgaaggaaacaccactgtcgttgtgtattatggatccatcttgataaataaaatctaatgtggagttcacaactgtctgactgcttgtctctcccaagaatgtcatagttttttgtaagagttgggttacgactgagacttgtggttttttacagtattaagctgtgtcatatatatagatgagttttaatatcagtgctgcatttctttaagattaaaaatacgcatgcacatgctttttgtatgtgttgtcaactacaccaatgacgtgacattctttatcttgcatcagatctgcatgtgtagtcatgttgtgcaaagtcctttcacgcgctntcatgtaatgcagacaacaatatatcatacacattntctcacaatgtgttgtcaactcagactactatatcatacat

SEQ ID NO: 39157 - DNA, 393 bp, Glycine max
taaatctttctattagaggaatcgattttaaaaaattagctgacaataggaataaatatgtactttaaagaacactaaaaactagaacagatatattgacctcaattatactgacttatgatttttttagtattaaatatcattcttctcaataagttaatgatcttaaataataaaatcaaggctaaccgggttaacctgtcctcactcatacgtaggcagggtggtagatgggcggagcaggctaccgaattctgtattttgtaaataaattatctaatatagataatatatatgatagattattaatttcatataagtaacatacaatatataattttttttcgtgataacaatgaaaacaattgaccgacatatatctttactaaataa

SEQ ID NO: 39158 - DNA, 342 bp, Glycine max
  unsure (1)..(342): unsure at all n locations
cttcgagatgttattctgatcatatgatactttcacgttgctcatttctgctatatggctgagtttacttctaatatataattaaaattaatactcccattaattgattaaaataatcatcaattacagattggtcagtttaggtaaagattattanagaattggcagttgttaccaaattatcaatggatggcaccctaatcctcatgagtaactgctgacgatttatatccattataaatgcaatagtttttttttaagaacataaatacaataatttagtcatctgggtacaggctaatttgcaacaacttcactttcgcttaaatactttttatggga

SEQ ID NO: 39159 - DNA, 311 bp, Glycine max
  unsure (1)..(311): unsure at all n locations
caatatgatcctattatatcttattagagagatagaggaagaacgagtatggaggtaatttcactgatacaaaaatgtgcattgttcgctaggtctgaccgcctgaatattatcacatgataaaggataagtgaatagtaatcattgttctttctgaaggattatgactcaacaatcctaaaagatctgtataattataacctgatctaataaaagagagtaatatgtcatcaatctttaaaataattntaatttgcgtgagcctcaattaaaacatatgatatcgttctcgtagactttaaacgtataca

SEQ ID NO: 39160 - DNA, 630 bp, Glycine max
  unsure (1)..(630): unsure at all n locations
aggggnctatgaaatgatagctattgaganttgagatncnctagagacacctgacaagcattganactncgacacgcatgtgaacctttggcatcatcttanacattcagnctngattactntgncnacaagttgtttgcctgccatgctacatgctntgngatgattaaaaaatatagtgccattatctatgctgttacatataccacacacttgctagcgctcgtgaatacaacactatatgttttgagtgattatggttcggactaattactctctgtttttctgcttcatcggaatttctctagtaatatgaatatagatgaatcataaatcatgaatagagaggtatcccanaactagcacacacatgcatgttatgattacgaactattacttcgttttagcattcaccaaacacataacttacaacccaatatgtgaaccaaacagaagagtagagaacacaagttgccgatagaanacaaacnannacaccacattatgagcaatacaagatctcattgcatatttttgtcatcatttgggtctacaaaaantaattgttcaacatgtaacttgctgacttttacactctctaaagaagaatggtttctttatattgcaaag

SEQ ID NO: 39161 - DNA, 331 bp, Glycine max
  unsure (1)..(331): unsure at all n locations
gagaggagacaccacttcactgagaagatgagactagaagaagctcaccaccataggaggccatggataagagcttggaagaagaaggagatgaatgaagggagaggaagagaagagcacgtaattntgtgctctaaaagagctctgacatctgaagtttaatattcaaaagatcaaagttgagaaaatgcacacacatggcctttatttatagcctaagtgtcacacaatattggagggaaatttgaatttctattcacatgtcacttgaatttgagattgagtctgttgagccatattttggagccaaaatttcactaattatgattag

SEQ ID NO: 39162 - DNA, 162 bp, Glycine max
  unsure (1)..(162): unsure at all n locations
ttctttacccactcctcacgttgggtggttagggaanaacaccataactaaacgcgccacaaggcatccctatcgcaccagatccaaatctagaacgatgggtgatcaagaggagacacangaacagatgaaagccgacatatcggctctgaaagaacaaat

SEQ ID NO: 39163 - DNA, 250 bp, Glycine max
  unsure (1)..(250): unsure at all n locations
gcttctgtgttaatttcgagcgtctcgatatattacgagactctatctgacatgcgagtcttaagttatngcggntngaatntgatacgagcctccgttatcaatttggagcgtctgaatatattacgggactcaatcagaaaatctgacttgaaagttattgcggttttaattgctagtggcatctgttctaaacttcgagcatctcgatacattgtgggactcaatcggacatccatgtaaaaagtta

SEQ ID NO: 39164 - DNA, 153 bp, Glycine max
  unsure (1)..(153): unsure at all n locations
gtcttgggatgaatatcttcctcatgtagaatttgcctacaacaggngggttcataanaccaccaagcaatccccttttgggttatctatgggttcaatcctctaacacccttagacctaattcccctcccacttgacacttcttttatacat

SEQ ID NO: 39165 - DNA, 386 bp, Glycine max
  unsure (1)..(386): unsure at all n locations
agagaccgctattgctgttggattacacacgtgttcccacttataagtaaaggatgagtttatcacaatttgggttataatgaatatgtgtaggaatccttagaggatcaaattgnggtctattttggaatgtttatgattataagtttgcctttatgattataatcccgagattgttatgtttgatggaccaatttgacttcctaatgcaaattggttgataaaattgagtgctcttggtgtttttgtgttttttaacttatgattatgtgaaattgtttgagaggttntactctccatgttctgagaaacatttntatataatttatttgtgttntgaataatatttaatagattagtgtgatagattgtatactgggatcatg

SEQ ID NO: 39166 - DNA, 333 bp, Glycine max
  unsure (1)..(333): unsure at all n locations
gcctaattcgtctaagagctcgtcaatgttgggtatcgganaccgttcacgcaccgtgagtgcatttaaagctctgtagtccatgcaaaagtgccatgaaccatcctgcttgcgaactangagcacagacaagaagggtcctttctagagcattgattcaacctgcgattcaatctcatgtttctggtaatgtggataacgatagggccgtacgttgactggcgcancttgcggcangaggtggatgtggtggtctgtttcgcgggccggtggcagtgaagaaggtggctgaaataatgcacganaatgatcaattaaagattggatacgtgg

SEQ ID NO: 39167 - DNA, 465 bp, Glycine max
  unsure (1)..(465): unsure at all n locations
gctccaggttgctgcatggaagggcaatggtctgtatggnggttagcagaggagcacaaaccacaaacccttgcgactggtacagatttctgattcaaggccagctgggttaccaagttgaccaatgcatccagtttgccttcaagcttcttagtttcagatgatgcagatgggtttgtagctacctcatacactcctctaatgactatggcatcatttctggcgctaaactgctgggagttggaggccatcttctcaattaaatttctggcttcagcaggagtcgtgtctccaagggctccaccactggcagcatctatcataattctctccatattactgagtccttcattaaaatattggagaagaagctgttctgaaatctgatggtgggggcaactggcacatagtttcttanatctcttccagactcattcngctctctccactgagtgctaatacctg

SEQ ID NO: 39168 - DNA, 406 bp, Glycine max
  unsure (1)..(406): unsure at all n locations
gtcactcncgcattntatctctagcatgcattgtatgttggtctcgtcctttgtcacgggaagccggaaggtccatatcaccttcttaattgtacacatggngcactgcgcccccaaatgcgcaagtaagaagagataattttccgggctctcgtgtccgtaaaatgcattcatatcataagcatctcttcataacatcataatggacatatcctgcatttgtccgttatcatattccagcctcacattntgcatgagtcatggcatcatcgtgcatatgcgttcaacaaactttttggtctgcanaattgcataccatttgttntcatgtttgctcatccttgcgttntcctctacaaaacaaaaacaagaaagggggaagcgtgaaacttcacactacattctt

SEQ ID NO: 39169 - DNA, 466 bp, Glycine max
  unsure (1)..(466): unsure at all n locations
ctgctataccctcctttgcatgactcgagccaccatcaaagaggtatcagacatactcgattgtatcttatgagactccacataagcattgttcacaatttccaatgcctataatgacatttctagtgactcctccactacttcaacataaggagtataagacagatgactagctagtatgtcctcctcgcctgatactataacaagctaacccctcaccacaaatttcaatttttgatgcaaagactatgggaccaccccagtagaatggatccaggggtgacctaacaaacaattataagcaggagttatatctatgacttggaaggtgatttgaaacgtgcacgagccaatctgaatcangagatcaatttcccctctcacatcacgccaactatcatcgaaggctctaaccaccatagagctttgcctcatgtatgaagcatttaatgacaacttgtctaat

SEQ ID NO: 39170 - DNA, 123 bp, Glycine max
gaaaaaacttttctccctaagacagactcccattcactctgggaaccagaacaaaacctgactcgaaaataacgttctttagatataccacacagcaggtgatagagtcttaccataaaagac

SEQ ID NO: 39171 - DNA, 488 bp, Glycine max
  unsure (1)..(488): unsure at all n locations
cattgcctaacaagccaacttacaatctgcttgcccaagagattcatcatattgatgcacaggtcaaagttgagtatgtgaaaagattgtatgaccatgtgaaggtgcaaattgcacagaagaatganagttatactaagcaagccaacaagaaaaggaaggaagtggtacttgaccctggtgatgatcctggacattttatggcaaatgttttccaagaaagagggaatgatgagaatcctganattggcaaatacangctaaaggcccaagtggagaaggacgaaagctcaagtgtagaaggacanaagccccgagtggagaagatgaaagncanangcnagacattataagactattattgttgctgaaggccaaactatttgaggctcaagtaataaagtttattataattatgtaattggcccaactgtaaaggcatgtctatttatcttaattaccacaccataagatggtttggttgaaan

SEQ ID NO: 39172 - DNA, 507 bp, Glycine max
  unsure (1)..(507): unsure at all n locations
atgtttgtctttntangagatgttcccaaggaagctngcctcanagagatccgggaaggacaaagcggctgaaggaaccagttccgctcccgaatatgacagccatcattnttggagcgctgagcaccagcagcgcttcgaggccatcaaaggatggtcattcctccgggaaagacgcgtncagctcanggacgacgagtatactgacttccaggaagagatagttcgccggcggtgggcatcgctggttacccccatggccaaattcgacccagatatagtccctcgactttatgccaatgcttggtctacagaggaaggtgtgcgagatatgcgatcttgngtaaggggtcagtggatcccttttatgcngatgccctcaccagntcctgggatacccatantgctggangagggcangaatgcnagtatggccnaagaagaaccagctgattgatttatgangaagcantgctcanntgtgtgttaccgngcangacttgcttg

SEQ ID NO: 39173 - DNA, 385 bp, Glycine max
  unsure (1)..(385): unsure at all n locations
aaactgatgacctganatgtacatgagacgctcttagcactcgctcacttatgaatttgggatgnngttccagacggcacttgtggctggtatccaatccgccaaagtatgtgccttttatgtgaggatgcaacttctgatctagatagcacctctttaacatgttgcgctataaacatggggatttttgaataacatgctatgctgccgaacttatgtgactcnagtaatcaatgggaatcgactaaaaaagctgcttttcaatggagacctactgctctcccaaaatgtatcatactatcggcctgcttgcctattgacatatgttagatgagcagaatcaggcatcaaatggtgtacaatcccctctggacaccctttgaac

SEQ ID NO: 39174 - DNA, 304 bp, Glycine max
  unsure (1)..(304): unsure at all n locations
aagaatatctcgataatgagtgtcatcatgaaaaagggggagaatatggatcaagcangttttgataatgttgaaaagaatntgcttgataatgagtgtcatcataaaaaaaagggagaatgtggatcatgcttattttaatgatgtcgaanagagatcacttgattgtcgtcatcaaaaagggggagaatgtgaatgtatgatgattntgatgatgctaaagaagaatcaaacaaggctgctacatttgcttcaagattaatacaagattgcttcaacaaacaaagccttgattcaagatttc

SEQ ID NO: 39175 - DNA, 401 bp, Glycine max
agcttgtctcagcgtttatgcgagacagagaccttcatgtcagccatcgtctgatagtaccaagaagaattatatctagccacggcccacgaacacaaagtggcgaacgagtatgcccgagtgcatgtggaaaaggaggatagaggaagggtgatcgactcgttacattgagaggcaacaatgtggatggaccgatttgctcttactttgaatgggagtcaagaacttccccgattgctagccaaggccaaagcaatggcaaacacctactccgccctcgaggagatccacagacttctaagctattgtcagcatatgatagacttaatggcccatgtaattagaaacagctaggaagtttgtattgcactcagatcttgactagttataaactttctgaa

SEQ ID NO: 39176 - DNA, 446 bp, Glycine max
  unsure (1)..(446): unsure at all n locations
gcttctgatgatgaaccannacaatttgatgatgccaaaagccctagtgattgattcaagattgattcaagacttcaagatcaagcatcaagaatccaatccaagattcaagattcaagagaagaaatcaagaagcaacaagtcaagacttcatttaggataagtattaaaagaatttttcaaaaaccaaatagcacagttttgttttacaaaagaatnttctctaattntctaagtcaccagagtgattagtctctggtagtcgattaccagttatcagtaatcgattaccagtgactagtttggttttcaaaatgttttcaaatgatttataacgttccanaatgattntcanatagtgtaatcgattacactatattagtaatcgattacaagtgaatctgaatggtgaattcanatctaatgtgaagagtcacacttttcat

SEQ ID NO: 39177 - DNA, 450 bp, Glycine max
  unsure (1)..(450): unsure at all n locations
atctctgagtcacctgcggcattgcaagcttaaaccaatntttaaaagtcaaaaacctttttaagagttacatcttttgatttattcagaatcaacactggtaatcgattaccaaattagtgtaatcgattacacaaagctnttgtgtgaaaggatgtgactcttcatatttgaatttgaatttcaacgttcanaggcactggtaatcaattaccaaaatattgtaatcgattacaactttttgaaaataattggaacattgtaaattcaatttgaaaactntntcaaaacaattttgctactggtaatcgattaccagagagtaaaaactctttggtaagggttntgtcaaaactcatgtgctattcaaagttntgaaaactttntaatacttatcttgatngagtcttttcttcattcttgaatcttgagtcttgaatcttgatctgg

SEQ ID NO: 39178 - DNA, 446 bp, Glycine max
  unsure (1)..(446): unsure at all n locations
gaccttgaatactcagctgttacacatcgttcgcgtgtatgatatccactcgacantgtttacagtagaggagaccttctatcctataacgcaacgtggcgaacaaaagtgggcagttaacttgaatgaccattattgtcaatgcggacagtattctgcgcttcactatccatgttcacacattattgcagcttatggttacgtgagcatgaactactaccattatatatatgttattcacacaaatgaacacatcttaaaagcttactccgcacaatggtggcctcttgagaatgaagcgacaattccttcttctgatgacgcatggacacttatccatgacccaactacaattcgtgcgataggtcgaccataatcaacaaggataaggaatgagatggattggctcgaaccatctgagcaccgacacaaatgtaatagatgtg

SEQ ID NO: 39179 - DNA, 495 bp, Glycine max
  unsure (1)..(495): unsure at all n locations
ntagtcanacagaataatttcgaanatgccaaagtattgggtgttgaanaagcataacatgaccggngtgtgcaccgatgatatatgatttacgctggtagacctatagaaacttgggtaccacaatgaccctcttatcatggccaaaccagcctgacaagtgttttacgtggtaaaccttgcgatggaaaggtggcgcggttttccgggccaacaattgggttaatgtgtagaatatgaagattcatacgtggacccctgtgttagccctgtgaccgctcaaatcactcgtaacgttgtcggagaagaagaagttgacgatgttcatgctaatcgaaatgatcatgatgaagggagaatcgataacatcgtctaatgtaatttctgcgagacagaggcaccatagcaagtagtgacatctacattntctctgatgaggcatcngtnnttgtttagatggtatctaggactcatcaactcatgttgcgccagtag

SEQ ID NO: 39180 - DNA, 490 bp, Glycine max
  unsure (1)..(490): unsure at all n locations
aagttttactaacgatgatgaacggacgaagaacaacaaagaatgttcacgaaattggtcacataagcgttacagaagtgcctcagccttgattntctccttctttcttcttctcctcactaattttaagtgaaatcttaataacaagggtgccgaacgccttcccttagtcccccacgtccatttatagaanaaataggggaggaggttgccaaccagctcgcccaggcgagctggaagcttcctccagaagcaacctactcgcccaggcgagctggttacttcatttcgaagcttcctaatgggcctagatgggcctangcctgaagagcaccccctanattgatcttttcaccctcattntgagttgttgctaattttccttccgaaatgtcgtgaatcttacggatcgcgcgaaaattgctctaagcaactcaatgtgatcagcanaaaccacatgtccacaacaattgtctcgacaaaatatggg

SEQ ID NO: 39181 - DNA, 375 bp, Glycine max
  unsure (1)..(375): unsure at all n locations
tctagaggaagctacatgaagctgcctcagtattcacgctgttcatccttcgttaaccggtggatcttctccaactttggccagcagcttaacatgacaattgtccacgatctgnaccgtgggatctatgatcatatgtctggagtgtgctcgaagcttccgttcccgagagctnttcttatttaagcacttcagcctttgcttttgtgtagcttaagaaaaacgtcatttcttcttctttctttcttccaaagccatttctaaagttccaagcactttcttcatcactcgcagccaccattagccaccacataccatcgttgttctccattgaaaccccacaccgagaggaacccttcaaccgaagcggaatct

SEQ ID NO: 39182 - DNA, 288 bp, Glycine max
  unsure (1)..(288): unsure at all n locations
agaattggatggtttacataccatcaagttcatataccctgatgctcatcataccaggccatccagtatctccatctcgagtttctgtatctggattaatatcaagaatggatgtatntgaagtctgcaatgctgtacatacccgcagcacagccaattcaaccatattcttccttttattataggagaaccccatccttagcaacagcaagtaactcatcataatacatgagcagaaagaattccgaaaatgaaatanatagtaatgagtaaatccttattttatac

SEQ ID NO: 39183 - DNA, 339 bp, Glycine max
  unsure (1)..(339): unsure at all n locations
gtacttattgagaaagtaggattacttcttgaagccctgtgattatcatgcctagaatataatgcaactgggaagcaatggttggctgattactactttccctattccccaggacttgaaccccattnttctgaanaactattctcagcttatccctaatcataattntatatttatgcttaatttcaggcagctaaggtccctgttaaagagtatgcatatgatgaanagaaggtggcaaacgtacaatctcacctggtacatgcncttttccccatgcttaattaaacttttggttaatatagtaaccaacttgcaatatcttacgaaggatatctg

SEQ ID NO: 39184 - DNA, 202 bp, Glycine max
  unsure (1)..(202): unsure at all n locations
gatttctatgttttgtaatgtaaaagagtttacacacttaacccataaaagcatggtctaggtaaggccatttttttatgacagtatgaaaaaactttttcacaatgccaccccatatagactaattatcctaagagagcccagaaccaaaaccanaacatcagtgttcactggtattaaagttcctctatttcagtttcca

SEQ ID NO: 39185 - DNA, 376 bp, Glycine max
  unsure (1)..(376): unsure at all n locations
tcttctccttcacctttcttctctcattattctcccttctctttntcccatgttgttactcccttgatgagcaaggccaagctcttatagcatggaaaaacagtttaaacatcacttcagatgtgttagcatcatggaacccttcagcctcaagcccatgcaactggtttggggtgtattgcaactcacaaggagaagtgatagagataagcctgaagtcagtgaacttgcaaggctcattgccttcaaattttcaacctctaaggtccttgaagattcttgtcctctcatcaaccaacctcacaggaagtataccanaagagaatggagactatgtagagctcatcattgttgatctcagtggcaattctctctt

SEQ ID NO: 39186 - DNA, 442 bp, Glycine max
  unsure (1)..(442): unsure at all n locations
gcttgtcatccagtcttctaacctctttgaccatgctactaangagagttttagcttcagaatactccttactttccattagaaatgctgcaagccttgcctcaactcgctgcctcagaaaggtatgctnttcagcacgtgtccattgcaccatttctttgcagagtgtaatttgtagatcagtagtccctggtatttttgcaacagaatcaattatgcccctcactatctttgctgtttttgccttangaatcaaggaaaagaagggcctcaactgagtaagaaggctatgcagatcctctgccctatnttgttccctgagatgctcagtgaggtttgtgatggcctgttctttcatgcgcagagcatctggagaagaagaaggataatcaagtacctgataaagaatggagatggactcngatgggtctttgcatccact

SEQ ID NO: 39187 - DNA, 494 bp, Glycine max
  unsure (1)..(494): unsure at all n locations
tatccatcacatgtggtactaggtggcggtcgggcgagggtgctcaacaattctccacatccacaaatcacgtataacccaccatcccctgttgcccacctccaactgagctcacgtactcccacgtagcccttatccccgttcctctcaacgtcgggtccccatcaatcctcccaagcttccacaacatccaggtaattccacatccaatcatcatggactaacaaaaccaagcaaaacagagcataggcagataactctgcccaaaacacaactcanaatcacagcttttcacatacaaataccctagtaacatttccttcattccaattcgctaaccgttggatcgactcgaagatgttactggaagtctctagtacataagtctacattctgaccggtgggatctgctaacaaacatccagaactcattctgtactactctttccacaaccagcatatacatagcattgttctgcacttatgcaaaattc

SEQ ID NO: 39188 - DNA, 276 bp, Glycine max
caacctgaaacccccaattcgctgggttctttcgggaggagcgagtggaaactcatggactttaatggtaagagcgcgaagaataagaaataaaatgaaaaaacttagaatataactaaggtatcacacaggatcataaataaataaatatttatgatattataacaaagctaagaagctgacacactgcaaactaacagatatctcaaaaatgtaaaaatctatagaacaaagtgttgtccaagaaagaaagaaattttcaaaacaccaggtgaa

SEQ ID NO: 39189 - DNA, 190 bp, Glycine max
ctgcagctctaacgcactctactgaactacaattgctacagaaaatttccctggcccaactcctaacttaggggctaccaacctactttacgatacgcccccatttgatggtttttataatctcaagatgctggcgggcttcttctgacgccttgctcaattttgctgcacctctttgtactgaaccctc

SEQ ID NO: 39190 - DNA, 478 bp, Glycine max
  unsure (1)..(478): unsure at all n locations
agttcatattagataagtgatggaatcttgaatttgttatccaataccttttttaaccccatgtgtaagtgttaaagtagtttctgttactactacatgcggactttttagaatcatttcaccaagaagatctatgatcatgagcagcttttgagcgttntggtattgtagagcagagttcatagcttaacttanactcttttgtcgctgaaaagtagattatgtctaaatcagtttggagtcgaaattgaccccaaaccctgaaagggcaaaagaagaacattcctggcagtaattntttcttgtactattgactgtggatgggctataagttagacgtagttgttaaagctntgagcanaagttcatattagataagtggtggaattcttgcannatccattacctttttcccattatctgttcatacttccatatgctgaccttntagaatctatgatcatgattcatgaacacc

SEQ ID NO: 39191 - DNA, 279 bp, Glycine max
  unsure (1)..(279): unsure at all n locations
ttcatataccctgatgctcatcataccangccatccagtatctccatctcgagtttctggatctggattaatatcaagaatggatgtatttgaagtctgcaatgctgtacatccccgcagcacagccaattcaaccatattcttccttntattatatgaagaccccatccttagcaacagcaagtaactcatcagaatacatgagcagaaagaattccaaaaatgaaatacatacgtatgagtaaatccttattttataccttagaacaggacatccac

SEQ ID NO: 39192 - DNA, 377 bp, Glycine max
  unsure (1)..(377): unsure at all n locations
atagtacaagggaccttggtatcaataataataacattagatagcatgataagaacaagtaaagcaaaaatagacaggcctgggcaaaaatttctttagcaccaaactatttgccaatagcggggcagtcaagtcattacttgaaaatagggttataacatcagttattaaggactgtcaacattaaccaatgttgaaagtatcgacgttaaaagtaatatcgttaacatacaaaatcaatgttaacataaaaatgacaacatcagtttttcacagaaccgatgtttcacagtaagaattataaaaaanaaagtcatatatatcttcatatcaacatcggttnttagcaaaaccgatgtaatatatacatgcaacat

SEQ ID NO: 39193 - DNA, 229 bp, Glycine max
  unsure (1)..(229): unsure at all n locations
ccgggtagtcgaagagaagttcaagtccatagtcatcaaagtctgaanagagtatgatgaactaagggacgtcaatatggccaccgctgaagccttggaacgagaaaccaagaaggcctatnaggaagaacacgaccaaagcaaagttttgaggggctttatagggcagcaatagtgagctcaagctccgaagaggtgaaaggaatcatcatgggtcanaggcatgatc

SEQ ID NO: 39194 - DNA, 349 bp, Glycine max
gaagattcctaaagaagttttagcttagctacacattcctctcttatagctaagctcacctccttgagatgagaagctagagcttagctacacacccctataatagttaagctcaccctcacgccaaatatacatgaaaatataaaaaaagtccctactacaaagactactcaaaatgccctgaaatacaaggctaaaaccctatactactagaatggccaaaatacaaggcccataagaaggaaaaacctattctaatatttacaaagataagtgggctcatacttagcccatgggcccaaaatctatcccttggatccctggcctaatttacttggagtcttctcta

SEQ ID NO: 39195 - DNA, 345 bp, Glycine max
  unsure (1)..(345): unsure at all n locations
acaattaaactttgtgcttatcacggtatgatagtgtatcaaatggacataanaagtgtgttcctcaatggacttatcaaggaagaagttgatgtggaacagccccttgggtttgagagttctatatacccttatcatgttntcaaatntaacaaggctttgtatantttanaaatagctccttgagctntgtatganaagctaagttcanttttaattgaaaatggctntataagaggaaaggtagatactactctgtttcacanagattatggtagtcaattcctaatcatccagatatacgtggacgatatcatattcgatgctactaatgactctctgtgt

SEQ ID NO: 39196 - DNA, 347 bp, Glycine max
  unsure (1)..(347): unsure at all n locations
gtctcacgagtgtctcgtgctcatgcaacttttgttagccgtggctatacgagacatcttgccaaacaaagtcaggttaacgataactcgcctgtgctttttcttccatgctatatgtagcaaagtcattgatccagtcatgtntgatgagttggaaaatgaggccgcaattaaactgtgccagttggagatgtattttccctctgctttctttgacatcatgattcacttgattgtgcatctggtcagagaaatcaaatgttgtggtcctgtttatctacggtggatgtacccggttgagcgatacatgaagatcttaanagggtatacaaagaatctatatcatc

SEQ ID NO: 39197 - DNA, 250 bp, Glycine max
atgccccacattatttcgcatgacacaaatgctaaaatgatgaatttggaaatttatgctaaactggtcatgcatgcacctatgcggacgctcaagtgtcaaatatttatggtcatgtgatgctaaggctcaagattcatttcctctattttaaatcaacccaatgtttccaaaacatgttcttttatcaatttgtgcattccttcaagtccctttcgggcgtgtggggagatttcacagcattcaccct

SEQ ID NO: 39198 - DNA, 351 bp, Glycine max
  unsure (1)..(351): unsure at all n locations
atactcagcttgtctggtttaactgatgattttgattgngactttatgattctatttgngcaaaattggatgaaggtaatagtggttttcgaaatctgcactttatgcagaattttgctgttgaaatgtgcagcagaatttttgtatatgtgtagaaaaatgcttgtgtatggatggttgtggaaatggtagtacatatggngttctgaacgtttgctagcagatcccaacggtcaaaatatagatttgtgtactagagactttcagtaaaatttcgagtcgatccaacggttaacgaactggaacgaagaanatgttactggggtatttgaatgtgaaaagctgtgatat

SEQ ID NO: 39199 - DNA, 220 bp, Glycine max
  unsure (1)..(220): unsure at all n locations
cttggatcagcatcatccaatgccttaatagatatctcaagattctgaaagaaaactatgtatgtgaagatttgatagtacagtgaatcggtatctttacacccttttcctcccaagctcatttttaagttatagagaanactgatttaagtttgcctcagtgcctcctgtctggtcagaactatttaatcaattttcatacatcatatggaactcttat

SEQ ID NO: 39200 - DNA, 329 bp, Glycine max
ataagctgtcccgtaatctgtcaccataggctatgctgtaaccccttcatcatgaacttttttgtactatctatcaattctctctctcacacacacacacacatatatatatacatctcccagcaaactaaggctgaggatcctttttgtgtgcatattttcatactcaaacatttcaagttcaacaaagagctaattatatctgtaaaaataaggtagataaaaaagtaaatgtaacaacaaaataaagaaaataaaataaatctcacattatccatgtggagattactacattatctctagataacttccacaaaggcatgatcaca

SEQ ID NO: 39201 - DNA, 489 bp, Glycine max
  unsure (1)..(489): unsure at all n locations
gaattataataaaatgtgattattttttcactgtgggaggagagatntaactgcgggatgcttgcagatacgcccccggaatctactcctcttcttttctgttgcagattgttattcttactttgtcttcattgtttatctaaaatttggcgttaattacttgtgagtgataggttttggggaccagcgtgtacctcttggatgtaattagcaatgatactcagctggtctctgtcttttctttcgctcgatgtgcatgtcaagtatattaaatgaaaaagaacgtacatatataatatatcacaggatagaatgtgatatactatgatattatgtggttacgcgttactatacactacttcttgtcatcagtactacgatcagacttccgttgttgaaataataggaatattaatgatgcttattgtcactatgtctaataatgtgctctatgagtgcttcaatcattgctttctacgaatcgaaatg

SEQ ID NO: 39202 - DNA, 363 bp, Glycine max
  unsure (1)..(363): unsure at all n locations
tcatcccttagaatagcagaactggtcatatgtaactgtcaaaaggaagctgtataaatccttttcattgaattcatgccatatatgttataagaacaaatgttntttttatgattaaccttaagttataatagtactaagaggtcataggtaaatggaacaataccagccagctgggcacatacaagatgttgaccaagcatgatgttacaagtcttaatgaagttctgaactcacaagtttgtttcttctttttaattatgctcccattgtgccaagaaagcattaacagtgacgcanagtggagggcattgtgtgttgatgttgctctcattccattatattgctggttttatacttata

SEQ ID NO: 39203 - DNA, 257 bp, Glycine max
  unsure (1)..(257): unsure at all n locations
ttgtagaacaatatatcccaacacaccanattattggctntctcagcacattgctttgaaaagaggtattccttcttctcccttcttgcatcgtcaataacctcattgaccaccaaggtactatgaagaagatacctatctttcaagaaggtgttgtgcttttgatcaataactccatttaatactttcatcaacctattggcaagtaattttgcaaatattttgtacaagcaactaacaagtgagatgagtctaaa

SEQ ID NO: 39204 - DNA, 350 bp, Glycine max
  unsure (1)..(350): unsure at all n locations
tgagttntagatccatgtaaaanatattgctttagttcctcaagacanaaaanaaaagaagttatatattgacaatagaacacaatatatttctcatttaaaataaaatatttctcttaaaatttactttatgtcttactaatgtgtccgtggtctgtggatagcatgtcattaaccatcactctcgacaacataataattgttattaaaagatacataaataatgtttgattaaaantattttcaatctataaaattatggagcttttantaaaataataattactnntaattggttttgttcctgtctctaaaaaatatgaaaataatgtattttatttatttgaaaa

SEQ ID NO: 39205 - DNA, 423 bp, Glycine max
  unsure (1)..(423): unsure at all n locations
ttttttcactgtgatttgcctatgtacatatatgaacaaaacagtattaaaatatgtggatgaattataatttgtagatatcaaagacccacatgcaacaagtcatactcttaacagctaaacatcattaaaatggagacagccatctgaatctcttacccctgtttccgccattgttgcttagacattgttaaatccacatgtcacctattaattacttaagcttttaatggatttgagtttcaatttgtcgctcattatctttcaagaagtcgtaattactaacacttttgccttcagctgccataaccattttatttcaagtatgtatcattgatgttaattgatananatatctgatgaaacagaagaagttatgaagaacnatcnctctatatatctatttcattttttcttcttctc

SEQ ID NO: 39206 - DNA, 386 bp, Glycine max
  unsure (1)..(386): unsure at all n locations
ccatttaccgaatgtcaattttaaatgggtgactacaagttgtataaaattcaccatttccatcatcaaagatttcattttaaatcttgagtaatctttatgaatataaaattatgttttattacttatttacttcactttctagcttcaaagtatctatcagaaaaataatcaagccataaacaaataaacgaatcaagcccaagcttcatatattntaaccaactcaagttgaagtttaaatttgtccagttaaataaacgagtgaagctgggtaacccattttcttcaaaggcanacctaaactntagctcagctatacttgtgacaccagtgaatgcgggtggagaaaatatggcatgaaccatgctcgacattgacatcaa

SEQ ID NO: 39207 - DNA, 458 bp, Glycine max
  unsure (1)..(458): unsure at all n locations
agtctttttcgtagttgngctgactagttgaagtcctcttctatgttgatgttgtgcatgcaaatggatgagcttattcctttgaggtcagagatttgtcatcctaaggcttggttgttcttctttagtacctccactagtcttttctcttcctctttgcacatcgtgccactaaggatggttgtttctcatacttgtcctctaaaaggaaatatttaaggtgatgaagcatgggctntaattcctatataggttnttctttaatcaaggttcttggatcctgcattttatnttctagcacttcctttaagggaattaggtgctagatgccattctccagctcttcattatgctccggcgtgaggtcttccacnagtgtagtaaaagcataaancanactctaangtgtnggtgtgtgaattgtggagttgatctctattacttgatcatatatcacc

SEQ ID NO: 39208 - DNA, 505 bp, Glycine max
  unsure (1)..(505): unsure at all n locations
tgcgcatatttccttacaaacgttctcttgcacaagacatttctattaaccgaaattaatgcacccatatacaatcaaggcagctgtgttacctagattatttacacgtacttccaaggtgtatttgttacttacatcacacacatctccttggctaaattcacatacatgcatactcaaagcattttggggtaccaaaaattgcacatgtgcacatcttggtatttctaatacctatacatacacaaacttcatgatgaatcttgactatctacacaataaggtgctacatttcatgctcttttcaagttnttgctacctanagccgcatgcaaattcaagtatatnttcctttgctgactaanattgtattcaaattaagaggtatacnatttttggtaatgtatcttcttacataacatgcaacatatntatgtatanttttttgtgagacattttactaccaanaaatatatgtacatatatncaagtattttgctatcat

SEQ ID NO: 39209 - DNA, 457 bp, Glycine max
  unsure (1)..(457): unsure at all n locations
gtgacatctgaactcgatgtatggttttgtctccatgtgggttatctganacatggatgtcttggtggcaagcacattagccatctgattntcctctctaggaatgtggtggaaagagacctcatcaagaactcaatcagtttcttgatgtaagcctgatagggtatcaacttgtgatccctagtttcccattctcccctcagctggcgaattaccaaggctgagtctctgtacactgtaagcaatttgacattaaagtcaattgccacttggattccgagggcacatgcctcatactcagccatattattcgtgcaatcgaagcccaatcgggccgtgaagggaatgcattggtgttttgcactccgagatactacnttgttgtgtggatgcanaatctaccagcaagtgcaccangttgtcaagtanataatttaaacggtgtgaaccaagtatc

SEQ ID NO: 39210 - DNA, 297 bp, Glycine max
atctatgcttaacaaaagatacttataacactacaaaataaccataaattggaagagtttgatacaacttacacaagctttatacacaaaagttagtcgtatttaccggctaacaactcccccaaatttacagttttgcttgtcctcaagcaaatagagaacagctcacttgtcctcaagtgacaataacatgcagtgactatgtacaatggtgtatgaaacaaatgttactgatggcatgataatagaatgaagcattctgtactcatcacttgtctttcacaaaatatgccacta

SEQ ID NO: 39211 - DNA, 354 bp, Glycine max
gcttgacatctcatgtctaagcgaaaatgcaggtcctatcagagttgcatattacgctaagtgcgtgtcctcgcgctaagcctaaatacctctctggaagttgaaattattgaattgggcttagcgcaagaggtggcactaagcgcatgggccttaaactcaaacatcatgttggcaagctaagcgcgccaaacaaaaatgctaaaataaaatagaactgccaatggcagttaccatttacacttcaaagcttttactcccttgtgcttgtgcccacattcgtgcttttgtcattatgttgcctttgcttcaagatattcttgctttcttgctctcatcttgcatttgcatcac

SEQ ID NO: 39212 - DNA, 330 bp, Glycine max
  unsure (1)..(330): unsure at all n locations
acccaattattaatgttctnaagcaggatatgataataaaagtgttcaaaagacaggacaatataatataaatcctgtcatgagtcctatgatgctttagatgggtcatcatatggagcagaaggggcaaaatccatggctgcaacatcatcttcatcctcagagagctccatcaccggtgtcgtcattggggatgcctatagaatagagagctccagcacaggtgtggtcactggtgatgcctgtggagtcgtctctggagtttgcctcgcagtgtcctcatgagtagctaggtcagtctctgggtcagcctctggcatgtctagctct

SEQ ID NO: 39213 - DNA, 337 bp, Glycine max
  unsure (1)..(337): unsure at all n locations
gtatgtactacgtgtcactatgcagatcataaacgatcatccttttcatcaagcacttcacatgaattaatcantttttatctcatacatatagatatatggngaccctgttcaaaggtttctatgcatgggcatcgttattttttaaccattgtggacgatcattctcgctntacatggatttacctaatgcaaacaaaagctgaggctcgaanactcattatcaccttcgttacatatgttcaaacgcaatntaataaaaccattanaatcatacgtagtgataatggtgctgaatttcttatgaatgaattttatgctcanaggggaatcatac

SEQ ID NO: 39214 - DNA, 286 bp, Glycine max
  unsure (1)..(286): unsure at all n locations
ccttatctttttcttgattcttgttggttgaccttgaattattcttgaagcaatgcttaagacccttttcccttttttttaggtattttttgcattcttgatcaaaacacataatgatcatctgtttcgcattgtaaccgccgttcaacactgtaagtcaactagcaaggatcaaaagatcaacaaacgatagtccctagacaaaattagagtatgaaaattgcccctctntacttatcttttattggaaataaaaggaaagtaaagataaggacactaatttcat

SEQ ID NO: 39215 - DNA, 240 bp, Glycine max
  unsure (1)..(240): unsure at all n locations
gagtttaggtgtatatttctcttcatagagtttggccaacgaaactgttntgaggagtgatgtatgtgattgcgcaatgacatccattctgatattaagttttaatcctcccacaaagcaatccaatagagcttcttgtgtaattccttgtactcgattagctaaagccgtgaactgcacgtaatatgactgaactgaaccaatttgagtgagtttaaacaactgagatctangacattc

SEQ ID NO: 39216 - DNA, 386 bp, Glycine max
  unsure (1)..(386): unsure at all n locations
ggaggtgttgctgtatccaatgaatactctgagttctgttcnnttatcaagttggcccttttaacctgtggaacataagagaaacaaacacaaccacagatttttagattttgtaaatctggttcgtaaccaaaccaaccttcaaatggagtttttttgtgcagaactcttgtaggtagtctattcagcaaaaatactgcagtgtttgcagcctccgcctatagctcctttggcaactccttttcatgcagcatacaccttgtcatctccatgatacttctattttttctctcactcacaccattttgttgtggggtgtaaggtacggtgaattggtgctcaatgccaacttcttcacaaaatttatcacaaacatcatttatgta

SEQ ID NO: 39217 - DNA, 345 bp, Glycine max
  unsure (1)..(345): unsure at all n locations
ttttcacgtctttctaaattcaaaatccaagtattatttgatacaagttactttaaccttcactctcctttatagaaagaaagaaaagaagcaactatcacttanagtaatataagacaatatgagataatttctttaagtctttctactaaaaatatgtaataaatgcatttcaaaagaagagcaaattagactcacatctcttaagctaatttctaattatatgtaacacaactctgtntcttattcttgcacgtaacccccttaatcttcagaaacattagactaacacncccttatatattatactagagaaatgttgatcatcccacttcatcttcttac

SEQ ID NO: 39218 - DNA, 348 bp, Glycine max
  unsure (1)..(348): unsure at all n locations
tcactatcacaaaaatgattacaagattgtaacccaccccatatactgtatcactctacaaacccgagtactccactcaatggttataagaaatgataacactctcacacaaagacacttttctctcaacaaagtgactttgtttcacaatctctcttctcacacacactctattcatgtgatgtgtttctcccctaaatctcttctctatttatagtgaagaatgccaccaactattataaataatttctcttggaagttgaaacaaaaacaagtctacaatgcatccattaagctaaggctcatctagtagaatgcaatcttccactttccatntaagccacctaa

SEQ ID NO: 39219 - DNA, 367 bp, Glycine max
  unsure (1)..(367): unsure at all n locations
gcagcttgtccaacctattcttctgtgggagggctattctaggctcatgagtgcgtcttccaaggaaggataacacgtggaatctccaccaacatttatttgaagaanatgttacganaaaccaaaagtgggtctacaaactttaagaataanaggttcgggagttcgttttacgcatggggaaggtattatgaccccatgtatctaccacaagggacaanaacttttaatcaaatgtgcaaaatcatgactttcaattntattctattgttccttttttatcgttcttntaatccttttgtgagtcaacaaagcggngctcttgctcttacgtatcctcaattgcgatgaggaactcacacctaca

SEQ ID NO: 39220 - DNA, 330 bp, Glycine max
  unsure (1)..(330): unsure at all n locations
atcaacatcaaacgttgtctattaagatgcatacatactagtctaacgtcttatagatacacaatattaagctcattgtctttttctctcaggatttacaagatattttgaaagctttttacaacttataaattntgaattcagagacttanaagatgaaaaatgaatttgacaaaaaaaaaatactaataatttcatcgcaacaaaattcacaacaaaggttgtttgagggaattgtcaaacaagtatggaaaggtagaacttgcaaaagtctttgacagtcatcgnttttaaacttttatgttatactttccaaagtcattcattatg

SEQ ID NO: 39221 - DNA, 199 bp, Glycine max
  unsure (1)..(199): unsure at all n locations
cctaattaagataacgtatttagaataagacaatatcttgatgngattataaattggagtctgaatattggattaaataaggaagcttacaatctttatctgttgtatttagaaaatatttctttccatattataaattcaaatggtgcttatacttcttacctatatatcaaatgaaatcaaatttaccctatttatc

SEQ ID NO: 39222 - DNA, 374 bp, Glycine max
  unsure (1)..(374): unsure at all n locations
tcttgcgacgggttttagaagaggattaatatgattccaaattatttatttatggagtgtatacgtgatatggagcaactattntggaatagaaaaaattctttccaaaaaaattattntggattatgatttttttatattatggaatagttattctgaaatacatatatacttctagaacaattaatctgaaatataaaaaattctttttgaaaaaattattttggattgagattttttttatcatagaataactatttcagaatgtatatacatttttggaataactattctgaaataagaaaaaaattctaaaaaacctattctagaatagaatgttttctattatgaaataattattcgagaatatatat

SEQ ID NO: 39223 - DNA, 624 bp, Glycine max
  unsure (1)..(624): unsure at all n locations
aagcacgatcnnatgananncatttgannnattgantancnatcngagnancttgantancntttgaacnacnngcangcgtgcgaacangangaagcagattgctatctgcncaacanatgnatggcgaacgggggtttgttcganaangacgaagaccgaggcagaggagctcacgagagccnacgagcgccaccacaaacacgaataccgcaaagcacgagaactcatnggngcgcaaagaccgcaacgaaaacagacggatagcnanattaatcaatctgcaccagcagactcaatggttggaatagttcatttcaattataccttaacaaccttgcttcagtataactaagcccgcattgattcctttttcttgcatattttagtccttacgtgaagtcaatcaatcttattgcgaattggaaggtcttgtatgagtaacatcatcaatatgttatatatcgctcctctctgaatatacatgaaaaacgcgaatctaattctaacagttcgtttgagtttgcatttcatgagagttgaaagcggtantcacattactcccacacagacataactacggctaaatacatgatctgcatttagtatatacggttgcatccn

SEQ ID NO: 39224 - DNA, 308 bp, Glycine max
  unsure (1)..(308): unsure at all n locations
tcaaacgttgaatgttatttcctaatggaagngggctgtttaactttaatttcagattcagccattttaaattggctattgctacttccaattataaaattttctcgtagttcactatcattgtccgttttttcttcctcatcaatatcgttatacctatagattttagcaatgaatccaatgatatatcctcttacaaattctcgtattctatcaatcttgctacagaaaatatttaatgaaaagagtgaatatatataattcttgacaatataaaacatactagtattcaatattttttattatac

SEQ ID NO: 39225 - DNA, 570 bp, Glycine max
  unsure (1)..(570): unsure at all n locations
agaatgaggatgaacccttgagnnctgaancnttgannattgatacatgtagaccggatcttaagcactgcagctgtttctgccaanaatattatatcaggtgtttattatatcctaatcatcatcttggctatgatatgttactgagtagcggtctcatctgacatgcacaggtttgattaattattttatctgatgatagttaattaaattaccttttcagaggtagtcgtgggtaaattaagttcattttaaataaaaataacaattgaaccaatcaaatttattaatatgtaagcgtaagaattttttttcgtaaactacgaacataacctaatccaatcatggntaaactggtcgntgagttattaagatagaaaatgtaccataacaacatngctctatactatattttatattgaaatatttcgaaattcaatacttatggcccatcgattccttgatttgttgaccgatgatgttattattcagaatgttaaccaactatatagtatatatttgtgaggtcggtatctacgtaatattctatatagatttttanaatatacg

SEQ ID NO: 39226 - DNA, 323 bp, Glycine max
  unsure (1)..(323): unsure at all n locations
ctcatgctctcaccccttatactaatctagtataggtagccagcttgataccaccaatgaaacccacctttaatactatgcctattaagaacttcactctgtctcanaagcaagagaggtacacaaagggcttatgcttctactttgatgagaagtttcacaccagtcattgttgtcaggctaaacaattcttgctcttgttattggacaaggaaccttctgaaggctccccagaatatgcaacttctgtccaagagtctaatgaccttgatccttttacaactctttntganactctctattgaatgagttaaggactacta

SEQ ID NO: 39227 - DNA, 208 bp, Glycine max
ctttctttgtgtagagagttgattaaagaatttcgaagttctcgcattatgccactaagtaatattggtaagaaaacaccaattttatctgttggacaccgcctcatcttcaacactgcgctaatttttacttgaatcttaacaaatccagagtcctctgtttttactggatttctccttatatctaaattcttttttatcaccatta

SEQ ID NO: 39228 - DNA, 276 bp, Glycine max
taaagatgatctcccacacatgttcgttaggccggtaatagaagacgacctcgtctccacccatcagattattgtccgttaagaatctattccaaggatcatccacatattgattatgcatggagatggtccatatgtcaccatcgccactgctatgatgcatggtcatacatggtcttgaagcatcaacaaaatcgacagcctcggaaggcacatctacaggacacaaatgaagtcgcatttctactattgtaatacaaactatgactacttgat

SEQ ID NO: 39229 - DNA, 336 bp, Glycine max
  unsure (1)..(336): unsure at all n locations
agatatttgttttctaaggcggttattacattagaaccgtcttagaaagtctgtcatttctaagacggatctgatataataaccgtcttagaagaatagacattctaagtcggtcatttaagaaccgtcttagaaattagtgtttgacagactttttaaaacggttctgaagtaataatcgtcttagaatgactactttctaagacggttgttacatcagaaccgtcttaganaattcattctttcaacaacgatgttnttaaaaaccgtcgttaattgagaattacttttaataacgttggctataacgatggttaanaactatcataaaaaact

SEQ ID NO: 39230 - DNA, 444 bp, Glycine max
  unsure (1)..(444): unsure at all n locations
tttagatgggtgtgtgtntcttatctctagcttctcaaggaagctttctcaaagaagcttctcaaggaagttttcttaagaaagcttctcaaggaagttttcttaagaaagcttctcaaggaagctacctagtctataaatagaagcatgtgtaacacttgttgtaactntgatgaatgagagtcttgtgagacatacttcagagttccacttctctacctcttttattccttcaatttcgtgctcccccctctctctttctctccctctttcttttcctccattgaagcatcctctccaagcttcttatccaaggctcatcttggttgtgaagctccttcttccatggcttattccttaatggatggcgcctcctctcacctattatcctttgtcttccgctgcatctncatggtggaaaatcaccattaaaggatcccattg

SEQ ID NO: 39231 - DNA, 440 bp, Glycine max
  unsure (1)..(440): unsure at all n locations
gctttaacagagaggaatgtggtagtntactatactagagttgatgagttcaaggtggaactcaagagacgccattgngatgaggagttgaatgactntgtggacggcaatattgatgttgccattgtaaaataattctatgcaaacctctatgaccccgaggacaaatcacctaagcaggtgagggtgagaggtcatctgattaagtttgatgaggatactcttagcacattgtgcatattctagatttgcactcctgaggcctgatccttangagttggctgctaagctntgtatcccangcctttgaagattctgaggaagaacatgaccacgcttactcagacttggagcgttctttccttttctaccctcatccccacttaccacacttctgatgtcactcttgacagagccaaactcatttatggcatcatcat

SEQ ID NO: 39232 - DNA, 443 bp, Glycine max
  unsure (1)..(443): unsure at all n locations
tcctctcttccncacgttgctttcttcttccttcttctcctccattgttgtccattaaagcttcaaaattcctcctcatttctactccaaattgcaaagagaagccattttcggagtcttggagcacacctctacattgtggggcttcaaatttcaggtatgggtggacttcttctcacatgaaattcgtgggtgttgggtttttgggagatatgatgggtagttctactagattattgccttaggatagtcatttgtgaaggaatttgttgaaatcatgttaaacttgacatgtttgatgtgagtaaaattacccatgctgatttanggttatatgatgatgttttgtgatatttgtatgctgaaattgttgatagaaaactggtagagatgatggngagagttaacttanggttaattgtgagaatgatgatgttgtgagt

SEQ ID NO: 39233 - DNA, 450 bp, Glycine max
  unsure (1)..(450): unsure at all n locations
gcttctgttggatcgagtggcctcagaataatttatataggggggttgaattaattattcctagacctttactaattaanaaattactcttctaaggcttttacttatgttgttaagagagtatggagtagaagagaaacttaacagaaagtaaaagcggaaattaaatgcacagcgganagtaaaagagtagggatgaaggaaacaaacacacaagagttnttatactggtttggcaacaacccgtgcctacatccagtccccaagcgacctgcggtccttgagatttctttcaaccttgtaaaaatccatttacaagcaaagatccacaagggatgtaccctcccttgttctctntgaacctagtggatgtaccctccactagaactgatccacaagagatgtaccctctcttgttctcagtcaaacccaagtagatgtaccgtctac

SEQ ID NO: 39234 - DNA, 361 bp, Glycine max
aacatattcgactattgactgtttactgcaacattcaagtgaagtcttcatgtgcatcccatatgggcttcttcctaaagatgatctcccacacatgttcgttaggccggtaatagaagacgacctcgtctccacccatcaaatcattgtccgttaagaatctattccaaggttcatccacatattgattatgcatggagatggtccatatgtcaccaacgccactgctatgttgcatggtcatacatggtcttgaagcatcaacaaaatcgacagcctcggtaggcaacaactacaggacaacaaaggaagtcgcatttcatactaattgaataacaaactatgactacttgatgatatg

SEQ ID NO: 39235 - DNA, 321 bp, Glycine max
gcagaactaagtttccaacacaaactacctactatataatatcctgattaaactgcatgctaaaaatagtttctttattttttttttttggaattctttgtcatttagatagaggtacatgtatcagttagcattgcagattgaagaaagttcagcaagattattatacaggcatcggttattttgttcaggatcagactggcatatattattatactaacatgccatataaggtaacaatagcaagtcatgtatcaatccaaatattcaggttttccaattccctgctcatattaatatatcacaatattgggacaaatg

SEQ ID NO: 39236 - DNA, 404 bp, Glycine max
  unsure (1)..(404): unsure at all n locations
catccctaacagtgaagccatcaacgctccanacctcaaccatgccacccttaacaagagcagtgagcaacccanaacgccaattaatagaagaagaccaaagagccctatggctctctaccttttctggcatcacaaacttcccagatcaccaccacacggcagcaacaaacaaaaccaagccacgctatcaaaaaacgccaaaaccaaattccaacacccaacacaacaacaaagaacaaagttgttattttttatgacaacactccaaaagggtgctctcaaagcacaaaaatataacctttctccagaaagaagacaaaaanaaaattgnggttactcacaagtttggttntaatgtcatgtgagtagtgaaacaaggttgtgaaaacactaactaacta

SEQ ID NO: 39237 - DNA, 410 bp, Glycine max
  unsure (1)..(410): unsure at all n locations
gtgaggagttgtttgttntgcttatccaattatcacctaattagtatcaggcaagaaaccttagagtgaaactgttagaatcccttgaacctatgtgagagttgtgagtcaagtatatcgaagtgaggaagattgtgttgggggaagagacctagatccgaaggtaggtaaatcaagtattctcgagagtcacatgcagactangattggtaaagcgttgaagtctcggaacttatacctcttttcttgaatcatcccatgttcgaaaaagagttggtcatgtggccaattntgtgtccttgtgtttntntgtttggtcgttttagattgtcattagtgtctcctatgatattacccaactccaaatagtatgtcatttacattctattaccgttgagatttcctctcgt

SEQ ID NO: 39238 - DNA, 94 bp, Glycine max
aatgcaaacccatgtgtttgatagggttttcttaattaatatattcttaggaggtttgcaagctcaaagtaagctcatgttggatgctgctact

SEQ ID NO: 39239 - DNA, 147 bp, Glycine max
aaatttagctcttccatgacacctgcatggacagttcctttacctcggggcattttttttactttttatttcttgcccaatattattatttccctatggacgctgtttgcttacattaataacattttggtataattttttttaatt

SEQ ID NO: 39240 - DNA, 99 bp, Glycine max
tctagatgagatagtatctagatgagatcaaatctagataagataagataagataagatctagatgacctaatatctagatgagatcaaatctcaataa

SEQ ID NO: 39241 - DNA, 300 bp, Glycine max
tctgtacctggtgcaagggtctgcggattgtgctcctctgctgaccaccatacagacctttgcccttccatgcagcaacctggagcaattgagcagcctgaagcttatgttgcaaatatttacaatagacctcctcaacctcagcagcagaatcaaccacagcagaacaattatgacctctccagcaacagatacaacccttgatggaggaatcaccctaacctcagatggtccagccctcagcaacaacaacagcagcctgctcttaccatcaaatgctgtggccaagcgaacatacat

SEQ ID NO: 39242 - DNA, 186 bp, Glycine max
tctcttttggttctcatcattgaaagtctataccatgcatgtttacgtttgggttacgcaatattctatttaaattatagaaatacatgcatgcatcttaattttaaaacgcaccttattaaaatagagaattcataagatattatataatgacatacaatctaaggagaacatgcatatatcata

SEQ ID NO: 39243 - DNA, 255 bp, Glycine max
actattgctagagaaaggaattttcttgtatatggaattcgaacactttgtgagagctgatacaaaggggaaatgcgtctttaatgttgttgtgtctaagaacaaaacattcaaggtgagtgtgagcaccatcgaacataagtgcttgactgctcaaagcaatgacaatgtgtggaagtggcatataagactcggacatttgaacttcaacaacctaaacaagttgcagaagaagaacatggttgtgggactacc

SEQ ID NO: 39244 - DNA, 274 bp, Glycine max
  unsure (1)..(274): unsure at all n locations
agtcacctgcngctgcagcttatataagcattcagagacccttctttatattaaatgtactgttgcntattattggcttcttatcaaaatccaatatacaaaataaaaaaattgaacaactaattcaattatgtttatgagctacataacggttatatgctaacataagtttccttaanaaactcgatgaattgaacatgatntgtgagttattataaactttcttatgtatgattntggttcctacagataaagaaaaaatatagatctttat

SEQ ID NO: 39245 - DNA, 320 bp, Glycine max
  unsure (1)..(320): unsure at all n locations
ataattaagcataatcctaaagattgttatgaaaatagtttacacaaatatgaatttaaataacacacagtttagatatactaggttgcctcccaagagcacttctttaacgtctttatccagatgcatggttgtggccgaggcttcgccatctcatcctccataattcttttctttgatcgtgagagaatcccatcatggacttagcacctgtaggcatatgctctaatgccttgaaaaaagaatgttaccatgcaaatgtttaaaattctcatactgcctatcctatctgcccctangtctactcaaggctcacgtgt

SEQ ID NO: 39246 - DNA, 263 bp, Glycine max
  unsure (1)..(263): unsure at all n locations
ttccatcacncttcttcattctccttctttatctttctanaccttcattctttaatcctacttgaacaccattgttatcatcttcattttccatccaaacacattcaaactttgaaccaaataccttacattcaaccctccataaactcgtcactttctctctcattcaataaatttcataaaaaaaaggaaagaanaacctttgaagatccatcttcaacccttgtgcaaatgggtttacatcattntggtattagagctct

SEQ ID NO: 39247 - DNA, 356 bp, Glycine max
  unsure (1)..(356): unsure at all n locations
agtcatcaatagattataaatatgtgaccatggtatgagtttcaacaataattatcatcatcgatcatctatctttcaatcttctctcaacatcattcaatatctttcaattctttctacagaattntctgattctttttctcttcatctttctaaaagttttttatcgacactttntcttcanagaagagttctttgttcaaaaacttgtgttattcatctttttcattctcttctttctttgccaaaagaacgaaggactaaccgcctgaattcttttgtatctctcttctcccttttccaaaagaacgaaggactaaccgcctgaattcttttgtgtctctctttcccctttc

SEQ ID NO: 39248 - DNA, 478 bp, Glycine max
  unsure (1)..(478): unsure at all n locations
tacnatagacctccttaatctcaacaacaaaatcaaccacaacagaacaattatgacctctccagccacaggtacaatctcaggtggaggaatcatcccaaccttatatggtcgaatccttcacaacaacagcagcaacaacaacaacaaccttatttttagaatgctgttggcccaagcagaccatacattccttcaccaatccagcagcaacaacaaccacagcgacaacccagaaacaacaaacaagtgaggctcctccacaaccttcccttgaagaacttgtgaggcanatgactatgcaaaacatgcaggttcaacaagagaccgaagcctcattcagagttaactaatcagatgggaaaatggctacccatttaataacacagtccagattctacagatacctctcatctgtcaaaatccaaatgtgatgcgtacatgagtcggaagcaatcaggactcatcacaactctct

SEQ ID NO: 39249 - DNA, 216 bp, Glycine max
  unsure (1)..(216): unsure at all n locations
ccgggttacttcatcagagctnttgttatctgacccatagtacacaaagccctttgtgttctcctaactcattgaaatccccaaaaccattgatcgaggccatacccgaattaaataaacattaatatgcagtaactaagaagtgatcctaggtcgtttcccaacgagcaatgattaaccaaatgttcataatatgcttcattataacagtaacaa

SEQ ID NO: 39250 - DNA, 367 bp, Glycine max
  unsure (1)..(367): unsure at all n locations
tgatcgattcattgcacagagaagcaatgatgtggatggacaggttcacctttactttgaatgggagtcaagagcttccccgactgctagccaaggccaaggcaatgggagatgagaactcgactcccaaggaggttcacaggctcctcaattattgccaacaaatgattatctgatggcccacataattaggagctactatggcaattgtattgtcgctttgattntgattagataaaccctttttgttccccaataaaatgaggttgatntaatcctgtgtgttaaaactctatgtgaatccaatacttcgacaacttatctttagcatgcatttcatgttagttnttgtcgcgtactcaccaca

SEQ ID NO: 39251 - DNA, 393 bp, Glycine max
  unsure (1)..(393): unsure at all n locations
ttcgagcgtctcgatatgtgatacgactgtatctgaagtctgagtttaaagttttaaccgttagaatttatcagacagctttcgttgttcaattntgagagtctcgacatattatgtgcccgaactcgacatccgtgtgaaatgttatgaccagttgaatttctcgagagcttccgttgttcaatttctagcgtctcgatatattatgcgctcgaatcagacctcctcgtgaaatgttatgaccattagaatttctcgagagcctgcatatttcaatttcgagcctctcggtatattatattaccgaatccggcatccatgtgtaatgttatgaccatatggaatttctcgtggacttccattgttcaacttcgagcgtctcgatatattatg

SEQ ID NO: 39252 - DNA, 462 bp, Glycine max
  unsure (1)..(462): unsure at all n locations
acacccgtctttttaaaatagcacctttgatccacacccaattnttcattntgtctcgctnttaaaccagcttcccttctcggtcgaattacagatgaagcttangtcctcccaccagagggactctctgttgttccttcttgtcacatccaaattcctccatgctccatagttggattccaaaacttgtggccacaattctccttggtgatgaaacaaattccagcacccttttccaagaagtgcatagttgaatttcaccaaatcctcgatgctcaagccacctttntcctttgatagacagattgaaccccagttcacccgtgcaatctttttctgatccgagtgtcctccccacaagaaccaccgctgcagcctcaccaacctatccaccaccttcttcggttaaacaantttctctcacatttcttgactatnggatcccanatctcactatgtctt

SEQ ID NO: 39253 - DNA, 419 bp, Glycine max
gtaacacacatcttctacgaccttggtgatccttgtactgcatctcattgtttcgcatgtgcacttgtgactccaaagtgtcaaacctttcaccaacagaggtttgaagaccatcgaacctgtcctacatcttttgaataatagaggaatcttctccaccatgtagatgtccttcttcatcaatgggatgagcaccctttttcacccaagagccatcatgctctttacggtaaccaaacgatgcaatcacatcagcgcctattagaaaggatctcttgagtggaacataaggttcagaatcaagaggaatgttgaagtgatgaacgaagagggtgactacgtgtggatatggcaatggagcattatatcgcaatgccttatgcatgtgatatcgaactaagtgtgcccaatcaatttgt

SEQ ID NO: 39254 - DNA, 285 bp, Glycine max
  unsure (1)..(285): unsure at all n locations
tgtaccatattttatgtttagttnngattttatgcacagatattcatttcaatgtgaattaatgtgtttacaactctagtttcagatgaaaagatgaagaataagaaggttgttgtggctggtgtctcgctaagtgagacttgtgcgcttagcgagaatcattcgctaagcgaggcactcaacccatntagcgagtcgggagaatctggaggagaatctgtcaagcatctgcgcgcttagcgcgtcatcagctcgctcagtgagtcatttgtcttctatcgcaat

SEQ ID NO: 39255 - DNA, 382 bp, Glycine max
  unsure (1)..(382): unsure at all n locations
ccttcaactntaaattgatagaaatctatctatacaaatatctgaacaacatatggcatatatagaacataaatgagactcctactaaactaaggtactataaggaatcactcccatatgggcagtgtgctcatgaaaaacattaggtaccaaacctttcgtaagtggttcagctagcatatcattagtccttaaatgttttatggaaatctgtctattctgaactctttctttaacaaccaanaacttgatgtcaataaactttgatttggttgcactcctattgttgttggagtaaagaactgttgagttattgtcacaataaatctttaattgtctttcaatgccgtcaaccacacacaaaccagtgacaaaatttctc

SEQ ID NO: 39256 - DNA, 415 bp, Glycine max
  unsure (1)..(415): unsure at all n locations
ctttaaagggaagtggtgtcgcctggtntctttcccgctcttctctttcgtaaaatntcttctcttatgtccacaatcttgtccttgtaaccctggtcaagaacatgacgttatgtaaagaactctaactcactcattggttctcaacaaaaattaaaaattactaagtggtaatcatagtttctattaatctttgcatgacataattgaaggatntaattatatgtactgacagaataaaatntattntatatagtgatcggttgataatataaaaaactttgcactnttntaattaaataataataataacaactaacatataanaattagtcaaaccgcgtaattngacaccatacaataatttctcgcanaaatatgtcacgcatactanggttngttattcttaataact

SEQ ID NO: 39257 - DNA, 381 bp, Glycine max
  unsure (1)..(381): unsure at all n locations
gcttatgctgttcaattgcttaagattgctacacanaaaggcaatggtctgtgtgatggtctgcaaaggagcataaaccacagagtctagcgataggtgcaaattttttattcatggccagttgggttaccaagttaaccaaggcatctagtttaccttcaagcttcttagtttcagatgatgcagatgattttatggctacttcatgcactcctctaatgactatagcatcatttctggcgctaaactgtttggagttggaagccatcttctcaattaaatttctgactntagcaggggtcatgtctccaagggctccaccactggcagcatctatcatatttctctccatgttactgagtccttcataaaaatattgga

SEQ ID NO: 39258 - DNA, 367 bp, Glycine max
  unsure (1)..(367): unsure at all n locations
gaaaaagaggtattccttcttctcccttcttgcatcgtcaataacctcattgaccaccaaggtactatgaagaagatacctatctttcaagaaggtgttttgcttttgatcaataactccatttaatactttcatcaacctattggcaagtaattntgcaaatattttgtacaagcaactaacaagtgagatgagtctaaattccccaaggctntgtgggtcatctacctttgngacaagagcaatgaaagaagcattgctatcccttagaagcacacaattagagtgaaactcaattacaaacttcaaaatatcatcccttaataattttcaaaaagatttagaanattgaagtgtaaccatttga

SEQ ID NO: 39259 - DNA, 449 bp, Glycine max
  unsure (1)..(449): unsure at all n locations
aaaaatatttgttttagttncttatatacaaaaaaataataagttatatattgacaaaagaacacagtatatttctcatttaaaataaaatatttctcttagaatttactttatgtcttactaatgtgtccgtggtctgtggatagcatgtcattaaccatcactctcgacaacataataattgttattaaaagatacataaataatgtttgattaaaatatttttcaatctataaaattatggagctnttataaaattaataattactttaatttgtttttgttcctgtctctaaaaaatatgagaataatggtatttatttattgaanaaagattanaactatagagtgaatagtctacatatacactcataatataaataatttttacactcttatttaatgataaactntcgttcaatcacatnattgttatcgtgtgtatatat

SEQ ID NO: 39260 - DNA, 350 bp, Glycine max
  unsure (1)..(350): unsure at all n locations
atatttttattattcaagcgtagttagtaatcgtggtagttagtaatgattntagttagtaatgatntgagttagtaattatattacttaaattttcaatcaggtaatataattagaattgatatttaattatttgtaattattttagttagtaattatatttaacataaaatataagtgaattcaagacaatattagatagtattatatagatgtatgtaattcttctaagtattatatagtgtaaaaataatctaatgttatattagatagtattagatagatgttatataaatgttacttgttatatatgggagtacgtagatgtgtttaaaacaaagtagataata

SEQ ID NO: 39261 - DNA, 384 bp, Glycine max
  unsure (1)..(384): unsure at all n locations
cgttcaattggatacatccaccgcagaataaccggaccacacaaccgaatttccctcacaagatgaacaatgaggtgaaccatgatgtcaaaaaatgatggtgggaaatacatctctaactgacaaatgacaatggcagcctcattctccaagtcatccaattgatgaggattaatgactntactacatatggcattaaaaagaaagcacaaacgggttatggcaactctaactatgtcaggcaagatgccgcgaatcgcaacaggcaataattgttgcattaagacatggcaatcatgagacttcaagccaaccaacttaagatcattgannggcgacaggctcttgatatttgaagagtatccttgtggaactntgacattc

SEQ ID NO: 39262 - DNA, 400 bp, Glycine max
  unsure (1)..(400): unsure at all n locations
gcttgcacattgctgtttgatagaagaagagctttgatggtaaccttggtacttcgatatcaaacggtacatcgaagacaaggaatacccgtaagaggcctctgacaacgacaatggcagccggttttttcctaagtgggaatatcctgtacaagaggaaccatgatatggttntgcttcgatgtgtgaatgctagagaggctgagcaaatgctggtagaagtgtatgagggctcctttggaacacatgccaatggacatgccatggcctggaagattctaagagtagggtattactggctcattatggaaaatgattgttgcatccatgtgaggaagtgccacaagtgccaggcccttcaccgatatgtcaatgctctgctcgtacctttgaacgtctt

SEQ ID NO: 39263 - DNA, 430 bp, Glycine max
  unsure (1)..(430): unsure at all n locations
ctcagctttctttgagaaataaaggcttgctcttgttnttcacccctggtaaatgtcacattcttcttcaccaactcattgagaggtgatgcaattgtagaanaattangaacgaaccttctatagaagcttgctaacccatggaagctcctaatatctcccacactntttggggtgggccattcttggatggccttgattttctcagggtccaccgggaccccatttctaccaactacaaaccctaagaaaactatattatctacacaaaaggtacacttctctatatttgcatagaaggtgttnttcctaaggactgaaagaactttcctgagatgtcctaagtgatcatctaggctcttattgtacactaaaatatcatcaaaataaacaaccacaaatctacctatgaaatcccttaagacatgat

SEQ ID NO: 39264 - DNA, 502 bp, Glycine max
gagattctctctacagagcgtgaagtatatgaaacgttcaatcctatgacgcaacgctgcggacaacagtacgcacttaaattgaatggtgcttattgccaatgcggaaagtattctgcgcttcactatccatgtgcacacattattgcacctatacatatatgctgtttacacaaatgagcacatcttacaagctcactccgcacaatggatggcatctgtgaatgaaactgctattactacttctaatgacgcatggacacttatacatgaaccaactcgattcgtgcgaaatgtcgccaaagtcaacacgatgaagaatgacaaggatcgcgtctaaccatctgagcaccgacaaatataagtagatgtggagctgatgagcaccacactcgtctacgttcactgcattatgacgtgggaagtgatcagttaatgatgaatgatagcactcactgactcgtatagactaactctctctatgtatcaatagtcgggtcag

SEQ ID NO: 39265 - DNA, 547 bp, Glycine max
  unsure (1)..(547): unsure at all n locations
aggacgcgacctgaaccctganatcggaccctgcaaacggacactatagatactcaagctcgaaggagacactctcttcagtggctctatctntcagaacttgcgctagctgctcggccaacatagcgaggaggagagtccacacgacgccgcgagcacggacgggaacgatccgagcacagaagtagagcgcatcacaagaggcaccgatgatacaggagaaaccaccgaatagngagcatgtattgcatgataaaaatcacatacgtgatatgagacatcaaacacatatcatggcaggagagtcactccgactgcgatcaatgtatatcaacactcaccgttggggagacaccaacgcacacacctcagcacgaggatgcgaataaaagactagcatctattgcggttaccatgcccaataatagtttcacatctttgtgttatagatagacgcatggacacacaatcgccacacaaccttcctaatacatgacactaactgccacggtgaccagacgcacatgacagaatcagcacccttccg

SEQ ID NO: 39266 - DNA, 402 bp, Glycine max
  unsure (1)..(402): unsure at all n locations
atccttagagtcacctgcggcgtgaagcttctccccaattttctatannataggggtgtagtgaagtgaanaagggttcagccccttaggcacttatctctctttcgaatntgcttggagaaattgtttctgtgaagaatatccaagccgatgcgcttctgaaacgttttcgtaacgtttccgtgaggaatttcgcgaaggtttcgaccgttcttcgacgttcttcattcgttcttcatcgttcttcgatcttcaacgggtaaatacctcgaaccaagctattcgattcattctatgtacccgtggtggtccacattgtgtttcgcgtatatctattctcgattcatttactctgtattaccccctttgacgtgcttaagccatcttatataagtcatttct

SEQ ID NO: 39267 - DNA, 400 bp, Glycine max
  unsure (1)..(400): unsure at all n locations
ctttcattcattctatgtacccatggtggtccacatttcgctcatgtatttttatgctcgttttcatttactttatatactcccttttgacgtgcttaagccatttatttaagtcatttctcgcttaatgtaaaaataaaataaatttccaccgatcgtttgaattgtatcatccggtaattatggttaaaatgaattccgaccgttcggtcgtgccgtaaccacgttggaaatcaaaaaaagaggtaaaataaataatataataatcaaaatttcttttagtaaaataaagcgaaagatcaaatcggacgttttctctttgggatttctcattcttaattgaattgactaataactaaagtgaaactaaggctaanatcaactcgcctagtcaagctca

SEQ ID NO: 39268 - DNA, 364 bp, Glycine max
cccagctggcctcgaatcagaaatctgtacctgtcgcaagggtttgtggtttgtgctcctctactgaccaccatacagacctttgcccttccatgcagcaacctggagcaattgagcagcctgaagcttatgctgcaaatatttacaatagacctcctcaacctcagcagcaaaatcaaccacagcagaacaattatgacctctccagcaacagatataaccctggatggaggaatcaccctaacctcagatggtccagccctcagcaacaacagcagcctgctcctttcttcaaaatgctgctggcccagcagccatacattcctgcaccaatcacaacaacaacaccccaaaacagccacag

SEQ ID NO: 39269 - DNA, 281 bp, Glycine max
tgtgctacaagctgagaagataagtttctgtcacatcagctgttattgacttatctaacaaacagttatctgcaacaacaaacttaactaatagacaactgtctaactatatcggaagtctaacagacaactgtctaactatatgggaaattgtctatgttaagatatacatcctcacctttttcctatcgttgttgtgaatttcacaagtcagagttcgaattttctagggtgaatcaaagatagtaaatggccagttgggggttcatcagatttatgtc

SEQ ID NO: 39270 - DNA, 284 bp, Glycine max
  unsure (1)..(284): unsure at all n locations
acacctcagaagtttattagcacaagccagtctagcaaatgacatgtacatgacataacctttcaatttcgtggtcgtgtattatatatgcaaactgtgatggcatgtattcaattcaccctataaaaaacattccagtttctattcatgaaaatgaagtatcatttctatacatatatttaatttaatttaatcaaaatacatggacatttacatcattntttaatcctataggagtagcattatatgttatgcatgacacaactatcgatatatgtattgga

SEQ ID NO: 39271 - DNA, 423 bp, Glycine max
  unsure (1)..(423): unsure at all n locations
ntatgnaaacatatctatgttactntgtacatgtgtataacatcgtatcttanatatatgtcaatgaatgttaacacatcataaattaattntgtgacgatgttttcaacagactacaaccaattagcagtgaatttgaaacaagaaacttcatgttgaattacatctgtattgagtttattctccatgtagtatatttcanacaagaagaaactacaagcaattaaaattgaatttgaattggataagtataattcattgccacacaacagtagtgaataaaactntactttccccccaaaacatggctaaagtattgcatatactgcgttcaaacttcattgtatatgaacattnggtcctatggttataaaactcanattaatagtattgcataagaacatttggtcctattatgaaact

SEQ ID NO: 39272 - DNA, 443 bp, Glycine max
  unsure (1)..(443): unsure at all n locations
gngagtattgattcacgtgagatgtattatggaataaggatgatgcatggaangnttcgttctctcattaagatctagccgacgcgcttctgaatcgtcttcctcacattttcttcgccattgtcgcaaaggatatgatcgcacttttggcggattggttccgtcttcatcgctctgtcatctctatcgggtgtattcctcgcaccatgcgtttcattccttctctggcccgtggttgccacagtgtcgtttcggtgttttactcccgtttctctactgtatgtaccgctcttgcccgcgaggcctgttttattgtggtcgggctatctttgttacattggttttttgtgcttgcgttgtttctcctttgtcgttttggatttctcgccggtctccttctctatgtacgctgattttaccctttttgtgcttattcgccgtcg

SEQ ID NO: 39273 - DNA, 414 bp, Glycine max
  unsure (1)..(414): unsure at all n locations
gataattttacaacggctaacaagttgtgatagatgaggcatttgtattgatggattttagtctaggcatgtgagtgctttaatttatttttttatctttttcatgccttgagcttgattagttatgaagtagatgaagattctttttctctaagtttcttanagaactcacttctacttgaaacatgtcttgcaacattgaattaatcgattgcctcatttggtaatcgactgcccaagtcaatttcagaagaaggaaggttctattagcttaagtaatcgattacctcatttgataatcgattacccaactccagaagacaaagagaagctctttgtctgaatctaaaatcgattaccagacatgataatccattatnccagcagcatagaagggactaatattctgatatt

SEQ ID NO: 39274 - DNA, 386 bp, Glycine max
  unsure (1)..(386): unsure at all n locations
tattctaaagcccgattatagttgtaangcttctatcacatccaagcctaatgcctgcaaaccatgattgtctaatatnntcacggattgagccttcttgagcctattttaacattattatgacctggtcttgtgaggaaaaggcagtgatggttcnaatgttataaatagcttcaatagctattttgctagtttcatcttgggctttgatagcctttntagacatacccttgaggagtacaagtcttgtgtagaaacttgcaatgccaataggttgaacaacaatcaatataatggcanatctccatgcaatgattangcccattgtgcatgctatcaccactgctganatagtttgtaccaacagagccattctatctcccact

SEQ ID NO: 39275 - DNA, 450 bp, Glycine max
  unsure (1)..(450): unsure at all n locations
gtcccacatcctggcttgtctacttattatntagngcaacttatgagcttatgctgcattgcacttangaaactatgtttactatcttagaataaaattatcacgatgtcaacgatttacgctcaattgctcaattgattgagtaatgccagtgaattattgtaaattttttagtatttgagtttgattcttatgaataaagaaaaatagcaatcttgtgtgttatgggctctaattggaanaaattatcttgtttttttatctttaagaatcgaagagagagtttataacaacacatatattcaagtttatatgtatgaatatcatctgttgtggaacattaattagttaaataaatttaagtatctcgaaagattaattctacctcttgggtaagaatactctacatccttcaattggttgttatttgaagtgaaattccatactcct

SEQ ID NO: 39276 - DNA, 338 bp, Glycine max
  unsure (1)..(338): unsure at all n locations
atgcttgttatggagttgtatcaactcanaatggagttgggaagaaatctccatgatcacatcaacaattntaataaattgatatgccaattgttgaatgtagatgaaaaataatttgacgagtagctaatattgttactgttggcttcactgccaaggtcctataaacctttggttcagacactggttgtagggagaagaatgttgaagttggatgaggtgaccgtgactntaagaganaatgagagaatgatgaaagatganaatattaacaatgaaagtcatgcactagcggcgcaatagtctgagtgagggatgaatcattcatggagacaaca

SEQ ID NO: 39277 - DNA, 470 bp, Glycine max
tctggatatccaatcaacttgaagttattgtatcaagtattctttgtagacatgcaatgagaacattacagttttttttattaaccttgcaagttttagagccaatagtggattttggagaaccagtggaaggctcaccagagaatgggttagttggatgatatgtaacacttttgttggctatgatagcttcgaagacatgctttatgtcattggtggtcatgacaacttgtcgaagtgcctcacaatcaacatgggcatatgcctattcgatggaagggaaatgttgcatttggagcacataactgcagatgttgtcaagacgatcatcaagtccatccaagaaagtatacacacgatcatcttgaatcaattgattgaattgttgaatatcagtagtgcatgtccttggattcggtcgtcgaaagtcagtttcatgtcacaaaccttttaactctgtgcaatacttc

SEQ ID NO: 39278 - DNA, 330 bp, Glycine max
  unsure (1)..(330): unsure at all n locations
gcttccagatccgatcatggaaggacttggcatttgccttcattaggctgtaccagtacaatacggatatggctcccgatcggaaccaacttcagagtatgactaagcgagagcatgagtccattaaggaatatgcccaaagatggagagatctcgcagcccaagtcgtatcgcccatgacgganagggagatgatcacaattatggtagataggttacccacgttctactatgaanagatgataggctacatgccagctaactntgcggatctcgtcttcgccggagaaaggattagcccatgaatctcctcggngatcgtacacactt

SEQ ID NO: 39279 - DNA, 344 bp, Glycine max
  unsure (1)..(344): unsure at all n locations
gcttcttgcgtagccgcatcttggtgctcagaaaatccannaaactaatccctcttattactatctatattgaatgctgtagttcctaaatgtacaaccttcaaattgatgctcgttcctctctttgtttcctgcaaaataaaaaaaaaagtacctcagggctaaaagaatctaatcctgagggcttatggtgtttccttggggatttcaatagcattacaagccaggatgaaagaataggttcatctcaaaggagtgtgggcacatttgacagctctggtttcaatgattggatatcaaacatggaaattcacgagattaanagctgtggtagcatatttact

SEQ ID NO: 39280 - DNA, 461 bp, Glycine max
  unsure (1)..(461): unsure at all n locations
agcattgtgataaatctcctagtgatattatatatataatcttcaagttagttctacattagttcctttntattaatgttcataaaataaatttaaagacaaaatttctctatactaatcttaaagatgattcttacaagaattaatatgataacatatatgtaataatgaataattgattaacgttgaatttctctctctcgcgcgcacgaatagaacttanaaaacacattanagacaatatattactcaacatttcttattntaccatgatcattcatttaanaactaataattgcagacacagttagcanagtgaanaactcaggtctctatgatntacgtgaaagctctgtcaaanaaaaaaaaaagattacgtgaaagcatgcaaactcatcaattaatttcttnttattntcatctctannactatactcatcaataatttcttttaatcatca

SEQ ID NO: 39281 - DNA, 309 bp, Glycine max
  unsure (1)..(309): unsure at all n locations
gtctctgtcaggacttctatttgttgngacaacatcttattntgagccatcgttgcatcttgagtgaagtattgaggtataatatgactagagtaatcctctagcgtcatcctctttggacgattntctaccatgatgcgttcttcgaagaaggagtgtgcactgttcacaaaggaaataactaccgtgcacgttatcacagaataaatatattnttttttttttaattnttctttttttaaaaaagaagaaaataaagtaagaatgagtggagaanaataaaataaagcagctcanataaataataat

SEQ ID NO: 39282 - DNA, 338 bp, Glycine max
  unsure (1)..(338): unsure at all n locations
aaaaaacttattttgtttaatgaagaaagggggattttacttaacagaggaggagaanaaaagtcaggagaaaataaaatcttatttagtttggttaaaagagaggagaanaattcatatctagttttaaaaaatttggtgccataggtaaattgagagaataatgtcttcgtaatggttnttttttttttaaagtcatcataatcatttgaatattatttttcttttatttttttgttacaaaatcataaataatccgatcataatcaagatntctttaaaaaaaaattgaacagaaattaaagtagcactatttaatttatcttgtgatataatag

SEQ ID NO: 39283 - DNA, 397 bp, Glycine max
  unsure (1)..(397): unsure at all n locations
gtgaatcataaatttgtttactctttatattttatcaattataaaaaatatatattcaaagagtgttttgaataatgtcttctactagcatatttctcaaaagattcctatatacaatgacataggtgcgttaaaaaatgtattagcaacatttcttttatcatgaaatacaaaatccaatgctttttttccattctatcaggatattatctagtacttatgttataaccagggaatctactactttatttgaagctatttgtggcagcaatgtggctgagaaaaccatacacaaaaagcacgccttggcccctggtcatgcagtgttccatanacaatntgcaggttntgctcttaattacttaattgatgtatgctgtgtgccttgtaaataaag

SEQ ID NO: 39284 - DNA, 425 bp, Glycine max
  unsure (1)..(425): unsure at all n locations
gcttgtagcaagtattctgaagcacatagagttagggaagtacgcacaatctcatttatctgcgaggagtcctccagttcattatctatgctgtgaactgcanataaagtgtgtatgcattgcaatcatcagactatatatccatgaagcanacaggtagatcagtatagctaactgcagtcatgtcatgctcccnccacataactgaaacttttgcaacggtttctaataagcacctgngaaatctgcttaaaatttctatgaccactntaagcaaccaagtataggatccanaatgtatacttccattcatcatgttattaactcgaaatatagtatatgatcaacaggatgaagaaattangagtcgtttggttaagaaaaacatttatgttttcactntgtttcttgtnttctaaattata

SEQ ID NO: 39285 - DNA, 421 bp, Glycine max
  unsure (1)..(421): unsure at all n locations
caactatgcggataanaatatggatacattctatgatccatccttttctccctggctntcaaagtacatttccctgagtgagattccctttccattacctaattacctttgagacaagccaattatttttaaaaaaaattgcatgaacctagctaaaatataatgagtcactgtccaattcanagatatctacacatgggggagtctttgtcaattcctacatattgcaagggcaatatggttattgactctcccaaatcttctgatagacttgcacatcttatgagaaaaagtgaagctganacctctctcaatctactcaaatgtttcaaaagcatcatatctatctacagctgtctagggaattgaagagagagaaaaaccaatatataaactannatcctcttaatgctttgtgtat

SEQ ID NO: 39286 - DNA, 171 bp, Glycine max
  unsure (1)..(171): unsure at all n locations
gccgcactaactgccatagtaatattacgccccgccctgcactcatccacgactggtgtaataatgaggcactgtgccacatacattcgtgccagccgcagatacaccagaagcgcgctgtatgttacacattccccatgcaanattacgccctctggagagtgtgacgcc

SEQ ID NO: 39287 - DNA, 369 bp, Glycine max
  unsure (1)..(369): unsure at all n locations
tggcggtcgggcgatggtgcacaagaagttntccacatccacaaagcgtgcataaacccaccatcccctgttgcccacctccaactgagctcacgtactcccacgtagcccatatcctcgtttctctcaacaccgggtccccatcaatcctcccaagcttccacaacatccaagcaaaacaacattccaacagcacaagctatcacagccaagcaaaacagagcanaggcagaanactctgctcanacaccaaccanaatcacagctnttctcacttaaagaccccagtaacaattccttcgaatcaattcgttaaccgttggatcgactcnntaaatttactggaagtctaaagtacataagcctaca

SEQ ID NO: 39288 - DNA, 304 bp, Glycine max
  unsure (1)..(304): unsure at all n locations
aagctttagaaataatcgattaagtggtgattaattaatcatcaattccaaaacataaggggagtatgaaatgagtgaacgcaatatatcttgcatatacattgcttgtatcttgatttatggaattaaattgtcatcataaaaaagggggagattgtagaagcaaagactttgcctttgatattttgatgatgccatatgatcgtgatgttntaatgccttatgaaaatgtgcttctcaagtttaattcaagacaaaaattcaagaatacaagatacaacatcaagaagatctctagtgtttt

SEQ ID NO: 39289 - DNA, 411 bp, Glycine max
  unsure (1)..(411): unsure at all n locations
ctcacattcactttcttctacatcatattcaaacttgtccaaatnaataataaagtcatctcgactcanagaaagtcatataagtctcatacaattaatatagaacctatatcctaatgtcacatcctatcagagcgtggtgttcccgtgtcctctagcatgaggttcttcatagtcatccacctattcatctgctcccccgaacacaaagttcanatcatcacaggatcgaaacacaaacagcaaaccgggagtgagttatcacattgctaactactagagagaaacaacacaacatatagtaaccaaatacaatttacttagcatatctcacattatttcatcactttgtcattcatcaatcacactnttcatccattaatcacaccttntcatcatcaatcattatac

SEQ ID NO: 39290 - DNA, 360 bp, Glycine max
  unsure (1)..(360): unsure at all n locations
tgttggagatttatttggaatgttatcctgcccatggatagtaaggatcgagccttgggcaaatggtccccaaattgggaaggaccgtttaaaataattcagatctattcgaatggtgcttatgaattagaggaattaacccctcagaaacgtactttgagtataaatggtaaatatttgaaaaaatataaaccaacattgctcgaagttaaaataagcatagaataggaagaaataatggaaacataaaaatggcgataacagtaaaattgccacganagggcatgtgtcaatattacatcgaanagtagaatcgaaatacagaattcgaaataaagaaatcatagttctactaagtca

SEQ ID NO: 39291 - DNA, 328 bp, Glycine max
tgatgtcattctttacacactatgtagacttaaatgaagactaaacatgcatctgttatgtaattgtattcattatgcgatataatttgttgtaacccattactaaccaattaatattatcaagtactcgtttggtaagcaaggaaattgttggtccaacaaaaatcatttacgcgtgcagcatacatcattgtcataattgacaacacataatgacatgcatgcgtattacagtttgagtgcgacaacacattggctgacttgagtacacattctgaaattagcagtcgctcgacacacattgttgctacacattggcgacacacat

SEQ ID NO: 39292 - DNA, 556 bp, Glycine max
  unsure (1)..(556): unsure at all n locations
tgaaacgggantttgaancctttannngtgannccaatgtgagccgtcgcagctacggagaccattgacgagcgtcgcattatattataggactgtgtccgacatacgagttctaggatattgctgactaagcatgccatgtgcatccgtgtaantgtataacgtctcgaatttatgcgctgagagggcatctgatgaaagtatgcctatgattaccgaagactcttgttcattaagcgttcgactatatttgctgaatcgacgtcgaggctgagttatgagcgtctangatttccatgtgcttgcatgtgcaaatatgaacatctggatagattgtgcacctggatcggacatctgagagaaatgatatggcgtatgatgtagccgagaggatacgtgcgttagtttcaagcgactcgatatattattggcctgaatatacatccgacgcaacagaatggccggggaatatccatgcgctccatgataagtgatagatctgtgttactatgcgctgagtcggcatccttagaaagatgcaccattggagttctgg

SEQ ID NO: 39293 - DNA, 572 bp, Glycine max
  unsure (1)..(572): unsure at all n locations
ggctcgtgnnatganncccgttgagnnactganngcgttgaanncatgacaccatcgtagaccgcgacncttgagtcaccngcngcaactatcttatcattatctattgaaacgatcaaagtatcttaatgcaagagngtgtctcaaatatagttgaactgattcacatgtattctagccactaatatttaaaagtgatcggagtaacgggttctcacagagctgcgatagattacctcaattgaacatactagatcgctttctcgagaagaaaactggagaaacnatattgttcaatattctgtctacacgtactctttatctttatatacaatctatttatgtctctgttataaatatgccttcttttattacatcactagatatgtttttaatcctctctgccttcattcatncattcacaccgtttgtatgcctcaacaaccgtacacanatatcttcacctaatagaatatacctattggttgagaaacccattttgcttaacaaaactagttactgcttaaaactgtttctcccaatgttaactataataaaaaaaggcttagttg

SEQ ID NO: 39294 - DNA, 190 bp, Glycine max
  unsure (1)..(190): unsure at all n locations
tcgagagtctctgagcgaagaggtgcctcttggtcgccggctcttctatcatcacccactgcactccgcgctcgggcgtgcaaccctgcgcgtccagcatgccacgtggcgcgcactcctcttncacgtcgtcgtcgtcgtcgtcgtagtattggcactggaccgcggccgacgatccgaacccgcgctc

SEQ ID NO: 39295 - DNA, 452 bp, Glycine max
  unsure (1)..(452): unsure at all n locations
cttttgttatataaagagnatanatctgagtgccggtgccagccaagcgtgcttcaatggcatttgcaaagcaatgggccagcctctgagtcccatcacctagtggagaagcatgttgctttatctgcttcaataactcattagcagatacatgatcatctgaagaaacagcttgtgcgcatagaatcaacaatgtcctcagatccacaactcccttctttgtgccttgtttcttaacacggctcttcccaccaccagacttgtttgttcttctaattacncaggatggccactgtgaagtctgtgaaccatacacgaagagctggtctttctgaccacgtcctacangacctataagcattctgattctcctgtctcatgacacactgatgttgtgctctcctctgtaactgttctctctccgccggatcttctctctactcgagaattcn

SEQ ID NO: 39296 - DNA, 196 bp, Glycine max
  unsure (1)..(196): unsure at all n locations
cgagaaacttgngcacacaattagagacatatatcagcaagtgagtcaaactatgtattgtcgtaccctgatgccctgcatgtgttctctcttgggattctgccttgaactgatggactgagatggatcaatactgccattcacaaataatatatatgagcgtgcttcttcaatggtttgagtcaatgcaagctca

SEQ ID NO: 39297 - DNA, 406 bp, Glycine max
  unsure (1)..(406): unsure at all n locations
agcttctacagaaagcctcttaatgaagcttctatataaagctacatgattctgcctcggtaaagattctgcccagccttctttaatcgttggatcttttcacaatttggtctccaacttcacaagacacttgtccatgatctgaccgttgggatctttgaaaagatgtatggagtatgctagaagtctcttaatgaagcttctggaggaagcctcttaatgaagcttctagagaaaactacatgtagctgcctcggtaaaaacactgcccatccttcgttaaccgttgcatcttctcgaaatttttttgcaacttcacaagacaattntccattaatctaaccgtgggatctttgagaagctatctggagtatgctagaagcttccgttcccgagagcatctctt

SEQ ID NO: 39298 - DNA, 392 bp, Glycine max
ctcctacaacctaagacaaggtagaaggagataaattgcacaggctcaaggttccatcaaacaatcatacttttagctcaaaatgagtgcaagggataattcaatcatgcacaaggtaagctttttagctaagtggctatctttgatccagacatggccttcatcatcttcaatttcatgcattcattccatactcagagattcatgcaaaaatcattactcaatgttagtcgttctctcacaattaaagatcacactctcaccgggttgcggctaatgagttccttcacaataaaactgacaaaacaactaacatttttagtcatgatcctaattccatgttctttctcttttaatgactgcatgctcattcaaggcacatgatctacaca

SEQ ID NO: 39299 - DNA, 303 bp, Glycine max
  unsure (1)..(303): unsure at all n locations
tataatagggtccgtggtaaggccacgctcatcatcatctacaatcaacaaaaatactntagaagcgcatttgtggccacgatgatattnttcatcacaattaaagcaaaggccacgttcgcgacacagggtatctcctcggaggataatcttttaacaggcactgnggttgatggttttaaagggttgagcagcgaggacgaggganaggaaagggtggacgaagaatgagctgaggcatgtggaanaaaattgngagcaggaatggcgttgggacgaccacggaagggccgacgagtgtca

SEQ ID NO: 39300 - DNA, 407 bp, Glycine max
  unsure (1)..(407): unsure at all n locations
gcttgcggatatggtcttcgacggtgaaaggatcgaagcgggtcttataagaggcacatttgatcatcctgctatgatgaatgaganaactagggccaatgaagaggatgagaatgaggaaggaacccatgttgtggctgccattcctacatggccaaacttcccaccatcccaacaatgtcatcgctcagccaatatcagcccttctcattacccatcacccaatcatccacaaaagccatccccaaatcatgccacaaggcatgcctgcttaccacatgcccaatgcccaaacaccacctataacgcataccaaaaaggaattctgcagcaaaaagcctgtaggattcaccccatattccggtgccatatgctaacttgctcccatatctacttgataatgcaat

SEQ ID NO: 39301 - DNA, 301 bp, Glycine max
  unsure (1)..(301): unsure at all n locations
agctgaattgaaactaaagctctgagcanattcatacgacataatttgactcggatgtgctattgtgtcccgtaggatatcgagacgctcgtgattgacaacggaagctctgagaataatcaaacgacaataactcttatctcggatgtccgattgagccatgtaatatatcgaaacgctcgaaattgaaaacgaaacctctatgataagacaaacgacaataacttttgattcggatgtccgattaagtctcgtaatatatcgagacgctcgtaattgagaacagaagctctgagtcccg

SEQ ID NO: 39302 - DNA, 300 bp, Glycine max
  unsure (1)..(300): unsure at all n locations
aagcgtcttgatatattacgggactcattcatacatccgagttattagttattgtcggtngactnttcttagaccttccgttttcaatttcgagcgtctcgatatattacagggatcaataggacatctgagttaaaacttattgtcgtttgatttttctccgagcttccgttatcaattacgagcctctcgatatcctacgggacacaatgggacatccgattcaaaagttattgtcgtctgaattcgctcacagcttcagttttcaattacgagcgtctccatatattactggactca

SEQ ID NO: 39303 - DNA, 324 bp, Glycine max
  unsure (1)..(324): unsure at all n locations
gagcatgatattgcgtctataccgttgactgtttatcaggtatatgagcgggttcaacacctgaacactgtatttgggaagacccacacgaaggataaaagtcagagttgcatatggaagaagaggttcattntctttgatcttccgtactggtgtgatcttgacgttagacattgtattgatgttatgcatgtggagaanaatgtttgtgacagtgtgattgngacgctccttaacattcaaggaaagacgaaagatggcttgaatacccgtcaagatctagctgatatgggtataagatcacagctgcatccaaggtctgat

SEQ ID NO: 39304 - DNA, 308 bp, Glycine max
cccatcaagccttgtaaacaccaatgcatcgttgatttcttctatactgccgcagaccaattgaaatcagcgacaacaaaatcgattaatgcagctacaatcagcactactccaagaggagaacacatcagaactagtgtatatacaagaattccacatattactataaggtggcactgctgtacttgacagcctcaagcagtaaatagaaaccaatatcattgaatggtcacttgaatccttgaagaactctatgaaccaaatccaactatactgattcaatcaatagacactacaacctatggtga

SEQ ID NO: 39305 - DNA, 223 bp, Glycine max
actgtatgcgttggtcaactttgtaacccaactggccttgaatcagaaatctgtacctgtcgcaagggtttgtggtttgtgctcctctgctgaccaccatacagacctttgcccttccatgcagcaacctggagcaattgagcagcctgaaacttatgctgcaaatatttacaatagacctcctcaacctcagcagcaaaatcaaccacaggagagcaattat

SEQ ID NO: 39306 - DNA, 350 bp, Glycine max
  unsure (1)..(350): unsure at all n locations
acattactcttaaagcaaaaatggcatataacctcctcccataaatacaaacatcaatgtaaatntagagcaagcttatgcgcctatttccttacaaacgttctcttgcacaagacatttaaccgaaaaaatgcacccatatacaatcaaggcagtttcgttacctagattatttacacgtacctccaaggtgtatttgttacttacatcacacacatctccttggctaaattcacatacatgcatactcaaagcattntgnggcaccaaaaattgcacctgtgcacatcttggcatttctaatacctatacatacgcanacttcatgatgaatcttgactatctacaca

SEQ ID NO: 39307 - DNA, 281 bp, Glycine max
  unsure (1)..(281): unsure at all n locations
gtcttgcactaatattatagtgttggtggatttcttttaccaattntgagagacttaaatgtgttgttagtactcaaaattaatgcattgttgtttttttcgtcccctanatctaaagttgctttgtttagtccctagaatttaatgattaattnttttagtccttcactgcatatgctattggcatagccaaacaatttaaggcagcttttaacctccacaacttgtagaaagaaaaaaaatatggacacataaacactataaacttgaaccacacaaaa

SEQ ID NO: 39308 - DNA, 371 bp, Glycine max
  unsure (1)..(371): unsure at all n locations
aacctccatgtaccacagaattcagacttaaccttccaactctcatagcctcactctttgtccactcataacaccacattctcactttccaaccctaggttaactctacatttcatctctaacagttttccatgggcaatttcagcatataaacatcacaaacatcatcacaaaaaccctanaacaaaatgggtatgtttaactcatacgaacatggcaatttcaacaagctttcaacaagtttcttcacaaataactatcatgaagcataaaactggcaagaccacccatcatatctcccataaccccatacccacgaaaattatgagagaaagaagtccacccaaacctgaatnttcgaagtcccactc

SEQ ID NO: 39309 - DNA, 285 bp, Glycine max
  unsure (1)..(285): unsure at all n locations
gatggaaaggaanatgagagaggaatagttgattcaagagagggaatgggaggagagaatgaactgtatgaggctagaatggaagaagagggttgatgaggctggaatggtttttatcttaacttatcataattnttcaattcaatccaaagacttgccacatgggtttgcttacatggacaaagacttgccacatagacatatggctaacaatggaaattggatttaacagtanggacttatttgcatagcggatgtaaagatagagactattttttacatttc

SEQ ID NO: 39310 - DNA, 360 bp, Glycine max
  unsure (1)..(360): unsure at all n locations
atcttgtntactctactttctcacacgatgaactttactggactctctgtatacaacatcaatgaataaatcaatattagttctatgatcatcttaggttcttaagcaattagccaagctatctagaggaagctcccttcaacttctttgtaacaggaagctccctctttntatattcaagggtagctagctatgggcaagctttaccttgctgatgggaagctagctaagtgttagtgtttggctctactgagctttaaaagattggctaagattntgttaaaacataagcacttagacaatgaaggaaagctggagttgctgcacatgatgtccaacgttatgtcaaggaataagatc

SEQ ID NO: 39311 - DNA, 277 bp, Glycine max
  unsure (1)..(277): unsure at all n locations
cgaggctcatgagtgcgtcttccaaggaaggataacacgtggaatctccaccaacatttatttgaagaaaatgttaggaaaaaccaaaagtgggtctacaaactttaagaataaaaggttcgggagttgtttttacgcatggngaaggtattangaccccatgtatctaccacaagggacaaaaacttttaatcaaatgtgcaaaatcatgactntcaanntttatttattnttcctttnttatgttttttttaatccttttgtggtcaacaaaagc

SEQ ID NO: 39312 - DNA, 398 bp, Glycine max
  unsure (1)..(398): unsure at all n locations
atcaacatcaaacgttgtctattaagatgcaaacatactagtctaacgtcttatagatacacaatattaagctcattgtctttttctctcaggatttacaagatattttgaaagctttttacaacttataaattntgaattcagagacttaaaagatgaaaaatgaatttgacaaanaaaaaatactaataatttcatcgcaacaaaattcacaacaaaggttgtttgagggaattgtcaaacaagtatggaaaggtagaacttgcaaaagtctttgacagtcatcgttnttaaacttttatgttatactttccaaagtcattcattatgtttccctcanacaattgtcaaacaagtgcataacatgcatgcaatggtgtgaatggaacaacattata

SEQ ID NO: 39313 - DNA, 242 bp, Glycine max
  unsure (1)..(242): unsure at all n locations
gcttcttcaccttngtgttcttcttcttccgcttcagagctccacgcgtccaacagtcttcaccccgcgtccaggtcttcttctccgcgcgcgtcgtcctccattgccgacatttgaagctntgaagcattcgtgttacgccctataggttagtgttctaacctcattnttctcctttaatcgcttttggtggccatagggtagaagacatgtttggtctggattggtttttcatggttttc

SEQ ID NO: 39314 - DNA, 370 bp, Glycine max
  unsure (1)..(370): unsure at all n locations
tctgcagagtggaatcatttatcgtatctccgatagccaatgtgtgagtctcgtcccggtagtcccgaagaggaccggccttaccttcataaacaatgagaaggaggagttgattcctactcgggtgcagaacagttagagagtctgcatcgattataggaggctgaactaggttaccaaaaaggaccattttcccttgccattcattgaccatatgcttgaacgcctggcaggtaaatctcactattgtttccttgatggttnttctggttatatganaatcactattgctcctgaggatcaggaaaagaccacattcacctgcccctttggcacttttgcctataccgtgcaatgcccctggtacctt

SEQ ID NO: 39315 - DNA, 348 bp, Glycine max
  unsure (1)..(348): unsure at all n locations
ttatcttataaacataattattaaatatataatgactcacttaagttaattgttgtcccattcggaagctaagaatattatctccatcttttttgtttacccaaatacctagnttggaagtatactatgtctaagattacaatctatttcaaagttttacttattaccaacaacttgatgtttgttcactaatgtgatcattcctagagttatacataatattgntaagtaagaccaaagccgttagttagctaaaatccaggttacaactttcatgaagatcacttttccaaattgggactctataattgtgtgtgtggccattgtaatctgatgtaatcgatacat

SEQ ID NO: 39316 - DNA, 353 bp, Glycine max
atatttttctgtagaaaatatggggcatggaaacccaaagtgatgagcattcaaaggataatgacttcatacctagccgaatgttattttctttggtaaggaatatgttggaacactgaaattaaatgaagtttcattaatataaaccccacgtaaggatttctttgccaggatataagaataagaagtaccttgatatctctatggagtacccgattggagtgaaggtagtccacagccagtaacaactgagtcaaccacttgcaaactctctattggagaaaatggcaatgcagagtggataaggaataaggaacaggaatccagagagaacatagacaaatggaagatga

SEQ ID NO: 39317 - DNA, 196 bp, Glycine max
atttgtagaagctctctcatataacttctctaagacatgagagagcttctacaagttaccatgctcataagtttatttgagcttatgcacaaactcattgaaattttttcttcttatattctttcctggaagtacttctggcatagctacctagacagattgtattcgatatcaccatgcatttgctcctatctta

SEQ ID NO: 39318 - DNA, 426 bp, Glycine max
  unsure (1)..(426): unsure at all n locations
tcttttctncgagcggttttggccttttgatgaagtctattggggagagaacttaagggtagaatttaggaataaattccaatcttaagggggagttaggattgagagcacacattatcaattgtatatcgtttatttagatttcagattattgtcatcatcaaaaagggggagattgtagaagcatatatgatatgaagttttgatgataccaaagatgagcgtgattcaagtcaagaattcataaattcaagaagaacgatgtacttagttgataggatcttataaagaattccttatttgatgcacgacatgtttggctaaggaaaatatcttacataatctttttaagaaatattatgttttcaaaaatatgagtatttctctctagcaatcaattatcaaaggatgtaatcgattaacagt

SEQ ID NO: 39319 - DNA, 309 bp, Glycine max
  unsure (1)..(309): unsure at all n locations
ctctctctctcganatagctgaggagaattatgtccgtgaagataatctaagccgatgcgcttccgtaacgtgtccgtaacgtttctgtgagtaattacgcgaagattctcgaccgttcttcaagattcatcgttcgttcttcggtgtcttcagtcttcaacgggtaagtaccgtaaaccgagcgtttcaattcattctatgtacccgtggtggtccacattgtggttcatgtcattttattctcgtattcattggctatttataccgacctttgacgtgcttaagccatttattaagacattgtcgct

SEQ ID NO: 39320 - DNA, 446 bp, Glycine max
  unsure (1)..(446): unsure at all n locations
gctttttnggaccttgaacaggcaactaacttctctttcaaaaccatgctatgtgctcgcgactggtccctttcctcccttcgcaacttgagttcattattgctaccccatagggctccgcgaaaattgttccggccatactcttccttgcgagccctcttggtctctcgttcaagggctcttgcggtaattgcattctcttcccgtaacccggcacactccttccgaacgtgtgtagcagccaacttgaacttctccttggcgagttntgcctttcctaactcgcttttgagagcttggacttcctcgtcctcttccggtgcttcaacattctcttcgctgacgacttttaacttggcgagccaatctaaacctcgtatgcgaactttcagccattcgtggtacccaccaatgatgccattacgaatgcctctaagctcttgatc

SEQ ID NO: 39321 - DNA, 486 bp, Glycine max
  unsure (1)..(486): unsure at all n locations
gcttgctggagcttcatggagaatgaagaagaagagaatggcaacgtgagggagagagagagagctgtctgannaagtgtgggctgagtgaagagagagagagagttgctntntaattnntaaaaaaagctntntcctcatttcttattattntattataaactatgccacatgtcntccattgagtggagcanaaagggcccactttcccttnttgactgtgacccatactcagccacaaaagtgaggaanatctgacctttgaaacgctaaaatcttgcctcggtttgcatgccgtttctatggttccagttcctcgcgtttctctgcgtccgtcggggccagttttcgaaagtaaccaatatatatatcanaacgctcagaatanaaccccgagcgtggttcagaggggtggttcgttaaatctaagtncacacaaacgatgattttaactaataatangaaataacccatacctccagtatg

SEQ ID NO: 39322 - DNA, 412 bp, Glycine max
  unsure (1)..(412): unsure at all n locations
agtgtgtgntaaatgtctaaaatataaagaaaattatgtaataatgtttctttgaagaatatnttatcagtgaaaataaaatattttgaatattgaatttgtagtatttttttaattagattaggttggtgttaatgatttattagtgtgttaataattcatgaacgtttcaactttcatttaaaaaaattagtagatcatatttatttgaagaaagtattttgagtatgaaatttattntaatatgaagttgtagtatttttttaattagattaggttcattnttttgtgttaaaaattgataagcgttcaagttgaaagtgttatttgatgatgttntnngtgttcttgtatcatatttanattaatatatttggtagtaatttgtaattacctattttcattttgaagt

SEQ ID NO: 39323 - DNA, 352 bp, Glycine max
  unsure (1)..(352): unsure at all n locations
agcgcgggtctgggagacgaaggtcaagtggtcgcgatatacgattatgatgttccgagtacattggatttggtacgaccatgctctcctgatttccagctggganaatggcgagtggaggaacgccccggcatttacgcaacgagcataatgtaaacctttacgggtttaaaagctctatangtgggcctaggctttagagtatttcctattgttaaggctttgtgtcttttgtntntgaatntataatacaaagatctttcttcatctgttcctacgtctctacccattctcattcatttgcatgtntacttctntntctgaaatggcagatccaatgacgagtcccccg

SEQ ID NO: 39324 - DNA, 307 bp, Glycine max
aaatctaacttgactctcccttatattctccctatattaatcctggatttattttggaatcaagggtggtaagatctcttctagccaactctacccgtgtgactacaacgtaaatctaatcaatatttattttgtaatcagggtgcttgtggaggggaagcacacctaagcctttccagtgaagtgcttcaattcacacaacccatgttcgtatttcattctacaagctgcacttcccaaccctacctttggttgtggagtttcatccgagaagaaaggcagcaatggaagtcactgaaatatcatt

SEQ ID NO: 39325 - DNA, 321 bp, Glycine max
  unsure (1)..(321): unsure at all n locations
taataattcanataatacttttaatatattaagattcaatgataaatactcttaatatatntntagtttaattatttattaactcttttaatcgaaaataatatagttcgatttaatatatacatgttttgtgtcatgtaaatattaatattgtctgatgtgtatatgattcatggggcgtgataacgtgatatattgngattatgagagtgtgatgaactgtgtgtaagagacaagtcgagtatatgttaaattatgagatcacgcgtgtattgagatattgtgtggattaagntatgagttatgaattgtacaatcaca

SEQ ID NO: 39326 - DNA, 188 bp, Glycine max
gaacaggcaactattttctttcaaaacatgctatgtgctcgggactggtttctttacttccttcgcaacctgagttcattattgctaccccatatggctccgtgaaattagtatcggccatactacttcttgcgagcccttttgggcattgattcaacggcccttggagccatagcattctcttcccg

SEQ ID NO: 39327 - DNA, 370 bp, Glycine max
  unsure (1)..(370): unsure at all n locations
tgtcatcctacaaacttgtgaaacaatactactttattcttgtattacctttcacctgcccctagggcttacccaaattcgtgtgggattgaccatcattcaaaatgactccctatgcatcttcttgtttgcaggatctagatgataagatgcagatgcatgtatgtttatgatcggacagttaaatgtaacaattaaacaagtgttatcatgttcaattatacttaaacgcttacggcaccccgttgatcgagccnnnncgctctggattcagtgagcaggatcgagagtgtatgttcttaatgatgataatagataagagacacaacacctaagggtgagatgcaaatcattaacccacatgtattaa

SEQ ID NO: 39328 - DNA, 451 bp, Glycine max
  unsure (1)..(451): unsure at all n locations
ttaagttcttcctcaaaactgtcctaagcaaagntcctttgtcctattagcaacttttgtttgcccatcggtttgtgggtgacaagctggtgaaaataacaatttactgcccaacttgctccacaaagtcctccaaaaatggcttaggaacttagagtccctatcactaacaatgctccttggcaaaccatggagtctcacaatctccttgaaaaacaaatcagccacatgggaagcatcatcaacttttntacatggaataaaatgagtcattttagaaaacctatcaacaaccacaaaaatggaatctctaccatttgcttgttttggcagccacaaaacaaaatccatggataaatcaatccaaggatactccgaaattggcaatggagtatacaatccatgaggctttacttagactntgcctttntacatacaatgcaatgttgac

SEQ ID NO: 39329 - DNA, 327 bp, Glycine max
  unsure (1)..(327): unsure at all n locations
gactcggtgctctntngattggacatggatactngcatgaactgagcaagagtctcttccaacttcattgttctgtcatagagactanngcccctgtgttgtggcctattagatggtccaccctggtctntattgaactgatngccaaggtgagttctccactatccctgtnnngtgatatagtgatggccatgtgaaatccagaatacccacctgcattaaaagtagatcttggctggtccccatatagttcacttcaagtgttgtatcttcaatggaaatacaatagccagaatcgtgagctccaccacatatagcacaacctac

SEQ ID NO: 39330 - DNA, 306 bp, Glycine max
  unsure (1)..(306): unsure at all n locations
gtgattcactgcaatatcatcaaagtcaagtcaaactgttctaaatgcttcagaatgagcaaaccaactaaccataaacaaaactagcagtgtatataaatataaagaaatattgtactgaaactataatcataataataataatccaaaaagcanaanaacatcataaggaatntagaattcctgtggctggtcctaagtatcctgtgtttgaacgttctcctcatctgtcagatgaagcactagagtagctggaggagaagtgtccagagtcaggactggtgtggtctggtcctctggtatctc

SEQ ID NO: 39331 - DNA, 421 bp, Glycine max
cttatcattgaaagtttttctctcagatctttccattcttttcttgaaactcgggtaatcaactctcagatgtcctggttgattacattcataacactttggaacaaaagatgaatcctctcctcttttctttggtttgaagtttgatcttctttgattttctttgtttcttaggaatttatttaatctctttacgaagaaattgaaatcatcatctcttctatttcattcaagtcttctttatcactttcttcttgaactgaagataaatctttaagtgtgattcctttctttttcttgtcattttcttcatgttgatttagtctcatgagttccatttcgtgttcctgaagctttccaaaaagagttgcaagacacatgttagtaaggtctcttgattctgtaattggtcgtacctttg

SEQ ID NO: 39332 - DNA, 312 bp, Glycine max
  unsure (1)..(312): unsure at all n locations
caccggacacgatggaggcccgacgaatatggaaggtaaaatatgggaagatgttgtctgttctgagaatgacggtcaacaaggaattaattgatcacattagagatcttgacagaccaaaggatgtatgggagacactatataaactcttctccaagaaaaatgttgctcgattgcagttgctggaaaatgaactngcatccacagtgcaaggtaatcttacaattgctgaatacttcttaaagattaaaaatctttgtgcagatctgagtgagaaaatcagtgaggcaaggtgaaggagatacatcatta

SEQ ID NO: 39333 - DNA, 428 bp, Glycine max
cgatatattactggacttaatatacatccgagtaaaaagttattgtcgtttgaacatccgcagagcttcggtattcaatttcgagcgtctcgatatattacgggactcactctgacatacgagtaaaaagatatcgtcgattgaagtagctctgaggttcagaaatcaatttcgagcgtctcaatagtttacgggactctatcagacatccgagcataaagttattgtcggttgaattagctcagaacatcacaatttaatttcgatcgtctcgatgtattacgtgactcaatcagacatctgagtaaaaaagttattgtctattgaattatctatgaggttcacaattcaatttcgaacgtctcgatatattacgtgactcagtcagacatctgagtaaaatagatattgtcgttagaattggctga

SEQ ID NO: 39334 - DNA, 300 bp, Glycine max
  unsure (1)..(300): unsure at all n locations
cgagacgctctanatngaatgttgaagctctcagcanattcacacgacaataactatntacttgaatgtctgattgagtcccgtaatatatcgagacgctcgaaattgaatgttgaagctctcagcacattcaaacgacaataactattttactcggatgtctgattgagtcccgcaatatattgacacgatccgaaattgaatatctgacttctgagcaaantcaaacgacaataactctgtactcggatgtctgattgagtccgctaatatatcgagacgctctaaattgaatgttga

SEQ ID NO: 39335 - DNA, 243 bp, Glycine max
gatcttcaagataatttcaggatgaagaaagcaagatgtccagcaaagccaagatctcaagataagaattaagatagacttttagaaaagtttttgaaaagcacaaatgattggccaagtgagtttctatcttaacaaaaacttttccaagcattttactctctcgtaatcgattaccagaggttgtaattgattaccttggtaatcgattaccagtggccacaaagctttctggaaatgttt

SEQ ID NO: 39336 - DNA, 235 bp, Glycine max
tcgagcgtgtcgattattacaggactcaatcagacgtgcgaggaaaaatttactgtcgtatgaacctgctcagagctacaacattcagtttctagcgttccgatatgttactggacttaatcagacatccgaggataaagatattgatgattgaatttgctgatagctacagtattccatttggagcatctcgatgtattacgggactcaatcagacatccgaggaaaaagttat

SEQ ID NO: 39337 - DNA, 313 bp, Glycine max
agcgtgccttgtcccttgatatattcgagttttcatggtgactatgaatgacaaaatccttgtgataaacgtagtgatgccatgttatcaaagcccgtactaaggcatacaactccttatcatatgttgaatagttaagggtcggaccacttaactgttcactaatataagcaactggatggccttcttgcatcaacacagccccaatcccaacatatgaagcatcacactcaatttcaaaagatttttgaaagattggcaacgcaagtatggcggcattagttagcttttgcttaagaacatagaaagcttc

SEQ ID NO: 39338 - DNA, 217 bp, Glycine max
  unsure (1)..(217): unsure at all n locations
gctatatatatcgatacgctcganataaacatcgaattctctcgagatattcatatggtcataactnttcacacgaatgtccgattctggcgcataatatgtcgagaggctcagaatcgaacgatagaagctcttgagaaattcatatggtcataactnttaacacggatgttcgatccaggcttattatatatcgatacgctcgaaattaaacatc

SEQ ID NO: 39339 - DNA, 432 bp, Glycine max
  unsure (1)..(432): unsure at all n locations
agcnttgcaatattgagaatgtgttctttcattttagttgtcaaagttgataagttcgtttcatttttctaattttattcgtttaattgtttgtattctgataattaaattagttattttagatattataaaatttgtacaaagttttaggtatagtaaattagtagtgtattaattttctatcttaccttagttatagttttaaatggtaaattagatttactttgatgatttaagttttgtacggtaggttcatgtttagttatagttttaaatgatattagttctagttctagtttgaaataatattagttctagttttaattgtaaatgatattagtcttgtacgttaggtttagttntagttaaatatatttaaattttttatggtaggttagttatatgatacattgtattaattntgcgtatata

SEQ ID NO: 39340 - DNA, 360 bp, Glycine max
  unsure (1)..(360): unsure at all n locations
tgtctactacaatcaaatcactcaccattagaaaagaaagcgctactntctaatctattgagaactccaatcactgataattcagccacatctaaactgcccaatcaagaatattgaaaccttagcagagtggctatatccattacatcttcaactaaccctgtctacttatttataacattgtctgattattacgagcagagggtgtctgctaaaagcagcttatagctgctagcaaatcttcagaatgaaaaataaaaacaaaattaataacagttaatcatgcgctgttgacagtaatgatgggcattanaataataaaatgtacctatatcaatcatacgggccttgtaacgtatg

SEQ ID NO: 39341 - DNA, 431 bp, Glycine max
  unsure (1)..(431): unsure at all n locations
tgcttaaagtattcacgagtcattcatccctatgagatgttgttgaagtattggcgatcagaattgccattccttggattatagggttgaaccaagctcacgcttttacaaaaaggttcatcaagtcaagttgaaatatggaagtaaccgtcttgcaaaattggggcaaaagatgaatcgagtcacatcactgcttcgtctactgccaaacatatttaggattattgatgtccttgttacttccagtttcaccttgacaaagatgtcatggaccatgttgaaaatctaaattgattcaaccccatatcttgcgtaaaaattcgcaatacttcaactgtacatcattcgcatgcatccatgcttttcattggttgcattgctcgttgcattctttccttgnaaaaaaaataaaataaaataaaatgaactta

SEQ ID NO: 39342 - DNA, 384 bp, Glycine max
  unsure (1)..(384): unsure at all n locations
gctgtcaatgtagaacatcttcttgaccgtggtgtttcngactccatctcatngaatcgaatgtgcactagtaactccaaagtatcaaacctttcaccaacaaaggtttgaagaccatcgaacctgtccaaaatcttttgaagaagagaggaatcttctccaccatgtaaatgtccttcttcatcaatgggttgagcaccctttttcacccaaaagccatcatgctctgtactgtaaccacaggatgcatcacaacagcgcctattagaaaggatctcttgattgtaacataanggtcataatctagaggaatgttgaagtgttgaaggaaagagtgactatgtgtggatatggcaatggagcatttaatcacaatgccttatg

SEQ ID NO: 39343 - DNA, 443 bp, Glycine max
  unsure (1)..(443): unsure at all n locations
tgataaaaaagaatgtattctctattttttatgtacaaggaaaagggagaaaaaaatanannaataataactgcggcgctctagtctcgggcacattaacgtctcttggcccgcagacatttcaattcccacttattcggaatcgacacagaatangttagttcaggtttagagatngcttatatccttggtttggatntagaannatatttaatccanataaatggaataatggtaattgacgtaattggatangggtgtttacttttttgctaatcattaagaattaatgttatatatanaagtgtaaataatatgaaaactatatctataattacacttatttctatattaaacaacaattgatatattggtagttaatctcagtaataataatttatanataaagcggcaacatatatttattaatattatatttatat

SEQ ID NO: 39344 - DNA, 293 bp, Glycine max
  unsure (1)..(293): unsure at all n locations
agcatgcatnttctttacccactcctcacgtttggttntttagggaaaaacaccataactaaaacgcgccgcagggatccctatcgcaccagatccaaatctagaacgatgggtgatcaagaggagacgcangaacagatgaaagccgacatgtcggctctgaaagaacaaatggcctccatgatggaggccatgttatgtatgaagcagctcatggagaagaacgcggccactgccgccgctgtcagttcggctgccgaagcagacccgactctcttggcaactacgcacca

SEQ ID NO: 39345 - DNA, 555 bp, Glycine max
  unsure (1)..(555): unsure at all n locations
atgctgcanacatctacaatagacctcctcaacctcagcagcanaatctttcacaacagaacaattatgacctctccagcaacaggtacaatcccgggtggaggaatcatcccaaccttagatgggtgaatccttcacaacagcaacaacaacaacaacaaccttattttcagaatgctgctggccctagcagaccatacgttcctccaccaatccagcaacaacaacaacaacaacaacagccccagaaacaacaaaacagtgaggcttctccacaatcttcccttgaagaacttgtgaggcaaatgactatgcanaacatgtagtttcaacaagagaccagagcctgcattcagagcttaactaatcagatgggacaatnggctacatagtttaatcaacaacagtcccagaatttgacagataccttctcatctgtcagagtccaanatgtagtgcatacattgggtcgganacagtgcaagactcaccntacatcttctcatcgcaatacctgcccactactctctcagaaagatatgcaaaataaagatg

SEQ ID NO: 39346 - DNA, 425 bp, Glycine max
aaataaagtcttataagatattatctagatgagatcagatcttaataatatctatataacataagatctaattttgtagaagaaaatagttttccctcttcaagtccaagcccaattctggattcaagcccaatatttcattaattcctgaaagtagattaagaacatcaaattagctgaatgggcccaaataataaaactgtctaattaatttgacaattaagactaatcagtacctaaaatggtccaaaaagggttaagaaatatgagaaaataatggcgcatcaatcatcatgaatctcttgttgataatgcagagttcttctctcagatgactcttggaaagtatttccaacagattagattgaaaacatagtctctaatgagaatgatcaagacaaggcatatatatatgtatatatata

SEQ ID NO: 39347 - DNA, 581 bp, Glycine max
  unsure (1)..(581): unsure at all n locations
tgcttgcgaaatgccctctganggcacttgtagcccancgattgatcagcatgctagagcgcgcacgggngagcagactagtgcatcgtcaacgtatcttgacgtatgaagatggtgacaccagtcatgtggcgtatgcgtgtgaacatgggatcgaacatatatgattgatgttggctatatatatctggatggagaagagcatatatgttgtatgtgggttgcaaatagatataatatcgaaatgggatgggtgggtgaaatactgtatcgcgtgtacgcaatcgctagaatgcacacgtctctaatgtacgaccacggctcgtatgtgactatgacaactcatgcccactaccagaccttgtggggctttatagttagagtctctatctacgtttttatgattctaacgtgctaccagcttgtcaccatcgagcttggctctcatacacagaattctagttactccggataagatctttggggatcgcatcgtgctgcaccagtgacatcgctctactcaatgagatagttgtccgatgttgactttactctacctaattataccctcctagaacggg

SEQ ID NO: 39348 - DNA, 310 bp, Glycine max
  unsure (1)..(310): unsure at all n locations
gcagcactcctggactaagcaggaggaagaatccataagaagatgagctgtgcaggttcgctaagtgcactgcttcagttcatccgctaagcgagaaaggcgcgctaagccaaatatcactaacgtgcgctaagcggtccatacgtgtgctaagcacatgagcacgaacaaggccacctatttaagcctgaaatcagattntgtgaagggagcttggactgggattcagagctttgcatgtctagggtttctagagagagaaaggtccaagttcctgagagttctgagagaatttgctgtgtgaatatct

SEQ ID NO: 39349 - DNA, 344 bp, Glycine max
  unsure (1)..(344): unsure at all n locations
ttctgaactgttccaaatcaaatgccatttttcgtgtcttttgccaccattttataagtgtgttgtattttgatgtaaatacatacattcttttaaaagttatcgaatcatatcggacactttcaattcccaatatgagtttatttagatatcttatcaagcatatatggctttgtgaattccatagactgantgacatgagaatttccactcgttttgtatggaataactgacgatactagaaaagcttgactgaaatgtctttacaaaaatgacgtaaaaagctccaagtcgtgtgtgctaatagattcccaaagtttagcaacagcggtatgatttatatg

SEQ ID NO: 39350 - DNA, 203 bp, Glycine max
aggagtttatattaaaaatataaaattgataataaatatacaatgttgaatgtggatggaataagatataattgtttttaaagtgcaagacaaaaaaggttaaaaagaggaaaaagagttttcgcattaaaatatagcaacaattaaggtaacttttaaaaatcagcgagtttgagagaaagacgttcaaatttgttagtgtt

SEQ ID NO: 39351 - DNA, 454 bp, Glycine max
  unsure (1)..(454): unsure at all n locations
catgcaagcttctggcccagtgngcccgtaaaactcactatgataagcggtattattaaaccagacaaagcatcaagcaataaaaccaaaaacagataaagcacctaaactataagataagtaagcttctccagaccatacaagtgcacgccgagcccatgcaaaaggtttggttaagatatgccagattccaccaagtatacaaatggaacccaaccatacatgccccccaattatatcttccaaatcgtccacactaacaatccacccttctcccccaaaaggtgattttaataaatatccaaatataatacttggactaagggtcaaattggttatttttcttacatctccgccccccggagcccacgtatcatatatacctncaaaataaagagccttgaatactagaagaaacgcacctatacctaacaagattaagtgaatacccaaa

SEQ ID NO: 39352 - DNA, 647 bp, Glycine max
  unsure (1)..(647): unsure at all n locations
agtatgacgccgtgatagcccatcttnatactcagctatcgtcacaggaacagcccgatcccagctagggccctatatttccgctcagtgatanaggaggtaggggtgcagagacaaccaggaggtttgcctagaagcagccacccttgaaagagtgcgtaatagctcactgatcgagcgctcttgcgccgaagatgaacggngctaagcgatctgccgaagctgtgggatgtaaaanagaatcggtaggggagcgttccgccttagagggaaggacctcgcgcgagcagtgcttgacgaagcngaagcgagaatgtcngcttgagtaacgcacacgttggtgagaatccaatgcctcgaanacccaagggttcctccgcaaggttcgtccacggagggtgagtcatggcctaagatcaggccgaagggcgtagtcgatggacaacangtgaatattcctgtactaccttttgttggtcncgagggacggangaggctanngtagccgaaagatggntatcggttcaggacgcanggtgccctgcntttcangggtatanggngagagaaaatgctcgaccnaagtcgagtacangngctcagcgctgagtaatcatgcatactcctagnaagctcgacgacttccn

SEQ ID NO: 39353 - DNA, 379 bp, Glycine max
ccaccattgaccctgtactggcgtcactcaaagttaatcactttccaatatgcccccacatcccaaaccccttctagatattatttacttggcagatgatgggtgctgcactctgggttttctgttcaaaggtctatgattttaggtaactataaaaaagtgtttgggtgctgcactctgggttttctattcaaaggtctactcttggagttttctactcaaaggtctatgattttaggtaactctaaatttgttccaatcattaattcagtcacaacattattgtattggaatctatgtgaataattacattgactataattgtctataattctctataatattaagggattaaacaaatctacagtcacgatgacca

SEQ ID NO: 39354 - DNA, 436 bp, Glycine max
  unsure (1)..(436): unsure at all n locations
attccttccaaccctccttaagatcttgtcacgggcagctaataagacaactagtacagcttcacttgcagttccctgtataactccaccacctttccctgcaataaaatcacatccaatgttgggtttgcatgtagtatttgagtttttctatcaaataaattattcatatgtaatttaggttcaaaattttattatctatganattcatcccagttgaagcatgcaagagcacaaacttgtaatcgcacaacttccttctcctctccaagaccttagacaccaacatgcaaaaacacaaagtggctcctaaaagatcccaagataggagaaagagggccaagtaaattttacgtttctttcttatgtccaggggaactgcattcctcaacaattnggacaaaagaacaatctactgcaactatgataagctcac

SEQ ID NO: 39355 - DNA, 358 bp, Glycine max
ttctcaacaagaaacataaaacttgagctccactaataaggacaatagtttgaatgacaatactgggatgttggtgaagttggaaaatattgctagaaagagagctggaatattcatcagcctaagaaaagcaagttctgactttcttaaaaccatcatttggaagcttcaaaccaatatttgaggacgactcatggagcttgatgaaatcggggaatattgctaggaagagagagctgaaatatccatcaacctaagaaaattcaaagcaagttccgatcttcttaaaactaagatctggaagcttgaaacaaactatggaaacccaaaattattcaaacttgacaaaaagaggaaa

SEQ ID NO: 39356 - DNA, 608 bp, Glycine max
  unsure (1)..(608): unsure at all n locations
tgcgaccattgacnccntatgatacgcagtcgaangnccacttanatactaagcctctaagagctatcactagaatcatcagaatctgatgatagaggaatatgactgcctagaggaataagaagtntatgatgctctcatctagtaagcctcntgtagaagtaatctctaatgagataccacttgttagcttccttcttagcatatagtttgtcttccaaagctagagcgagtgctgttctcattcttagaagcttagtctcgatgagtctggcntactctctgaggaggatcatagaccttttcagcaagagcttcctagtcaattgcatcctcaacatcaaaattcacctcttccaatgataggttacacatgatgagtaaagataaatctggagtgagttagaccacatcaaaatatatgttgaggcaagcacattgcgaaaattctcgttcgtcgccatactntacatgcaaacctatttgtgatgcataattttaccagtttgacatacatgtgagaaaactctatgatctgcatcaatgaggtgtgtcctaaatgcatttctctatggcgtcgtttggtgcgccaatgatccctgagtgct

SEQ ID NO: 39357 - DNA, 419 bp, Glycine max
  unsure (1)..(419): unsure at all n locations
agtgcttccagattcgattggtaatcatccaatccaatcccttaggtttttttctttttaaaattatcatgtaatttattntgttcgaaactttaaatcaatcaatccaatcgaatttgatatggtttggattggaccatcttttgattttaattatttttattttttttataaaatgtgaaatanatgataaaatatataataactatagtaaaaattaatttaaaatatcaaatattttatttacatgtcatttatgactatatttatacatttatgactataatttccaattcttaacaattattcttgatagaaatcttcaagtttggtatgttttaagagtgtttccagaatggatcngtaatcatccaatccaatcccttanngtttntnnttataaaaaaatatcatgtaat

SEQ ID NO: 39358 - DNA, 311 bp, Glycine max
  unsure (1)..(311): unsure at all n locations
acctctcttcaaaccaaccttatctcaacaaggctgtcttcccattttgtaaccttcaccttttccaaatcaagaaattatccctcgaggggtaataagtgtgacaacatataaaggaggacacttataaaaggagctcatntaaggttcaagcaaagatgcggccagttcattcagacatttaaataaaaacaaggtgtcctatgataagggtgacaaatgatnggatggaaagcactctagttgaaagctacgacagcatgaangngttgtcattatataatgatggccaccaccacccttattgaaac

SEQ ID NO: 39359 - DNA, 316 bp, Glycine max
  unsure (1)..(316): unsure at all n locations
tgatttaaagttcgattcaggagcatctttaaatataaggtagaatcgggattctatacaccttntccagtagtagtgtgtgtctggataaaagatacatgtcaacgcaattaactgtcatgtgaattgatatataagacaaatagctgcttaccaatatgatgcatttgaatgtgtctttttatgtgacaagtttttacttgcaatcctacaatgatgacctcttgtgtgctctgatgggcgaggcgtgtgcacacctctaccacaatggcattgacacgactaaaatggttacagtcataaactgccattagat

SEQ ID NO: 39360 - DNA, 378 bp, Glycine max
  unsure (1)..(378): unsure at all n locations
acttgagcatgcttgtagtatgaatagataaattatcacgtggttctagattactgcggtgtttattaatctatgatacatacataagattattaactctctcaaagatcataacatctaaatgatattttttcacatatatagttgacatngaaatntgttaacaagttatatatacattatcgtaanatatatacaccgcattattttatgagtgtgttgtaactaaaaacataaataagtgtatattaacacatgtctataagatgtgttaattcacacttatntattctttaattagaataagtctatatattatagctaaagatatctcgaatacatccagatgtacttataattacttaactatatcatata

SEQ ID NO: 39361 - DNA, 206 bp, Glycine max
  unsure (1)..(206): unsure at all n locations
tatccatggcactctctttggtgggaagctccttcttccatggcttattcgctagtggatagcgcctnctctcacctctgtatctgtatcttacgctgcatctccatggcggaaaatcaccattgaaggacatcattgaagctcacagatccagtctccatagaagcttcacaagcgagcttccatcaagtggtaatcacagcata

SEQ ID NO: 39362 - DNA, 515 bp, Glycine max
  unsure (1)..(515): unsure at all n locations
cggagtgtnactganacattgggtaacnngtgatncntttgaagccctggatgtaccgagatactagagtcagccgcaggatctatctatatagcgttnagcgcttattcatgcgataactcaatataaacagccgtacattatttagaatataacaaacgcggctttctatttgcacccgctgtagaaactattactacaaagacggctctcgaagaccgtcgtaattatctaaccactatttacaaaaatgtgactgagggacattctaagacggctcctggagactgtcttagaatgtgcgtactacaaacagctatttatagtagcggccatgtgctacttggttgcataacgcctaggatgaatctgagtgtcccactatagagatctcacacctttttggaccacaagctgacatgttagggcctcatggacacttcatatctttctcgaccacgattaaattgaactctntaggacgtgtatgatatcaagcacacatgctaacaccn

SEQ ID NO: 39363 - DNA, 656 bp, Glycine max
  unsure (1)..(656): unsure at all n locations
attgacccccttttgangngcccctgtanangcccccngnnnnnattgatacgccttcgcttangtcacactatanantactcaagctngagatgtggaagtgtagaatggtgaaacttnctggctttatttgttgactacagagtggtacctggagatatgtcgcggnggtcaggagaccttggagacgtcacgacgggtgctattgtccaataccaaactcgaccaatcccgacccaacccgggcatagtcagttagtgagaacctgtgatgtacctaaacatgcgagctcctggcagtcaacagataaaatgaacatggaccacaaagcaatgaagcttgtggtggctgccagctatgaactngattgatatatgagatatggcctctggtgatcgaataccaanaggtgggtatcgatttacaggcttataaatgaagacaagaggctaagatagtctctggtcatcgattaccangcttngaaacganggcatgaagctaggatagcttctggtaccgactaccaaggggtgtagtcgataccacgcgtaacaaggaactgggagatggtggnggctctggtantnattacancctgtgtatcaataccagangaatggtactggtatcgatcacangcctttcaggtttn

SEQ ID NO: 39364 - DNA, 435 bp, Glycine max
  unsure (1)..(435): unsure at all n locations
atcatatccaaatatgcatgtgaattatgaagcatcaacaagaatcaagccaaggctattgtgcaagcaatcaatggggcaaaacacaccaaatgattatgatgatggatggctcanattctcacaaaggtaaactcatcactttcaaattaagctttcaaaactatcatgacatgtagaggagaatcaaaaatttcaagtcacaaaatgtcaaaaacttttattttcaaaacaattacccatttcttgaacatatcatatgattcaaagaaaaacatgcaaagtcgtacatgcgcacagaattgacccaaaatattaaactaaaaatctgacgaaactaacaacattaacaaattaacacaactaacaaattaacaaaaccaacaaaactaacaaaaaccaaagaacactcccccccatacttaaataacacat

SEQ ID NO: 39365 - DNA, 623 bp, Glycine max
  unsure (1)..(623): unsure at all n locations
cgtgnaaatgacccactgangtgcactatgatactcagctnntgtgtatggccaattgcagctagagtgttgggtagttttacattttcgcttcaataatctaagtgatacatgtatttatctctctatatactatcgaagtgtgtttanggattataaaattgagatggtgagcattcctcgtgtttcatacgagagattccagattgcccattatacacaagtgaatatggttgttatatcctgtagtaattgtaatatgctcaatatactcgggtatatgatattgtttcaagtatgatttatacagagtggaatgtggatgcacgctatcacatcatatgtgacaaatgtagaagtgcatatctctgattaacatatgagaagtggtgtgaatgtgtgtaatctagatgttatatatcacactctataagtgtcaatctcatgcgctgtgtccattagtaataaaaagagcaacctctanatctgggtcattaatagacaagtatctaatagtatcacatcncaattgagtccttctattagaaaangatattgtgtgacataccatcacctcagtcgtctcgtcactaaactgagttggaatatgatctgactcaatg

SEQ ID NO: 39366 - DNA, 454 bp, Glycine max
  unsure (1)..(454): unsure at all n locations
tataatgagtaattgtgccaatgcactttgaatatacatcttaccatccctctcacacctctaattatttccaccgcacaaaatctgcactataaagtccatcacctcctcttgtattcaccaaatagactattagccccagaggtccaagactgaccctaatcacactttataattattttttttttcgtgttggcatatttcctttttctaaacattntgtgctctttttgtttgtggtagatccatgagccagaaaacaaaatcccattcatgggccttcgttgcagatctacttggttgaaattcattgaccgtgtcttatatttctttgccctctcttttatgctttgtcttacccnttgcggtaaccatggccaataaacatcttcaacgaccatgatttcattgattaattaaatcaggtaaaagtcctaattttttcgttattcta

SEQ ID NO: 39367 - DNA, 139 bp, Glycine max
tgagatgaggcgccatctactataggataagccatgataggagaagcttcaccaccaaaagagtgtcttggataagaagcttacagaggaagcttcaatgaaggaagagaatgagagagatagagtgatgcaatcctac

SEQ ID NO: 39368 - DNA, 419 bp, Glycine max
catgcaagcttaaggatggaatacatacttgttggtgattaataaaagtgcaaaacgttatcgaaaaatgcgaaaaatagtgaccctagggctgcaaactcgtaaattccgtgggtattgcttttgaatggggggaaaagaagtttttgaatgcaaaaacgtcccccttcttcattttttatattttggtgcaggggctgctcgcccaggcgagctaacctgcactttttttttttaaaaaaaaaggtcggttgatttcagaggcgactgtacaagggaatggctcgcgtgaggggaccaaagcttttgatgctccgccagccactccgtaaggtactgatcgaaactccccaggatagattaggcatcgaacaaaggtaataattactataatttcaaaggatactgggctgctttac

SEQ ID NO: 39369 - DNA, 252 bp, Glycine max
catacacattatctcaaactcatgatatgaaacacaaactccatcacaatcatgcactcaattcataatgaagacatacatgcaatattcacatgaagataaaagtgtgtcactgccatgtcatcaaaaacaagtcaaactgttcaaaatgcttcacgatgagcatactaattaccatacacttaactagcagtatatgtagacataaatgagatactgtacgataacctatattataataataataaatca

SEQ ID NO: 39370 - DNA, 459 bp, Glycine max
  unsure (1)..(459): unsure at all n locations
tcacctgcggcatgcaagcttgctaacccatggaagctcctaatatctctcacactntntggggtgggccattcttggatggctatgattttctctgggtccacttggaccccatttctaccaactacaaaatctaagaaaactatattatctacacaaaaggtacacttctctatatttgcattgagggtgtttttcctaaggactgaaagaacttgcctgagatgtcctaagtgatcatctaggctcctactatacactaaaatatcatgaaaataaacaactacaaatctacctatgaaatcccttaagacatgatgcataagcctcataaaggtgcttggtgcatttgtgagcccaaaaggcatcactaaccattcatacaaaccaaacttggtcttgaaagcggttttccactcatcaccctttttcatcctggattggtgataaccactttta

SEQ ID NO: 39371 - DNA, 434 bp, Glycine max
  unsure (1)..(434): unsure at all n locations
agctttatatctttctggcgccgagctatnctcccgcaggacctcccctacagtatcgtcgccgcagtagagtctaaccaccaagttcgggatggattggtgtggttcctctacgcctaggacaccagaatatcgaaccatgaacgaagaaaggcatgagataaaagcaaatatattggctattcattgtgaggccctaattctcgactggaggggacaccanaggcctatgcccttccattccttggatagatagagaggaggggcagagtttttggttatttcatgttgtcaaagagttgaacaatgaaaatggatgactagtgcctgatcgaattgatcggatcatgtatgaacaaggttcacgtctaccggtctgttaggatgcctcagctgcatacatcactgcacttccacttgacacctatcattaa

SEQ ID NO: 39372 - DNA, 402 bp, Glycine max
  unsure (1)..(402): unsure at all n locations
tgcaagcttggagattgtgtgtggngagctccgtttttgttgtgtgttatgtatggaaaagacgggataacaatggattgatcccataagatagtggtggaaatgttgatctttgtatggtgtgttgatgagctcatgtgtttagttgactgtcgtccggtaccattggcaggagcccacacagacctacaaaagacaatctcgatggggaacgtcgttgaggattccacccttaaaagtggtggatgactgcatattgatatccgaggtatgcttgttggcttattgttcctttggggtgtggtgttgagtttgtggtcatgtatccacaaggttggtaagagtttgtcattgtaccatgacgatggtgtaatctcaattgtcatccaacttaanatgtgt

SEQ ID NO: 39373 - DNA, 663 bp, Glycine max
  unsure (1)..(663): unsure at all n locations
cgatgcnctgtgannnccntatgatacgcccgttgtatatgtcacactatanaattcgtaagccttagacctnngaagtgactatgaatgagaattcatggttcaattattcttaactcattaccatccgagtatgatccatttcaaatgagctataatactatgaaagaacaatggaatgtgatgagtcgcacaatatgttggtttatgacgacacaangcttaagatcaaagaaatcactcagtccattgtgttaaccaccaatggaatcaaggcttaagattaaggctgtgaagaaattaccaagaagcatgataatggcaaaaangcattaaagatcattgaagcattagtgcanattcagaagaaagcatcatagagcaataattgccacttcctgtggaaagctggacatttttagaaggattgccctanacataaggcttggntcgaaaagaaaggtgagcttaatattatgtatgtntngaatcanannttgactgaagtgccactatacatggtggattgattctagatgtatgaccatgttctactatgatgtagtgatttctacatcccaacccatgagaaagtctctttatgtgatagagtgaagcagttggactatcattttatctgcattnacatattatattataaag

SEQ ID NO: 39374 - DNA, 444 bp, Glycine max
atgctatcagtcacctgcggcatgcaagcttctatatttgttcgttcctaatttctctacaattgcatcacctctcaatgagctggtgaagaagaatgtggcatttacctgcggtgaaaaacaagagcaagcctttgctttgctcaaagaaaagcttactaaggcacctgttctagctcttcctgacttttctaaaacttttgagctagaatgtgacgcctctggagtgggagttggagctgtattgttacaaggtgggcaccctattgcttattttagtgaaaaacttgatagtgccaccctcaactaccccacctatgataaagagctttatgccttaataagagccctccaaacttgggaacattaccttgtttccaggaatttgtcattcatagtgatcatcaatcacttatgtacattagaggacaaagcaagttaaac

SEQ ID NO: 39375 - DNA, 363 bp, Glycine max
  unsure (1)..(363): unsure at all n locations
gatcttctacaatcttcccctttttgatgatgacaatccctganatcaagacaaaccatatacaagatgatagcacattcacacagcccttactccccctatctnttggcatgtatgcctatgcctaactntaatgagtntaattgatttctaacccaagttatgcctaactttaatgagtttaatggatttctaacccaagttctctcaagttctctcccnctttgcaacatcaaaaagaactaaacaacacaatcaaaatccaaacatagccaaacatgaaaccaaaataaatccatatattggtatagccaaccaaagcanagtcctganatataataatagtgcaagagtacgataact

SEQ ID NO: 39376 - DNA, 413 bp, Glycine max
  unsure (1)..(413): unsure at all n locations
agctntaggatataccataaaaactaaggtttttcctaaacataaatcaattgaggaagcttcgccaagtatccccattgaaaaacctttattcaaacctttcaaagttagtgaanaggctaaacgaagaattagggaacttagaanaactaaatccttaattgaaggcgtaggtgacaatcatagtgaattactaaacaagattggtagtttacttaaggtcattccagatactccccaagcctcggaaaatacttccaaaatggtaacaagaagtacctccaaattaattaatattattaatgaagatagtgaccaaaactcagataacacaactgagataggatcagtgtcagaaaagaatataaatccaattaattccagacactggataacacccttcaagttatatt

SEQ ID NO: 39377 - DNA, 300 bp, Glycine max
  unsure (1)..(300): unsure at all n locations
tgcgtcacgtntaaaaccgagctcgatggtggtgcgagcctttgatggtactcggcgggaagtgatgtgggaaatcgacattcccattcagataggcccccacacttgcaatgtggtatttcaagtaatggatataaatcccgcctatagctgcctcttgngaagaccttggattcatgccctgngagtggtcccttcaacgattcaccagatattgaagtttgcagtgggtggactcttagtgatagtgttgggtgaagaggatatgttagtgagcttgccctccttcgcaccgtacgt

SEQ ID NO: 39378 - DNA, 265 bp, Glycine max
aataatgatttcaagattgagtcaacaagttcaagataaagattaatttccagattcaagagaagacatctagaagaatcaagattcaagagaagatgcattcaagattcaagagaagaaatcaagaacaagtcaagacttcacaagggaagtattgaaaagggtttttcaaaaaccaaacatagcacagtttatttttacctggtaactgatgcaggagacgttcaaactatggaaaatgtgtgcctgaaattttatttttttt

SEQ ID NO: 39379 - DNA, 476 bp, Glycine max
  unsure (1)..(476): unsure at all n locations
ggcttcctgcacncacttgtgtaattagcatgactntcatcattcagttcgtgactccttacctttccattactgatagggaattttccctcattttgtattccctgagaaactctntttgcagcttcttgtagagcatctattgcgacatcataagtttcagcagaccgcgcgccttcatcaacaaatgtaagagcctcatgccggaaggtgtatattaactgataaaatcaaatagagatatacatacagctgttttatatacatgtttgcattctgtcacgttatattagagaggaagaagcatgtacttaaaatgcaactgctcaaaagctgaactaaacttggactgcagtgttattcagacatgattacacataccttatggctctcaantactactgaatgatgactccatctatcgcttgagcatatgcaggtcactactctctgaactatgaaattttcggtagccn

SEQ ID NO: 39380 - DNA, 70 bp, Glycine max
ccgggaggtttgaaccatcctaatgccccctgcaggtttagatgaatatccgctatgcttgaaactgatt

SEQ ID NO: 39381 - DNA, 522 bp, Glycine max
  unsure (1)..(522): unsure at all n locations
tgggaagatgannatttggatccattcgaaaacgctttgatccgatcgaaacantggtgtacctatatccgcatactatctctgcggctttagatattgatacaacctttactgtttgtttaaacacacaagcgnggtattgtcaatagaatgcttcggcgtgttcctaatctcaaggggagactaagagagtcacaagagcggtctaaataatacatgtaatcaaaagtattcacaagtgagagagaaaaatactcgcatgtaatcaatctgtgactgaaggaaccctacagagattttaaggagaattggatgtaactcacatgtttgagtgaaccactataaacatagggattttactctcacaatgtgtgtcacctatgtatctaangttattgcgtttcacatcggatgcacaagctatgcaaaaatatcctctagagacaaatctttttttaactcttgataaaagcactctccaagagcgtgtctttataaccctattagattcgcttatgtgtn

SEQ ID NO: 39382 - DNA, 520 bp, Glycine max
  unsure (1)..(520): unsure at all n locations
ctctctgctatntcttcatggtgtnanattnnattccnnnnnnnnnnnaagggagcgnnattgggcctttgaagccgtgtaagccacatnacctagcttacaatcaaagtgtaggatatatgtatgtacaagcttatttacacccgacaatcaacccgaaagaggattcgaggctgttgtttagatgtcactgaggaaactttatgattaatggactcttataccacattgctctattttagagacatacttgaaactctagtaagcatcttgctgaatataaatgaggggactttaaagttcctaaaaggggaggaaacaataccaaaaatctgtgtgttatgggttgcatgacttaacaataataatttgagcttaaaggtatacgtgagattgacacatatatatggagatctactaagccgtgggaacctagaatacataggcgtccacattttctctctcccaaaacaacaaaattaagtttgtatctgttaaaaaaccaaaaaccgcgtaaatc

SEQ ID NO: 39383 - DNA, 446 bp, Glycine max
  unsure (1)..(446): unsure at all n locations
cctagaagatatgtcacatatccatatttcaaatgatctcttatactgtgcccgtggctaaaagcatcttggatgggtattgaacatgcgtggttactgaaagtacagaaactgggacagcattgacagttataacctattttggaatgaaagttgcataaaggaattattcacaataaagagtgagaaacgaaaagtgatgcagaaaatacacatagcaagtacctccttcaataatgagaaggaagtttgatccacttttgatgatttcagcaatttgtcattgtcagccaaccaaatcttcacactgcaaagaacatacatgatacattcagctaaactaagatattaggcacaaaatgtaatacaccaaaaagtcaatccaattaggagtatgagggaaatgcactgtaattngccaatgtgagattcttgaatgaatgata

SEQ ID NO: 39384 - DNA, 375 bp, Glycine max
  unsure (1)..(375): unsure at all n locations
catgtgtgtccactgtgtgttcaagcttattatanagagaatataaacactcggtttatattggttcactccagtcttgaactacgtctagttcacctntaataatttagagggttccaacaatncaaaatgattataaagaaagtattctaccatatcattattggcttacataagtattctataggccacttctaacacaccctcaatctacccttagatngataaataactaagtattcttttatcacaagccactctntacttttcaaacaaaagttngaatgattacaaatctaaatcaactctcacatagaggatattcaatgaanaatatatcacanagtagatntcttaagcagaggatgacacact

SEQ ID NO: 39385 - DNA, 377 bp, Glycine max
  unsure (1)..(377): unsure at all n locations
catgcaagctntaattctgatgagcatgtctgattcattctgaaccacagaaatagcattacactcaactaaacttcctcgagacaatgcatcagccaccatattttcttaaccctgcttctattctatgcaaaaatcaaattctatgagtttaactaaccatttctgctggaatgctgtagctaacctctgatccaaaatatacttgagactcctatgatcggttcttattacaaacttcttaggtaacaaataatgtctccacttctgcactgcaaagacaacaaccagcaattccttcttataagtggatagggactgttgctacacattcaagctcctgctgatgaaggctatgggatgattgtcctgcatca

SEQ ID NO: 39386 - DNA, 394 bp, Glycine max
  unsure (1)..(394): unsure at all n locations
cagcttgtgaatgacttgccgcagaggatcaagtggtctaaaagaggcacatntaatcatcccacttggacgaatgagaaaaactgggtaaatgaagagggtgagaatgagggagaagcccatgctgtgactaccattcctatacggccaagtttgccaccaacccaacaatgtcattactcagccaataacaaaccttctccttacccaccgccaagttatccacataggccatccctaaatcaaccacanagtctgtctaccgcactgtcaatgacgaacatcatctttagcacaatccaaaaacaccaaccaagaaatgaattntgcagcgagatagcctgtagaattcaccncaattccagtgtcttatactgactngctcccatgtcta

SEQ ID NO: 39387 - DNA, 431 bp, Glycine max
  unsure (1)..(431): unsure at all n locations
agcttttagaatatataataaaagaactatgtctattgaagaataaattcatgttactttntatgagactaactctattagcccaagagaggatatacttgatgatattacaaatactttagaagatacgcttattcatgaagaagtccacaaagacaaagaagacaaaaatagtagagatgctcaatccaaagaaaatcaaataaatgtggatcttccaacggagtggagaacttcaaggtaacaccctcttgataatatcataggtgacatctcanaagggataacaactcgacactctcttaaagatgcatgcaataacatgagatttgtctctttaattgaacctaanaacataaatgaagccataattgatgaacattggattatngctatgncagaaagaataaatcaatttgaaagaaatcaag

SEQ ID NO: 39388 - DNA, 250 bp, Glycine max
  unsure (1)..(250): unsure at all n locations
accccgacanatcacaccaganagagagggattcggaggtcgtgtatgtatgagaatgtacagntgaggaaaacttaaatgaattaattggtactacttataccaacaatatgcatctanttttcagtagtacatcacttgagaacttcatagttaagcatctttgtcttgaaatagtaataggaagggtgaccttctagaaagttcctagaaagtgtgtgagtgaagacaaaatacacaaaaaaagtct

SEQ ID NO: 39389 - DNA, 431 bp, Glycine max
  unsure (1)..(431): unsure at all n locations
agctatgagcttgtcagcaccaccggcaccgtacacagcagcagccctgctctcccttgtggctccagagcttanatcttcgctcggctgcgcacttccttgagaaagcttcatctgaatcaaatccaacagtgaagggctcttcctgaggcgcaaacccaacgggctcggctcgtcaagtatgttcagatgggatggagaactgacagaaccatcatcggaagcactccattgctaaaatgattgcaagcacgcacgcaaacacgggaaggaggaataaataacacgttttttattttaaaagaaaaaaaaaacaagatataaaatttcaacatctctctcgtaaacaaacaaagcgcgtgttctatgattccgagcattanagctaggcaataataatgcagatgacatgttaattnttttgatacatc

SEQ ID NO: 39390 - DNA, 190 bp, Glycine max
  unsure (1)..(190): unsure at all n locations
tttttcattcatttaattaatcatttggccttgcccggactattcaacacattcattcgtttactttgtggaataagatttggttcttgaacaataataataatcgatnttcttttttgtaacttctcttcattcgagaacaatatgatgtgttttctaagaatttagcattttaggttctacacggatg

SEQ ID NO: 39391 - DNA, 339 bp, Glycine max
gtatgagacgtgctctattagcccacgaaaggatatacttgatgatattacgaatactgtagaagatacgcttattcgtgaagaagtccacaaagacaaagaagacaaaaatagtagagatgctcaatccaaagaaaatcaaatggatgggatcttcaacggagtggagaacttcaaggttacacactcttgagaatatcatatgtgacatctcaaaagggataacactcgcactctcttaagatggtgcataacagatttgctcttagggaactaaacataatgaacctattgagaactgatattgtatcagaagataattaattgaagaatcagtta

SEQ ID NO: 39392 - DNA, 257 bp, Glycine max
cgggagttttaaaaaaatttttgtttaaaaaaaggggttggaattaaaggcaatcaagcagaaggtaaaggaggtaaaagataaaatataagtaattagattattcatacatgatgaaaggaaagatggtttaaatgtgtaaataaaaaacggaaaagaaaaaaatttaagtaattatataaaaagaaaaagaaaggaatgtaaaagattaaagaaaaggagaggagagatgaaatcaagtaatgagtaataaaaaa

SEQ ID NO: 39393 - DNA, 471 bp, Glycine max
  unsure (1)..(471): unsure at all n locations
atgcaagcttcagaccaaagcaactcanaatctaggtatctaaaacccctcaatttattggattntcaaggtttgagaagtgaaaatgagaatggggtaattttggagcaaactctcatctcaaacaaaactatgacattaatctaaactcgctcaaactggttttacgacgaaaactctaccgaatcaaaatttgactcctcaacacccaatttaccctagaaatggctcttgccttcactttggtcactcattttcctcctttgcacagcccaagctttcccacaatcctaaatgacatttcaaactaggattaactcactttaacctcctgtcgcaacgtgcccttcgcgggcgagcgagggcgaggctcacaggtgcgctttccataggaggaaagatgcgtggagtcgccaccaacgtttatttgtggaaaacgtcgggaaaaccgaaggatactggtcaaaatga

SEQ ID NO: 39394 - DNA, 642 bp, Glycine max
  unsure (1)..(642): unsure at all n locations
atgctgggtattgatcgcagcttagangtgacactatgantactcaagcttgcctgtccgatgcagcagtaatgatggcccgagttatgtntgggaactgttactaaccctgaatggtntangcaaagacaacggcggcataactagcctgatatatgccanagganatcgtgggaagtatggtttatgctataagcccactcatgcagatgtaaagagaagtatcgcgggaaggaagggcggtggtcaaagctcgcggttgagacaagaaagtgaatgaagcccgccctgccacataagtagaagcattataagcgcgggtctgggagacgaaggtcaagtggtcgcaatatacgaagatgatgttccgagtacatttggattggtacgaccttgccctcctgatttccagctggngaattggcgagtggaggaatgccccgacatttacgcagcgagcataatgtanaccttttacggtnntaaagctctatagtagggcctaggctttagaagttntcttttggttaggcttgngtatttgcttttaacttatatacacgatcttctcatctgtctactcctaccatctatcattgatgtactctttctaacgatatcatacagtcccangactatctn

SEQ ID NO: 39395 - DNA, 288 bp, Glycine max
  unsure (1)..(288): unsure at all n locations
gctatatatatcgggcgctanaattgtattcagaagctcttgagttattcaaagggtcataactnttaactcggatgtccaattcatgcgcatcacatatagagacgctaaaaaatgaacaacagaagctctccagaagttaaaacggccataagtcttcacactgatgtccgaattaagcttatattatatcgagacgctcaaaaattaacatcgtaagctctcgagaaattcaaatggtcataacttttcactcggatgtccgattcaggcgcataacatatacag

SEQ ID NO: 39396 - DNA, 298 bp, Glycine max
  unsure (1)..(298): unsure at all n locations
acgctacggatacgtttcggaagcgcctcggcttagtctttcttcacggaaacgatatttccaagcaaattctaaagagagagaagtgctaaaggggctgaaccctnttcttcttcacttcctccgctatttatagcaaaataggggaggtggntgccgcccagctcgcccangcgagctcagctcgcccaggcgagccaggttgcttcctccagaagcaacagccttctggaggaatattctggagggcccaagtgggcctgcgtgctatttgcacccacattcttactaagtacac

SEQ ID NO: 39397 - DNA, 449 bp, Glycine max
  unsure (1)..(449): unsure at all n locations
ttcgatagcgggaagaganaaaagattatccatagaaaaactaaactcaagccgagaagcaaagaagcaactcacggtttgcgaataattttgaaaaggagactattagaggccaggagaggtgcaacagagagtacccggtgaaagcgcttaacaacttttgaaagtcagacacgacgtcattctcgccgccaccaccgtgctgtgcagaggcaacatcgactgtgtgcatctcagctcctgcgaaatcctacaacagaccaacgacaacaacgacaaatcgataattctaaggcttatttgcgattaggagcaaaaacgaacatcgtatgacgaagggaaacctggtcaataaggactggtgaatatgagaaaaggaggaagctggtttggagaatgaagaagcgcgaatgtntgaattgatggctgattttatagatgaaattgat

SEQ ID NO: 39398 - DNA, 315 bp, Glycine max
  unsure (1)..(315): unsure at all n locations
gatatgaactatctgaaataagaaggtttcgtcggagatacgaaagaacaagacaggtttcggaagcatagaagaagaatggtttcggaagcaaggaagctgaaggtngttttctggtgtttctggcgctatttatggagtttcactttaaacagggaaaagcaatataataataatcaatggtcaaagatcaatcaaatcagatctcccttccgactccncagcgttacacgtgtcccactctgcctagaaaagtggaattaatgatgggtagtgngagatcgatgcgacggntacacagtgaacgtgcgatca

SEQ ID NO: 39399 - DNA, 446 bp, Glycine max
ttattctagactactaattctagttctaaataagtttatttattatttaaactcgtcatcaatatctatatactaaagttggagtatgatgaatatactaaaatgcccatggctgagagcttgacagttgtccattttcttgactttttggtcattttatgcccctccagcttggcttggttttgtgccaccttgctgccatgtgtcatttcatggttatggtagcttggtgtgttgttgagtgattagattgccatttctagtttgggtgtgtcgcaacctacccttcggcgggagggcgacgcgtgactcgcgggatgcgtgttccacgaaaggaatacgcgcggagtcgccaccaacgtttatttgaggaaaacgtcggaaaaaccggaaaagacgcgatctacgaacttttaagtgaaaggttcgggagttgtatatacaca

SEQ ID NO: 39400 - DNA, 453 bp, Glycine max
  unsure (1)..(453): unsure at all n locations
caagttcaagatcaagaataaagaaaaaacatcaagaagaatcaagattcaagagaagatgaattcaagattcaagagaagaaaccaaanagcaacaagtcaagacttcacaagggatgtattgaanaaaaataattcanaaaccaaacatagcacannatttgtttacaagaaacgtntttccaaatttttctaagttaccagagtatntactctctggtaatcgattaccaattacctgtaatcgattaccagtggtaaagtttgattcaaaagctttaactgaatttcaacattccanatgtttttaaatggtgaatcgatacaaatatnggtatcgatactagtgtatctanagttgaaatcanatcaattgtaagagcacatctttcatanatgcttgtgaatcgatacatggtatggtatcgatacactgacagtctgataaaagtc

SEQ ID NO: 39401 - DNA, 389 bp, Glycine max
  unsure (1)..(389): unsure at all n locations
gcttgtgatatttttactatatatgtgtgtgtcttcgtttatctctacctgtttaaaaatgtgataattcactcatcatgtgttgtttatgtttggatcatgtgatgatcttaaaccttgtgtttgtgagagcaaatgactaggtgaattactttaagaaaccttgtgatggaggactctgagacacaatattttgataggatgtaacattggaacaagagnttttattttaattgcatgacgtatcanacatgtcattntactttatttgataaacttgaacagtcttgttttaagtcataaatatttctaagaaactttatttggtaacaagtgaagcgaatgtgaacatacccacgtggactgattacgatttattgataaaatga

SEQ ID NO: 39402 - DNA, 401 bp, Glycine max
  unsure (1)..(401): unsure at all n locations
ttctacagatgtgagttcttgattantctatntaattggcatcatctaatttctgtcttttcaattatataatgataatctcgaacgctntgtcagatgtttaattctttgtcacttaattatgtgagatctaatctatatcatgtagattcctcttcaaatactctntgctctgtctgtaaagggacttggtagctttgctccatagatgnntttctgctgctttactntgcattctctttgctaaaggagncaattatccttcatatcctcactccttgacttttctttctcatgagaatttgtaccccttgaatctgattgaaaggaatggaagaagaaataatatnaactgaaatgcacactaatgcggaagaatgatagcatctaatcattgtctc

SEQ ID NO: 39403 - DNA, 445 bp, Glycine max
  unsure (1)..(445): unsure at all n locations
agcttccgttttcgagagcatctcttatntatgcatttcagcctttgctttcgtgtagcttaggaaaaacgtcatttcttcttctttctttcttccaaagccatttataaagttccaagaactttatccatcacccacagccaccattagccaccacaaaccatcattgttctccattgaaaacccacaccgagaggaacccttcaaccgaagcggaatcttccaacttggcttgcggttccggaagagaaaaaaaaccctaatctgacatttcgttttctttcgagaggcttgtgtggaatcgacgagcaaggacaaaaaggaatcttcaagtgacgcgacaaggaatccgtggggtagctcacgataggtaaggggagtttattatataaattaccgttntaacaccatagttagggtcagggaacctagctatgaggatatc

SEQ ID NO: 39404 - DNA, 388 bp, Glycine max
tgctattttcatctccttacttcttcaaaaacatgtaaaatgatactattgcccatccctgtttttctacaggccttcccctttcttgcacaccacttttccttctcttgatatatatatttttatttaatttaattatgatatagtttatcattttaactataactgaatgaactatgacacagattatcatatgatgacacaagctatcctttcttaataataatcaacataattattatacaaattagcatcataatatagcaaatttgcatagtaattaacttgagtatttttataaatgataactcctatcataattaaatctaattggtattcattactattcaaaaaatggaattttaatgtataaaagataatttgatca

SEQ ID NO: 39405 - DNA, 171 bp, Glycine max
  unsure (1)..(171): unsure at all n locations
tactctgttctgcttanatatagttgcaagatagatatgaacatatcctgatctcttgaaagaagtntctcttagatatccctgcatcatgctagtgacccaaggtgggtcttatgatgacaagagaaatgctaggaatgtactatcttttatcacattntttactattag

SEQ ID NO: 39406 - DNA, 387 bp, Glycine max
agcttccttattatgattcctaaagaagctatagcttagctacacatacctctttaatagctaagctcaccttcttaagatgagaagctagagcttagctacacacccgctataataactacgctcacccccatggcaaaatacatgaaaatacaaaaaaaatccctactacaaagactactcaaaatacctcgaaatacaaggctaaaaccctatactactagaatggcccaaatacaaggcccaaacaaaggaaaaacctattctaatatttacaaagataagcgggctcatgcttagcccatgggctcaaaatctaccctaaggctcatgagaaccctagggccttcccttggatctctagccgaatctacttggagccttcta

SEQ ID NO: 39407 - DNA, 282 bp, Glycine max
  unsure (1)..(282): unsure at all n locations
gagagaaagtgaactntgagtagtgtctcacaagactctcattcatcacagttacaacaagtgttacacatgcttctatatatagactatgtagcttgcttgagaagctntattgagaaaacttccttgagaaacttctttgagataacatccttgagaagctagagcatagttacacacaaccctctaataactaagctcacctccttgagaagcttccttgagngattcctaaagaagctagagcttagctacacacacnccctataatagctaagctca

SEQ ID NO: 39408 - DNA, 325 bp, Glycine max
agcttattatgtccttggatacatctgagtctcagtggtatttatctagggccaggaaacaggagagcaactccatttataatctgtacgatcatatacagcattggctgaagatcgtagtcatgtatgtttgctgatataaatgtaacccacagatcaatgcaattgatgtactgccaactgcaaattgtcttaaccacctcctatccataaaatataaggcggaatatcagagaatattcctcggcatggtaatatgatactatgcttctatagaaacttgtacatgttatataattgtctaatagactgttcattacactta

SEQ ID NO: 39409 - DNA, 296 bp, Glycine max
  unsure (1)..(296): unsure at all n locations
taatcattgaggccttatggatcatntactntangaatcaaagctagaaaagatgcattgcttccttttggaaagactccattggcatgaaattcattcaagaatctaagcacatctgattntatgagatcccataattgtttaataaaattaacattcagtccatctggacagggctttcggactaccacaatcccatatagctgccttaactggatcctctttgaaatgagccaccaacaattcattatgttgcggatcaatggacctgaatctaacctcaatctctcccactc

SEQ ID NO: 39410 - DNA, 529 bp, Glycine max
  unsure (1)..(529): unsure at all n locations
tggganaanaaatggatactgatngcattngaaannccgngtgaattcnttgttgancccttcngtatcccagannanctgtngaatgaacgcangccatttcgagaatcctgacgatgtgtgcacctgattaggataccgctgtaatagcatcagaggatcttttcaacgatgagaggatatcggtaaccaagacgccgggtactgaatgcggtgcgctccgtggccttgatgcgatcattagtatatccttcaaacaatatcttatctaccacgtgcacctcatataatggctcatcatcatcatgatcatcatcgtcgacatcatcgtcatcttcttacaggtggcaggaggaggctgggggttcaagcatagttggctggacgagcttctgatccccatggacccgcttgacaacattgtggggcgaatactcatattacatatctgggataccgtgctccgctctaacctccctgtgaacaatgatggaggtggccgcagcaaggtaaagaatctcgggataag

SEQ ID NO: 39411 - DNA, 602 bp, Glycine max
  unsure (1)..(602): unsure at all n locations
aggtttgtnncccatgatgtgtcgtccannannccncacannanactgaagctnacctcagctncgtacacacctgactcanaagcctatctgagtattctcgacaacaacatagaacgcaagctgtccgccgtacgacatgaatctcacacattcctcaatgaaagaccgcacaatgcgacgacaattctgtacagtggatgaatatggcgccacatatggaaatgcttgtatgatatctgacgtctgtatctggaaagaaagctcatgcatggaagactcatactccttcttcataaacgctctgctcaaaattatgagaccacaaccgcctccgctattctgtttctacagtcagacaaaagcatcgtatagtacatagcgctatgtttgctcaaacagtaactacgcttaatggcgtccatatctactctagggatcataccactacatatcttaacaacataactatagcattgcattctgagactgtcctcatacgacacttttactacacaatccaatgtttacttcatttgattaaccacccgtctaacacatctcccacagacctgcattgcaaacgtgagcatcnatagacn

SEQ ID NO: 39412 - DNA, 490 bp, Glycine max
  unsure (1)..(490): unsure at all n locations
ttganccccttcgagaaccgtttganacatgttgaaacatttgtagtccgnatctttaagtcacctgctgcatctttcttgtggcgttgaatgttattcaaatttcttttggttaacctgggaatactggaatcatgaatacgctttgattgcatgcgagtaatcccccctgcttcatcatggaaatcaatgtaacttctgctgcactcactttctaacctctggttagtgattcttgacatcaaagaaaaattaaatgctcgattacaatccacatccctataatttaagtgtgaaataactactatcctccattcatttccataaattatcatgaaattcatccctctctattccttcttatacatgttaaaatccagagatatagagtaaaccattccattagatttaaaagaaataatctcttgaaataccccttactttcgttagttttatgttgagtcatgagagtgacaccaaataaaacaag

SEQ ID NO: 39413 - DNA, 399 bp, Glycine max
  unsure (1)..(399): unsure at all n locations
gttacttacaatataacaagtntaatcaaaagcatttantatatctattcaacttagaaaaaataaggacacatgggaaaagttaacttatagtttattacaataaaacctatgtatccaacatcaatcatcatctaacacgaaactcaattactgatatgcatagacatggatgatcccacaccataatacatataatccaatacattctgaatttcatgaatcagtccaaggaaaaccagataacangacattaacatcaataaaatatctttttattatctccaaggcctagactccaaggagtccatcangacctctctcttctaattcangtcaacccagaaaatatttaatatacagactctgatctatgaactatgcatacacacaactact

SEQ ID NO: 39414 - DNA, 335 bp, Glycine max
  unsure (1)..(335): unsure at all n locations
tatctntntacaacgcgtgaataaggacatttctactaaaaatgtccttaacaaatgaccggnggcatttttatatataagagtatgcgaaccattcagtacgatgatggtttttatcaaaaccgtcgtgatagattgggcaagtatagagatcgatgggaggtggagcctgtgagccatagtcgctgaagaagctaagctaagtttgtgaagtgtgctcccaatctcttctctcccattcactcttcactcgtgtgatttattcccccacactcttatcgacactcctctatgacctattcctgaacgctcccattgggaaaaaaggtttcagt

SEQ ID NO: 39415 - DNA, 446 bp, Glycine max
atgcaagcttcagtgttgttgaaactcccttgttcatatcctcttcatttttgttgctgaagaatcttctccttgatgtcttaaagttggaggcttcacatatggtggatttcctcttcttttgacactgctccttctcatctgaaggattgctcatgttggaagagatgaatattattttaaactctgatgggatttgtgattgtaaactcataagaaagaaatgatgatcgggctttgagtgtctgcactactagcattattgtgtatttgtgaaatggaagtgaagactcatttcccctttctttcaacatataaatggatttctcatctttgtcatagccagaggaaaggcatttctcattcttcttttcaaaagtatgaatgagataagaatctccaatgtcatacaacttattgtcaatatccatttatgtaattatgtt

SEQ ID NO: 39416 - DNA, 109 bp, Glycine max
gctatatatatcaggcgctcgaagtgaacaacggaagctctggagagtttcatatggtcataactcttagctcggagttcagttcgtgcgcatcacatatagagacgct

SEQ ID NO: 39417 - DNA, 437 bp, Glycine max
  unsure (1)..(437): unsure at all n locations
tcttgtgaactatagctctgagatactgctctactatcctgttcagcacctctgtttgtccatcgctctgcggatggtacgcagagctcatgcgtaaatgagtgccgctagccttgaacagctcttgccaaaacttgctgataaagagggggtccctatcggaaaccaagcttcgaggaatcccatgtattttaaccaccatgtcgacgaacaaggatgccaccatatgagcagtgtgagacgttggtaacattcccagatgaatccccttcgaaaaacggtccaccaccacgagaattgtggtttttcgtgatacgccggcaggccgacaatgaaatctaacgagaggtcctcccaaggtcgatggngcaccggtaaggggcataatagtcctgcgacgcgttgtgtctggtacttagtgacctgacaatccatgc

SEQ ID NO: 39418 - DNA, 446 bp, Glycine max
  unsure (1)..(446): unsure at all n locations
tctgctgaatcttccnctattcttctcaacaatgatcttaacccagagtttattctcgtttatttcttccactatgacctcttcctgcagaaactaacagtggcaaggcaacattagtaattaacaattgtagatgggctattcactttattatgttttcaatcaaagagagaatctcattgatgagatgacctgtatccnccaattcttcatatcttccgcagcatcaatttcaactaattttgtctctgctggttcctctgaagctgcttccattnggtgaagctcttggctgagactctgaaccttgtcttgcagcttctcaatgtaggtgatagcatcttcaacaatcattgcttagtcatctagaaccaaaataagagttataatacttacattcaacaataatgtacaattgatactaaccatttaactatagtgataac

SEQ ID NO: 39419 - DNA, 412 bp, Glycine max
  unsure (1)..(412): unsure at all n locations
gcatatttttcaccccaaaacgtcctccaagcttccaagaatgaaggcactcatggtatatgcgttttttcagccctaagtcaccgttgtttgtgttaatggttccatttggccttattgctcactccatacaagtaagtacaccaccctcaatggcatttatgcatgtttttgtgaaatataacctatggaacgaattggtatacatgtgattgtcatttttaagtgtgtaggcagtttcatggggggtagaataattgccccaaatataccttatgcctaggaacccaagcttgtgttnttgagtgcaagagtgcatgaaaatgagagcatttggtgagggctgcaccatgatggcttctttgcacctatatgatgtgaaagtgtttgtttaccatgtatatgcgtatat

SEQ ID NO: 39420 - DNA, 325 bp, Glycine max
  unsure (1)..(325): unsure at all n locations
attcagacttagccttccaccctagagtctcactcttttattttttttttttccactcataacatcacattctcactttctaaccttgngttaagtctacccttcatctctaacagatttccatcagcaatntcagcatataaacatcacatacatcatcacaaaaaccctataacaaaatgggtatgtctaactcatccaaacatggcgagttcaacaagttttcaacaaatgccttcacaaataatcatcacacagcagataactaacanaaccacccatcatatctcccagaaccccatacccacgaaatgtaagagagaaa

SEQ ID NO: 39421 - DNA, 341 bp, Glycine max
  unsure (1)..(341): unsure at all n locations
cataatgagaagataatttgcagtctaacactcataccacttttataatacttgatccgtttcagaatatgtcattcaagataattgcacaaagattaagaaagccactaattagtctcaattatcataaaatataatttatttcctttntatcaaaatattggcactcctgactccactaatgccattgctatctctcattccacttggtagagataagagagacaaagatatagttgggacaaaaaaaattcaaactttaattntctaaaatgacagataaattgaaacatttttttatttaaaaaaaggctaatattttgaaatggagagtatatttg

SEQ ID NO: 39422 - DNA, 328 bp, Glycine max
  unsure (1)..(328): unsure at all n locations
gcagacaatcgcgttccacggtttccaacggcacagcccgatgtaatggcagcgaacccgccaagcaggccgttacacacgtcaatcacgttccagtggccaaccaataaccgcttgctgaacaacgtcgtcagagccgcagtgctcccagccaatgtcgtcgtgacagctgtcctccctatagcgctccattgaccataatacccttcacttntcatacccttgtctattgtcacaaacgaaccagggttgaagccgtaccagccgaaccataacataaacgtaccaagcacaactaaagacgcgctgtggccacgtaaagcaaccg

SEQ ID NO: 39423 - DNA, 442 bp, Glycine max
atataataaaagaactgactattgaagaatctattcatgtttcctttgatgagtctaatgctatttctccaagaaaggatattttagatgatgttacaaaatctttagaacaaatgcacattcatggacaagattctaaaggaaaagggaaaggaagcaatgaagatcctccagaagaagtcaaatcaaataatgaacttccaaaagaatggaaagcttcaaaagatcatccccttgacaacattattggtgatatctcaaaaggggtaacaactagacattctcttaaagatttatgcaataatatggcttttatgtctatgattgaacctaaaaatataaatgaagccacaatagattatcattatatttaacttatggatgattggcttatatttggttgtgacttatgattgattatgtatactttagttatatcatc

SEQ ID NO: 39424 - DNA, 378 bp, Glycine max
  unsure (1)..(378): unsure at all n locations
taagtgtggggggtatgtttcattggaagatatgaattttggtcatgctctaatgtttattntggccatgtttgatgtatatatatattgcctagttcttgctntaatcttcaaattcaatctataananaaaaaagagaanaaaaattcagntgctgtaaattctgcacattcgtactattaananaattgccccaaaaaaaagaacagacgacaagacgtgacagtgaataaatgaggtcttggtatgaggtcttgttgatattagagggtctgggttactacatgtgtntaattccacttattcccattgctctctattccttgggattagctacttattccatattnttcctaccttgtcttggccccatacac

SEQ ID NO: 39425 - DNA, 400 bp, Glycine max
  unsure (1)..(400): unsure at all n locations
ttggaaagttagttntaccagtgggacactactcttaaaacaaaaatgacatacaacctcctcccataaatacaaacatcaatgtaaatttagagcaagcttatgcgcatatttccctacgaacgttcacttgcacaagacatcctattaactaagaaaaatgcacccatatacaatcaaggtagcttcattacctagattatttacatgtacttccaaggtgtatttgttatttacatcacacacgcctccttggctaaatttacatacatgcatactcaaagcatttcggggtaccaaaaattgcacatgcgctcatcttggtatttctaatacctatacatataagaacttcatgatgaatcttgactacctacgcaataaggtgctacatttcatg

SEQ ID NO: 39426 - DNA, 338 bp, Glycine max
  unsure (1)..(338): unsure at all n locations
tatcaatttacacaagttgtgttttattcagaanattagagtttatctcttttatcttagtgagagtgattctcctaaattcttgagtgattcaagaacaccctggctgtatcaaaggactttcacaacctttgtgtgttgccctcgctggaaagagtgattctttgcttcctatcatctccacccttgttctttcaaaccacaattccagaaaatccacctctgtccaaaattatctcgtgaccataactcccattttacacactcaaattaagtgattcttgagcctaaattgaatttcaaaacgagacctttcacctcgttttggaatcacctca

SEQ ID NO: 39427 - DNA, 633 bp, Glycine max
  unsure (1)..(633): unsure at all n locations
agacgnccattgaaacccattgatacgccagtatatangtacactataaatactcaagctcgatatgangaagtgttgaaaggtgaaacttnctgctttttattgtgacctcagagnnnggacctggagatatgtctttgnggtcangagaaccttgggacgtcaggtggggtgctattgcccataaccaagcttgaccaatcccgacccaacccgggcatagtcggtcagtgagaacctgtgatgtacctaagcaggcgagctcctggcagtcaacagaatataggaanacaagaccacanagcanggaggcttgtggtggctcgccagctgtgaattntgtgaatatgtggattgtggcctctggtaaatcgataccaagggtgggtaatcgaatacaaggcttattaatgaagacaggaggctaagatggtctctggtaatcgattaccacggggtgtaagtcgataccangcttgaaacgaggcatgaagctaggaacctctggtatcgataccaggtgtgtatcgatacangctacaaaggactggagtgatgaagctctgtatcgatacagctgtgagcatacacaagatggcactgtatcatacagcatggatcataccaggatan

SEQ ID NO: 39428 - DNA, 417 bp, Glycine max
agcttcaccctgatcctcctcaatctttactcttgtggactccgctggtgaacttgagttgcccaatgaatgttgcacttcatctgacacattacgaggttcatgctcatttgatgcatggctcactcgctcatgggtctctggaactctatgcccagcctgattgtcatgtttccttgcttcggcatcttttgcaccataagcaacatttctatctacgtttgcataacaatcaagcaaaaagtccttcttcttggtaacctatgcagatattaaatacaaaaaatgtcaataatttaaaatagagagataggaattaaaccataaacaagcacgtcacgttaattaaaaaatttataaatatacactataatgaagaatgaaggaacgaaaacttttaaaatctcgtactaatct

SEQ ID NO: 39429 - DNA, 177 bp, Glycine max
ataggaaatctcattcaggatgatattttcatcaattttaaatagacaaatatgatattaaactcgacagctattgacttctaagctctacatggcctacacaacagtttagtatactgtaagagcgtaataacttatattaagctacatatactatcaaactgacaagcatgtccg

SEQ ID NO: 39430 - DNA, 421 bp, Glycine max
agcttccactcttaaaaagatagattcctttgtgcttatgaacaaggagaacctccacatcattatatctacaatcttagctataactttcaaatatgatattagttacaacattataaaaatgcaagacacaaaatcagtgcccaaaggtaataaataacggtttacttacatgaaatttgtagtgcctcactctgcattcaaccaaagctggaagaatgcaagcaatgagaagcaccattcgaacccaatgagaatccatttctctatctctctgtatcctatctacaacactttctcttatgccctgtcttaatttgtcgtacttctgatgtccttgtgtgttgccttcacaaaggactggccaacccacacttatatataccgccatgggcattgctaccacgtacttttaactatg

SEQ ID NO: 39431 - DNA, 347 bp, Glycine max
  unsure (1)..(347): unsure at all n locations
aagattactcattgtatagaattctgcanagatattctccattattggcatgaagtcaggatcttggcacatccaaatacaagaatctgataggtacaatactgtcttcactgtacctttcgggcaatatgaatagaacgttatgccatgtggtttgaagaatgccccttcagaattccaaacaatcatgaatgacatctttacatcctattcanaattnttcattatctatatagatgatgctgtaactgtttctcacgatattgatcaatatctttaacatctgtagaccttcattcacattatcaaacaaaatggtcttacgggtctccaatcgaacatcaatc

SEQ ID NO: 39432 - DNA, 304 bp, Glycine max
  unsure (1)..(304): unsure at all n locations
tgctntcaagaatttcaaatggtcataattttgacacggaggtcagattcaggcgcctaatatatcgagacactcgaaattgagcaacggacgctctcgagaaattcaaatggtcataacttttaactcggatgtctgattcaggcgcataatatatcgagacgctcgaaattgaacaacggaaactctcgagaaattcaaatgctcataacttttcactcggaggtcagattcaggcgcataatatatcgagacgctcgaaattaaacaacggaagctcacgagaaattcaaaaggtcataac

SEQ ID NO: 39433 - DNA, 280 bp, Glycine max
  unsure (1)..(280): unsure at all n locations
ctcaagagcttccgtngctcaatttcgaacgtgtcgatatattatgcgccggaatctgacatccgtgtcaaaagttatgaccattngaatttctcgagagacttccgtgttcaatttcgagcgtctcgatatattatgcgctngaatcggacatccgagtgaaaagttatggctatatgaatttctcgacagcttcccgttgttcaattttgagcgtgtcgatatattatgcgcctgaatctgacgtccgtgtcaaaagtatgaccatttgatttctcga

SEQ ID NO: 39434 - DNA, 327 bp, Glycine max
acaccatttttctgaaggggcactatgtgataacatcatcatcacaagtaggacatccatcacagcgaatgacaaagaggatgctacagatcccgagctgacactgatgaacacagccctttttcgtgttgaagaacatcaagcaagggcgcctctgtgataaaaatcagatagctcgtcgttggaggaacaaagaatgcatcaaaatctcattcattcctataaggaaactggatctcttttgcaactatatgaccgtttacttttataaaacatggctaaaagctggacattcagaaacatctggttgtgctcaaaggatcataa

SEQ ID NO: 39435 - DNA, 284 bp, Glycine max
  unsure (1)..(284): unsure at all n locations
aacaagctctgaacaatatacttggtcttcannttaactgtcttgggctnggcggccacgctcaacanagtactttcgacacctactgtacgttgatntcacccaatgctgtatgggaatgttgcgacaatcctttaanaccttattgatacattctgagaggttnngtgtcatgtggtcatatcgacgtccttctctatcgtaagccatcgtccatttttcccttgagatgcgatcaatccatgttgctatggctggactcagttcacgaaaattttctaaat

SEQ ID NO: 39436 - DNA, 440 bp, Glycine max
catccccttggaaacactaacaaggatagtgcatgtgcttacgtctgggtaaaggttcgagggcgctcttgaaaaggctcaaacaaggggtgcttgtacatgatgcaagctattatactgccgtccaattggagggtccagaggtagattattttagctttagttatagctttaatgttggaactttcttctttttcattgttatacatctgagtctaagagacatactaaactgatgttctgattcaaacatattgaaatgcatgcatcatataattattgcgggctgagatggtttaattatattagttttatttaaggctctcttgtatacaggattcattaatgtcagtattaagaatggtgctggaaccctatccggcagcagcacctcatgctggagatcatgatgactctgttctttacagtgtaacctatgg

SEQ ID NO: 39437 - DNA, 655 bp, Glycine max
  unsure (1)..(655): unsure at all n locations
ggctctgtnaattgcgcacttganggcatctttagtcgcctctngatctcagcgtgctgcagagtgcgatgcactagcgtctatagaagctctatgggtgttctagacaatatgcacctctatgtgttgttagctcatggtgttccacccgtgcttctggcagacctaggagcctatttcatttgtgagatattatagaggactctgaagcatgcctgtctgtaatctgcgggctgctaaagagatgtaatatccccatctgcgttattcacaaaataagacacattagtgttcatctcgtttcttatttccatatgagagaatcatgttcatctcagatcttaaataataattagtgaatgacatatacctgcaaacagcttgataggcagctgggaaagagatagctaagaaatggctgatggacataagctttttgatgatccgttattaattccacttctgtacatcgttatactatgacattcaaatagaattcaagttgctatcacggaagtatctatcattctgctcaacactatatagtagaagtgctataactgcctgacgatagtggatccctacaccagccttgtgatcatgctttgcacctacacgtattctgaaggaactcggttctatgatctcttgcctn

SEQ ID NO: 39438 - DNA, 442 bp, Glycine max
  unsure (1)..(442): unsure at all n locations
cattcggagaggttccatcaaccgttataattccttgatgctggttgtatctaggcttttaaccttgacttggtagaacctcttgccggtttgatttgatcccatgcttactaaagtgagacaaaagctggtgcaaatcaaaactccgatatctcatgggtgggatggatgaatgcatgatggaatgcatatgacacagatgcaatctatgaatgcggnggcccgaggaattgtctccttcttagatacaacgtcaaggggtagcaaagtgccccaacatacgtttttaagaaggcgacacggaccctccattggtttgtttatagaggggatcaagacagaacccatatgcgatgcatatgtaatagacgcaatacgggaatgtacatagtatgacaatattcactgaacataagcaaaagggtatatgatacttatgcat

SEQ ID NO: 39439 - DNA, 402 bp, Glycine max
  unsure (1)..(402): unsure at all n locations
ctttaccttctcttccattggtgtnttcttcattttctccatgtatctcctcacatgtcttgttctanatggtgttaacatgattctntagagtttccaccgattaaacttgctatagaagttagatntgattntctatggttcanatntcttgttcttgttcttgaaccatgaattgtattgagttangttcctttngagtttgtcttggttatttttgtggctganacctanatcataaaattcttacacanatattaaagtagaagaaaacctcatanatctagagtgactngttcacctatngtagttntgtcatagaagtcatgtctagtcatgaaacttgtcacataagaattcttatngtgnngctgaatttatttcttgttctntgctaactca

SEQ ID NO: 39440 - DNA, 461 bp, Glycine max
agcttcccagattcgatcatggaaggacttgtctactgccttcattaggcagtaccagtacaatattgatatggctcccgatcggaaccagcttcagagtatgactaagcgagagcatgagtgcattaaggaatatgcccaaagatggagagatctcgtagcccaagtcgtaccgcccatgacggagagagagatgatcacgattatggtagatacgttacccacgttctactatgaaaagctgataggctacatgccagctaactttgcggatctcgtcttcgccggaaaaagaattgaatctggattaaggaaaggcaagttcgaatatgcctccaatgcggcccccaacaacaacagaagagccctagtagtgggcgcgaggaaaaaggaaggagatgcccacgcggtcaccaccgccccgacatggatgaaagcaccccataatatccaaagctcat

SEQ ID NO: 39441 - DNA, 209 bp, Glycine max
  unsure (1)..(209): unsure at all n locations
tgtacagtccttagtatcagtaattgcaactattgtttgtcacttccacaatttggacaactaccttctcttaaggagcttgtcattaaaagcatngaaagccatgaaatagttggtcatgaaatttactgcaacaacggaggctcccctacttttcagccatttccattactagaaagtctccagtttgaagagatgtcaaagtggga

SEQ ID NO: 39442 - DNA, 424 bp, Glycine max
  unsure (1)..(424): unsure at all n locations
acaatgagccacattatgttatgcactatgtggttattgtggttggggctgaaaggtcgaaggagttagatttgaacccgagaaccaataatgataacagggttaaactaattgaagaaacatgtacctttcaactcgatattaaaaaggaataagttacctaactcgaaaaccaactctcaatggaggataagagcaacttacaacaagttattagggcacatgttgacatgttctcatggttcgcgacctacatgccaagcataattgccatacattatccatatgttgagacgccaaactcgtagctcagaggaagagaaagatgggggaagaaaggtgtcangcagtatggcaagaggtctccaagctgatggtagcccaacatcaaagaagtagactacaccacatgactgtcaaatgt

SEQ ID NO: 39443 - DNA, 448 bp, Glycine max
  unsure (1)..(448): unsure at all n locations
gctgagcactccacacttatgtactagctcttgaacgccccttgtacaataacaatccgtaataaaaatatactntataacgttcataanataaaaatgtntattntaatggtccanaatacttcaaatattataataaatgagtccttacaaaaataaacaactntattctcaaatatgaacagctacaaagtttaacgaacaatgaactgagtcttcaattctcttttgtcttaaaagcttcttcctcgaactctttaaacaacactnttaatgagataataatctcaatgaataaaataagttctgaaaggattcacaaatagtgttgttctcagacgacgcggtaatcagaaaaatccaataatgatatccataannataaatntaanataatatatacataccttaaaaacaaccacanattattcatacaacgaaataacac

SEQ ID NO: 39444 - DNA, 409 bp, Glycine max
tatcttcttcctaaattcacgaagcataatattaacaaaactatatgattagttttcccttggcccccactcgatgtgcattgtctatagtttctcttaatattatgccaagacataaatacgttaagtaacattttctatatacttgatatcgggtcgcgaactaaggacatgtgtgcacaataagaataagaaaatgacatcgagacagtgatcgtgtgctgttaacatttcgtaataatgtgacggcagcaataatagaaatgagtcgtgaatatgacatagcaacgcatcaacattcaaaattagcatatctatcgtttgactggttcatgtgaactcataaaaacagtttctgaccagagcgcgcctgtgtggacatcgcatgaaactattaagtactgtatga

SEQ ID NO: 39445 - DNA, 423 bp, Glycine max
  unsure (1)..(423): unsure at all n locations
agctnttaacattggttatntaggactntcatcatcagttattaaccgatgatgaaagtattatcgttaacatcggttntgttgaaaactgatgttaacgtaaaattacaacatcggttttttaaataaccgatgttgttagtattcgtcaacatcggttttttaaaataccgatgttaactaaaactgatgttaacgttggtagttaacatcggttttttaataaaccagtgttgttagtgtaggttaacatcggttttttaaaaaactgatgttgttagtggatgttaacatcattntttttaaaaccgatgttgcttttaggaatttttttaatatactgtctgctttttcaataaacccaaaaattaagctgcanatttaaattagatcacacaacacaacatatataattttcattct

SEQ ID NO: 39446 - DNA, 542 bp, Glycine max
  unsure (1)..(542): unsure at all n locations
gagcgtgtccttaagcactgtaaactcgcnncttattgcattgaagaccgagcttaagaggggcnccgatatctacaggatattatacgctctaccatgcactccattgttgtgtcttcagtttgtcccatgtatctccacacatgtatagttctaaatgttgataacatgattctntagagctccaccgattaaacttgctatagaagttagagttgagagtctatgagtcatatttcttgtcttgatcttgaaccatgaatatgatagagttaggttcattgacgtatgtctagcattattgaggtggacctagatctagaatcttacaagagtttatagaaagatacctcgtttctaagtgctcgtcaccattgtagttgaatagaagtctgctagtctaaacttggcatagattctatgtgggtgattacttctgatttgtcaacattgtataggatgaagctcacctattaagcggcaattctgtagaagctacagtcgctatctaaagcatatggacttctacttagtctatatgg

SEQ ID NO: 39447 - DNA, 192 bp, Glycine max
ttcacagtatgactaaacgagagcatgagtgcattaatggatattccctgagatggagagatcttgtttcccaaggagtacccgccctgacggagagaaaaatgatcacgattatggtagatacgttacccactatctactatgaaaagctgataggctacatgccagctaactatgcggatgtcgattttg

SEQ ID NO: 39448 - DNA, 387 bp, Glycine max
ttctccctgtctgggcatctggccagtctccattccacgcgacctcaacccgaaactacttctgggttgggcatacaaaaggggtggaaccctgcccctactagctgaggctgaacaggtagatacactcatgtatatgcacctatccatggtggttggtcgcccgctggcaaaccacatgctatagatactgctccacactcagtggtccagacgaatcggcctgccgaggtggtggcgatgcacccgcggtctgatgtgcgtcaccctgcacctgcctaggcgtgcagtacttctcgatgaatgctcgggtgattggcggccggattaccttgctgggggtgacatgcactccgtagaactggaagaggcccgtgatcaaaactg

SEQ ID NO: 39449 - DNA, 546 bp, Glycine max
  unsure (1)..(546): unsure at all n locations
catgatgaatcanaggtgattcanaggggttttttatgataacanattatgatngaaaaggtgatgacaaanagctcanagatcaatcaaagaacaactcaagtgaatcaaagatcaatcaaagaacaactcaagtgaatcaagaacaattcaagacttcaagataagaatcgagaagaattcaagactcaagaagaaagtttagagtcaagaatcaagattcaaggctcaagatctcaagaatcaagatcaagatcaagattcaagactcaagaatcaagaatcaagagaaggcttaatcaagatangtatgaaaaggttttctcanaaatcgagtagcacatgattnttctcaanacatgttacccaagagtttactctctggtatcgatactagatgggtgaatctataccantagcagaatggtttgaaaaggttcaaattgatttacanncgtcataattcaaaagccgatcgatcatgtttgtatcataccatgcttngacgtaatcaatcaattgagagccatcttcacatatgttctn

SEQ ID NO: 39450 - DNA, 603 bp, Glycine max
  unsure (1)..(603): unsure at all n locations
agctngagtgatattgtcacagaatacacttgaggcacctcctccatttcatccaccccacttgaattctagtcgcgcattagttaaaaaggtgtatattttgacaacatagaggagaaataataatcaagggaatagtcattctattttcaaaataataattgttacagctgtcatgaattacaagtagttagttagagggggtaagaaaataaataggaaagactgacagagggaggagaataataaatgtaagaagagttggcctctcaaagagccaagttaggattgatgcacctcttgctacttcatatatttcatttaacttaaaaatctggatcgttttagtacctctggtacttattaatgaatatattatatttttggctgataaaaaaaaaatatatttcatttaactttcacttaaaagtcgtgtgcttccaaaggttgacccacaatccacatctatttctctatcataactcacagcattaaataaatntagaaaagtgggatanagctnggttgtacaatatggatttaattcactcctattcttgaataacangaatatgaatatggtctagctatagagtaatcaaa

SEQ ID NO: 39451 - DNA, 310 bp, Glycine max
gaccaccatacagacctttgcccttccatgcagcaacctggagcaatcgagcagcctgaagcttatgatgcaatatattacaatagaccttctcaacctcagcagcaaaatcaaccacagcaaaacaaatatgacctctccagcaacagatacaaccctggatggaggaatcaccctaacctcagatggtccagccctcagcaacaacaacagcagcctgccctttctttcaaatgctgtggcccagcagacatacattctcaccaaccaacacagcacacctagaacaccaacgtgaggccctcacaac

SEQ ID NO: 39452 - DNA, 532 bp, Glycine max
  unsure (1)..(532): unsure at all n locations
agcttctattttagacctcgatcgatcatctntgatggccgatgtcgactgtcatttttttcgatcaatatcggtgaataatattttttttgccgtgaaaggctaatgttttgctggccgaataaatgtgaacatgccatgtgtcagtccgaacataacgtacgtagagctcgcacaaaaaaacctatccgacctacattgtaaactttttacgcaacacctataaaaaaatcttcctctgccgtaaaaaaacaattatctgccagcgagagttttttaaaaaaattgctcaatgtctgctgaaaaatatcagtcggggctatttcacgaccgatgtcggctattgagttttcaattcaatccgtgaacaaaatttgcatgatgttggctacgaaaagttctatcagcatcatcttgtgaaacttttttatagacttcgattgtcatgtctcctggctgatgtacactgtaatcttttcaatcaatatatgcgaataatatttgcttgccgagatgagctaatgttttctga

SEQ ID NO: 39453 - DNA, 469 bp, Glycine max
  unsure (1)..(469): unsure at all n locations
tgaacgtganacccgaatttcaaaaactcagtatatacttatgccataacctaggaatttttaaacttatggctgactgtaactgatattgtggcgaccacaagtcaccccctacagtcaacaagttagccaccaataggtcttccgaaatgctgatgcctatgttgccaattgagaccttattacaacttgaactatacctaactaaagccttttagntgattaacccaaaacatatctttgctcacccaactatacaaggattgtgccattatttagactaactaaactctctaaaatgcaacaagtggtgtcatatagactactccattgggccatgatcactcacaacctggactntattcatgaaactgcgcctggatccatatgttgacagctcatgntgaaacaccgtgggcttacatgctttagccgtgcataggtacacaagccttaagtgaacctgcct

SEQ ID NO: 39454 - DNA, 761 bp, Glycine max
  unsure (1)..(761): unsure at all n locations
tgcccaaccatgaagtccttcttaattatcatgctatcatggaacttgttggacttttcttagtagaacatggcattctcatacgcttctaagcagatctcatctaactcactcagttgcaactttctttcctcaccagcttgatccatagagaagttacaggtcttcactgcccagtatgctttgtgctcaatatccactggaagatgacatgcctttccaaagacaacccgataaggagacattcctatgggtgctttgtaggcagtccgatgtgcccaaagagaatcatcaagcctggtactccaatctttcctgcttggctgacaatcttctctaaattctctgatctccttgtagaaattctgcctgccattggttangggtggatggagagataccctgtgtcaacctgtaaagcaagcttcatgataaatcagattgatcaagatgtttgatgatacaaagtgatgacaaagctcaaaggtcattctgatatcaaagaagagtcaaggtgtcaagatgttagatgttcagatgctcccgttcagaggaattgcattcagatcaagataagatcgaggtgagcttccagatcagatcagattcagatcagattatgatcagatagactatcaagaaagttgaaagggttttaaaactgatacaatggttttttcaacagttaccaaatattactcttggaacgataccgatgtgctacgtaccaaagcaatggtttcaaagtttactgattcacc

SEQ ID NO: 39455 - DNA, 295 bp, Glycine max
  unsure (1)..(295): unsure at all n locations
cactcacgcagatataaagagaagcatcgcgggaaagaagagcggcggtcaaagctcgcggctgagacaagaaagtgaagggagcccgccctgccacataagtagaagctttataagcgcgggtctgggagacgaatgtcaagtggtcgcgatataccaagatgatgttccaagtacattggatttggcacgaccatgcnctcctgatttccagctgggaaattggcgagtggaggaacgccccagcatttacgcaacgagcataatggaaacctctacgggtttaaaagctcta

SEQ ID NO: 39456 - DNA, 478 bp, Glycine max
  unsure (1)..(478): unsure at all n locations
agctgttatgatctgtgtgcacaataaattctctgcccaataattaatgtctccagggctgaatacaaagcacaagggccatcaattccttctcatagacagattttgccagattcccatcagataaagctttactgaagaaagcaataggtcgtctctgctgcattagaacagcacctatacctctgccagccgcatcacactcaacttcaaaaggtaaatcaaaatttggaagaattagcacagggggggaagtcatgatccccttcatctcctcaaaggccttgacagcctctattccccaagaaaaattgtctttcttaatcaattcggtgagaagggttgctattttaccatacttctggataaaccttctattataccctgcgagactcaaaaaaccacgtacccccttcacattctttggtgtgggccatgccanaatacacttcacctttttatgggccactgcccacct

SEQ ID NO: 39457 - DNA, 454 bp, Glycine max
  unsure (1)..(454): unsure at all n locations
tctactaatatatggagttggtcactgctttgcctgangatggcaattgctagaccataacaattctagaggcggtaaaggacaatggtcttttaaataaacctgttgttggatcaagtgacctctgaataattaagaatggggagggggggttgaattaattattattgtaccttgactaattaaaacttatccttcttaatgttactagactcaattaggatttactactaagttatgtaacttaaacaaaagtaaagcgtaaaagtaaagtacacaacacaaattaaaaagtgtatggaagaagaaaacaaacacaacaattttatactggtttgcgacaacccgtgcctacatctagtccncaaacaaccactggttcttgagatatctttcaaccttgtaaaatcctttacaagcaaagatccacaanggatgtactctcccttgttct

SEQ ID NO: 39458 - DNA, 286 bp, Glycine max
agcttctagattgctagcggagcgaagtatgacaaatttagatttttttacaggatagatgggcaacactatattgaaccttggagaacaaggatcctcactactcaagagctctataccaccttgcggcaacataatcctgcaaagaaacgagaggacatatacgctgcttgatgacgataggagcgctatgttgaacgtgagcattatagaggcatgtgattggtacagcgcataatataaaaattggtgtgttactgatagcctctctggcaataccaaaatt

SEQ ID NO: 39459 - DNA, 427 bp, Glycine max
ttgatgctagtagcaatgaagagaaagttcattattaaacttgggaaagatctaacagactcagcctaatgttgatgagaatgactgttgcaaacagtattaagacaactctccctataatcgaaagtgttaaaaagtttatgtgattagtgggagagtgctctcaaacaactgataagtctgttgctgggacattaatgagtacattgaccaccatgaagtttgatggttcacgtactatgtatgaacatgtcattgagatgacaaacattgcagcaagacttaagaccttgggaatataatgactgtgaatgagaactctcttgttcagtttattacaaactcattaccgtctgagtttggcccgttctaaatgaactataataccatgacagataaatagaatgtgcatgaattgcacagtatg

SEQ ID NO: 39460 - DNA, 644 bp, Glycine max
  unsure (1)..(644): unsure at all n locations
tactctacactgcagcttgcagcctgctatcttctatctccaagcagatatttttgaacaaacaaaacataagtttttttatcccaacctatatttctagtttcagccacatgctaccttaaccacaattgtgttccagcttctatctccaagcagattttttgtgtcaatgtaatgttttcaaacttaaagggggttgggagtttaatttgttcttcaatctttttcctgaagctggtgatttttgaaaaactcacataacttgtatgacttaatctcaaccattcatagcaaaatctagttgtgaatatctatttttgttgttctcacgtaaaanaataaagtcctatctagggaaaaatgtagtctgtagcactactaaagcatagcaaaaatcaaattgctcattccacaattgttgcctgataaaagcaacatctaaaacaattaaatacaaataaaattctgacccacctttcctcgacaaacatgaaacaccaagtaaagcagctcttcctttttcctgaagctggtgattntgtgagaaaatttcttagtgcctgcaatcttatttacgttttctttgttngtatatagctgtaaggaaattcaatgatagtngccacaatagcataaaattcatt

SEQ ID NO: 39461 - DNA, 387 bp, Glycine max
  unsure (1)..(387): unsure at all n locations
gtgaagtagtggaacttggtggttagttaagaattaaacgtaatctcagtggtggagacaaaccagtataactctctgtcttttgtgctttcatttcttctttactttaaactggcctanggtttgagttggattgtgttttgaaaactctatttgttttgcaaaatttgttttcatcgtctaaaagagattttgcgaaaaattgttatttgtcttaacaaagcatataattagagagtgactnntgttttcacaaaaaggtttaaaattntctaaaatcacaattcaactccccttcttgtgatattttcccttacagtttggtattagagcttagcctctaagggttgaagacctaatagtgtctataggaaaagattctgattg

SEQ ID NO: 39462 - DNA, 580 bp, Glycine max
  unsure (1)..(580): unsure at all n locations
agcttgaagaggatgctttaatggaggaaaagaaagatggagagaaagagaggggggagcacgaaattgaaggaataaaagaggcagagaagtggaactttgaagtatgtctcacaagactctcattcatcaaagttacaacaagtgttacacatgcttctatgtatagactaggtagcttccttgagaagctntcttgagaaaacttccttgagaagcttctttgagaaaacttccttgagaagctagagcttagctacacacacccctctcataactaagctcacctccttgagaagcttccttaagaagattcctaaagaagctagagcttagctgcacatacctctctaatatctaagttcacctccttaagatgagaagctagagcttagctacacaccccctataatagctaagctcacccccatggcanaatacatgaaaatacaaaagaaaaatccctactacaaagactactaanaatacctcgaaatacaagggctaaaccctatactactagaatggccaaaatacaagggcccaacgaagggaaaacctattctaatatttacaaaga

SEQ ID NO: 39463 - DNA, 326 bp, Glycine max
  unsure (1)..(326): unsure at all n locations
ctatatatatttctctaaaacagagaaagttgtgcataagttaattgaattataaaaaaaaattcttctattttattttttagaatattttagatagcttgtcaaaatgacttatacatggtaccaacacgaggaaggggatgcattttttgaaataataattctatgtaatacatattttattttagatgaataaagaagatataacatgtgnaatataataaatcaagaaagataatataactttaaaaatcattatgattaattaataatatataactggagcctaaaatattatgtgcttgattaataataattttacatat

SEQ ID NO: 39464 - DNA, 580 bp, Glycine max
  unsure (1)..(580): unsure at all n locations
agcttgtgactctttgagcaaattgatagaacaagcaatttattgtttctttattaaagctagacaatgaaagacacgtgggtgatcatgaccattttaattagagtgggaaggagggtgtttaaaaccattctaaacaactaaaactaaaaatataaaataatcattttttaattgttctttaattagattttcagtttctatatattattaaatcagaatccagccacactaaaccaaacccttattatatttgtaatattgatttgtaatacttatgtagtagtagtgttttaaactttttataatagtagcttatatgtaattttatgtgttgaacgtttaagttatattaaagaaaaaatgatttatttggtttttatcttatttttttttggtttatcttcattctttatctattaaaaangttaatttaattatttatcttatttttatattcagnntagtcctttacctttaaaaaatttattttgctcaattaattttttttctttcaattntttgctatttccctctacttcannatttaacaattnttttaaatgaataacaatatcaa

SEQ ID NO: 39465 - DNA, 459 bp, Glycine max
  unsure (1)..(459): unsure at all n locations
cgctggttatgttgngagcacatatgtagtttgttatgtggaatttgcagtcccacttgttgttgttttacccatggtttgattgctataaattgaagagaaaatttcactatttagtgtggattctacacttttnttttttactttaatccaaatatttcttcttgattgtatttcattttcttctcttcttctcaatcaaaacataactgacattcatatctaattgactcaactagtataggctagtttgacttttttttccttcttgtataaaaaaaatcaaattcatatataataaaatctaaatataattacaagatcaattattaattttctaattaataatcgttattattgtattttatcatctaaaatacaccccactcacttcaaatgggtcatttccatgataaaattattgaatttataatctctatacattaaaattaaattaaa

SEQ ID NO: 39466 - DNA, 444 bp, Glycine max
agcttttgatcagctgaagcatctcatgacacaagctcctgtgatagccacacctaatttttctcttcctttcacggaggaaataagcacttcacgcacaaccttgggtgttgttcttcttcaaaattcgcaccccattgcatattatagcaaggtcttttgtcctcaccttcaaaaagcttccacttacgttcatgaactccacgccatcacctctacagtccacaaatgacaccattatctactaggccacccactcgtgatcctcacagcactactaaaaaaatacagtttagcgactgaaactactcaatcgctgtcagtgaccgaaatagcgaccaaagtaatgtcgttgctaattgcgatagaatctgcggccgaaattatagttagtagctaagttgcgccagcgaccgtattgacgaccgactagaaacgtcactg

SEQ ID NO: 39467 - DNA, 459 bp, Glycine max
  unsure (1)..(459): unsure at all n locations
tctggtaagctactgggctgagcntttgaatgactnggaaggtgccgtagtatctntatgcaagtttcgtgtatggtgcgcccacgacggtggattggcgtcttggatggagttttaccagaaccatgtctccttcngtgaagtggagttcgcgatggtgcttgtctgcaagttctttcatgtgnttgtgggccttgaacagtttgtgtcgcaagctcttgaacattaagtcgcgatcagttaaccaagtgtcgacaacgtctatatttgaatttctcgccacgtattgaggaaggttgtggtggttcttcccaaaggtaatctcgtaaggagacatgcctgtagcggagtggacagaggtgttgtatgaccactccatccacattangaagcgaccccatgttgagggtttgtcgtgaacgaatgccctgaggtattgttcaacgactctatttatca

SEQ ID NO: 39468 - DNA, 608 bp, Glycine max
  unsure (1)..(608): unsure at all n locations
agcttttttgtgaaaggatgtgactcttctcatttgaatttgaatttcaacgttcaaacacactggtaatcgattaccaaatcattataatcgattacaagattttgaaatcaattggaacattgtaaattcagttgaaagctttttgaaaaacattttgctactggtaatcgattacaacaatctggtaatcgattaccagagagtaaaaactctttggtaaaaggtttttgagaaaaattcatgtgctactcagtttttgaaaaatctttttaatacttatcgtgattgaatcttctcttgattcttgaatcttgagtcttgaatcttgatcttgattcttggaacttgaatcttgaaacttgattcttgattcttgaaatcaaatttccttttgatccttgaagtgttcttgattcaatcttgaactcattctttgattcttgaagtcatcatctttgttaacatgaagtgttcttgacttttgagctttntgtcatcatctttgttatcatcaaaactcttttaatcaatcttgattcatcatgaagctngcttctacancaactaactaatatagcgaaattaaacaaaagtaaaagagaggg

SEQ ID NO: 39469 - DNA, 495 bp, Glycine max
  unsure (1)..(495): unsure at all n locations
tgagtggcttgaacctgcattacngacctatgatactcagctcctggataccggagtggtcattacatcgacgacggaactttattctcaggctagtggctatgaccatggagttcatcatctatctatcgcaagatcaacagactctccctaaagatgatgagaatgacctgggctaacagtacaatacaactctccctataatcgaatgtgttaaaaactncatatgagtaaagggagagcgctgtctaacaactgataaatatgtagctgggacattaatgaccacatcgaccaccaggaagctagatggatcacatactacgttgaacatgtatggagagacaaacatggagcaagacttagtacttggaatagatgctggcatgaaacctttggaatggagacaactataccgatgattggacgccacatgacttatgctgaagacaaagaaggctgatgactaatgagaagaaaaagagtcagaaacgg

SEQ ID NO: 39470 - DNA, 562 bp, Glycine max
agcttaagctccttcaactgcacattgttcttaatatttgaagagtatccttatggaaccttcacccgacgaagacactgacaaaaacttatcttctccttcttggacaaagtatggcaggctggggggaagtaaattttcttcccatcagaccttggatgcaactgtgatcttatacccatatcacctagatcttgacgggtattcaagccatccttcgtcttgccttgaatgttaaagagcgtcccaatcacactgtcacaaacatttttctccacatgcataacatcaatacaatgtctaacgtcaagatcacaccagtacggaagatcaaagaaaatggacctcttttccatatgcaactctgactattatcctctctttgggtcttcccaaatacagtgttcaggtgttgaacccgctgatatacctgctcaccagtcaacggtttcagcgtgttagaaagcggcgatgcctactgtagactggttttcttccatgtttcagttgtatgtaacttgcattttcttcacagatggggcatgcatgatgacccttaaca

SEQ ID NO: 39471 - DNA, 151 bp, Glycine max
acgaatctcacggttttttgagagtgctactcacgctattttttgtctaaatctcaagggtgtcttgggtaaatggaacaatatgttctgctatctacactgcctactaaacaagaataggacttacatggatcgaaattgtatatgcctg

SEQ ID NO: 39472 - DNA, 507 bp, Glycine max
agcttttacaaaaaggttcatcaagtcaagttgaaatatggaagtaaccatcctgcaaaattggggcaaaagatgaatcgagtcacatcactgcttcgtctactgccaaacatatttaggattattgatgtccttgttacttccagtttcaccttgacaaagatgtcatggaccatgttgaaaatctaaattgattcaaccccatatcctgcgtaaaaattcgcaatacttcgactgtacatcattcgcatgcatccatgcttttcattggttgcattgctcattgcattctttccttgaaaaataaaataaaataaaatgaacttatcaaaaagaaaaggaaacgctttacggcgcccttaccgaactcgtgctagagctagagtaatgggtgaagcagagaaggtgcaagagaagatgaaggccaaaaatggaggcccataaagagcaaatggccacaatgataaaggccatgatgagcatgaagaagataatggaagccaatgc

SEQ ID NO: 39473 - DNA, 453 bp, Glycine max
  unsure (1)..(453): unsure at all n locations
cctgcngctgcaactatttgataacagcggatgatcattcttgtgtcaaagctacatcatcttatctggatcacagacacttagctaagctataaatggtcatgagtgagcaggtgaccacactgagaagagtggggaatacatgctaatgtcattccacatgtggagtatgagaaggagcaaagctaatttcttcagaataaccaaagttctaggagggttgttagcctttggaaagtggtttgatcagatatgcaattggaaaaaccctctcacatccatactcattcatatccgtttcataatactggttctttatccagagctaatacttccaacaatttttctttacctttttttggttggaatttggaattttcgatggaggccaagacactctcctcatatggacacaagactatcacatgctgatgctgctcatcctgatgaact

SEQ ID NO: 39474 - DNA, 355 bp, Glycine max
  unsure (1)..(355): unsure at all n locations
ggatgtctcagtcaactcagtagagtctaagattatctctgctcaacctttagttgcttcaggttcagacgacagtgatgaggcgaagcccaacgatggtccaaaacgatgcagcatctgcaataagcgggttggtttgacaggatttaattgtcgatgcggtgaccttttctgttctgaacatcgctactcagacaagcataattgcccatttgattatcgcactgctgcaagggatgccatagctaaagcaaatccaactgtcaaggctgagaaacttgttaagatctagatttgntgtctctacagttcatgctctangtgctagtatgctcattgtngtcctcatgagatg

SEQ ID NO: 39475 - DNA, 537 bp, Glycine max
  unsure (1)..(537): unsure at all n locations
agcttgtggcagtgatgatttcccttttctaagggctgatatctggcaattcgcccttctttnttatgtacatgtgtatgttcaaggtcttgagtcaagttctctcctggatcactttccagcatgctctgcttgagcacttgaacatggccccttctcaactccaccccaatagttgggccatggtgaaagcctttgagattttgtgccccttcttcaatatccgacccagtgtgtcggtgcttccatattttttttagatgaagttgaggggcacaatcggttgggtctccttgaacaacgtatctaagaagctattgacttgaacatttttcgccgcttcaaggaccatttctccaagatcccggctattgtcattgtgactgatggcctgccattaacgttcaacagagaaggggagccctatttctcgttctactgganattcgaccccaccaggttcaagtcgtttgatgaggatctattgacccttgttgagaaggtcaacanagctatattgaagtactatcggctcac

SEQ ID NO: 39476 - DNA, 403 bp, Glycine max
  unsure (1)..(403): unsure at all n locations
atttccaagagtgatatctattcaaatggcnnatgaatgggcatcacaggtctatttatatgtgacttggagacacgaatnnaaagagagttttcattgcccaaaaagttttatcctctcaaaagattaagagaagttttctgaactgaaatgtcttatcctctcaaaaagattccttggtcaaccacttgcatattcaataaggaatattgattgatcttcattgtacaatctatctcttttaagagagatntcttcttctcttcttcttatttctgaaaagggattaagagaccgtgggtctcttggtgtagaggattcctgaacacaagggaagggttgtccctgtgtggctcaaactttgtataaggagttttacacagagagtggcacatctcaagtg

SEQ ID NO: 39477 - DNA, 520 bp, Glycine max
agcttgcttctacaacataggctataagaaatttatatgacatttaccttggcgagaaaccaacacatttaatggaatctggatgagaagcctatcatggacatgataatgtgcaaaactgcacatacacacaggctataagaagtttcttaattatgacacgtaccttggcgagaaaccaaaatattcaatgaaatctgaatgagaagcttattgtggacatgaaaatgtgcaaaactgaacatacacacaagctataagaagtttattaattatgacacataccttcgcgagaaaccaacacattcaatggaatctggatgagaagcgacgaaatcaataacatgtcaaccacgatactcgttttattaaagacgtaagaagaagcttaatatacatgctcaaatccctttacaaagaattccagagacaaatggaacaattggctcaatggataagtgatcgaagtcttgatgtttgcgcacctactctaatactacacagactacattatgcaaga

SEQ ID NO: 39478 - DNA, 496 bp, Glycine max
  unsure (1)..(496): unsure at all n locations
gcncntannagccccggnnatgatngcttgtattaccgacacatgaaactaagctataagagtgtaaatttgaacagtgattgttgcatatgtaaataacatgttcccatatgaagctgcacctatgacanaccataatatgttttgtggactgagataggtatcacacccagggccattaaaaacatgatcaattaacttttcatcaccagggaaagatattcagttctttcttaccaataccaagtcacggtaggtgccaaacacctaacgtatgatgaaacccaacttgcccccaccttcttcttctcaaccggatgcaattgtccacacnatatactatagtagctgaaggcaagtactcacggggtagaacattctataggcccttgatacccatccttcttttgatcatcatattcagcaactgaagccagagattanacagctggtcactaaaaaatgtatatgctgctgtactctagtcaatgcttcn

SEQ ID NO: 39479 - DNA, 472 bp, Glycine max
agctttataaacgcgggtctgggggacgaaggtcaagtggtctctatatacgaagatgatgttccaagtacattggatttggtacgaccatgccctcctgatttccagctgggaaattggcgagtggaggaatgccccgacatttacgcaacgagcataatgtaaacctttacggttttaaaagctctatagttgggcctaggctttagagtttttcttttggttaaggctttgtgtattttgttttttttaatttataatacaaggatctttcttcatctgttcctacatctctacccattctcatccatttgcatttttacttctttatttctgaaacggcagatccgatgacgagtcccccgaaggtactaatacctgggacccgcctatcaacttcgagcaagaaacgaatcatacgaaaggtgaagggaacgaggatgtgggacttcccccacaattagaaaggatg

SEQ ID NO: 39480 - DNA, 401 bp, Glycine max
  unsure (1)..(401): unsure at all n locations
tatgcatgggataagaatctttcangtcactattatcatttaaataccttanagtgttggaggaatgaatcanctttcatggtatttatttcattgcttcccatttaggccgtggatgaagatacaactgcctaatggtcattgagatagcttgtgacatagtcctacttggttcanacctaaatacaaaagaaggttacctaaaattaaaagataatggaggacttataatatatattaaaaaaactaaattcttatttattcttacactgtaccattgngtataatcatcgggtaagggttcttccatttcctcatcttaatgatgttcattggcagacaagttctcaacaatgatggaacatcctattgtgatggtgggtcttgtangcattgagtct

SEQ ID NO: 39481 - DNA, 545 bp, Glycine max
  unsure (1)..(545): unsure at all n locations
ggcaaagtcaaaagctaaagaagaccaaggtgaagcttatgaagatttggttgatgttctcctaaaatttcaggatggtgatgatagaaaccaggatattagcttaactattaacaatatcaaggctataatcctagtgagtataacaacatcttctaaatcctttcttttatcaatataatctcactcctttctatagaacttagacaaatgtttaatagttacaccagaatatatctcacacatgagctcttcaaaattttgctgtatgtgataatttccgtagtgtattactggatgccttcggcttataatatttgaatttaactccttcaaagtgagaggttccttttagaggattagtttctatgttataactattaatgtaaaaagcatttgctgatatagtttagagtttattatctctttaatccttaaattttttacgaattctatntctaaaccctgatctttatatatatatatttaatctttaaattttttatcattcttatttttaattccctaattttttttctgaccct

SEQ ID NO: 39482 - DNA, 271 bp, Glycine max
catacatgaattgaagcgaccattttcttgcatgatggttctggagaacagatgacatacgaatcagctccgcacactagagagaaactgctgcccttagtgttatggcaggagtatacgaaagttaatgactcacctctttacccttcaactgctgagccataattgtcatcaacttacactcccccaagaacactacctacattttctagacacatccttgctacaacaaaagctccaacagtgtcttataccgaaactgtctattgag

SEQ ID NO: 39483 - DNA, 451 bp, Glycine max
  unsure (1)..(451): unsure at all n locations
tttatggggattttggagtacattttgccaataaatcttgttttatggttaaagctgtctgtataacatttccattggatttaatgatgaaatctatgcattttcaggtgaaaaagaggctaagttttgaattgcacaaagtagcagttaggctaaatgtgcatccaccgctaagcgcaacttcagagcgcttagcgcaaaggagaatttggcagagcatcagcatcaaagccgtgcgctaagcgcaagatcagtgcgttaagcgcagcatgtgccttcagttaggctaagcgcgagattgatgctaagctcaattccacttactcgcgctaagcgcaagggtggtgctaagcgcaacgtctcaaattcagagcctatntaaagcctgttttgtgcagaattagggtagaatgcccagngcacagattccagagcataccatagtgcctat

SEQ ID NO: 39484 - DNA, 577 bp, Glycine max
  unsure (1)..(577): unsure at all n locations
cgatgcgnnttttgttnccccttggtananaccgnnacncnnntnnnnnnnttgaagtccnctagctatatcagcgacactataggntactcaagcttcattgtgtaataacacaaccctttatcttccaagtgttgttgtgttactataaccctcaaaccctaatgccgtattcaaattctcaaaatctcacacgttgtaacttaacagagataacaacctttgttcctaatattgaaataccaaacaaagaatgaaagttgtatggaatatgtcagataatggtccacatattctaaatcactgactaaggaatatgtgagatattcaaaagataccgtgatagaatgtgtagaagacgaatagagataaaatgaatatggtgatgaacaaatataactaccaggctattgaagaatttgggaacaaaatgggtgaaagaatgggtaanagtctaaaaagccctaatgtcgatagcaccataattgtgataagaacatggtggcgatgatagcaccacgacgatgtccacaatagaggtatagggatgacgagagcaagagaagtatggctatgn

SEQ ID NO: 39485 - DNA, 559 bp, Glycine max
  unsure (1)..(559): unsure at all n locations
agcttgcttgcactccacccctggaaccaactcaaaacgttgtttataagtaatggcgtgtatgtaagaaccaacacaatttcaaaatagtatgaatctggctgcattaatattctccaaagcttttgccaatgattaaatagcagcatttgtttttgtctcttgctttgcgcccttaacctacaaatctttcatacatccgtcacccattacgtaccttctttctaagttctaaccacgtgcccacagcccaccatgtattctaagatagtcccaaaaaacagcttgccacccgaacaagtgaacaaccgtttgcttcagtaggataaaacgtacttccttttatctttaaaataagaaaaaaaatatttttcttggttttaaatataaaaantttttaattaattctatttcatttaatgttattatctttaaaatattttttatttaatcgagattttagttccaatgaaaaataagttagaaatataatttttaattcagattagtggaattaattataattaattaatcttcttaattatgtaaataatatctt

SEQ ID NO: 39486 - DNA, 476 bp, Glycine max
  unsure (1)..(476): unsure at all n locations
tctatccttatcaagaggggctctagacattcaagatgctgtcataagatcttgatcaaatagcaaaaggttgtccctcgaccttggcatgccgattgaagtactttatgatgcagagtcttgtacattgcatacttaaaagacaaaatgtacgccttgctgataaatatttgtcccccgtttccaaattcctaatatgaagctgaactcatatagagtgaccaatgtttgatacacacactctcggtagctgctaagtggggctaggcttanactcggtgcaattacatttctgagattttaccaagtttcaggagtgtgtttcaaaaccaacaagccataatgagagcgcttgactntngtattcagttttgctgtcatggcaccgcccttgaaggccttttgggagtacattaccttaatgttctgtccttntntatctgcagaaattggcctattcttatcctatcaattac

SEQ ID NO: 39487 - DNA, 563 bp, Glycine max
  unsure (1)..(563): unsure at all n locations
aagtcacctgcagctgcagcttcgcgaacatacgggacaattttatatcttcaccaaacaaaaatattcacacaatcatcacagatccaacaaaaaggagcaacacccagatcacaaaaaccacccattagtccaaatttcaaaactttccacaacaaaattaagaaacaccatatggggtagcacccatatcatcatccacaaacagatatagaaacggagaaaaacagaggaatgagagtataaaataacttacgaattggcaagcgatgaaacgaacaagaatgagaatacacgaagacaagaaagagaaatttttcagacacagaagaaatggaaaatggtagttctcatatttagatatggactctacacactctctctgtatatatatagacgcggnttttatgcatgaattatttgatcaactctgagttcgagaaagctaatgggagccacatgatcatatcaagtgacgaaaataccctccacatttacgtgaggcccattcttcatttaatattctaactaaatttccatgtatctcacgtgattgtgacaca

SEQ ID NO: 39488 - DNA, 294 bp, Glycine max
tgtcatgattggcacctttattctagactggtgatatcacgcaggggttgctgagacgacaaaataatgttactaaaacctttaagaaataggccaggctttatcgtaaacgcgacatttgtggaaaattgagataaactgccgaagtggcggggctcactccaaagcaataatacctttaggttgttgtggacacgtggcacattgtaaacattttccatttgccacgtaccgctctttttcttattgaattgtgatagccttccacagggtaaaatgtaatgtggcggtaag

SEQ ID NO: 39489 - DNA, 561 bp, Glycine max
  unsure (1)..(561): unsure at all n locations
agcttgcgacacaacttggtttaacttgttatttcatttctgatgatgatcaaattttgattatgctatatttattttatgtaaaaaaaattatatataaatttggttcatgatacatgtaattcatcgattttcctattttatttttaaatctctaatgcaattgtgagtcttagtatttttttttttgggtgcaattgtgagccttagtgataatgaactcgagtttgtctcatcttaatagcatctagataaaaatatttaaagtatatgttgtttaggttatcaagttcatcaatttcaaaattttaatatccaaattaaaacccgacttgaacaactcgagttctaaaaaatttaatttgattcgaattgtgaattaatttaatccaccctgtttttttttgtctttggtttaaattacgttaattagtcgagttatttgagttgatntcaacccataatcactcttaaattattaacactttcttttcttacaagtcaaacttgaaatttaattgtttgagtataacttgattcaactcatctttagttctaata

SEQ ID NO: 39490 - DNA, 587 bp, Glycine max
  unsure (1)..(587): unsure at all n locations
agcttgaaaaggttggatttcattgcgactgtaatttttagtttaaagntttgtttcctgtagctgttgtaccttgcttcttcaatgttgttgataatttacttttatgattttatgatctatgttttatgacatcctccagttttctagcaagtaacaatggtatgagcattgtcctggtattcactaaattaatgtgcctccccctttctttgatgtatgggcattgaaataacaagaatgttgctacatatggatttgtatttgaaatacctccatgaaattctattttctatttggggaagtttctgttaagttatatttttctttgagacattactacttcgaatatatttttttccagttacctggcttgttagtataaaatcacaatatacatcaacttcgataatagatanttttaacatggccattcacctcataagtacagacatgnattagtgccttagataggctggaaagagggcatngtccttntcttcttattttttcctcttctaacttgcagtcttttattttaacttgggttattttaactttacatntctatcttattctgaaaattt

SEQ ID NO: 39491 - DNA, 385 bp, Glycine max
  unsure (1)..(385): unsure at all n locations
tgatatgaagaagtgtagaagggtgagacttcctgcttttattcgttgaccacagactggtacctggagatatgtcgcggtggtcaggagaccttggggacgtcaggtggggtgctattgcccacaaccaagcttgaccaatcccgacccaacccgggcatattcagtcagtgagaacctgtgatgtacctaagcaggcgagctcctggcagtcaacagataaaaggaacaaagaccacatagcaaggaggcttatgtggtggctggccagctgtgaactttgattgatatatgggatatggcctctagtaatcgattaccaagaggtgtaatcgattacaaggcttanaaatgaagacaggagactaagatggtctctggtaat

SEQ ID NO: 39492 - DNA, 524 bp, Glycine max
agcttccttgaaaagattcctaaagaagctagagcttatctacacacacctctctaatagctaagctcacctctttgagatgagaagctagaacttagctacacaccccctataatagctaagctcacccccatgacaaaatacatgaaaatacaaaaaaagtcccaactacaaaaactactcaaaatgcctcgaaatacaaggctaaaaccctatactactagaatggccaaaatacaaggcctaaacgaaggaaaaaaacctattctaatatttacaaagataagcgggctcatacttagcccatgggctcaaaatctatcctaaggctcataagaaccctagggccttcctttggatctctggcccaatctacttggagtcttctatccaatgcccttgcggggtaggattgtatcattccctccaccttggaaaggatttgacctcaaatcccgaggttcttcatactctgggctccttccctcaacacttgtaaaaagaacaaaaacatatgtattagt

SEQ ID NO: 39493 - DNA, 325 bp, Glycine max
  unsure (1)..(325): unsure at all n locations
gatgatgaatttctgcacttccttggaggaggcggagccatacaaccgggatcgccaaacttatgaattatccttcattactgctttcacttattctattattctgttatttcctttgggatatgacattatctacttccaattattatgtccattgtgattgaactgcatatgcagttatctatcgcattgtgagtaatttaccgcttttgacatatggtcgtacttactttacgatgatttgtctgaaacgcanaaatgtgtctaagtctggtgtactttcgttcacacgcctttttcaataaaatgtaatctcgggtatcaa

SEQ ID NO: 39494 - DNA, 581 bp, Glycine max
  unsure (1)..(581): unsure at all n locations
tccttaagcacctgcggctgcagcttaccttgaaatgagaaaattgtagataaattctactctttttgaagacctttataagttcaaaaatcaactagaaagcttataaaacaactataccacactcaataaacttcatgattacctaaatagggaaaggtgtaatctattgaaagaatgttcacaagtccataagaattataaaaacttagaggcaagtaaacataacttatgggttaaatgtgaaggatatagaaaaacctaaaatnttcaaatgataaacttgaacagtatgagaatcttcaaaagaaaccttaagatgttattacaccacattaagagattgaatttttgggagaaactctatccaaatttgttggaagcacgtagaaacttaacaaaatggtaagatacagcaaatgcccaactaaaaaatttggaaatggatatacaagaaagaaatatgctcatgatgaagaaaccatagtattgtatttcaatggaaanggtggacacatgacatccaagtgtagatgtttaccaaagatggatcatccaatgctttcataacttacaagaaa

SEQ ID NO: 39495 - DNA, 297 bp, Glycine max
  unsure (1)..(297): unsure at all n locations
aaatgcgaaaaatgaggaccctatggctgcaaactcatcaatcccgtgggtatggcttttgaaaggggggaaaagaagttnttgaatgcaaaaacgtcccccctttcgtcattcttataatttggtgcangggtggctcgcccaggcgagctaacttgcattttttttttgaggggaacattaaccatgtcccctcctttctcatggattagcgtcttgcctaactngaacttacttangttagaattaggcgttgattacttatctttactttttaaaacaaacaaatagtaaaag

SEQ ID NO: 39496 - DNA, 547 bp, Glycine max
agcttccttgagaagattcctagagaagcaagagcttatctatttacacccctctaatagctaagctcaactccttgagatgagaaactagaactcagctacacacaccccctataatagttaagctcacccccatgccaaaatacatgaaaatacaaaaaagtacctactacaaagactactcaaaatgccttgaaatacaaggctaaaaccctatactactagaatagccaaaatacaaggcccaaaagaaggcaaaaactattctaatatttacaaagaagagtggacccaatcttggcccatgggcttagaaatctaccctgagattcatgagaaccctagggccttctttagtagctctagcttaatcctcttgaattcttctatccaatacccttgggggtaggactgcatcatccccttcccctttgaaaggatttgacctcaattctcgaggttcttgatactttgggctccttccctcgacacctgtaaaaagaataaaaacatatatattagtggtgttgggtatgttagagtatgg

SEQ ID NO: 39497 - DNA, 499 bp, Glycine max
  unsure (1)..(499): unsure at all n locations
nttgtcgcctgcattacgcgcactataaaacttagctccggctatacccgagtgttagctagaagcggtcatgacataatactctgtacatgtgaaacatagtggttcgtggtgattcgctaagaaatggacatactctccgcggtagagactaatcaatataagtatgtgttgagtgagtattcgctatctggacgctataatagatgtaaggtttgaatttgcttatagaaattagacaatctatcttacatggaacactcattttccatcatctacttgtgtatatggaaatgggtatatgattacaaagttgcctttagatgataacttggttgatatgagaatctttaaaattctaaatacaactcaccgccccactttctgtgattttcctttcacacatgacaaagctgcaagtaacctatgatggatcatgaaggcatccgagtgaaattcgaactcttatacgaaatggatcccatatntccactgcaag

SEQ ID NO: 39498 - DNA, 450 bp, Glycine max
agcttcctctgccgtaaaaaagatattatcggccagtgtttgtataattattgcgcaatgtcggctgaaaaatatccgtcggggctatttaactaccgatgtcggctattgttttttctattccacccctgaattatatttggatgatgcctattaagaaatgttcggtcggggtcatccggtcatgcttctttttgaggcctcgatctgtcgtctttcctagccggccgacgtcggctagcatttttttcgatcaatatctgtgtgaatcatgtttttttttgccaaggagggctaatgttttcgtggccgacaaaatgaaaacatgccagtgtcggccgaaacacaatcccgcacgaaaaaccctaaccgacctacattgtaattttttaggcaataccgagcgacaaaacttcgtctaccatgaagaaatattatcggccagtgttt

SEQ ID NO: 39499 - DNA, 439 bp, Glycine max
  unsure (1)..(439): unsure at all n locations
ngcaccttttatgattccatgcataaccngaccattgaaacttaaccctctcaaaggcatgcgaagtggtggaatcctagagcatttccttatgtatcaacataaaagggaatgtatattgtaccgtgctcttctcgtcttatgcttactttctttgctgaacaaaatgattggctgaatgttgaaaacattatgaaatgataactttggagaattttaaaaatggaaaatttcataaatggttcttagacatgaagctttctttcaaaaaacaattggtggcctaatgtcactaaaattgctgttgtaacacagaagagttaatgggctttgggccaaaacttataacattcagacatttatggctcttgaaaagattcaaattttgacatgatgttgtaaagcaatctagaagctatggtgatccctgccatcgagt

SEQ ID NO: 39500 - DNA, 551 bp, Glycine max
agcttaggaatacggcgcacttggaagattagacaattgattatcatattcatagtacaggcagtgtgattaacaaaattttctttgtttgtcaaggaaggagaatagtatagtatttgccatgttttctccaagcgcaacatgacctcaacgctaataatttaagcaataactacatcataaaagacaaatttttgtgctaagagacaacctggcaactgtttttttagcgtattgatgtattaaaaattggagcagcgagtaaacaactgactcgcgtagcagtaaactagcagtatttaattggtgggcatacacaacgagggatctgtttggtggagacagtctagggacgtggatacctacaaattataatattaaatgttctataagggcgatcatgaatgaattgattggtttgcgttagggtaaaatcaaactaatcaatctacttaaccggggggtggtagttagatttaaatgatgatttttctattcaacggaactattcaataagatctagttatctaaaagcttaccaaatctatttt

SEQ ID NO: 39501 - DNA, 448 bp, Glycine max
  unsure (1)..(448): unsure at all n locations
agacacgttacttggagtaatgtggtgggttcttaaatataatttcaaatggngattttcatttgttagatcatgttggtgaatgccacaatttattgagggaggactatggacatggtgaatntttggaggggacatagaagattgcaacttatacacctgatcttcagtctttccttgcagaagaaccgctcccgttgtcaggctctttacctcaaaatgcaagggaaaaattcaacagacacagagttagtttgacgtaattgagaaacagaaatgagattttgagagacagagggaacatagtatattggaaagacgaagagggatggtaggggtgttcaattcagttgagccatgatgttgaatgaaaagacccttatcattggcaatgtgaagctgatccggaccagtgcagtcattggaaatnagagacaattgatgatgt

SEQ ID NO: 39502 - DNA, 1041 bp, Glycine max
  unsure (1)..(1041): unsure at all n locations
tcctcttcgatatcgtctcgacccctccgtttacatacccacccaatatctattagtcaccaccacccccgncacaggattgatgaatctttcattgcacaccgaaaanaaatgccccggcgaagtaactgagaatactcacgaaagagtgttgcttgaggtatgccacccctaaccctcggcacgcgactctgttgaggaccaagaccgttcttagtcagcgccgagatccctaagagaggagtggtgatgaacctgctgaggggtacacacctcttttgtaatatcctctcctgcgcgccggcatatttcatacttagtgtacaatagggatctccttaccgtagaggtgggacattatctttcttgtatgcaatcacaaacttcaaggatgcgtcctctggtgcgacacacttactggaatgaacatgttgcctcatagcgtcgtatggaccacacaccatataaataaccgaaacagggtatgtcacccttaccatcacttttacatgagcttgaaacacatgagatccaaggggttcccatggccccgataacaatcaacggccttgcgtgagagcgccactccacccccgttacacgcaatacgtggctacgatgagtcaacctacttatacaacgggtacgccccacattccctataatcgcccaagaacactgttgtaggatgtcctattgacacttatggaaataggaccgtaaggcgtatgaatcattctctaatctacctgcgccaatttctgtgtcgatctangtaaaacacttaccggtgccaagagaatgcacctctagcggaacagcaatctatatggtttgacaacactggccattataaggggacattatgaatcgaaccgttaccactccgaagactcatgtttgaggcgggccgggtgtcacatatacacanactatcgcctcagatggcgaatccatcgctgactcgctccacatagcatattgccgcgtatactaattcgaantacttcactctctacctacactcacgtcacgcatccc

SEQ ID NO: 39503 - DNA, 408 bp, Glycine max
  unsure (1)..(408): unsure at all n locations
gtatgcatgggaatgtaattatgaaattgagatgcgcgtttaaacaccatttcctagttaaccatgcattangtaccatggtcaattattctgttgtgtaggtgtgtgtgtgtttttttattttttagaaaagggtttatgatcccaacatgggtggctcatggtgcctaacacatgcatctaataatgtcgtgtgaagtttcacgcttccccttctttgtttttgttttgtagaggaaaacaaatggtatgcaatcttgcagatcaaaaagtttgttgaacgcatatgcatgatgatgccatgactcatgcaaaatgtgaggctagaatatgataacggacaaatgcaagaacgatatgttcattatgatgttatgaagagatgcttatgcgatgcatgaaatgaat

SEQ ID NO: 39504 - DNA, 487 bp, Glycine max
  unsure (1)..(487): unsure at all n locations
agcttaatgaggcaaccaggaaagatcattttcccttgtctttcatggatcagatgctggagcgattagcaggacagtccttctactgtttcttatacgggtattcaggatacaatcagatagcacttgagcctaaggactatgagaagacaacatttacatgcctttttggtgtttttgcctatataaggatgccatttgggttatgtaatgcacctgccactttccaaaggtgcatgctagccatctttgcggacatcataaagaagtgcatataagtcttgatggacaatttcttagtgcttggtttatcctttgattgctgcctgacgaatttagagatggtgctgcgaagatgtgtcgagaccaatctggtactaaactgggagaagtgtcacttcatggttcgagaggggatagtcttgggccataaaatttcagccccgggcattgaggtggataaagcanaaattgacatcattgaaaa

SEQ ID NO: 39505 - DNA, 499 bp, Glycine max
  unsure (1)..(499): unsure at all n locations
cgcgccttgaacctgcaaacccccnttaaactgaccgtgaatccggcattgaaacgacactgtattttcgtcgtcttgacggtggataggagtttcattgccatcttggacctgtactgactatgctcttcggcgttnccgaactcgatttaatttgagaagatgtcgtcatgtcaacgtcggtgccatcttccttgatctccgaaattgtatggtacagtctgatgcacttctataccagattcttcctgatcaccttcaggatcttgttttatgcaacatcttacgagagagttgagcggtagtcactggagtaaccacaccttcaaaaatccaggaactcagaatgactcctacaatagtcatcattacacctcctgcattaagcggatgctttcatctcttctggtgcaaaaaatacagggtgccctttcggacaagggatggcttaactcacctgtcctcatcagaatgattcagcattgctttcttcattggg

SEQ ID NO: 39506 - DNA, 576 bp, Glycine max
  unsure (1)..(576): unsure at all n locations
agcttggttaatagggggcctgatgaccctgctggtgtcaatatgcactcccttgaactgatagagacccgtatttagagctggcaactccaagaccctgttggccttcttcgggtctactatgtgtcttgcaggcacgatccctgcaaacaatagatgacatcagaaatcagttgggggaggtgcatacttacctatgtcatgatggcctgagcttgctggggggaaaggcgccctatatggctgacagatgcccgtaaccagagctggaaaccccagggccctgttggacttcttcaggtccactgggtgtctttgtgggtgcgatccttgcaaacaatatatggtatcagacatcagttgaaccatatgcatacttacccatgtcgggacgacacagaccaactgatactnttgcagggggagattggcattgccgtcgctgggcagaatgttgctaagtagcaatgtcatctatatctgtgtaagagtggtcatgttggtgcgcatgatccgcactcgtctctttgcagcggcacgggtgagatcttcccccgtatgcatagtagctgtgtg

SEQ ID NO: 39507 - DNA, 568 bp, Glycine max
  unsure (1)..(568): unsure at all n locations
gcccccaccccccccactcatctatttattatacttccactcccaccgagcgattgaactctgcaagcgtctcattataatgactcctgaaatcgcgcacttagataccatctttcttctaaacctgttgtggagaacttctgcttcttatgctgattcctaagggaagacggcttctctcccctgtactgcattaactccactgaactccctgggtgaaaacacccttataggaccctaatggagctcaatatctaacctcctaaaagttttcaacaagcttcctccattgagcaactgcatactataacatacttttatataatgaatcgatggatatgatatatgatatatgacgatttattgaaatatatgatgaagatgaagaattaatctctacttacgtgttaagaacttttcacgataagactaacaagtctccaatccaatcttaagactctncaaatgcattgcatggcatatctatgtatggcatcatcaaagccaaacaaaaggagattgtagagatatgttaactacatgacatcatgatgataactcatgtaag

SEQ ID NO: 39508 - DNA, 669 bp, Glycine max
agcttgctgagcataggctactgcacacgatctcacattgccattatgggggaaatgttgacattttgcagtaacattcatggactgagctaattaaacggatcggcaaatctggcttaccttgccatgtgctttgagtttctctgagtttttgtttcctcattttttgtgtaatatagggcggaacaaaagaaagaaggaaggcttagccaagtcaacagaagattcacttaaaaacatgagttaacatttcacatgtatactctctttcctaatttggttttctttctggtaaaattcgtgaggaagtcacaataacaaatagtttttcactataaagtaattatggtaatatttgttgtataaaatatttaaaatgagaattttatcataaaaatatttgcacttatcttggtaataaatactggtacatgcactaaattatatatctaataagaaattcatatgtgtatatcttgaacattgaatatttagaatgagaatgttgttgaactagctgtactcatcctcctataaatcatattttgggtgtgttgtcatgttaaaagtataaagtacctaattttgttgtacaatttaatcgatgattctaatggttcttcatctaataaaaaatattaatgtttagatattccttgcgaataatac

SEQ ID NO: 39509 - DNA, 665 bp, Glycine max
agcttcgaagctcgcagaagaatcaaatggtgcaccattgtttactgtaactcagtctcggagtttctcaaagcaagtcaccagtaatgatgtgtcaggtgacaacactggattccaagaggaagatttccctggcatggaccgtggcaatgatacaggaaccaatgaggatgattggcaactcttataaatgcgattgctggactatgacatggattcaaagtacagggtcaaaaatttgttgcatgattctcatgggcctaattgccactgcaagtttggttgatccctggcatggggctccccactcttcaaacattgtttaatagtcgtgtataaagtaatttaaactcattatgattctttggcttaaatcatttgctcatttgttcatattagctaaccacgtatttgttgtacattacaacggctagtttgatcatatttgttgcctgtacccttttattggctgcacaaaatgtagtggatagtactgggggactatcaaataaatggtagaaagtagttcatattgagatggaatgttttctttaaatagaagatagcataaactaatcacttgagtcccttgatataaaatatggggtaaagcttttagtagttgcactacactgatgttgattaactactcacgtgaatgatct

SEQ ID NO: 39510 - DNA, 415 bp, Glycine max
  unsure (1)..(415): unsure at all n locations
tattccatttttctctcatattctcttcgnttgcggagaagattatccaaacaggccctaattaatcatcaatcactcattagttaatcgctaaaacaaggcgcaaccatcaactaaatcacattactgcgaggcactcaccgttttgcacacgaactcttccctgatatctttctcagttataatcgcagaggaaaagccaagcacaacaacgtgaatggactcttgcgtaaccttaaccaccttcccttctgaaaccaacaaaacaacaatcacgaacactattaattgaattaaccagaggcattattntgacagcaataaatatagagagagagagaagaagaagaagaaaagaaagagctcctaagagcatgtttggtttgtgagaaaagagcaacagattgaccttgag

SEQ ID NO: 39511 - DNA, 623 bp, Glycine max
  unsure (1)..(623): unsure at all n locations
agctttgagccaaaatcctgactcaccataaaccttgacccagggtgagaatgccaatccttaccctcggaagcaaaaaaaaaagaagagaaggaaaatttccaatcaaagaggaagcaaaaaaggagagaaggaaaatttccaatcaaaggaaaaaagagaggaaaggaaattcccaatcaaagagtgggagaaagcaaaaagaaaagaaagaaaattcccaatcaaagaatgggagaaagaaaaaaagagaagtaaaaaagaagaaagctcctggtcaaagaaaccagaagaaatgtgccgagaggtccttggaccaaacgatatctgaacaatacagaattgtcaccaaatgaacaaaagaaagaaaaggaaaccatgacctanaagtggtcttctccctttgattaccaaccaaaatcctgngcgctagcgactnnttcgccccgcactacacaaaaacagaaaaggaaaaagccaaccaaaaatcaaaagccaaaaacacacaaaagcccgaaaacccaccaaaagaacccatttccaggggaagtcctattgatccatgatcacacgtgtaatctttatttgataggaaataattcgcaaagtcaagtcgtgacata

SEQ ID NO: 39512 - DNA, 657 bp, Glycine max
  unsure (1)..(657): unsure at all n locations
agcttatgaatcttgtcatccttccagttttgcatttatctatcacattgattaataccatgctatattcgttcacacaaaagataatgtgaataatttgctcaacaactcaagtactagatataataaagtgacaattttgtgcgtacatgtccctacttaggtgcaccagaatgtgcatacatgtccctatatagtgtctataactgaaataaaaaaatagaaataaatgaaatctaagctatgtataggagacaaaatgtttgaagtgagttttatagttattgagaaaaacaataaatggtcattaacaaattgggaggaagagagatagaggtatggtacatgtgtagtgcgtacgagatttaattgctatattttatatgacaacgaaatgcatactacgtgtgggaaaagagaatggagtgagctttctagtgttaganagtaaagatagacagacgattaagaatagcacatggaacacctaaaaggtaagtgtacataaaataaacttcgttcgctcatttaaaatacaataaggatccaggttgagagtaagactttacacttactcttggagtaagtggatctctttcctatctagagagaacgagagagagaatgaaagttaaatcggataatttgagtagaaaa

SEQ ID NO: 39513 - DNA, 575 bp, Glycine max
  unsure (1)..(575): unsure at all n locations
cgcacgatgtnntttatncccattgaatnaaccccccnnnnttngtaaaattgacccccctctagatannaccgncgcaacttnnganannnaactgaantccttctgcantccagngacactgtagaatactcacgcggtgtctctggctgctcaactatgagttcccagcgtttcatatatatagaatggattgaagcctctaattgtctatccctataataagggcatttctctctctgaagacactgattcgcaaatataaccgcggtaatgagcaggaatgagcctccaatgtggtgtccaaattttataacaaacctactgacaacgatgtccggatcggatgtttaatggaacacatttgagtatacttgataaaaaatgagatttttatgagaggaaaaagacaactctaatttgggaagaatagagggttgaaccatgtatccttactaacaaactgacataacatactcctgcatatataggtaaagtctctcacagctctttaacccattcaagaaacatgtctcctctgagtatctcaactcaacacactaattccttgcccg

SEQ ID NO: 39514 - DNA, 504 bp, Glycine max
agcttctggatatattatgcacctgaatcttactttcgtttgaaatgttatgaccatttaaatttctcgagagcttccgttgttcaattccgaccttctcgatatactatccgccagaatcggacctccgggtgacaagtcatgaccatttgaatttctcgagagcttccgttgttcaatttcgagcgtctagatatattatgcgcctgaatcggacttcccggggataagttatgaccatttgaatttctcaggagcttctgttgttcaattccaagcttctcgatatattatgcaccttaatcggactaccgtgtgaaaagttatgaccatttgaatttctcgagagcttccgttgttcaattccgaccttctcgatatactatacaccggaatcggacctccgtgtgacaagttatgaccatttgaatttctcgagagcttccgttgttcaatttcgagcgtctcggtatattatgcccctgaatcggacttccgtgtgat

SEQ ID NO: 39515 - DNA, 329 bp, Glycine max
agcttgcaaaataatggcctcaacaaacatgttagttttagtgagaattgcactcaataggcgcacactctttactggagaggtgtacctctactggaaaacccgagtgcgcattttcattgatgcgatctactttaacatttgggaagccatagagataagaccttatgtgctctccatagagtaatgatccacagtacatgggaacgttgctgtggatgcacacaatggataaaccttagatggatggactgctaggatgtaagacattacaatatgacttctaagccaagagcatcatttcatgtgtcgtgggaatggatgaatat

SEQ ID NO: 39516 - DNA, 477 bp, Glycine max
  unsure (1)..(477): unsure at all n locations
agctttgaatagagggacttcaaaaaatagaacatctagttctatttgagctaggtctttntttatcttcatgggatttgtcatgggtgaatcattcatagagacattacagtagaggatatccttgctcacaaagaattttgaggcacaagtattatgatttgtgattagagaaaattacttgaaaacaaatgcattgattcgtgaaacttaaggcatctttactttgagaaaataattttcaataattcttataaatgtgttgatttacttttattttattccatacaattataaattatgtgacttattattagaaaaatacaatttgaaattgtagtcacagatgcaatttcatcactattcttgatattgtgggaaattgaagacaaatgcggccaatgcatgttaaggtcatgaataactcataaaccttgatgtttcggctgaaactgtggtcacataccagtttttaaa

SEQ ID NO: 39517 - DNA, 448 bp, Glycine max
tcaacataccccatttctagtgtgatctttcgtatttcaattggtatcacagcatggcctattgtaatgagtattcttacgaatatagaggagagatcctaaagtccaatatatatggaagaaggatactccataaacaagccacaattattcacaggcgtcaaatatgactattggaatgaacatatgatagctcatttctagtccattcatatagacctttgggacatcgtagaacttgacaactacgtaccattggatgatcaactgaatgaactttccataaccttttaggcaaatgctcatagacaaatgtttatagtgaactttaaagctcacaatgttgtattgtgtgccctctctgatgaagaatattcaaaggtccacaactacaaaagtgcaaaataaatgtcagacacattagctctgacatatgaaggatcgtcat

SEQ ID NO: 39518 - DNA, 502 bp, Glycine max
agcttctagcacactccagatattttctcaaagatcttatctgtttattcatggtaaagggtcttgtgaagttacaaaccaaatttcgagaaaatccaacggttaacgaaggctggacagcgtttctaccgaggcagcttcatgtacttttctctataagcttcattaagaggcttcctccaaaagcttcattaataggcttctagcacactctagacatcttctcaaagatcccaacggtctgataatggaaaagtgtcttgtggagttgcagaccaaattttgagaagatccaacagttagcaaacgctgggcatcatttttaccgacgcagctccatgtatctttctctataaacttcattaagaggctatcttgctccctcctggcttttttgagaagctatctcaacaagcttccttgagaatctatatccttatctatccacacccctctattaactaaatcaacttcctttaaaataattaccgatgaaaataac

SEQ ID NO: 39519 - DNA, 478 bp, Glycine max
  unsure (1)..(478): unsure at all n locations
tatgggttgacccttgctantactgacctatgatactcagctgttgtgtcgctgagaggcagggacntcttntcttttctctctctnccccatggcgagggctgaaggtattgaagagtctatgtgagttgcctacttttttacatgctcatctccattcttacatcttcagctcactaaaaccctacatctctcttttgctcatttncaatgcccaagggctangaggagctcaagattccaactcaacccacactcatctcttttgcttccttgtgtcaaanaagaagtaagggaggagcaattgatctcttaggacccatgctatgttgtatgagtaaactcattatgtggggttgtatgaacttgaatatgaattggctatatgattctggagtgaatttgaatctggttcaaaaaagttctgaccaaaaaacaactgaatgctattgagtgatagcttgaataatttagtagg

SEQ ID NO: 39520 - DNA, 437 bp, Glycine max
ggcttacaacgcaagttttgacgtgagcagcagtgattcttgttttaatatgattcactcatgcagaacgtacgtcaattttgtttttattatacttactctgaactttgtggctattcccttttgtattttactgaactgctacataggagtggaagaagtagaattactaggaaaatgctagcaatatggtgattgataccctcttttgaacacactattattgattcaattttattggaaatcacaatatattgtccatcatacgttttttgttgaaatcagtccatctcataattttataattatcaatcaattttaacctataataaagattgtgttagaaaatgtatcagatagcgtggtgctaacactcctccatgtactatgttaaaacaatggaatttctggggttttcaattgcagattacaattaa

SEQ ID NO: 39521 - DNA, 294 bp, Glycine max
gtctgcattataataagtatgtattggcaatataagaattgtcaatgcatttgatacctctcaacgagtctctcattatttatcacttctagtgaggcaattgcaactgcactggccagtggatttccaccgaaggtactgtgaacaataacagagaagaagaaagcttcaacattattagtcttagctttcatactttaataacattgaattgtattgtactaaatgaaattattggctaattacataaacaagaaatgaatgcaaaacaaaaagcaaaatttccagagtaca

SEQ ID NO: 39522 - DNA, 1163 bp, Glycine max
  unsure (1)..(1163): unsure at all n locations
ggatccgccagtgacatcgcagctgangtcacacactctantataagccgcctatnactctgntcgagattcagacaacatccgatccacctaccttaaggcacaacggcnaatgagtcctttggattccgtcgcgcacaccgggnaccactanagtcgaccagcactcataccaacactacgacgagccacagcagaggatgtctacctattacgacccagacacccccaaagcataccggcgggatcgtcgccgcacgaccgagtggcacaagcgcacaccacatgaataatagacaagaggagtgggcccaacactacccccagaaggcgaaacctcagtcacactctgagacaagagcaggcttgctacgactactccttgacgcggatagacggagaacctaacggcgttgcacggacactacacgngggagacagtacgtaccatttcgttgaaaactgactgaccgccatgatcgcggagactggaatcactatagaatagacgagagagagccgcgctgaaggcggggacgatgccgcactcaatactgtacgcacagactgaccagaacacacgagatccgcggcacacctcaaagaaagtctgacataagataacaaccatccacccacgatcttcgacacaactcaagagagacactccgcacccaccgcgcccaccgatacgcttaccgacacacagctgggcgccacagggtacgctcacgctacagcaagtaaagaaacccgagaaccatcgaactaatacaccgacgagacgctcctgatgactaagatgggcggcaggcatacgactccctccctacagcgatggggcggtgacagagagcgggcgacgaagagaaatgtactcnccctcatttcgccacacacaagagacggctgacaggtacggaccataccataactcactccacacacgaacagacttgctcgggagcaacaatgcgtcctacactatgaccaggggacctaccacgtgggatcagagagcatggcctaccgtgtgaatcactcacgacggaagaagagcgcgacctacgcatacgatgatgcgatacatctgaccaacgtaaacgcccgcagaaaatatcacagccagcgacacatctagccggaggcgaacaaccatcacg

SEQ ID NO: 39523 - DNA, 422 bp, Glycine max
  unsure (1)..(422): unsure at all n locations
gcgctcatattcgccccataacataacccgagccaccatcaaagcggcaccagataagcgtggctgcatcagaggagattaaacaacacatgcataaagttgggcaacaaggaaaagaaaacacaatccgccaaaggcgagtgaagaaaaaaaagagacaaagatctccagaatttacaagaaaggcacaaaagtgcaacgaaagattaatgtataagacaaaaggagtagagcccaacccaagagttgaaaggaacaaaagtactagcaagcctctgaaggttcttactcaatataaccctcanacactctntgagcctctctaatcctttctttcatagcccttttacccctgaccacattacaaacccaataaagcccatgtggatcaaggaatgactaattntgcttttaagttggga

SEQ ID NO: 39524 - DNA, 489 bp, Glycine max
  unsure (1)..(489): unsure at all n locations
agcttgtagctctttgtcattgcaaatcatgcttgcttggcggtagtagtggttcacataagtgcggacccaggtctcaattgcagaccacatcaaaagtccatccgttgcataagggtagtcttcaattaagagctctacaccatttggttgtgttgggtctggtaccgccattcccctgcgcatgagatctgcagggaggccctccatgtcaaagctccacccgtttttgtatgctccacaactgatctccatgcagtagcgcccaggagtaaaacaagactcaatgattccatcagcattgatcagtttctggcgagctaaagcattgatgtctaacgtgtacctcatgtgtggatccaacagcttaaagacacgatgcattgcacttaattgcctatgagcaaacaatattaaatggttccatgcccgcatgtgtgcgttacctgtatacaattaatttaccaaaatttatcccacancatgcat

SEQ ID NO: 39525 - DNA, 560 bp, Glycine max
  unsure (1)..(560): unsure at all n locations
cgcgcggaatgaaaccctgcatgtacggacacttttganatttagctccgttgctattcgcgacactgatgaataccacgctcagagacttaagccanacacatgggagtggctaatgcctttattatagcccatacatgttccacgtttctagcttacacatccattccacaccaccacaactgatctccagagtaatttggatgccgagaatgatacctccaccctctgtccagaataaggacctgcctgttctttctactcacagagatgaaaagctgattctcatcaatgtatgccgtgactatgccagatacacacacaactatggctaccacgtcccacatgctcagaggctggttcaccgagtggcatacatataacggaagagacaatccaatcagagacacctgcaacgttgtcatgatgtacattaaaagtagaagccatggagaatgatgactatgagtgaccttaattacctgctgacggacgtatatggcgacaaaatgaacccaccaccgatgccttccatatcgatggctgcaatcagtgaaacg

SEQ ID NO: 39526 - DNA, 577 bp, Glycine max
  unsure (1)..(577): unsure at all n locations
agcttgtgcaaatcaaatcactcctacatctcatctctagcatgcattttctttacccactcctcacgtttggttttttagggaaaaacaccataactaaacgcgccgcaagggatccctatcgcaccagatccaaatctagaacgatgggtgatcaagaggagacgcaagaacagatgaaagccgacatgtcggctctgaaagaacaaatggcctccatgatggaggccatgttaggtatgaagcagctcatggagaagaacgcggccactgccgccgctgtcagttcggctgccgaagcagacccgactctcttggcaactacgcaccatcctccctcaaacgtagtaggacggtgaagggacacactgnggcacgatggcagccatcacctatgatacaaccgagcggcttacccttatggattgccgcccaactattcaccacccatcttgcaagaagatgcgggccacattgcttctcccgtccatgaaaaagagcctnctcagcagcccgacgaagtccatanagaccctcaagattatgctcggagggatgtcaagttttatcccccgat

SEQ ID NO: 39527 - DNA, 583 bp, Glycine max
  unsure (1)..(583): unsure at all n locations
agcttgaaggcaaactggatgcattggtttacttgtttacccagctggccttgaatcagaaatctgtacctgtcgcaagggtttgtggtttgtgctcctctactgaccaccattcaggcctttgcccttccatgcagcaacctggagcaattgagcagcctgaagcctatgctacaaatatttacaatagacctcctcaacctcagcagcaaaatcaaccacagcagaacaattatgacctctccagcaacagatacaacccttgttggaccttgtggcctcaataatcttaagagggataggcttagaatacagaagaagcaacaccaatcaatttaacaatgttctttaaacatgcaagacacaattgattgcaacanaataaataagataagggaagagagaatgcaaacacagttttatactggttcggccacaacccgtgcctacgtccaatactcaagcaacccacttgagattccactatctttgtaaaatctttaaaagtctgacnccacagggcaacccattcttttgtcagatgcttacaacaagagactacagtctcttaccaatctcattg

SEQ ID NO: 39528 - DNA, 389 bp, Glycine max
gatccccttgtctcaaacctcctctgaggcttatattctgatgttgggctttcattcactagaatagatatagaggctgatgtgaggcaccccttattccatgcactccctctatcatggaaccccattcttttcttcataaaataaaaggaattgccgagacactgcatcatatgctttttctaaacccactggtagaagacacacctacacacatacacgcatgcacacatacatacacacacacacattcctccttaactacctcagtagcgacctgaacaccatggatcacctgtctaccctacacaatgacacacccacacacacacacagactcacgctctcacacacattcgcacagactcacacccacacacacatacaca

SEQ ID NO: 39529 - DNA, 654 bp, Glycine max
agcttcctttaagacatttatgttgcttttaaatttttattccttcacaactctcctgaacgttgatttgttgtaactaacttcatactccattgaatacttccaactttccttcctttcgagaattgctcccagatttttgcttatgcaaaatagattttgtatttatcttccacaattaatgcttatttttttgattggttgtatctggcatcttgtatgcctacaaattccttgttttatttttgcttcttctttaactcttcctttgttttgctatcttcattagtcatccaaaataccttgaactttctatgctctattgctttaacattgagggtattttggtgactaatgatgatgttgaatcaactgtcctcttttattctctgcttcctctttgtgttgggaaaacatcacatttttgtgtttgtctcttttgctagacttgtccattttgccatcagtcttggacactataagatttgtgttgggttggttcattatgccttttatagcatgtctttggaagcccttcacgatagaatcatcttgtcgtcgatttgctcgacaatgagaatttgtggtgaggaagccttcttggaaggtgtgctatatggcggatgacacctaatcacacctgtgcctcctact

SEQ ID NO: 39530 - DNA, 426 bp, Glycine max
  unsure (1)..(426): unsure at all n locations
aataaaaaacaaaanataatctcatattgtaaaaattgttcaaatcgtgtctcaatagaattaattgattgatctaatatgtataanaaatactcattacgaaaagattctttgaatgaatgtgtgatctcattactaatattttcatcaaaataaaattttctataaattttacgtttttcaccaacttttgattctatatcctaaaaaattagaagcctaaggtcgttgtctcatagcctaatgacttatatagccctggtgccaaaaaatagacttgtgatgacagacaaaaatctgtatatgtaaacatgacattgatccacggacatcgaccctttcattatgagaggtatatagcaacgactatttgactatcactatanngagtttaactgtcattttacgtanaaagtattgacttat

SEQ ID NO: 39531 - DNA, 619 bp, Glycine max
  unsure (1)..(619): unsure at all n locations
agcttgtttgaacttataacaatggtttatgagttatgaccttttataagtttttaacaacgtttaataagtttcacaaaatcaaatataatttattttaataaattttacagtgatatttacaaatgagttttactaaataattgcttgattaagttatttatctaaatacatccaaaactaattgtcattcataaaacaccactaatgtgattgaaataatttcaaaatccagtgggtcagaaaataaatgataaggaaaggataaaaaactgccttgaaaatttagagcatgtataacaatgaaatgagactagctttcatgtaatgtcgctaaagaaaaacggatgttgatagtaacaaaattgtttctaaaatgctggttgcaacaagttatctttggttctttcattttcagtatcaagcatgtggtctgtgcttcaacaaggatggatttaaaggttgtgaatttttgtataggagacattatccagacaaacacatggtccgtgaaattgtacactgatactttntaatgtaagaaaggttttcaagttatatctaancgaattagattcgtatagcgacantattctatctatttctttaatttattttt

SEQ ID NO: 39532 - DNA, 405 bp, Glycine max
  unsure (1)..(405): unsure at all n locations
ctcttatcatgtggaataaggcaacaggaatatgttctgcatgattntctttanctcatataacagacataaaaaattatttagaaaattatgattcataatatcatttttaactaaaagaagcattccaaattctattctgtttattttcctcttttccatagcttattgtgaatcaaacatgaataacgccttacattgaggaaaacacattccataattttgacttttgactatctcagaaggaatcaattgtaagaaccactcactctacctagagttaacaggcattgcaaatcatttctaagaaattctggggaatagactacttctggctcactaatatttttaagaattcatcatactcataacagagtgaagaatttgcaccccagaacagtatca

SEQ ID NO: 39533 - DNA, 614 bp, Glycine max
  unsure (1)..(614): unsure at all n locations
agcttgtagaatggctagacatgatacatgtcatggcttggtttggttcaaggataaaagggatgccccacattatttccatgacacaaatgcaaaaatgatgatttggaaatattatgcaaaactggtcatgcatgcgcctatgtggacgctcaagtgtcaaatttttatggtcatgtgatgctagggctcacgattcatttcctctattttaaatcaacccaatgtttccaaaatatgttcttttatcaatttgtgcattcatccgagtccattttgggcgtctgggaaaatcttcacagcattcacccttcaggtgtatacacattnttttcaaaaactagttatgatcagtgaatttttccaaagaaaagttggaagtcatctcttttcataagcatgttggtttttcagcttgacaacttattttcttttttctccttcttnttttttcatcattatcatttgattatttctttttcttgtttgtattttttttcttcttttttttcatgaagtattttgctacctaaacatgtgcatatttttgtgaggtatttttgctatatacatgcatatgcaaggtatcttgccacctacacatacatatatat

SEQ ID NO: 39534 - DNA, 342 bp, Glycine max
tctggcgacaggtgtagaattttgattcatggccagatgggttaccacgataaccaaggcatatagtttaccttcaagcttcttagtctcagctgatgaacatgaatttgtggctacttcatgcactcctctaatgacaatagcatcacttctggcgctaaatcgctgggagtttgaagccatcttctcaattaaattactggcttcagcaggggtcatgtctccaagggctccaccactggcaacatctatcatacttatctctatgttgttgagtccttcatataaatattacaggagaagctgcttagaaatctggtggtgagggacactggcacataa

SEQ ID NO: 39535 - DNA, 904 bp, Glycine max
  unsure (1)..(904): unsure at all n locations
gtgcaccgcaggcgacgcnagacccacacantacaaactacagtgatagctatactgtccatataaaccacaacaaancnnacanccagcggactgaatcgatgacgccatggcaccccccncnncnantacaccatcaaaaancaangaaccggggaagcgggaggaactttatttttccacaacccagacgcccacacggcgaacctacacaagaacccatggaacacaaccaacgtgcactcctgaaagaacggacgccagagaccggcacaagcgaaagaccagcggcaaccaccaacgacaaaacacgccacggcaccgaccggaaggaactggcacaatgaaaaggagacaaaaaccggggcaacagacgcgaccgcgcaacacaaaaaacaaaggaagtgacaaaagaaacgaaaatgaaaaagaccatggaaaataccacgcaccaacgcgttaaccccgcgcggaccaccgagacgaaagataaaggcgaaccaaacgaccacagacaccaccgcacaccaccgagaagggacaaaaccacagatgggcgaggacctcgaggacaaccgaccaacagacacagcatagacaccaaaagaccgggcaggaaggacatacaccccgaaaaacggtctgaacccatcaaaataaaaactcgagctacagcacgacaacgaagacgcgcgcgaacctcacggaaggaggaaaataccgcaaaccagaaccccaccgcggccaagagcgaggccgtaacagaaaccgagaacgaggcgacaaggcaacaacccacgaacacgaatgaggaaacgccaacgaggcaggacaccgaacgaagggagaccagagaccaccacaaacgaatgaacgcaacggcaacgggaggaaccagagaccc

SEQ ID NO: 39536 - DNA, 550 bp, Glycine max
agcttgatgataaaagtgagaagtacatgtttgtgggttacgactcaagatccaaggggtacaagctctataatccaaatagtagaaagatcgtcataagtcgcgacgtggagttcgaagaagaagattgttgggattggagtgttcaagaagataagtatgattttcttccttattttgaagaagatgatgaaattgaataaccaatcatagaggaacatattacaccacctgcctcaccgacaccaaggctggatgaaacaagttcaagtgagaggacaccgcgactaaggagcattgaagagatttatgaggtaaccaaaaacctaaacgacattaacctcttttgtttttttggtgtttgtgaacctctaagctatcaagaagcagcgaaaaacataaagtggaaagacaccatggacgaagaaatcaagtcaatcacgaagaatgatacgtgggaacttactacacttccacgaggacacaaagcaatcggagtaagatgggtgtacaaggcaaagaagaatgctaaaggagatgtggagagata

SEQ ID NO: 39537 - DNA, 434 bp, Glycine max
  unsure (1)..(434): unsure at all n locations
gtgaccacagagtggtacctgaagatatgttgcggnggtcaagagaccttggggacgtcaagtggggtgctattgcccaaaaccaaggttgaccaatcccgacccaacccgggcatagtcaattagtgagaacctgtgatttacctaaacaggcgagctcctcgcagtcaaccaataaaagaacaaagttcacaaagcaaggaggcttgtgtggcggctggccagctatgaatcttgagtggtatctggaatatggcctctgttaatcgattacaaggcttaaaaatggagacaggatgataatatggcctctagtaatcgattaccaaggcggtgtaatcgattacatggcttataaatggagacaggatataaaaatggtctctagtaatcgagtaccaatggtgtgtaatcgattacacagtgtaatttgt

SEQ ID NO: 39538 - DNA, 538 bp, Glycine max
agcttcgatcttccaccaccgccgccaccatcatcttatatttctattataatattatcagtactttgattttcagccttgtattttggctatattattatggtctttgaacaagtgactatttccttatttgcatgtgatgtgagaacaaatattaagtgtgctatttgactatatgtattttatagttaatctattatttctcttgcttcatgattagattgatttttttttcatgaatgttgtatgggtgtttaacttatatttgaatttgatacgcactttggctttttgttgatgccaacggtggagagatatgggattaaatctataattcacatgagtaatcaacttaattttaagatatgcatacatacacaaacaaagggggagaatttatgtgagtgatcgactatgaaaaagtgtgtgtgtgtgtcttgatttcagaagttgacactcatcaaaagggggagattgtacatcaaagctttatggtgaatacaagtgattctaagatgttttgatgataacaatgatg

SEQ ID NO: 39539 - DNA, 359 bp, Glycine max
ctaatatgtgtgtatcgggcgtctctattgtgggtgagtcttgccaggccatttgtgataactcaagttttattgcctgcttcaactatttgttcattatcttcaaattgcgtttgtgttcctcttccacttctctcctgcaccattcctttaggttttcattgatttctaccaacttgtgtggggcgattgatgctgatgaagtgttatagccacacactgcctcgccaatagtgattgtcacactagtcctagctacacgaatacgaccaggatgctccggtcggccaatcgcaggattcaatatgtcatcacgaccatcgggaataaagttgccttgtgttatttgctcttgtaaa

SEQ ID NO: 39540 - DNA, 178 bp, Glycine max
tgcagcatgcaagcttgtgctgttgctgctgcatcattgtaatagctgttatgttactataggctatgagtgtcgtacgagaataacttactaatgattgagcatcgctactttgcggtgattaacatccatgctttaatgcctgacacttgctggagactaattgacttgagaaaaa

SEQ ID NO: 39541 - DNA, 207 bp, Glycine max
atgtcaccccgttatttttattacagtaataattctacgcaatattttcattaaaaactaaaagataatttgtattgaatatatacattatgttatcatgcttttttttatatttcctatatttttatataatatttcttctctttaatttaggcatcggttaaaaggctctaattactggataaagaataatggttatgacaatat

SEQ ID NO: 39542 - DNA, 994 bp, Glycine max
  unsure (1)..(994): unsure at all n locations
gtgcacactagtcgtcacacangancactcgacncnactcatcacatgcactctctatgcctcacagctgacaccgacacatnacgaatnagcacctacctacactcaccagnacagacggctttgatttcgatggcactgccagaaccccnancagcccactgcaagcatgcaggctgcaagcgtcaaacgcggaagagaccgggtgttctttttatggcggccccacacggcgcaccggagacatctcacgggggaagaaagacctcggagacaacatgtgggcggcctaagcctacagaccaaattagccaaacgcgaccgaccacggtctagatgatccgaaagagcctgggacgtaccacaacaggcgagctactggcaaccaagcaagaacagaaagacgatcacccacaaccaacggtgtcttcgggaaggccggccgcccaatcgactacaaagatctctggatgagcgtctccggcctgctactaccaacggagactagtcagtacaaggcgggaaatcgaccaccggcataatcacggcctccggtcatcatcacacacaggagatcgatagagcgggccacgaacgcgaccaagacagtagggggcctcacgcatagacaaccaatgcgacgagccgacacaccccacccgtggcacgggcatcgtcaccaaagagggaagcaaaaacccgggcaatcgacgctggaggacacaatcgagcacggcagcatctactggcgaccaccacccaggcagcgacataactgacaaaacatcctgagggactctcccaaccccagacccaccaagcgcgcagagacaaatccaacttacgcggctacacgaaaccccccgctaatatgcgggcacggatcgatcaccgccgcagaccttctaacatgcgtacccacacgccagcgcgaacggaatatcccgtacgaaccgacgcgaaatactaccgcagacatctcgaaacggcatcc

SEQ ID NO: 39543 - DNA, 529 bp, Glycine max
  unsure (1)..(529): unsure at all n locations
gcatggcntttgagaccttgtattgcggcccttttatactagaccggttgcctctcaggaangtctagagctacatggcatgtatttagtccttcgataatatgtatgtatgattattatgtatgcatgatactgccatcgcaccgatatctgatataaaactgtcatcgcgtgcatatgaaatatatagtagcattgaacgcgccttacataaatgcctgggatgggtagcgtaaaactgtttttcacatatgtgtttttgtgagtaggacacacaagatgcctcccacactatgtgtatatatataagatgtatcatgataaggttagtcacactatactgacatggatatgtgtctcaaaacgctcctcacaatattttcatgtgtgacacgcgtatgtgtataaattagccacccccatatgatatttatataggatgtgacctctcacatataacgttggtgacactgttggatgatggatatattagaaactacttctaaggtgtctccagaaggccctagag

SEQ ID NO: 39544 - DNA, 909 bp, Glycine max
  unsure (1)..(909): unsure at all n locations
cggattttgaattcgactggcnatcgcgagaccccgtgaagccnacatgcaagcctgcaggctgacatcgaattagtgatatgagggacggcaaattatttttgttatgtaattcaacggcgaaccacactggtgatgccttaccgatattgaatgatcaactactagagatgactttaaattggcctttgaaacgtttcgtagaacctgtcgggcaatcatatatgactcatggtaaggcgctttacaaaacaagtactgggcgtattgctgcattgacacaagaagacgtaagacgtacatcgttttgtacataatattgttatttngaaaaacaaaggtccattgtgctatctaaaggtcttgagaagacatctattttcatacacctacagcgtgagaagaactctcattcgtcgatttctgagcactctctgcgntctataatctatgcacacgatacttggaacttgaaattcgaaacttgaaacacgcggtggaaaatcacatttctgatgatccttcgagtgtatttggtcaaacataactgaattgttgattttgaatcaatcttgctgctacgtgatcgtggtagtttttgactgtacgacgctcctggggataaaaagacgcttttattatcgttgatatgattcacctgttttaccacttaactcctctccgcataagaatgttaatgtattggtatataaagtggaatagggtcaagaaattttcactcttgtgtccttgaccccccacctcctgtaacactactgttctttgacgggggtgcttcaaggtctcctaaaacaaataactttatgcatgcacgctctgagattttttaagacctttctaggataagtggactatcgcaagttaatagaactggccgctcataccctc

SEQ ID NO: 39545 - DNA, 393 bp, Glycine max
  unsure (1)..(393): unsure at all n locations
caaacaatggttaaaacataattggaatgtaaaacctctgcattatgcatattgtaatggcatcaatcccttacctcaaacacgccatgaccaataaactgtccagtccaacaaaacaactgagcagccaacacaacctgaagatttcatcacaaacaagttacaattttattcaatgtacaatatcacatgctctntttatctctaacacaaaagcagaagcacgcaaatgaagataaaaaaattgatgcttaatcatgtcaagatatggaaaagtattgaacagtcctgcggagcattgatctgaatntagagcatgtgtttgattaagtctacaaacttacttctgaatgaaattcatttcataaactgagttttaaaagcaactctcac

SEQ ID NO: 39546 - DNA, 609 bp, Glycine max
  unsure (1)..(609): unsure at all n locations
agcttcttgtggttgaagaacttgctccagtcggtgttgaagaggtggcgacatggcgtgccgcggtagatgtggtggaagcgccactcaacgccgtggatgtcggcgacagagaggagctggataggtggatcggcataaaagtcgagtggagggaagcacaagtcggcgcaaaagcacggcacggagaagccaccgctgttgttggcgtcggagggagtgaggatcttcacaaacgaaacgacgccgttggtctcgcggtctttatcatcattgtcatttcgaacctccttggtgttgttttggaaaggttgttgttgtgattgttagaggggagtgaggaggaacttggcggggacaaaggggagagagcggataagagggttgtggtaatgcgagggagaggcatgctccatgtgaccctangcctaggggaagcagtaaaccctattcacacattaattttgggaatgagaacgaagacgagttntaagtaaaacccgtcgtaattttcattccattaaattacaagattgccaacaacatacattctaagacggtnttgtataatcaccttagaatgttagtcataaaaagattttttattta

SEQ ID NO: 39547 - DNA, 448 bp, Glycine max
  unsure (1)..(448): unsure at all n locations
taaagtatgcccgagtcattcatccctatgagatagtgtttaagtattggcgatcagaattgccattccttggattatagggttgaaccaagctcatgcttttacaaaaagggtcatcaagtcaagttgaaatattgaagttaccgtcttgcanaattggggcaaaagatgaatcgagtcacatcactgcttcgtctactgccaaacataattatgatagttgatgtccttgttacttccagtctcaccttgacaaaaatgtcatggaccatgttgaaaatctaaatngattcaaccccatatcctgcgtaaaaattcgcaatacttcaactatacatcattcgcatacatccatgcttgtcattggttgcattgctcattgcattctttccttcgaaaataaaataaaatgaacttaatcattgacaccaaaaaanaaaaaaacatg

SEQ ID NO: 39548 - DNA, 583 bp, Glycine max
agcttcttgcgtagccgctcttggtgctcagaaaattccaaaaacaaatccctcttattactagctattttgaattctttagttcctgaatatacaaccttcaaattgttgctcgttcccctctttgagaatgaggaggatctttataggacttcatccagctgatgtttgtcggcagtttcatcatccatcaccattttcttctatgccttctcacatttgttgttgttaaacccatatttatgcctttttcccttcatgtcttgttttatcacaactttaactaaatctcccatcttcagcatagttgaatatcttgtcttattctccaatgacacactttgatggcttgtatctcttttcttcatatgttctactgcttcagcttcacaatgcatagagcaatcagaattttccagcatcacaaaggcttctgatcagcgtgacactctccaccctctttggttatgcttctgtgtttcttccgtgcttctccttaaattctcagattattggaggctcactagaagatcagcccaattttgcttgtcctcctctaccagctcatatctttcgttcacct

SEQ ID NO: 39549 - DNA, 548 bp, Glycine max
  unsure (1)..(548): unsure at all n locations
atgaacgcattgcannagccgacgcatttaaaattggactcgctagctattacgtgacactatgaaactcagtcttatcttcacgcatagaatgattgcacttctggctntagcaatcatctctaatcactactttgagcttagatattctgacatgctttcttcgccttcaagagcttgtacacagccatgttgaatcaagattgctcccgtcttgattatgcatgacccgaactcatgtttccctgccaacttctcaatgacgtactttgttggtaccatctttcttgagcttgatcttgtccccacagacagcgccactaggaggttcttcatataaatgccgctgctcttaaacttgctcgcgataaggaaggcaagaaaaacacagcttgcgaacaccgcacagcaagaacccaaagatttacgtggctcggtaatgtgcctacatncacgggacagagcagctcatcatcatcacattgatgcatgacatacaagttcaatacaagcagcagctagctttgatctctcttggattcttattn

SEQ ID NO: 39550 - DNA, 505 bp, Glycine max
  unsure (1)..(505): unsure at all n locations
agcttggacaatggcagggagtcgcaacctacccttcgacgggagggcgacacaagggctcacgggtgcgtcttccaagggaggaaggcgcgcggagtcgccaccaatgttggttaagttgtttttatctttttttttgcaagatatattttaaccgaacaaaagtcgtttaaggcgttggaccattaaacgatcttttgattcttttgaaaggagagaaacgttaaggcgttggaccattaacgatctctgggtagagaaacgttaaggcgttgaatcattaacgatctcttggggtggtcgacaaaagcggggtttttgctcctacgtatcctcaattgcgatgaggaaatcagacctacgtagttcttgcaaaagcggtaaagttatgtgttgattttatgcttttgaacggtccatgttaactgataaaagcaaagaggaccgtttaaggcgttggactntaaaacggtttcaagtgatttttgcagacaaagcttgattt

SEQ ID NO: 39551 - DNA, 415 bp, Glycine max
  unsure (1)..(415): unsure at all n locations
ggccattatatgggctgatccacttagtctaatatctttctcattaaaatttgtaacttttcttccttcgcgcacaatagcatgttctagtcctagtctagaagctatgtgtttcactctcatgacgtcatcctctgagaccagattcatctatatattngcatcatttntgacattttccaaagctaattttatggattgaagactaatagtgcatttgagacctatcaatcctaacaagatcagttcttcttgctgaagttgttctccatctctttgtgtataagcaaaagcaattggcttaaggtcagcatccnccatttgttgaatcacctggccaactttgaacttcttattttccatggcatgtgtggcgtttaaacaaattagttttacacatgaaattaaaaataaa

SEQ ID NO: 39552 - DNA, 488 bp, Glycine max
  unsure (1)..(488): unsure at all n locations
agctttgtcgcgaagaagagtaaggttctttaattttatctttgctgtttgacacccctagcttttttttcctttttctatttgacacccctttttactttaaacagtcccattttttttttccttaacatgctatntttgctgatcgacatcccttttttctgtccgccatgacatccggcattttacgctacgccatccgccatatttttatggcggattgttgactttccgccatctgccattaacaacattggacttaaaacatactaggtggttcttattctatgttaatagacagtgagaggaccacttagctttataatgtcattatcatcgaacatgatgatttaaccttgaactagaacaactaactgaattatcttatatctagtcacatgggaaatgggatgcctgtgtcattctgttttaggaatcttactgctgttatcattctgataaattattaatattgtggcattcaccct

SEQ ID NO: 39553 - DNA, 382 bp, Glycine max
  unsure (1)..(382): unsure at all n locations
tgccatattataattaagaaaaaaaaatcacacgtagaaagtacataccgcatacctaactaaattcaagtatataactttaacaatgattctatatntaataggaagtttcacaacgaaaaatttccagctatgttcctttgttctaacataacaatgtctatcacagccaccgccctgttcacgtgcactataaaaatctcatatgcctaatgtgtctntattatcataacactcatcttcaaaaatgaagctctaattaaagattgaaagatagaaacaaaaatacatataccattacatataacaacacatataggtaccttcttagtttgggatctactcattactctctcataaatcctaaaatgatagaagaaca

SEQ ID NO: 39554 - DNA, 593 bp, Glycine max
  unsure (1)..(593): unsure at all n locations
agcttcgaagggaagagagagactgatcacaagcacatagcacggttttaaaagaagagttagccgtttgctcaaggtccaaaagaaacttgtctcagcgtttatgcgagacagagaccaacatgttagctatcatcaccaagtaccaagaagaactaagtctagccacgacccacgagcatagggtggcggacgagtatgcccaagtgtacgcggaaaaagaggctagagaaagggtgatcgactcgttacaccaagagacaaccatgtggatggaccgatttgctcttaccttgaacgggagtcaagaacttccccgattgctagccaaggccaaagcaatggcggacacctactccgccctcgaggagatccacggacttctcgactattgtcagcatatgatagatttaatggcccatataattaggaaccgctagggaacttgtattggtactcagatcttgactagttataaactttttgaataanatgagtttatcccatggttttactccgannatcagtgcgaatcaaatcacccctgcattctatccctagcatgcattcttaatttttacctactcctcacg

SEQ ID NO: 39555 - DNA, 353 bp, Glycine max
  unsure (1)..(353): unsure at all n locations
ngcttgtgttgcttctatggaggctggatcttngagcttcaatgaggtcctttgatggtgattttccacgatgtgatatgcagcggaagacaaaggagaagaggagagaggatgcaccatccactacggaataagccttggaagaaggagcttcaccaccaagatgagccttggataacaagtttggagagggtgcttcaatggaggaaaagacagagggagagaaagagagaggggcgagcacgaaattgaaggaataaaaagggagagaagttgaactttgtgttgtgtctcacaagactctcattcctcaaagttacaacaagtgttacacatgcttctatttatagact

SEQ ID NO: 39556 - DNA, 598 bp, Glycine max
agcttaaaaaacaagaaatgaattgtaagtctcggattcgaaaacttacccgttgaagaacgaagaacggatgaaggacggtgaagaacggacgaaaaccttcacggatttgcttacagaaacatctcggaagcgttacggaagcacctcgacttggattttcttcacggaaacaatttttttcacccgaaacagctgaaatacaaagccagggggctcagggatccttagaacagcccctttcagcctatttatagggaaaaaggggaggaggtggccgcccagctcgcccaggcgagctgggcggccacctcctcccctttttccctataaataggctgaaaggggctgttctaaggatccctgagccccctggctttgtatttaagctgtttcgggtgaaaaaaattgtttccgtgaagaaaatccaagtcgaggtgcttccgtaccgcttccgagatgtttctgtaagcaaatccgggaaggttatcgtccgttcttcaccgtccttcatacggtcttcgttcttcaacggggtaagttttcgaaaccgagacttcaattcatttcttgtttttaagctggatgcctgaggtcg

SEQ ID NO: 39557 - DNA, 652 bp, Glycine max
  unsure (1)..(652): unsure at all n locations
agcttaacatctatgtaagtactactcataatgctaaggctatacatttcatttgattgtatttacaaatttatgtactagtagtattagatctaaagtttattttttaattcactttttttacaaaacttttgtacatgatcatttaatgtcatattattagaattattataggtgcactttatgttgttttccaatcagaattagagtttcactttgataacctgcataataaagctttccattaaaggtcaatctagattaacgaggtgaaactttcattttgattgaaaagcagtactaaaagcacttatgtaagtgaatttgtttaagcaaaacaacatacaagacttgtcctcccaaaacaccttaaatgtcatacagttactacatctattttcttaatttatccattgatcaatctttagagttgaagtaacaacaaacttttttctcggttaaatatatagcttattgaatttgttcgacggagctagtttattatccttcanaaccattgatgatatatgtaacaagtacattggttatagctagatgcgtttcatttggtagacctgaacaatgtgtgcaaatgctgcctatatgagatcataagcttcatcactgactttgtttattttaggtgacaatg

SEQ ID NO: 39558 - DNA, 385 bp, Glycine max
  unsure (1)..(385): unsure at all n locations
gtataatatatgtatgagcacatatgtaaaatagagtatatcagattcctcttaatctcaagaggatcaaaatacctcacgctcagtaatggggtaacgacaagagtgacaccgaaagcagtctggatgaaaataattatgaccaactcctaaacaattgccatagagtatctcttggttgcaccctccacatgttctattatgcgattgcatactgcacattaccagttgtcaataagaaatgattgagcacggtcatcataatgcattagcatcacaagaatgaaatcaaaattaattacatgtatggagaagtcaacagagaaatcaaaacttattttaannatttgttcaaatttatgctaacaacacaatgacatacata

SEQ ID NO: 39559 - DNA, 493 bp, Glycine max
agcttttcgattcattctatgtacccgtagtggtccacattgtgtttcgtgcatttttattctcgttttgtttactttttatacccctgttgacgtgcttaagccattttacttaagtcatttctcgcttaacttaaaaataaaataaatgtccaccgaacgtttgaattgtattatccgttgacttcggttaaaataaattccgaccgttcggtcgtgccgtaaccacgttggaaatcaaaaagaggtaaaattataatataataatccaaagacatctttagtaaaataaagcgaaaaatcaatcgggcgttttctctttgggatttctcattcttactcgaatcgattaataactaaagagaaactaaaggctaaaatcaattcgcctagtcaagctcgtccataaaaataagctttagaagattgtcatttcattttctcgctaagtaaaatggatcggcactgacaactgtgtacccaccaatcatac

SEQ ID NO: 39560 - DNA, 333 bp, Glycine max
  unsure (1)..(333): unsure at all n locations
ttcacaaatcatctataaaaacttgctaagccaggaaaactcctcacctcagtcacagacttaggtgtaggccattcttgaatagccctaaccttcatctcaccaaactgcactgcctgtgaacttacaacccatcccagaaacacaacatggctagtacaaaagatgcatttttcaacgattggcatacaattgttcttctctacgcacacacaggacaaattntatatgatcaatatgcaaagtctgtgaagcgctgtagacaataatatcatcactgtacaccacaatgaactttcctatgaactctctcaagatatggctcattaatct

SEQ ID NO: 39561 - DNA, 441 bp, Glycine max
  unsure (1)..(441): unsure at all n locations
agctnttcgattcattctatgcacccgtagtggtccacattgtttttcgtgcattttgaatctcattttgtttactttttataccccctgttgacatgcttaaaccattttacttaagtcgtttctcgcttaacttagaaataaaacaaatttccaccgaacgtttgaattgtattatccgttaacttcggttaaaataaattccgaccgttcggtcgtgccgtaaccacgttggaaatcaaaaaaagaggtaaaaataatataatactcaaaaaaaaaatatatctttttactaaaataaacgcggaatatcaatcggacgttttttttttgggattcctcattcttaatcgaattgattaataactaaggtgaaactaaggctaaaattatctcgcctagtcaagctcgtccaccaatataggcttttgaagtttgtca

SEQ ID NO: 39562 - DNA, 201 bp, Glycine max
  unsure (1)..(201): unsure at all n locations
acattgttgcctcatgatgtaatgagtcgatcacccttcctctagcctccttttccacgtacacttgggcatactcgttcgccactctatgctcgtgggacgtggctagatttagttcttcttggntattgctgatgatggctaacatgttggtctctgtctcgcataaccgctgagacaggtttcttttggaccttgagc

SEQ ID NO: 39563 - DNA, 901 bp, Glycine max
  unsure (1)..(901): unsure at all n locations
tattttatcgtaccacacgataagatacttattcggttacgactaaaatctcgatgaggataagagtctagataaacatagagatcgagatgtggaggagaatggatatccacgatgatgagaaccaactaggatccagataccgagtgtgataaagatagaatgtgtcttggtcctcttacaagtgacaagcgccaacaacgcgatgtcgggccacacgtagcgtgataaattcttcttgagaaataaatgaaaaagcgcgagtctcagtccggcctacctcatacgaaaaaaactgcgtaataaataggacacctgacggctcatacagatttttagactggtcgacgcaaaagggcgcagaagataagagacttatgaagacacaattattcgcttcagaatcgctcataacacacataaagaacaatggtcaataaatgagcggaagaccctgtgcgctcatgatcaggaaaggctaatgatggaagatgagctccaagatgaacttagccgtcactggcaagatgacaggttgtctaacacttcgcgagatcaagatacctggttgaggctcacaaaaagagatgatccaaagggtggctgtccgaagagagaaagactcacgaattcatgattcctatcaagtctggaacgaccaaggacaataaggaattgcctctcacgtgggatcgcgcgttacctggaccccgttaatntgtcaggcatcccgcaaaggagacggcatcggcggaacgcgcgctacaggttctcataacctctctgggctagaaagactaataaggcccggtgacagtatcaaaccacacatctaatgaacggggggacataagcgtggcgctatacgacggcggagtgaggtgaaccgctactcccgccc

SEQ ID NO: 39564 - DNA, 298 bp, Glycine max
gctggcactaacagaatttgctcaatgcattttcattcaatttcgagcttctcgatatattacgggactcaatcatacctccgagtaaaaagttattgtcgcttgaattggctaaaagcttcaacattcgatttccagcaactcgatatgtgacgggactgaatcacacatccgagtctaaagttattgtcagatgaattggctcagagcttcaacactcaatttcgagcgtctcagatatagttacgagactcattccgacatccgagtactagatattgtcgtttgaatcggctca

SEQ ID NO: 39565 - DNA, 294 bp, Glycine max
  unsure (1)..(294): unsure at all n locations
gagtcccgtcatatatcgagacgtctcgaaatgaatgttgatgctctgagcaaactcaaacgacaataatatttacttggatgtctgattgagtcccgtcatatatcgagacgctcgaaaatgaatgttgatgctctgagccaattcaaacgaccataactttttactcggatgtctgattcagtcccgtcacatatcgagatgctcgaaattgaatgttgaagctctgggccaattcanacgacaacaacattttactcggatgtctgattgagtcccgtaacatatcgagac

SEQ ID NO: 39566 - DNA, 998 bp, Glycine max
  unsure (1)..(998): unsure at all n locations
accaagaccgcatgcgaaacacgcaccatccncaccactactcaatctgtccataacgantatgtanagacatatacgatccacnnancnncacnnannnnncaccaagatttgaattcgatggcgatgcgagcaccgcganactctacangcaagcaggcaggctggccgaccncaaaagaagagggcgagagggcacttcattttgtgccgctctgacaaagaatatgaacctctgtaacaacccccaaagaacaccgggaaccaagtatgcgggatcagaacgcagagggctcctatgacgtacctaccatcatataataatctaacagcaaaccaactggacctaatgatacacaacggtgcgagccggaatgatgtctagcctccaagcatcactgcatcaaacaaacaggcaggaacaaacaggcgacaccactcgtcgaaggcaggacagaaaggagagcgtgtggagggacgcagacatagtttggcacgcgacagaacggtctggataacaccatggaccccgattggaaaacaacgcggaagaaatggcgaacctccaaaacggcgatcccatcatctcggaaacctcccagaaaccggttggggcggccgagggcggaaaaagaaagggacaagacaagcgactctgtcaccaaaaggaaaaaaaacccattgcagaccacgaggacagcacggcctgactatgaaagcaagggaaacaacgacccgcatgaaccccgcacaaaaggaaactgaaaccgcccggaagaggcttagagaaaaaccaactaccccgccaagggtaggagaaaacatccattcacaacaaggccccaagagaaatccaaacgaggaggacccgttgtaatagaacaaaaaccggccccaacaccgggcgaaatctagcactagggcaaaactggcccgggagcataaacgatgtaagcaaacggttccaacaaccgcgaaatgcccaaaaggacggatcg

SEQ ID NO: 39567 - DNA, 313 bp, Glycine max
cttgacgactgcatataactttatctgtccgccatactacatgaaactcacagaatcctgcatgaaagaccgcactatgcgacaacaatgcggcacagtggatgaaaatggcgccacatagggaagagctggtatgatatctgaagtctgtatctggaaagatagcacatgcgtggaatactcatacatccttcttcatcaacatctgctcaaagttatcagccacaaccgcctccgcaatctgggtactacagtcacacaaaagcaggtcatggtactaattcctatgtttgcgcataacatcaagctacgc

SEQ ID NO: 39568 - DNA, 494 bp, Glycine max
  unsure (1)..(494): unsure at all n locations
agcttctggcggttgaattgtgagtccaaataatcttttggtttagccttggaaaaactggaatcagcaataggctttgcattgttatgctgagttaatccagccactgccttcattcatgtgattatcaatgtttactcctgctgcactcacttcctcaccttctggtttgtgattcttgacatcaagaaaaattaaatgcttgattacaatcaacatccctataatttaagtgtgaaataactactatcttccattcatttccatanattatcatgaaattcatccctctctattccttttaatacatgttaaaatcaaaagataaagattaaaccatcctataagatttaaaagataaattcactagaaattacccttacctttcgttaagttatcatgtattagtcatgagagtgaacactaaataaaaacgattgcnatataaatatatacatgaagagttgggtcaataaaaaaaagtacctccattg

SEQ ID NO: 39569 - DNA, 428 bp, Glycine max
  unsure (1)..(428): unsure at all n locations
taaaatatttattcaacttagaaaaaataatgacaaatgggaaaagttaacttataatttattacaataaaacctaagtatccaacatcaatcatcatctaacacgaaattcaattactgatatgcatagaattggatgatcccacaccataatacatataatccaatacattctgatttcatgaattcagtccaaggaaaaccagataacaggacattaacatcaataaaatatcttttatttatctccaaggcctagactccaaggagtccatcangacctctctctcctaattcangtccaacccagaaaatattttaatatacagactctatctatgaactatgcaatacacacaactactcaattngtttcaaaatctcaactattttccaaaattattttaacttatcgcgcctcaattcat

SEQ ID NO: 39570 - DNA, 616 bp, Glycine max
  unsure (1)..(616): unsure at all n locations
agcttgagaagtaaatttgtttttgccacataaacttcgaaaatgtttatggattcagaaatttattagacacatataaattgatcaaattaggtgtacaaattaagggccctatcaatgaaatccaaaaatgatttaaaagtatagattaatatacaattagtgatttgagttaatagttattaattaattttntaattttaatttttaatttaaaattaacaacaaattaattgtttataactctagagaatgccacgtgtcaacatttttttttatagaaaatattcttgtatgtatagactatagattatatccgtaacaattgaagacggatatcacaagttttactacaatttatatacattgcttaactaattgagcgagacatatgacaaaatatagaaataattatttttaataaaaatagaaatataacacattttctattgtgttttaattaaaatatagaaaaattataattctttgtataacattatagtttattgtaaacaatatttttagtatatattatgtgtgtgtatcattaaaaacaataatctaaattatgacatattntttggtagaatatggttctcatatatcaatgataact

SEQ ID NO: 39571 - DNA, 236 bp, Glycine max
atggtgatgtggatgatttctccagaatgacctgggtcaactttatcagagagaaatcagaaacctttgaagtattcaaggagttgagtctaagacttcaaagagaaaaggactgtgtcatcaacagaatcacgagtgaccatggcagagagtttgaaaacagcaggttcactgaattctgcacatctgaaggcatcactcatgagttctctgcagccattacaccacaacagaat

SEQ ID NO: 39572 - DNA, 648 bp, Glycine max
agcttcggcgtgttgcaagcacttcactgtctatgatttggaccattggaagggactagatcgctttgtctacgatgctcgtgtaagtgtgtttttttaatttgtttgatctgttcatgaatgggtggaacttgttggaaccataatgttctgtcgtgtgtcgtgtgctgtttgctttttgctctgattctgagtttgaagcagtgcttttggtatattgaacatgattagtagtaattaattattgtagttggggtgtcactcctgcattttttttaatcagagttgctttactaattactaccctgacaaatctaaagatttttgtcttccatgcaattgtaagtgatgttagttttttttaaagcttaattattaattttatcttcaaattattttaaataattaaatttgatttttaagtttttaaaacatttaatcagatattattctttaaaaaaaatgaatcattttatttttaaattcttaaaattatgacctaattgtttatttttaaaatttggaataaatttacattttaaataaattaattattttaagaacttgttaattaatttttacatcaaattcaatctttaaatatgggtagcaataatattaagtatttttaaattgttttgtgttctt

SEQ ID NO: 39573 - DNA, 352 bp, Glycine max
atgatgtgatagtggctatggattctggaaagaatatgggtatgttttatggatgaaatgtgaaaaatctattggaaaaagttgtaaagatggaaaagaaaggataaggggggcatacaagaagtaaagatgagacatcaaggggggaactataaaaggttgtgaggatgctttcttataatgtgacgaggttaggggataacgtgaaatataggtttattagagagttagtggtgaaggagaaagtccaagttgtgtgtatccaagaacaaagaaagaggggtgaaataattctttgtaagcactatgaagggataatgaagtggagtggctggaaaatctgataattaat

SEQ ID NO: 39574 - DNA, 523 bp, Glycine max
agcttaataagatcatgttcaaatgaaacacaaaaatgcaaccttgtcaagccttataccaaaacaggaacaatatacaaaaactgaaactaaaaaatttaaccaagaaagaccttgattctattagaaacattgtgtcaaaataagaaaaataatttcaacaattaaaataagcaaaagcaagactaattttagataaaaataaatttcatgtttgaaacaaatcggcgtgaagtttgaaagaaactatcgtgaagaagcttctcgggtccttcaagcttaatagagtcattgtcgaacaagacacagaaatgcaagctagttcagccttataccaaagaaggaactatatacttaatctgacactaaggaattaagcctaaccagaccttgattctattagaaattaaacatggtgtgctgcacctcataagcggaacaaatttcaacaattgaaatgagcaaaatctagagtaattttaggtaaaaataagtttaatgttcgaaacaaaccgatgtgtct

SEQ ID NO: 39575 - DNA, 388 bp, Glycine max
  unsure (1)..(388): unsure at all n locations
ctcttccctattaagatcccttaagaagctagagcttcgctacttatacctctctaatagctaagctcacctccttgatatgagaagctagagcttagctacacaccccctataatagctaagctcacccccatgacaaaaaacatgataataacaaataatagtccttattacatagacaactcanaatgccccgaaatacaaggctaaaaccctctactactagaatggccaaaatacaaggcctggacgaaggaataacctattctaatatttacaaagataagcgggctcatacttagcccatgggctcaaaatctaccctaaggctcatgagaaccctagggcctttccttggatctctagcccaatctacttggagtcttct

SEQ ID NO: 39576 - DNA, 614 bp, Glycine max
  unsure (1)..(614): unsure at all n locations
agcttgtgcaaatcaaatcactcctacattttatctctagcatgcattgtatgttggtctcgtcctttgtcacaggaagccggaaggtccatatcaccttcttaattgtacacatggggcactgcgcccccaaatgcgcgagtaagaagagataattttccgggctctcgtgtccgtaaaatgcattcatatcatgcatcgcataagcatctcttcataacatcataatggacatatcctgcatttgtccgttatcatattccagcctcacattttgcatgagtcatggcatcatcatgcatatgcgttcaacaaactntttgatctgcaaaattgcataccatttgttttcatgtttgctcatccttgcgttttcctctacaaaacaaaaacaaagaagggggaagcgtgaaacttcacactacattcttagtttcatgtgttaggagccaaccatgttgggatcataaacccgtttcacttataaacaaaataattgaacatggtacctaatgcatggntaactangaaatggtgtntcttcgggcatctcaatntcataattacattttccgtgcataagcttaaagtatgcccgagtcattcatccctat

SEQ ID NO: 39577 - DNA, 433 bp, Glycine max
  unsure (1)..(433): unsure at all n locations
tctatattagtctgaaccatttatcaataaacacaagttgagttttatttagaaaattagagttcttctcttttatcttagtgagagtgattctcctaaattcttgagtgattcaagaacaccctggctgtatcaaaggactttcacaacctttgtgtgttgccctcgctggaaagagagagtctttccttcctttcatcttcacccttgttctttcaaaccacaattccagaaaatccacctctacccagaattatctcgtggccgtaactcccattntacgcactcaaattaagtgattcttgagcctaaattgactttcaaaacgagacctttcacctcgttntggaatcacctcatttggagccctgtagcttcagttattggcatttctatatttctgtccagccaccacttaacctacattttacca

SEQ ID NO: 39578 - DNA, 671 bp, Glycine max
  unsure (1)..(671): unsure at all n locations
agcttctagcgtacccgctattggtgctcataaaatcccaaaaacaaatccctcttattactagctattttgaattctttagttcctgaatgtacaaccttcaaattgttgctcgttcccgtatttgttttttgcaaaaaagaaaattaatctgaaacaattcaggctgaattgttatcgttattattactcgaaccataaggaataacagctaaacaagtaatttaaaatgtaacctttaaattatgtggtatttttttaattacaattttacttcaatatctaattttgttaatctacttacgtcgttttttaaatataaatatgaatttaaaggtgatctactgataatataaagtacttgctaatcacaaattatgatacgtatcattttaaattttaacttaattttataaatattaataaatttataataagacaatttttaacatggtgctgcagtgattccttgacttcactataatctccctgacataattaagaattagaaatagacctgngctgcagtgnatcgtttgacttcactataatcttccttctcaagaccttgattggctatagtaacttctttgcctctgatactgtataactcttcaacatgccatngcagcaattatttaccangcacatacattttaaattacattcct

SEQ ID NO: 39579 - DNA, 297 bp, Glycine max
  unsure (1)..(297): unsure at all n locations
gaaagcctgggtagttcagatctttgatgcatagaacaacttcattcacatctctagcactggattgaatagcaactggcagaaaaatatgtaacaagacaaaataacttgaaaaaatatcatcatcgtagcactaccaaaattagaaatcaagtttctttgtgactacttaaaaagcaaggttatcaaacagagattcaaatcgtgaattgccaagctaattttntaatcatgaaacataatttgtatcgaattgtaagactcaaaacaattaaaaattacttcaaatatatcata

SEQ ID NO: 39580 - DNA, 546 bp, Glycine max
agcttatgctgcaaatatttacaatagacctcctcaacctcagctgcaaaatcaaccatagcagaacaattatgacctctccagcaacagatacaaccctggatggaggaatcaccctaatctcagatggtccagccctcagcaacaacaacagcaacctgctccttccttccaaaatgttgctggcccaagcagaccatacattcctccaccaatccaacaacaacaacagccccagaaacagccaatagttgagacccctccacaaccttccctcaaagaacttgtgaggcaaatgactatgcacaacatgcagtttcaacaagagaccagagcctccattcagagcttaaccaatcagatgggacaattggctacccaattgaatcaacaacagtcccagaattctgacaagctgccttctcaagctgtccaaaatctaaaaaatgtcaatgccatttcattgaggtcgggaaagcagtgtcaaggacctcaacccgtagcaccttccttatctgcaaatgaacctgccaaacttcactctac

SEQ ID NO: 39581 - DNA, 279 bp, Glycine max
  unsure (1)..(279): unsure at all n locations
ctccgcttaacatcagaccacttccaggtgctggaactacttctcatggacttgatggggcctatgcaagttgaaagccttggaggaaagaggtatgcctatgttgttgtggatgatttttccagatatacctgngtcaactttatcagagagaaaacagacacctttgaagtattcaaagagttgagtctaagacttcaaagagaaaaagactgtgtcatcaagagaattaagagtgaccatggcagagagtttgaaaacagcaagtttactgaattc

SEQ ID NO: 39582 - DNA, 512 bp, Glycine max
gcagcttgcaaattcacataaaatgattatgtcttttatttctcaattataaaacaaaatagtagtgttttcttatggttctccaagaacgtattgactgacctagcaatcaacaatttggtaccgaataattcagtcactaattaagttagtaatttctataaatgaccaattttgttattggtcgctaaattggttgcagtttaattcaatttgggtcactattacacatttttcttgttgtgcacacacgtcctaattgaggaaaatttatcaccttatttaggtatatatctagaacatattggaaagtgcaactctacatattcttagacgaagaatagagatttataatattatgatgtggatgtataatcttagatgttccacttttagatgattctaagctagctgtattaagcaaaactaacaggtaaaatattccgcctattattagaaacttgaaaacgcacacaaaaaccttcataattaattaaacatattgtacagag

SEQ ID NO: 39583 - DNA, 239 bp, Glycine max
aagatcctcataagcatcttacgaagttccatattgtgtgttccaccatgaagccccctgatgtgcaacaagatcatatcgttctaaaagcttgtcctcattctttggagggagtggcaaaagaatggctatactaccttgctcctaggtccattttctgatgggatgaccttaagagggtgtgcctggagaaattcttccctgcatctaggaccactgccatcatagaatacatttca

SEQ ID NO: 39584 - DNA, 808 bp, Glycine max
  unsure (1)..(808): unsure at all n locations
ggggaaaagatcatatcgactgantcannctnntanagnangcttnnccannnnnnnnnnnnnnnntattataaagaatttttttttattgangaagataaaggaaagaaggttttaaataatgtggggtattactattattattaataaaatntattaatagataataaaaaatataatttgttgattgaaaattattatattaatatatttaatataaattattgtgataatatataaatatgattagtaataaattgaattaaaaatattttatataatagtgaataaatataaaatataattaattatattaaaaatgaaatttataaattataaattaataatattttgatgaatttaagaatttatgtataaataatatattttaattgaattaatttagttaaaaaaatatatattaagtatatagatataaataaataattgataaaaataatagatgatgagtaaggatatataatataataagaatatatataatatatattaatagatatttaataattgagttaataattatttatattagatatttgttttttataaaatagtaataaatataaatatatataatttaaatgataaattttttgataattttattataaataatatatattattaggaataataatatatatttattattattatgtgatatatgtatattatatatttgaaaaatgatattaatataaatgtaataatatataaataaataaataaaaaatggataaataataatgttaagttgatgtaaaaaaatatagtttaaattaaaaat

SEQ ID NO: 39585 - DNA, 506 bp, Glycine max
agcttgggacctccaaaattatgaaggtgatgatcgagtgcataaaaaaatatttcagagtgtatttcggaaagctatttttgttttcttttcaatttccgctgcttttctcccatttaacctgtgtataaataagttctatatttttgaaaatactagctgaaatttagatttttctttttcatgaatattagatcaattatcaaaatgaaattaatattctgaaaccaaaataagaatgaaattcattgatgagagtattaatttatatgcaacctgttctaaatgtatattaactagctaaacaaaactaatgtacaatagttatcaaggagagaaactacgtgcgtttggattttattatcattatttgatcttatttcctgcttatattttttgataactgtctacatctttaaaatattacaaatctgaaatatgtctagtttgactttttattttctgttctcaagagataaaaacactgaaaattcatcatatattga

SEQ ID NO: 39586 - DNA, 412 bp, Glycine max
  unsure (1)..(412): unsure at all n locations
ccctgaacaggcaattatcctctgtgtatgcaaggggtgggatttttgaagaagtacatgccatggacgtgtccgaacatttgtttcagtgtgaagaatagtaaaatctggagtgggcagtacccaagcttttgtcattaattcctttaacttgcaaatactttgtgtgcctctgagtgccacgagagttgatccttgcaaatgagagatgttaaaggttccacgatggcgacatagccctagattaatttttggcaaaaccctatcagacccaagaatccttttaaagtatgaggagaagtaggggaggccaatccaccatgacctgtattttatcanggtacgacgtgacaccctggacaaataccatgtgtctgagatactacagttgggtgtgggtgaanacacactt

SEQ ID NO: 39587 - DNA, 1094 bp, Glycine max
  unsure (1)..(1094): unsure at all n locations
ataatcataatccgctctcttatatcanctcncatctacataaacatatantatctctatantcattcgatttctcgaacactnncctcnactaagccataaagcgatttgatttcgatcgcccctcgggaccgcgatactctaccagcgagcatgcaagcttgctcgctcttccatggtagggtggatggcagcgcgttatatctatctatcaaagcttcacatcaaattaaaacacaacacaaaacaatggttgatggagtttatgtcacattaataaccacacacattcctgtgaccctatcatatcattccttaaaatatgtcattctcggagaaaagagactttaaacaaacacgaatcgtcctacttacccttataaatgaaaataccttaccatgattcatcgtccttcaaaattccaatcaagacaacccgcatgattatgtatcatttcttccctactacaggtgccgtagctaaaagcatcaacatatacctcagaaccctatactaacggtttatgacgcaccatgcctgtacctcaaccgaacctcgggcatacaaacatcctcaacccgaatgtcgataaccggcactggtggacttatccaaaaatacggttgcacacaattgtactatctaaacaagcagataacttactaaacaatcatctcgggtgcggttttaagtctttgacgaacaaccaaccacctataatctcaatcacgattcgatatgactaactgtcctgttctcttatcccgaaccactatatctatactatggctctgcctctccaaattcaagagcataatatgttatcttatacgaccaccaacccatctcctcctgtctacaatagaaatccttagactttctaacactcgtctatactctatgaatatacagtcgatgcacataaatgtctatcttacaatntctgaaacaagacgaatctatntatacaggcnacatattctcttntcacgtcgcgcgaaactaaacacattacagttcctttcataattctctgtactcgtccacaatatgataatcgaacacaaatagatctcgtcctccttatcaactt

SEQ ID NO: 39588 - DNA, 501 bp, Glycine max
  unsure (1)..(501): unsure at all n locations
cgatgctctntgngcacatatgactgtctacaaagcacctctatgaatgtgtccttatcaggttgtctttgganaggcatgtcatcttccagtggagattgagcacaaagcatattgngcagtgaagatctgcaacttctctatggatcaagctagtgaggagagaaagttgcaactgagtgagttagatgagatccgcctataagcatatgagaatgccaagttcaacagagaatagaccaagaagttccatgacaacatgataattaagaaggacttcatgattgggcaaaaagtgttattgtataattctaggcttggactaatgagtggtaagttgaggtctaagtggattggcctcttgttgtactaatgtttttccttatggtatagntgagatcaaaagtgactccacaaacaagagcttcaaggtcaatggacaccgacttaagtcattcctcacaaacncttctctagtggacgtagtggtggaanagactg

SEQ ID NO: 39589 - DNA, 989 bp, Glycine max
  unsure (1)..(989): unsure at all n locations
gcaccatctcaccctcacgatatcctctnaccatcttcnttatctacacgctacacacctaaaactaaacgnntccgacaccccnnccatacagnnnccaaaggatttgatttcgatgcagtgcggacaaccnngaactntanagcaacctgcacgcttgcgatgcagagccaaaagagcacagtgctgaagtctgttttcaggcgcgaatggaaaccttagactgcgcacgaatagactaagagtgaccgacataatataaatatgccagaaaggctccagacactctgcttttctgactttacaggaataaacatatgctgtgattgaacttaaatgagcgggtagaataaaataagtttacattgtcattttattatcaagcatgggaatagtatttttaaataattattactaaattcaacaaagtcatcatatattataaaatttgattgaatagcgcatgaaaatattatacgtgtataatacattaattgtcatccactatttatttttaagcaatgagatcatagtccataggaaggtaatttttatgcattaacaatttaccaaaaacgtacaccgttatattaattcaaaattatagctaatactattgttgaagaaactatcctgaaaattaatgcactaattctatataaccggtaagaacaccgaagtattctaaccgcgtggagttcgttgaaaactgaccacacagataactctatctattataaatgatattcaaagaaatacaacaaatgtattggcccgcccgagaaaaagaaattcgcgttaatatcttatacggagaagattctataacgaaatcacacctcgaccttatcaaactggccattattacaggaacaaaatattttggacctaaaccgggggtttgggcaaacaaatgccacatgtgtattggggaactaaaccgaatatggataaaacaagattctgaacgaaccatatattgaccctcg

SEQ ID NO: 39590 - DNA, 353 bp, Glycine max
  unsure (1)..(353): unsure at all n locations
gctcatggcaactgtagcattgttaggattggcaccaccaccacactatacatttcatatttattgntctccaactggacagtaccacaacgtaatgtattgatttacacgatgttataataatctaagaaaaagattcgacttacaacttctgaaattaaatttcatatcttaaactaatttcatcttaatgaggaaatctaaatcacctgattgagattgagtaatgtgtttgagttgttataaactctacaatacttattnttgattcctaaggataaaaaaagactaatttcatcttngctatatattacatgggcnctaaacttgaaaggtgacgataaactatataa

SEQ ID NO: 39591 - DNA, 906 bp, Glycine max
  unsure (1)..(906): unsure at all n locations
nggggnncctactgaattcgnttagttcanngtccgannntcatnncncntanntgnnnaaaannattcgtngnccgcatnnaannnntttannanaaanaaataataaanaaaatttttaatatatctgggagnnggaaaaaggattaggggggagttttttgttgatatggtttgagagataacactccttcgctttatgaaatgggcctcataaacattaaggaaagctagcagatgggcctctaaagataagtgataacttggcaatgattctgggataaacaaggttttttatttcactaaatgcgcaggaccactaaagtacaatgccaaacagctgggtcaccctaaggcgtgaatctcaacactttcggaagtgtgcgtgaagacaatccctgtgtagctttcatcccttacgtgggttattaatgaaaattgggagcttaactatgtcaaatttattgtgcgtttctaaattgtaatggggtgacagcaataccggggtgcggatggatgatgtaagatttntgttggtttacctaagaaactaggtacctaaagaccctttcttatgggtaaacatgctaaacaagtttttttgtgcagacccttgtgatgaaaggtggtgcatggctcttacaacaaaacaattgcggttatgtagaaaagaggatttatcctggacactatgttaggctttgtcacaaaaataccctcaaatcgtcaaaaaaaaatactgacacgtatgctatatatgagctgggaagaaatacttgactttcatgattttcaatttgattgtttggaaatgattatatttatactgggttttatatgaacaaaaaattttgtttaagaaatggttatcctgcgtagccttcacttataatacatgtggaagag

SEQ ID NO: 39592 - DNA, 403 bp, Glycine max
  unsure (1)..(403): unsure at all n locations
ctcttagttnttgtgccttgcacactctggaactaagttccaattagcagtggacaaatcagttctaattcccaaggcagactactacaaaggtgagaagatgattgaagatgatgaagatgcacccccaacacactatgttaaagtaagaccaagaatagtctgcaaatatgaagtagttgctctgcatcaaaaatganaaagataatggaactcacaaaccaagataatgggtgaattagtttcaaaatcaaatcaaacttataaaaccaaagttaaaanaaacttcttttccgatgctcttatcataagcttttaatataccaatatttaatcaataaccattaacacaaaatcctttggtaaagatctttctcatatacatattttcttaaccttcagt

SEQ ID NO: 39593 - DNA, 392 bp, Glycine max
aaatcaggcccgcgtcttatctttagcatgcatcctttctttctttaccccctcctcacctttggttttttagggaaaaacaccataactaaacgcgccacaaggcattcctatcgcaccagatctcaatctagaacgatgggtgatccaaaagagacacatgaacagatgaaagccgacatgttcgctttgatagaacaaatggcttccatgatggaagccatgttagggatgaggcagctcatggaaaagaatgtgggcaccgctgccgcaatcaattcggctgccgaagcaaacccaactcttttggcaactgcgcaccatcctccctctaacatattatgacggggaagggacacacttgggcatgatggcaaccctcatttgggata

SEQ ID NO: 39594 - DNA, 361 bp, Glycine max
  unsure (1)..(361): unsure at all n locations
tccatttgtttaatctntcataccacgccctaggtgccttgtttaacccatagatagctctcttgagtttgcagaccatactttntatcagaatcagcaaatccaggtggctgggtcatgtagatttcttccaaatagccattaaggaaagcattgttcacaccaatttactgaatagaccagtgatgagcaagagcaatagtcaacattattttgatngtgacaggtttcacagcaacacgtggaaaggtttctgaataatcctgactagttatttgattaaatcccttggcaaagctactagccaacagattgaagaacgtcatgccgttcatcatagacaaaaggcaatctgcattca

SEQ ID NO: 39595 - DNA, 585 bp, Glycine max
agcttgaaggcaaactggatgcattggttaacttggtaacccagctggccttgaatcagaaatctgtacctgtcacaagggtttgtggtttgtgctcctctgctaaccaccatacagacctttgccctttcatgcagcaacctggagcaattgagcagcctgaagcttatgctgcaaatatttacaatagacctcctcaaccttagcagcaaaatcaaccacagcagagcaattatgacctctccagcaacaaatacaaccctggatggaggaatcaccctaacctcagatggtccagccctcaacaacaacaacaacaagcctgctccttccttccaaaatgctgctggcccaagcagaccatacatttctgcaccaatccaacaacagcaacaaccccagaaacaaccaacaattgaggcccctccacaacctttcctcgaagaacttgtgaggcaaatgactatgcagaacatgcaatttcagctagagaccagagcctccatttatagcttaaccaatcaaatgggacaattggctacccaattgaatcaacaacagttccagaattcttgacagctggct

SEQ ID NO: 39596 - DNA, 416 bp, Glycine max
ctcgcttgtgatgcttctatggaggctgtatctttgagcctcaatgaggtcctttaatggtgattttccaccatggagatgcagcggaagacaaaggagaagaggtaagaggcggcgccatccactatggaataatccatggaagaaggagcttcatcaccaagatgagccttggataagaagcttggagaggatgcttcaatggagcaaaagatagagggagacaaagagaaaggggggagcatgaaattgaacgaagataaagggagaggagttgaactttgagttgtgtctcacaagactctcattcatcaaagttacaacaagtgttacacattcttctacttatagactaggcagcttccttgagaagctttctcgagaaaacttccttgagaagcttctttgagaaaact

SEQ ID NO: 39597 - DNA, 538 bp, Glycine max
agcttgtaagaatatgggggacccatcacatgtggttctatgaggcggccgggcgatggtgcacaacaagttattccacatccacaatgcgcgcataaacccaccatcccctggtgcccacctccagctgagctcacgtactcccacgtagcccatatcctcgtttatctcaacaccgggtccccatcaatcctaccaagcttgcacaacatgcaagcaaaacaacattcacacagcgcaagctatcacaatctagcaaaacagagcaaatgcagaaaactctgccagaacaccaaccaaatatcacagctgtttccactcaaagaccccgaggacagattcctttgatcgaattcgttaaccgttggatcgactccaaaattttactggaagtgtatagtgcataagcctacaatttgaccggtgggatctactatcaaacaaccagaactcattctacattactttttccacaaacagcaaatacattgatatttcttgacttgtgagaaatctgcgcacaattttcagcgaatct

SEQ ID NO: 39598 - DNA, 133 bp, Glycine max
gcccctacttttgaggggcgactccccccttatgacgactatcccgggcaagacgatgaggaaggagatacccatcttggccgcctgctccacctcaaagaatcgttcccacatgaactaccccaaccgaaca

SEQ ID NO: 39599 - DNA, 356 bp, Glycine max
tgcaaccttatttgaaaaacaaggcattcttttcttattttaacagaggacaaaacagaagattacaaaaaacttccctttggatttaagtcaccacccaacaattcaccaccttgaactaacattcatataggacacaaactgctccctccaaacactcatgatcttatccccaacagttaacattgagcatacttaagcagtgatccaacttgcctctttgaactggctttgaaaacatatcagtcggattgtgcagagtgcttgatttatgaacctttattcttttttctgaccgaatgaattgatatataacatctatatgccttggtctatcaagatgaacctgaaccttg

SEQ ID NO: 39600 - DNA, 210 bp, Glycine max
tctgacattcaccacagattctgtcttcttctattttcagaatgggaatgcctctaacagcacctttgtcaatgattatcttcatgcctcttaaatgcagatgtccaaatctttatgccctattttgacttcatccttcttggaagatagacatgtggaggagtaactggtttcttgaggtgtccataggtaacagatggtctttgatct

SEQ ID NO: 39601 - DNA, 528 bp, Glycine max
  unsure (1)..(528): unsure at all n locations
agcttatacaacagtaggcggtgtataattaagaggcaactcgtatggtgggaaggaatgttttctctgaatctgaacatgatgaggcccatatgcatttttcactgtctcgcctccttgacctactacatctaagactggatgattcacttgattgaaaccggtcggttgaatcgggtccatctcagtagcagtactcgcatcaacaactatagcagtgttatcctcgatcatcttcctcatgctcatcattgcttccatcatcgttgtcatctattccttcatggccttcatattggccttcatttgttcatgtacttctttgatttcactcattattctgaccttagcacgcgtctggtaagggtgtcgtaaagcgcgatctttctctntggttacaatgattacaattntgatttcaaggaaagaatgcaatgagcaatgcaaccaaagtggaaagacaaacaagaatgaatgcatgtgaatgatacattgttgaagtattgtgaattttacaccatacattca

SEQ ID NO: 39602 - DNA, 395 bp, Glycine max
  unsure (1)..(395): unsure at all n locations
tgatataccttatctagttctttgcatcgtgatcacgacattttttcctagacactatactgatcatcttcacaggtacgaaagtttgcaatcaattttgatgcttaattttgttatgattttttttgtatattggtgtatgtaattaatgtactttgctttagatacaacttttgttcataatgagtgaaccttagatttccgtttgagactgaatgcaataattcttgcggacagtttgcattaaccattgtattcaatcttgaattatccgtttggacagttnggggagactcatattnntttggttgattcattcgttaaggttaacaantatttgttgaatttgatgaaatttcgatacaatgcatttctaattgttctctaagtgcata

SEQ ID NO: 39603 - DNA, 517 bp, Glycine max
  unsure (1)..(517): unsure at all n locations
agcttgcttttacaccttgtattttggccattctagtttatatgattntagccttgcattttagggcattttgagtagtctttgtagtaaggacttttttgtattttcatgtatttttgaaatgggggtgagcttatctattatagggggtgtgcagctaaactctagtttctcatctcaaagaggtgagctcaactattagagaggtgtgtgtagctaatctctagcttctttaagaatcttctcaaggaagcttctcaaggaggtgagcttagttattataggggtgagtgtagctaagctctggcttctcaaagaagatttctcaaagaagcttctcaaggaagttttcttatgacagcttctcaaggaagctacctagtctataaatagaagaatgtgtaacacttgctgtaactttgatgaatgagaagtcttgtgagacacaactcagagctcaacttgtctctcattttattctttcaattttgcgctctcccctctctctttctttccc

SEQ ID NO: 39604 - DNA, 550 bp, Glycine max
  unsure (1)..(550): unsure at all n locations
ctgcnnatgatcccctgctatntactgacacttagaatactcaagcttgtaatcaattacacacatatttgtattcgattaccagaagatgttttcagaaaacattcttcatagtcacatctttttatctgaatttaaagggcccatcaaggcttatatatatgtgactagagacacgaatttgataagaggtttgaagaacaaaaaggtcttatcctcttaacaagcaaaattgtntattctcttacaaattccttggccaaaacacttgtgattcaataaggaattatttaagtgctcaaattgttcaatctatctctntcaagagagatntcttcttctcttcttctttattctgaaaagggaataagagactgagggtctctcgtngtgaaaggaatctaaacacaaaggaaagaatgtcctttgtgtgttagaacttgtaaaaggagattacacgatagtggaactctccagcgggttgctctgggactggatgtangcacaatggtgtcgccgaaccaccataaatatgagttngcactttccg

SEQ ID NO: 39605 - DNA, 190 bp, Glycine max
tgaaacacagagcaaatttgaattcagattctaatgactgatgtaaatcagttttggaccctggctgtcgattacactcctcttgcaatcgcatgccatagagtatatttgacgaaaaaactttctacatatatgtcttgtccaaacctcttgctagttaaaattgaactccattgctattcaatgtacc

SEQ ID NO: 39606 - DNA, 275 bp, Glycine max
  unsure (1)..(275): unsure at all n locations
ccaccaagatgagccttggataagaagcttggagaggatgcttcagtggatgaaaatatagagggagagatagagagaggtgggggagtgatgatattgaaggaagaataacggagacaagttgaactttgagttgtgcctcacaagactctcattcatcacagttacaacaagtgttacacatgcttctaatattacaaagaagagggactcaaccttgacccatgggctcataaatctaccctaaggggtatgagaattctanggctttcttt

SEQ ID NO: 39607 - DNA, 494 bp, Glycine max
agcttgaaccataaccagtgagagtgtgatcttaaactgtgagtgaaaaactagctttgagtaatggtctttgcatcaatctctaaaatctagaatgaaatgtatgaatgaggagatgatgaaggtcatgattgtgtatatacaagccaattgaccaaaaagcttaccttgaatgataattgtatcctttgcaccctttgtgagctaaatgatattgtcaaaattgaaccctgaacttaaatgattatctccagataccttgtttagattctaggagagcagatagttcaaggagaattaccccaaatttgggggagtggagttgattggaatgtaaagtaaaaggtaaagcatcatcacacacaacaaataagttgtgtgtgttaaaaaaaacaataaaaaaaatgtgtgttgttgtaaaaaggtcaaaagcaaattaaagtgaaaggctagtgagtaagctaattgtattgaaaagattactctgataagtg

SEQ ID NO: 39608 - DNA, 227 bp, Glycine max
ccatcacgtgtggtactatgttgtttctgggcgatggcgcacaacaactgatacacatccacaaagcgcgcataaacccaccataccctgtggcccacgtgcaactgagctcacgtactcccacgtaacccatatgatcttttctgtcaacaccgagccccgatcattccatccaagctttcccaacatcccagaaaaacaacattcttacaccacatgctatcaca

SEQ ID NO: 39609 - DNA, 372 bp, Glycine max
actcctctaaagacaataacatcatttcttgcactgaattgttgggagttggaagccatcttctcaatcaaattcctaccttcagcaggggttatatcaccaagagctccaccattggcagcatcaatcatactcctctccatgttgctaagtccctcatagaaatattgaagaaggagttgctcagaaatctggtgggggggacaacttgcacacaatttcttgaatctttcctgatgcctaaaatttcttttctgatggcagtggtcctatatgcatggaagaatttctccaagaacactctcttaaggtcaacccagctagaaatagatctgggagcaaggtagtatagccaatcttttgtcactccct

SEQ ID NO: 39610 - DNA, 271 bp, Glycine max
  unsure (1)..(271): unsure at all n locations
agctatatgatgttncgcattcgagcatgtgtatattgtcttgtaataaatcctcatactctaggtaaagtttgtggcacttgaaaagaaaacaatgtagtttttttcgcgacagaaaaataatatatatatatatatatatatatatatatatatatatatatatatatgcgtgagtgtgtgtgtgtgtgttctacttacaaaaaagataaagatacaatgcactggataaaaaaatgtttgaagttcttatataatatatgaacaactt

SEQ ID NO: 39611 - DNA, 491 bp, Glycine max
  unsure (1)..(491): unsure at all n locations
agcttgcctcttttgtgacttattgctacaatggcatgtcggcatggcatccctacatcaaagttgtaaaatcagcacacatgtaggttacaaatgaaaaaaagaaaaaatatacagaacacaacctgttagttgccaaactctacaagtgcatgtccattcagctaaattgacctcaactttttccccccacatgtggacctcatatctcacgcccatgttatcactacaccaaattggagtccattgattagcaaaatgaatctccttttctagtcttttgtattgaactggacataatggtccaggttttccagaaagtttaaccttgtgggcagccatggttctcgtgatgtaacatctaatttgttcaagcatggtgagaataggctngctcctatactgcaaaatcttggcattgaagacctcacantgtgttctgcatatgttgtccactttgggtattggattngaaatgggctttttcatgc

SEQ ID NO: 39612 - DNA, 365 bp, Glycine max
agcttgagctgagaggcgagtgaaccgttagactgtttttgttttataaacaagacattccccgtatgcatgaaaagacaaaccctccactgaccttcttcatgattatgatcacagcacaccttgctatgtcattaccactcttgacagtcatattaataaccgcagctgcactgagatagatcggttaaaaattactgtaatagtgtctccacagagatacaacgcaaatgattgaacgagagctcttatatcatgagatacgtgagacatgtgaatgacactatcacatactcctagctttgagcgtctgaataaaagccacggagatgtccaagtaggcagtgatacccaacctgcaccat

SEQ ID NO: 39613 - DNA, 561 bp, Glycine max
atcgccaatacttcaacaatatttcatagagatgaattactcgagaatactttaagctgtgcatggaaaatgtaattatgagattgagatgcccgaagaaacatcatttcctagttaaccacacattaggtaccatgctcaatcattttgttttgttgttgtgttttttttagaaatgggtttatgatctcaacatggttggctcatggtacctaacacatgcaactaagaatgtagtgtaaattttcacgcttcccttttttttgtttttgttttgtagaggaaaatgcaaggatcatgcatgagcaaacatgaaaataaaaggtatgtagtttgtggaagaaaaagtatgttgaatgcatatgcatgatgatgcaatgactcatgcaaaatgtgaggctgtaatatgataacggacaattgcaggaacgatatgttcattatgatgccatgaagagatgtttatgcgatgcatgatatgaatgcatttacggacatgagagcccggtaaattatctctttttacttgcgcatttggggcgcagtgccccatgtgtacag

SEQ ID NO: 39614 - DNA, 443 bp, Glycine max
  unsure (1)..(443): unsure at all n locations
agtctccatacanagtcaggttaacgattactcgcctgtgctntttcttccatgctatatgtagcanagtcattgatccagtcatgtttgatgagttggaaaatgaggccgcaattatactgtgccagttggagatgtattttccccctgctttctttgacatcatgattcactttgattgtgcatctggtcagagaaatcaaatgttgtggtcctgtttatctatggtggatgtacccggctgagcgatacatgaagatcttaanagggtatacaaataatctatatcatccagaagcatctattgttgagaggtacattgcagannaagccattgaatntttttcagaatacttagagaaggctaaacctgttggccttcctgagtctcgacatgatgacagagtgggtggtaagggttcaagaggactgcatgtgatcac

SEQ ID NO: 39615 - DNA, 524 bp, Glycine max
agcttgcacttgaggagggaaggatatttgcagctattgaacaagtttcttgactatttgtccttaagattttactatttctttttgctaatatgtaaatataaatggtataagggtattccgtaaaaacatggtctatatttacttctaagattgttaggggtaaaaatgaccatgtccttaagaaagttgttctcagaaaatcccaaaaataaatccctcttattactagatattttgaattctttagttcctcaatgtacaaccttcaaattgttgctcgctcccctctttcttttttgcaaaaaagaaaatcaaatgctgtgaaaacatggatgaagtcctaagataatcaatatcagagaaaaaatggatgatatcacaattaataagcacaactacctatctttcagagtcctttggttaatttggcttgtctccttatgtggtggggttttgtttaataatgttatacttttgccttccaaaaaaaacttatgactaatcctcttttcaataatcca

SEQ ID NO: 39616 - DNA, 555 bp, Glycine max
  unsure (1)..(555): unsure at all n locations
agcttgaggttattcctcaagtaaaagagttgttggatgagggtttggttcgtaagagcttaaatccttgtgctttgttggtgcccaaaataagtattataaggcaccaaatccctatgataggtggtatgatgaatctgttgagtggtgcaaccctcttttgtaaaatcactcatgcacccaacatcttcatgatttgtgtacatagggactcattangtaggtttgttcttattttttgtttcaatacaaacttaagtgctcatatgggacaccttangtttgtcataattttttgtaggaataatcaacattaaaaataaagaaaaaggtatgttttattccattactttccttaactntttaaatagtgatcaagggcttcccatggaccctaagagaataaaggtcattcttgagtggcctactccaccatgtataagggaaaattggggcttcaatgacttaacaaacttttacaaaaggtttgtcccatatttntctatacttgcagcagcacttattgagttggtgatgaactatgttctctcatgg

SEQ ID NO: 39617 - DNA, 231 bp, Glycine max
  unsure (1)..(231): unsure at all n locations
caggattgctgagacaaaacatattctaataacccttttaggaaaaggcangttttaccgtacacgcccatcttgcgatatatgtgttaaactgccgaaatcgtctgtattactccaaacgatgaaacgttaatttgtcatgaaacgtgtacaaggtgaacattccatatacacttcacgcttcatgcctacggatccgtagacatcttaggcgcaaatgtgaaatagcct

SEQ ID NO: 39618 - DNA, 528 bp, Glycine max
  unsure (1)..(528): unsure at all n locations
agcttgatacaagattctccttgcctggctcttcattaccttctggntgggtcatatagatgtcttcctctaaatccccatgcaagaatgcagttttaacatctaactgctccaagtgaagattctctgcagctactatgctcagaataactctgatggtagtcatctttacaactggagagaagatctctgtgaaatcaattccttgtttctgctgaaaccctttcaccacaagtctcgccttgtatcttcttctaccgtcagattcttcctttagcctatagacccacctattctgtaatgccttctttccttctggcaatttagttaaagaccacgtcttattcttttgaagggatgtcatctcatctttcatcgctagctcccactcaatagtgtcattcccctgtgtagcctcattgaaacattctggctcaccagcatcagttaacaacaaataatgcaatgaaggggaatacctatctggtggtactgaaattctgctatattttcttggaggagttgatg

SEQ ID NO: 39619 - DNA, 560 bp, Glycine max
  unsure (1)..(560): unsure at all n locations
tacgataccctcctctccgttaaaaacatcatgcgtacantatatnncagattctatgnacttataagccagctcaccgtgatcctgaaatcangaacttgaaacnactgancctcttatccggcacttagatactcgcctttgatctanaanacatgaatggtggcgcttacccctacagcctaaaagcctcgggtcattttgggtgacatactatatgcaagagaaaaatgcaagggtggaactcgtcttgggtggatatgatggaataagcctacacacttgagcttgaatgaaataatgactgcgagaatttggctgaagaccttccttgatctttgtcatgcttactagcttatntcagctgtgactaatacttgtgctcttatctttcacaagcatgttgtgttttagctagacaacattgtatatttaatattagcttttttttcttccttctntgttcttttcttgcttgctctctatttatcttttgcatttatgcctttttttcttttttaagatattatcatttggcgaatgtctcttccccttcccct

SEQ ID NO: 39620 - DNA, 366 bp, Glycine max
agcttgataacaaggctcttttttttagcatttttaagggcatgctcctcttccattttgcatcctgctacaggaaggtgccatttggtagagctaagaattctttagagggctgatggggtttatcaacaaggtagtcccaactaggattggacacttccaccgttggatgataggcatcttctacaatatcctttatttccatgggatcttcattctccttatattgtgcatcctctttggtgttctgcttaaagagtcagaagcattacccattttctcttaaaatgtgtgaatctggggcattttatttttctagaaaagaaaatacaattatccccatgagactcattagacatccactcc

SEQ ID NO: 39621 - DNA, 402 bp, Glycine max
  unsure (1)..(402): unsure at all n locations
ccacatttctagtcccatgttttttngaaaannctttttcctacacgtatactcgccactcctttcacaaccaattaacataaacgtagtccttcctctactacctgtgtttgtgtccaaccttaaaatcactgccacaaatccgttttcatgagtcacggatcgagcccatcgcaaaacatcctctcggcactcaaacacctacaaagaaatccacataatttaaattttctaccagtattcattntattaaatctgtgacaaacattaacattataacctgaggagtcttgaacgcatccaaacaatcaacatgtggttcattcacaccacacgcttctgcattttcgtaatccatattcgctcgttcagacattatttcatacatccactcatcttcgt

SEQ ID NO: 39622 - DNA, 364 bp, Glycine max
ttctcctcgtgcctcctttatccctaattcttcaaaccttcatatcttcctcgaatctttaccaaaacacgtcctgtaaagctcaatcttcctctttttcactcctctttcacttccaccgattgaaattcactaaaacttcatcaaatggcagaaccatcgaagaagagaaagggatcatcctccaccaccgctgctgctacccatcgccgccaaggaccatccgaagcacccacagcacctatccatccttctttgtcatctccaagatcatccactctattttctttcgatgatcagcgtctatggtacctttctcaattttcttctaggatcattttagaccctaagtacctagacgtag

SEQ ID NO: 39623 - DNA, 362 bp, Glycine max
agcttattccgaggacagtttattatcatgttcagcctgtgagagttggctcacaacaggccaatcatacctatggagcattttcttgagcaagtagcctggcctgaagcttaacttccattggtgagatccaacgaggctgctcctcttgagcccacacctgcacaggttgaaccagagccagctgatccacaatctccagtggtgaatccaccttcttctcctgagcttgaagtagttcccccatctccaccttcttgtgaaaattggtgttatgaacattttggattgaatgcatgattgtgatggagtttgtgtttcttttcatgagtttaagcaagtatgttgttagacaaagaaag

SEQ ID NO: 39624 - DNA, 366 bp, Glycine max
  unsure (1)..(366): unsure at all n locations
aaaaactaagcttaggctgttcaatggcttcagattgttgcacaatttgttattgtctgtgtggnggnccgcagaggagcatataccatagagtctatcgacaggtgcatatttttgattcatggccaggtaggttaccaggttaactaacgcatctaatttaccttcaagcttcttagtctcacctgatgaagatgaatttctgactacttcatgcactacattattgacaatagcttcacttctggcactaaatcgctgggagatagaaaccatgttgcaattaaatctatggctacatcaagggtcatgtctccaaaggctccaccactggtagcatctatcatacttcgctccatgttactg

SEQ ID NO: 39625 - DNA, 365 bp, Glycine max
  unsure (1)..(365): unsure at all n locations
agctttagaaaagtgtgangttttttgaatttttgcttagaataatgctgnaggcaacttgtcatgtctggttaagtgattgtgaagattggaattttttagcatttgttgggacaaaagggagggcgagccttggcacaatggtaaagttgtgccttggtgattggtagtcatgggcttgaatttggatgcagcctcttttgcgtatgcaagggtaagattgcgtacaatgatcttccctcgtaccttcgcatagcaaggagcccttgggcactggggtacatcagttttttttttttttgttgggactaaaggtgcaaggatgaagaggagtcaatgcagataggaacagttaaggcagctag

SEQ ID NO: 39626 - DNA, 544 bp, Glycine max
  unsure (1)..(544): unsure at all n locations
ccaccgcacccccancgcgcnnnacattccggggggcaccccanctctactactaccanannacnnnnnnnaaggannaaggttgatgaaccgctagaagccnccgaannannaaaagccgcggaggcggcncacgagagaaggcgnagancnactgtgagcagcnnaggcgngcacnggagaggaaacaaacacagccaacacacagaaaaccccaaagacaagaggcgaacaacggaaaagcaaacgccnaggcaacaaaacaagcggcacaggaaaagaaaaaaacgaagaaacgcacagccagacaagagaccacaagccgaaagccgaaaaaggcccaagaggccgcacaaaacaaaaaagaaagacacggccagacaaaaacaacaacanacagagagacacaagaaccggaaacgcggcaccccaagacggaaagcacacagagaagcgacacagaaaagccaacagaagaccgcgangcgagagaccagcacgcagaaaacaaccaacaaggaaccgagacggcacaaccacccag

SEQ ID NO: 39627 - DNA, 369 bp, Glycine max
agcttgtaagatttgcaagaatttcttccttgtacaactccttgaaaattattgccatcaatataaagatatgacaatttagagagtgatccaagactttcaaatggatttccactgaatttattaaaagagagagagagagattttaaatctatctcccttaagttgcggagattacccaaaaaagtcggaattgttccttcaagttgattacgtgataaatcaagttcaacaagagaagtcaaatttcccgaagaagttggaatggttccttcaagttgattatatgacaaatcaagttcaacaagagaagtcaaattttccggggcatcagaaatagtcccatgcaagttgctggaacttaggtcc

SEQ ID NO: 39628 - DNA, 359 bp, Glycine max
cgcatgcaagcttccacttttaagggataacacatgaacagcgctaggcaatgacattcatggtgctccgaacaaaggtggagtatggaggattgccttgagggtccgcacttatgcaatcatgaaactcagctccaaacttgaaagtggaggacacatgaacaaccctaagcaataacattcatgtggctccgaaaaaggatgagaatggaggattgccttgagggtactctcttaggcaatcatgaaactcatctccaaactcaaaagtggaggacacatgaacagccctaagcaataacattcatgtggctccggaaaaggatgagaatggaggattgccttgagggtcctctttt

SEQ ID NO: 39629 - DNA, 210 bp, Glycine max
  unsure (1)..(210): unsure at all n locations
acaagagaggcatanncaatgggcngaccaacgaaacaaccctcacccatggaagcaaaacattcaaacttgttcccttgacacattcacaagaggttagggatcaactagcaataaaactcaaatgggatgaggaaaagaatagataaagaaaagaagagctacctttaatggttaacgatgtaagtgtctccacatcttctcttttgt

SEQ ID NO: 39630 - DNA, 375 bp, Glycine max
  unsure (1)..(375): unsure at all n locations
aataaaggacttcttaataaaaattttcgtcgggaaaaaatcttcatctcaccaccaccactcgaaagtcaggatggatttatgttggaccgttatgagattttaaactttttttttatgattttaatcttcataaatgccactacttattaatgacatgacatatatttataagaataaaaaacatttcaatgtaaagtaaaattgcactaattttcatcacttaagagcatttgttataaagntttgtagatttgagttttataaaattaattntaagtgatggaaagtaattgagatgtttgactaaatcaatttcacccataatgtggaaaattaattcttggcantaaataaatatgtcctaaatctaaa

SEQ ID NO: 39631 - DNA, 359 bp, Glycine max
agcttcacctttttgtcctcctcatagttgttgcatgagaaaacatgctctattttcatctcccactccaagtaggcctccggatcattctttcctttaaatggaggaatgttgagtttaataccatcaattcggttttgtctaagaacaccatcattccctcttctcctcctttcttcttcattatgatctctattctccatttgattcaacctctcatggagcgcatcatctcgttgtttcattaacctctccaaatgttgcatcaaagcttgcatttggaattgcgaaagccccactccatcattaggattagtacctgacatctcaaacaaacaaatcaaatgtaacaagacaat

SEQ ID NO: 39632 - DNA, 456 bp, Glycine max
  unsure (1)..(456): unsure at all n locations
ntgtcttctttggatgctgacttgtggcaagaagttattaatgatgagatggattctttagaatctaacaagacatggcatttagtagacttgcctcctggttgcaaaccaattggttgtaaatggatcttgaaaaagaaactaaaacctgatggtactgtggataaatacaaggctcgccttgtagccaagggttttaggcaaagagagaatgtggatttcttcgacaccttttcaccagtcactagaataacatctattcgggtgctaatatctcttgctgctattcacagtctagtggtacaccaaatggatgttaaaactccttttttaaatggtgaattggaagaggaaatctatatggaacaacctgaagggtttgtgattcatggacaaaaagataaagtctgcaagttagataaatctttgtatggtctaaaacaagcacctaagcan

SEQ ID NO: 39633 - DNA, 358 bp, Glycine max
agcttggaagcttttaagctattacgagagttttctcggcgagctacaagcacttgtgtaatcgattacaatcatcctgtaatcgattaaaacagagaggttgaaacactgaggaaattttctaactttacaacatttcttcttactcctacatgatgatgcatgatggatgcacatatgaaatgatagggactaagatgcaacacagaatacaacaatcaatacaaatgccacttaagagagttgggcatgtgaaagacaaaacttcttcaagcttcaaggctaagtcttcctgttgctccccatatctctaacaatttaataggtaccagcaagtaagaaagactaaaagcaagaa

SEQ ID NO: 39634 - DNA, 444 bp, Glycine max
aaaatggcctcagcaaacttcttaatctctatggaaattcaatcaataggcctccaatctttaatggagagggttaccactactcgaaaacccgaatgcaaatttttattgaggcaatagacttaattatttgggaagccatagaaatagggtcttatatatccaccacagtagaaagaattacaatagatggaagcacatcaagtgaaagcataacaatagaaaaacctagagatagatggtctgaagaggataaaagacgagtacaatacaatttaaaagccaaaaatataattacatctgccctgcgaatggatgaatatttcagggtttcaaattgtaagagtgctaaggaaatgtgggacactctacacttaacacatgaaggaacaacatatgttaaaagatctaggatatacacattaactcatgaatatgaactat

SEQ ID NO: 39635 - DNA, 360 bp, Glycine max
agcttttcgatttattctatgttcccatggtggtccacattgtgtttcgtgtatttttattctcgttttgtttactttttataccccctgttgacgtgcttaagccattttactcaagtcatttctcgcttaacttaaaaataaaatcaatttccaccgaacgtttgaattatattatccgttaacttcggttaaaataaatttcgaccattcggtcgtgccgtaaccacgttggaaataaaaaaaagaggtaaaaaataatataataatcaaaaaacatctttaggcaaagtaaagcggaaaatcaatcggacgtcttctctttgggatttctcattcttaatcgaattgattaataac

SEQ ID NO: 39636 - DNA, 448 bp, Glycine max
  unsure (1)..(448): unsure at all n locations
gaaatcaagagcgacaatctccttattattcctctcacgaggtggcggttaagccatgtgctaactatagaaattaataatggaaagctctgattcagaatatccagagtcaccctccacagaatgctcagaatgcacagaatgaccaagatgcacactatgcctaactaatctactaaaggttctatgtatgttanaatctaacggttctaaatcacctggatagcccctagccatgcactatatgcagcatataatgtgtttctcagcaagcacctaacaagggggtaaaactacaactatactcaaatgagatcgaaatcaactgatagttcatgaggcacaccctacaatcatgagaagatagcgcggaaatggtgatacaaaaattcacaggctaactatgataactacctaagcgaacgttataagaatatgacaataatac

SEQ ID NO: 39637 - DNA, 295 bp, Glycine max
aatagaattaatataaaaaatcgtatttacacaaataataaatgttggtggctttcttttataattttatatttcagggtttttattactctatttttttgtcatgctctttgtatttttgatgtcatgttattatatatgacaagggtatgatataaattcatttttccctattttatttaatattttttacatttgtgttggaaattattattattggttaaatttagaaataaaaaagaatccaaatagtataaattaataatctaaaaataatttcttattcattttatct

SEQ ID NO: 39638 - DNA, 340 bp, Glycine max
  unsure (1)..(340): unsure at all n locations
atttttatatttttatgaatanttaagggatatactaagatagatggtgatgatcatttaacaggtcgtttcaaataagacactagttagacagttgctaaaggaagttgcgaggcttgaaggggagttacgaagccctgacctttctgtgaattcatgtctaaggtcattgctagctgaaaaggagttgaaaattcagcaggtacaaacttctttacttggtcttaactttcatgttaactttactgcgttaaaatttttgaactaacctcttctctgagtcctctagatggatattataatggtattctttggagttcttacattattaatatctctt

SEQ ID NO: 39639 - DNA, 444 bp, Glycine max
  unsure (1)..(444): unsure at all n locations
tagattattgacacattctctnttattgttattcttttttggacggcaggccattttcaacaaacaattgagatttgactatgaaatcaaaattaatggtaaaaaattgttcaaataatcataaaatctcatatcatgtaggattcgagactaataatcatttacatacataattcttttttaagtcaccgatgtgtattttaacaagaataaaattgtgatgagttgctgtacacttaaacaaatattatcttcaaccatcatcctgatgagttcagcagaaaaaataatactattttatcatataattttttagtaataaatattttctttattataataataaaacagttntacatgactaatttattaatattttataataaaaattgcatatgaaactttnttaagagatattnatntttaaataaatctcaatatcac

SEQ ID NO: 39640 - DNA, 365 bp, Glycine max
  unsure (1)..(365): unsure at all n locations
gcttaactagagatctcaaatttaactaagtatgtgantttattaaatattaggaaggaaaactttgtcacctaatagtcttatatagctcaaacaagattatctttaatagaaaattttatgatttttttacaaaaagataatggttgtctatttgtctttgttttgatttgaagtaaggagcaatacacatggataatgataactaataattaatttaagttaattaccgttgttatcatcgtggaaactgaaagttccatttctaattcttagttttcatttgttgatgggaatagaaatgttatcttgttgatggattatttaccagcgaaactgaggtctgagtggttatttcttcacaa

SEQ ID NO: 39641 - DNA, 368 bp, Glycine max
agcttgccgcccagttgcttcttttttaagttttcaaacttccaaaatgttccgaaagggtctagattcgaattgctatttacaccctatcttgataagttcaccccccatttttgtgttattagatgttttctttccgaaatctcacgaaactttacggattctgccgggatgagtgttaagccttccgaagcgattaacaatggtcctcggatgaaattagagtgtaacaatttatttacacacaccccactttgctaaatacactcatgttttgtgttcttggccggtttctctccgaaacatcccggaagtttacggattccatggcgatgggtgttaaacattttgaagtggacaaatgaaag

SEQ ID NO: 39642 - DNA, 197 bp, Glycine max
  unsure (1)..(197): unsure at all n locations
cctactataacatgagaagcagccctagatcaccatattaggagcttntgatagcgtctatgtagcctccaactatcgctactttaacgtcttgagctggactctagatggccagtcagtcactgacccactactatgcttacctttggctctggacttgaaaagctatggatgggccgaggggcgtaagcaactct

SEQ ID NO: 39643 - DNA, 367 bp, Glycine max
agcttgcacccttgcactattattcgcattgtttcccctatcttcatcaccaattgacatctaaggatgcatgtgatttgactcaattggtaatgatgaagaactaaatagtcaacatcaacatatagctcaagcgcaccaataattgttgtttgaaagcattgatcatacacctaacaattgattagttgaaacttcaatttagcatgaatttaaaatatcattactaatacctcggttaatttggatgaaccttttctcactctcaaattaagaattttttttttcaaattaaaatatggggttaattgtatttttattctctacatttgttacaaattttacttttagtctctaaacatttttt

SEQ ID NO: 39644 - DNA, 341 bp, Glycine max
  unsure (1)..(341): unsure at all n locations
gactacttgaaatgagggagcctttgttatttctttantaaaatangaccactagaagaacaatacatcttttcaatcatattctactccaagactaaacttgagttcaatcctctttggtaactgccatgattctcatactacctgtagagtgatagatcttgataaaactatgagcctactcatacaattgaatgttcctgctgtataaatcacactacaaaatcttatgtactaaaacattcagatatagatctcataggtatatacatgagcgtaatttcctggtaaatttacacttgaaaacatgtcatcggacttgacggttacctttatactct

SEQ ID NO: 39645 - DNA, 369 bp, Glycine max
agcttgcaatttatatgaagattattagctttttaaattacccgaagataaaacatggagtatacaaactaaatggcatcagaacatttaattgtgaagcaccataaacttggttaaaaaggaacgatgcagtgaaaaagctaggcaagaagaattaaatgctctcaaagatacaagattataaaactcaaatgctctcaatgctctcagtggagaatggacataaaactcacagggcaactacaatagcacttattcctatatcattaaatataaaataaaaaaattgctttatgaaaaaattctcccacctcctttgtattacatcagcataatacagtatatattttgaaatatcctcttctcggg

SEQ ID NO: 39646 - DNA, 572 bp, Glycine max
  unsure (1)..(572): unsure at all n locations
gcgcaagcactcccncaaaatcacaatccggcgagacacaccacacggcacannccacnnannnaaggggnnntgttgatgactcgtcgangcanccnnnnaaanacaagcccccgaganancccgnangcgtgacgaaacaacnagtggttcacgtacacacgcacggatacgggcgcactgccaagtcctagagccgaccccacccaccataagagaacgaaaagcctcatgggacaagacaaccaagggagagagagggagggcacaagatgcccgacgcggagcaacggatacacacacacacagatagagatacacaaaaccggccacacagacgggaaaaacgcacaggcaccagtagcaacacacagaagcggagagcgggaaaaacacacgaaaaggaacgccctaagatacacacaaaaccacacacgggaatcgagacgaaaaaagagacataaaacgaacacaggcagcgaacctacacgcgggcagatgcggcggcgcgcgacacagcgaaacaccaacggacacgacaagaccacccagagccaaccaaagaaagccct

SEQ ID NO: 39647 - DNA, 366 bp, Glycine max
agcttaacaaaataatgaaaatttatcaatgtgtggtcatatgcattgttacatatgtacccttgtttttttcaccttttttaccttacgttttttacatcaggatagttttgtaacttttttttttcaccaaaattaatgagatattatgaaacctactttttataaataaatttaaaatatttttataagtttaccttaagtgatttcaatcaataaaatttttatcattttgatcttgaaggataataatacattgatatttactcaattcaagttaataaatctatttaatcaataatcaatagtatttgatttttttaaaattgaaaaacacacacacacacacacatatatatatatata

SEQ ID NO: 39648 - DNA, 248 bp, Glycine max
tatactggagacggctgtcgtggctctatcctctatagttttctggaatctaacatgacctccgagatggaaccatttgatctctgacagccgatagatcggccttcatctgttcctgcaccccctcttcattatccacttctctggatcgagtgttataggggagccttggtgttttcttagtcttgatgataatccttaagaaattaactactggtgagtatgccaccaaaccttgattttgctat

SEQ ID NO: 39649 - DNA, 214 bp, Glycine max
  unsure (1)..(214): unsure at all n locations
aaagacggaaaaagaaaaanaaggaaaggaagaaaacgaaagganngaggaaagatcccagaaacgaggctgggggnggaccaagaaaaggaaancgaaaagggaagaaaaaacatagcggaagaaaaaagggaacaaaaaaatgaaagtgacaaattagtctatcatagtttgatgacaaattaatgcatcaacattctgataaaagtcatct

SEQ ID NO: 39650 - DNA, 197 bp, Glycine max
tgaagaatcactttaccatataagcaaaaacataataaagatctcaaatttaagttgtctaaagccaaatgacgaagaaatgacatatcagaacaatgtgtgagattcatatcataaacaaaaaaaaaaaagagtaagaaacactaaaattattaccaatcatgtgcaagaacaaagagagcccagaacattgtgcc

SEQ ID NO: 39651 - DNA, 360 bp, Glycine max
  unsure (1)..(360): unsure at all n locations
agcttctacttatatggcaggtctggctnctttcactngcnngnctccaacgcgagctttgaccactgttcttccttcccgcgatacttcttttcatgtccgcctgagtgggcttatagcctaaaccatacttcccacgatttccttgggtatttatcaggctagttatgccgccgttgtttttgcctaaacccatcccgggttcataaccgttccccaacataactcgggccatcattaccgctgcatcggacagacaaggctgcccaaagagggagtccacggaggaaatgctgaccacctcaaaagactggaaagcagtttctaacgattcttctgcggcttccacataaggcatgg

SEQ ID NO: 39652 - DNA, 396 bp, Glycine max
  unsure (1)..(396): unsure at all n locations
tactcagcttattcaccccaaaactccccctcactcagaatttcattacctatgggaaccatgagttggcagccctagatcaccatttttggtgcttttgcttccatttttggtactcctactcactccaacaagtacctcattctttggctctctagctttccattgatttattttggtgctctaagttgcatgtatttgcttgaatccgagaagcaatgtatgtttggatttgtgtttgtttttttgaattggagggttgtgtgagagggccttangcctctgatgatggctgaagtgattgggcatgccacactgcccctattgccttgctattcatgcctaaaggtgcgcccaccaagtgctcagtgaaatgcctcaatggcatgtgagcat

SEQ ID NO: 39653 - DNA, 356 bp, Glycine max
agcttggagatttgctccaatgtatgaaaagaaagagggagagaaagagggagggggagcacgaaattgaaggaagaaaaagggagagaagttgaactttgagttgtgtctcacaagactctcattcatcaaagttacaacaagtgttacacatgcttctatttatagactaggtagcttccttgagaagctttcttgagaaaacttccttgagaagcttctttgagaaaacttccttgagaagctagagcttagctacacacacccctctcataactaagctcacctccttgagaagcttccttaagaagattcctaaagaagctagagcttagctacacatacctctctaatag

SEQ ID NO: 39654 - DNA, 440 bp, Glycine max
tgctacaaacatctacaacagacctccttaatttttcagcaaaatcagccacaacagaataattatgacctctccagcaacaggtacaatcccgagtggagaatcatcccaaccttagatggtcgaatccttcacaacaacagcagcaacaacaacaaccttattttcaaaatgctgctggcccaagcagaccatacgttcctccaccaatccagcaacaacaacagcaacagccccaaaaacagcaaacagttgaggctcctccgcaaccttccctagaagaacttgtgaggcaaatgactatgcaaaacatgcagtttcgacaagagaccagagcttccattcagagcttaactaatcagatgggacaattggctacacagttaaatcaacaacagtcccagaattctgacagaataccttctcaatctatctagaat

SEQ ID NO: 39655 - DNA, 59 bp, Glycine max
gaaaaaaatctaccacctcactttgacgacatggacgccatacagaacagattgaggaa

SEQ ID NO: 39656 - DNA, 176 bp, Glycine max
  unsure (1)..(176): unsure at all n locations
cataccaatttctttttcaagtcattccaccaaccttttattcgacctaataaaactacaaaccaaaactccaatctctagcggaaaaaatacgtgtgatgtgagaggaattctttgatagacacaaactccatacatcatttttaagcgcaatccattataactntataacctaa

SEQ ID NO: 39657 - DNA, 359 bp, Glycine max
agctttataagctcgggttcgtgagacaaaggtcaagcgttcgcgatatgcgaagatgatattccgagtactttggatttggtacgaccatgccctcctgatttccagctgggaaattggcgagtggaggaacgccccggcatttacgcaacaagcataatgtaaacctttacggttttaaaagctctatagttgggcctaggctttagagtttttccttttgttaaggctttgtgtcttttgtttttgaatttataatacaaggatctttcttcatctgttcctggtctctacccattctcattcatttgcatgtttacttctttttctgaaacggcagatccgatgacgagtccccc

SEQ ID NO: 39658 - DNA, 405 bp, Glycine max
  unsure (1)..(405): unsure at all n locations
tgtagactataccttcgaccaaacacggatgtgtttctgtctcagcccggatttaaagtgggttgcagcaccggctccgcttccctaactatactggagacggttgtcgtggctttatcctctatagttttctggaattttaacatgacctccgagatggaagccatttgatcttgtaaagccgatagatcggccttcatctgttcctgcacgccctcttcattatccatttttctggatcgagtgttataggggtgccttggtgttttcttagttatgatgaaattcctaaagaaataaacaacggtgagtatgccaccaaaacatgaatatgcaaatggatgatcggagcccttggatccaccccaaggtttttagataacatgatgangtcagaacttctca

SEQ ID NO: 39659 - DNA, 331 bp, Glycine max
  unsure (1)..(331): unsure at all n locations
ttctcatggcaagatcgcnacagcaagactgataagacaaaccaatatccatcactacaaagacacgcatttgtaaaatggtggacgtatatatatatatatatatatatatatatatatatatatatatatatatatatatatatatatatatatatatatatatatatattattgaagagcagcacacagaaaaaatagttatagtggtgtcgccccaattctctatatagggaagacaaagagggcgataaaaaaagaaaagaagacactgtggatatgtttttacacgagtgtgaaaaaaagaggggagatgtggaaaaacacatgg

SEQ ID NO: 39660 - DNA, 318 bp, Glycine max
  unsure (1)..(318): unsure at all n locations
ctataaaactcagcttgttcttttataaaagaaagtatatttttatacgtatcaaaaaagccttgagtggatccaagtgttctgatcattcatacatattcatgtttggtncatactcaccattgtttgttctttgggaactcaccatactaaaaaagcgcaaggccccctataacactcgatccaaaagaggataatgaaagggaggcaagaacagatgaagccgactatcggcttaaagacaaatggctttatacagaggcatgctaagcttagaaaactataaaataatgctcggcggcgcttcaataaactagg

SEQ ID NO: 39661 - DNA, 349 bp, Glycine max
  unsure (1)..(349): unsure at all n locations
tgtttnngaggttctaanctttgttnnggnngcacagaaaaaaaatgatgatattaatattaagaagcaagactttatcacatgacatgcaaagacttgcagaattacagaaacatatacaaagtattctttcctaacaaatttcctacttttaatgctcaacatgtccttaatgctagtaatcgcaccatgcataaccgctttcgcctataacagcagaatagcatgcgagttgcctccctagaccaagggatactcaatgtagccattttccatctacttaatatgttaaggcaattagtcaagtctatgcgccagacatataaagatagattaaaacctttggcat

SEQ ID NO: 39662 - DNA, 421 bp, Glycine max
  unsure (1)..(421): unsure at all n locations
ngatctttaatattgccaaatttagtatgctgttattagcaatattaattagatatatattgacaagttgaattaaaatagtttttttgggtacatgaattaaaatagttaatatagtactaataaataaaaattgtttcccataccaatttctttttcaagtcattccaccaaccttttattcaacctaataaaactacaaaccaaaactccaatctctagcggaaaaaaaaggtgtgatgtgagaggaattttttgatagacacaaactcaatacatcatttttaagcgcaatcaattataattttataactaataaaataaaccaggttttgtcaattaaaaaaaggtttgatattctttcccttttttggttatgttgctttngattntntgttaaatcacagtaccattatcttct

SEQ ID NO: 39663 - DNA, 312 bp, Glycine max
cttccgactgaaaacttattgtcgttcgaatttgctacgagcttcgggtttaaatttctagtgtctcatatatattccgggactcaatcggacttccgagtgaaatgttattgtcgttcgaaattgctagtagcttcggttttaaatttcgagcgtctcgatatatttcgggactcaatcggacatccgagtgaaatgttattgtcgatcgaatattgctacaagcttcgattttaaatttcaagcgtctcgatatattacgggactcaatcggacttccgagtgaaaagttattgtcgctcgaatttgcta

SEQ ID NO: 39664 - DNA, 229 bp, Glycine max
aaaccgaagctcctagcaaattcgaacgacaataacggtgcactaagaagtccgattgagtcccgcaggatatcgagacgctcgaaagtgaaaaccgaagctcgtagcaaattcgaacgacaataactgttccctcggaagtccgactgagacccgcaatatatcgagacgcgcgaaatttagaaccgaagcttggagcaaaagcgaacaacaataacaattcactcga

SEQ ID NO: 39665 - DNA, 281 bp, Glycine max
  unsure (1)..(281): unsure at all n locations
agcttctggcagagtagtaattgccacttattgccgcaatggcattgcagaatgttgtggctaagggccgctaagtggaaccccattgcattgcagctcactgtcccacgtggagcaccatgaatcaatcgcagccaacacgatctattgcattagacataaaaatcccccttttttggccccggtccctcaatgaagttgtttggtgctgttggtggtggggtggggggaggggaaatcttgtnattttgctttcctttaattgtatcctaacacaaccc

SEQ ID NO: 39666 - DNA, 371 bp, Glycine max
  unsure (1)..(371): unsure at all n locations
gcatgcaagcttagaagaaaagcnctgtttctgagatttgtgggattttttgangnngggctaggntacgtagggcaatacagccccaacgtgagatggatgcttcttggttatgtgggagagactgatgcagggcttttggaattctctaagggctgccccagtcttcagaaacttgaaatgagaggatgctcctttttcagtgagtatgcactagctattgctgcaactcaactgaattctctcaggtacctatgggtgcaagggtatagtgcatctgcatctggacgcgatcttctggcaatggctcgcccctattggaacattgagctgattccttctagaagcgtggttgttagcaatcagcaaga

SEQ ID NO: 39667 - DNA, 414 bp, Glycine max
gtgcagactaagtgctcaccaacactagataagaatttcttggttgtttcatgaaacctctgatgctagatcaccattcaggaatgccattttcacatccattggatgcagcttatgatcaaaatgagctactaatgccagaattactcgaagagagtctttcttagatacaggggaaaaagtctctctgtaatcgaatccttctctttgagtgaatcctttagcaaccagtattgccttatgtctctcaatggtgccttctgagtattcctttgttgtgaagacccatctacatccgatggcttttacaccaacaggcaactcatcgagatcccaatcttgggtagatgccatagaagccatctcatctctcatagcattataccacaaagttgattccttagaactcatggc

SEQ ID NO: 39668 - DNA, 367 bp, Glycine max
  unsure (1)..(367): unsure at all n locations
agctcgtctnnntcagggaatatgnaaagattgtccaggattttcaaaaatnnaatgactgccctcacgtactgtctcgtggggggtatgaactgcttgacaagaaacttatggaggagaagagcaatcgtggacatgaggaacattcgtgtactgaaagcccaacactcaacttcgacccaccatccccagttgcaatacacttgaagtggaagattgcccgtactaagcggcatggccaaatgacgtctgaagtggcacaagaaattgcagacaaaattgtcagctcatatatttttttggttactgtcattggcaaataatggttagctaacctagtcaaatttgttttattcaaattcaacaa

SEQ ID NO: 39669 - DNA, 188 bp, Glycine max
caaaaaagcgggccgaccgacgccaacaacttgccaggaagcgcgggccggaaaaccccccacccaccaaaggagaagcaaagggaaaccccccacagggaaagcaaaaagaacccccacacgggagcaagagaagaaaccacaggacggaaaaccgaagacgaagcgggacaacagcgcaaacgaga

SEQ ID NO: 39670 - DNA, 365 bp, Glycine max
  unsure (1)..(365): unsure at all n locations
agcttgcttctacactgcgctttgtgcctttttcaatttttagttntatttttttgtttttgatgaaaataatcttgtttaaccctgtggtttgatcttatttctttcatatgacatcaaagaagagaaaggaacctgctacaccttcccaggtctgttatgaccaatccaggttcacttctcctaaggcctgggaaaggtacactaatattgtggtacccagaaaattactccctaagcgaaatgtggtaatctaccacactgagtttgatgagttcaaggaagaactggagagaagaaaatgggatgaggaattgactagttttgatgaaggcagcattgatgttgccattatgaaagaattc

SEQ ID NO: 39671 - DNA, 381 bp, Glycine max
  unsure (1)..(381): unsure at all n locations
tagaggcacctgcacgcttgcaagctaataaatattgtttttattttgaaangaccctaagccatattagcgctagagcctttatttttaatttttattatatcttatcatagtttatataaaattttgattaatcgattaaatttaaaggctaagaaaagaggtaagattaattttttaagaaaaaaaatggattttgggtacattttactattttaattagtatattttaaataaaagaggctttaaaatgatttaatcattatgatataaaaatgaagacatagactatgtttgttttagttagtttttaactttttttactagctgaaaaaatttagttgattatttgataaatgaagtctcaatgttatactcaaa

SEQ ID NO: 39672 - DNA, 393 bp, Glycine max
  unsure (1)..(393): unsure at all n locations
tggtgatcagtcaggatgatgaaaggatgaccataaagtagtggtgccacttgagtattgcagttgtaattacatgaagctcacaaacataagtagaagcttgttatagcctgnggcacaattgcttggctatggggtgggagttctgtaacaggactgctcctatggcggtgccggaggcgtcggtttcaatggtaaattgaattgtaaagtctggagtggtgagggcaggagcttgggtcatgatggtttttaattgttgaaaagcttcttgagccgtgggactccatgaaaatttgtccttacacaagagcgtagttaacggtgctgctatggcggcataacttctgatgaattttcgatagaatcctatgaggctcatgaaacttctca

SEQ ID NO: 39673 - DNA, 442 bp, Glycine max
  unsure (1)..(442): unsure at all n locations
attaaaaccagggccaagcgccacctttgaacctatgatgcttcgtacgcccccgggatcctctagagtcacctgcagcatgcaagcttgcaacctatgctcctacntccatatgagaagaagccttcaagttgtttcatataatccttctcctctaaatcaccattaagaaaggttgttttcacatccatttgttgcaactcaaggtcaaaatgagcaactaatgccaagatgatacgaaaagaatctttcttagacacaggagaaaaagtttttgtgtagtcaattccttctttttgagtaaatcccttagcaatgagtcttgccttgtatctctcaatgttgcctaatgaatcccttttggtcttaaagacccatttacagccaatggcctttgccccattagggaactctacaaggttccaaactccgttactctgca

SEQ ID NO: 39674 - DNA, 401 bp, Glycine max
  unsure (1)..(401): unsure at all n locations
ngaaggcaaactggatgcattggttaacttggtattctatctgaccttgaaccagaaatctgtacctgttgcaagggtctgtagtttgtgctcctctgctgaccaccatacagacctttgcccttccatgcagcaacttggagaaattgagaagcccgaagcttatgctgcaaatatttacaatagacctcctcaacctcagtagcaaaatcaaccacagtagaacaattatgacctctctagaaacagatacaaccctggatggaggaatcaccctaatctcagatggtctagccctcagcaacaacaacagcagcctgctccctccttccaaaatgttgctggcccaagcagaccatacattcctccaccaatccaacaacaacaacagccccagaaac

SEQ ID NO: 39675 - DNA, 358 bp, Glycine max
agcttacaaaacttatgtatctctgcaaaagctactcctcttcctgtctccagagctcttttcccgaaataggcactatggtgtgttgtggatttatgtgccctaggcattgttaccctaattctgcacaaaacaggctttaaataggctctgaatttgcaactttgcgcttagtgccaccctcgcgcttagcgcgagtaagtggatttgagcttagcaccagtcatgcgctgagtttggctgaagacaactgctgcgtttagtgcactaatctcgcgcttagcgcacggccttgatgatgatgccctgccagattcttctgtcgtgctaagcgcattgaagctgcgcttagcggtgg

SEQ ID NO: 39676 - DNA, 426 bp, Glycine max
  unsure (1)..(426): unsure at all n locations
ntgngctnntgatatgtttttattggtaaatgtctttttgttgtgtcgaccaaattagaaaacctagaggtaggtggatttgtcgttttgcaaagcatcctagaagaactaatatttatgtgtgtgtgtgtgtattgctggactatggggtgtttatgaaggtcttattaaattggctcaaagtaaaggttttaatgcagtcattttccaagtggactctgaagccatagtgaagactctggtttgtttgaaagagatatggtagtgctcttggttgcactggcacacttgcactttagtgaaagaaaatcgcaatatgctaaatgctgaccggagaatgacaattttacacatttacctgtaagcaaattcttgtgctaatactntggctaacttggaagtttattnggttgtggattatatgat

SEQ ID NO: 39677 - DNA, 357 bp, Glycine max
  unsure (1)..(357): unsure at all n locations
agctngagagccttccaaagctttcaggnaatcttgccacacaagnggcctccatgaagaagtgacacagagaagccaaagancctatagaagctggaagctcgctgagcattttacatttgttcaatcttaaggtgacaagattttctagccatccaatggactctggcaattccctgatatttccattgaacatgttcagtgtagtaagaaatgctaggcggccaatagattctggtaaatattcaagatttttgcaattcatcatctcaagtttcctcaataatttcatctctccaatctcatctggcaaatctgtgatggttgttccatctaactgaagctcaacaactgaag

SEQ ID NO: 39678 - DNA, 422 bp, Glycine max
  unsure (1)..(422): unsure at all n locations
nntgacggactatacctagctctaggcaccagggatggataaagatctatatataggctggctaagggtagagagaggaagactagagatttggatcaagtaaagtgtgttaaggatgaagaaggcaaagtcttagtgcatgaaaaagatatcaaggaaaggtggaaggcgtatttccacaacttatttaatgatggatatggatatgactctagcagtctagacacaagagaagaggaccggaactataagtactatcgtcggatttagaaacaggaagtaaaggaagcattgaaaagaatgagtaatggtaaggcggtggggccagacaacatacctattgaagtgtggaaaactcttggagatagaggtcttgagtggctcaccanactctntaatgaaattatgaggtcaaaacgcat

SEQ ID NO: 39679 - DNA, 362 bp, Glycine max
agcttatgcgcttatttcctttctaacgttctcttgcacaagacattctattaactaagaaaaatgcacccatatacaatcaaggcagcttcgttacctagattatttacacgtacttccaaggtgtatttgttacttacatcacacacatctccttggctaaatttacatacatgcatactcaaagcattttgaggtaccaaaaattgcacatgtgcacatcttggtatttctaatacctatacatacacaaacttcatgatgaatcttgactatctacacaataaggtgctacattccatgctcttttcaagttttttgctacctaaagccgcatgcaaattcaagtatattttcctttg

SEQ ID NO: 39680 - DNA, 463 bp, Glycine max
  unsure (1)..(463): unsure at all n locations
tggcttagcgcgtgaagagatggcacttatctcttgtttgcgcttagcggataagcaatctgaaaatttttctaagtcattttctgcttatctcttcacacataatttaaaaaccctttttgtttattactaaacaagctgaaataaatcacaatcacaagcaagatgtcctaactacatgcaagaaataaaaaatgaagatagagaagggaaagaaaagctgggttgcctcccaataagcgcttctttaacatcactagcttgacgcatcatcctgttatccaggatccagtaaagttcccacttcaaggaccttcttctcaggtcttctttcctccatcacatgaactttaaaacaaacattccggttaggtggctctttatcttaatgaaatagatcanagctgattntctgatcttctatgcccatttgcaacatctttnttcccatatctactacaca

SEQ ID NO: 39681 - DNA, 252 bp, Glycine max
  unsure (1)..(252): unsure at all n locations
cttttttgnggtttttacaattgagaacgcgggaagaaaaagaaggctaatgacacaagaggtcntgaggcaacaaatacaccagttgatgaaatggatttatctacatctaaagatgctaaagtagaagcaatgagcgatagctatattgggactaacaaacaaaccatgtgttaatgaatattatcacatggaattgtttgggaacaaactctaaaggatttaattctcttataaaggacttatctaaag

SEQ ID NO: 39682 - DNA, 369 bp, Glycine max
  unsure (1)..(369): unsure at all n locations
tctcaggaagttttctctagaaatctttttttggtttctacctagtctataaatagaagcatgcataacacttgttgtaactttgatgaataagagtcttgtgagacacaactcaaagttcaacttctctccctttttcttccttcaatttcgtgctcccccctctctctttctctccctctttcttttcatccattgaagcatcctctctaagcttcttatccaaggctcatcttggtggtgaagctcctttttccatggcttattctctagaggatggtgcctcatctcacctcttctnctttgtcttctgctgcatctccatggtggaaaatcaccattaaaggaactcattgaagctcaaagatc

SEQ ID NO: 39683 - DNA, 350 bp, Glycine max
agcttgcagtttatcagaaagttttgatgctgcatggttatgataatatcaatctaaagaatatgcaaaggagtgaacatgtaaaatctaaaccttctagttcaatccgtaattcccgtgttcctatggatactgaagaacgggggttatctgctaggatggcaaaggttcattaatatatttacaccctctgtgtgttatatttgtaatggtcaatttgtcttgcttacagatggtttaaaatgcttaaattttgtgtcaaatgtgcaggaagagatgtttaagggggacaggaaagcaaaaaatacatactgcaatgtagatggagcagggatgctttcaaatgaaat

SEQ ID NO: 39684 - DNA, 449 bp, Glycine max
  unsure (1)..(449): unsure at all n locations
tgtcattgtagttctctgagcataatgcatttatgttacttgaagaggtagaacctcttcttcctcagtaacatgaaatcttagttctgacaaaaaaaatgtagattcattggtaaattgccttttaacttttttttccttttcaatctttggatggtgaagatttttactcaaatagtgatgatgatgatgaaagagacactaatttgacactatatcgattggagatcctgtcaatcgagctccactccatgtatggatatcaggcatgtatcacaaaaccgattcctctccctacatctatctattgttaaattatatctgaatagtcaagatttanaaataaaaaataaaataaaaatgaanatgactattttaagtagtcatgtgaccactanantacctttaatcttgaccgtgcatgtatggttatatgacctagacttata

SEQ ID NO: 39685 - DNA, 355 bp, Glycine max
agcttggatagaccctgtgcttttagtagatttgggaagttaaacctttgctgaaagaaccactccaattcaagaaacttgggtattctaacattcttcactgcgtatatcctattgaagttgttcttcttattcttgtctatgaaccatgtgtcaagcctattgagagcaacctaagagcactctccttgcttcctcttggaggacttggccttgttctgagctctggaggggttgctagccatctttagaagataaatagagggtttggaggtagaagaaagatagggtttcaaaaatgggtgataaaaggaggtgttggtgtgattgagaagtggttatggttaccttttat

SEQ ID NO: 39686 - DNA, 415 bp, Glycine max
  unsure (1)..(415): unsure at all n locations
actcagcttctatccaggctcatcttggtggtgaagctccttttnctangttttattccttaatggatggcgcctcctctcacctcttttcctttgtcttccgctgcatctccatggtggaaaatcaccattaagggaccccattgaagctgaaagatccagcctccatagaagccccacaagcaagcttccatcaagtggtaatcagagcacaagagcttcaagtaggtgctccttaaacctccattaattttttgctttaccttctcttcctttgatggttcttcattatttctccatgtatctcctcacatgtcttgtgctaaatgttnttaacatgattctttagagtttccaccgattaaacttgctatagaagctagatttgatcttatatggttcacatatcttgttc

SEQ ID NO: 39687 - DNA, 365 bp, Glycine max
  unsure (1)..(365): unsure at all n locations
agcttatggcatgttaccatatttacaccaatttagtgntgagaaaggnattcttttatcaagtccagcaaaaacatctgaagtcatttggttggctggaaagtccttcattgtggtcattctcaatgtgaaagaataaatctatttgttgtgttgccatccaaaaatacgtttcaaaaatattggttgttgatgctttccaaagcatgttatgctcaagaaaaagatcctatttaaatcccaaaaagagggataatctataactatactaacagaatatcagagctcgcataaaatatgcaaaataaacaagtgtgagttagttaaagaaaatccaaaacagtaactaacgtaataaactactg

SEQ ID NO: 39688 - DNA, 256 bp, Glycine max
  unsure (1)..(256): unsure at all n locations
tcaagaaacaaagaacaagnncaagagcgaatcacgaacatcttccggttcaagaggaaatttgatttcaagaatcaagaatcaagattcaaggttcaagcttcctagaatcaagatcaagattcaagagtctcgattcacgaattaagagaagaattaatcacgataagtttggaaaagtttttttgaaaactgagtatcacatggagttttctcaaaacatgtttaccaaagagtttctactctctggtaatcg

SEQ ID NO: 39689 - DNA, 365 bp, Glycine max
agcttgtaggattatgggatatttatcacatttggtactatgtggcgttcgggcgatggtgcaagacaattctccacatcctcaaatcacgtataaacccaccatcccctgttgcccacctccaactgagctcacatactcccacgtagcccttatccacgttcctctcaacaccgggtccccatcaatcctcccaagcttccacaacatccaagaaattcaacatccaatcatcacaaactaacacagccaagaaaatagagcaaaggcagaaaactctgcccaaaacacaaaccaatatcacagcttttcacattcaaataccccagtaacattctcttcgttccaattcgttaaccgttgga

SEQ ID NO: 39690 - DNA, 382 bp, Glycine max
  unsure (1)..(382): unsure at all n locations
tgagccaaaatcctgactcaccatagaccttgattcattttataatgncaanccttaccctcggaagcattaaagaatataacggacatctccaatcaaagaaaagagaaagaatatttccagtgatagagacaaaagacaagaaaggaaattcccaatcaaagaatgcgagaaagataaaagataataaagataattcccaaccaaagaatgggagaaagtaaaaaaaggaaggaagctcctgtcaaagaaaccataataaatgtgcagagaggtctntggaccagacaatatctgaacactacagaattgtcacctaatgaacaaaaaggaaggaaaggaaaccacgacctacaatggtcttctctctttaattaccaac

SEQ ID NO: 39691 - DNA, 366 bp, Glycine max
  unsure (1)..(366): unsure at all n locations
agcttggcaaacatagntgatttataagggttatctcctctagatagaagcataatatcatctgcaaaagccaaatgagatagctgaatacctgcacagttgagatgaaatttaaaattggcatcatccttgaggctgctcatatctctggaaaagtactccaaacagagcacaaacagataaggggagagaggatccccttgtctaagaccccgctgtcctttgaagtgaccataaatggatccattgactgccacactaaaggaagtagaagaaacacattccatgatccaagtacagaaatgagctgggaagccaatggacttaagcatccaatccaagaattcccagaaaatggaatcataa

SEQ ID NO: 39692 - DNA, 363 bp, Glycine max
agcttgaaaggtagtcataccttataaaatatatatatgtttgtttaggtagaaagataccttagatatgcatgtatgtaaacaaaaaaatacttcacaaaatatatatatgtatgtttaggtagaaagataccttagatatgcatgtatgtaacaaaaaaatacttcacaaaatatatatatgtatgtttaggtagaaagataccttatatatgcatgtatgtaaacaaaaaaacacttcacaaaatatatatatgtatgtttaggtagaaagttaccttctatatgcatgtatgtaacaaaaaatacttcacaaaatatatatatgtatgtttaggtggaaagataccttagatatgcatg

SEQ ID NO: 39693 - DNA, 243 bp, Glycine max
agcttcaccggtttacgccgatctaacaggtccgaaccgacgtcatgcaaaccacgcccagggaacgaacggaaaactcgggacgcgacaacaggcgtgaagtagcgaccgatatttttcagccgacattgcacaattctttgtagaaaagctcgctggacgataatggtatttttacggcataataagttttctaggattggaggtgcataaaaaagttacaatgtacttccgctaagtttt

SEQ ID NO: 39694 - DNA, 380 bp, Glycine max
gcttcttgttagacctcgatcggtcatctttccaggctgatgtcgaccgtcatttttttcgatccatttcggtgaataatatttttttgccgagatgggctaatgttttcctggccgaataaatgggaaaatgccagtttcggccgaaacgaaaagtcggttgggctcgcacaaaaaaacctagccgacctacattttaaattttttatgcaacaccaaaacaagaaaacttcctgtgccgtaaaaaaaaaaaacattacatgacagcgagcgttttgaaaaacaaaattgcgcacagtcggggctttttcacgaccgatgtcggctattgagttttcaattcaatccgtgaacgaaatttgcatgatgtcggttaagaa

SEQ ID NO: 39695 - DNA, 359 bp, Glycine max
agcttagggattttacacttttttgttggtgatgaacaaaagcgcaaaacggaatcaaaaaaatgcggaaaaggacgaccctagggctgcaaactcgtcaatcccgtgggtatggcttttgaaaggggggaaaagaagtttttgaatgcaaaaacgccccccctttcgtcattcttataatttggtgcaggggtggctcgcccaggcgagctaacttgcacatttttttttttttttttgaggggaacattaaccatgtcctctcccttctcatggattagcatcttgcctaacttgaacttacttaggttagaattaggcgttgattacttatttttttactttttaaaacaaacaaa

SEQ ID NO: 39696 - DNA, 399 bp, Glycine max
  unsure (1)..(399): unsure at all n locations
tcatcttacagacagcaaanaagaatgtttatatggataaccactcgagtacttccctcccgtcagcgtgactcaaatgtcagtatgacagatcttgtgagcgcggaagatgacataaatctccgcgtgtcaacgggcttgtcggccgcgattgacgaagggcgcagaagacgacgttagtctctgcgtgctatcaggcttttcgtcttaccgacagcaaaaaagttttgaaagtgcggacaaccacttgggtatctccgcatgtcacgtgactccagtgccagcatgacagaacttgtgagggtggccgacaaaagtgaggctcttgctcctacgtatcctccaatgaggaactcagacttacgtagttcttgataacttgtgagacttgaaaaagtc

SEQ ID NO: 39697 - DNA, 381 bp, Glycine max
cccgggatcttaagcaccgcggcatgcaactggctgttgttatcttcttggacattattgaaaggtggggtgtgtgtgtcaatggaggagaggtggtagtaatgtacacttggattttgcttgagaaggcaggaataacagtgggatctctcaagtgggggggtgggggcaaaaaaagatgagtatgattgcttaacgttcgcttgtaagttgaaattgttctgaaattggtaagagaatcaagtgtttgctaatatcttaaggaacaagtctcatatttatttatttttattttgctagtttgagcaagtttaatgataatttgggttgggtgagtaacgtgagttgggttccctgatcaaattccgcatggatattgga

SEQ ID NO: 39698 - DNA, 448 bp, Glycine max
  unsure (1)..(448): unsure at all n locations
tgcatccggtgcttgttgtcagggtgatgtttccttctcaacagtcttgctcctatcttgatttcccatttgcatcgtaccaaagtcaccgctttggtaggatgagaagaaacttccatgtggagtaacatggaaggaggcaccggaatcgacaatccaagagctatcatcacaagcaatgtttaggatattaccttcaccaacgagatataacaaatcttcttttgaaactacggcagtagtattcttcttttctttcttctttgttgggctgacttggtctggcttaacgttaccgattgtttgatctctcttgaaggattgacattctattttcctgtggcccatccttccacagtagtagcatgtaattntttagcgtgatttggatctacctcgagaatgatgcgaatctcggctcttaatacgtccacgagtctcattcata

SEQ ID NO: 39699 - DNA, 290 bp, Glycine max
atttgcaaaagccaaatgagatagctgtatacctgcacagttgagatgaaatttaaaatcggcatcatccttgaggctgctcatatctctggaaaagtactccaaacagagctcaaacagattaggggagagaggatccccttgtctaagaccccgctgtcctttgaaacgaccatttatggatccattgactgccacactaaaggaagtagaagaaacacattccatgatccaagtactgaaatgatctgggaagccaatggacttaaacatccattccaaaaattccc

SEQ ID NO: 39700 - DNA, 336 bp, Glycine max
acgaaaggatttttcactttttttccttttcaacaaaagccttaaaggcactcatcctatagcgcggcagacgacagaacctattcgctgcttaaaatttaaaaacttcgagaataattatggactggtgtgacttaccattttctgagggaaaactcattaacaggcctcttgctttcaatggtgacgggtgtgattatggcaaacccgaatgcatacccatgtttaagacatatattgaaggatacgggaagccattactattgctccctacattcctacaatgggcctgggaaatgcttctataggaaaacctaaaagagaattggatgatga

SEQ ID NO: 39701 - DNA, 366 bp, Glycine max
agcttgttagtaggaaattttgttagacttatttcaccccccctcttaagttattaaggccacttatcctataagtggtgtcagagtagtattcttgtttaaaatttaaaaacttcaagaataattatggcctcatctgactttccattttctgagggaaattctattaataggcctcttgttttcaatggtgagggttatcattatggaaaacccgaatgcagatctttgtagaagacatatatttaaatatatgggaagccattaaaattggtcccttcattcctacaatggtagtgggaaatgcaactataaaaaaacctagaaaagaattggatgatgatgaaagaagaagggttcaataca

SEQ ID NO: 39702 - DNA, 365 bp, Glycine max
agcttgtcactaaattaaatattttattaattataatttaagagatactaaaaattaatacccaattaataatatattaaaaatatttaataaaattaagtaatataagataatatttatagcataattaattgctcgaccaaatcttcaatcttcaatactatattttaaaaattgagatgtgataataataattttattgtctgaagagattaatattaataatttgtgaaataaagattttattttagctataaagtttttggacatacatactatataataatacacataaagaaaaacagcttctgacaaacacttgaaccttatcacgcggcgaaacgaactctctctccttggccacc

SEQ ID NO: 39703 - DNA, 363 bp, Glycine max
cacctgcagctgcagcttctctccccacatttttctgagtctcggagtagcaaaggagatgcacttgccacaattactaacgactccaaattatcatgattcctcaatagttcagttatcaattctacaatccgctgattgattctccacaacttctgacctagattggcatctttggcaatccatggctgcaattccttctcggcctgacaagcaacaagtcaggggatgaaaaatgaaatattgtaaaaaaatctacaaaatggaagctgatttggaacacaggttagatgagctcttctgcataagatatttaaactttctatacattaaaagctatgtctcatgtgggaattaaatatg

SEQ ID NO: 39704 - DNA, 368 bp, Glycine max
agctttgagccaaaatcctgatttaccatttaccttgacccagggtgagaatgtcaatccttaccctcggaagcaaaaaagaaaagaaggaaaatttccaatcaaagagaaagcaaaaagaaaagaaggaaaatttccaatcaaagagaaagcaaaaagaaaagaaagaaaattcccaatcaaagaatggaagaaagtaaaaaaaggaagaagaagaaggaaagaaagctcctaatcaaggatcgaaagaaaacagaagaaatatgcagaaaggtctttggaccggataatatctgaacaatacagaattgccaccaaatgaacaaaaagaaggaaaggaaaccatgacctaaagtggttttctccct

SEQ ID NO: 39705 - DNA, 505 bp, Glycine max
  unsure (1)..(505): unsure at all n locations
aggaacgcggntgttgatgactcgttgacaggccgcgaanntaanaaagcccagcgtgncgtaaatctgtgctagacgaagacctttaagtttggctttcgacgccaagcgcgcgggggagatatgggtatgcacgacccgcaagcggaggatcgcagacaaatatgctgatggccatgcggaggaacaagcgataagggggcagatccactccttacaccgagaggcaccgatgtgcatggatcggtggggtcttacctggaacgggagggaggatctaccccgattgttgaccgaggccaaagggatggcgatcacctactgacgccccgaagagattcatgagctactcaggtattgacaacatatgacagactcgatggcccgactaattccagatcattacgagactggaatggagagtaagacctagactagctacaactgtgttcttgaactacaggagatgatccgagtctcactcatagacgcgtgcctcatgtgg

SEQ ID NO: 39706 - DNA, 368 bp, Glycine max
agcttacccccactattacccttatccacccatcaaacctatcaatgttaagaaaatgacatcggcagaaatgcacttgagaagagaaaggggcctatgctttacttgtgatgacaagttttcccctagccatcgttgtcctaataagcaatattttgttccacagtgggaagaagaggatgaacctgcattacaaccagatccaccagacgaggttgagacagctggtgaccctagtttgcaagatcatcatttgtcttataatgctttaaaaggctcatcaagtcttggaacaatgaagtttcaaggatcaataaatggattgggagtgcagattctactagataatgggagttcagataatttcc

SEQ ID NO: 39707 - DNA, 262 bp, Glycine max
  unsure (1)..(262): unsure at all n locations
aagcggactgcaggcacaccatattacaaacttaatattttgcaccaggcgagggagagaaatnatctacctatctgggcgaacactaagaagatattcatacaaactcgctcaacgcccaagtcatcatttgaatctctcttagatatacacttttgggccagagaagaaacatgcaggaatgcatacacgctagctataaaaactgctcaaaaccaccatgtaaatggctctactcggataacatggcttctatgggaac

SEQ ID NO: 39708 - DNA, 305 bp, Glycine max
  unsure (1)..(305): unsure at all n locations
agcttctaaagttttctggttttctaaacccngaaaacgtgggctatttatcttttcattctcttctccctttgccaaaaagaattcgccaaggactaaccgcctgaattctttttgtgtctctcttctcccttttccaaaagaacaaaggactaaccgcctgaattcttttgggtctcccttctcccttgtcgaagaattcaaaatgacacagtctgagaattcttttggatcttccctttccctaatacaaaagtgttcaaaggactaaccgcctgagaattcttttgtatccccattcacaa

SEQ ID NO: 39709 - DNA, 447 bp, Glycine max
ctcagcttaagccaggccagactcacgtgcatgcagttgcttcttcaagaaaaatgccaaactcactttgcaaatatgatttcaggcttaaatagatggccttgtccgtgctcatgcgcttagcgcagatctggatcgcttagcacgcttgtttcgcttagcggatgagctgaagcgatgcacttgatgatctgaagcggtgcacttagcgaacttgacaactcatcttcttctggattcttcctcatgcttagccattgaatgtcacacttagcgaatgatcgctaagccaacatattggcttagcgagaaggtgaaaataacacttttgccaatttgcctaattaacctgaaattgagaagaaatgattattaaacacacaaaacaaaagtattaattatctattacctatatttaacataaagtacttattatattattaaaca

SEQ ID NO: 39710 - DNA, 356 bp, Glycine max
  unsure (1)..(356): unsure at all n locations
agcttgctagagtatcttctatttagggngtttctttgagcttcaataaggtccttcaatggtgattttcagccatggagttgcagtggaagataaaggagaagaggtgagaggaggcgccatccaataaagaataagccatgaaaggagaagcttcaccaccaagagagtgccttggataagaagcttatagagaaaacttcaatggaggaagagaatgaggtatagagagagagaagaagtggcatggaaattgaaggagaagagggagagaagttgaactttgaagtgtgtctcaaaagtttctcattcattaaagttatgacaagtgttacacatgtttctacttataacct

SEQ ID NO: 39711 - DNA, 382 bp, Glycine max
  unsure (1)..(382): unsure at all n locations
ntgtggccatgtaaacactaaggcttanggtttgtttttttttcattcaaatcaacccagtgttcccaaacaatgctcttttatcaagttacgcacacatccgagtccatttatgccttcggaaaaatctttcattgcattcacccttcaggaacacccacatttttcaaaaatctttctatgtcctgacctgtgaattttccaaagaaaactagcggtcattttctttcaaaagtgtgttggcttttagtttgtttttttatttttttttagctttttctttcaatcaatttctttcaagcaaatttcttttctctttttttttttgttagaaaaggtttgtacccagggcaaagttggtaactgagattacactttatct

SEQ ID NO: 39712 - DNA, 357 bp, Glycine max
agcttgaaagatttctcaagatccggtggttgcttagggactggatgtaggcacgggttgttgccgaaccagtataaaattcttgtgtttttcttcttcttccatacactttttaatttccgttgtgtactttacttttatgctttacttttgtttaagttacataacttagtagtaaagcctaattgaatctagtaacattaagaaggatcagttttaattagtcaaggttacttaataattaattcaacccccctattctcaattactccaaggccacttgatccaacacattgtaccctgagcaactgccagttagttcttcttccttttcttttcttttcttaagagttgaat

SEQ ID NO: 39713 - DNA, 453 bp, Glycine max
  unsure (1)..(453): unsure at all n locations
tccattatattgggccatntattcatgacatgagttgtatgaaattcaatataaattgacattcatttctttatttaaagaaaaacatttggctggtagaagaaaaaccttgtgtttggtttggtaggcaaaaagcaatattgctgcttcagtgtgtcaacaatggaatacttagacgatgcttcaatctaaattgaataaaacaaatgttgagaaacatcataatagaataatttatatataaataataatactcccctcccttgaaatatgcttaaagtatatttccttcgcttctaattttaaaattacacactcctccgttaggaggtgaaatgttatgtgctaacctcaaagcaacggtgagcaactacgaatgggcctctcaaggacatttgttccttttgtgagacttccggtgtcaacaaaaacctaatttgaacaccttaatta

SEQ ID NO: 39714 - DNA, 263 bp, Glycine max
agctttaaacaatcaataaattcccctcacctatctatatctctctgttagttcctcgtgccgttgttctgagatctcttaggttcacgtcctttggtccaaacgcagagctcttgatcgaggtcgtacccgaatcaaataaacatgaaaatgcagtaactaggaagtgatcctaggtcgtttcccaacgagcaatgaaaaaccaagcattcataatatacttgcagtaacagtaacgattgggggggggggtttgttatttg

SEQ ID NO: 39715 - DNA, 412 bp, Glycine max
tgtctcagcgtttatgcgagacgaagaccaacaggttatctatcatcgccaagtaccaagaagagttaggtctagccacgacccacgagcataggatcgcagacgagtatgctcaagtatatgcggaaaaagaggctagaggaagggtgatcgactctttacaccaagaggcaaccatgtggatggatcggtttgctcttaccttgaacgggagtcaagaacttccccgcttgttagccgaggccaaggtgatggcgaacacctactccgcccccgaagagattcatgggcttctcagctattgtcagcatatgatagacttaatggcccacataattacaaatcgttaggaaacttgtatggtctctcagaccttgactagatacaactttctttttgaaataaaatgagt

SEQ ID NO: 39716 - DNA, 358 bp, Glycine max
agctttgaatgctctattcaatttagttgacaagaacatcttcagactgatcaacacttgcacagtggccaaagatgcatgggagatcctgaaaatcactcatgaaggaacctccaaagtaaagatgtccagattgcaactcctggctacaaaattcgaaaatctgaagatgaaggaggaagagtgtattcatgacttccacatgaacattcttgaaattgccaatgcttgcactgccttgggagagaggataacagatgaaaagctggtgagaaagatcctcagatccttgcctaagagatttgacatgaaagtcactgcaatagaggaggcccaagacatttgcaacatgagagta

SEQ ID NO: 39717 - DNA, 452 bp, Glycine max
  unsure (1)..(452): unsure at all n locations
tcganaggctgtctcggaggtgtcgaaggatatttttgttactacaatgagttgaagttggagaagaaacttggtgctattgaagaggtggagcaagctgaatgccaatctttatttaggttggaaaaattcttacattgaatatggtacatctttatttaggttggaaatttaatccagatagtacctatatctttgttattttaactttgatacattatcatctggaatttgaattgaccctaacatgctaaaattttttagggttctagttgctttagttttaagttggattatccttcctttttcacaaatgatttanaggggttaagtcatgatatctgactagaagtcttacaagtagtgatgcaaactagttgcttgcttggtgattattatatttataggttnttcatgaactaaggggggttgatattatttatntattcatc

SEQ ID NO: 39718 - DNA, 340 bp, Glycine max
  unsure (1)..(340): unsure at all n locations
attttgccnactttgngcgtttttatggannctntttccttataagaatggacgcggcaaaaaattaaactctagaccacttggacaaagaggctctgataacatattatgaactaagtgaaatgatagtaacactctattattggctgaaatttgttgaaaatcacaattctgtaagtctcgctccctgcctaataaacttcactcgtgacatgttagattttaataaatggtaatcaataatagagaatatgttaaaaagagtgtcttagagaatgtgctcctagcacttatctatgaactaattatcccccaaaacgtaaactattagacacagata

SEQ ID NO: 39719 - DNA, 406 bp, Glycine max
tggccacaattgaaggacgagcattatccctttgttctataaagccatctcaaatctcaattccaataatccgttagcacttttttcagtggctctggtgctgccattgcgttccaccaaccgccactgccacacatacacttcactacagacaaataaatttcacactcttttgtctgacacgtataacattctgaactaaaactacttggtttttcccacaccgaatactcttcttcaatcaagcgaaggtggtctcacttgactcgattgcaagtgatccacgacacactgttcgcttcacaaaagcttcgaatccaattcctcaggtaacaaacatctctcaactgcactcgatctatatgaatacagcacccaatgacccacttgcagtaacatactaaaa

SEQ ID NO: 39720 - DNA, 350 bp, Glycine max
agcttgcttcctttaataatttttgaatatttggagaagcattttcttgtgtttgtaagcccacagtggttctcagcaaagagttgaaggtaattttatccttgaaaatgcaaagtaatgcaactaaagatcgttatatatatgttcctatatcctttgcataatcagatgaaacctagttcagttgccgaatttgttcaaatttggaaatactcctttcctatgacaaaacttattgaagcctagatgtaatttgtatttgagaagaaaataggtccacaaaattttcatttgaatttgcattttgccgagagtctgagtacttgagtagacattctagaacaggtgtg

SEQ ID NO: 39721 - DNA, 407 bp, Glycine max
  unsure (1)..(407): unsure at all n locations
tgttcaacanatcaaatccagaatcatattgttcatgatatccagtgaatgatgtggcaggaaactttttacgcaggaggttgtacctgaaaggaacattccgttgttaatacaaaatagaaaatttgttcaacagtacaagtcaccaagtgaggccagatagtcagaccagaaccacccaaagttggaaaagcctgggaaaacagtggcaaaacataagcacaatataatcaaacagtaactttttaaataaaggaaatcgtaagcacttactggtgtttgacaaaattgaccttgactccaggtaatttggagaacccaggccaaattgtttcatttggtgtgccaagaatccggaaaatctacaagtagaataacaggtcaatagtgtaaaacaaccaccaagt

SEQ ID NO: 39722 - DNA, 363 bp, Glycine max
agcttcaaggtatttgcatgattcaatagcttttattggatgtgcatttttttagttaggataggttcaacatcatgattggtaatgcaatttccatcttgagtttgttattgattttgtgcaagtcataaagattttgtatcaagtttagcttttagctatgatggacaatttcttgcatcagggtgcttccatggaattgttcaagtctgagatgcatctggaaatctgaaaaaagtatttgaaggtcttaaagggggcattgaggtgggattgttaatattcttgcttttttgctttaagtagttactaaattagttgccataaaattttctcaatggcttaggtggcatccaagacaag

SEQ ID NO: 39723 - DNA, 448 bp, Glycine max
  unsure (1)..(448): unsure at all n locations
cgagaatcctccntgaatatatccttatctctatttangtccttataangaacnnnangaggggggggcttcaatgggaatacattggcctgtttcatgagcctcaccacagatggtacaacctgtaacctacgaaacagaagaatgtgtaggcttaccaatagacagtttagtttgcaacttaccaagtggttctgttaaaatctcaagttgcttacaagcaacttattctgtgccaataaatgtcatgtgatgatagctctaacaagcttttctttgtgggtagatgaactctatcgcgcagaatggcatgatcagtgactgaacatatttcaattagctcgattgcctcttcaggggtcttcaactttatatgtccgcctactgaagcatctagcaattgcttggtgtgtggtctcagcccaatctataacatattcaattgaat

SEQ ID NO: 39724 - DNA, 364 bp, Glycine max
  unsure (1)..(364): unsure at all n locations
agctttgaatgctctattcaatttagnngtttataatatcttcagactgatcaacacatgtacagtggccaaggatgcttgggagatcctgaaaaccactcatgaaggaacctccaaagtgaagatgtccagattgcaactattggccacaaaatttgaaaatctgaagatgaaggaggaagaatgtattcatgacttccacatgaacattcttgaaattgccaatgcttgcactgccttgggagagaggatgacagatgaaaagctggtgagaaagatcctcagatccttgcctaagagatttgacatgaaagtcactgcaatagaggaggcccaagacatttgcaacatgagagtagatgaa

SEQ ID NO: 39725 - DNA, 360 bp, Glycine max
agcttctatataagctgaacctttttatcttgttacacattttgagttttattcagaaaattagagtttatctcttttatcttagtgagagtgattctcctaaattcttgagtgattcaagaacaccctggctgtatcaaaggactttcacaacctttgtgtgttgccctcgctggaaagagtgattctttccttccaatcatctccacccttgttctttcaaaccacaattccagaaaatccacctctgcccaaaattatctcgtgaaaggtctcgttttgaaattcaatttatgctcaagaatcacttaatttgagtgtgtcaaatgggaattatggtcaccagataattttggccga

SEQ ID NO: 39726 - DNA, 382 bp, Glycine max
agaccctaatcgactgagctgcagctttgagcacttggtttgtaatttacaacgagatgatgcgctccatgagaggttggatcaaatggagaatagagatcataatgaagaagaaaggaggagaagagggaatgatggtattcctagacaaaaccgaattgatggtattaaactcaacattcctccatttaaaggaaagaatgatccggaggcctacttggagtgggagatgaaaatagagcatgttttctcatgcaacaactatgaggaggaccaaaaggtgaagcttgccgccacggagttttccgactatgctcttgtgtggtggaacaagctacaaaaggagagagcatgaaatgaagaggcattggttgatacatgg

SEQ ID NO: 39727 - DNA, 273 bp, Glycine max
tatccatagaagccagggcggcactcacccaatactacgaccagcctctgagatgcttcatgttcagagactcccaattaggaccaaccatcgaagaatccgaggaaattctaggatgtcctctcgggggaagaaaaccatatctttcctccgggtgactcccctctttgagcagaattgcaactatggtcaaggattcaacaagaggtttggaccgcaaaaaacagacacggaacgacatagcgggcctaccacggaggctcctaaaagaca

SEQ ID NO: 39728 - DNA, 523 bp, Glycine max
  unsure (1)..(523): unsure at all n locations
aaaaacggangtttgatgagtgcatagacngncacgcgananannanacaagctcgcctganagagatctacgatggagaaagcggctttaggtanctattctcccncccgaagatgacgggcaccgctttaggagcgctgaacaccaacaccgctgagaggccatcaagggatggtcattactctgggagcgacgcgtccagctcacggacgattattatacgcggaaccataacgagaataagtcctcggcggtgggcaatactagctcacccccatggtcaagttggaaccagacatgaccctacaagcttatgccattgcatggtcatcatagcttagcttgcaagatagaagatcctgcctgatcggtcaatgaatcccgggggatgcagatgctatcgggccgctactgcgaattcctttagagccggactagggcatgagtgcgagtattgctataggaggaaccggcccgacgggtcgcgagagaacgtcatcactcattgctttgatacggccn

SEQ ID NO: 39729 - DNA, 358 bp, Glycine max
  unsure (1)..(358): unsure at all n locations
agctttgagtgcttgcatctttaatcacgaaaaaattacttttctcagataaaagaagattaaaaaaagtggtttgaataaaaaggtttgtcttctgtagttaaatagaaaaacctgttgatgcaaaacaaaagaagtggccaacaaagaagaagaacatggctaattaataaactaaactcacaaaacacataatataatatccaaaataatatggcacagttctacaaatttaccttgagactcatcttgaccatctttactttgttttggtgccactccaaaatcagctagaagagcctcaagctctgcaagntccttcttcttcctttcctttttagagagctgcctttctgtc

SEQ ID NO: 39730 - DNA, 436 bp, Glycine max
  unsure (1)..(436): unsure at all n locations
tatcatccttgtcttcatccaaaanatcctcccggtcattgtcagccaccagaagtgcaactaaccaaaagagggatgaatcaagggataaaaaggcaccacctccaaagagaccagttttagcagtggggcatgtatatgtgagatcaagatgcacattgcgtttaaggtgaaggtgttcagtgattgttggccataacagcatagttgcagctagtccagttgaaaacctaagtagatacataattatatgaagaaaattcattcagtgggaactacaagatatacagattaaggaaatgtctatagcagaaaattaataatataatataaattggtaggtagggtgcacaagaatacaaagattcaagagtacagtcaatccagtacacaatcttttatatcatggctgccaggtgcttgatataaagtacta

SEQ ID NO: 39731 - DNA, 356 bp, Glycine max
  unsure (1)..(356): unsure at all n locations
agctnnagaaatttcatggatttttnatcngttcttccggcaaaagggangatcggggaacatgctcgatgaggaagcttcgatacttgctttggactcttgaaagaagattgagaaagccaaagttggtggaagatttctaaaagctacaattttggtcgatgtatttccggcatgtttatatatatttttcagactttattttcatttcttttgatccaaatgtattatcttttccaagttaaaagttttttcaacacctttcaacttgcgggatattagagatatatattagtttgattacttaccaattatttattagcttagttagttacaagtttagttatataagttat

SEQ ID NO: 39732 - DNA, 402 bp, Glycine max
  unsure (1)..(402): unsure at all n locations
tgacaagagttacatgccgagcaaagtttccattcttgcttgtgatagttntcacaacttgaaggtaaatttttattttattggtttgggtttgattgggatgattatgcttaattatttgatgttgactttgggaacatttttaggagattaagaccgtggaactcatgaagccaactgggtgggtatatctatccttgtctggagctgatcctaggtaagtacagtgttctttctgtatccagtttttgttggtttaagtttgtatccagtttttgttgtttggaggcgtggatttttgttgctttgataggaggtgaaggacaataattgtgagattgttgtccctattcgtgttaacatgttagacaatgaatatacatcacggattagattcttatt

SEQ ID NO: 39733 - DNA, 356 bp, Glycine max
agcttgacaaaattctgagatttcttgccagagatttttcccttctgttttctgcaaaacatgaagtggtgtcaatacttgtaatatcacaatgctctatttgtaaataccacaccctccttttatgtttcatatttcaaagaaaaggaatgttaataatgttaggaagtcccacatgtctagttcttgggatacaacttatatatctcttggataacttcacttagtgtcaattggttttaagttgagatctaacatagtatcaaagtctatagcccatcttagttcttgcctattccagaggcaggcctctgtgtaggggtgttaggaagtcccactcagtgtcattggtttta

SEQ ID NO: 39734 - DNA, 464 bp, Glycine max
  unsure (1)..(464): unsure at all n locations
ctaaaaactcagctagaagctcgtgttgagctctgggtgtgtaatcctatgtgaataagtttttcaaggccataacctttagtatgcaaaagccacaatgaccgtatcctaaaatctagtccaaatacctaactacatcaaagcaatattagggatgatagcatggcgggttgggaacaagtcaggctctccccgtccctcaaaaaacattaatttacatacttatactctttcttatttctatttgaaattattccgtaatatctccggattcgttctctaaaacaactaaaatacttatacttgttcttttttctatttgattntagaataaaataattttgtaaaatattttaaattatatatatatacttttaagattaagaaagtaaactntccacaaaagtaagaatgatacgagtttgcctataaaagagatgatnntaaaatntaatatcaatcat

SEQ ID NO: 39735 - DNA, 324 bp, Glycine max
cttcatccgactttgcattaaacttgcccaagttgtcttttccattatttaacataaagcatttacatccaaaaatatgaagatgggaaatatttggttttctctccttatatagttcatatggtgttttctttaaaataggtttaattaatgctttattcattttataacatgtagtattaacagcctcgacccaaaagtatttaagaagatttgtatcattaagcatgggtcttgctaattcttctaatgatctatttttcctttcaactactccattttgttgaggggttctaggtacagaaaaattaggtctattccatg

SEQ ID NO: 39736 - DNA, 449 bp, Glycine max
  unsure (1)..(449): unsure at all n locations
tgagttnnntttaaaatcatatttagctaaatggtgataccatgaactttaaaaaaaacctattaagtctgatgaaccgacctgtttagcaataatattttatattaaagatattattattaatatgatatatagtataattattatatttaaattataaaattattttagtagtttgacaattttaattagtgtttgaaatatcttaattcgtataaatataaatgtgtagcaaaaatatacattcttttcttttggtgagacttaaaagactttagtaatatgtcacccacaatgttttcccatattttattgtttaaaattgtcttattatttttaataaaaatatttggttntgcttaaaagataatactttnttacactttttaatatgaaacaaacctttaaatggattaattggcctaaccaacttatacaaaagctaagtc

SEQ ID NO: 39737 - DNA, 300 bp, Glycine max
agcttgagtctgttccccatttatttttcatttgtgaaaaaattcaacctctgtggtgggaattcctatcctgggtgaaggaacacagaaccatccattgtagaccaatggataattttgtccaacatgctcctactgtaggaacacaggctgttggtagaagatggaaaatctggtggctggcagccacaaactcaatctggaaagtcaggaatgatataatttttcaaaatcaatcctttgatatctctagatggtagacaccactcttttccttatgtggacctggctaaagggggt

SEQ ID NO: 39738 - DNA, 409 bp, Glycine max
taatagactttttcacaagtccaaccttagccttttatctaaatatgcttttttaaaagtcaaagtctagtcttttaattaaatgagccagactagaccaggttttaaataggtcagaccatagattcctatcgggtggccaaacctattctcacccctaataaactataagttaggagttgaaaaattaaaaacttataagctagtcaattttattaaaagtatttggtaaaactagctgataaatgtcaaatgacataaaatgacatgtttaatatttatgtttttaataacttaccatcttaaaaaataagacatatttttgcttttacaaattgaatcgataaaataaaatcaagcaaggaaacaaattaggacatataatttaaaaaaaaacaaaaacaattca

SEQ ID NO: 39739 - DNA, 310 bp, Glycine max
  unsure (1)..(310): unsure at all n locations
ttctttgcagatttggtcttctctctnngaaaggatcgagggggncagaaaaaaggcaaanttgatcatcctactacgacgactgagaaaactggggcaaataaagagggtgaggatgagggagaaacccatgctgtgactgccattcctgtacggccaagtttcccaccaaacccaacaatgtcattactcattcaataacaaacctcctccttacccaccacccagttatccacaaaggccatccctaaatcaaccacaaagcctatctatcgcactttcaatgacgaacaccacctttggcacaaac

SEQ ID NO: 39740 - DNA, 342 bp, Glycine max
  unsure (1)..(342): unsure at all n locations
tctcgatatattatgcacatgaatcggacctcnattgacaagnnanggccannngaatnnttcgagagcttccgctgctcaatttcgagcgtctcgatatattatactcctgaatcggacctccgagtgaaaagttaagaccatttgaatttctcgagagcttccgttgttcaattttgagcgtctcgatatattatgcgcctgagtcggacctccgagtggcaagttatgaacatttgaatttctcgagagcttccgttgcttcaattcgaccgtttcgatatattatactcctgaatcggacctccgagtgaaaagttatgaccatttgaatttctcgag

SEQ ID NO: 39741 - DNA, 273 bp, Glycine max
atcttgcagtgttctacccatttggacctgaacccatatgcggttgatagatgcctcctaacgaaacccgagccaccatcgaagtggaaccaaacaagcgtggctccactggaagagattccacataagcagcgcctacaatggatagcgctgggaaagacattgaccacgacaactctgctacatcaacatatggcgtataagacgagaaaaataccagtatgcgctcctccgctaacactatagaccagctgccctaccaccacgaactaa

SEQ ID NO: 39742 - DNA, 367 bp, Glycine max
agcttttctgtattagtagagtttacaatttttgctactttttttgtacttttcttaggattctatagagtggtcctctaatctggcagatgcctttatgtaattagaaagggaatgtactggctaagacctcttccaagaggtgcagcacatatgtacttaagtcaggggttgtagctggtacttaattcatcttgtgtaccggctatgttcaaaatatatttctactcacagtacctctggtactctttcatctatctaatacatatctatttttgctgagcaaaaaaaattatctttgctgataaaaaaaaaaacaaaaataagtacactgcccctaaaataccaacattatgctcactactgg

SEQ ID NO: 39743 - DNA, 427 bp, Glycine max
  unsure (1)..(427): unsure at all n locations
agcatgcgaggctagttgccttggctggctttgatttttatataatccagataatgggggttggaatctctgaaggctctgtttgctgaggaagtgatgtanaaaaatgttgaagacgccaccatgatggaagtagatagtgagtttatgcttgaggatgtacttttggagtttgtgaaggctcaattagaagatgagcagataaaggttgagcttgagaagacagaagggcaatctacaatagagcatgaagttgaactcatgtctttggatgttgcggaaaagcaagttgagctgcaatatggaattgttgatgacaacatgaacccttataagagggaaacatnggaagagcaatgctttagttcttcatttaaacatctcttatagaagaagaacaatgtctgaagctggcgaaacaaatatt

SEQ ID NO: 39744 - DNA, 365 bp, Glycine max
agcttcctcaattcttgtggatttatgctctttagacggctgcgtatatattaaatcgagttccaaccaaggctgtctcaaggacaccttttgagttattcaagggttggaaaccaagtttgtgacatatacgcgtttggggatgcccgtctgaagtaagaatttataatccacaagagaagaaactagaccctaagactattactgggtatttcattggatatgctgaaaggtctaaagggtataggttctattgtccatcccacaacactaggattatggaatcaaggaatacaaagtttcttgaaaatgacttgattagtgggagtgatcaatttcagaacatttcttctgaaagggatcac

SEQ ID NO: 39745 - DNA, 333 bp, Glycine max
tctgcaacacttgcccaactaagcttagtgaagtggttgtgagggtttatttccaacattcacctcttctatgcacactgtcaacataatctcaatatttttatcataccatcttgctttctttcttttcacaggaacttgattgagagacatttctcaaacttaatgaagcaaacaaaagcataaccctaatccataacaattcaaaatttaatgagaagaaaaagaaattaatgacaaattggttaacccgtgatgctaataaaggaagaagaagagatgctgaaggatgatctgaagagacattgaatatggatgagagactgacgaaca

SEQ ID NO: 39746 - DNA, 362 bp, Glycine max
  unsure (1)..(362): unsure at all n locations
agcttgtagatatggccattgtaattngttcagacccttctgctcttcagatgcaatgtgagtatgagttctccatttatggaaggaattcattctcttcactgttcttttttctctccctctttttgtcttttagttatatttgaactgttggatggagaccataggttacagccttacagggttggttgttgaaagttgaaactgtgtcggatgggtgggaaaggaattgttgtcttcaagtgtattatcctattcacatggttaaagtttctttacaagaataactagactataactaatttgataacaggttgtgaaagcagattatctcagcggtaggacagctcttcactttgcag

SEQ ID NO: 39747 - DNA, 339 bp, Glycine max
ctttctatttttgcgtagactctcactaaaaggattacaccagctatgaaatatggcaaccaactcagactcctttcttatattctctctttttccatggacgaaggatatgatctcacgccatgatattatcctatatgttacaatatgcaacttatcttttcctaagcttgtagggacaagacataatacgttaacctgataaaagggaggtcaatttttggcttttaaggagtgcgcttgattcttgtgataattaacatttacagtgaacttggatataagctcttaggaaagtggtattataatatcatttttctttataaattggaagcatgc

SEQ ID NO: 39748 - DNA, 364 bp, Glycine max
  unsure (1)..(364): unsure at all n locations
agctttaatatgttgggactcttaatagcttattaacncattagggacccagaaataaaattcgatcatttattgaagatcttaaacatatttaagcatttttatgtatatattggacaagatttagtattcatgtgatgctaaacaactttgtttgtagtcctttatatatttaattagtttaatttctatacacggctagcgtattaacataaatcattgttagtgtcactcttaagataattattgtgaaaagaaacaaacttacagtaatttgtgtaatttgtgattgaatgacaatataaaaatctcttaataattaaattgttggcgtatacagagtctactcttatttattttactt

SEQ ID NO: 39749 - DNA, 345 bp, Glycine max
agcttcccagttatggaaagctttttcctctgttggatcttccttggaggtatttgatgtaaatgtttttttatctatttaatgatgttttatgacttcactgtgctatcaaaacttcattctaccatgccgtttccttgatcacctaaatgcatgggtttttaagaacattccaccatggaaaccggtctgaatcttaaaacttgagatgcatcattttatctaagccgactagagcccaacttaacgagagttgcaggtttttttttatctgcataactcgcttaacactcttatccaagcgctctaccccacctctgtgtgttaaaaaaaaaaattagtttt

SEQ ID NO: 39750 - DNA, 407 bp, Glycine max
ggaagtgtatactggtgaaacttcctgttattaatacttgaccacagagtggtacctggagatatgtcgcggtggtcacgagaccttgaggacatcaggtggggtgctattgcccaaaaccaagcttgaccaatcccgaccccacccgtgcatagtcagtcagtgagaacctatgatgtacctaatcaggcgagctcctggcagactacagatataaggaactgtgaccactaagcaatgaggcttgtgtggtggctggccacctgtgaatcttgtgtgatatatataacttacccttctggtaatcgattacctatggtggcgtttcgattacaaggcttaaaaatgaagagaggaggctaacatggtctctggtaatcgattaccaaagggtgtaatcgattacc

SEQ ID NO: 39751 - DNA, 356 bp, Glycine max
agcttgcccagttttgagtctctgaggaaatgcttaccacctcaaaagactggaaagcggtttctaatgactcctctgcggcctccacataaggcatagaggatgggcagctcaccaagatgtcttcttcgcctgatacgatgaccagatgcccttccactacgaatttcaacttttggtggagtgtagagggaacaacccccactgagtggatccatgggcaccccaacagacagctgtagggggggttgatatccatttttggaaggtgacttgacaggtgtgagggcctatctgtactgggagatcgacctctcccctaacctctcggcgggtgccgtcgaaggcacgaacca

SEQ ID NO: 39752 - DNA, 400 bp, Glycine max
  unsure (1)..(400): unsure at all n locations
tctactgatgtggcagggcgggaccccttcttactttctacccaattgcgaactntggcctttgcccttcctttccgcgacacttttccttatgtctgcttgcgtgggtttatagcctaatccaaacttcccgtggtttcctctggtgcttaccagactggttctgtcgccgctgttcttgcctaaacccatttcgggctcgtagccataccccaactttacccgggccaccatcattgctatatcggataggcaagactacccagagagggaatctacggaggcaatgcttactacctcaaaggattggaaggccgtttccaatgactcctccgcggcttccacatatggcatagaggacaagcaacttaccaagatgtcctcctcccccgatccaatg

SEQ ID NO: 39753 - DNA, 357 bp, Glycine max
  unsure (1)..(357): unsure at all n locations
agcttgcttactgtcttcgtttctcaagaacttctcggntttcctgagtagcttatagaaaggcttcgttttttctacgagtttcgaaaggaacctggacaaaaacgcccatctaccattcaacttttgaacttctctgatgttgttaggactctgcatttccaatattgccgtacacttgtttgggttggcttcgatcccttggtgggtgatcatgaaccccaagaatttttcactgccgaccccaaaggtgcattttcagggttgaggcatatgtcatatttacgggtttctccaaatacttccttcaagtctgctacatgttgggccacactataagacttgataaccatgtcg

SEQ ID NO: 39754 - DNA, 453 bp, Glycine max
  unsure (1)..(453): unsure at all n locations
tattgaaagaaattaatttataagaaatagttgtgttttatattattataataaatttcattaaaaaaatattttatcttatttgtattagtatattttgaaatattatgttgatggtattaaatgaatcaattttactattttcaaacatttgataatattgtattaactgtattggatatttggatgaatcatgatataaaataatagttataaaaaaaattaaataggtaaccagatggactaaaccaaaccaaaccaaaccgttcactaataggttgggttgagtttaaaaaaaaattgtaaaagttaaaccaaatcaaacctatcaaatntaattggattgagttttaaatttaatcaaaactgatctaaaccagcacacgaacacccctaaagtaaagtggaatccttacnaaaaaatannagcatactaaagtatcaaaatactta

SEQ ID NO: 39755 - DNA, 355 bp, Glycine max
agcttctcccctttttttattttagggggagaagcgaagagaaaaagggttcagccccttacacacttctctctctttcgaatttgcttggaaaaattgtttccgtgaagaaaatccaagccgaggcgcttccgaaacgtttccgtgaggaatctcgtgaaggtttcgaccgttcttcgacgttcttcattcgttcttcatcattcttcgatcttcaacgggtaagtacctcgaaccaagcttttcgatccattctatgtacccgtggtggaccacattgtgtctcgcgtatatttattctcgttgcatttactttttatacccccttttgacgtgcttaagccattttatttaa

SEQ ID NO: 39756 - DNA, 388 bp, Glycine max
  unsure (1)..(388): unsure at all n locations
nntatggattggtcttcgtcggtgaaaggatcaattgggtctggaaagaggcaaatctaatcatcctgctttgatgaatgtgaaaactggggcaaatgaagagggtgataatgaaggagaaacccatgttgcgactaccgttcctacatggaaaatcccccaccagctcaacatcattactcagccaatatcaactcttctcattacccaccacccagtcatccacaaaggccatccccaaatcatccacaaagtttgttggtcgcacatccaatgccaagcgcaaaccaaaacaccaaccaagaaatgaattttgcagcgaagaagcctgtagaattcaccccaattctggtgtcctatgctaacttngctccatatctacttgata

SEQ ID NO: 39757 - DNA, 356 bp, Glycine max
  unsure (1)..(356): unsure at all n locations
agcttgcatatttataatgtgttcgnnggatctttaaatgcacatactttttcatgctaaaaaaccattcttcattgttggcgtgttgactactacaacaacaaactacttccttttgcatcaaagcaagtatgtgcaacaaagctttttttttaatggcgattgaagaatttcaaagcttgtcttcatttattcttcatagtatttgacagatcttaggagaatatatccgttaaatagatctcagacatagaatattaaataaagtcttaaatgtcatctttaatgtcgaatcagatcatgattccatcttactatcatctgaaacatcagacactaacatcacaaaatatgtt

SEQ ID NO: 39758 - DNA, 438 bp, Glycine max
tattatatcatttataatctgttgacgatataatcttaacggtttggaatagcgcgacttaaatatcttatccttcgacacattgtttcggctggtttatttcgtctaccactatacattactaacacaaagaaaaattagtttattttttactgatattttaatattattaattgatttttattttataataattaatagtttatcaaatatcataattatttaatatggataatacatatttatgaactttattttaatttaaaaagtcagaaaacaaaaaaaaaattatgaacatttttttaaagatgtgcgcgcgcattgtcacggacaaaatgtccaagcatatagatttaggtataaggaagagtaaagactgtaaaggtagggttgaaaatgcacaactttcacaggtagctgcaaaacaaaataaaagtg

SEQ ID NO: 39759 - DNA, 345 bp, Glycine max
  unsure (1)..(345): unsure at all n locations
agtttcagaccttttcaacttttaatctaggnatccaaaacccctcaatttaatggattttcaaggcttgagaagtgaaaatgagaatggggtaaatttatagcaaactctcacctcacacaagtctataccatcaataaacttgctcaaactggttttacgcctaaaattctgccgaatcaaaatttgactcttcaacacccaattttaccctagaaatggctcttgccttcactttggtcatttgtttttctctcttacacagcccaaactttctcataagtcctaaatgacatttcaagctaggattaactccctttaacctccaaataccactaaattcag

SEQ ID NO: 39760 - DNA, 384 bp, Glycine max
  unsure (1)..(384): unsure at all n locations
tgtctcagcgtttatgcgagacggagaccattngttatctatcatcgccaagtaccaagaagagttatgtctagccgcggcccacgagcatangattgcggacgaatatgcccaagtatacgcggaaaaagaggctagaggaagggtgatcgactctttacaccaagaggcaaccatgtggatggatcggtttgctcttaccttgaacgggagtcaagaacttccccgattgttagccaaggccaaggcgatggcagacacctactccgcccccgaagagattcatgggcttctcggctattgtcagcatatgatagacttaatggcccacataattagaaatcgttaggaaacttgtatggtctctcagaccttgactagata

SEQ ID NO: 39761 - DNA, 343 bp, Glycine max
  unsure (1)..(343): unsure at all n locations
atcttcgnccttatatcctttttgatggacaaggctgaacttaaacaacattatcatcacaacataataagaaaactaaaaccccgcaatccatcactggtaatgcagttatttagccctacttttatcatgttctaaggcaacagtacatttcccaatgctaaagtcaccttacagtacacacaagtggatgattaggccaagagcatgcagtaattaagcattgaaagaagcattgaacacacaaaacacaattaattcgatatgaaaagtaattgcattaactattcattagaaatccccaactagggttgttagccagccatacaaggaaccctaatgc

SEQ ID NO: 39762 - DNA, 298 bp, Glycine max
  unsure (1)..(298): unsure at all n locations
ttctatgtaccgcgggaggtttcctactgtttgngcatttgtattctcggggtcattcgctctctgtacccacttttgacgtgcttcagtcatttatttaagtcatttctcacctaatctaaaaataaaataaatttccaccgattatgtgaattgtatcatgcgctaatttcggataaaatgaattccgaccgtttggtcatgccgtaaccacgttggagatcaaaaaagaggcaaaataataatatactaataaaaaaatgccttctagtaaaataaagcgaataaatcaatcgga

SEQ ID NO: 39763 - DNA, 368 bp, Glycine max
agcttgtccacacaaacctgatcttatcaggtttattaattcttataaattaaggctcaggagagattgatcattttatggtgtggctgcaaataattaaccattcaaaagtttttaaaataaactaattatgcatgttcaatcaaaattttgttgtctttcataaaaaaaaaatgttaatgggcaaacataacggtatacacaaggggacaaccatttaagcttgatgtcaagcaaaacatcatggcttcaaccccacgatgggtaatgggtgcaacccgctgtctcaagtctctacaaacatttgcacagaagttgttcaattcattgcatttataattgggataattgtatcttttttttttaat

SEQ ID NO: 39764 - DNA, 367 bp, Glycine max
agcttataagaacaaaattgcttcaatcatttttaaatatgcatgtgaattaggacgcattaacaaaaatcaagccaaggctattgtgcaagcaatcaatggggcaaaacacaccaaatgattatgatgatggatggctcaaattctcacaaaggtaaactcatcactttcaaaactatcatgacatgtagagaagaatcaaggatttcaagtcacaaaatgtcaagaacttttattttcaaaacaattacccatttcttgaacatcctataattcaaagaaaaacatgcaaagtcgtacgtgcacacaaaattgagccaaaatattaaactaaaaatccgacaaaactaacaacattaacaaatta

SEQ ID NO: 39765 - DNA, 367 bp, Glycine max
agcttctcaaggaagttttcttaagaaagcttctcaagaaagttttcttaagaaagcttctcaaggaagctacctagtctataaatagaagcatgtgtaacacttgttgtaactttgatgaatgaaagtcttatgagatacacttcaaagttccacttctttccctcttttattccttcaatttcgtgctccccccttctctctttcttttcctccattaaagcatcctcttcaagcttcttatccaaggcaattcttggtggtgaagctccttcttccttggcttattccctagtggatggtgcctcccctatcctcttctcctttgcctttcgctgcatctccgtggtgaaaaatcaccattgaa

SEQ ID NO: 39766 - DNA, 287 bp, Glycine max
acacgctacgtgttgtttgctgtcatattgccatgcatatcttctcaattccatgtttgtgtgcgtctctactatgttgttatttgatggagttgtcatgctcgtacgcctagtatatttctattctgtgctatcaaccgcgagcttgcacatatgtatatttgtatggtgctgtcactcatgcattgtgatgatctcgacattttgtcacatgaagtcggaatgcccgcaccgccttcttaaatgcatacatgaggcactggggcgatgactgcacatgaaccatg

SEQ ID NO: 39767 - DNA, 347 bp, Glycine max
agcttggatttcctttgctcctgaaacctctcctttctcatgtgaacccaaaaccaatctttgggttggaaaacaacctttttgcgccccttgtttgcatgtttagcatagctctcattcctcttttcaatttgggccttgactctttcatggagctttttcacatagtccactttggcttgtccttccttatgctttaaaactgaaatattaggctttggcaacaaatcaagaggagttagtggattgaaaccataaacaacctcaaaaggagaacaagtagtggtgctatgcacagtcctattataagcaaattcaatgtgaggtaagcaaacttcccaattttt

SEQ ID NO: 39768 - DNA, 232 bp, Glycine max
acatgctattaactaagacaaaggctcccatatacaatcaaggcagcttacttacctagattatttacatgtacttaccatgtgtatctgttacttgcatcacacacatttcactggctatatacacttacatgcgtactgaaagcataatgacgtaccaaatagtgcacatgagcacatgttggtggttctaatagctgatcatggacaaacgacatgaagagacatgact

SEQ ID NO: 39769 - DNA, 358 bp, Glycine max
agcttctatatattctgaacctttttatcaataaacacaagttgagttttattcagaaaattagagtttatctcttttatcttagtgagagtgattctcctaaattcttgagtgattcaagaacaccctggctgtatcaaaggactttcacaacctttgtgtgttgccctcgctggaaagagtgattctttccttcctatcatctccacccttgttctttcaaaccacaattccagaaaatccacctctgcccaaaattatctcgtgaccataactcccattttacacactcaaattaagtgattcttgagcctaaattgaatttcaaaacgagacctttcacctcgttttggaatca

SEQ ID NO: 39770 - DNA, 370 bp, Glycine max
  unsure (1)..(370): unsure at all n locations
nganattgaacaagggaagctctcgacaaactctattgatcataacttatcacacggaggttcgattcaggcacataatatatcgagacgttggaaattgaagaacgaatgctctccagaaattcaaatggtcataacttgtcacacggaggtccggttcaggcgcataatatatcaagatgctcgaaattgaacaacgaatcctctcgagaaattcaaatggtcataacttgtcaaacagatgtccgattcaggcgcataatatatccagacgctcgaagttgaatatcggaagctcttgagaaattcaaatggtcattacttgtcacacggaagtccgattctggcgcatcacatatcgagacactct

SEQ ID NO: 39771 - DNA, 358 bp, Glycine max
agcttctagcgccattgtttgtatagaagaatgaagaagaggctatgaagaataggaactacaggaacaaggatatgtctcacttgaagacaataaaatgatgattatatcgaggaaaaggaggaccattcatgtcctttcagctagaagcttagcctttccagatagttagtatatgacaattatatttggtagatttattttagcatttgaaaagaaaaatatattgcaaccagtaaccaccatgctttcctccattgaccgcaatgtcaacccgacatttgtatggtggattttaggcttgctactatctactaataataatgccaacttctaatcacttggtcattcatgctct

SEQ ID NO: 39772 - DNA, 457 bp, Glycine max
  unsure (1)..(457): unsure at all n locations
tatgctgcanacatctacaatagacctcctcaacctcatcagcaaaatcaaccacaacaaaacaattatgacctctctagcaacaagtagaaccccgggtcgaggaatcatcccaaccttagatggtcgaatccttcacaacaacagcaacaacaacaacaaccttattttcaaaatgctgctggcccaagcagaccatacgttcctccaccaatccaacaacaacaaaaacagcaacaaccccataaacaacaaacagttgaggctcctccgcaacctttccttgaagaacttgtgaggcaaatgactatgcaaaacatgcaatttcaacaagagaccagagcctccatttagagcttaactaatcagatgggacaattggctacacagttaaatcaacaacagtcccagaattctgacagattatcttctcaatctgtccagaatcccaaaatgt

SEQ ID NO: 39773 - DNA, 470 bp, Glycine max
  unsure (1)..(470): unsure at all n locations
actcttcaacgacaaggnnnnnnnattgatcctttgangccctggaagacgcnaagagcccaccngcatgcaagcaancttagaaaggaaaagaagnattgnatagctttntgacgattgttaaggggaaaatatggtctctgggactacatcctaatctgtaaacatgaagcatgtagtaacactatgctgtaacgtatgatgagatgaaagatgggatgagcatacagatgcaaagtttacacttccttataccgtctttgatccctattgatttcattgccacccccctaactctctgttgtgttacttcgattaaagcatacttgtctaagcgtaaccactcaggggaatctctagcgaggagaagcaactcttttgcttgacttattacctactggatggtgccttccctatactcatatcatttgacattcgctgcatctccgtggggaaaaatccccattgac

SEQ ID NO: 39774 - DNA, 354 bp, Glycine max
agcttgaagacaaactggatgtattggttaacttggtaacccaactggccttgaatcagaaatctgtacctgtcgcaagggtttatggtttgtgctcctctgctgaccaccatacagacctttgcccttccatgcagcaacctggagcaattgagtagcctgaagcttatgctgcaaacatttacaatagacctcctcaacctcagcagcaaaatcaaccacagcagaacaattatgacctctccagcaacagatacaaccctggatggaggaatcaccctaatcttagatggtctagccctcaacaacaacaacagcagcctgctccttccttccaaaatgctgctggcccaa

SEQ ID NO: 39775 - DNA, 387 bp, Glycine max
  unsure (1)..(387): unsure at all n locations
aatcttgaagaaggatagcaaataaatgggtattgctgttaagactgaattaatgagggttattctaccccccattgatagatttctttgcttccattttgtaagtttagcctcgcatttgctaataatgggctgccacacagacctatttttagagctgacccctacaggaattccaaggtaagagaatggaatatccatttgactacaattgagagaagatgctgcctccctacaccagtcctcggatttgcccaaacacccaaattttctcttattgtagtttatcttaagaccagagaccaattcaaagcttttcaggatacactttagaattntccccgtatcttctccatatgcaatggccaccttcacgatttgaaatca

SEQ ID NO: 39776 - DNA, 358 bp, Glycine max
  unsure (1)..(358): unsure at all n locations
agcttgctnctacacagcgcttgtgcctattttacnnttagncagagcggcatggggntgatgaaaataatcttgtctaaccctgtggttagatcttatttctttcatatgacatcaaagaagagaaaggaacctgctacaccttcccaggtctgttatgaccaatccagggtcacttctcctaaggcctgggaaagggacactaatattgtgggacccagaaaattactccctaagcgaaatgtggtaatctaccacactgagtttgatgagttcaaggaagaactggagagaagaaaatgggatgaggaattgactagttttgatgaaggcagcattgatgttgccattatgaaag

SEQ ID NO: 39777 - DNA, 414 bp, Glycine max
  unsure (1)..(414): unsure at all n locations
agttgagcccttgaagcntctgaangcttgagancaccgaggcacgcgcacttatgccaacgacaacgttttttantttctgacagtgtataaggggccatgaggagttggaactacacgatcgacgatatttctgagctagagaccaggcctggatgattacttccaggggaaagaggaccactacgcgtgccttttctcgagcacactcctgcattcgtagaaccagagcctgacgattctctatggccaatggagaatcccccttgatatgcagaacttgtagtaacccccccctatcatgcttcttgtgaatagtgcggatgtgaacctttcggattgaatgcatgattgtgagggagttcgtgttccttttaataggccaacttgtatgtgttagacatacaaggacgc

SEQ ID NO: 39778 - DNA, 295 bp, Glycine max
  unsure (1)..(295): unsure at all n locations
agagcatgaatacccctctccactcgatgccattttgtcgcgacacgcatcactcaccctcactaccatgtcattgttggctatctcttcactcaagtcccaaaccacacatgttgtttccggaagccaactntccaaaatgtcactaatgccctccatttggcacagtcccaagatgtcttcatcgatactatcatcaacgctcctgtcacatntatttacctctgcctctagctcctctattcttggctcatacacatctgccacgtcagcgtccaagaccgtgaaatcacta

SEQ ID NO: 39779 - DNA, 350 bp, Glycine max
  unsure (1)..(350): unsure at all n locations
aattagtttcaattntatttgtgacaatagtaaatggttttaaaattattatttattagatatgtgacatttaaacaaatacaaaggaagaagcacaattcatccccccctttagtggatttctggatctgcccctggttagaggcagctagaactgttccaatgctaaccgatagtgtaaatactaaacttcacactttcagtgtgtaacattcattcatatcaatacaactaaattctctcaatctcttttcctttctgttggattatctctccactatgaattctacatcccaaacccacactaatttgttaaacattattttttaaattgcttttaacatcaattc

SEQ ID NO: 39780 - DNA, 418 bp, Glycine max
  unsure (1)..(418): unsure at all n locations
gatattatgtattcattatcatccaacttctcaatgattttttcgtaacaacagncaacttttacccatatgatcctcacgtgtcctcaagcttcagaggaaaggttgagctgatagtttcgagacttccagaactgatttattgcactaaaaaggcaatggtttctacataaattataatgacaaggcattgctccctaatgaggtccttcgtcctctaatgacccttagcataaatggctcctcagacattccaagacaaaaatgtaacttctttaaataagtccaaaaatccatataaaaatgtgcagaagatggaaagtaaataggcacactcattgtccacttccatctaacagnttgaaaccatcaccaacttggtagcactgtcgaagtaagacactcctatggacatact

SEQ ID NO: 39781 - DNA, 411 bp, Glycine max
  unsure (1)..(411): unsure at all n locations
catggacgaattgcagtggccataatgatctcacagtaagatcttgatgagcctcaaggcataaagaacttagtgaatatcatatacaagcagatcaaagtagaagccttcacagtttatgattactatcacctctatgctaaattcttggatactgttttgccttacattagggaagggaagataacatatgttgaagacataactgagggtcttgagaacggtccaatngcactagaagcaatgttccaaggtcgtagtgctggtaaacaagtcattatacttgctcgtgaataaattagtacaaccttactggttgatctttcannatcattttggttgtgtntgcaactctcactttgagaggttgttgagtaataaacaacgtggatcatgttgaccatctttaat

SEQ ID NO: 39782 - DNA, 269 bp, Glycine max
gctgctaatgaggcaaatgaaaaccacctcatggcaaccaagtcaactaggtgtccgggatatagactcacattcatctaaaaactggaatgagctcaatgaaagtgtgtcaaactccctacaaggatagagctggatcaagacgaacgatcaagacgctcatcatgatggaagacttggtggtgaacgacgcatcatctacatagagaggaatagtcttcacctcattataagctgttccctattgggacaactactaataacactca

SEQ ID NO: 39783 - DNA, 387 bp, Glycine max
  unsure (1)..(387): unsure at all n locations
accgctaagagacaccttattttggttagcgcgatcagngttttcagcacaatgccttacgatcaanactgaggttcatgaagctaagcgccagtaatggcagctaagctgaatccctagcgacaatgttagcactaagcgagtccttatcagctaagcgcatgctcctctgtacttaaaatgcatcattttagctaagctggccatagcctggcttagcgagagttgcagctcttcgaatctgcatacctcgctaagcggtcttatccttgcgctaagccaagcttgtgtgaaaanataaaanaacattattattttgaatctgagacatcggctaagcgcacgggttcactaagcgagcctcgttgagaaaccaaacgtctctct

SEQ ID NO: 39784 - DNA, 480 bp, Glycine max
  unsure (1)..(480): unsure at all n locations
cccagctcgcccaggcgagctaggttgttttctccagaagggacgcgttttttgtagatcttcctggaaggcccaagcgggcctgggtgctattttcaccccctttttactaaatacacccctgccttttttctgattctttttccgtaacgttacggaactttacgaattacgtaatgatacttggtttctttccgtaatgtcacgaaaccttacggattacgtaatcatcccttctttggcttccagaatgttacanaacttcacggattacgcaacaatccttcctttngacttccggcatgttatgaaacgtcacggattgcgcaacaatgctttcttttgacttcctgcatgtcacgaaacttcacggattgcctaaagatgggtgccaagtacctcnaagtggtcaaacgaaggtcacatcccaacatacagatggtccccggacgagattatgggatgacactggccatagca

SEQ ID NO: 39785 - DNA, 304 bp, Glycine max
  unsure (1)..(304): unsure at all n locations
gcttcatgcattttataatgatcctacattgttacttccttacattaaaaaattttcttaagacgtaagaatttctcagaaaaaaaattaagaaacaataggaatccgctacagacacaataaatgaattagaaatataatcaacggtgacattggcctcatagagaagattagattatgctacattaaacaactgcttcagacatatgctggtctattntcagatgtttaatccttggccaaaacatatcaaacataaccaagttctatatatcgagtactgccaaagatcaacaaaaacatg

SEQ ID NO: 39786 - DNA, 467 bp, Glycine max
  unsure (1)..(467): unsure at all n locations
ctctatattcaacacatatgaatgtgacatccaacgttcattcagtatcatacatatgctataggcgcaaaagcaatacttcaaaaataaaaagcatcaccaattaacattaatggttaataataatgaaaatattttgggacagccacaaataaaagaagatttcgttactcccccacaataatgaataataacatacaatgaatacaaatgataggcagataaaaacaacaatgatacatagctacctaaacactcatttcatttgacccttcatttctccctatcttcctctcccttcttaatcacatcatatcactcatcanataatcacttctctctcttctagttctttctctcaaggtatagatgtgcattangtgtctacaaatcattattcagataaaataaaatatagcaaagtacatgaatgaagcctatataatattatcaattacaaaatacaa

SEQ ID NO: 39787 - DNA, 581 bp, Glycine max
  unsure (1)..(581): unsure at all n locations
agggccactggnatgagccattgananncnnnnatgatgcgattgtaganccgngaannttanaganactgccgcatgcaagccnggacttattctcctctccctccataagnctcattcncgaagatgtactacctgcttgggagccatatgaagagtacatgacagaagttggtaaaggaagccacctttgactgaccttaaaaatatgtgaagtaaaactgtacaacagtgagatttgtaaaattcatcgtaaccattaaatttaatctacccgatattatgtgcttaaatcgaaattctccaaatgtctataaatcgacgagaatcattcccatatattggtctctgagtataatattcaatagaaagagataatcntaacttataagggattcttctaataccgtgggtagaatgattgttacacacataaattatgcanatagtgttcataataaaattaacatggttatataaattggttaagcaaatattttagcctacatgtgagatatttntttctgtctgaaagaagaattctaccgacaaagttatagactaatcttcaagaagtaagg

SEQ ID NO: 39788 - DNA, 233 bp, Glycine max
cctagaaagtcttttgcaaaacatgcttccctaaatgtaccatacaccacatcattgactgttctaatgtctctgtaagactatgccaccttggcagaggaaagcatcattatgagggaaaacaattcgtcagctgaagggtggacccatataagcctgcctattgtatttccttattttcttggtttccaacatcttttgtgtgcaacacaaacaaatcttgatacatattg

SEQ ID NO: 39789 - DNA, 462 bp, Glycine max
  unsure (1)..(462): unsure at all n locations
attctatcaatagacctccaatctttaatggagagggttaccacaactggaaaacccgaatgcaaatttttattgaggcaatagatctaaatatctgggaagccatagaaatagggccttatatacccaccacagtagaaagagtttcaatagatggtagttcatcaagtgaaagcataaccatagaaaaatctagagatagatggtctgaagaggatagaaaatgagtacaacacaacctanaagccaaaaacataataacatctgccctaggaatggatgagtatttcagagtttcaaattgtaagagtgctaaggaaatgtgggacactcttcgattaacacatgaaggaactacagatgttaaaagatctanngataatgcactaactcatgagtatgaattattttagaatgaatgcaaatgaaatattcagagtatgcaaaagagatttacacata

SEQ ID NO: 39790 - DNA, 417 bp, Glycine max
  unsure (1)..(417): unsure at all n locations
aatatatcgagacgctagaaattgaataatggaaactctccagaaattcaaatggtcataacatttcactcggaggtccgattcatgcgcataatatatcgagacgctcgaaattgaacaacggaagctctcgagaaattcaaactgtcataacttttcactcggaggaccgaatcacgcgcataatatatcgagacgctcgaaattgaacaacggaagctctcgagaaattcaaatggtcataacttttcacacggaggtccgattcaggcgccatatatatcgagacactcgaaantgaacaacggaagctctcgagagattcaaatggtcataacttttcactcggaggtccgaatcaggcgcataatatatcgagacgctcgaaattgaacaacggaagctctcgagaaattc

SEQ ID NO: 39791 - DNA, 330 bp, Glycine max
  unsure (1)..(330): unsure at all n locations
atatgtaaagagggtggtnttggattcatacccatgaccaatcggtcaccaaggtgcaactttaccgctgcgccatgacttgctttggggggcttttaatcatcttgataaaattagttcttactttttacttataaatttttatcacaggaagaatgattcatagcttaaataaaaatgagcatgctctcgatatggctgctcctgttcatgagagattgggtgatatggatggtcctactgacgacaattcctcattgaagaagagaaccaatgttctcctccatcgtgatcacactggagacttggaatgtcttgatggttgaatat

SEQ ID NO: 39792 - DNA, 361 bp, Glycine max
  unsure (1)..(361): unsure at all n locations
attactgacatgctagccaagcccaccctgaaccaaattgtgttgcagcagcagccttgaactcatcaaggaattntacaaatgaaccacagtctctttcaatcagttctagaagctccccggatggctttccacctccacactggttcatgcactcccagaagaagtcatggttccatacctgcactatgcattacaagattgattgattaattaagtactaagccatggtgttgaaacatgaattagagattctggttgcaagcatgcatgcctgtgctgcattgttgaaagctggaagaagtcacccttattgtatgatgtgacaataatctcttctagtgacataccatcaagctct

SEQ ID NO: 39793 - DNA, 381 bp, Glycine max
gcttgattctcattggagaggtaatgattctctagatgatgcgctccatgagaggttggatcaaatggagaatagagatcataatgaagaagaaaggaggagaagagggaatgatggtgttcctagacaaaaccgaattgatggtattaaactcaacattcctccatttaaaggaaagaatgatccggaggcctacttggagagggagatgaaaatagagcatgttttctcatgcaacaactatgaggaggaccaaaaggtgaagcttgccgccacggaagtttccgactatgctcttgtgtggtggaacaagctacaaaaggagagagcaagaaatgaagagccaatggttgatacatggacggagatgaaaaaatcatg

SEQ ID NO: 39794 - DNA, 500 bp, Glycine max
  unsure (1)..(500): unsure at all n locations
tatgcgcatatttccttacattcgttctcttgcacaagacattctattaaccgaaaaanatgcacccatatacaatcaaggcagcttcgttacctagattatttacacgtacttccaaggtgtatttgttacttacatcacacacatctccttggctaaattcacatacatgcatactcaaagcattntgggggaccaaaaattgcacatgtgcacatcttggtatttctaatacctatacatacacaaacctcatgatgaatcttgactatctacacaataaggtgctacatttcatgctcttttcaagtttttgctacctaaggccgcatgcaaattcaagtatattttccttcgctggctaaaattgtattcaaattaaaaggtatacatnnttttggtaatgtatcttctttacatagcatgcaacatatntatgtatattntttttgtgagacantttgactaccannaaatatatgtacatacatncaagtatt

SEQ ID NO: 39795 - DNA, 573 bp, Glycine max
  unsure (1)..(573): unsure at all n locations
cgaggattgaaaacccattgaganccccngannttagnaccactctagcnnccccnnattgaaagcgttcgtagaccccgngannctctagagnctatctgcaggcatgcgagctntacagctgattttagtaatgacccactattctataattaaaataacttaatgccgntaacctatggaattaaaaaaaattaatggctgagtgtaactgaaattgtggcaaccaaaagtcacccccaacagccaacaagtcagccaccatttggtctcccacaaggttgatgcctaggatgccaattgngcccttattacaacttgaactaaacctactanagcccttttagttgattaacccanaacatnattntggtcagccaactctacaaggattgngccattattataccaactaaacactctaaaantgagacaaagtgtngtcattagtccttctcatttgggcatgatacaactacaacctggactttctcttgaaactggcttgatgcaatatatgacagcactgtgaaagctctgctttctgtctagccttgatggcctccagtctan

SEQ ID NO: 39796 - DNA, 226 bp, Glycine max
  unsure (1)..(226): unsure at all n locations
ttttgagcatctcgatatattatgcacctgaatcgggcatctgagtgaaaaggtatgccatatgagctaaccgagagcttcggtgntctatttcgagcgtctccacatattattggcctgaatcggacatccgagtcataagttatgggcagttagactatccatgtgcttccgtgtttaattntgagcatctgcatatatgatgcacctgaatcggacatctgag

SEQ ID NO: 39797 - DNA, 359 bp, Glycine max
  unsure (1)..(359): unsure at all n locations
ctataaacttaattttaaaagctaaaacataaacataaacataaatctaaagactgaaacataaacataaatctaaattataaaatgtactaaagacgagataataataaaattgttcaaaaagcatggaaataaaaatcttgatcctatcaatatgatcatgtgcatgcttattcaggtccagtgctggtgcagatgatggatcctgagaaagaggccggtccaacactggtgcagatggctcaagctcangctaaggagatggctctggtactacaacatcctcctgaacaataactagatcagtctcaaaaatgaaaggctcangtggagtgggctttaaggcctctagaatgtca

SEQ ID NO: 39798 - DNA, 426 bp, Glycine max
  unsure (1)..(426): unsure at all n locations
aattctatttatagacctccaatctttaatgtttagggttaccactactggaaaacccgaatgcaaatttttattgaggcaatagatctaaatatttgggaagccatagaaatagggccttatatacccaccacagtagaaagagtttcaatagatggtagttcatcaagtgaaagcataaccatagaaaaacctatagatagatggtctgaagaggataaaaaacgagtacaatacaacttanaagccaaaaacataataacatctgccctaggaatggatgaatatttcagggtttcaacatgtaagagtgctaagganatgtgggacactcttcgataacacatgaaggaactacagatgttaaaagatctatgataaatgcactaactcatgagtatgaaaatattagaatgaatgcaaatg

SEQ ID NO: 39799 - DNA, 552 bp, Glycine max
  unsure (1)..(552): unsure at all n locations
cgccgtgcccattgtacgcctggatnacccgacttgtatactttgagagcctggagctgataganaactataccgcaggcccgaggttctagtttatggagctccctctctctttcggggagactctctctctctctccgcgatctcttggatcgttcgatcatagcgataggctctgttctctctctctgttatttacgttaatgtcaatgccaggacagacttttagctgtatgaagtaaatttcatactgtatttgattaatggaaggctaacgccgcagcgttgttttgccttgaggatcaagcacacggtctcttgacgttctattattacggggaaattctgccgagtattggctcttcactaatcactgtggaattggtgctgttaattcatgcatgctcagcgcttggataattggctctgcgcgtaattacgttcatgcttatgatcgctatgagaattgtggatgtgaggttatcactatgaagcctatggtgattcgcttagaattaattatggctgataagtgttaactgaaanggtaan

SEQ ID NO: 39800 - DNA, 506 bp, Glycine max
  unsure (1)..(506): unsure at all n locations
atactcacgagtataaatcaatcttgtacaaatcataactaaattattatnntagtgtctgaaggcacttcaacattntaaaagaagatataactctaatcacacacacacacacaaaaaccaattcaatttatggaagagaactaattctatataattcaaaaatgttgtatataaaagtaaaaaaattataataaaactcagcttatataaaatgtcattttttattattaattatcactaaacaccaaacatttcagctcaactatctcaattgattcatacaacataatcataacacanatcatacattatcatcaacaacatactttcatcaccaataatcatcataaactatcaaatatcatgagtcgcatacaatcataaactatcacaaaacctcatcatactcaatcaccaacaaccatcatcataactgaagtacatcatagaccaagacaacatcaaacatcaaccacttattctanctcatgngagtcaacaca

SEQ ID NO: 39801 - DNA, 414 bp, Glycine max
  unsure (1)..(414): unsure at all n locations
ttgtgtgtgngagatgtcgatgtgactgtgattattttattatttgtgttcctgcgagtatatgattaggaggtggatccttcctttgaaggcatcgtggatggatatgcttaaacataaagatgggtcttcttgtgttttctttattagttntatgtgcagtgttgaccaacttaggtgcttaagtttatctctatgttagtcgtcttatacgactaacttttgtatagaaaacattttccaaaacttgtatagttccccaatttatagttattctgtagtgattattgtaaataaatcttgttntatggttaaagctgtctctagaatatgttcattggatntaatgatganatatgtgcaatttcacgtgagaatgaggctaagtcatgaactgctaaaagtgacagttga

SEQ ID NO: 39802 - DNA, 412 bp, Glycine max
  unsure (1)..(412): unsure at all n locations
tcccgagagctttttttgntcattntcgagcgtttctatatgtgatgcgccttaatctaacatccgtgcgaagagttatgaccatttgaatttctcaagagcttccgttgttcaatattgagcgtctcgatatgtgattcgcctgaatcgtacattcgtgtgaaaagttatgaccatttgaatttctcaagagcttccgttggtcaatttcgagcctctcgatatattatgcgcccgaatcggacatccgtgtgaaaagttatgaccatttggatttcgcgagagtttacgatgtttaatttcgagcgtatcgatatattattcgcctgaatcagacatccgtgtgatagttatgaccatttgaattttcaagagcttcctgtgttcatattcgaacttctctacatattat

SEQ ID NO: 39803 - DNA, 479 bp, Glycine max
  unsure (1)..(479): unsure at all n locations
acgctcgacattaaacatcagaagctcttatatattcaaatgggcctattttttcatgcggatgtccgattatggcgaatcacatgtcgagacgctcaaaattgaacaacggaagctcttgagaaattctaatggtcataaattttaactcggatgttcgattcaggcgcatcacatatagcggcgctcgaacaggaacaacggaagctctcgagatattcaaatggtcatgaactttcagactgaggtccgattctggattataatatatcaagacgctcgaaattaaacatcggaagctctcgagaaattcaattggtcatcactcttcacacggatgtccgattcgggcgcataatatgttgacacgctcgatactgaacaacggaagctctcgagaaattcanatggtcataacttttcacacggatgtccaattcatgcgcatcacatattgagacgcatcgaaatgaacaacg

SEQ ID NO: 39804 - DNA, 481 bp, Glycine max
  unsure (1)..(481): unsure at all n locations
gactaagttgacaccaaattcaaatatgataaagccaccttctccaatccatgctcataaccaaacaacatcatcaccatcgtccatcacaacctangccaccattgtcgttgtctctcttaaactttcactttcatatatgttcagtttatataatatgttaaactctttccataacctcattttctcttttcacaacatgttcacattcctctctccctaaccttactggttgcgccttcacggtcaatgttgtcctccccccactcccttcttaatggccttaatcctagtcgcgtgtttcacatacccaaagctccatgtcttgcccttccaaccncaaagctctatgacgtagtgatggtgatgatgttgtntngtgcgaacctagatcanaggtggnggatttcttagaattcgaagtagtgtcaactaaaccaacactaacaatagtaataaaaaactatgccaagtttggtat

SEQ ID NO: 39805 - DNA, 515 bp, Glycine max
  unsure (1)..(515): unsure at all n locations
atactttctataccatccttttcttaaattcaaatgttttcttttcaaaataaagagagtctaatataatttgtataaaacaacacgagaacttcccttttttgtcattcataaaacataacacatttactaaaagaagtgtcatatatattttcacaagggtggacgctctttggatttatcatgttggatgctagataaaatggagcgtactctctttgattatgaacaatacttgaaatagtaaatccctttgacatatttatcctatccacttgtcaagaattcattagaacatcaataatttatacttattattatacatcanagtccaaggtggatgagacgagtggtcatccagacctaacatcctanaccaaaatttctgctcaagcacactnttaatggccatgatcatttcaaagtgaatcgctaagaccaaaagctngagcaaagccaagcacccatcaccctacttaatcccataacagttaccttgttttaaattaaataaa

SEQ ID NO: 39806 - DNA, 207 bp, Glycine max
  unsure (1)..(207): unsure at all n locations
gncgtccggctcgcgaccaatctaatgcttgacagttatcatcaatcttgccttcatccgctatatacttactaggcgtacaaccagcgttatggcacccaattgcctaaacatacacccccctgcactatcccactgctatttattgaatctgcaacggaccttcaaagatgatatctaatctgagcataacaatttcttgttatn

SEQ ID NO: 39807 - DNA, 592 bp, Glycine max
  unsure (1)..(592): unsure at all n locations
tgcgtttgannccctttgananancnnnntttgnnaccattgtagacnccgcgatttgagnacatttgatgacgcacngcaacnnnaatattgccagaagaatgcagacaaatttcttcatgtgacgtagccacaattttntcctaagcnatcctctccatnatggaagacacaacatctacaaccaaagatatgaagatgtgagatgtctggttttctgccattgaacaattcatatgggagtttctttaacatgggtcttattaaaaccctatttaaaatgtagcatgcagtggtaacggcttcagcccacaagaatcttggaagaggagtatcattcaatanacgtctagcaatctctttcaaagatctattttttctttcaacaacaccatttttgtgaggggttcttggtgcatgaaaagtatgctcaatcccatgcttatcacacaataattcanattctttatcttcacactcacccgcatgatcactcctaatagatataatgctgagatgtatctatntngaatgatatatgcaagtttctacatgctcgaatgcatcattctatgagtgatagaagagtccg

SEQ ID NO: 39808 - DNA, 392 bp, Glycine max
  unsure (1)..(392): unsure at all n locations
tgtggatgtgcgttgtgcacgttgaacgctcaagtttactctatgtaaaattgcgttggacgtgtattgagaagtgagaaaagcttanactaaacagattgactcttttatgaaatgaaatcttttaatttgtttctaatacaaaatatctagtgatttgatatacacaagttaactgaggttattccaacttaaatagtaatagagtntgaattttgaatttgtagttaattatgttaaatagctcaaatanagaatttatcgatcataactattttatctgaatttgagcatattatgtttaatatgtaatcagaaaaatatatgtggtctatatacgagaattgatctctaacattgtcagaaagtatttagtcattaattgtataatt

SEQ ID NO: 39809 - DNA, 325 bp, Glycine max
  unsure (1)..(325): unsure at all n locations
agagaacgtgaactttgagttgtgtctcacaagactctcattcatcaaaagtacaacaagtgttacacatgcttctatttatagactaggtagcttccttgagaatctttcttgagaaaacatccttgagaagcttctttgagaaaacttccttgggaagctagagcttagctacacacacccctctcataactaagctcacctctttgaggagcttccttgagaagattcctaaagaagctagagcttagctacacacacctttctaatagctaagctcacctncttgagaatgagaagctagagctaactacanaccccctat

SEQ ID NO: 39810 - DNA, 325 bp, Glycine max
  unsure (1)..(325): unsure at all n locations
tgcgtcacattttattccgagttcgatgggggtctatcctttgatggtacttggcgggaagtaatggnggaaatcgacattcccattcagataggccctcacacttgcaatgtggtgtttcaagtaatggatataaatcctgcctatagctgcctcttgggaagaccgtggattcatgccctgggagtggtcccttcaacgcttcaccagaaattgaagttcgcagtggatggacttttagtgatagtgtcgggtgaagaggacatgttattgagttgcccttcctccgcaccgtacgtagaagcggcggaagaatcattggaac

SEQ ID NO: 39811 - DNA, 466 bp, Glycine max
  unsure (1)..(466): unsure at all n locations
ctgacgcatgcaagcttcttgtatgggatcaatatatctatgggcttagatagaaggatgaaaatgttttacgtgatatatnttggagtcatcttgatgcagtcaaattgtccaatgcctataatttgatattttttatagatagtacatacaaaacaaacaggtacatgttgtcgttacttgacattgttggtgtgacatcaacagggatgacattctctgctacttttacctatttggagggagaatatctaaataatgttgtttgggctctagaaacaatttgaggtatttttctcatacgtgatgcactccttgaagttattgttactgacaaagatgtagcattgatgaatgcaatgaanagtgtattccctgagtctaccaatttgttgtgtctgtntcacattgataagaatgtgaagacaaagtgtanaacaaaaaaatgcatggaatattgtcatgg

SEQ ID NO: 39812 - DNA, 438 bp, Glycine max
  unsure (1)..(438): unsure at all n locations
cttcaatatctttattctagatgactnngncactttttgtgtctctaatccctccattncaaaacttcctatatttaaggtttttacacagattaaaaaactatttatatatacaaacttaaactaaattattctaatttataaatcataaagataaactaatagtccacaatacaaaataattatccaataattgtccaataactcanactcaataataataatcataaacataaactcaagactactcaatgtccaataattatccataaactcacattagcatcaaagccaatgtccacactaattgtccacaaactcatattcaagcatcaaactcaatgtccacactaatngtccacaaagtgaaatttaagattataaatatatatggtagatttacaaatggtaacgcataattccaaaaaccccatattc

SEQ ID NO: 39813 - DNA, 465 bp, Glycine max
  unsure (1)..(465): unsure at all n locations
agtcctctcacgaggtggagattgcaaaatagataacgaacttataaattgaagaacgaaattttattgctactggaattgcaaaacgaanaanaaatgtctcanagaataacctataactaaaaaaacgaaaataggggagagagaagagagagcctaaactagaaccttggtgctgttatatagttntccagccccaaagcttacanaattgttttaaatccaagcccataaataaaatcaaatctagataagataagatctagatgaaataatatatagatcagatcaaatctaaataatatctagataagataagataagataagatctaatnttgtagaataaaatagtttgtcctcttcaaatccaagtccaatgcttcattaattcctganattagaaataaaacatcannatagctgaatgggcccaaataataaaactggcctaataattgacaat

SEQ ID NO: 39814 - DNA, 421 bp, Glycine max
  unsure (1)..(421): unsure at all n locations
acactaatttattattagattggatgatggtatatctttttataatgagtcaaccaatgacagatgttacccaaaaagagccttgaagcatataacctctaggcccaaattctaaaccagtaaaatgtaagatgtgctagtgagatgaaatgtgatgcagtgcttgttaatgaagggaaaaaaaagaagctaaaaagctccaccatggcttgaaaaagaattgataagggtttcttattttcggtaatctattatatggttggtgcacaataatttagaaggcaggatatgtatagaagtttgtatgaccaactaaagtgttcataagctaagtactccacaaacttaggtacctgtggccatatattcangagcaacatagccatatgtgcccattacccttgtagagacatggctctta

SEQ ID NO: 39815 - DNA, 446 bp, Glycine max
  unsure (1)..(446): unsure at all n locations
agcttctctacttctgtgtattcttcccaaactcttctcattctcttcatcctttcttcattggcataactcattcttcttatttgatcatcaagtttaatcatctccgccatgagccttgcggtttttggagatggtgaagtagcatatccacttgtagaagccatacctacaagaaaagttagtgcacaacttanaaatagaataggacctcaccactcaacttagtgtttctctcaagttcactcgtgtatcactctttcaaggctntntctttcatattattgnntagtcgtatttacgactaactttngtattgaaaagcatttatgaaattatgtcttttccccaatttatagttcttcttgtnggttggacatcccctttatgttagtnntaattttatgcagtagatattcccttcatttgtgaataatgtgttttca

SEQ ID NO: 39816 - DNA, 314 bp, Glycine max
  unsure (1)..(314): unsure at all n locations
ctgacgagggatcgatgttttattatttatgtctcaacatagaacacaagagcatgattgattagagaaatatatntatatgcatcagcttgcttgtgagaaagacccaacatttctacctactgctgtcacttttacttactttgcattttatagatttagcataaaagtctagtgtaaattcttgttgaaaatatcaatcatacatgttctctcaacaatgcgttcattttgaacttaattcagggctaccgttgttccctgtgttcgatatttggattcatccattttaatntttaaatacttgacgatct

SEQ ID NO: 39817 - DNA, 379 bp, Glycine max
  unsure (1)..(379): unsure at all n locations
agcttctggttgaagcctcttaatgaagcttctatataaagctacatgaagctgcctcggtaaaaatgctacccacgctttgttaatcgttggatcttctcgacatttggtttgcaactttacaagatacttgtccattatctgaccattgggatctttgagaagatgtctggagtgtgctagaagctcccgttcccgagagcatctcttatntaagcatttcagcctttgcttttgtgtagcttaagaaaaacgtcatttcttcttctttctttcttccaaagccatttataaagttccaagcactttctccatcacccacagccaccattagccaccacaaaccatcattgttctccattgaanacccacaccgaga

SEQ ID NO: 39818 - DNA, 359 bp, Glycine max
  unsure (1)..(359): unsure at all n locations
tctcacctcttctnctttgtcttccggtgcatctgcatggtggaaaatcaccattaaaggacctcattgaagctcaaagatccagcctncatagaagccccacaagcaagcttccatcaagtggtaatcaaagcacaagagcttcaagtaggtgctccttaaacctccattaattntttgctttaccttctcttccattggttttttttcttcattnttctccatgtatctcctcacatgtctggttctaaatggtgttaacatgattctttagagtttgcaccgattaaacttgctatagaagttagaattgattttctatggttcanatttcttggtcttgttcttgaaccatgaat

SEQ ID NO: 39819 - DNA, 213 bp, Glycine max
aacatatctatagtattgataaaggctcaaactcttacatattaatgtagaatagtttggctaaggtttttttaaaaaataaaaaataatccaaattaatcccatcatatgtgaattgagtcaggtctattgattagatctatcaatataatagtagaaaatacaatagaaagaaagttgatgaatagtctcaaaagtcataattatagcata

SEQ ID NO: 39820 - DNA, 580 bp, Glycine max
  unsure (1)..(580): unsure at all n locations
tgtgcnntttgataccccatcgattacccgacattatatacnttttgaagccctcatagnctgctaaaaatatctacaaataaacttataactaatttagagtccaaataggtgactttcttgattgcaatcaaatgctctaccactaaacgataaacccatttgatattttaatcatcgataatatactagatttgcaagccagaaacaaaattcatttttgagaagaagcctattgttccaggggaagttgtgcgtaatgccatgatgganagcagttgcaaacgttcaagcttgtttatgaggaatctatgatccactgctgagctatgtatgaacccatttgatgttntaaaatcaataatattctatttaatgaacatgttactttggaaaagaaaaaaattaatacagagggcccaaccgggttcgaaccggtgacctcttgatctgcagtcaaatgctctaccactgagctatggacccaagttactgtcagaggcagaatttaacaaatagatagtaatggttcaatttgttattgtgaanatctacatatatgaaaagggtggactggcag

SEQ ID NO: 39821 - DNA, 328 bp, Glycine max
  unsure (1)..(328): unsure at all n locations
atcttgggcctttttcccacaactctngtaaatgggagagaaatgttcatctaaagcatacaaatctctaatgttatcaaatcctaaaatntgagctcctagtgagcaaaacaatgtgtgtctcctagagagggcatcagctaccacatttgtttttcccttnttgtatttgataacatatggaaattgctctangtactctacnnccatttgcatgcctttgtttaacttgctttgcactctaatgaacttaagtgattgatgatcactatgaatgacanattccttggaaacaaggtaatgttcccaagttcttagtgctcttatt

SEQ ID NO: 39822 - DNA, 189 bp, Glycine max
acatccacaaagcacgcatgaacccaccatcccctgtcgaccacctccaactgaactcacgtactctcacgtatcccatatactcgtttcgatccacccgggctcccatcaatactgccaagcttgcacaacatccaatcttaacaacattagaacatcacaagctatcacgagctagcaaaacagagc

SEQ ID NO: 39823 - DNA, 255 bp, Glycine max
  unsure (1)..(255): unsure at all n locations
tgctatatcatgnnatatntcatgagaaaatgtccatatatatgtatattcattcattgcggttatatagtattttttttttatctccagtagaataaggctctttatttagagtgtgtgtgtttcaagtcatacaaatttattccaagaaatgctaaacaaacatgttgggaataatattcctagtaatagtattcctaggaatatcatcctagaagtataatctagtccatgagagtaacgttcccatatttt

SEQ ID NO: 39824 - DNA, 463 bp, Glycine max
  unsure (1)..(463): unsure at all n locations
tcggaatgccctatntaggttgggttggcaagctaacctttttctcttttttctattaaagaaannganggtataaaataaactaacgataataataaatatatactttgaagaacactaaaaacttaaataaataaattgatgtcaatcatatcatattaactatacggtttttcttagtattaaacatccttctcctcaacaaatgaccctaagtagcaaaagcaaaatcattntttttttttgcaaaaataataatagtattgactgcaagccaactttgccccgagcttgctggtaaagtagattgatgagttgagtcatctagtttgccccatcattcttgctggttagtcagtcttaacttcacatgtctatatcattacaaagtatatgtgggttgcaaccatctangtctagttaagagtggcagntctaagtattaataactangaagtcattt

SEQ ID NO: 39825 - DNA, 445 bp, Glycine max
  unsure (1)..(445): unsure at all n locations
atataccaaggtgctgtgtgaaataaactaaaatttgtgtataagcttagacgagcccttgcagttcataatcagtattntgtagatgtctacttgcgcatgcatatactatagttaaactattatacagatgatgggcataaacttattgaagcctaaagataaagagtatactgggtgcctgngtggtgatgtgctaggctaaaagcacggaatttggtacccttggccaagttgttntagttcacttaacctggttgtacagtgcanatacaagtctttactcatttaagaaattattacaatgtgtatatgctagttaatatcttgaggttntcgggcttcccaatacaagaataaagaatcagctgtaaaacttgattaagaatcagctgaagaccttggagctcactaagaatagtgtgattagaaaaactttcgcata

SEQ ID NO: 39826 - DNA, 166 bp, Glycine max
ctacatgcatctactcacatgtgttgcgataaatgcttttaacacgattctgtaaagtgtccaccgactaaacttgctatagaaactagatccgattttctatagaccaaatttctagttcttgtgcttgagccatgaactgcgctgagactacgcaccctcgagc

SEQ ID NO: 39827 - DNA, 246 bp, Glycine max
  unsure (1)..(246): unsure at all n locations
agcgagaaagcttcttctaagatagccaatgcatctttcgtttgcccgggtcccccccatcctataagagaagggaggcccaaatacttggcttgagatcccactccctttacacccaacaacantaattgctcattacatatgtttgtcaaaacatnttggctaaaggaaatctcanatttttcaagggtaatcttctggcttgaagcttccttatacacttggagaagatgagcaatgtgggag

SEQ ID NO: 39828 - DNA, 303 bp, Glycine max
attatcaatcatctgtgaatcatctatctttcaatctatctttcaatatcttctttcatctctttaaactctttctataaaaatttctgattcatttctcctcatctttctaaaagtttttttgctcaaatactttctctttcaagaaaagttctttgatcaaaaacttgcgctattcatctttatcattctcttttctctttgccaaaagaatgaaggactaaccgcctgaattcttttctatctcccttctccctttccaagagaattcagaggactccgtctgagaattcttttgattct

SEQ ID NO: 39829 - DNA, 291 bp, Glycine max
  unsure (1)..(291): unsure at all n locations
acagcctcatgtctcccttcctgaaaacccactaaaaactgcctaacccccctgctgttactccataatttattctgcaataactgcttaaggcagttacatatggtcctaaatcactacacattcagttacgattaaccctttgtgcctaactagggtttcgaaacatcacaacaaagacagaccattgaacaatggattntcatcattaacatacaatagagacataccttcgatggaaacgcagacacgaactccacaaacgcgaactcgacaatgtggttgcagtca

SEQ ID NO: 39830 - DNA, 366 bp, Glycine max
  unsure (1)..(366): unsure at all n locations
agtgctcatcgataatggctccagtttaaatgtgatgcctaagagcactntggagaaattaccattcaatgcctcccacttaaagccaagttcaatggtggttcgtgccttcgacggcacccaccgagaggttaggggagagatcgatctcccagtacagataggccctcacacctgtcaagttaccttccaaataatggatattaacccccctacaactgtctgttggggcgcccgtggatccactcagtaggagttgttccctcaacactccaccaaaagttgaaattcgtagtggaagggcatctggtcatcgtatcaggcgaggaagacatctgggtgagctgcccatcctctatgccttat

SEQ ID NO: 39831 - DNA, 291 bp, Glycine max
  unsure (1)..(291): unsure at all n locations
ttcacctcttcggagcttgagctcactattgctgccctataaagcccctcaaaactttgctttggtcgtgttcttcctttcgggccttcttggnttctcgttccaaggcttcagcggtggccatattgacgtcccctagttcatcatactctnttcagactttgatggctatggacttgaacttctcttcgactacccaggctctttcaagctttgcctttagggcttgtacctcatcactttcttccgaagctttaacctcatcatctctcatagtctttagatttggga

SEQ ID NO: 39832 - DNA, 405 bp, Glycine max
  unsure (1)..(405): unsure at all n locations
tgttagtcttattcgtcagttctttgaccttccaccaccatcttcatagatttagattattattatattntgttttttaagccttgcatttggctatgtntttatgacattcgaacacttagtatttcttttaatatttgcttagtatgattgaacatgatgataatatttacttgctcttggttgtttatggctatggttgttaaacttaattattntgatgatatatatgtctagtggtatgtacttacatttggtattgtgctntatgtatgttttagaattatntatgtatgaattattttacacacttttggccttttgatgttgccaaagggggagagaaaaatgggtattttagaaatcaagatattatattttcaaagtcttaaattaagcataaat

SEQ ID NO: 39833 - DNA, 455 bp, Glycine max
  unsure (1)..(455): unsure at all n locations
cgcagggccttcanatgagttcaagcatacagggctnagnattgtgattttggcttgnntactctccttgtatgatgagtggccgaatcaacttggagtcactagcatctgctatcaagattcagatacagaatacaacctaacaaggtagacatgttgaagaccggccttctcaaaccacagaataagaaaagaaatagaatgagaatgagctccacgctaaagaccccaatttcgtttgaaagttattacattgattggatatgcacatacttgcacccaagggaagatatctggaaatagacctatgagttaanatgttgtactgttctattctttacttcaaagaaagttaaatntgatgcacgtcattcatacatgatcattgctgtatgtgcaagaaagaagtctattagcatgtcctatggcataccactaataaagatatttcatta

SEQ ID NO: 39834 - DNA, 397 bp, Glycine max
  unsure (1)..(397): unsure at all n locations
tgacccactatcctataattaaaataacttaatgccattaacctanggaattaaaacaaactaaatggctgagtgtaactgaaattgttggcaaccaaaagtcacccccaacagccaacaagtcagccaccatttggtctcccaaaaggctgatgcctangttgccaattgggcccttattacaacttgaactanagcccttttagttgattaacccanaacatatttttggtcagccaactttacaaggattgngccattatttagacaaactaaacactctaaaattgaaataaagtggtgtcatttagtcctccatttgngccatgatacaactcacaaccttggactnnttctcttgaaactngggcttgtattcaaatagtatggacagcac

SEQ ID NO: 39835 - DNA, 380 bp, Glycine max
  unsure (1)..(380): unsure at all n locations
cactcaaggcactntttggtttcaattacccaacttgaattctatgatttacatcatctcttatttttgtgcgtatgtgcgggtgtatctgttccctgtttctaatttgttgtctgatttcttgtaaattttggaacagactgctagaccccaaattggaaagctctgggtctctctttgttggaagttgcattcttcaactgattntgcatttaccatcacagatagtggtacatatacgagacctaattgctgctcttgtcaaacacatgcaatctgctcaaaactntgtcttgctaagctcattgctaattgtttttgccagactggcaatatcgccaacttttcaaattaatttgaatgattctactatcagtttt

SEQ ID NO: 39836 - DNA, 372 bp, Glycine max
  unsure (1)..(372): unsure at all n locations
caagggtgaatagtgattctaaagactgtgctagtttcgatggcggtccaacatcttatcctcttggaggcgagcgagctcggtcgcctgaggcaaagaaagagggcgcagagcctgaacttcccggcgaagttccagaattaaccttgagacgaagcaactcagcaagaaggaaggggcaaggcccacaattagattcgccaatcgttcaatctttgtaaggtactcgctgacagaaccggtatgttggagtttgaacaaagcgccttgacgatcgtcatagaatgagatagcanaccgcgattctagagcctgaagcatggccggctaagaaggaaaaactcatttctagacatccactggtaccacgac

SEQ ID NO: 39837 - DNA, 378 bp, Glycine max
  unsure (1)..(378): unsure at all n locations
cgtaccaagcttcaattggagtcttgtcttttacagacttagttggacatctgttgagtatgtaaacaacagtgtagactgcttcagcccaaaatatgttaggtagtcccttttccttgagcatcgatctagccatctccataactgtgcgattctttctctcggacactccattttgttgaggagaatatgcgactgtaagttgtctctcaatgccttcatcctcacaaaatctttcaaactcgcgagaggtgtactctctgctgcgatcacttcttagtgactttatccgtcttccactttgattttcagcaagggccttgaactctatgaatactccaaagacttctgatgattctnttagaaaatatacccatg

SEQ ID NO: 39838 - DNA, 399 bp, Glycine max
  unsure (1)..(399): unsure at all n locations
tgtctgcatgaatccttgtttatatcgagacgctcgatattgaatgttgaagctctgagcaaattcaaacgacaataacgttttactcggatgtctgattgagtcccgtaatatatcgagacgctcgaaattgattgttgaagctctgagaaaattcaaacgactataactttttactcggatgtctaattgagtgccgtaatataacgagacactcgaagatgaatggtgaatctctaagcaaattcaaacgacaataactttttactcggatgtctaaatgagtctcgtaatataacgagacactcgaagatgaatgttgaagctctgagcagattcaaacgacnactacattttactcggatgtctgattgagtcccgtaatatatcgacacgctc

SEQ ID NO: 39839 - DNA, 322 bp, Glycine max
gcgtctcgttatattatacgactctattagacatccgagtaaaatgtgattgtcgtttgagttggctcagagcttcaacattcaatttcgagcatctcgatatgttacgggactcaatcagacatccgagtaaaaagttattgtcttatgagttggctcagagcttcaacattcaatttcgagcgtctcgatatatgacgggactcaatcagacatccgagtaaaaagttattgtcgtttgaattggctgagagcttcaacatgtcaattcgagcgtctcgatatgttacgggactcaatcagacatccgagtaaaaagata

SEQ ID NO: 39840 - DNA, 407 bp, Glycine max
  unsure (1)..(407): unsure at all n locations
tatagtaaaatataatattttaaatattattatattacttattagactttaataaatacatttataatcttcagtatataaatatatttaatagtttgcgtacccattatgcaatgtatataatcagatattttgaaacatttaactaataacgaacttatacttggtcccaacaacaactcttctcgtcaagctccatacgaaaattcaaccaattggtgcagaagactagctcaaattgacaacactcgagcactctcacactttttatatacatgggtcatcgactaaattctagaagacaaacctaaaagaaacagaataatggtctacgaattctgctgttcccatgctcgtganacgaaatttatttccattgattatttggaactaacatagaacacaag

SEQ ID NO: 39841 - DNA, 360 bp, Glycine max
  unsure (1)..(360): unsure at all n locations
atagtgcccttgcgacgaactacactgtcgccagtgggcggaatatcgaagaaggcctgaccgagagccctctcgaacaatagcgcaatctgaatggtgaatggagcctgatgcacaatattattctcacgcactggagcaggatatcacaccgactatggtgcactctaacgcatatctgctttgaagatcgacagatgaagcagtatccactatccgccagagccagtaacctgataccaataggcaaatactgtgtgccatgatcagcanataattatttcctttatgcatgttatggagctggatgaagggtgtacagttgcaggacagaataaatgctcataaaatgtactcttg

SEQ ID NO: 39842 - DNA, 294 bp, Glycine max
  unsure (1)..(294): unsure at all n locations
aagtttttcacaatctgagtagcacatgtgattttctccaaacttgtttaccaaagagtttttactctttggtgatcgattaccagattgttgtaatcgattaccagtagcaaaatgtttttgaaaaagttttcaactgaatttacaacgttccaattgatttcaaaaagctgtaatcgattacaatgttttggtaattgattaccagtgtgcttgaacgttgaaattcaaattcaaatgtgaagagtcacattcttttacaaaaaagctntgngtaatcaattacatttgatt

SEQ ID NO: 39843 - DNA, 452 bp, Glycine max
  unsure (1)..(452): unsure at all n locations
tggacttaccttgaattaattcctttgatagttcttttgagccttgtttcccttttcttgttttgaagctcactacaagccttaagtgaaaaaccatgatatcaccatatccttaaggaattntggagctttggaattgttttgggaataagtatggggggtttttgtttcattggacaacttgttttgttggctatgcttcatgatgtattttgggccatacttgatgtacattgtatattggttaaatgttggacatgctgaatgaaatgttgtttctcanaggctatagagtaaaaaaaaaaaaatattcgaaaaaaagaaattcgaanaaagaaaaagaaaagcaataaagttgagtgaataagatcttaaatggcacaagaatgatgaaactcttcatnngttaattttatctttacttctttntaatttctttntttttttcttaa

SEQ ID NO: 39844 - DNA, 244 bp, Glycine max
  unsure (1)..(244): unsure at all n locations
tctactnttctgtttgttaatttatnttttcttgtttttccaacattaaaataattaaaaaatatattttttgttatgaataattttttggtgaatgttcatatcttcgnttatctttttttgtttatctttatttgcattaatttttttaactctctcattaccttttgtatctataaatatattactcatctttaaatgaaaatacacaattctcattctttctaaactctccttttctcta

SEQ ID NO: 39845 - DNA, 446 bp, Glycine max
  unsure (1)..(446): unsure at all n locations
gaagtgaagcanatttggttcagccccttaggcacttctctctctttcngaattgcttaggaaaattgtttccgtgaagaaaatccaagccaaggcgcttccgtaacgtttctgtaacgtttccatgagtgatttcgcgaaggttttcgaccgttcttcgacgttcttcattcgttcttcagtcttcaacgggtaagtacctcaaaccaagcttttcaattcattctatgtactcgtggtggtccacatttgngttcatgtatttttattctcattttcatttacctttntatacccccttttgacgtgcttaagccatntagttaagtcatttctcgcttaacctaanaataaaataatataataatactaaaaaataacttttagtaaaataaagcanaaaatcaatcggacgttntctctttgggatntctcattcttaattg

SEQ ID NO: 39846 - DNA, 235 bp, Glycine max
  unsure (1)..(235): unsure at all n locations
atatctctttaacacatcccctcatgaaaccgncatctgggcttggaggatggacaaatgcataagcccatttacctagtgttgaatttgatttttttattggaaggatcaagaatggggccagcaatgattgacctctagaacactntgatcataaaggctctattaccatgtcatgacatgagccaacaattgacacatgaagcagtttatatttagtgttttaatcattaat

SEQ ID NO: 39847 - DNA, 439 bp, Glycine max
  unsure (1)..(439): unsure at all n locations
attttaccaaaatatttaggctnttattgttctttttgttacaaattatatgtatgcaatctttgttttgtaaagagtcaattttggaattatgtttttttcaaaattttcataaaaaaaatctacatttttttctatttggttcaattagatttccaaagtagaaatcctattggttataattntattttctatttggttcaatctgatttccaaagtagaaatcctattgtttataattntatttccagaatcattttcttttttaaagtctgaaaattctattttcaaaatagtttgtacacaagtcttgcaaaaattcttatagtataaactacagtgaactcttaatggtntgtggngatatcttttacagaaatgacagtctttatgatctggtcctatgtngaaatatatntcatgttcagagtcatttatg

SEQ ID NO: 39848 - DNA, 568 bp, Glycine max
  unsure (1)..(568): unsure at all n locations
gtggctttggcccatgaannccgncttgttcccttgtatcacgtgcactatatatactcagcctgagatgacgaagtggtgaatggtgaaacttcctgcttttatttgttaccacataatggtacctggagatatgtcacgggggtcaagagaccttggggacctcaagtggggtgctattgcccaaaaccaagcttgaccaatcccgacccaccccgagcataatcggtcagtgagaacctgtgatgtacctaaacaggcgagctcctggccagtcaccgattaaaggaacaaagaccaccaagccagganggttgtggtggctggccagctcttaaacttgattgatatgtgagatatggtctctggtaatcgattaccaacggtgggtaatcgattaccacgcttatnaatgaagataggaggctaagatggtctctgggtatcgattaccaccgngtgtaatccattaccaggcttgaaaacgaggtcangaagccatganggcttcttggtatcgaatacccacgggtgtantcgattaccacgcttaacaagggaacttggg

SEQ ID NO: 39849 - DNA, 560 bp, Glycine max
  unsure (1)..(560): unsure at all n locations
tattggnnccggatcttgaagcgttgacaggcgcgaaccttagaaaacctccagcatgcaagccttggttacatgttcaacccatcctctattttacatgngaagagtntgacttnnttagaccatacttcatgccagagtccccgtgtttgtgtattggatattaaatgagtatagcgacacgaaataatgcgagtgtaccatatatcagattataaagtacacaatgatctgtttaataacgttttacagatgcaaaaaacatcacatttatttaattatcaattgttataacaacatatctangcacatcactcaactaaatatgatatttattgaactttctaatcactattatatacaagtgaatacatcattcaattaaatattaaattttaaatcatcagattgtgganataaattaaatgaatacacaatctctaaaaaatattttaacaaaataatacatatggattcctaataaactttaatcttaaatttgaggcaatacttgtataacaccagattaatatatttaaatgattccatcttatcttaag

SEQ ID NO: 39850 - DNA, 296 bp, Glycine max
  unsure (1)..(296): unsure at all n locations
cacagcaagactaacttttctctctctgcttcgtggacgttagataatgggataccaatccatttgctaacaatctctgtgatatcaaggtcagtgacctcttctccaaataaagaatgtccggactttctgaagtcggttaggctcttttcagcttcttctaattggcgctgaagggacatcaaagttccatacttaagctcggcagcacggttcatgtcataatcacgctcagcagctttcatctctaagttgactctatcaatctatacacgtgtntataacaattaagtcgc

SEQ ID NO: 39851 - DNA, 349 bp, Glycine max
  unsure (1)..(349): unsure at all n locations
aagaactcccaaggattagcctctgatatgcccaaattntgtgaggcagtggaattcttgaagaagtatggtgtggtttgtttgtgtttcatttttctttggttcagaatttctttcacaggccactatcaaaaagggttaagcattgaggagatgcttttattttctttcatcattntgttttgtaggctttcagtaaccgtgttatataaaaacaatcccttacaacttacaagttacaacaanngtttttgttatgcatcacaattgtttaaataaatgtttagtctcatgatatgaactacaaaatgctgacatgaagttaaacagtcctccaatcctactggaa

SEQ ID NO: 39852 - DNA, 500 bp, Glycine max
  unsure (1)..(500): unsure at all n locations
ntccattaaccttcacgtggtcgttaagaatgttggctccattatggcattttcacgctgacggcgntctcagccccacctgccggtgatggccattgtgctccacacgaacaattaagggcttttgagaaagtgcataataccgccaagggccaacaacgggtgagagtcaaaattcatgtttgatagctcttgagcagggntgaccggcctgggactatgagaattccaatgggtttgcacagtcttcacattggagatgataaacactccgtgtcactttaggcagaaacacttggaattatcaagtcctataattttcgaacgttacattccattactcacacaccaccaatcgcctttttcagcggaatatacatatatagtacctgctaaataacctcaatctctacgtaagtgtataatagacagattaatagtgtgcgtattgtcagggacattgtaagtttacctctagactcctacatggtgctctggtn

SEQ ID NO: 39853 - DNA, 190 bp, Glycine max
  unsure (1)..(190): unsure at all n locations
tgcaagctttttataggaagattaacatgctttttgtatgctagacanttgataggttaactatgattttgaatgaatatcacactacaacgtgaaattaaatagtttgttagataaaatagaaagctttttgaaaaggatatgattntcacaaatacacatgtntaanagctagactctaaatgtatca

SEQ ID NO: 39854 - DNA, 438 bp, Glycine max
  unsure (1)..(438): unsure at all n locations
ctttcgcacagcttacggtgatttctgngacctagccatggtttaagtctcttcagaggccattgcctcccttgcccagtattatgatcgaccgctgagatgctctacctttggggacttccagttgtcacccatggtggaagaatttgaagagatcctatgatgtcctctatggggaaggagaccatacctcttctcagggttctatccatcattagctagaatttcaaagatagtccaaatctcggggcaggaattagaccatggaaagcaagtcagaaatggggtggttggaataccgagaaaatgtttggaggcaaaagcaagaaccttggtaggtagaggcgaatgggccccattcatagacattctcgcactggtgatcttcggaggattcctctntccacatgtggatgggttggtggatctagcaatgat

SEQ ID NO: 39855 - DNA, 437 bp, Glycine max
  unsure (1)..(437): unsure at all n locations
ctggaactacttcacattgtctngatggngcctatgcaagttgaaagccttggaggaaagaggtatgcctatgttgttgtggatgatttctccagatttacctgggtcaactntatcagagagaaatcagacacctttgaagtattcaaggagttgagtctaagacttcaaagagaaaaagactgtgtcatcaagagaatcangagtgaccatggcagagagtttgaaaacagcaagtttactgaattctgcacatccgaaggcatcactcatgagttctctgcaaccattacaccacaacaaaatggcatagttgaaaggaaaaacaagactttgcaagaagctgctanggtcatgcttcatgccaaagaacttccctataatctctgggctgaagccatgaacacagcatgctacatccacaacagagtcacact

SEQ ID NO: 39856 - DNA, 382 bp, Glycine max
  unsure (1)..(382): unsure at all n locations
atgcaagcttaatatatctatatatggtttanaacaagttttccgtcagtggtaccttaagtttcatgggataatttcttcattnggttttgatgaanatcccatggatcaatgcatataccacaaggttagtgggagtaaaatatgttttcttgttttatatgtagatgatattntacttgtagccaacgatcggggtttgctacatgaggtgaaacaatttctctctaagaattntgacatgaaggatatgggtgatgcatcttatgtcatcggcattaagattcatagagatagatctcgaggtattttgggtctatcacagganacctatattaacaaaattctagagagatttcggatgaaagattgttcaccaagt

SEQ ID NO: 39857 - DNA, 485 bp, Glycine max
  unsure (1)..(485): unsure at all n locations
agtatgnnntnncctgcanncaagtnntcttatacctgatacgaccataatactaactgcttctttatttgaacgctcggatttctttttgtgcacaagaccccaagatctcaaagcggttaaccaagggtgcatgttatcaaataataatccccggacgaaattanggtatgacaacatagtgttcaatttaatttcttcattataattataaaaaaaactggcataatagggctcttgaccttgtgtgtgttacactttagttctgtttttttactcatttctattggagaggctcttgtgacaaccacctgaaataaaatcttttctacgtcagatgtaacttgacatggactcaattgaaaacatcngggcgcaccagttgaaatctgaattctaaccctatgtaaaacattggaaactaatatcttttttggtgatcaagggtctactatctgcttattgacatctgtatgtgacatcta

SEQ ID NO: 39858 - DNA, 244 bp, Glycine max
aactgatcattgcttatgttccacaacatgatacttcccactatttccatgaacgagattgggattcctttgcagtataacaatgtcatgacatctgaagatgggaaatggtgattggcttatagagagaagatcgaagtctacgagttgctactgcatgatgtgtagtgacttgtgttaagcaatttcatttctctctctctaaatcctttgtataatctcttcttaacttaacaatatattc

SEQ ID NO: 39859 - DNA, 437 bp, Glycine max
caatggggtgtaatataggaattttgaaaggaaaaacggtttatctgtagtcaacatgatttggagggtattgagaattgtaaactaagctagttcgattatgaagcaagaggatatggagaccaattttttattttgttgaaatctttgatgttctagtctagcacgcatgccaatatttcgtatttaaatttagaatcaattttaggcatttctcttttcttatatgtaagtgtatgaataggaatagttgtcctacaaatactccaggtctctaacatagctcacagtagacccacattatatgaatgtgaattcatgtaagcatacgtcttggcgtcatgcacaatgagagtatctcttattatcatgactacccctcatgttcgatgtgctatagtattagtaacagggcatagtttacgcatatcacatta

SEQ ID NO: 39860 - DNA, 188 bp, Glycine max
ctagatgcctctgagtatagccacggaatgatatgttctcttgagtctggagctgtttggactctactgactctttttgaggcaagggtagtcatagctgtaacctttctcattttgagatgaacttgtacaaatctgtcgttcatttcatcaatctcactccagcatgtagtcttagtgggagcgat

SEQ ID NO: 39861 - DNA, 413 bp, Glycine max
  unsure (1)..(413): unsure at all n locations
atgcacgtgagcccatttttaggtaagagatgagntttactctttcggggttagaatgaacatgtgtagagatcaagaatcatatcgagatttattttgggatgtttaatgtattgtgattattccttaatgattaatatcacgagattgttgtgtttgatacgtcaattgatgccctaatgtgaattagtagataaaattgagtgttcttggtgcttttgacctataattttgatatgattatgtganattgctcgggggagtttacctcccatgttatgagaagtatttatgtataattctttcgcgtacaaaagattactatatagcatgataattgtatattggattggaagttggatcgaattggttaagtataaatgatgtgtgaatgtagatcatgtgataaattt

SEQ ID NO: 39862 - DNA, 348 bp, Glycine max
  unsure (1)..(348): unsure at all n locations
gcagtctttacatcacatgttatataggatttntgtttttttcaaacttagcgcaatgaagagaatatccactactctgcatggcaaggataatgaaccttcacctcactggatagaaccatacgtatgtcgtaatccctgtttttatggacattttaaatcagtaacatgtgtcaccaataatgacctagcctccttgcgtattttcatattgcatataaagtcatgtacaatccggagcctatgagtgtgaatattatgtgatgcattggatgtggcgacagattgaagaatgaatggatcaacgtatgcatatgttcgaactcgatgacagtcccgaactttatc

SEQ ID NO: 39863 - DNA, 396 bp, Glycine max
cggatgatgccgatcgaactattcctaatcgacatcattcaattgttattcagggattgaatagaataaccaatggccggtgtcggtcgttatatgaccccgactgatatctttcagccgacattgcgcaatttcttttacaaacgctggccgataatgtttttttatttacggtagaggaagttttatgttttggtgttgcctataaaatttacaacgtaggacggctatgtttttcggtgcgagctcaaccgaaggttcgttccgaccgacactggcatgttgctcttctcatttacgaggataagagaacgttcgcccaccccggcaaaaacaaaaaaagataaacattattcacgcatattgaaaaataaatgatagctgacgtctgcatgg

SEQ ID NO: 39864 - DNA, 515 bp, Glycine max
  unsure (1)..(515): unsure at all n locations
acatagacagtatcatctgcatattgcagaaagtnaattggcaccttctgctnnccttctaaataactgctgtacagaccttnggatagagctgtcctcatcatgccagtcaagccttcagccacaatattgaaaaggaaaggggctaaggggtccccttgcctcaaacctctagtgggggaaaattcatttgaggggctgccatttatgagaatggatatagaagctgattgattgcaagcattgatccatttcctccatataggacagaaccccattctgaccatcatataatccagaaagttccatgagacagagtcataagcctttgcaaagtccactttaaacaccagagctggtttcttacttcttttagcttactctattgcttcattgagaatcaaagatccatgaaggatgtgtctatcctttatgaaagctgtctgtctctcatcaatgagtccaggcaatatatttcttaacctattggccaggaatntaacaatgatcttata

SEQ ID NO: 39865 - DNA, 533 bp, Glycine max
  unsure (1)..(533): unsure at all n locations
ggtgaacatgaacccggaatgaaccatgagancgagaacttgagagactcggctgcagcatttaattaataagcaacttgtggccnaatanatatgtncattaagcccaatatacttacgggtttatataagatatatacttatctatatacatagatatatatatatacacatacataatatgcacatctaagatatatgagtacatatcattataacgagtcgtataatacgaataatatgtaagaacaagattcggtggccttgtttagacatgtngacctcattaggcctgtgaacctatccggtggttatacgcccttttgtaaacacgcccattatagacgtccagtacatatgctttactaagccaataacgttaaaaaatattggacaagtaattcgcaagtcaggacactaatgagctggggcagtctacgctcgcaagactacttgttcctccttacttgagagggcctatcatatgactacaacatctcacattgcagatagaaccattcgtgtcctatgct

SEQ ID NO: 39866 - DNA, 556 bp, Glycine max
tgagagatgttgaccctgagaaccgatgatacgatgagcactggaccatcgaacaatgctcgagaggatgctcaatgtttataacactagggagagatttatagattgttgatctcacaattgacggaagataattggagataagttgatctatgagtcgcgtcttactagactctcatgtttcaaagcttcaacaagtgttacacatgcttctatgtatagactatgtagcattcttgagaagctactttgagaaaacttcctcgagaagctagagcctaactacacacacccctcaataactaagctcacttcctgtataagctctcttaagaatattcctaaagaagctagagcttacgctcacatacctatttaatagcgaagcacacctcctcgagatgaatagctataacttagctacacaccctctataacagcttagctcacccccatgacatatgaacatgataatacatatataaaatgcttcgacaaacactactcagaatgcccctaatacaacgcttaatccttatatattgaatggcatatg

SEQ ID NO: 39867 - DNA, 355 bp, Glycine max
tgacctcttcatgggaccatcctgtgttgggatgcgaccctcattagaccacttcgatgtacttggcacccatcgttaggcaatatgagaagttccatgacgtgccggaagtcgagagaaagcattgtagcacgatccgtgatgtttcgcgacatgccggaaataatatgaagtgtacggtgcaatccgtaaagttcgtagcattccggaaggcataaaggatggtacgttatccgaagttcgtacatctgaagaaacaagcatcgtacaaatcataagttctaacgttcggaaagatcaccaaaaagccgggggtctagaaaatggggtcaaacaaccagcactggcctcaaaa

SEQ ID NO: 39868 - DNA, 377 bp, Glycine max
catcaagctgtatgctatctatgtgctatgtatgtcacaatgttcaacctatcactgatcgagttcatggtaatcatgagcctcagagtcaatgggagtatgcttttgacccaaaataaattacatctctttataaatgtgtataatggaaacaaatgattcctaatggcgacgcttagcaatatttcttttctggactccgactttattagaaacactgttcattacattattcactttcccacttctctaactattgtttacatggtagaatcagtgcacaaattacacaatatgaggtaaactctttttcataatctaaggtattgctcttttgtctccaaaatttcacaatgccacacatcttgtctcatatt

SEQ ID NO: 39869 - DNA, 227 bp, Glycine max
  unsure (1)..(227): unsure at all n locations
taacacacataaacccttaccccactatgctgcanaaagccaccgccaccaccacctcttgttattacatcagcttaacacgttcccacgcagaagaatgattcatatcactggtttctttcccttgccctatatgatcccacacgcctcttctttcgtgaatgtgtataatgaaatcgggggcttattatacacaagacaaacgtgcacaccagttggcacatgta

SEQ ID NO: 39870 - DNA, 488 bp, Glycine max
  unsure (1)..(488): unsure at all n locations
gactgtgtacaacgacagaatttactttgagtgtcctcatngatatgttctacagttggttntacatgaatttctaattatcataacatgattcatggatatgatctangcattctttctttctttacattntaagccactggccagacaactatcccaatgtatattattctaccatttgcaagcccttngagccaaacacttgatattttgttggaacactaacctangataaaagtttcctaccttacctgaggttaggagagcaagggtgttttgatggngatttctatcanttggtgattaatgtgatgtacatactctgttnttatgtgtattaaaggaaatttaaatattatcagaaaagaaaagaacaaaaatagaaaagaaaagggaaaacaatgttctttgtagataaataaatgtctgaatcatgtacagagttngtgaaatatctaaatagaaagaagtgataacttggttgaaac

SEQ ID NO: 39871 - DNA, 329 bp, Glycine max
  unsure (1)..(329): unsure at all n locations
gactgaagganatatgtgggccttcattgaccactacaaggaatatctaagcctagtagcaactcatgagtgaaggctagaggacgagtacgccaaggtatcagtcctgcaagcggaaagggaggcaagggaaaaggtgatcatttcattgcacagagaagcaatgatgtggatggacatgttctcctttactttgaatgggagtcaagagcttccctaactgctagccaaggccaaggcaatggcggatgtgtactcggctcccgaggaggttcacgggctcctcaattattgccaacacatgattgatctgatggcccacatgatta

SEQ ID NO: 39872 - DNA, 443 bp, Glycine max
  unsure (1)..(443): unsure at all n locations
ttctgtgagcctgatgttaactctntactatctatttatatgtgtttttatgtgttcattgcttctatctacatttaattcttgcatgcttgtgaactggtcatccatgagtgtgtaaagttaggattnttagcattggaaagtgttttaaatccttagaactggatagagcaggctagagaactgtatgtttggacacggagtgcaaggattntaattttaatatgttgtaatcttaatacaattcgtttaggctaagttcgacgagagatccgagaacgaggtttaaatagaattagcccattcatgcgaggaatcgtggtttggggtagttgtcctcaacatagaacacaaaaacaaccttanatagagaanaatacctaattacatcaagttactcagtagaaggacccaatantttaatcatcagtctatctctcaca

SEQ ID NO: 39873 - DNA, 371 bp, Glycine max
tctctacttttaaatgtttctcagagtttataacttgctacaaggactttttccagttaatattgtattttccttcattgcattccctataattttcgtctttacactttagtgactgtaatttattgcttttgattttcgcgatgtgcaatttatgtcaaagcaaagggtgtacgccatccatcttcttgcactggagtttatctgccccacagaaaaagaacagtgcatcttgtactagacacatgcaaaagaatcacgaaatcgttgttaattaaatataattaagttacatgcatttgatgtacgaactagtcccgtattcttatccttaccatttcattgctgagttcaattcaattcgcaggtat

SEQ ID NO: 39874 - DNA, 375 bp, Glycine max
  unsure (1)..(375): unsure at all n locations
ctgaggtacttctctctctctctctcaatagctgagganaattagttccatgaagaanatccaagccgaggcgcttccgtaacgtttccgtgagtaattacgcgaagattctcgaccgttcttcaagattcatcgttcgttcttcgttttcttcggtcttcaacgggtaagtacctcaaaccaagcttttcaattcattctatgtactcgtggtggtccacattntgtttcatggtattttattctcgttntcatttacttnttataccccctnttgacgtgcttaagccatntatntaagtcatttctcgcttaatctanaaataaaataaatttccaccgatcgttngaattgtatcatcccgttaatttggt

SEQ ID NO: 39875 - DNA, 462 bp, Glycine max
  unsure (1)..(462): unsure at all n locations
gttgtcatcatcaaatagtggagaatgtgaatgtatgtatacatgattntgatgatgtcaaagaagaatctaacaaggctgcttcaaatgataagcatttgcttcaagaataattcaagattgcttcaacaaacaaagccttgtttcaagattcactaaagaccaagccttgccttanaacaaagtgctttcaagacatgcaaggctctggtaatcgattaccaggaagtgtaatcgattaccagaagacagggttgagaaatagctgttgaaaaatgttttgaatttgaattttcaacatgtaatcgattaccatatgtctgtaatcgattaccagcaacgaaactttggaaattcaaattcacaagtcataacccttcacattataactgtgtagatcgatacacaaacattgtaatcgattaccagtggaaagtttcagaagatctgcaacagcacatc

SEQ ID NO: 39876 - DNA, 367 bp, Glycine max
  unsure (1)..(367): unsure at all n locations
atatcatgngaacttataaacatattattgaacccattcagacgtatagttttattggagtaaaaagatngaatatatgccttgagaaattatatttcatatttacgtttttcattatgcctttggaacaatttttatttcaatgttgttctgagactcctcaaatctatttgtgcttcatctatttcatttgaatntgaactggattggtgtagctggtatgggattggttacctgaatcaattataacaaagtacaatttataaacaagtgtggatggatttcttaccattatgtatagtagtaaaatacatgatcaacaatatgatgacatcatgataatagtaaataatctgacacagatata

SEQ ID NO: 39877 - DNA, 508 bp, Glycine max
  unsure (1)..(508): unsure at all n locations
caagactgtatcatgtgtcctactaatttataaattacaacgcgacttgtatatcagaggcatgactggaatcagtacatgatatttaatattaaatagagtttaatcaacaatctcgttctataattacttaaatcgattaatcacccaagttaattcacatgcatttttaataacactaaaaactaggtacatagaataccaatatttttgttcatttgaatgtgtccatcctgtgagatgactattggaggaaatcttaagcaatttctctgtcaagatattgatgtgtgattattaatttattggcaagtgtattaattcgtctaaatagtattntaaaataataagatcgagtattaagtccacaaaaactntgactgtactcanagtttgtatacgtctaattntaaacaattaatgaattaaattcaatattggtcgaataataatacagaatggtaaattcaacatacataaagataattaagtagagcatattaaagag

SEQ ID NO: 39878 - DNA, 329 bp, Glycine max
tggggagttttgtatttggaaaagtaatactgttaaatggtaaatgtgtttaaagagattatgataagaaagtcacggtaccaggggttcaggatcatccagcatttcctaagtaagttgaagagtccagatgtgctttctggatgaatgtctctacctgccgcatgtttgccgctccagtggtggtatgaaatgtatgtcaaaacagagtgatggtcacatgcatcaaaagtgatgttggttgactcatagactttcatatctttctggaagttttggagccatctgctaatacactttgctttgtgtggcagactcgatttcataat

SEQ ID NO: 39879 - DNA, 492 bp, Glycine max
  unsure (1)..(492): unsure at all n locations
tgtatgtgatgtgccatcatnnttcttctatttctattcctcttttgcaccatttttattttgattggtcttaattgtcaattaatcagacagttttattatttgggctcatttagctaatttgatgtttttaatctaatttcaggaattaatgaaacattgggcttaatccggattttggttatggacttgaagagggcaaattaagcagcgcttaccttagttaattaggaaatttcgcaattttattttatgttgttcagtgtttatttcgttttgggccagagtattgtaatagggcccagtgactctgagtgactctttttaaatagcagccttgggattcgtgcaaggcattctgttatgctattcattattcagagcttttgttttaagggtttcgtttttctgctttgatgcttctgagttcgtaatgcaattttacgttttctgcttctaattacannattcgtcttgcttcttcttctactc

SEQ ID NO: 39880 - DNA, 275 bp, Glycine max
  unsure (1)..(275): unsure at all n locations
cacgttatttcttttggctttccgacaaggaagacataagcatttaaacactatccaaaacaacccaaaacgttaggaaaacataaagacatcttaactaacccagtaggtgaaaggaacacgaactntaactacctacttatgaagaanacacacgcaagttccacaaaagaccaaattaagagctataaacgaatacccacganaggctagtaaagaaacacaacttcagctaagtaatgaagcatanaagaccgaaccttggatcccaagaa

SEQ ID NO: 39881 - DNA, 583 bp, Glycine max
  unsure (1)..(583): unsure at all n locations
tatgtgtccattgagacccgngatcttggagccttgcagcngcgtganttcnttacnttngtgcncgctgcaagctttgtgttatggtctttgcagcgaaaagttctatgtggtctgaaaaaggtgtantagtcatcctgcttggacgaatgagaaaactggnggcaatgaagatggtgaggatgaatgagaagcccgtgctgtgactgccattcctataccgccaaagttcccaccaacccaacaatgtcattactcagccaataaccaaccttctgcttacccaccgcccaggtatccacataggccatccctaaaacaaccacaaagtcttgtcttccgcactttcaatgacgaanatcacctttagcacaaaccaagagcaccaaccaagaaatgaattttgtagcgagaaagccttagaattcaccccaattccagtgtcctatgctgacttgctcncatatctacttgataattcaatggtagccataaccctaactcaggttcatcaacctctatttcttcgagaatacgactcgaacgtaacgtgtgcttgtcatggagaaagcctcggggcctt

SEQ ID NO: 39882 - DNA, 191 bp, Glycine max
  unsure (1)..(191): unsure at all n locations
ccttcattaggacacacaatgggagaagagccaaccatattttctttagagctaatatgcaaaaggactggttggaacagagcccacatgttgttacacaggttcaaacgatgtcaatctgtggtaagagtanggctggaacagaattatacagttcgaaatgtagctggaacagagtgataaaagtgaga

SEQ ID NO: 39883 - DNA, 428 bp, Glycine max
  unsure (1)..(428): unsure at all n locations
ataatcctaagtggtacaagaaaataaggattaaatntaatcaacaacttaaccaatattacaagtgtgtcttcaaatgacacattggcatggggattattatattacttacataagagaaaggcttcactagatgtctgggccatccaatgaatgagttcactgcgtccctgacatactgaatctctgaagtgggtaacaggacaatggcttcaccatcgtatacagtgtctacacacacccttactacatcatctccgtgagcaacaatgtgtatcatgccacctactccgaagacctttcgctctgccaccagctgtgtactgtaccacatcaatgtagatcccatactcatgtctcaatgtaaccgctcgtaccaacacatattagcagctcatccactctcttcggctacactgcacaaacac

SEQ ID NO: 39884 - DNA, 394 bp, Glycine max
  unsure (1)..(394): unsure at all n locations
tcttctttaacaaaaaatttggaactacaatgattaagcataagctttaaagcttgagagtttgggtgacctagcctaaggtgccaagtatataccaaattaggcacaacattattacaatcaacaaaagaaacaattttatactataagagttagaagttggataagacacaacaaagcaaaattgaagattggagaaatagtacacgccattaggtccatcctctccttgatgaaggattntattggaatcttaagatttaacaacgcaacgattagcatgaaattcaaagaaaacatgattatctttagcaaaaatgcttacactaggtatagtcttagtgaattgaggaacaagaagcatatntttaagaacaagctaagcattatgact

SEQ ID NO: 39885 - DNA, 242 bp, Glycine max
  unsure (1)..(242): unsure at all n locations
acctcttctcctttgtcttccactgcatctccatggtggaaaatcaccattaaaggacctcattgaagctcaaagatccaacctccatagaagctccacaagcaagcttccatcaggagagaaagagtaggagcacgaaatttgtgctctaaaagagctttganatctgaagtttaatattcaaatgatcaaagttgaaaaaatgcacacacattacctctatttatagcctaagtgtcaca

SEQ ID NO: 39886 - DNA, 488 bp, Glycine max
  unsure (1)..(488): unsure at all n locations
ctacagcagatgccactctattctaagttcttgaaggatatgttaacaatgtaacataagtatattcaccaggaaaacatcgtagtggaaggaaattgtagtgctgtgattcaaaagatccttccaccaaagcataaagaccctgcgagtgtaactatttcttgttcaattggagaagtcattatgggaaaggctcttattgacctgngagccaacattaatttaatgccactctccatgtgcagaatgttgggagagttggagatcatgcccactaaaatgactttacaactggctgaccgctccattaccagaccatatggagtaattaaagatgtgctggtcaaagtgaaacattttatcttcccgacagactntgtggtaatggatatctgtgaagatattgacattcctgtaatattgggaaagccattcatgttaactgcaagtngcatagntgatatgggtagaaagaagctggaaatggg

SEQ ID NO: 39887 - DNA, 339 bp, Glycine max
  unsure (1)..(339): unsure at all n locations
atattatntatgcaaaagtttaaattacataaaatatctaacaagtatttaactcaagataataaaaaaccttacatgaattctaattagatacatactgttaatgaaatataaatttctttaaacttgatatcttataaaaaaaattaaaatatctaaacgtgagaaacatgtcaatatcttaatccaatttatagattaaaagataatcgtaagaacctctacatcactgcccctattattntgcatcattctcatttctcccctcacanaagaactcacatgacacatctcaagacataatacttaataattgtgctcattcgaatggtttaacaa

SEQ ID NO: 39888 - DNA, 364 bp, Glycine max
  unsure (1)..(364): unsure at all n locations
acaaacaggggagttagacttagaattgtatctcggtttgggatctatggtactgaatctatgtcaacagccaaacatcatggaagataaatcattttaatgatccaaatcctttccctcaaaagatgcctatacaataagtgacttaagcctgcatatcaggtatgttaaatgagtatgtacatcactaaactaacctatcttcacgagcttcagcacccttgtaacttgacaacttatggacaaatgcctgcatggtttttgctatatcactgngatcaaactcgtcagcatttgaagcagatgatggaccagcatcttgaccctcttttgctttccctttctttttgtgtttaagtcatat

SEQ ID NO: 39889 - DNA, 442 bp, Glycine max
  unsure (1)..(442): unsure at all n locations
agcttataatatattgatacgctcganattaaatgtctganactctcgggaaattcanatagccataaattttcacacggatgtccgattcgggcgtataatatgtcgagaggctcgaaattgaacaatggaagctcttgagaaatttaaatgggcataacttttcacacggatgtccgattcaggcttataatatatcgatacgctcgaaattaaacatcggaaactctcgagagattcaaatggtcataactcttcacacggatgtccgattcgagcgcataatatgtcgagaggctcgaaattgaacaacggaaactctcgagaaaatcanatggtcataacttttcacacagatgtccgattcaggcttataatatatcgatacgctcgaaataaacatcggaactctcgagaattcaatgtcatactttcacacgat

SEQ ID NO: 39890 - DNA, 299 bp, Glycine max
  unsure (1)..(299): unsure at all n locations
gacattcgacttaaatgttatgaccatttgaatttctcaagagcttccgttgttcaattctgagcgtctcgttatgtgatttgcctgaatcggacatccgtgtgacaagttatgaccatttgtatttctcaagagcttccgatgttcaatttcgagcctctcgacatattatgcgcccgaatcggacatccgtgtgaaaagttatgaccatttgaatntctcaagagcttccgatgttcaatttcaagcctctcgatatattatgcgcccgaatcggacatccgtgtgaaacagtatga

SEQ ID NO: 39891 - DNA, 458 bp, Glycine max
  unsure (1)..(458): unsure at all n locations
ggtctgcattttctctccagggatagtaatnnttttgtgttgaccacttacctgtttaaataagtagtaacacatataatgtatatagttatatacctctttgtcacttgatgatccactatccacaggttcaggggaatcttcactgttaatgactgtctcctacaagtgggatgttaggaaccaagaattgaaatgaggaagaaaataaaagaatttattgactagtaagaaaagaacagaaaatatgagagaaaactctcctccaagggtttcctcttcacaaaggatntctcctttcacaaagagctaatgctcaatctacaaatgataagatccccctctctcctatccttcttcctctaattatatctaatanacccctttaactaacctaactcatagtagtctaactatattaactaactcttcattctccttgtatcctaacaatacac

SEQ ID NO: 39892 - DNA, 477 bp, Glycine max
  unsure (1)..(477): unsure at all n locations
ctgcagcttaactgattgcaacgtccattgattttaaatggtgtaatcgatactttatattggtaatcgattaccagtgtatctgaacgttgaaattcaaattaaattgtgaagagtcatatcttttcataaaatgctttgtgtgatcgattacatggttttggtaatcaattacatggttttggtaatcgattactagtgacaagttttgaatagaaagttaagagacataactcttccaatggttttcaggtttttctcaagattataactcttctaatggttttcatgaccagacatganaagtctataaaagcaagaccttgacttgcatttcaataactntttacataactcttacaatctttntgaactntntcttcttcttcctttgcccaaaaagctttctaagttttctagtttccaaaccttcttctttcacagaanacanaagtgtgtatatcttttattctcttc

SEQ ID NO: 39893 - DNA, 298 bp, Glycine max
gaagtagacccggagatggacaagacaatccgcagtattgtgagtagcattctgaaagatgcttctgtgcctgatgctgagaaagatgttccaacatcttccaccccaagtggttccgtgcctgatgctgagaaagatgttccaacatcctccgctccaaatgctgaagccctcccttcacccagtgaagaggaatcaacagaagaagaggatcaagcctcagaggagactcctgcaccacgggcaccagaaactgctccaggtgacctcattgacctggaagaagtcgaatctgatg

SEQ ID NO: 39894 - DNA, 393 bp, Glycine max
  unsure (1)..(393): unsure at all n locations
gcccctaagctctaattctacaagctctaagctcccgtttgatgtttcccttccgactttatatatcataaagaccatcatcacatcatccttgtatggcacattccaatgtgacacaagtaatttagactgcacctctacacacaaaaagttgtgctatctccatgcatcgttgtgcaccattgtcctttgtctcatgtcgaaactcgaatcctttcattgtcggtgtccaaatgtgccttacatctcacttgtgtcgtaatgggataagttccataagttgtacaaggttcatcacanaagtaccaaatcattacttgtctcatcacacacaattttacttcaagtacacaatcattgttcaaagaataacatggaagaatgaatctttat

SEQ ID NO: 39895 - DNA, 546 bp, Glycine max
  unsure (1)..(546): unsure at all n locations
tctccttgaccatgannacgcttgtacatagaagtcgtgcagcatcaaatggacgctgagctggcctaaattatgccaagctggtggttttttcactctagagacaccaggaccctatgattccaggagtgcggagacgccatccactacggaataaacactggcctatggatggagaacgcctagaagagcccatggcataactacatgtttgatgcactacctgccatatctacattatggttagactacctgccgtatgtacattgatatcatataaaggatattgagagggtggagtaatctatcacagactagcgtggagctcaaggacgtatgttcgcgctattgctctccttactcaatatctttacaatgatgcgaacaagacaatctatgatgaataggttnggtctgcttatacattcattaatgagaggaagaaactgtgtaattgcgagatccaataccgagcattccacattngcgacttgaggcaacaccgttggacatgatcttatgaacgttagcatatgtnctcttttn

SEQ ID NO: 39896 - DNA, 411 bp, Glycine max
  unsure (1)..(411): unsure at all n locations
cacgcgcgctaagcccgcgatctatactcgttgagcgagggggtgtctttctgagcgcgcctacgaagacccaaagctcacttcaacaactataaatagagggtcagtccaaaggaaagaaaacaccacgacagaaccccctctcctaggggtttcatttactccctttctttctttcacccttcctctcattgtaaagccctcaatggccatgagtggctaaacccttagttaaggtctggcaggcctataagccaatgtgatgtatgatgtactcttcactatntatcaatgcaataccaggtttttctttcctatnttcttttctggttttaccttgcatactcatctttatattctgttagggggtagatgctcgggagagggtaacttctaaaaataagatttaaa

SEQ ID NO: 39897 - DNA, 334 bp, Glycine max
  unsure (1)..(334): unsure at all n locations
tgattttgtagaacatgctatgggtagttgtcagttactattatgttagcttgattgcagaactgtctcttatggtgtctaatcttaaattgattacagaatcttcccattgtgtgacatcagtggtagctggttggacctggtactaagaattgcattccttaacgcatataataagccataatgcttatactttcactttgatgctgatgaatgccaaatatgatacaatgttttcctacattatctattangataaattactcggagctatctgggaattcatatacgtatctaattttgttgaattgagtccttgatcatgttttttttt

SEQ ID NO: 39898 - DNA, 279 bp, Glycine max
  unsure (1)..(279): unsure at all n locations
aagttattgtcgtntgaattggctcagagcttcaacattcaattttgagcgtctcgatatatgacgggactcaattagacatccgagtaaaaagatattgtcgtttgaattggctcagagcttcaacattcaatttcgagcgtctcgatatatcacgagactatatcagacatccgagtaaaaagttattgtcgatngaattggctcagaggttcaacactcaatttcgagcgtctcgatatattacaggactcaatcagacatccgagtaaaaagata

SEQ ID NO: 39899 - DNA, 346 bp, Glycine max
agacgctcgaagttatgggaagcttgagccattcaacgacatacttttactggatgctgatgagcctgcatatatcgagacgctcaaatgaatgtgaagcttgaccattcaacgacatacttttatcggatgctgatgagtccgcatattgagacctcaaattgatgtgaacttgaccaatcaacgacatactttactcgatgtctgatgatccgtatatatcgaacgctcaattgatgtgaactctgacaattcaacgacatacttttatcgatgctgatgagcccgcatatatcagacctcaaatgatgtgagcttgaccaatcaacacatacttttctcgatg

SEQ ID NO: 39900 - DNA, 108 bp, Glycine max
  unsure (1)..(108): unsure at all n locations
caagtgggcctggttgtatttaacccccctgttactaatgcatccccttctatgttttgaaatctttttcgtacgctacgaaactttacaagncataacgatacttat

SEQ ID NO: 39901 - DNA, 306 bp, Glycine max
  unsure (1)..(306): unsure at all n locations
tgagtcaaaggaccctatgcattccggtaatgcaaagacggcatttacgacaaatataaacacttacctatgcgtggagaaagcataaaagtgtccatggcatatctacattttttttgtactacctgccatatctacattntttttgtactacctgccatatctacattgatatcatataaaggttatttaaagggtggagtaatctatcacaaaaaagtgtggagtaaaaggacgtattttgtcgttattgcttttcttactcaaaatctttccaataatgtgaacaagacaatctatgatgaa

SEQ ID NO: 39902 - DNA, 333 bp, Glycine max
  unsure (1)..(333): unsure at all n locations
tcgggcgatggtgcacaacaagttttccacatccacaatgcgcgcataaacccaccatcccctgttgcccacctncaactgagctcacgtactcccacgtagcccatatcctcgtttctctcaacaccgggtccccatcaatcctcccaagcttccacagcatccaagcaaaacaacattcaaacagcacaagctatcatagccaagcataacagagcanaggcagaaaactctgctcaacacatcaaccaaaatcacagcttttctcacttaaagaccacagtaacaattccttcgatcaattcgtaaccgttgatcgactccaaatttact

SEQ ID NO: 39903 - DNA, 495 bp, Glycine max
  unsure (1)..(495): unsure at all n locations
cgtccaatcctctaataggatcatctccataaatataatcactttcatcaccatctccatcatcatcaatgccttcctcagattgtgcatcatcatcaggttccacgaaaattaaattatctagatcaagagcttaaaatagatatcaaagatgttatatcagaaatagttaaaacttaaaataatacacaagcacattntaaatttgagaaagttcataaattataccttctcttggtgttattaaaattgcattntatcttctcttttgcattttccatctcatatatgaaaagtattcagtaacaagattgatccaactccaacattgtagggtcagttggtgtgttttgtaatagactaatataaagtatgaactatgaactatgagtttatcgtcatttgtttggcaaatggtgcattntaaatatatntacttattattcatatnnttttttacgaagtagactcttaagagtctacgagtcgactcgt

SEQ ID NO: 39904 - DNA, 397 bp, Glycine max
  unsure (1)..(397): unsure at all n locations
gcttctcaaagaagccacgtttaatcttctggaggaagctcttaatgaagcttctagagaaagctacatggagctgcctcggtaaaaacgatgcccaacgtttgttaaccgttggatcttctcaaaatttggtctgcaactccacaagacacttttacatgatctgaccgttgggatctttgagaagatgtctggagtgtgctagaagcctcttaatgaagcttctggaggaagcctcttaatgaagcttctagagaanactacatgaagctgcctcggtagaaacgctgcccagccttcgttaaccgttggatcttctcgaaattttgtttgcaacttcacaagaaactntaccatgatttaaccgttgggatctttgaaaaatatctggatatgc

SEQ ID NO: 39905 - DNA, 456 bp, Glycine max
  unsure (1)..(456): unsure at all n locations
gctaactgacatgnccttagttagttattngattctgngagatntccccacttggcaagttgttaagcaattagtgggtagaagctataattagcaactggtggttaggaagcattttcaagccagaatttataatcatcttccttcttgtaatttctttccctaataatgaaaaacatgacttccatgctcatcttaattcattcatttcattgagtttccttgtttgttcaagaacttcaaattcttttatttgattcatagttgggattaaaaaaaatcatcttttgttgatggatagtgtgtttcgatttgcgtgagtagaagaatgaagatggagcgatgaatgagggaggaggggacagatgatgaataataatggtgttcctcgaaagacgacaaaaaaaaagaanattaaaatcttaagcatttattcaattaattttactatattct

SEQ ID NO: 39906 - DNA, 475 bp, Glycine max
agcttcattaatatgcttctagcacactacagatattctctcaaagatcccaacggtcagatcatgctaaattgttttgtgaagttgcagaccaaatttcgagaagatccaacggttaatgaatgctgggaaacgtttttaccgaggcagcttcatgtagctttctctagaagtttcattaagaggcttcctctagaagcttcctcgtggcttctttgagaagctttctcaagaggcttctttgagaagctagatccttatctatccacccctctattaactaaattaacttctgtaaaaataattacggatgaaaataacgcaacaaataatcaaacatcaaacataattactaataatatatagatatatatatcagggtggtacaagttcggtagagaccgaaaccctaatctgacctttcgttttctttcagggaaccatgattctacactttgttcttgtgagtttcatc

SEQ ID NO: 39907 - DNA, 539 bp, Glycine max
  unsure (1)..(539): unsure at all n locations
cccctttaattcnnatgaatcccattgcattttctngcacattgatactcagcttatgaaatttgttgaagaagatagagaagagttgngccnnttttataatgagannnctttccttntccctttcttttctaaaagcacttgccacatgttctctttttaatggagcaaaaaagggcccaccttctttcctttgattgacttcatactcagccacaaaggacaannaattgaccttttggatgctaaaatcatgcctcggtttgcatgccgnctctctagtcccagtttctcgcgtntctctgcacccgtctgggcccattttcgaaagtatgcaatatatatatcaaaacgctcagaatgagaccctgagcgtggntcagaaggtggatttgtaaaatnttagttgcacgcacaacgataanttttagactatataatngaggattaatctataactgtccagntatggattactcttcngtaataagctaacctgcgtattctccccaatgacatactttaccaagatatacatt

SEQ ID NO: 39908 - DNA, 429 bp, Glycine max
  unsure (1)..(429): unsure at all n locations
aagagctaattatctgaaaacttatatacctttatttaaactatcttataaatgagncaaaataacttataagctgactaattaaaaagacttaattataagttattgaagtaacttactaaacacatgtgtcgaattagtttatattaagaaatatgatattctgttgatcattctgaagatcattttaagaatattatttataagatngaattttcaaataacgcttctttatggcaataatgaagaagggtgttagatgaattcgagtataatatatctttcccacaaacgtgtgctaagatacatagttcaaaccataatataatgaagaatcagaatgactaatatataaattatagccaactaccatcagataacatttattttgattagacaatcttactataccatcgaagtggtattcat

SEQ ID NO: 39909 - DNA, 223 bp, Glycine max
  unsure (1)..(223): unsure at all n locations
agtcaaacgacaataacttggtcnctgatgtccgattgggtctttgttgatatcgagacgctcgtaattgaaaatagaagctcgaagaanagtcaaacgacaataagttgtaactcggatgtcctattgagccctgcgatatattgagacgctcgaaattgaaaacggaagctctaagaaaagtcaaacgacagtaactgttgacttcgatgtccgatggagt

SEQ ID NO: 39910 - DNA, 89 bp, Glycine max
tctgattgtcttgctttgtatagcgcgatatatcctaattagaaaaactggggcacgtgacgatgatgagaaggacggagaatcctatg

SEQ ID NO: 39911 - DNA, 403 bp, Glycine max
  unsure (1)..(403): unsure at all n locations
acaagaatcaagccatggctattgtgcaagcaatcaatgaggcaaaacacaccaaaagattatgatgatgcatggctcanattctcaccactttcaaattgagctttcaaaactatcatgacatgtagaggaaaaataaggatttcaaatcagaaaatgtcaagagacttttattttcagaacaattacccatttcttgaacatatcctataattcaaagaanaatatgcaaagttgtacatgcaaacagaattgacctaaaatattaaactagaaacccaacatacttaaaaacaaaactaacanaactaacaaaactaggaaaaccaaactatactaaaaaattactaanaccaaaccaaagaacaatcccgccatacttaaacaacacattntcctcaat

SEQ ID NO: 39912 - DNA, 362 bp, Glycine max
  unsure (1)..(362): unsure at all n locations
aatagatatgtctttgtgatattattntctgaatatcccctctggtaatcaattacaagacttatgtaatcgagtacaggttttaaaaatgtgaattaaaacattttcaactgctggtaatcgattaccagagagcanatatcaatttgaaatgatagaattctttggtcaaaactttgtgtttttttcaatttggaaacttcttcctaaagattctaagagatcaaacttgatcatatatcttgactttcttggatgcttgtctcgaataaaacttataagcacttgatcctttagcatcatcaagatatcangacatcttgcttctacgtangagtcatttgacttaaatccatcaactg

SEQ ID NO: 39913 - DNA, 409 bp, Glycine max
  unsure (1)..(409): unsure at all n locations
ttgatttagccttagtttcaccttagttattagtcaattttgttaagaatgaganatcctaaagagaaaatgtccggttgattttccgctttattntactaaaaggtatatttttgttattatattattattttatctcttntttatttccaacgtggttacggcacgaccgaacggtcggaattcattntaaccgaagttaacggataatacaattcacatgttcggtggaaatnntattgtattttaagttaagcgagaaatgacttaagtaaaatggcttaagcacgtcaaaaggtggtataaaaagtaaatganacgagaatagaaatacacacaacacaatgtggaccaccatgggtacatagaatgaatcgaaaagcttggttcgaggtacttaccccgttga

SEQ ID NO: 39914 - DNA, 358 bp, Glycine max
  unsure (1)..(358): unsure at all n locations
tcgtgcacaatagcatgttctagtcctagtctagaagctatgtgtttcactcccatgacgtcatcctgtgagaccagtttcatctatatatttgcatcatttttgacattttccaaagctaattntatggattgaagactagtagtgcatatgagacctatcaatcctatcgagatcagttcttcgtgctgaagttggtctccatctctttgagataagcaaaagcaattggcttaatgtcagcatccctcatttgttgaatcacctggccaactgtgaacgtcttattntacatggcatgtgtgggcgttaaacaaattacttntacacatgaaattaaaaataagaaaggaacctt

SEQ ID NO: 39915 - DNA, 312 bp, Glycine max
  unsure (1)..(312): unsure at all n locations
tatttggaaaagacaaaaacatatatagtatagaaagcaccttntgtaccctggcatctggtgaatattaaggaactgacaaatatctattctttatgccattatctttntataatatgataagacacaatatgcttctatcatgtatgtttcatgtcctttacctgcagcatatattttagacatgatgaccaagaacttaattcttagcagatttttgattgatcgacttgtatgtgtgcagcttgagtactctgagaccatattaaatgcatatttgacttctgatgcaagagataccttgaagtcttt

SEQ ID NO: 39916 - DNA, 453 bp, Glycine max
  unsure (1)..(453): unsure at all n locations
tataaatggatagatntctttacttgagctcacgtctgaagattatcgccattggagtatntaatgcttgcatattgcagaagacctaccaatatgttatctttccccacctcacagctatgaaatagaccttngccaattgctctcgtcataccacatanttttgccataatattaaaaagaaaggggactaatggatcccctttccctcaagcctttagtcaccataaattcacttgttgagttcctatatactaacattgacaccctactactcaccanacaagccttgatccatntaatccatatttcagcgacaccctactacaataatcatacataactaaataatcttggatctgcttaanggtggtgtgagttgttaatttttgtttcaaaacaaacgtgtttacaaaatggagctgaatggtttaaccattttgaacactttac

SEQ ID NO: 39917 - DNA, 334 bp, Glycine max
tatcctaattagaaaaatagtcaacacaagcaattgatagtgaagacagtggtttaaaagtgttgggtctctataatatacgagttgatgcatataaagatatttctctaattaaaatgttcttgtgttctatgctaaagactaaagtactaaacctcgatccctcgtaagtttagactaatttaaaccaagctttgtccttagatccctcttgttggactaggcttaatttaaatagcattataatcacaacataatttataactaaaatacctctattcctagcaatgcagttatctagccctgctctatcaagttctaagtaaacagtacc

SEQ ID NO: 39918 - DNA, 131 bp, Glycine max
cttaactgtgatattatatccttaagttgttctttcctttagaatactatctctatttgttaaggggtacaaattaatatcccatgactgggattacggatacgaattatagaagacttgagacgaatgct

SEQ ID NO: 39919 - DNA, 309 bp, Glycine max
  unsure (1)..(309): unsure at all n locations
attctctcaagaaaagaagccactgactcagaacctgatgagaacccaagaacgcatgttaagcctcatcctgaggtgttgtgtcctaagaagaacaaaaaaatctcaagcagtagaactatgaagaggagggagagcaagagtttgtcagaccttgaatttgaggagcttaaagggttcatggatctgggttttgttttctcagaggaggataaagactcaagcttggcttcaattattcctgggttgcacaggctacngaagaaggaagaggaagaagaagaaaatgaagattgtgatgagataagt

SEQ ID NO: 39920 - DNA, 331 bp, Glycine max
  unsure (1)..(331): unsure at all n locations
attatgccctttntcactaaacacacaaattgctcattattgtttgtatgttttggaatatttcgaatattatcaataaggcaattgaatttgtcattgacagcttccctgccagggtagtgaaactcgtttgtaggtacaggcaattcctgattaccaaacttcattttttgttttatactttggtatgagaccttacaaggcttcatcttgttgtatccctgcaaaacgagaaagaatatcagcagcaacattcctaactcctttntatgtgttcaaaatttattttatntcattatgataaacatactctttgaaataaaagcctttt

SEQ ID NO: 39921 - DNA, 419 bp, Glycine max
  unsure (1)..(419): unsure at all n locations
acaagatttatagatttgtcatttgtattgaatgttttagtttagacatgatgcttgatatagtttaaggttgcttgaatccatgcttagtgtgaatcaaatatgttagaaaaatagattcatctctaagtttcttagaagcaatgagttcaacatgatgtaattgattacaaggttttgtaatcaattacaaagtgttagaactagaaacataactntcttctaataggaatntagcaagaatcatcaaattaatcaattatcaatttctgtaatctagtacagaagccagtttcacaaaaaggaagactntatagattgagataatngattatcatttattgtaatcgattagattgtgtctaanacttaaggaactctctgtgtgtcaaaataatcaactaccacaattgataatc

SEQ ID NO: 39922 - DNA, 200 bp, Glycine max
  unsure (1)..(200): unsure at all n locations
tcaagagaaatccactcagtgagcacaatgctgatagagtctatcattttcttagcaaagatcttggattgagtcttactttattggaaagctctctttgagtggtagaatctataattctttaaatggtttggttatgaaagctaggagtcacttagtgacanaacaatacttgaatgttctaggttcaaggggagtct

SEQ ID NO: 39923 - DNA, 250 bp, Glycine max
gcatcatcctcctccaaataaccacaaagaatcaagactttagctgagagtagctgcacaatatggtttctagataaactaatttcaaacatctctaataacttctttttttatatcacccactgcttatacctactttatgttattgagcacccttatctttatttactcgttgtacaaaaaacaaggaatgtgtctgtgacttatttttcccgctcccaatggaaatgctaacaactttgggttgctt

SEQ ID NO: 39924 - DNA, 569 bp, Glycine max
  unsure (1)..(569): unsure at all n locations
agctcttnnnttgnncccttgannnccccnttancccattgatagcatgcatnacgcgaccatagatactcagcttgaatcgatttacatatactgtaatcgaatttcttagcatatttttagaananattctcaacagtcacatctttttatgtggttcttgaatggctatcaaaggcctatatatatgtgacttgagacacgaatttgctaagagtttttcagaacaaaaaggtcttatcctcttataaagaanaatcgttttatcctcttaccaaatccttggccaaaacacttgtgattcaataagggaattattgagtgctcaaatngttcaatctatctcntttcagagagatttcttctttttttcttcttcattctgaaaaggggataagagaccgacggtctcttggtgtgaaagaattctanacacaaacgaaggattgtccttgtgtgtttagaacttgtaaanggaattacaagatagtggaactctcaagcggggtgctnggngactggacgtangcacaannggtgtggccgaaccantatatatctgagtttgg

SEQ ID NO: 39925 - DNA, 350 bp, Glycine max
agcttgtgcaaatcaaatcactcctacatctcatctctagcatgtattttctttctttacccactcctcacgtttggtttttttgggaaaaacaccataactaaacgcgccgcaagggatccctatcgcaccagatccaaatctagaacgatgggtgatcaagaggagacacaggaacagatgaaagccgacatgtcggctctgaaagaacaaatggcctccatgatggaggccatgttaggtatgaagcagatcatggagaagaacgcggccaccgccgccgctgtcagttcggctgccgaagcagacccgactctcttggcaaatacgcaccagcctccctcaaacat

SEQ ID NO: 39926 - DNA, 402 bp, Glycine max
tgcatgaccaagtttcttatgccataatcaatgattttctttgatagacaacaaatgcgataccttttgatctgatatttcacccaacttgatcttataacagttacctttccttatagcagaaaatagtagagactcatccttgttctggactacacactcattctacttaaaggaaacatcatatccactgtcacataattggctaatgcttagtagattgtgtttaagaccttcaacaaataatgcattatcaatagagggataaggatgtgtacctatcttacccactcttattattttcccttttttattccctttgaaagtgacaattccaccatgatagcgagcaggcattagaacatacacctttctcatgtcatgtgccatgagcaaccactc

SEQ ID NO: 39927 - DNA, 369 bp, Glycine max
agcttaagtgttggatcactattctttgtttttttgttcactttatctgaggttagtgttgatgcctcacatttgctgagggtggagcattggtgcaatattggtgggtctttcattgagggtgtgtagtgtcaacaagtgtggagtttggggacttttttttttttcctgttttaatgcagactttctttgtaaggcttgactcaacttttttactcgttcgactttgcttgaaaccttatttattaattcttttgtttttattacaagcgtgaagactatcattttaggaattgtcaaacattaaggataattaaggatcggatcctctcctgttacttttaacaagggaggtcctgttcaacaaat

SEQ ID NO: 39928 - DNA, 399 bp, Glycine max
ttaagagtctatccatctttgttttgattcactttctgtccaacttcaataatgcaagtttcaaagctgtgataggaatagcagcaaggttttattctttacagtataccagataattttaatctaccatgtaatatcaaattatatatgtgaaaattgcttgtttactagttactactgagatgcaagttgccaacctttctttgtttttctattggcaaagcttagttgttaattattagttttttgttagtgggaaggattcaaacccatgacctctcctctccctctcttcttcattcaccactaagccaaccttatatctccattgccaacctttgatattgttaattctttaaatattttccagttgcaactgttgggatgtctagctggtgt

SEQ ID NO: 39929 - DNA, 232 bp, Glycine max
agcttagctagatagattgtccatgatggaagatactttaaactagtttatgcaggtatccatctcaaaccaaaagaacattgatgcttctattaaaaatctagaggtttaggtgggacaattggcaaaacaaatgtctgagcatgaaagtggatccttctcagcaaccacaaaagtcaacccaagagaacaatgtaaggcagctacaactaggagggggcagtattggttt

SEQ ID NO: 39930 - DNA, 399 bp, Glycine max
tgtaggattatggggtacccatcacatgtggtactaggtggcggtcgggcgatggtgcacaacaagttttccacatccacaatgcgcgcataaacccaccatcccctgttgcccacctccaactgagctcacgtactcccacgtagcccatatcctcgttcctctcaacaccgggtccccatcaatcctcccaagctttcccaacatccaagtaattcaacaatcaaacaacacaaactatcacagccaagaaaacagggcaaaggcagaaaactctgcccaaaacaccaaccaaaatcacagcttttctcacttaaagaccccagtaacaattccttcgttccaattcgttaaccgttggatcgactccaacatttaaatggaagtctctagtacata

SEQ ID NO: 39931 - DNA, 269 bp, Glycine max
  unsure (1)..(269): unsure at all n locations
agcttttaggtgaagacatgtgtttagttatattttacatctataaccattatgtccgtagtcaagtccaaggtctgtagtttgtttgttttccccccaaattcatgataataaatttgtgatttaagtctcttctaaattgcagacgaatacgagtgttgcatcatctttaggaacatatttcctgccacaaatcacattgatctttttggacatgttgaatgtgtgacggtatattttgtgtaactgaaactntttcttttgttttg

SEQ ID NO: 39932 - DNA, 321 bp, Glycine max
aaggaccgaaaaggatgttatggggggcttgaaaaacaggtgctaattttatgcatctatgattctaagatcatctttcagctcattgatcatgatagattgataataaagactataatgttattggctgcggatgatgaaatgacatgccaactcttgattgattatgggatcctcacacaaataattctgacgattccaagaccatggaaagtcaagttatctcaagataccccgggggtattgatcatcgtgtctatcaacgaattatttgtgcattgctatccaaggcatcatctggtgtctggtgcatgtaggtgc

SEQ ID NO: 39933 - DNA, 374 bp, Glycine max
agcttgttaaactcaaggttggtttttggtgagcccctttgcaaaaatctaaggtgcataaagtccacccttgtaagctttcctattactaaatttttatctatgcagaggaatacaagtttgtcggaacatcagaaacctaaggtccatccttggtaagattactctttagggactacaatagacacagtcaaaggtccaggttccacaaggcagaatcaatgaccaccagattgatcagcaagacctttaactaggtggaaagcatactaagtactcaccaacctcaggtggaaagctccacaaagcgaaaggaagcatcaccaaatgagtgacaagacctttaactatgttgaaatcaaacatgagatgat

SEQ ID NO: 39934 - DNA, 332 bp, Glycine max
ttttaggacatgctggattttataggcgattcataaaatacttttcaaaaattgccaaaccactcagtaatttactgaacaaggatgttgtgtttgcatttaatgaagactgcttggaagcttttaatgttctttagaccaggctagtatctacccctgtgattatagcaccacattggggacaagagtttgaattgatttgtgatgctagtgactatgtcgtatgtgctatacttaggcagagaaaaggcagagttttccgtgccatctattatgccagcgaagtcttgaatgatgcacaaatcaattatgctaccatctagaaagaaatg

SEQ ID NO: 39935 - DNA, 354 bp, Glycine max
agcttcaaccaagatgggatggtccatttcaagtacttgaaaggataaatgacaatgcgcacaagattgaattgcccgatgagtataatgtgagtactacatttaatgtgtctgacttaacgctttttgatgtagatggagaagtcgatttgaggacaaatccttttgaagagggagagagtgatgaggacaaggcaaggaataagggcaaggaatctttataagaacttggaggacctatggcaagggctagaacaaagaaggccaaggaagctcttcaacaagtattaaccatgctatttgaatttagacccatgttacaagtggagaagcttcggattgttaattgcacca

SEQ ID NO: 39936 - DNA, 398 bp, Glycine max
tgccttgccccttgatatatttgagggactcatggtcgctatgaatgaaaaattccttgggataaaggtagtgttgccatgttttcaaagcccgtactaagtcatacaactacttatcataagttgaatagttaagtgtaggaccacttaacttttcactaaaataagcaattggatggcctgcttgcatcaacacagccccaatcccaacatttgaagcatcacactcaatttcaaaagatttttgaaaatttggcaacgcaagtatggaggcattagttagcttttgcttaagcatattgaaagcttcttcttgtttctctccccatttgaaaccaacatttttcttgagcacttcattgagaggtgctgccaatgtgctaaaatccttcacaaat

SEQ ID NO: 39937 - DNA, 200 bp, Glycine max
agcttgtcatggtatatacttagttttctaattatcttctgtgttatatatgatattttagtcacatatattgtttgtatactaaaaccaactacccaacattgcatgtctttcatcctcaaggataccaatatcaaaggatggagtgtcatgggtgattttagcagtgattgtatcatctttgttccatatatgttttg

SEQ ID NO: 39938 - DNA, 332 bp, Glycine max
tttctttgtgggtcgatgaactatgtctctcataatggcatgatcgctggctgacatattcttaattatcttacttgccttttcagcggtcttcaactttatttttccccctgctgaaacatctagcacttgcttggcttgtggtctcagcccatctataaacatatttaattgaattggctcatagaacccatgggtgagaatctttctcaataaacctctaaacctctccaacgcttcactcaatgactcgtcagggaactgatgaaatgaagagattgcagctttcccttccgtagtctttgactctgggaaatatttcttcacaaact

SEQ ID NO: 39939 - DNA, 209 bp, Glycine max
aagcttgtgctatttgcaattcattttatgctttattcctagcaacttaacgtaaagagtaaattcattcagttcaaattctaagagtacttcctagtcaaaattaaaatccaatttcatgaaactagtgatcaaatagaatcaaacattatgaatagaatgaaatcaccataaatgagtagaaaagattcatatatatatatatatat

SEQ ID NO: 39940 - DNA, 392 bp, Glycine max
  unsure (1)..(392): unsure at all n locations
tgaccatggattttaaattttaattgcgattgcagtcatggttgcattgtggttgttgaaggccaactatgatcaattcaattttgcaatcacagcctaatgcagttagcaatggccgccagcatcatgtgatgccttccacagctttaaaccttgagctcaactataacaaattgttatcatgttaagtgagtgagttttgaaaagtgtggaaaaagtcgcctgtcttgtatatatatttactttgtaattcttgtactacacagtactatatagtatcttcaccaatataactaagcatctatacttctttttttttaccttcaaaagtcacataaactacattaaatccccccccccnccccccctcaaagaaatgaaaaatataaaac

SEQ ID NO: 39941 - DNA, 370 bp, Glycine max
agcttgcacttctttactttcctcaaggacttcagcttctttcccacttgggcctttaagctttgggagccaagttatcccttgcctcctaaacctcaaccacttgtgatagccgctgatgacgccattgctacttcccctaagctccttatctttcctttccactgtattccatgctttatggattctctgaagtatcctcacattggcttcattgaaacctcgtgcgacgaaaggcgcgatgatctcctccaatggtgcacctctcatagggtagcctagttgtcttatggccagcatgggattataattaatacaaccccttgttcctatcaaggggatgtttgggaatccttcacacgaacacaac

SEQ ID NO: 39942 - DNA, 395 bp, Glycine max
tgccatgaattgtttcatgtgtactattatagaggctggcataatcctgtcataaaacacaaccataaactaaaataagcatatgtgatcagtgtcaaaataaaatgcaaccatttacaaaaccaatcaagaaaataagaatagattattacagctaaccaatcaacaagcctttcaggtagccatgcttgagattgcttgtccacataaaatatttcaattaactcccacgcagctttcaaagatgtaggctcttcacctctctatattatgtgtaatgtgttaaaaagcaagtgattaacttctcggtatcataattcccacaaagcagatctcagctcagctaaacacgggtaaacaatttagaacctaaaacagtaccttagcaattacat

SEQ ID NO: 39943 - DNA, 367 bp, Glycine max
agcttcgaatttgtttccttgtcaccacatggcaatgtttatagaatgagatgataattccattcatatctgaagataatgtattagcatgatctatttttcccccttaaatagaaacttattcatgttttttatgaaaataaatagcattaaggtcaacccagtgtattaaatgataaatttaatttagaaattaaaatagaagaggataaattattagggaaaagtacttaaaaagattaaatataaatataaagataaaatattttgaaataattacaaaatattttttttggattaattacaaaaatagtgtgaaaaatacccttataagaaaaaagaagcatctatatttttctcctccctc

SEQ ID NO: 39944 - DNA, 382 bp, Glycine max
tatggtggtatcaaaagagttatataaagacatatagatgatggcctacatggtatcgatttgtcaaggaaaataacttaagagcaacgagtgctcttaggattaggtggattcaagatcctcatgaccttttatgtgaaaatcattacaagatatagttgcaccaaaatgcctcaaagaattcaagttaataaattatggcttttatgtttctccaatttacggttatgtttctttctaacgaactatagcaattctaataatattatgtcatggggaatatgatatcagttcaaaattatttatgttctcataggtccaataaatatcatcttttaagataaattttatcttttaagggtggtttttgtcacttgctata

SEQ ID NO: 39945 - DNA, 371 bp, Glycine max
tcaacattcaacttcgagcgtctcgttatattatacgactcaattagacatccgagtaaaaagttattgtcgtttgaatttgctcagagcttcaacattcaatttcgagcgtctcaatatatgacgggactcaatcagacatccgagtaaaaagatattgtcgtatgaattggctcagagcttctacattcaattttgagcgtctcgatatatgacgggactcaatcaggcatccgtgtaaaaagatattgtcgtttgaattggctgagagcttcaacattcaatgtcgagcgtctcgatatgttacgggactcaatcacacattcgagttaaaagttattgtcgttgaattggctcagactttaacattc

SEQ ID NO: 39946 - DNA, 374 bp, Glycine max
agcttccatacattgctaagcatgcaacagaatcaacatcagttttttcccctgcttttctcatgtttattgaagggaaataagtagcaagcctgacactcccctttgatctataaataggttcaacatgttgagctatataatcttctgtaacccgattacgaaccttcacggcggaaattttatgtgttgatacataagaaggaacatccttaactgtgatataatacaaaaggatgatggggaggtgttagtttttgctgagtattttagatgttatttctcacttttcaactttcaaaataaatgcaagagtaaaccaaaagaaaaaagtataaatttatggaaaatgtggcagagcacataacatgtac

SEQ ID NO: 39947 - DNA, 397 bp, Glycine max
ttcaacatcagggttggggcagcagggacatgaaggtatccattctattccaattctctccttttgtctttttattagtattttttttaaattgaactaacattctatgctcttaagtttggcttcttttcatacttgtatataaatgtaaggtgtccctttcatacccccttttgtgttgcttggacatgcttgtgagttttttgttttccttttctctttttgataatttgattggacatgcttgtgagttttttgttttccttttctctttttgataatttgattgatgtgtgagcaatgatggttaggaggggagaagaagtgtctgaattctgagctatggcatgcatgcacgggccccttggtgtccctaccaactgcagggactcatgtg

SEQ ID NO: 39948 - DNA, 350 bp, Glycine max
agcttctcagagtatgctagtcttttattcaaaatgaaaaaaaaaatgtaacaccaaatatttaaagaaaatgtttattttaaagtcataagaacactaggcgagtacatggatacatgcatatgtaggtccagtagggacacatgataaaacttttctaattaaattgtgtgaaaaaacgtgtgtgttacgctaattatgcatcattagttatatgttaagatcaagaatctttctttcatagatcaagaatcttttgtaactaaaatatgttcgaagattaaatgaatgctttcttctttaaaaatttatccattaacttagagaaaaaatatactagtagcaaatgg

SEQ ID NO: 39949 - DNA, 399 bp, Glycine max
tatgtggctatccacaggtaacccaatatttgtttctgaagcaaccaaattctacttaagaaggcaacagatggtacaaaacacagtaatgattgtctcactttcctacacaatagaagccctcactacttctttggtttaagaaaggaataatttgatgaagaagctgcatgagctttagtaatcttaatatgagaaattagaaaatgatggataaaaagctacatattgaactaacataaaactgggccattgtttcactttatgtatggagggtcgcaattattagagtcttatcttaataactataaaatacatgagactatttacttggtttcaaacgtagaatgttaaatggtgaataatgtaacagtaaaggctcttgatttatttatacct

SEQ ID NO: 39950 - DNA, 213 bp, Glycine max
  unsure (1)..(213): unsure at all n locations
agcttgttccacctaaatttcatatgttcttcattggtaatcagcctaggctatggatgctaatttgttaatctcttccacacccaagtttggaccaagtagtaaaagggtgaccaaagagtcaactacaattccaattcttgattaccagtcaaacaaattactgttttctttcatagaccaaaattattttatatgttgngataaaatgtt

SEQ ID NO: 39951 - DNA, 398 bp, Glycine max
tgcacgatgttaacttacaagaaaacaagtttaatcaaagcattttaaaatatttattcaacttagaaaaaataaggacaaatgggaaaagttaacttatagtttattacaataaaacctaggtatccaacatcaatcatcatctaacacgaaattcaattactgatatgcatagaattggatgatcccacaccataatacatataatccaatacattctgatttcatgaattcagtccaaggaaaaccagataacaggacattaacatcaataaaatatcttttatttatctccaaggcctagactccaaagagtccatcaggacctctctctcctaattcaggtccaacccagaaaatattttaatatacagactctatctatgaactatgcaata

SEQ ID NO: 39952 - DNA, 109 bp, Glycine max
  unsure (1)..(109): unsure at all n locations
gtcgncgccccggncgcngcaaccatttctgtttggagatctaatagcatattgccctttacgctttttanatctatgaggcgancaccggtctnagggccctaatgct

SEQ ID NO: 39953 - DNA, 355 bp, Glycine max
agcttatacgacttttcaatcatggctgtcctaagcataaggcggcacaagcccttgcttttatcaccccccaataaaagttatttattattagtattgataaattatattaatatcttgtccagtgtagtggaaactaggagtgttttttatctcggtgaatggggtttgaaccctgttagaggaaaaaagcattttattttttgtatgattcctaattttttctgtattctctctcacttaaaaaaataattactcattaatttcaattaaataggctgtctcttaatatatcaactgtcaccaaatttggcccataaaacattgctagattggctatatccaaactcactct

SEQ ID NO: 39954 - DNA, 385 bp, Glycine max
tcattagatgttgcatttcagtatcactttctctaatggaaaaacgatatgcacttcttgcattgtatatttgtttgattgaggcgcaattgttggcattgtgctccttcaacgttagtaggatgtttcttggtttcaccattgactttgtcatatcagtaaatattcttctcatccttagtcaatcgtccagcgtatggatgtccaactaatgacttggccaattcataattgtgaatcccacagatcaacttcaccatccaaccttcccctccaatcattggtttcccacgaagcttgaagggacaaccacattttctactcccaatgtctcttctaacaaattttttctttctacacttattctgattgctcctttctcaac

SEQ ID NO: 39955 - DNA, 367 bp, Glycine max
agcttgctttggtttatatagatattgccatagagagagctttgtaatggcaaccaaaataaaaaaataaaacaaaaaaaatataaatatgtagcatctaaataactagtatttgagctgaggattctacctatttttgtcaaagtaaattaactactcgctgaagcaaaaaagggtatgaaatatatttggtgaattgggtcacatttggtccaattcaatttatgtacccattttcgccaaagcgaagtgatgactctcgacaacaaaaatggacatgagttcattagattagatatatcacaatcgctatgacgaattgatattttgttgtagtgaaaattcaaaaaatgatggcaacataaat

SEQ ID NO: 39956 - DNA, 396 bp, Glycine max
  unsure (1)..(396): unsure at all n locations
tagatatcaatgcttcgagttgttgctcttgcacttctacttgttcctcaaccagcctccatacttgccttatgaaaaaatggggagaaataggaattttgattgtcataaaaatcatctttttaatgaaagcagtcttgaagtgtttacacacacacacacacacatgtcattttcttgccatgcttgaactcaaggggagttttactgcactacattttctcttataactttgttctttaaatcaaaatttatattgtttgtcatcataaaaaagggggagattgttaggtctaggcaaacatatgtctcatccaccatagattntgatgtataacataagtataaattattgatattctaatgacattttgacaactagacatcattattcta

SEQ ID NO: 39957 - DNA, 259 bp, Glycine max
agcttttggaaggatcaataagtgccttatgaatcctcccgtgcttatgccaccagtacctggaaggcctctcattttgtacatgacaatcttggacgagtcaatggggtgtatgctggggcaacatgacgaatccggaaagaaagagcgcgttgtttactacctaagtaagaagttcacgacctgtgaaatgaattactccttgctcgaaagaacgtgttgtgctttagtatgggcatcccatcgcctaaggcagtac

SEQ ID NO: 39958 - DNA, 398 bp, Glycine max
  unsure (1)..(398): unsure at all n locations
tccatcaagtggtaatcagagcacaagagcttcaagtaggtgctccttaaacctccattaattttttgctttaccttctcttccattgttgtttcttcattttttctccatgtatctcctcaaatgtcttgtgataaatgtttttaacatgattctttagagtttccaccgattaaacttgctatagaagctagattttattttctatggttcaaatttcttgttcttgttcttgaaccatgaattgtgttgagtttaggttcctttgagttttgtcttgttattttttgtggctgaaacctaaaccataaaattattacaaaaatattaaagtagaagaaaacctcaaaaatctagagtgacttgttcacctattgtangtttgtcatagaagtcat

SEQ ID NO: 39959 - DNA, 218 bp, Glycine max
  unsure (1)..(218): unsure at all n locations
agcttgtagagttcattctcttatcggcttaatcgattacagtagtctcataatcgattacactgttgtttgagatgatgactgatttattcaggagtctttgctttaatcaattacttctctctcacttagttgttcagaggtgaacaagaacactttaatcgattacctagagcctctaatcaattaaattgttacttgattatttnccggtgttg

SEQ ID NO: 39960 - DNA, 397 bp, Glycine max
tgtgcgaatcaagtcactcccacattttatctctagcatgcattgtatgttggtctcgtcctttgtcacgggaagccggaaggtccatatcaccttcttaattgtacacatggggcactgcgcccccaaatacgcaagtaagaagagataattttccgggctctcgtgtctgtaaaatgcattcatatcatgcatcgcataaacatctcttcatggcatcataatgaacatatcgttcctgcatttgtctgttatcatattacagcctcacattttgcatgagtcatggcatcatcatgcatatgcgttcaacaaactttttgatctgcaaaattggataccatttgttttcatgtttgctcatccttgcgttatcctctacaaaacagaacaaaaa

SEQ ID NO: 39961 - DNA, 227 bp, Glycine max
agcttcaagatagataggttatacattcaagagtccttatattcaagcaatgagaatcatatccatataccatttacaacttccaagtaatctgaaaaaaaataaaaataatcactggcttccactggcttattgctcgaacactacccattctctcattgtgtatgtttatgctattaagagcaatataccatgaatataaatatatattgtttaccttgtttttt

SEQ ID NO: 39962 - DNA, 395 bp, Glycine max
tgaaggcaaactggatgcgttggtcaacttggtaacccagctggccttgaatcagaaatctgtacctgtcgcaagggtttgtggcttgtgctcctctgctgaccaccatacagacctttgcccttccatgcagcaacctagagcaattgagcagcctgaagcttatgctgcaaatatttacaatagacctcctcaacctcagcagcaaaatcaaccacagcagagcaattatgacctttccagcaacagatacaaccctggatggaggaatcaccctaacctcagatggtccaaccctcagcaacaacaacaacagcctgctccttccttccaaaatgctgctggcccaagcagaccatacattcctccaccaatccaacaacagcaacaacccc

SEQ ID NO: 39963 - DNA, 371 bp, Glycine max
  unsure (1)..(371): unsure at all n locations
agctttggagtnttttgttacaattcgncttcttctttggtccagtcttcttctggcttcaattcatcagtgggctttccttctgtgtccagcatcttgggatgttcccagcctttgatgacagctttccaggttctgctatccagtgatttgaggaaggccaccatccttgctttccagtattcatagttggttccatctaggattggtggtctgttcactggtcctccttctttctccatgttcatcagaatttatctccctagatctcactctgtgatttcgagtgttggctctgataccaattgaaattctgataccaggggacagatgtcgtaccggatgtcacgacatcatgcttcagaacatgc

SEQ ID NO: 39964 - DNA, 393 bp, Glycine max
tgcttatggggcttctatggaggctggatctttgagcttcaatgaggtccttcaatggtggttttccaccatggagatgcaacggaagacaaaggagaagaggtgagaggaggcaccatccactagggaataagccatggaagaaggagctccaccaccaagatgagccttggagaggatgcttcaatggaggaaaagaaagagggagagaaagagagaggggggagcacgaaattgaaggaagaatgaggtgccattattctctcctatttcttaaccctttttgcaccattttaagtactgattaatcttaattgtcaaattaattaggcacgtttattatttgggcccattcagctaatttgatgtttttaatctaatttcaggaattaa

SEQ ID NO: 39965 - DNA, 278 bp, Glycine max
agctttcgtgaaattgaattggtcataacccttcacaccgatgtccgattcaggcgcataatatatcgagaagctcgaaattgaacaacggaagctctcgagaaattaaaattttcataactttccactcggatgtccgattcaagcacatcacatatggagacgctcgaaattgaagcacggaagctcttgagaaattgaaattgtcataacttttcactcggatgtccgattcaggcacatcatatattgagatgctcgaaattgaacaacggaag

SEQ ID NO: 39966 - DNA, 380 bp, Glycine max
ttacagcagattttagtaatgacccactaacctagaattaaaataacttaatgccattaacctaaggaattaaaataacttaatggctgtgtgtaactgaaattgtggcaaccaaaagtcacccccaacagccaacaagtcagccaccatttggtctcccaaaaggctgatgcctaggttgccaattgggcccttattacaacttgaactaaacctaactaaagcccttttagttgattaacccaaaacatatttttggtcagccaactttacaaggattgggccattatttagacaaactaaacactctaaaattgaaacaaagtggtgtcatttagtactcctccatttgggccatgatacaactcacaaccttggac

SEQ ID NO: 39967 - DNA, 190 bp, Glycine max
agcttacctttaaaagttgttgtagggcgtgacaactctaaaaagggcactgtagcttgcggcggcgcgacacacgcgacgcagagaagatggacgcacgacaatgtatgctaccttccttcgacggaggacacggtggcgcgacggagatgcaagcaagcactcgacggggggttgatagcacaatttt

SEQ ID NO: 39968 - DNA, 392 bp, Glycine max
tcagttcactacttcaagtagtgcatgatatgcttccagaggaaaacatgttgccaaaacattactatcaggtgaagaagatactgtgttcgatgggtatagagtatcagaagattcatgcatgtcctaatgattggatactatacatacatgagtttgaagaaaggcacaaatgccctaggtgtgggctatcgaggtacaaagtgaaggatgacgacaagtgtaacagtgacgaaaactcaaagaaatggccccccggcaaaaggtgttgtggtatcttccgatcatgccaaggtttaagcgtatgttttctaatggagatgactcaaaagaccttacatggcatgcagatgggagaaacggtgatggaatgctccaccatttggctgatt

SEQ ID NO: 39969 - DNA, 276 bp, Glycine max
agcttctaaatgtgctaatatatgaggccatttaatcaagatagatgcaaacaacttaattgagttcctccagactctagtgttattagaggagggggaagctttacccaattattctagattttgcagactaaggtctgatcccagagagatagaggctagactgtgcattccaggcaagggctttattcgaaacatagagggccaaccatggaagctcctcagaaaagatcttaccaccctggctcaaacatggagcgtcttctcatactcaaa

SEQ ID NO: 39970 - DNA, 402 bp, Glycine max
tgccaacccatggaagctcctaatatctcccacactttttggggcgggccattcttggatggccttgattttctcagggtccacttggagcccatttctaccaactacaaaccctaagaaaactatattatctacacaaaaagtacacttctctatatttgcttagagggtgtttttcctaaggactgaaagaacttgcctgagatgtcctaagtgatcatctaggctcctactgtacactaaaatatcatcaaaataaacaactacaaatctacctatgaaatcccttaagacatgatgcataagcctcataaaggtgcttggtgcattagtgagcccaaaaggcatcactagccattcatacaaaccaaacttggtcttgaaagcggttttccactcatc

SEQ ID NO: 39971 - DNA, 206 bp, Glycine max
agcttgcccttctccatgctatgtccttcaccctactaactaagttctttttctcttcttgcaagtccttgcaatgtctgaatagttcatcatcatccaacctggtgcacaaaaacttggccaacacaccgccaactttacaagatagttggtggtttgacctcacagccttagcaaaagcaaccagtggcaccaattacttgggg

SEQ ID NO: 39972 - DNA, 394 bp, Glycine max
tcaagaataatggccttagcaaacttcttattcccaaatggaaattcaataaataggcctcctatttttaatggagagggttaccactactggaaaacccgaatgcaaattttcattaaggcaatagacttaaacatttgggaatccatataagttagaccttatgtacccaccatggtggctagaaatgcaacaatagagaaacctatagaatagtcgactgaagatgaaagaagattagtgcagtacaatttaaaggctaaaaacatcattacttctgccctatgaatggatgaatattttatggtttcaaattgtatgagtgctaaggatatgtgggacactctacaaattacacatgagggaacaactgatgttaaacgatctatgataa

SEQ ID NO: 39973 - DNA, 196 bp, Glycine max
  unsure (1)..(196): unsure at all n locations
agcttgcttttacaatcttcagctgctggtaatcgattacaatcctcatgtaattgattacatgccttcaaaaatattcaaaattattttaaaaatgtttcaggaagtgttttggccactggtaatcgattaccagagagtaaacctcttgtaaaaacatttttgcttaaattcattggccaaacttnttgttgtt

SEQ ID NO: 39974 - DNA, 395 bp, Glycine max
tgtcaattaggcttaatcaaatttcttttgggaaaggccttagagcttatcttcattattctttaaaaacaaattttggagttcttacttctccattgctcacaagctcagacaagggagagagaaatccatttctttcttctttcaagcttcatacaagtgctcttgaggtttcttccatcaaagtattggtaaggagctcttaatcttctttcttttcttgttttccttaccaaattcatgaaagcttctcattcatggttccaaaatttcattttcactcttagaagtttgagacatcaagtacctaagctctttgtccatctgagtcatttcgtgtagcttcattcagtgtaaggggagtctttccacttcttgaaccctaaccttgtctt

SEQ ID NO: 39975 - DNA, 350 bp, Glycine max
agcttgaaggtgtgttacttaccatttccataataggaccctggtaatgtatatactatcattgttatcatttctttccctgtcattgagggaaccacttgggctgccaaatccctccacctttgggcatattctttgaaagatccgtgccccctcttgcatatgctctgtagttgcatcctatccggagccatatcagaattgtactgatattgcctaacaaaggcaaccattatgtccttccaagaatggactcgagaaggttccaagttagtataccaggtaacagttgtcccaataagactttcttgggaaaaatgtatcagcagtttctcatcttttgtgtatgc

SEQ ID NO: 39976 - DNA, 394 bp, Glycine max
tcttggggttggctggctattataggaaattcattgagggattttccaaattggcattgcccctaactaagttgactcgtaagaacgagaagtttgtctggaatgagaagtgtgatcaaagtttccaagagttgaagaggcggttgacgacagctccgatgttaattttacccgaccctaagagaccatttgaagtgtattgcgatgcaagtgggcaaggcctgtggtgtgtgttgatgcaagagggaagagtggtggcttatgcttcatgtcaattacgtcctcatgaagttaactacccgacccatgacttggaactagcagcggtggtctttgccttaaagattaggaggcattatttgtacggtactcgttttgaagttttcagtgatca

SEQ ID NO: 39977 - DNA, 363 bp, Glycine max
agctttgagccaattctatctactataactttttactcggatgtccgattgagtctagtaatatatcgacacgctcgaaattgaatgttgaagctctaagcctattcaaacaacaataacgttttactcggatgtccgattcagtgacgtaatatatcgggatgctcgaaattgaatgttgaacctctgagccaactcaaacgacaataatgttttactcggatgtctgattgagtcccgaaatatattgagacgctcgaaattgaatgttgaagctctgagccattcaaacgacaataactttttacttcgatgtgtgattgagtcccgaatataattagacgctagaaattgaatgttgaa

SEQ ID NO: 39978 - DNA, 395 bp, Glycine max
taaacattcaatttcgagcgtttcgttatattactagactcaatcagacatccgagtaaaaagttattgtcgtatgaattggcttaaagcttaaacattcaactttgaccgtctcgatataatacgggactcaatcagacatccgagtaaaaagttattgtcgtttgagttggctcagaggttcaacattcaatttcgagcgtgccgatatattacgtcactgaatcagacatccgagtaaaacgttattgttgtttgaattggcctatagcttcaacattcaatttcgagcgtgtcgatatattacgagactcaatcggacatccgagtaaaaagttattgtcgttagaattggctcaaaggttaaacatacaatttcgagcgtttcgttatat

SEQ ID NO: 39979 - DNA, 180 bp, Glycine max
cagcatgcaagcttgtagcctttatcttcttcatcaatggattcctttgcttcttggaaaatgaatggccgcggaatggacaaagaagagagagagagaggagacgccacttcaaggagaagatgactctagaaaaagctcaccaccataagaggccatggataagagcttgggggaaga

SEQ ID NO: 39980 - DNA, 177 bp, Glycine max
  unsure (1)..(177): unsure at all n locations
tgacaccaaataaaaatataaataaaataaaaaaaagagaaatgtctctgcacgaanaaaaaaccagcgaccaggagaagccgaattttgccagagccaccaagaggaagatggaggacaaaacaagaacgcatcaaggcgccaaacggaaaagaaagcaaagaaaaatactcaaag

SEQ ID NO: 39981 - DNA, 177 bp, Glycine max
agctttgaattcattctatgcacccttagggtccatccttgctttgcatgtcttcatcttcattcttctaccattggtgatctttttcttttttttaagcgagtttcaactgaacgttaaagccgtaatctcacttaatcaatgttaaaaagaattttgaccggtcgtttgtgttgt

SEQ ID NO: 39982 - DNA, 377 bp, Glycine max
taggttaaattagtctaaacttacgtaagttgtttaagctgagcctagtcttaaatgagggatctgcggacaaagcttagtttaaattagtctaaacctacaagggctgcttaagttaagcctagtccaacaagagggatctgaggacgaaacttgagttaagctagcctaaagaggggtcgagatttaattctttaggctacaacatataacacagaagcatgattgattagagaaatatccttatatgtatcagcttgtttgttagaaagacccaacatttttacctactgctgtcaatcttacttacttgcatttttactggttttagctctaacataatttaaatcaattttaacccattattattaatgttt

SEQ ID NO: 39983 - DNA, 358 bp, Glycine max
agcttttcgattcattctatgtactcgtggtggtccacattgtgtttcgtgcatttttattctcgttttatttactttttatacccccttttgacgtgcttaagccattttatttaagtgatttcttgcttaacctaaaaataaaataaatttccaccgaacgtttgaattgtattatccgttaatttcggttaaaatgaattccgaccgttcggtcgtgccgtaaccacgttggaaatcaaaaagaggtaaaataataatataataacaaaaaatataccttttagtaaaataaagcggaaaattaatcggacgttttctctttgggatttctcattcttaatcgaattgactaata

SEQ ID NO: 39984 - DNA, 369 bp, Glycine max
tgtcatacttgttccagaaaggagaatatatgtttttgttaatgtttgcgccatgtcaaagtgccacaaggatactcttcaaatgttaagagccttgtgcagttcgaatttctaaaatggcgatacaagacattttacctaacaaagtcaagcatgccataactcgcttgtgctttttcttcaatgccatatgtagcaaagtcattgatcctctcaaatcgtatgagctggaaaacaagactgctattatcttgtgtcagatggagatgtattttcctctttcatttttttgtcatcatggctcacttaattgttcattctatgagggaaataaatgttatggtcccgtttatttgtggtggatgtacc

SEQ ID NO: 39985 - DNA, 166 bp, Glycine max
agcttgtcctctaattgttttttctctccctataagagtgtagtttggttaaaacaaaatgaaaaccacattgaatgggaagccaaatgcatgaagatatatactttaaaaaaaaccacgaaagtttaaattcaaaggaatcagaaataatgttcacctgccaaaa

SEQ ID NO: 39986 - DNA, 372 bp, Glycine max
tgtaccttattaactgaatgaccatcagatatttttttatccctccaaatcattagcttggcataaacataatcaacttcatttagtaccatgctaattacttgtttctttctagcatgatcgctgatcagaataaacaatgatgaatttgataagccaactagcaagattaaccacgaactaacatgaacaaatcacttcttgcttttcttggccttcccaacacgtaaaaaagaacccaacccgaagagactaccacttcctttagaaatgcagggagttggtaggttcaaaacaggactaatccaaagaccattggcataagatcctccataactcttacctgaacgagacctttgtataggatacaaa

SEQ ID NO: 39987 - DNA, 374 bp, Glycine max
agctttaacctcatcgtctctcacagtctttagatttgggagccaatccagtccttgtgttcggactctcagccacttatgatagccgccgatgatcccattactgcttcccctaagctctctgtcctttcttcacgccgcatcccatgccttgcgaactccttggagtactctcgcgttgtggtcactaaaaccccgtgcgatgaaaggcgtgatgctttcgtctaatggcgctcctctcatggggtagccaagctgtcttatggcgagaacgggactataattaatacaaccccttgttcccatcaaggtaacatttggacatccttcgcatgaagatagaatcttgattcttccttccttctagcgaggga

SEQ ID NO: 39988 - DNA, 402 bp, Glycine max
tctttgagaaaacttccttgaaaagctagagcttagctacgcacacccctctcataactaagctcacctccttgagaagcttccttaagaagattcctaaagaagctagagcttagctatacatacctctctaatagctaagctcacctccttgagatgagaagctagagcttagctacacaccccctataatagctaagcacccccatgacaaaaaaacatgaaaatacaaaaaaaaaagtccttactacaaagactactcaaaatgccccgaaatacaaggctaaaaccctatactactagaatgaccaaaatacaaggcccaaacgaaggaaaaacctattctaatatttacaaagataagcgggctcatatttagcccatgggctcgaaatctaccct

SEQ ID NO: 39989 - DNA, 366 bp, Glycine max
agcttgcactatccgtgatattctgtaatgtggcggaagtcgaaaagaggtatttttgcgcaatccgtaagtttccgtaacttcttcgaaagctaaaaaagagtaaatatgtaatccgtaaggattcgtaaccttgcggaaggaaaataagtatcgttacaaaattcgtaaagtttcgtaacgttacggaaaaagaattaccaaaaaaatagaagggggtgcatttagtaaaaagggggtacaaatagcaatctggcccacttgggccttccaaatcattcctccagaaggtgttgcttctggaggaagcaaccttgctcgcctgggcgagctgggtggcaagcttctcccccttttgctataaat

SEQ ID NO: 39990 - DNA, 391 bp, Glycine max
tctacctttttccttcctttctaccacaaaggttgagttattccacatacataaaaggccaccagcagcttccacagatggaacaaaatcccaatgaccagtggagtctcccgaaatggcctggcaaatacttttattaaagttctccctcttggtttcttggaggcagacaagatgcactttgtgcttacaatgagccttctaacagcagcccacttgactcccctcccctaacctctagaattataggagagaattatcataattgctgagatttaattcccttttctgttgccatcaaattatctttattctccatatccagcagtagccccttaaccttgctatcttcttccttataagacaagcccatttccttcaagatgtcaca

SEQ ID NO: 39991 - DNA, 199 bp, Glycine max
cgcatgcaagcttaaggtggtgactatttcgtatagtagaggaacacacataaagatattagaagttggaattgttgttgcaattccaatttgtatggagatataatattattgtttggagtcaaagtaggttatcaaatatttgatcttgttatgatctaaatatagcataaccaacttttgcattctgttgtatgtt

SEQ ID NO: 39992 - DNA, 398 bp, Glycine max
  unsure (1)..(398): unsure at all n locations
tgtaggattatggggtacccatcacatgtggtactaggtggcggtcgggcgatggtgcacaacaagttttccacatccacaatgcgcgcacaaacccaccatcccctgttgcccacctccaactgagctcacgtactcccacgtagcccatatcctcgtttctctcaacaccgggtccccatcaatcctcccaagctttcacaacatccaagcaaaacaacattcaaacagcacaagctatcacagccaggcaaaacagagcaaggcataaactctgctcaacacatcaaccaaaatcacagcttttctcacttaaagaccccagtaacaattccttcgatccaattcgttaaccgtgggatcgactccaaaattntactggaagtctatagtgcata

SEQ ID NO: 39993 - DNA, 326 bp, Glycine max
agcttattatcttcattttttgtgaggcaatttggtttagtgcaatctattcccaagataataagtttccccatctgtcttctagttagtctacatacttcttgtcaactaaataagatactatagttctggaggacattgaagacaagctccactcctttgtattcaagtgctttgcctttagtcctaacaatgtggacttcttcacataatggtgaggggttatgctggttatcttattttttggtcaacagccgattttctcgctaagctgatcaatgacatgtctgatgatgagatgccatcctctatcctcattaagcata

SEQ ID NO: 39994 - DNA, 398 bp, Glycine max
tctatgtggttttaagaatgatgaagatgagaatagttgagagaaggaaacgaaagctctcttttgtgcgattattttggatcctctttagaaatgtacaaccatctttttctttcttgtcagttggcataggatctttggaattgggtcagtaacttgttgcaatgtcgcatagacctcacgtcccagttatccatcctgcatggtcatcagaataatagcaagcaagttcaagatgtttatgttgcaactattttaaatgttgtttggtatatctagatcaatagaaataactctagattcaaattaaacatggcgtttaaagaacaagattattgcggatgttgctcgcgcaggtaattatagtttggaataaatatctacgcccaagatccaat

SEQ ID NO: 39995 - DNA, 194 bp, Glycine max
agctcgtgacagagttattatggctcacatatgtctactcaatacatgaacgccatcttcatagcctatatgaaagtgatccaaataatatataccacaggcgtaatgtgcaactttaaataacaaatccgtaaatttgttaattgttatttgttaattcccaaggaaagggaaattctcaatttgtgttgcta

SEQ ID NO: 39996 - DNA, 387 bp, Glycine max
tgttgtattattgtcaaataccaatcacattataataactctaatgagtgctattagagctgattatagacaaacacacaataagtgtcttgttaattgatagatacagctataggaccatgattacctcatgattaataaaagaaaaaaaaacatgcagaatctaggttgagagaaacagtaggcaaaaaagtggcagactttgaagttggaagttaatgtcattaggtttgggatcctagatcaggactgcaacttaatttctcaaggttgcagaaacaaagtcttgaattggcagcgtatagtttggaattatttatttttccttgagatttggttaagaagtgggtagtgggagatagctgtctggatcatgcatcaaaatat

SEQ ID NO: 39997 - DNA, 365 bp, Glycine max
  unsure (1)..(365): unsure at all n locations
agcttgtacgaatgttagtaacatcttcttcgaccttggtgattcttgactccatctcattgaagcgcatgtccacttgtaactccaaagtatcaaacctttccccaacaaaggtttgaagaccatcgaacctatccaaaatcttttgaagaagagaggaatcttcttgcaccatgtccttcttcatcaacatgtcgagcaccctttttcacccaggagccattatgctctttttgataaccaaaggatgcaatgacagcagtgcctattagaaaggatctcttgattggaacatagggttcagaatcaagagggatgttaaagtgttgaaggaagaaggtgactangtgtggatatggcaatgg

SEQ ID NO: 39998 - DNA, 394 bp, Glycine max
tgtccatgtcaagagccaacaccaagttgctaatgtttttacaaaagcacctccaggcccggatttttggtaaattcattgccaagttgggaatgattaacatctattcgccaacttgaggggtatcacgattaagcggttgcagttagttactagaagttatttgagtagttagttagttactaaagttatttgagtaagttagttggttactcaagttagttattttataaataaaccaactttgtaatactttaatgaacgaatcctcaaacttcttttcatctctctttcatttctgataggtatgggattactactacatctgccccaaccccaaaaccggaccaaccccaccacttaaattttttagaatttttgcataatttaaaat

SEQ ID NO: 39999 - DNA, 367 bp, Glycine max
agcttagaactcctcacttacaagttgctttaaggattttgagacatttgaagggatctccaggcttaggcctattctattatgttgataatgacttgaagatccaagtcttctttgattcagattgggcgatatgtccagttagcagaaaatcaatcactggttattgtatttttcttggaaaatccttgatctcttggaaagctaagaaacaaaccacaatttctaggagttctactgaagttgtgtatagagttcttgcttctcttgcttgtgaattatagtggctgaagtacctttgtgatgatcttcatcttcctattcttgttcctttttgtactttttctgatagtgagtctgcaattta

SEQ ID NO: 40000 - DNA, 393 bp, Glycine max
  unsure (1)..(393): unsure at all n locations
tgtgtctgaagaaatgtttgtttggacattaaatgcatgtcctcttcttggtgagaaatccctctctttagttttctagaagcatactttagcagagcatcatgtgcttttcatcaaagtaggtatgtcacaacaagacacgtcttttggtagagtttgaatttgatagttcttttatgtttcttagattttgacaaattctaggagtatgtctctaacacaattattgcaaaactaatctcaaacacaaaatattaaatgaagtcttaaatgagatttttaaatattgcattagatcataacatttgtatgcctctgtctgaaactttagatgtagatacaatgttttttatctgagcatacataagacacaacttttaactnttgtattta

SEQ ID NO: 40001 - DNA, 187 bp, Glycine max
agcttaacagtatttcaaatctcaatatacgttgccaagtgtgagtatggatcttcattatgtataccatgaaacaaattactctatattagctgtatcaatgaaggtgggtaagttaagttttgtgcctgaacctctggtagtgcaacacttgagaaatattgcggcaccgaagtacttgagtaat

SEQ ID NO: 40002 - DNA, 388 bp, Glycine max
tggaggaagaaggagatgaatgaagggagatgaagagaagagcacgaaattttgtgcttaaaaaagctcggaaatctgaagtttaattttcaaatgatcaaagttgaaaaaatgcacacacatagtctctatttatagcctaagtgtcacacaaaattggagggaaatttgaatttctattcaaatttcacttgaatttgaaattgaatttgtggagccaaattttggagacaaaatttcactaattatgattagtgaattttagatatggttcagcccactaatccaagatcaagtccaagattctccactaagtgtgcttatgtgtcgtgaggcatgtaaaacatgaaggacatgcacaaagtgtgactatatgatgtggcaatgg

SEQ ID NO: 40003 - DNA, 164 bp, Glycine max
agcttcagaaacatgtaatggaactcataagactaaatcaacatgagaaaaatgacaagaaaaagaaaggaatgcacttaaggcttcatcttcaattcaagaagcaagtgataaaggagatttgaatgaaatagaggaagatgatgatttcagtttcttcgtaa

SEQ ID NO: 40004 - DNA, 395 bp, Glycine max
tgctcatatccaataacacaactgaaaccatttaccaccatcatcttctcgaggccttagatatacaaagaattggattatttatccaagtagataaaggataaatatccctttttcgaaaccgtagccggccacttccatgataagtatgtgctcaaagatatatgagtatagcactgaagtttgttaatttgataagtaattttgctaactaaggtctgaaatgaataaatgacattttcattcaccaagaaaatgatatttaagaatatatatttgtaaatttatatatatacttatataagtatttacaaatacatattatatatatgcttaaatatatattttttcatacctgaaaaataggtcgttttcagattacaatcttaaattta

SEQ ID NO: 40005 - DNA, 275 bp, Glycine max
agcttcaactttcaatttctagcgtctcgatatattacaggactcaatcagacatccgagtaaaaagttatcgtcgtttgaatttggtcagagcttcaacattcaatttacagcgtctcgatatattacgggactcaatcagacatccgagtaaaaatttattctcgtttcaatttgctctgaggttcagaattgaatttcgagcgtctagatatattacgggactcaatcaaacgtcttagtaaaaagttattatcgtttgaattagctcagaa

SEQ ID NO: 40006 - DNA, 371 bp, Glycine max
ttgaggattttcaaacgacaataactttttactcggatgtctgattgagtcccctaatatatcgagacgctctaaattgaatgttgaagctctcagcaaattcaaacgacaataactttttacttgaatgtctgattgagtcccgtaatatatcgagacgctcgaaattgaatgttgaagctctcagcaaattcaaacgacaataacttttttactcagatgtctgattgagtcccgaaatatatcgagacgatcgaaattgaattctgaagttctgagctaattcaaacgacaataactttttactcgaatgtctaattgagtaccctaatatatcgagacgctctaaattgaatgttgaagctctcagc

SEQ ID NO: 40007 - DNA, 365 bp, Glycine max
  unsure (1)..(365): unsure at all n locations
agcatctcattcaatgcttatcttggnggngaagctcttttttccatggcttattccttaatggatggcgcctcctctcacctcttctcctttgtcttccgctgcatctccatggtgaaaaatcaccattgaaggacctcattgaagctcaaagatccagcctccatagaagctccacaagcaagcttccatcaagtggtaatcagagcacaagagcttcaagtaggtgctccttaaacctccattaattttttttctttaccttctcttccattgatgtttcttcatttttctccatgtatctcctcacatgtcttgttctaaatgttgttaacatgattctttggagtttccaccaattaaac

SEQ ID NO: 40008 - DNA, 395 bp, Glycine max
  unsure (1)..(395): unsure at all n locations
ntgccgatttagtttttgtcgacgaaaggatcgaagtgggtctgagaagaagcaaatttgattatcctgctttgatgaatgggaagcctggggcaaatggagagaatgagaaggagggagggacccatgctacgatgccattcctacatggcccaattccttaccagcttaacaatatcaatactcggccaatattagtccttctcattacctaccaccctaccagtcaagaacacccaatcatccacaaatgccacccctaaatcagccacaaagctcgcctgtcgcacaaccgatacctaacaccaccctttacatgaaccaaaacaccaaccagggaaggaattttccaacaaagaagcctgtagaattcacccaaatttcggtgtcgtatg

SEQ ID NO: 40009 - DNA, 181 bp, Glycine max
agctatgaatcccatgatttctctccacaagcggaaaagctgtccaaatacaaacaagtcatcaaataggggttctcggagcagaaaatggtcaaaaaatatgtactcggatattttggagatagatggaagtccccttccaaagctccctgaagaagaaaaagccgttggaattattacc

SEQ ID NO: 40010 - DNA, 390 bp, Glycine max
  unsure (1)..(390): unsure at all n locations
tgatgcttttggtcacataatcactgtgtgaatgttatgtttgctcgtgtcagtactagaaacagtgtgaaataaacatgttatagttactaccatgattgaagtcaataaacaaataattaacttagttgtttggtgggttatccctataatttataaatatcttgcatcaaagttattctggactacttaatgtcttgaatatggttcaacagcataatagatatataaaaataataaatatttataaattatcaaagagacaattcaaataaagtttaatttgacctacagaattgagcttaccaatatatttaataggatttaggtaaagttgtttttaccaaaagaantttggttataacaatntaggaaagtgttttgtctcta

SEQ ID NO: 40011 - DNA, 376 bp, Glycine max
agcttctttgagaaaacttccttgagaagctagagcttagctacacacacccctctaaaagataagctcacctcctcgagaagctagaagctagagcttagctacacaccccctatgatagctaagctcacccgcatgacaaaatacatgaaaatacaaaaaggtccctactacaaagactactcaaaatgccctgaaatacaaggctaaaaccctatactactagaatggccaaaatacaaggcccaaaagaagaaaaaaacctattctaatattttcaaagaagagtggacccaaccttggcccatggactcaaaaatctaccctaaggttcatgagaaccctaaggccttctttatcagctctagcccaatcc

SEQ ID NO: 40012 - DNA, 394 bp, Glycine max
  unsure (1)..(394): unsure at all n locations
tggttcgaggtacttacccgttgaagatctaagaactaatgaagaacgtcgaagaacggttgaaacctttgcgaaattcttcacggaaaacgttacggaaacgtttcggaagcgcctcggcttagattttcttcacggaaacaatttttccaagcaaattcgaaagagagagaagtgcctaaggggctgaacccttttccttctcacttcctcccctatttatagcaaaataggggagatggttgccgcccagctcgcccaggtgagctcagctcgcccaggcgagcagggttgcttcctccagaagcaacaaccttctggaggagggcccaagtgggtctggttgctatttgcacccccatttttactaagtacacccncctgcctttttttt

SEQ ID NO: 40013 - DNA, 313 bp, Glycine max
agcttatgctgcaaacatttaatatagacctcctcaacctcagcagcaaaatcaaccacagcagaacaattatgacctctccagcaacagatacaaccctagatggaggaatcaccctaatctcagatggtttagccctcaacaacaacaacaacagcctactccttccttccaaaatgctgctggcccaagcagaccatacattcctccaccaatccaacaatagcagcagccccagaaacagcaaacagttgaggctcctccgcaaccttccctcgaagaacttgtgaggcaaatgactatacagaacatg

SEQ ID NO: 40014 - DNA, 397 bp, Glycine max
tctcgtatccgtacttggaaggatctgattatctgtcttcctaaggcaatatcagtataattccgatatggctcccaatcgcactcagctacagaatatgttcaagagagagggcgaaacctttaaagaatatgcacagcggtggagagacctggtagcacaagtggctcctcccatggttgagagagagatgatcactatgatggtagacaccttgccagtgttctactatgagaagttggtaggttacatgccatccagcttcgcggacctagtgttcgctggggaaagaatcgaggtaggattgaaaagaggaaagttcgattacgtttcctccatgagtgcgaatgccaaaagaatcgggacaacgggggcaaaaaggaaggaaggagatgcc

SEQ ID NO: 40015 - DNA, 199 bp, Glycine max
  unsure (1)..(199): unsure at all n locations
agcttcaggctgttcaattttttcagattgttgcataaaagggcaaaggtctatgtggtggtcggcagatgagcataaaccacagagtctggcgacaggtgcagattttttattcaaggccagctgggttaccaggttaaccaaggcatatagtttaccttcaagcttcttagtnctcgctgatgaaaaatgaattgtg

SEQ ID NO: 40016 - DNA, 391 bp, Glycine max
ttaacgatgttgattcaatgacggttctactcaaaaccgtcgtcgtaaaaaatgcagtgacatttttgtaaatagtagtaacatttcaacgacggttttcaaaaaagtcattgaaactacaaatcgacaacaatttttaggggaactgttgttgaaatcgataattcaaagacaattttgaaaaattgtctttgaaagtgaggagttttggcttttgagtctcatgccctttcagagtctcactctatctcactaacaccctatcaaagtctctttgtgccctctctcacttcgtttcagtcgcaccctaaaacacgtctccatcgaagctatccaacattgttgtaaagcttattttctgcgagaaccctctattttgctccctattttt

SEQ ID NO: 40017 - DNA, 179 bp, Glycine max
agcttgaaggtaaactagatgccttggttaacttggtaacccaactggccgtgaatcataaatctgcacctttcgcaagactctatggattatgctccgctgctgaccaccatacagacctttgcccttctgtgcagcaattgaacagcctgaagcatatgctgccaacatctacaata

SEQ ID NO: 40018 - DNA, 396 bp, Glycine max
tcaggctgttcaattgcttcagattgttgcatataaggaaaaggtctgtgtggtggttggcagaggagcataaaccacagagtctggcgacaggtgcatattttttattcatggccagttgggttaccaggttaaccaaggaatctagtttaccttcaagcttcttagtctcacctgatgaagatgaatttgtggctacttcatgcactcctctaatgacaatagcatcatttctagtactgaattgctgggagttggaagccatcttattaattaaatttctggcttcagtaggagtcatgtctccaagggctccaccactggcagcatctatcatacttctctccatgttactgagtccttcataaaaatattggagaagaagctgctctgaaa

SEQ ID NO: 40019 - DNA, 374 bp, Glycine max
agctttttgctgcaaaattctctttttgttggtgtgtgtttttttttggtttgtgctaaaggtggtcttcgtcattggaagtgcggtagacaggctttgtggttgatttagggatggcctttgtggataactgggtggtgggtaaggaggaggtttgttattgactgagtaatgacattgttgggtttggtgggaaacttggccgtacaggaatggcagtcacagcatgggtttctccctcatccttaccctctttatttgccccagttttctcagtcgtctaagcaggatgattaaatttgcctcttttcagatccacttcgatcctttcattggcgaagaccaaatccgcaaagctttgagggtgtgtagcc

SEQ ID NO: 40020 - DNA, 393 bp, Glycine max
tgaagaagtttttttggagaagttttggcttttacatgcctaactcccttgagtggcatttgtattggttgttatttttgttgttgcatcttactacatttgatatatgttttgcattgtgcattatcatagtgcgtgtgaagaaaattttctaagttaaaaaaatttctttagaggcaaagactctctatgttaatcgattgcaacctcattgtaatcgattacaacaaattgtttgaagcttgtagagttaagtctcgtatcggtttaatcgattatcgatatctcataattgattacactgctgtttgagacaatgattgatttagtcaggagtctccactttaatcgattaccaagtggattaatcgattactcctctctcgatcatgt

SEQ ID NO: 40021 - DNA, 314 bp, Glycine max
agctttgcagctcagtttttctgtggcgttgctatattatgtttgagatggaaattgcacatgatccttctgcagctcgacgtgctttcttccgggctatccattcctgcccctggtgagacctatgttttaaataactgaatgatattttcttagtaaattgattttgccacagtcgaggctgaaaacaatttatttatggatgtgatggggctttgatttctagttctaattctcacaaaaatgttccctcacctattgttattatattattattattattatcatcatcattatggtcattactaatctta

SEQ ID NO: 40022 - DNA, 395 bp, Glycine max
tattgttatttaagatatctagtttagttttttgtataagatatatgattgttataaattttgacattatatttgatccttacagataaaaagaattaatgattatatatatatatatgtgtgtgtgtgtgagaaatcaaattagaccggtataatttagacaattattacattattttataattttcaaccgaataatattttcttaaaactcatagttggattaaaagttcatttttcttagatcatatatgcaaaatttagtattaatccaaaattatttactgcctcattcatataaattaaaatcaacgtaatataaatatttcaaaacatattaaaatacgaatcatttgattatctttttgttattatttaattttgataaaatttga

SEQ ID NO: 40023 - DNA, 185 bp, Glycine max
agcttgtaggattattgggtatccatcaaatgtggtactaggtggcggtcgggcgatggtgcaaaacaattctccatatccacaaattacgtataaacccaccatccgctgttgcccacctccaactgagctcacgtactcccacgtagcccttatcctcgttcctctcaacaccgggtgcccat

SEQ ID NO: 40024 - DNA, 384 bp, Glycine max
tgccacccatctcgcccaagcgagctttgttgcttcctccaaaagcaacagccttctggaggaatcttctggagggcccaagtgggcctggttgctatttgcacccccatttttactaaatacaccccctgccttttttggtgattcttttttcgtaaagctacggaaacttacgaatttcgtaacgatacttgttttcttttcgtaatgttacggaaccttgcggattgtgcatcaatattttcttttgattttcggcacgtcacagaatttcacaaattgcctaatgatgggtgtcaagcacctcaaaatgaccaaacacaagttgcatgccaccaaacaaaagtccctggacgaaattaaggtatgacagtttggaactct

SEQ ID NO: 40025 - DNA, 266 bp, Glycine max
  unsure (1)..(266): unsure at all n locations
agcttagggatggatcacttacttgttggtgatgaacaaaagcgcaaaacggaatcaaaaaatgcgaaaaaggatgaccctagggctgcaaactcgtcaatctcgtgggtatggcttttgaaaggggggaaaagaagtttttgaatgtaaaaacccccccccttttgtncattcttaaatttggtgccggggtggattgccccagcgcattccaacgccatccattttttattttttttcttttttcttttttttggggggggaaa

SEQ ID NO: 40026 - DNA, 383 bp, Glycine max
tcttgaagttttctggttttccaaaccttgttaacttgtgctattcatcttttcattctcttctccccttgccaaaaagaattcaccaaggactaaccgcctgaattctttttgtgtctctcttctcccttttccaaaagaataaaggactaactgtctgaattcttttgtgtctcccttctcccttgtcaaagaattcaaaacgacacagtatgataattcttttgattcttccctttcccttatacaaaagtgttcaaaggactaagcgcctgagaattcttttgtatccccattcacaaagtatcaaaggtttaacagcctgagatctttgtcttaacacattatagggtacaccctttgtggtacaagtagagggtaca

SEQ ID NO: 40027 - DNA, 251 bp, Glycine max
agctttccccttcctctatgaccactggtgtcttcaagaaagtgttgagggcgtcagcatcaaatttaattaggtgccctcgcaccctcacttgcttaggcgatttgtcttcagggtcatagaggttagcataaaattctttaacaatagaaacatcaatgcttccctctaagaagttagtgagctccttatgccaattcctccttgttaatatcacattttgttgcaaaatgaattttcttgttaacaat

SEQ ID NO: 40028 - DNA, 390 bp, Glycine max
ttacagactcaattcccgtggcatgcttttgtttgtcataaatgaaatgatcaaaattcaaaaggaaaggaaagtggatcaaagagaaagagccttactagtataacatgttagttcaaaagatcaaattctggtgaatatatattcaacaaaaaaaaatcacctactagagattgagagtagaatgataagacatcatgataaaacatgaaaaacagacttttagtaattcaactgctttacatttgcttcatggttgcatgggagcctcatccagtggcaagaaaaaaaggtgattaatataaaagaaacaacaacatttcgttatcatcatgctaattagcagaaggtttaatatctttaagaagtccaactatttgctgcatgctc

SEQ ID NO: 40029 - DNA, 353 bp, Glycine max
agcttgccggataactcttctatcttgtaagctccatttttttaggttttgccgaatactgaaagtgttggcctaattggctatgaatttgtcttccttggagtcttttcttgcatcactttgcactctccatactagatctcctttcaagaactctctagatttcatctttgaattgaaacttcttaccatccttttcttacatgcttctgccattatttttgtctgatttcggagctcatcaatgaaatgaagttcattttttaaagtgttcatatttatagtgttatcataatgcagttttcgaaatgagggctctccagtttctattggaattaatgcatctgtatcat

SEQ ID NO: 40030 - DNA, 287 bp, Glycine max
acttgctgagatacaagcgccggggattttctttccacctataggacctggcgatcactgacaaactcagcggacgctctcacgacgacttccttttacagctctggactctgcagatgtgcacacgacacattctctcaaactctctggaattgggacctctctctctagacctgatgacatacaccagatcctgataaaaaatggccaaacctcctatctaaatctgaatacacgccaaaatatgcggactagaatgagctcatgtgctcagcgcatctctgatc

SEQ ID NO: 40031 - DNA, 177 bp, Glycine max
agcttccaatttcattttttagcgtctcgatatattacgggactctattgggcatccgagtaaaaagttattgtcgtttgaatttgatacgagcttccattttcaatttggagcgtctcgacatattacgggactcaatcggacatccgagttaaaagttaatgtcgcttgaatttg

SEQ ID NO: 40032 - DNA, 387 bp, Glycine max
tgtatcaaattcaaacgacaataagttttttctcggatgtccaatagagtcccgtaatatatcgagacgctccaaattgaaattggaagctcgtatcaaattcaaacgacattaacttttgacttggatgtccgattgactcccgtaatatatcgtgacgctccaaattgaaaacagaagctctaagacaattcaaacgacaataactttttattcggatgttcgattgagtcccgtaatatatcgagatgctccatattgaaaacggaagctcgtatcaaaagcaaaccacaataactttttactcggatgtccgattgagtcccataatatatcgagacgctcgaaattgaaaacggatgctcgtagcaaattgaaaccgcaata

SEQ ID NO: 40033 - DNA, 343 bp, Glycine max
agcttttgtataatgactatgattacttattactctttaaccatgtaaagattacctcctttttgtatttaatgctttatatagttttttagataaaaggataagctaatgcaaggaaaaaattatggactggacctcctttttttatttttattcaaaagttgtaaaccttgtgcactaaaatttatttgtattcatctaatttttacaactgtgttttacaaaccgaaaaaggaagagacaaataactggccccgtattctattatttacatattcctgctctttttcaagctgcttttaacttcattcttctaattaattaacaggttggtcaatgcttt

SEQ ID NO: 40034 - DNA, 399 bp, Glycine max
tatgttatggtgcacctttataaaagttttcacttgttattgattgtgtcagacacaccccaagagttggttaatgagaatagttaaagaagaagacattgatgattcttcaaattcattttgtcttgcctttccttaaggtggagcgtggtggtgctcctctcactaatacacctgagggtataagatattttggttaaattggtcccaaaccttcggcatcatcagtcttaatctttcaataattaatctaaacaaaagtagttatggccatgggtttttctctttgttattgatacaaataattattggtccaaacaataacaattgtataacctcaaaaaataatcgtttatattctatgcaaaactacaatttgttaaatattattcattattc

SEQ ID NO: 40035 - DNA, 212 bp, Glycine max
agcttgagcttggctacacacacctcttctaatagctaagctcacccccatgccaaaatacatgaaaatacataaaaagtctctactacaaagactactcaaaatgcccttaaatacaagtctaaaatcgtatactactagaatgaccaaaatacaagacccaaaagaacgaaaaacctattctaatatttacaaagaagaagtggacccaa

SEQ ID NO: 40036 - DNA, 404 bp, Glycine max
acagcttaaaacttgttttctcctcacttatatggtgcttaattttttcatttcttctcgatgtgagattttacctcacacatatactccaacatctactgcactcccttaacttcaacttgtttgtacgaggcgccttgcaagattgtggtgattcccttttgtcaaaactacaaaacttcacttgaatctcaaaatggaatcagccaagcgttacaaggcggttttgagattgaatggatggggaattatgaggagtgcgagaaatgttctggttccggtggagagtgtggagtcactgatggtaaattccaatgtttctgcaaggatggatgcaaaagtatgcttcctaactagcttggtcattgctcggactctcttgtgtctattaattcaaattctag

SEQ ID NO: 40037 - DNA, 169 bp, Glycine max
agcttttctttctcaatcattctgtctattgcctaacaattctaattgcaagttcacattcttgttatttctttgcataacatacatacttgctcaaacttatgacaagaaacacaaactccatcacaatcatgcattcaatccaaaatcaattcataacaccaatttt

SEQ ID NO: 40038 - DNA, 370 bp, Glycine max
tcagcttctcttggatcgggactcacgattatatggactgcttatgctttaagaaattaaaccttcactgatcatcacacaccacgtacaataccagcaccatagagatttggttcttcgaagattcctgcatcaatatatactttaaggaattccgccacaagcttgcaccactcgagatcttgagcatattcattctgggcaatgtaaagagagttgctatagaactctatctattactatggtccttcaaacagaaagtgaatctcatgtgcaaatgatattagagggggagtattatattttgaggttgcggctttctcaaatgcaacaaaaagtgaagcttaatctacactttaacttcatgggg

SEQ ID NO: 40039 - DNA, 209 bp, Glycine max
agcttcaagaattatggcctcatcaaactacttgtttcccgagggaaaattctataaatagacctcccatctttaatgaagtgggttaccattattggaaaacccgcatgcaaatttttatagaggcaatagatttaaatatttgggaagccatagaacaaggaccttatgttccctctattagtggccgaagtgcaacaatagaaaaa

SEQ ID NO: 40040 - DNA, 382 bp, Glycine max
tcttatccaaggcacattcttggtggtgaagctccttcttccttagcttattccctagtggatggcgcctgctctctcctcttctcctttgtcttctgttgcatctccatggtggaaaatcatcattgaaagacctcattgaagctcaaagatccagcctccatagaagctccagaagcaagcttccattaggaatgatggttcttctctcaatcaatcagcctaaaaatattgatgaagaattgagtgaagattctaaggtgattgctatggaagaggaactaagtcagttcattaataacaaggttggaatctagttcctcctcctcagaatcagacagtgattggaaccaagtggatgttcaaaaacaagcttaatgaa

SEQ ID NO: 40041 - DNA, 247 bp, Glycine max
agcttagtagtttaccattctcctctatacttcccaagccacatgatcaacatattatgtcatcagtgatgggtccttagggccaccaagaaagacaacatgggggtcctgctcttgctagtcctcagattggacatggtcaacaggctccacttgttgaagaacctggacttggtcaacatgctcaacatcctccactttcttaacatgctttgaaggctccacttgcgcagttgttttaaaggtc

SEQ ID NO: 40042 - DNA, 327 bp, Glycine max
tgtggcaaatgaagttatgagtcaatgcatgttattcctaatgcactccaagaaaataggtcgtgatttcttaggagcacttgttctatatatttatgtactgcatcctccatttgtttgccgattttggtgcattgatgcgactaccttcgaacttggaaagattcaatgtcttctatgagtgtgcttcgtcgatgttcaaaatttgggcaaggaacaaaatacttcgaagtggagattattgcaataatactggagaatggtgcatttccattctatattgctatcgccatgttgtacaactctactttgcaacttttcacatag

SEQ ID NO: 40043 - DNA, 235 bp, Glycine max
agcttttggcagcttatgtttaagaataatccaaatttgccttaatatgctacacacgtccacgtgttcgaggggttacgatacaaatcaaattaagtccaatactatcaaattatcattcattaagaaaatggtatatccacaattatacactttcacaaatcaaattgccttactataagttgattcgagtggggtggaaaatagtggggagaaggagacagaatgataattg

SEQ ID NO: 40044 - DNA, 396 bp, Glycine max
gctttgggaattacaaacatgtgaaacatcattttcatcatcaaaaagagctaagaaaatcattcgatcatgatgagtatgaggaagattcatcgggagctatgtatgagctgttccatgggttcctggcaattggaactcttggttcggaggcatcaacgacgccaacgtttgccatctctttggagaacataaccgaaaaggaagatgaagtgaccgagaatgaattgaagctgataaacgatgagctagagaaagttctggtactgggagaggataatgactagccatcgtcaatatcatgtgggagaagcagtcatggaagcataataactctgagcggaggaggggggaagcctgctgcaactacgttgttggaaggagatcaatcaaatg

SEQ ID NO: 40045 - DNA, 242 bp, Glycine max
  unsure (1)..(242): unsure at all n locations
agcttgccatccagctcgtccaggcgagctaggttgcttcctccaaaaggcgatgccttctgaagaacttcctggaagggcctggttgctatttgcaccccaatgtttactaaatacacccccttgcctttttttgctgattcttttttcataacgttacagaaacttacgaattacgtaacgatactcattttctttccgtaatgttacggaaccttacggattgcgtaancatccttttt

SEQ ID NO: 40046 - DNA, 390 bp, Glycine max
tgtattgctgctcagatcttgactagttataactttctaaataaaatgagtttatcccatgtttttactccaaaagtcagtgcgaatcaaatcactcccgcattttatctctagcatgcattcattattctttacctactcctcacgtttggtttttttaggaataacaccataactaaactcgccccaaggcatccctatcgcaccagatgatcaagaggagacacaggaacagatgaaagccgacatatcggctttgaaagagcaaatggcttccatgatggaggccatgttaggaatgaggcaactcatggagaaaaacgtggccaccgctgtcgctgttagttcgactgccgaagcagacccaactctcctagctaccgcgcacca

SEQ ID NO: 40047 - DNA, 188 bp, Glycine max
agcttgacggagttttgtgtcatcggggaacaatttcactttaaaagtgggtcccaattggattcctaattttcaacttacctatttggaagtgacatcatggcagttaggtcccagctttccattgtggattcagtcacaaaacaaacttgaatatgttggactatctaacacggggattttccgtt

SEQ ID NO: 40048 - DNA, 387 bp, Glycine max
tgttattattgtactcctccactacttattttctggatatgttcatgttaattaatccctattaaatatcttaatccccaacatatgaacacggaagattccagccaaaagatataattgaacacagagaataccaccttttttttttttggtctataagaataccacctgtttaagagaacatgcatctacaagttattgggggttttttctacttcttatgatagcatagatgaatattattgtggttttttttggtctataagaaaaccacctgtttaagagaacatacatctacaagttatttggtggggttattttttgtcctatcaaatgaaaggttgaggacacaatttctgcccaaaacataagctcccaccatttact

SEQ ID NO: 40049 - DNA, 178 bp, Glycine max
agcttctatagaaggttctttcctaatttctctaaaattgcctcacctttcaatgagctggtgaagaagaatgtggcatttacctaggttgaaagacaagagcaagcctttgctttgctcaaagaaaatcttactaagggacctgttctaactcttcctagattttctaaaacttttg

SEQ ID NO: 40050 - DNA, 372 bp, Glycine max
tataagagcatgtagaagcaaatgacttttatgttttgatgatgatcatgatgatttgatgcaaatgatgcaaatgcgcttttcaagtttaaattcaagacaatgattcaagaatacaagacacaacatcaagatgatcactattattttaggaagggaattcctaattgatatagcaaaaggtttggccaagtaatttaagttaaaaatgtttttcaagagatttactctctggtaatcgattaccagaggatgtaatcgattaccagtggccaaaaatggtttacaatagctattaaaaatttaaattcaaattttagattgtgtgatcgattacataatattggttatcgattaccagcagttaataaa

SEQ ID NO: 40051 - DNA, 228 bp, Glycine max
agcttgcctcaaagaggtccaggaaggataaagcggccgaaggaaccagttccgctcccgagtatgacagccaccgctttaggagcgctgaacaccagcagcgcttcgaggccatcaagggatagtcatttctccgggagcgacgcgtccagctcagggacgatgagtataccgatttccaggaggagatagttcgccggcggtgggcatcattggttaccccctggc

SEQ ID NO: 40052 - DNA, 364 bp, Glycine max
tttacgtaaaaaccaaactgatcgctggaatgaggattgccaagaggcttttggaaggatcaagaagtgtcttatgaatccccctgtgcttatgccaccagtacctggaaggcctctcatcttgtacatgacaatcttagacgagtcaatggggtgtatgctggggcaacatgacgaatccggaaagaaagagcgcgctgtttactacctaagtaagaagttcacgacctgtgaaatgaattactccttgctcgaaagaacgtgttgtgctttagtatgggcatcccatcgcctaaggcagtacatgctgagccatactacctggttgatatccaagatggacccggttaagtacatctttgaa

SEQ ID NO: 40053 - DNA, 252 bp, Glycine max
agcttgttgctgtaaagatgaaaaaaaaatgcaagctaaatgaatactaagtaaatgtgtgtcctgaagcacgaggatgatcatcagtttaacccaaaagtttaagatcataagttaagacaaaattctgtcaaaaaaaaaaagttgaagacaaaatgtgcatattctacccatgacttcatcttatattgtaccgacccattaacctttttctttgcacatgtacacctttcatatattcacacaaaaatg

SEQ ID NO: 40054 - DNA, 388 bp, Glycine max
tagggaattacatgtctgaaacactgattaccagtggttttcagaatagttcctagttactcttatctcggttcaactcataaaaaattaaggaacgatttttcatccattacaaatattctatatcactcctagtaaattcaatcaaaatttggaacaataatttcatgtcacagaagccaacctcaaaggaactataaattttaaccattcccatatgacccattttttcaagtagtcgactgtagaggacaaattttgttaaaaaattgaatcacatattctcaaccttactaatctgatcatgaccctctaagaagagtttatagatgtctctctaaggaaacacgctaggtattctttgaatcaaagtctcttcagcttctac

SEQ ID NO: 40055 - DNA, 184 bp, Glycine max
agcttgtctcagcgtctatgcgagacagaaaccaacatgttagctatcatcgccaagtaccaagaagagttgggtctagccacggcccacgagcatagaatcgcggatgagtatgcccaagtatatgcggaaaaagaggctagaggaagggtgatcgactctttacaccaagaggcaacctgtg

SEQ ID NO: 40056 - DNA, 389 bp, Glycine max
tgctaacccatggaagctcctaatatctctcacactttttggggtgggccattcttggatggccttgattttctcagggtccacttggaccccatttctaccaactacaaaacctaagaaaactatattatctacacaaaaggtacacttctctatatttgcatagagggtgtttttcctaaggactgaaagaacttgtctgagatgtcctaagtgaaaatctaggctcctactatacactaaaatatcatcaaaataaacaactacaaatctacctatgaaatcccttaagacatgatgcataagcctcataaaggtgcttggtgcattagtgagcccaaaaggcatcactagccattcatacaaaccaaacttggtcttgaaagcag

SEQ ID NO: 40057 - DNA, 372 bp, Glycine max
agcttttcatatattaattaacccaatgaacaaacaatgtgcatatatattactactatatatgatttaatttaaactcaatttgcaaagtgagtttgactttgcagggctcaataaaccagcccaataagctctaatgacctatatctctatctccatgcatcaactgtagacttggaggaggtccatgtcgaaccaacacaatatgttcccctctttgttacccacaattaaattataattcgcattcaatgtgtatcaaaacaattatgatgaataatgttttgtattaacgagtaaaagagaaacaaactacactataatttcttgtttaagaaatcctccatgacaaagaagtcataacacagatct

SEQ ID NO: 40058 - DNA, 400 bp, Glycine max
tgtatttaaaaatgttttaaaaatacttttaattaatatttgaatttttattcctttattaatatatatgtgaggggtagagggtgtcacagtctcctcgcttagtggccaacttaggcttactgcgaagaagactcatgaagaatcccaaaggcgcgcttagcgcgaaagcccgcgctaagcgcgaggtcttgtggaaattaagctaccttaggcctataaaatgagtaagaagcaaatgagaaagtcaccaatccctacacatttacagaccgagacattgagacttagagttctctaatgaatacatcaaaagcctgagtatttcaaataagagaaaccctatatctatgtccattatccccttctcttcctctatccatccctcttcttctatcca

SEQ ID NO: 40059 - DNA, 270 bp, Glycine max
  unsure (1)..(270): unsure at all n locations
agcttgttaaagcggaagaaaagaaaactgaaaggaagcgaaattaaagtgaaagtacacaaaacaagtagggaccactaagggtgcgtagcatgaattgaaagattcgatttcgggaacttgccggttgaagaccgaagaacgacgaagaacgaacgaagaacggtgaagaatgatgaagaatttccacagaatcgcttacggaagcgttacggaagcactncggttggaatttnttncacaaaacactttttttcacccaaaaaccca

SEQ ID NO: 40060 - DNA, 398 bp, Glycine max
tcccctcttgtatccttacaatattctcattatctctctctgtgataatatatatatatatataaagttaatttcatctttgggggatctccaactctgatttattaataaggtgattggcacttctcttgctataacctgcagtgttggatcatgggggttaagtgtgtttggttactgagtgcctctatacacttccacttagaaatgtatccttggacacattttgaaatgtttggctggcaagtccaaaattagttttggtcccaaatgttaatctaccaggaataacatttatttattgtttttcaatttgacagattttaccaattggttgttacatataagtttaatgataataaaaaatcaatttatttgttttttgacaatttcacact

SEQ ID NO: 40061 - DNA, 194 bp, Glycine max
agcttgtaatcgattacactcatactgtaatcgattaccagaggagtttttcagaaaacattctcaacagtcacatctttttatctgattcttaagtggccatcaaaggcttatatatatgtgactagagacacgaattgaacaagagttttgaagaacaaaaaggtcttatcctcttaacaagcaaaatgttt

SEQ ID NO: 40062 - DNA, 385 bp, Glycine max
ttatgatgatgctttgcttaaacttatcttgcatgtcttattagtttcgcagagaaggtcaaacaacacactaaagctttgatttttatgtcaacaaaaatagcgatttttatcacaataggtgtgttttgtttgtagatctttcaaagcttaatttttttggttaattgtttgggtgttcttgatccttctcctactttgtttcgcatagaatcccgaagaacacacttaagctttgatttttatctcaagaaaatcagcgatttttattacaacacgtgcgtcatatttgtagttatttcaaagcgtaatttttttggataatagatcgggtgtttctgatccttctactacatggttcgattaaaacccacagaacactaaa

SEQ ID NO: 40063 - DNA, 193 bp, Glycine max
agctttgaaaattgttcctagcctttctctacaaaaaattcctaaagaacctattcatgttcccactgaggttatcactacttcccctagagtgaggtagacatgtttgtcttatgatctgtagaaattcacaaggatttacttgctaaatgtaggttggggatgtcaatggagtaaaagttttgcagcatga

SEQ ID NO: 40064 - DNA, 394 bp, Glycine max
tgacaaacaaagctaatcgaagcaagaaataaaatcaattgtgcaaaagacatttgaaatggtaacatctttcaatattttatattaattttcttataatttatataataataactcattttctattttgtgattgtttttatatgatatatgaaaggttggtgaaatttttaaaggcattatgcattagattatattatttttatattatttaatttgttttttactatatttaatgttaataggaagaagattcaatatctggtgaatggtcatatgctatggaagtttggaaggccacacacatgagatgtaatggaacttggtgcattgcaaaaggagaagaaatcatggtaaagaaaaaaaattcattttaaagtcttgatgtcaatat

SEQ ID NO: 40065 - DNA, 231 bp, Glycine max
agcttgtgctttgaaaattatgtttatggaatatttgtgagtttagaatgctgaactgggatcatccatttctattttctagtttagatattaattcatgtggctgcggtaaaattggtttaccttacagtttacattgttggttaaaaaaagacaatgacatttatattatgggttatttaaggcttatttaaagttaagcatagggtttggttatctactgaaataatg

SEQ ID NO: 40066 - DNA, 410 bp, Glycine max
atactaacgctttgagcattaagaagatacaatacgcaaggtccattcaaggaaacaaggaagtaggaaagctaggaccttactgggaaggcccattcagagttgagcgagcatgcacaatgaagcatatagacttcaccaactagatggaaaagaaaatccaagaacatggaatgccacccatctaaaattatattttagttgattagcatcactaccacgtgttgtactttttttcctactcaagtctgttgttccaaaatataaaaatcaaggttttggcttgaaaggttttaacaacgcacacctggggaatggagggaacttgtactcaaattattgaagtatataaaattgcatctccctttagtctttattattttctttgtgcatatactaatgatacgaat

SEQ ID NO: 40067 - DNA, 117 bp, Glycine max
  unsure (1)..(117): unsure at all n locations
gtcgncctcccggnccttgcacattttcctgtttgaacantttaaatgcatatntgcccttttangctttattanatctatnagggcnagcaacagngctttaaggtcacctaaatg

SEQ ID NO: 40068 - DNA, 230 bp, Glycine max
agcttgtaattgattacacacatactgtaatcgattaccagagaagattttcagaaaatattctcaacagtcacatcttttcattttgttcttaaatggccatcaaaggcttatatatatgtgacatgagacacgaatttgctaagtttttttcagaacaaaaaggtcttatcctcttaacaagcaaaattgttttatcctcttacaaattccttggccaaaacactgtg

SEQ ID NO: 40069 - DNA, 388 bp, Glycine max
tggttcgaggtacttacccgttgaagatctattaacgatgaagaacgaatgaagaatgtcgaagaacggtcgaaacctttgcgaaattcctcacggaaaacgttacggaaacgtttcgaaagcgcctcggcttagattttcttcacggaaacaatttttccaagcaaattcgaaagagagagaagtgcctaaggggctgaacccttttcttcttcacttcctcccctatttatagcaaaataggggagatgcttgcatcccaggtcgcccaggcgagctcagctcgcccaggcgagccatgttgcttcctccagaagcaacagccttctggaggaatcctctggagggcccaagtgggcctggttgctaattgcacccctatttttac

SEQ ID NO: 40070 - DNA, 180 bp, Glycine max
agcttgtaggattattgggtacccatcacatgtggtactaggtggcggtcgggcgatggtgcacaacaagttttccacatccacaaagcgcgcataaacccaccatcccctgttgcccacctccaactgagctcacgtactcccacgtagcccatatactcttttctctcaacaccgggt

SEQ ID NO: 40071 - DNA, 377 bp, Glycine max
tctatatgagctgaaccattttatcattattcacatgttgagttctattcagaaaattagagtttatctcttttatcttagtgagagtgattctcctaaattcttgagtgattcaagaacaccctggctgtatcaaaggactttcacaacctttgtgtgttgccctcgctggaaagagtgattctttccttcctatcatctccacccttgttctttcaaaccacaattccagaaaatccacctctgcccaaaattatctcgtgaccataactcccattttacacactcaaattaagtgattcttgagcctaaattgaatttctaaacgagacctttcacctcgttttggaatcaccttatttggagccctgttgctt

SEQ ID NO: 40072 - DNA, 193 bp, Glycine max
agcttgtgatgaatatatctctttcttgcaaaaatagcaagaaaaagtcttagcctcacatgatatctcttcattgatgttctcatctcttccttcattggcgtttgtcctagaagaagatgaaccccccaagctcattggattgaaaaaatccaattccactttcgaccctcgaattgaataatccttggat

SEQ ID NO: 40073 - DNA, 306 bp, Glycine max
tttgattctcttagtagatcacatgacatcttcactttctaagtttctctgccggtgggatcgcttgattgacttagaagctaaagagactgaggttaattttcaaaatctttgttctagttttaccctcgatatttgttttcaatcaacttgtcagtttaaaagtctttgcttttcttatacttccctccctttactgtttcagctcttaaagaaaggggtgctgcaatcacatataataaacaggggtggcctttcctttattgatcttgatgcttcacaaggaaatcctccatcagaaatctc

SEQ ID NO: 40074 - DNA, 249 bp, Glycine max
agcttctgctgttaattcttcctccttctgttaaccattgtaatgcttctacttctaaacaggtttgctcattcaacactgctggtccttcatcagcagatacgaagggtatgaaaatatctcattttttttattcttctatttgtaataatattgctcttgatacctggatcatagattcaggtgctagtcatcacatatgtgcctcactgcactggtttcactcttatagtgaaatcaatccctgat

SEQ ID NO: 40075 - DNA, 295 bp, Glycine max
tcagcctgcctgtacaatgcagcaattatgtttgcccgagttatgttggggaacggatacaaacccagaaagggtttaagcaaagacaaacgcggcataacatagccagagaaatgccaaatgaaatcgtgggaagtattggttaggctattatcccactcaagccgatatatatagaagcatctccggaaggaagaatgggatttaaatctcgccgctgatacaataaggtgagagaagcccaccctgccccaataagttgagcattatatgcgccggtctgggggaataaagt

SEQ ID NO: 40076 - DNA, 328 bp, Glycine max
agcttatgttgggtctccattatgttacttgtgttttgttaaaaaaaaaaggtctatttgcattccttttgcaagtctggttgtggtcatttggtttggggatgttgcaatggcccaagttgtaagtatcaaacataatggtggcattcatgggaacatgaggtcaaagtctacgctagaggccatgggtttttagtggattgaaagaaaataaggtgcagagtgcagatcaagacaatgccgaatttaaggttcatgagatcaaaaaattggtggttcggctagtgattcaaaagatgcttatgacgagcttgtcagagtgatgaac

SEQ ID NO: 40077 - DNA, 378 bp, Glycine max
ttgccccgcatacactagtaacaaaactgcagaatttgaattacaaagtatactccatcgtaccaatgacaagatgattaagcactagtaggcccattcaaacatgcacttgtgttactcatccactgaaccaaagagaaacgaaatgccgagtcgaattgcttaagccaagaccatgatacaaaagtgatatcatcaattaaacttctgctatcaatatcttgttgattaaagataactgcatttctcttcttccaaatgcagaacactaccgagcaccaaatagtctgccaccataccttgctagagcctgttgaacccatattagtgtagtcatgcactcacacgatcactgattagtaaactatgtgataaaca

SEQ ID NO: 40078 - DNA, 265 bp, Glycine max
  unsure (1)..(265): unsure at all n locations
agcttcttcataaatgtgtcatttgtgcgcaatacacaatgctcggtacaccacaacaaaatggtgtatcagaaaggcgtaatagaactttaatggacatggttaggagtatgttaatcaatttgactatacccgtatctttgtggatgtatgctttgaaaactgccatttatttgttgaataggattcctagtaaggcagttccaaagacacttttgaatgtgtgacaataggacactcatataaggcactcnctgtttggggt

SEQ ID NO: 40079 - DNA, 382 bp, Glycine max
tgcatagtggtactgctattagaagcctttgactacatcgattatgctatggtaatcaaatgggtcaaattgaaaaaccttgagcatatcgggattggttaaatggaggagcggaccccttttgaggattctttgaacacttgtgtggaatgaaggggccactagtgttgtgaattttatatagggtgtatgtgttaatggttgcatggtcttacaatgggtggctttaatatttatgtatgcatacttatcggtggacacaatgattcatggtagggtatatgtttttgttggcactgatttaaggtttagaatcttttttttatgcatgctcttgatgtatacgctacgattcttttttttggggtttgtttaatatgtg

SEQ ID NO: 40080 - DNA, 352 bp, Glycine max
agcttgatcaaaacaattatctaatcattccaatccactcaaatcatacaattgctcattcaaatcattctcaaacactcatttcatacaaaacaatccactgcatatcattttcaaccaattcactgttcaaacaagctttttgtacaagcaaacaactcaaagtactgaaatttaaataacttggaatttaaagaactgaaacataaaaactaaaatttaaatgattgaacataaatcataaaataactgaaaataaactaaaatgttcaaaatagaagggctcaggaggagtgagctcatcctccccctttactgctactgctggctcctctggttcaagctcctgggc

SEQ ID NO: 40081 - DNA, 399 bp, Glycine max
tgccgctggagctgacccatcaactgccctaactctcttagactggtgatccctaggctcttgaccttgacttgatagaacctctttttaagtgaaggcttttgacttgatcccatgttttactaaagtgaacaaaatcggtgcgaatcaaaactccgacatctatcatgggtggaatcgatgaatgcatgaagaaatgcatatgacacggatgcaatttatgaatacgcgagcctaggaaattgtctccttcttagatataacgtcttggggtagcatagtgcccgacgcatgtttttaagaaggtgacacggaccctccgttggtttgccaaaaagaggggatcaagacagaacccgtgcatgatgcatatgcgaaaggcacaacacaaggatgtac

SEQ ID NO: 40082 - DNA, 266 bp, Glycine max
  unsure (1)..(266): unsure at all n locations
agcttccatcaactggtatcagatcttcaatgaagaacctcaagatttgaggtcaaatcctttccaaggtggagggaatgatgcaatcctaccccacaaggtcattggatagaagactccaagtagattgggtcagagatccaagggaaggccctagggttctcatgagccttagggtagattttgagacccatagctaagtatgaagccttctttgtttngaaaanatcanatntgtttttnctttttttggggctcgtgttttg

SEQ ID NO: 40083 - DNA, 386 bp, Glycine max
tgtttcccctcatttctctgatattagaaggggggtcacacacaccaaacaaccaaatcacgtcgtttcatttaacaacaatcaatcttttccctctttctcttaattcccaatattcttcacattcacttctcttctgccatgtgaacaaacatcaaacatagcaagcacaaaacaaaatcgcagttccatccatagcactgcctcaattcttcccccaaaaaaatgagccagtgtgttcccagttgggatgtcgaagacaacccaccaccctcaagagtctcacttcgctccaactctaattcaactgcccctgatgttcccatgttagctctcatttcttcttcttttgtctctgtatcatacgagaaattattttataattc

SEQ ID NO: 40084 - DNA, 216 bp, Glycine max
catcttgaagagacaaatgtttattgaatttcgactaatgttcacagtttgttatttggataaataaacagaccaacaatggggacagatcacagaaactccaacactgttttcttcttcttcttctgctaatgaaaaacgtgcaaaatctttatttgtagagtgctatgctattgtttatttatatatataaaacacactcccgggttatgttaa

SEQ ID NO: 40085 - DNA, 332 bp, Glycine max
atataatacacaagcttatgatggtgccttatatgcgcgctgctttactttttgatgcaaattacccaacgatctctcaaattaaggacttctcatgacttggaacccttatgctctcttataaccaaaaaacaaggtgaatatataaaaatctggctttgggataatcacactcaaagcattattactgttggctaaacacgggtgcaaaggataaattcataacataatatttttatggcagagtggctaaaacaaaaagaaacatggccttgatcgtatataccatatgcaaataatctaacactctaataacgatgcaaaaatatgaa

SEQ ID NO: 40086 - DNA, 371 bp, Glycine max
agcttgtcaacagagttcatcaagttaatatctctattcctttaggatgcttgttgttccactaaaattctgattatgcgtatgaaaaaaaaatttattggaagaatcaaaacttattttggttatttctattcccctagatctagtcttatgattttttattatggacatagtttcttttcgaaaaaaataatatatttaatttttatgtattattaatttagtcaccttaaaaagttaatatgatttaatcaattaaatactataaatctataatagctttgatttttaagaaaataatcatgcaaattaacaaatttattttatatgataatttgtaattaaatattaataatataaaatcccattga

SEQ ID NO: 40087 - DNA, 399 bp, Glycine max
tgaaggtaaaatagatgccttggttaacctggtaacccaactggccatgaatcaaaaatttgcacctgtcgccagactctatggtttatgctcctctgtcgaccaccgcacagacctttgcccttctgtgcaacaatctgaagcaattgaacagcctgaagcttatgctgcaaacatctacaacagacctcctcaaccttagcagcaaaatcagccacaacagaacaattatgacctcttcaccaacaggtacaatcccgggtggaggaatcatcccaaccatagatggtcgaatcctttacaacagcagcaacaacaaccttattttcaaaatgttgctggcccaagcagaccatacgttcctccaccaatccagcagcaacatcagcaacagcacca

SEQ ID NO: 40088 - DNA, 194 bp, Glycine max
agcttttgagaaactcaaatggtcattacttttcactcggaggtccgattcaggcgcatcacatgtcgagacgctcgaaattgaaaaatggaagctcttgagcaattcaaatggtcataaattttcactcgtacgtccaatacaggcgcataatatatcgagaggctcgaaattgaacaacggaagctctcgag

SEQ ID NO: 40089 - DNA, 388 bp, Glycine max
ttaacctcatcgtctctcacagtctttagatttgggagccaatccaatccttgttttcggactctcagccacttatgatagccgccgatgatcccattactgcttcccctaagctctctgtcctttcttcacgccgcatcccatgccttgcgaactccttggagtaccctcgcgttatggtcactgaaacctcgtgcgatgaaaggcgtgatgctttcgtctaatggcgctcctctcatggggtagccaagctgtcttatggcgaggacgggattataattaatacaaccccttgttcccatcaagggaacatttggacatccttcgcatgaagatggaatcttgattctttcttccttctagcgagggaaccaattaacagacgccc

SEQ ID NO: 40090 - DNA, 203 bp, Glycine max
agcttgaaattgatctatgtatgctctcgacaaattcgattggtcataacttttcacacggatgtctaattttgggacctaatatatcgagatgctcgaaattgaacaacggaacctatcgagaaattcaaatgttcaaaacgtttcacacggatttccgattttgggacataatataccgagatgctcgaaattgaacaacg

SEQ ID NO: 40091 - DNA, 387 bp, Glycine max
tgccgccacggagttttccgactattctcttgtgtggtggaagtgattatgcaagttgaagtggacgtttccattgggaaatacaatgataaggtactttgtgatgttgttcctatggaggccagtcacttacttttggggagaccatggcaatttgataaaagagccaatcatgacggttacaccaacaagatctctttcattacttttggtgttgcataaaaaatgtacaatgtaagtcggctaggtttttttgtgcgagctcaaccgacattttgtttcggccgaaactggcatgttcccatttattttggccaggataacattatcccacctcggcagaaaaatatttgctattccacttcatgcatattttattcacggaat

SEQ ID NO: 40092 - DNA, 366 bp, Glycine max
agcttgtaatcgattacactagtcttgtaattgattacctaaggagattttcagaaaattatttccaagagtcacatctgttcaaatggtttttacatggccatcaaaggtctatttatatgtgactaggaacacaaatttgctgagagtttttttaaagaacaaaaaggtattattctctcaaaaagaaaaatcttcttatcctcttaaaaattccatggccaatacacttgcaattcaataaggaattttttgagtgctcaattgttcaatctatctctttcaagagagatttcttcttctcttcatcttacttctaaaaagggattaagagaccgagggtctcttattgtaaagaaatctgaa

SEQ ID NO: 40093 - DNA, 383 bp, Glycine max
tgcctgtctgatgcagcagtaatgatggcccgagttatattggggaatggttacgaacccggaatgggtttaggcaaagacaacggcggcataactagcctgataaatgccaaaggaaatcgtgggaagcatgggttaggctataagcccactcaggcagatataaagagaagcatcgtaggaaggaagggcagtagtcaaagctcgcggttgagacaagaaggtgaaggaagcccaccctgccacataagtaggagctttataagcgcgggtctgggggacgaaggtcaagtggtcgcgatatacgaagatgatgttccgagtacattggatttggtacgaccatgccctcctgatttccagctgggaaattggcgagtgga

SEQ ID NO: 40094 - DNA, 327 bp, Glycine max
agctttattcaagactttattaattaaagatattcaagatggatgatcaagacagtctctagagtcttaggaagggtatattaaataggaagggaattccaattgaagtagcaaaaggtttggccaagaaatttaaattaaaaaagttttttttcaagagatttactctctggtaatcgattaccagagaatgtaatcgattaccagtggccaaaaatgatttacaacagctattaaaatttgaattcaaaatttgcactgtgtaatggattacacatatatggtaatcgattaccagcagttactgaacattttaattcaaatttt

SEQ ID NO: 40095 - DNA, 338 bp, Glycine max
taaatgctagtttgaaggatacttgtgtgtggggagttgatcctacgaggatcttttctaccaaatctgcttatctttgtattaaagttgagcagctttctgatgatcaatgtctaggttttcgtcagctttgggacattaaaatcccacctagagctctatcttttggttggagattactttgggataggcttccctctaaggagaacctatttaggagacaagttgagattaacaatgacctttgtcccttctgtcaaagcaaatatgaatctgcctctcatttgtttttcacgtgtcaaaaagttttgcctttgtgttgggaatttaactcctgg

SEQ ID NO: 40096 - DNA, 309 bp, Glycine max
agctagcagggttaaagtctcacgattgtcacgtgctcatgcaacaattgttagttgtggctatacgagacatcttgccaaacaaagtcaggttagccataactcgcttgtgctttttcttccatgctatatgtagcaaagtcattgatcctatgaagtttgatgagctggaaaatgaggccgcaattatactgtgccagttagagatgtattttccccctactttctttgacatcatgattcacttgattgtgcatctggtcagagaaatcaaatgttgtggtcttgtttatctacggtggatgtacc

SEQ ID NO: 40097 - DNA, 388 bp, Glycine max
ttaggctgttcaattgcttcagattgttgcacagaagggcaaagatctgtgtggtggttggcagaggagcataaaccacagagtctggcgacaggtgcagatttctgattcatggcaagctgagttactaggttgaccaaggcatcaaattttcctttaagctttttatttttagtagatgaagatgaatctgtggccacctaatggactcctctaacaaaaatagcatcatttcttgcactgaattgttgggagttggaagccatcttctcaatcaaattcctagtctcagcaggagtcatatcaccaagggctccaccactggcagcatcaatcatactcctctccatgttgctgagtccctcatagaaatactgcataaggagtt

SEQ ID NO: 40098 - DNA, 353 bp, Glycine max
agcttctatataagctgatccattttatcaataaacacaagttgagttttattcagaaaattagagtttatctcttttatcttagtgagagtgattctcctaaattcttgagtgattcaagaacaccttggctgtatcaaaggactttcacaacctttgtgtgttgccctcgctggaaagagtgattctttctttcctttcatcatcacccttgttctttcaaatcacaattccagaaaatccacctctgcccagaattatctcgtggccataacttccattttacgcactcaaattaagtgattcttgagcctatattgaatttcaaaacgagacccttcacctcgttttgg

SEQ ID NO: 40099 - DNA, 391 bp, Glycine max
ttgcggatttggtcttcgccagtgtaaggatcgaagtggatctgaaaagaggcaaatttaatcatcctgcttagacgaatgagaaaactggggcaaataaagagggtgaggatgagggagaaacccatgctgtgactgccattcctatacggccaagtttcccaccaaacccaacaatgtcattactcagtcaataacaaaccacctccttacccaccacccagttattcacaaaggccatccctaaatcaaccacaaagcctgtctaccgcacttccaatgacgaagaccacctttagcacaaaccaaaaaaaacaccaaccaagaaatgaattttgctagcgaaagcctgtaggattcaccccaaattccggtgtcatatgctaacttg

SEQ ID NO: 40100 - DNA, 359 bp, Glycine max
agcttatcgtaatctatttcacaattctttttgagacaatgattgattttttaggagtctttgctttaatcaattactaggtgatataattgattacttctctcttaaaaagtgtttcagaagtgctcaagaacactttaatcgattacttctttgaaataatcaattacattgtatatttgattgattacaggcggttataaatgttttctctataaatagccaccttgtgttttaacttttaacaacttttgtgtgtgctagaactacgagttgaaattagtaaaacaaagaagagaagaaaaagtgcttaaatacaatgtgactcacaacttctaatctttgattatgaagatcat

SEQ ID NO: 40101 - DNA, 330 bp, Glycine max
ttaacctcattgtctctcacagtctttagatttgggagccaatccaatccttgtgtccggattctcagccacttatgatagcctccgatgatcccatcactgcttcccctaagctctctgtcctttcttcacgccgcctcccatgccttgcgaactccttggagtaccctcgcgttgtggtcactgaaacctcgtgcgatgaaaggcgtgatgctttcgtctgatggcactcctctcattggacatccttcgcatgaagatagaatcctgattcttccttccttctagcgagggaaccatttaacagacgcccctccatgctagccaaga

SEQ ID NO: 40102 - DNA, 341 bp, Glycine max
agcttgagatgaggaagtgtataagggtgaaacttcctgcttttattcgttgaccacagagtggtacctggagatatgtcgcgggggtcaggagaccttggggacgtcaggtggggtgctattgcccaaaaccaagcttgaccaatcccgacccaacccgggcatagttagtcagtgagaacctgtgatgtacctaaacaggcgagctcctggcagtcaacagataaaaggaacaaagaccacaaagcaaggaggcttgtggtggttggccaactgtgaattttgtgtgatatatgggttgtggcctctggtaatcgattaccaagggtgggtaatcgatt

SEQ ID NO: 40103 - DNA, 367 bp, Glycine max
tggtcttcacttctaccatcgtgcggtaagtaccaatattgttttcaggcgtaagttggttgttcgtgttgtcctcgataaaataggtttcattgatgcatgcctggtgtttatgataatatcaatttgttgacattgtgagtttctgtttgtttaaaccctaattttacttagttgtaagttgaaatccctttttggattatacaaacctagcatctcttgtacaaatcagtagttccaccctagctcctcttttatggctttttttcatcgttttccaagcttagtgcagaaaattctccaatagttaaattatataaatttagttcaaatttgatactcccaccactggattctcattatgaaa

SEQ ID NO: 40104 - DNA, 415 bp, Glycine max
  unsure (1)..(415): unsure at all n locations
atagtgtgggggaaggaattaccaggatccttgcgcaagatgaaaataattctctctctttgaccgcttaagatgataattgctcaaataactcagttaatcagctctcaaaccgatcaattagagaattgaattgataaagaacatcatcaaataaaacaaatttaatggcaaagactgatttgaactggagtatttcttatgctttttattcataaacctttgctaaataacactcgtacaagaaatgtatctgtaaaacggaattctaaataatatactaaagataaaattatgaagataaaaacttataagttttcaaaggtaattcaagtaacttcttctaanaaataaattattaaaataagtatacttataaaacaaatagcttataaactagtcaaaacgagtttat

SEQ ID NO: 40105 - DNA, 221 bp, Glycine max
  unsure (1)..(221): unsure at all n locations
agcttctttatttatagctntcatctntaagtattcgttgtctcacaacaggaagattcttcancctattctgtgtctaaaatcttgaggtcattcgaacatccacaaccgtattaaatgcatgccttttgttcatgcaaagttantgctgataggttgacgtgtcttaccntttagcaggaaattcatttttttccatnatagcaagtctacattaacag

SEQ ID NO: 40106 - DNA, 388 bp, Glycine max
  unsure (1)..(388): unsure at all n locations
agctntgaaggtgcgtagcccaccatcttttcatagtataataccggtaatgtgtctaccatcacgattattgtctccctttccatcattgggggtaccacttgggttgccagatccctccacctttgggcgtattctttgaaagattcatgcccttttttgcacatgttttgtagttgtatcctatccggagccatatcagaattgtactgacactgcctaacgaaggcaaccattaggcctttccgagaatggactcgggaaggttccaagttagtataccaggtgacagctgccctagtaagactttnttggaagaaatgtatcagcagtttcccatcttttacgtatgcccccatcttccgacaatacatttttagatggttct

SEQ ID NO: 40107 - DNA, 449 bp, Glycine max
  unsure (1)..(449): unsure at all n locations
cttgatggtgttgagaagaaatcacnngtttgtcatcatcaataagggggagaatgtgaatgtncgtatacatgattntgatgatgtcaaagaaggatctaacaaggctgcttcaaatgatnagcatttgcttcaagaatgattcaaggttgcttcaacaaacaaagccttgtttnaagattcactaaagaccaagccttgccttanaacaaagtgctttcgagacaagcaaggctctggtaatcgattaccaggaagtgtaaacgattaccagaagacagggttgagaaatagctattgaaaaatgttttngaattgaattttcaacacgtaatcgattaccatatgtctgtaatcgattaccagcaacggaactttggaaattcaaattcaaaagtcataacccttcaaanataattgtgaatcgatacacaaacattgaatcgata

SEQ ID NO: 40108 - DNA, 367 bp, Glycine max
  unsure (1)..(367): unsure at all n locations
agcttggaagaatgancctggtgttatttgggtccagttagcaaatctagcgggtgcaaacggtacccaaattggttgtcacatgtctgctacccaattaaacctgaaattgagggaattgctattgacaataatcgaattactattggcatgacccacctaggtgtcttttttggatttccaaacatgtcgttcccacgagtgtataataccgttgtacattgtacatcagaagcatacttctatngcaatgttggaggtgtgagaaaaagcaattcaaccgtacgattctatcattcatgtccaatagaatcatacttgctttgtagtttgggtgtgacaaaaattattgcaaaatcatgtttct

SEQ ID NO: 40109 - DNA, 345 bp, Glycine max
  unsure (1)..(345): unsure at all n locations
atggacttaccttggataattcctttgatagtctttttgagccttggtgtcctttccttgttttgaagctcactacaagacttnagtgaaaaaccatgatattaccatatntcttaaggaattttggagctctgcaacccgcttcgggaataagtgtggcgggctcttgtttcattggacaacttgttttgtgggctatgctttatgatgtatnttgggccatacttgatgtntattgtatattggttaaatgttggacatgctgaatgaaattgtgtttcttaaaggctaaagagtaaaaaaaaataaaaaaaaagtataaaaaaaaaattcgaaaaaagaaaa

SEQ ID NO: 40110 - DNA, 418 bp, Glycine max
agcttccaagaatcaagatcaagactcaagattcaagaatcaagagaagaattaatcaagataagtatgaaaaagttttttcaaaaactgagtagcacatggatttttctcaaaacatgtttaccaaagagtttttactctctggtaagcgattaccagattgttgtaatcgattaccagtagcaaaatgtttttgaaaaagttttcaactgaatttacaacgttccaattgatttcaaaaagctataatcgattacaatgttttggtaatcgattaccaatgtgcttgaacgttgaaattcaaattcaaatgtgaagagtcacattctttcacaagaaaagctttgtgtaatcgattacactgatttggtaatcgattaccagtgatagtttctgaacaaatcataagatgtcactc

SEQ ID NO: 40111 - DNA, 134 bp, Glycine max
aaaataaaataaaaaaaaataccaaggacaaaaataaaaaaaaaaaatataaaaaaaaaaaaaaaaaaaaaaaaaaaaaaaaaaaatagtaataataaaaaaaaaaaaaaaaaaaaaataaaaataaaaaaaaa

SEQ ID NO: 40112 - DNA, 237 bp, Glycine max
gagagttaaaaaattaaaaattagaatttactgtttacaaaccatcatttcattctaaatacaagacacttgaaaccacccaaaatcatttattaagccacaactaaataaggtatggtggttaggggcttgaaccttgattagtttgtatgaagtcataagttcaaatctatcccaataaacagatcatgcattaagcaataaaggatgtcacttcaccactaatcaacaactacc

SEQ ID NO: 40113 - DNA, 65 bp, Glycine max
  unsure (1)..(65): unsure at all n locations
aaagcgttatatacttttaatatgaaancgttgcattttatataataataataataatagtaata

SEQ ID NO: 40114 - DNA, 426 bp, Glycine max
agctgtggtgaagaggtgaacagaataagatcttataaaaatctttcggttgttcactcgctaagcgcagctctcacgctaagcgccaagtcttcacgcgctaagcgggcccttgcttgcgctaagcgcttggacccctgactagtggctggatggtagcgctaagcctaattacctctttggaatctgaatttctcgaattgggcttagcgaggtgatgtgctaagcgcaattccctctctgttttggaaatctttggaatagcgctaagcgccagctaagcgctaagcgcaagccatcacagcactaagaagcatgtttatgcgctaagctcaccattggttgctaagtgcgtgtcctcacgcctaagcctaaaacctcttttggaatttgaaattgtgaataggacttagcacgagaagtcac

SEQ ID NO: 40115 - DNA, 302 bp, Glycine max
agcttgtaagcatgtctctaattttatacctttatatatccactttctttgagagcaaaaaggatctcgaacttaatgatccggatataagtatggtacttgatacaacattatggctgatgatgatccatgtagtcgacactacctactgggattacgcgttgttgatgatgtggtatatatctactttctttcattttcaatgagatactgtgaaaagcattgcaccaaaaagaattatctatgcagtacatgtataggcaacccttaactaacactctctcaagaatcttgatttcact

SEQ ID NO: 40116 - DNA, 445 bp, Glycine max
  unsure (1)..(445): unsure at all n locations
agcttcaagcccaggccagaatcttctgcatgcagaggctttttcaagaaaaatgccaaactctctttgcaaatttgatttcaggcttaaataggtggccttgtttgtgctcgtgcgcttagcgcacgtatggaccgcttagcgcgcataagtggattttggcttatcgcgcttgtttcgcttagtggatgagctgaagcggtgcgcttgatgacctggagtggtgcgcttagcgaacttgacagctcatcttcttctggattcttcctcgcgcttagccattgaaggttgcgcttagcgaattctcgcgaagccaacatcttggcttagcgaaagagcgaanaacagcattttgccaaagttgcctatttaacctgaaattcagagaaatngattattaaatgcacaaaacaaaagtataaaatatctattacctatatttaat

SEQ ID NO: 40117 - DNA, 69 bp, Glycine max
  unsure (1)..(69): unsure at all n locations
aagctgggagtggaagggaggaaacaattagacagcttggagttattgggtgcataatntatgataatg

SEQ ID NO: 40118 - DNA, 440 bp, Glycine max
  unsure (1)..(440): unsure at all n locations
gtgcaagctttaagatgtgctcgtttatataaacaacatctatatattggtagtagttcatgctcacgtaaccacaagctgcaataatgtgtgaacatggatagtgaagcgcagaataccttccgcattgacaatgatgaccattcaagtttactgcccacttttgtctgccacgttgcgttatagggttgaagctctcctctacttcaaaccttatggagtggatatcatacacgcgaacgatgtgcgtacaagctcgttcttgatttttcctcagttctttaacaagctttgaacaatatacttggccttcatttaactgtctttgggcttggtggccacgctcaacaaagtactttcgacacctactgtacgttgatttcaccaatgctgttatgggaatgttgcgacaatcctttnaaaccttattgatacattct

SEQ ID NO: 40119 - DNA, 430 bp, Glycine max
  unsure (1)..(430): unsure at all n locations
tattgatgagtctnattaattggttgaatctgttttcacatattaaaaaaanacaaaccaagtttcttggttttgttttcaacntattccaaatagaccttagattgagggacacattaatggacattattgttgaactctatatgcccgcaccacgcaacttaatttgcttttttcattttcttttggatggaacaaaattaccattgttattcatagtccagcagatagggggtggatataagtatcaaaattcacatgtactaaacctcataagtccgagagaaactgttatatggtataagattcttatgttntagtatcataggaatatatctctgttggttaaacagaattattattaatcgttggtacggacaaaaaattcttttgtttattaagatttacgagacatatatagtttttcttt

SEQ ID NO: 40120 - DNA, 351 bp, Glycine max
  unsure (1)..(351): unsure at all n locations
agcttanggtagngtgattagggtttattacgtaaggctgaagatttatgtaaatatatgtaggtttttaattatatgaatagtttatttgaaccaaaaaaatacgtgttcttcatgatttgtagatcatggttagaacacgaggtttaggtcgtgctttatctaaggttataggcagaggtagacaggatgagcatgatgcagttgatgttacctggaggcgtangcctactgcatcagcccatatgcaacgggtacatattgcggttgatgagggtgtttctcaggtgactgangatgttcctcatatggcggaggatgttcttcagatgactgaagatgtccctcata

SEQ ID NO: 40121 - DNA, 192 bp, Glycine max
agaattgcgcgccgcatcttacactctatcttttcatatgcgcatcatgcatcatcatgtctgagtaaggagaaagattgtaaagatacaaaatttcttcataaggcgaaactctctatatgaatcgagtacaaccttacagtaatcaattacacaaggcgtcttaaacctgaaaagaaatgactcgtatca

SEQ ID NO: 40122 - DNA, 432 bp, Glycine max
  unsure (1)..(432): unsure at all n locations
tattntatttattntctttntattnttttctcctataagtactnaaagttaaaaaaaaaaaagtatatctaaacatgcgcttgctcttttatatgattaaagggttcatgaccactctacataattgttaagtacataatgaaacacaatcacatgctntaaccctgattattatacagagtttataacaatggctggaagaaggctaagggaggcagtgaaggagaaattaatatctagcaacgatggagaattcgatgatgaaacatatgtggttatagcaggactgacaaatacttaatataatactgcgctcaattattataatatttaatttaatacattaaaaaattagtggatttcattnttatttaataagttttatttttattagtaaatttaatcacactattttcattgcattttttagtc

SEQ ID NO: 40123 - DNA, 314 bp, Glycine max
  unsure (1)..(314): unsure at all n locations
atagatgggaatagaggtaacaatggcggtaatgacggaccgaggcagaaccgggttgagggagtaaagctcaatgctcctcccttcaaaggtagaagtgatccagatgcctacctgcaatgactacactgatgcgcagaaagtcaagctagcagcagctgaattctccgactatgcccttgtttggtggcataaataccaaagagaaatgttgagagaggaacagtgagaggtagatacatggactgagatgaanagggtgatgagaaaaaggtatgtgcccactagctataacagaaccatgcgacagaaac

SEQ ID NO: 40124 - DNA, 402 bp, Glycine max
agcttatccttatggcctgcctccggacttctatccttgtgccaccccggaagatttaagccaagcccctactttcgaggggcaactcccaccttatgaagactatcccgggcaagatgatggggaaggagatacccatcttggccccctgctccacctcaaagatctgtccccacatgaactaccccaaccgaacatagtccgccataccccggcctcacccacacctttaaaagaatctgttcccttcgcggaagataagggaaagattgaggcgctcgaagagaggttaagagcagtcgagggccttggcaattacccattctcgggattagcggatttatgtctcgtgcccaatatcgtcattcctcccaagttcaaagtaccggactttgataagta

SEQ ID NO: 40125 - DNA, 181 bp, Glycine max
aaaaaaaatataaaaaaaaaaaaaaaaaaaaaaaaagaaataaaaaaaaaaaaaaaaaaaaaaaaattagacataaaaaaaatagctaaaaaaaaaaaaaaaaaaatatatgtacaaaaaaaaaaaaaaaaaataaaaaaaataaaaattaaaagatagaaaataaataaaaataaaataa

SEQ ID NO: 40126 - DNA, 302 bp, Glycine max
  unsure (1)..(302): unsure at all n locations
agctngaagaagagctngatgnaagtttttcttttacatgctcaactctcttaagtggcatttgtattgattgttgtattgtgtgttgcatcttagtctctatcttttcatatgtgcatcatgcatcatcatgtcggagtaaagagaaagtttgtaaagttagaaaatttcttcataaggcaaaactctctattttaattgattacaaccttacagtaatcaattacacaagttgttttaagcttgtagagaaatgtctcgtatcaatttaatcgattacaagtttatcgtaatcgattaca

SEQ ID NO: 40127 - DNA, 451 bp, Glycine max
  unsure (1)..(451): unsure at all n locations
taagctgtttagagattactcattatggaattattagatgtcttgacctgatattcttgccttttgactaagcttctctatcatgctttctctgcanaagagacgtagacatcaacaccgctgtgaggtgtcttccatattttacagcgttgctctataggtgaaaacttaaaaggttactggataagattctttataatgtacaaaggaggtagtgatggtagtgaatctagtaatgttgttnaagttataatcctctttttactattgtgcaaatgtcggtaagaaatgctgaatgagttgcagtgcacaatatctaaacattggtgtgtttattttgttttcttctctcgagtttttgccttttgtggaataaatacctaaatagagtacgcctttcatttgttgctttgttaaaaataaaaatattccttaaagaaaatatacttta

SEQ ID NO: 40128 - DNA, 308 bp, Glycine max
gcaagctttgagccataatcctgactcaccatatattttattctcgaaagcaaaaaaaggaaagaaggaaaggaaatttcccatcaaagagaatgcaaaaaaggaaggaaaggaaattcccaatcaaagagaaagcaaaaaaggaaggaaaggaaattcccaatcaaagagtgggagaaagagaaaaaaagaaacgaaaggaaattcccaatcaaagagtgggagaaagaaaaaagaaaagaaagaaaattcctaaccaaagaatgggagaaagtaaaaaagaaggaaaccatgacctaaaagtggtc

SEQ ID NO: 40129 - DNA, 416 bp, Glycine max
  unsure (1)..(416): unsure at all n locations
tgagagtgtggacttaattgttgagagattgactagtatagagtaataatttgtgtataaatgtgtgnaaattagaacgcnctgcctgacccctccacatactgaccncccattgtcgcatatacaagccactctcccacccgcttnacctgctatcaatgagtatattatttgcatgcatctttgagctatattgtaattgtattgaactgtgagccttgagttgtaaattttatttaccttgcttaggttttaagagggcacattggtttaggacaattttacctgaatattgggggagtntgttagatggtnaatgtttaaaggtaagatataacaaaacacacaacatataattaatgaagatttagatgatgaagaagaagaagaaaggagtgtgtataagtgtgtgtgtt

SEQ ID NO: 40130 - DNA, 402 bp, Glycine max
actaaatacagatgtcacattgtataccatgcatctctactttaaaccattatacttatatacttgtaatgccattttctccaagagaatagtacggataaacacactaaatacagatctcacattctgaaagttcaaataataatatcactgtatataaagtgttattcttatacttataatgtttggacctttatctcctcaccattttttaatgtgaaatgattaaactccgcgttaatcttaagcgttaaatatcatttgatctctataaatgtgtggtaaaagtgtcaatcttaactcaacaaccttctcaatagttgctaaacacaaatcttcatcttctgaatattttactgcgtgagcttaagaatcgtcattatctctttacataagtctaaa

SEQ ID NO: 40131 - DNA, 188 bp, Glycine max
tggagctttcttaaagagctaatgggttttggaatttcaccactgaggtggttgtcatagagtgtcaagtgcacatggcttgttagattgccaatgttggaaggaatgtttctttggaggaaagtcgttctaaatatttgattcataaattgaaaaggaacaagagaaaatggcttctatattaatta

SEQ ID NO: 40132 - DNA, 342 bp, Glycine max
  unsure (1)..(342): unsure at all n locations
aatagcaagctccgctgcctacctgagagccaaagcctcgacaatatgaacctcataacaagcaggaagaagacgtgaagcagcaaccaggacctcgccagagtggtctcaaaagataacatccaaaccaattccctcatcacaatttgcttttatgaccccttgggtcgagcacttccagattgagctcttctccacacttaaatgtggtttcttgctcaaatccattaggaaggattgggctctatctagagtaacatacaaaggatactcggtttggtggaaaacccattaatttcgctaaaatcatatngctgaattgagtccttcatgatctttgga

SEQ ID NO: 40133 - DNA, 66 bp, Glycine max
tcactgaagcaactggctcattgtaactggtacccacttccttaaatcaaaatctgtacctgtcgc

SEQ ID NO: 40134 - DNA, 387 bp, Glycine max
gctttgatgaacattcggagaggttaatgtaacaacgagatgatgcgctccatgagaggttggatcaaatggagaatacagaccatatgaattgctcaagagcttccattgttcaatttcgagcgtctagatatataatgcgccttaatccgacctacgagttaaaagttatgaccatttgaaatgctcaagagcttccattgttcaatttccagcgtcacgatatattatgcacctgaatcggacctgcgagtgacaacttatgaccatttgaattgctcaagagcttacattgttcaattttgagcgtcacgatatattatgcacctgaatctgacctgcgagcgacaacttatgaccatttgaattgctcaagagcttccattg

SEQ ID NO: 40135 - DNA, 318 bp, Glycine max
  unsure (1)..(318): unsure at all n locations
agctnttcgcaaggcttacggtaatatctgttacctagccatggtagaagtctccatagaggccattgcctccctcgcccagtattatgatcagccgttgagatgctttacctttggggacttccagctgtcacccatggtggaagaatttgaagagatcctatgatgtcctctagggggaaggagaccatacctcttctcagggttctatccctcattagctagaatttcaaagatagtccaaatctcggcgcaggaattagaccatggaaagaaagtcagaaatggggtggtttgaataccgagaaaatgtttgga

SEQ ID NO: 40136 - DNA, 400 bp, Glycine max
  unsure (1)..(400): unsure at all n locations
ntaggttgctcattgactccagattgctgcatagaaggacatagatctgtatggtgatctgcagaagaacatagaccacagactcntgcaacaggtgtagatttctgattcanggcaagctgagttaccaggttgaccgaggcatcaagttttccttcaagcttttnattttcagtagatgaagatgaatccgtggccacctcatggactcctctaataacaatagcatcatttnttgcactgaattgttgggaattggaagccatcttctcaatcnaattcctagcctcagcaggggtcatatcaccaagagctccaccactggcagcatcaatcatactcctctccatgttgctaagtcgctcatagaaatattgaagaaggagttgctcagaaatct

SEQ ID NO: 40137 - DNA, 370 bp, Glycine max
  unsure (1)..(370): unsure at all n locations
agcttgcccagagaaggagtccacggatgatatgcttaccacctcaaaagactggaaagcggtttctaatgactcctctgcggcttccacataaggcataaaggatgggcagctcaccaagatgtcttcttcgcctgatacgatgaccagatgcccttccactacgaatttcaacttttggtggagtgtagagggaacaacccccactgagtggatccacgggcgccccaacagacagctgtagggggggttaatatccattatttggaaggtgacttgactggtgtgagggcctatttgtactgngagatcgatctctcccctaacctctcggcgggtgccgtcgaaggcacgaaccaccattgaactc

SEQ ID NO: 40138 - DNA, 387 bp, Glycine max
  unsure (1)..(387): unsure at all n locations
tgttgtcaaagactgatcaaagagttggtgagtgtaaatgaagctaagagctangtggcataaaagaaaaataaagtgaatgaagntaaacagcaccctcagggtaaaaaagntccgagtttggtggtactactttaaanttagattaacaacatgaaggtgaaaggattttttattatgttaaccttattaagttaaattttgcggatgctactcttgttgcaataaaactcaantagtttttagtatccctttatgcgaatttttttttcaaaatntacaaaaaaaaataccaaaatatacaaccctcccattatttatcccaatatacaactntattattcacattctcaacatgttttttttttaattttttttagaaatata

SEQ ID NO: 40139 - DNA, 454 bp, Glycine max
  unsure (1)..(454): unsure at all n locations
agctngcaaaccaaatgctcaccatttctatatgagaagccttcaggttgtttcatataaacctcttcctctaaatcaccattaagaaaggttgttttcacatccatttgttgcaactcaaggtcaaaatgagcaactaatgctaagataatacaaagagaatctttcttaaatataggagaaaaagtctctgtgtagtcgattccttttttttttagtaaatcccttagcaacgagtctttccttgtatctctcaatgttgcctaatgaatcccttttagtcttaaatgtaacatcccatttttcgtgaattaaattaaaaaggttttagagttctagaaaaaaaaatgatgaggcttttgttattaaataaataagaagaaataacattattaatataatggttcgaaggaaaataaaaatgatatttgattattcatttgatagaaaataa

SEQ ID NO: 40140 - DNA, 368 bp, Glycine max
  unsure (1)..(368): unsure at all n locations
tctagaganagctanatgaagcttcctcaactttttgctgccccgccttcgtnaactgatggatcttctcgaaanttggtcttcnacttcacaagacacttgtccatgatcttacggatctttgagaagatgtctggagtgtgctagaagcttccgttttcgagagcatctcttatttaagcatttcagcctttcctttcgtgtagcttaggaaaaacgtcatttcttcttcttcttttcttccaaagccatttctaaagttccaagaactttctctctcacccacagccatcattagccaccacaaatcatcattgttcttcattggaaacccacaccgaaaggaactcttcaaccgaaggcgaatc

SEQ ID NO: 40141 - DNA, 369 bp, Glycine max
  unsure (1)..(369): unsure at all n locations
agcttcggntcatcaatcaatggctggttattttccttgctaatattgcgctaaatatatagaagaataaccatttttaaggtatgaatcggatttgcttttccatcaaagcttattttaatttctcttgcatttttcttttctaaatataatttgccttgaatggtttgcagaaatattctgtgcaacattagcacaccagccacgggcagatgtggcatactgcattcacaaacttgctaagagactttcaaagacgcgaagttggatagtataattcttttgatgatatntatagtagctggatatcttgtcttttgaaagcactaagaacgaaaacatcctatgaactctttttttaatgacatg

SEQ ID NO: 40142 - DNA, 249 bp, Glycine max
  unsure (1)..(249): unsure at all n locations
aagagatctaggaaggataaagcggctgaaggaaccacttagccacccgtttatgagcgctgagcaccntcagcgcttcgaggccatcaagggatngtcatttctccaagagcgacgcgtcncgctcagggatgatgagtataccgacntccaggaggagatagttcgccggcagtgggcatcacaagttaaccccatggcaaagttcgacccaacgtagtcctcgaatttatgctaatgcttggctac

SEQ ID NO: 40143 - DNA, 333 bp, Glycine max
agcttctcccccatattccttttataggggtagaagcgaagggaaaaaatgttcagcccttcttgtaattcgagaatcacttgaaattagtgaaaaaaattggttccatgaagaaaatccaagccgagccgctttcgtaacgttttcgtaacgtttccgtgggagatttcgcgaagattttcaaccgctcatcgacgttcttgattcgttcttccggcttcaaccggtaagttcccgaaatcgaactttcaattcattctaatgattcctagtgggcctcaattggttttctcgtgcttcttattttcatttcatttactttccgtaccccat

SEQ ID NO: 40144 - DNA, 339 bp, Glycine max
gcttcaacattcaatttcgagcgtctcgatatatgacaggactcaatctgacatccgagtaaaaagttattgccgtttgaattggctcagagcttcaacattcaatttcgagcgtctcgatatatgacaggactcaatcagacatccgagtaaaaagttattggtcgttgaatttgctcagagcttcaacattcaatttcgagcgtgtcgatatattacgggcctcaatcagacatccgagtaaaaagttattgtcgtttgaattggctcagagcttccacattcaatttcgagcgtctcgatatattacgggactcaatcagacatccgagtaaaaag

SEQ ID NO: 40145 - DNA, 307 bp, Glycine max
  unsure (1)..(307): unsure at all n locations
cgtacctcgatcaggtcaccatgaaatgtacctagggttaaccgaaacaacacagacctaggttagatgaaatgaagcttagacatgaagctaacttacattttagtaactnttgttctttaggtctattatttacantttagtaattcatgctcatagtatataaccatggatagatttactatgtagaccctgctgctccgggtgaacttaataattgtggccatgtctttctttctagtcaagctcctgagggcatatcattgtgaatggtaagtttggagcaatgctatctataactgtcata

SEQ ID NO: 40146 - DNA, 414 bp, Glycine max
  unsure (1)..(414): unsure at all n locations
agctcgctctaaatntacattgatgtttgtatttatgtgaggaggttgtacgccatttttgttttaagagtagtgtcccactggtaaaactaactttccaaatttttgccttcgcaggaaatggccccgaggaagcttgcctcaaagaggtccaggaaggacaaggcagccgaaggaactagttccgctccggagtatgacagtcaccgctttaggagcgctgtacaccagcagcgcttcgaggccatcaagggatggtcgtttctccgggagcgacgcgtccagctcagggacgacgagtatactgatttccaggaggaaatagctctacggagttttaaaagattggctaagattntgttaaaacataagcacttagacaatgaaggaaagctggagttgctgcacatgatg

SEQ ID NO: 40147 - DNA, 89 bp, Glycine max
  unsure (1)..(89): unsure at all n locations
taagctattgctgaatatatgttgantnaatgatttgagatattatttgaattatttatgtgttgatttcttgatgtggatgttgagtt

SEQ ID NO: 40148 - DNA, 445 bp, Glycine max
  unsure (1)..(445): unsure at all n locations
agcttgtgtggngctagtgaactntggagaattttatctgaaggaatctaaatcatggtggcttgcttggcctcctcttctcccctcatgtcaacttaattagattcttgggggagacaatcacattaaataatgtcctttcggttggctcaattntaaaactntgattttaaccatggtatcatgtagcccatctcacatgataggataagattttattgatgttggtgatggttgactcaatttatttgtttctcttttcaaatataatgacaattgatactacccatggttatcaaacttttggttaactcgctaactcttacgattntatgagttcacttattttctgtgagttgattcgtgtgtaaactctctttttagtatactttgggtagactcaatanactctaagtaaactcagtagactctcgagtttacactg

SEQ ID NO: 40149 - DNA, 57 bp, Glycine max
tattaattttgagcgtcttgaattattaaatgactatatctgatattttatataaaa

SEQ ID NO: 40150 - DNA, 410 bp, Glycine max
  unsure (1)..(410): unsure at all n locations
attcttaattcttcttgacatcatcaaagatttcatgatttacattcccccctttttgatgatgacaaccacctgtaggttaggagcgacaacaaagaataaatatctatttgcgtatagtatactcccccttggttttgcaatgattgcttatatgagacagttgaagaattcatatttttcatatgttaacaaattgtctcataaacantagataattgttcttactattttatcttttatctttctctcgccctttgtcaacatcagaaacgaatcatgaatagagaggagagagatgttaccacttgttgcaatgtatgataatcaagtgaacncaaaggcattagaacaatcattcaatatattcaagaaagacaattacaacgacacatcaatcaaacacaatc

SEQ ID NO: 40151 - DNA, 501 bp, Glycine max
  unsure (1)..(501): unsure at all n locations
tgccccatttatgatctgcatncggcccttaanaaaccgcagcggcggctcaacataaacagatagcgatcttgtgtgtgtcatcganaccttcagacatgcgagagagacgttatagccgnctgtatgggctcanagcgtgaaaggtaccgttggtgcaactctatacattaaaccgtcctctcatagacattctacttgagcatgttgtatggatgacatcatttacggttccactaacaagtctctttgtgacagatttagtgctcaatgcgtatggggagttcgcattgttaatgatgtgggagtaccctgctgtctcgtcgaacagagaaactagtgcccgtggatcattcttctatgacccagatgccacatcgatgtgttcggaaagtttgagacggagctatgcatagctgctacaacgcctatatcttctagatgcttccttagtgccgatgagaaaagaatgacattggatcgctctatgaatacacagcn

SEQ ID NO: 40152 - DNA, 379 bp, Glycine max
  unsure (1)..(379): unsure at all n locations
tggatccatagtctncacgccacatctgtaaatgaaatttctcaccctaacctacgagattgtgaccatcaaggctgatcaaaancaagcacaataatgctatgctgagagcctgaaggtaacaccctatcctccctctatggagcttgccaagcctcaccctgcagcggttgaaggtactcaagtcatgagcaaagggcttccaatccgagccttcattgtttaccanacaagcctggacgatgaatctgatatagatttgtgggagaacacttctgacagaggccaaaagcccatcgaagagcttgtcaagctggatgtaaggacctcactagccttgaacacaagcacatcattggtgtcctatacaagaacatgg

SEQ ID NO: 40153 - DNA, 398 bp, Glycine max
  unsure (1)..(398): unsure at all n locations
agcttattacaaatcagaatgaatcttaactgtcacagctcttgaatcaaattgagtcaaaacaaaaaggcaatataaattatgtcacaagaactaaagattaagtccaaacaacttgaagatgtacaaaggcacagggatgaacatgatcaagcattatcgaagcaaattcaattgctcataatttaaattagaaagcttatggcagaggagcatcatttgtctaaaactgaccaaaaatagaagatgactacgatgttaatgcaatagaacatcaccacaaccactcccttacaagtacactacatagtaaatgaacctacatccttctctntctgattatggttttcgtaactaaaccctattagcttctagagttatagaaaattactaacatt

SEQ ID NO: 40154 - DNA, 189 bp, Glycine max
  unsure (1)..(189): unsure at all n locations
atgaaaggaacaaatctcaatttatttattgtctcttctgggtttagaaaaatgaagctttaaaatttatgaaaattattgaagggaaggggcaaaacgaaaaatacattgctaaattcacaaataagaaagttgattgtggatttgcatgggtcattatgtacttntntatttaagttaaatatatat

SEQ ID NO: 40155 - DNA, 182 bp, Glycine max
ccctcgggtcagaatgaaactcattcttgggggacactatgacatgcattacagagcctatatttggcaaaatttaaatacggcgaaccaatccctggaatcttggaaactaactaacatgaatggatcatgtttatgtgagcaatatgatggtgccctcaccatggatcatcctctttgct

SEQ ID NO: 40156 - DNA, 439 bp, Glycine max
cgcaagcttcaacattcaatttgagcgtctcgttttattacgggactcaatcagacatccgagtaaaaatttattgtcgtttggattggctcagagattcaacattcaatttcgagcgtctcaatatattacgggactcattcagacttccgagtaaaaagttattgtcgtttgaattagcttagagcttcaacaatcaatttcgagcgtctcgttatatcacgggactcaatcagacatccgagtaaaaagttattgtcgtttgaattggctcagagcttcaacattcaatttcgagcgtctcgatatatgacaggactcaatcagacatccgagaaaaaagttattgtcgtttgaatttgctcagaggttcaacattcaatttcgagcgtctcgatatattacaggactcaatcagacatccgagtaaaaagatatt

SEQ ID NO: 40157 - DNA, 197 bp, Glycine max
tatgtcgagtcgtgaatgtccatttactgcgtattgtcttttctcttgccactattcttcattctggtatttttttttaatctaaattatgtgaacgggacattatgaatcttgtttggctgtgtccagacaatggcggaacgggcatctcggttttttatggcgtttctattcatgcgtgaggttttaaattccga

SEQ ID NO: 40158 - DNA, 452 bp, Glycine max
  unsure (1)..(452): unsure at all n locations
tacgtgaactataaaactaagcttaagctagaggagacggaccattccaagtgttggagaagattnacgacaatgcctacaagattgacttgcctaggtagtataatgtaagtgccactttcaangtgtctgacctctctcttcccgatgnagatggaggagccttggatttgaggaaaaatccttttcaagaaggagggagtgagtaggacacaactaaggacaaggaccatgaagcacttgaagcgcccatgaccagaggcagacttaaacaggcccaacacatattagagacaaggctggccatttgtatagctgccattgatgatggttaaaggcccaagtggagaaagatgaaggcccagaggcagagccactaccaagactattaattgttgctgaaggcccanactaatttataagcccaagttaaatatatttttagttataat

SEQ ID NO: 40159 - DNA, 205 bp, Glycine max
  unsure (1)..(205): unsure at all n locations
gctntgatgatagtttatgctctaacagtatttggcaatcaattcgtggggctactgactcaatggtggatgatggatcaaccacaattaattcatggggcttctaataagatggcggaagatgcacatactacattaagctacttatttcttgcgtctcaagactcaatggtggaggatgcatacactacaatcaattcatggg

SEQ ID NO: 40160 - DNA, 461 bp, Glycine max
  unsure (1)..(461): unsure at all n locations
agatganccttgannccattgttacctggcanacgcgaacagaaaactaagcgggggctgagtttctaagttatgaacagcttaaacaaagaactggacctctttaaaagcatcgggctgnggaccaccatcacgcacactttcgcgcgctactatatgttgatcttgaacagacgctgatattggaatgctgcgaaatctttcacagcttattcacacattctgaaaagtaggatgtcatgtgaccatattgcccaccagatgtaatctgagacatgctccattcttccttagagattcgaacaatccntcttgctatggctggactcaattgacgaaaactttctaagctcggatcaaacacatgcttgcgaggagtgaccgagcataaagttgtatcatcaagagtgacaagacatgaactaaacaaaaaatgataaataaccgtacaattggtgaag

SEQ ID NO: 40161 - DNA, 374 bp, Glycine max
  unsure (1)..(374): unsure at all n locations
agcttaggctnggtgacatctgctaacagtttggactattgatacatgagatcatctatccccatattgatatgttgttttgccatagaggtttccatgagagtaagtttgtctaatgatagtgtgtctgccatagtagatggtgtactgatttgggcaggcatgttcagtaccgcttgagcagtagaagttgccaaaagcaggcatacctatggtaaatgtctcggttgccttacaataatcattnttattctaactaaatttcatactttcgagatttctctcattagatttatgaatgtttttacctatgtggtcatactggatgtgtcaatttgttgtcgtataanatttttataagtcatccgagatat

SEQ ID NO: 40162 - DNA, 369 bp, Glycine max
  unsure (1)..(369): unsure at all n locations
agtgagctgtgttagagataatggatgagtntataacaattggggttagagtgaacatgtgtagggatttttacacgatcacactgcggccgactttgccgtatcccctcgccttttaagttttctagtacaatgataactacgaattggtcatgtttgatgggtcaattgatgccctgatgcaaagtggatggtttaattgagtgtttgactttgaatgttagaatgaggggtaaattgttgcatgttttcttgaaattgattaaggggttttgtttcctatgatgtgatcacatgttgtatgctattaaccgaaatgaataagtgaatgattatatgccttaaatgatggaaagattgtattgtatg

SEQ ID NO: 40163 - DNA, 437 bp, Glycine max
  unsure (1)..(437): unsure at all n locations
agcttcagagggccgaaagagacgagttgagggtggtatgaatgatattggaggacaaattgaagtcttgtcaaaggttgaagaggaacttgaccgaacagttgagtaggacgaaagagaacatgtgggcaatcattgaccaatataaaaagaagctaaatctagctacaacccatgagcaaaggctagaggatgaacatgcaaaagtatcagtcctgcaagcggaaagggaagcaagggagagagcgatagattcattacatagagaggctatgatatggatggattggttcgctttcactttgaatggaagtcaagagcttccaagacttttagccaaagccaagacaatggcggacgtgtactcggttcccgaggaagttcatcgactntttgattattgtcagcatatgatcgagttgatgtcccacataatt

SEQ ID NO: 40164 - DNA, 270 bp, Glycine max
  unsure (1)..(270): unsure at all n locations
tgtggagaacgaattcattcaggcnctcagcaacggtgaattgatccaggataggaaaatantaattgctttatctcacaatgggacctgtgtagacatgcaaaaggaaaaaggtaatcncagtctcctgcgtccacgccgaggagaagggagaagcagctatcgagctggcgtaactgaatcagaagcaaaaaggtggtgaacctaattgcgtggagattccacctcctctattagtaggccctatatttcaaaaagaaggagggggac

SEQ ID NO: 40165 - DNA, 452 bp, Glycine max
  unsure (1)..(452): unsure at all n locations
agcttatgctgcanatatttacaatagaccttctcaacctcagcagcaaaatcaaccacagcagagcaattatgacctttccagcaacagatacaaccctggatggaggaatcaccctaacctcagatggcccagccctcagcaacaacaacagcagcctgctccttccttccaaaatgctgctggcccaagcagaccatacattcctccaccaatccaacaacagcaacaaccccagaaacagccaacagttgaggcccctccataacctttcctcgaagaacttgtgaggcaaatgactatgcagaacatgcagtttcagcaagagaccaaagcctccatttagagcttaaccaatcagatgggacaattagctacctaattgaatcaacaacagtcccagaattctgacaagctgccttctcaagctggtctaaaatccaaaaatgtca

SEQ ID NO: 40166 - DNA, 364 bp, Glycine max
  unsure (1)..(364): unsure at all n locations
tttagtaatttatgctacaacatagaacacanaagcatgatcaattagagaaacatccttatanccatcaaccggtctgttagaaagacgcaacacttctacctgactgtgtgtcaatnctacttacttgcatttttattgtttttctcctaaagctagtttaattcttattttaaccatcaattatcaatgtttctttcaacaatgccttatgtttgaatttaacccggtcttaaactagtttccctgagttccntactcggattcacgcattttaatttttaaatacttgacgacccggtgcgctttccggcaaactggacttcccttgaatatatttgtacgaagaataagtggaacaaaa

SEQ ID NO: 40167 - DNA, 162 bp, Glycine max
aactccaaggtaatattcttttggtaattaaatacgacaatataacacaattgtttttgtaaaaaggtgattactatgtgaccttctctgcacaatatactatattatcatttagtgacctatgtatttgtaatgaatgtattccatgcacatgacaaccca

SEQ ID NO: 40168 - DNA, 330 bp, Glycine max
  unsure (1)..(330): unsure at all n locations
taactatttattaaattgtttatttaaattttttttaatttagnaaanggggngtttttttttttttttttttttttttttttttttttttttttttttttttttttttttttttttttttgtttgggtcctccttttttttttttttttttnnatgtatatttattttttatttatttatnnnnatttnnntttttttttttttttttttttatttttttttattttttattatttaaanggggctttttttttttttttttatgttataagngtttttttttttttttttatttttctttaaattatnnttttttttttttttttttt

SEQ ID NO: 40169 - DNA, 445 bp, Glycine max
  unsure (1)..(445): unsure at all n locations
aatgcctcaatnatttccaaatatgcatgtgaattangacgcatcaacaanaatcaagccaaggctattgtgcaagcaatcantggggcaaaacacaccaaatgattatgatgatggatggctcaaattctcacaanggtaaaatcatcactttcaaattgagccttcaaaactatcatgacatgtagagaaaaatcaaggatttcaagtcacaaaatgtcaagaacttttagtttcaaaacaattacccatttcttgaacatatcctataattnaaagaaaaacatgcaaagtcgtacgtgcacacaaaatttgacccaaatactaaactaaaaatccgacaaaactaacaacattaacanattaacacaactaacaaattaacaaaaccaacaaaactacgcaaaccaaagaacactccccccccccccatacttaaacaaca

SEQ ID NO: 40170 - DNA, 428 bp, Glycine max
tgcacgcatgcaagcttttcaattcattctatgtaccctgggttatccacattttgatgcatgtatttttattctttttttcgtctactttgtatacccccttttgacgtgcttaagccatttatttaagtcatttctcgcttaatctaaaaataaaataaatttccaccgaacatttgaatcgtatcatgcgttaattttggctaacatgaattccgaccgttcgggcgtgccgtgaccacattggaaatccaaaaagaggtataattataatataataataaaaaaatgcccttttagtaaaatataagcgtaggatcaatcggacgttttctctttaggacttctcattcttaattgaattgactaataactaaagtgaaactaaggctaaaatcaactcgcctagtcaagctctgacacaaaaa

SEQ ID NO: 40171 - DNA, 297 bp, Glycine max
  unsure (1)..(297): unsure at all n locations
tttattttttttatggggggggtggggggggggggggtgggggggggggggtgggggggtgggggggggggggtgggggggggtggggggggggtgggggggggagatcaataataagaatataaagcggaaaantaggggtataatgggagataggagggacatggaaaaaaagaaataaaataaagtggtaaaagaagaagaagggagagaaaaagggaaaaaaagggtccttgaagagggaaaaaaaaataaaagaggaaaataaaagagagtaaagagaaaaaagtttataat

SEQ ID NO: 40172 - DNA, 378 bp, Glycine max
  unsure (1)..(378): unsure at all n locations
agcttcatgattgaatcaagattgagtcatgtatcaagattgattcatgatgatgaatcacgatttattcagggtgttttgatgataacaaagatgatgacaaaaagcccaggagaaagatttcaagattgagtccagaacaattcaagaatcaagaatcctgcttcacgtttccagtttcaagaatcaagactcacgaataatccagatctagattcaagactcaagattcaagaatcaaganaagactcaatcaagataagtacaaaaaagtttttcagaacattgagtagcacatgaagttttcacacaagcttttaccagagagtttttactctctggtaatcgattaccagtttactgtaatcgattaccagt

SEQ ID NO: 40173 - DNA, 376 bp, Glycine max
  unsure (1)..(376): unsure at all n locations
ctaagctaatgttttttaagncaaagatttgcaaaaagtcatcatactataatcctatnattccaactatgttgatatcatatggactatnattctatgcccgtaaaccaaattcatctataaacccactgcacccccggaacatttatgagaggacataaaaccaaaatctacgattaaaattggcagaaatctatagttatgtatatttaacttatctctaagaaagtgatcagaaactaaactttggaccaaatcccaccaaataaaatcctgtgaataaatcatgatttgctaacctatcagcacaaaaattattgggagttaaaataaaaaccctttttacatttaattgatgagaaagtacaacttatat

SEQ ID NO: 40174 - DNA, 359 bp, Glycine max
  unsure (1)..(359): unsure at all n locations
agcttagtggcagtgatgtagtcatgtctcactttctgttaggattgttagntagctgttacgtaactaactgcatgtataaaagccaagttcaaacccgtgagagggatatatgaatatattctgccttttgagctcagattctctctctctctcctttccctcttaaatattctgtcacgagaaaatgttcttcctaacataagaggtagcacttgtaaaaatgttgtcattgctaattaaatttattttttctaacatttattaaaacaagtgttattattgattattaaataaaaaatttagtaacatctttaaataaatgttacccaaagtagccttttatttggatctcataa

SEQ ID NO: 40175 - DNA, 200 bp, Glycine max
agcttacacacaagaccatactccctctgcgtctcaaacccaggaggttgctccatataaatatcctcctcaagatcaccatggaggaagacatttttaatatcaagctgatggaggggccagtgatgtatggcagccatagcaagaaacagacgaacaatagtgattttggctacaggagaaaaagtatcacaataatc

SEQ ID NO: 40176 - DNA, 77 bp, Glycine max
  unsure (1)..(77): unsure at all n locations
acctaaanacaannagctaataaagaagaaaaaaaacattttgaattggtataaataaatatttgaaaatgaaaaaa

SEQ ID NO: 40177 - DNA, 411 bp, Glycine max
  unsure (1)..(411): unsure at all n locations
agcttcacattctagacaaggtcaagttcattgcgtctgctacaaagtctacaaccaacagaataatgaacaagttctaagtaacagaaacaagtgcatgatgtatagtgttaaacaaatagagacattgacaccgagtctaacctgcatcttctttggtgaaacacaagggaggtgtaattctgaagacatttccatagtaaccacccttaccaataagtactcctagttctatagtaatttagaatgaccggttagtaataatatagaagaaaactatagctaggatcaaaatatgtgtctagactagagggatatggattttacctttcattnggtccattacatgcaatgtttcattttttgctggagttttaagttcacgatcagtgacaagttcaactcctagca

SEQ ID NO: 40178 - DNA, 389 bp, Glycine max
  unsure (1)..(389): unsure at all n locations
ttaagtgtgaggaantgaaatatagagcaaagaatagaggtatgatcatctaantcttctcatggagaagatgcggggtatgaacactatgagggacgatccacgaatgacacccctccggagacaagacctcacacacccatctcaggcccacaaccacacgacccgccctgatggactcaacgccaacatccctatttttaaagggacttgtgatttggaagtgtatcttgagtgtgagatgaaggttgagaaggtctttgcttgctacaactacagtgaagaggaaaaaaatcaaattggcctccttggagtttgagggatttgtcttattgtggtggaatcaagtgaggagtgatgttggaaggatgataaggcctttgattaat

SEQ ID NO: 40179 - DNA, 422 bp, Glycine max
  unsure (1)..(422): unsure at all n locations
agcttctcaacaattttctgtgtagcctcatacgtcatttgctcagttntcttagtgtgggccatcttccacttcacgtgtcgtctgatgggagatggatggtcaatcacgccttcagtgcttccgaactgagcagtttcctccagttttttctttctcttctcagccataagcttctattctaaatattcataacccccacaagtcaacacgtgggggggcggtattttgcttctggatggcttgtgcctttntctgcatatcctgtaaaaatcgaacattaatgaaaatcattactacaatgtattataagaactaaattcttagtggaaaacaattaaaatgacaaagtacatacctcccaggaggggtctgacaaaactgggctcatttctccttgctaatggccgatttttcataaa

SEQ ID NO: 40180 - DNA, 181 bp, Glycine max
atgatatatgaagagcactaccagttgagttgttggaaaaaagtaacgtgtgaatatttttaagtgactaatatgatctgttagattgcctgatagtggtgaatattgaacttgaagtgttgtgagtgtatgggaaatacaaggagtatgaatttataaaagtttattaaaatgttgggtg

SEQ ID NO: 40181 - DNA, 500 bp, Glycine max
  unsure (1)..(500): unsure at all n locations
cggcntttgaatcgatgcanttgcagacccttctagaatccgnccgancgcatagacgatctgcaggctagcgttgctcgagggcatacttatatgttttggctaatcttggaacccagcggggcctgtattattagacatgtccctgtcacaaaactctgtggtttatgctcctctgcggaccacgataccacaccttggcttttgtgcgacaatttggagcgattgaacaacctgaaccttatgctggaaacatctacaatgaacacatcggagcgtgtcagctcaatcaatcataacataacagatttgagcactccatctacaaagtctctgcccgctggggaaataccctatattagatggtctaccctctaaataacacaacagttgctcctcctcataatgctgtgggcaagtaaaccaacgtgtctccttttggccaaccatctacacacagctcaacaaaacacaatcccttttgggcccttctctacttn

SEQ ID NO: 40182 - DNA, 432 bp, Glycine max
  unsure (1)..(432): unsure at all n locations
cataagttattaaagcttaaccattaaaagtaaaccactctaagaaaaagctaaaaccaaaatctgaatgcttaaccaccatacaagacaaaagctaaaactantaaagccaatagttactccccatcanccaatcttcatggaactacaacatttncactaaaaaacacatccatatttaagaaaagcaaactcaatagtaagatctcatgtttgagctataagaacacttagtaatttccttcaatttccttctaatgtgcagttaattacctaaactaaactacatgtgccattatattattactctnttaatttagtcactaaattagtcattgaaaatttaaaagttncattatattagtcttccgatccaaaaagctatttaccaaattagttcttaagctttcttttatcaacactttaatactc

SEQ ID NO: 40183 - DNA, 452 bp, Glycine max
  unsure (1)..(452): unsure at all n locations
agcttgagcttaacctttatagtaaataagcttagctgagcctcacatatgccgagccaaaggccctcgacaagttactcggctcatttctacccctagtgtcacagtcctactattgtacgtatcccactttttctcttttacagatgatagataccaccacgcatattgtttctggttctatactcctttcaggaaagattcctccatgaacagtggtatttgctaaagagtgttgtgtaggtacgtataaaaaaaacaattcgacacgcaaatttccaaacagagcactaaaatggcaaatattacatacctggatataactaaatntgggtttatacaactgactaataagattttaaaaaacagtttgccattgcaatttctacttgatcatgatttactaaacattntctttgaggagtctttgtatttgcacatgacaataacta

SEQ ID NO: 40184 - DNA, 310 bp, Glycine max
  unsure (1)..(310): unsure at all n locations
ctcagcttctcaggaggtgagcttagttatgagaggggtgtgtgtagctaagctctatcttctcaaggaagttntctcaaagaagcttctcaaggaagtnttctcaagaaaacttctcaaggaaggtacctagtctataaatagaagcatgngtaacacttgttgtaactttgatgaangagagtcttgtgagacatacttcaaagttccacttctctccctcttttattccttcaatttcgtgctcccccctctctctttctctccctctttcttttcctccattgaagcatcctctccaagcttctta

SEQ ID NO: 40185 - DNA, 396 bp, Glycine max
tgattaggttttcgcatgcatcttctcacgacgccgcgaagcttagaactcgaaggacctcgaagctgacatcccctgtgccgcatcaatgttgttgtagtaccgccgtgccgtaggctaccccaccgtggttgccatctgtgtcgtgagagtgagaagcagagggtaacgaggaaggtgaagtggttcaatgaccagaagggagtgggtcgagtcattttttaaaaaatataaagctgttttgattaggttttcgcatgcatctgcgcgcgacgccgagaagctgataactcgaaggacctctaagctgacatcccctgtgccgcatcaatgttgttgtaataccgtcgtgccgtaagctatcccgccgtggttgccagctgtgtcgtgagagtg

SEQ ID NO: 40186 - DNA, 387 bp, Glycine max
  unsure (1)..(387): unsure at all n locations
ttatccatgacttcctatggtggtcagcttgtgcttgactcttcttctccttgaagtgacanctccaatcatctttcttccttctccattccgntaccattgacctccaccacacacccgcctccatcgatgaccaagatccaagggctacaagctccacatggagctacatcaaatcttctaagtgcttgacttgctcttgtgcaagactcttcatgttattttggttttctctttctatcatttgctttttggcatcatcaaaatctacaacattacatataaccacaatcactagcaccgttaccaccacctccatcatcattgccaccaccatcgtaaccaacatcaccactactactgacattggtaccaccaccataacca

SEQ ID NO: 40187 - DNA, 443 bp, Glycine max
  unsure (1)..(443): unsure at all n locations
agctntgtcaagtttcttcataatattaactttctttttcctcctatctatgttatatgaaattttgatgttatgtattagttttaaaattcatttgagaatagtgttttgcttactgactaattgttaaatattaaattagtctacctaattatagaatttatttatgcgtatatagaatggatgtatagccatggttaccattggtaaacatggttctcagtgtagatctatgaaacattcattcatagcagtacctattcttttgcatttcataatatactactttatattaaaatgaatactttatataaaaaaaagcatcttatatgtttgttgaaattgaaattaagcatatacgaccgaatagttgttcagatgcggcaaagtatgaaacacatatagggtcttctacagctagtggctcaattgcaacacaacac

SEQ ID NO: 40188 - DNA, 389 bp, Glycine max
  unsure (1)..(389): unsure at all n locations
tggtaagaggctcttaatcttcttncttttctcggtttcttattttatttttctcattcttttaagcttgagacatctaaatatgagttgtttgttcatattaacatccttgcctaccccgcatcaacgcataaggggtcttcccacttccttgaactctacatctcgctatctttggaagctaagacttattgcatgttttgttgaatgttataatttagtagctactgactaggctagaactatgtgatatgttgttttcttaagattctaaggttaaaaatgagttttttgggtgttaaaacttatggttagctatagaattcaatgaaatctgagttttctagcacaagttatgataagtttaaggatatttttgtatgattaaa

SEQ ID NO: 40189 - DNA, 370 bp, Glycine max
caatgtggaaaacaaagtaagatcgcgagatcagatagaggtggggagtactatggtagatacacagaggatggacacacaccaggttcatttgcgagatttcttcatgaacatgggattgttgcccaatacactatgcctggttctccggatcagaatggtgtggcagaacgaagaaatcgaaccttattagacatggtgagaagcatgaggagtaatgtaaagcttcctcacattttgtggattgatgctcttaagacggctgcgtatatattaaaccgagttccaaccaaggctgtctcaaagacaccttttgaattattcaagggatggaaaccaagtttgcgacatatacgcgtttggggatgcc

SEQ ID NO: 40190 - DNA, 471 bp, Glycine max
  unsure (1)..(471): unsure at all n locations
gacccgggatacttagagtcacctgccgcatgcaagcttgttcttaactcatcttctccttgaagtggcatctccaaccatctttcttccttctccattccactgtcattgatcttcaagaagcaaaagactccattgatgaagaagatccaaggcctacaagctccatatggagctatgtcaattactaaataaaacttattaaaaacatattcggttcagaacaaggccgtcaaagtttacaaaagaaattttgttaaatcaatgagatgaaataaaataaaataacaacatgcaattaaaagaaaaattcatcctcaatgttgcatcctatcagagcattgtgtcctaacatcctctagcacgaggttctttaaagtcatctacctagtcatctgctcccatgaacacaagattcgagatcatcacaagatccanacacaaataacacacagggagtgaattatcaca

SEQ ID NO: 40191 - DNA, 374 bp, Glycine max
  unsure (1)..(374): unsure at all n locations
gtaatatcagcagactgttcttccaacatagcaagatcaaaatgcaaancaccgaggtgaaatcccctcgctcctccaccacacaattaaccccattaatattggcacaaatcatacatgagaacttagtgaattgggaacatgtattgcagaataaaattcatataagtggtttgagacataaaacacattgtatacatatgatttattcagatcacggtcaatgtatattggtgctctcctttgggtgatacaccaacacaacatacaaacatggtgatgctaataaaattcttaacattatttgacaattaaatatcgaccaattagtagtatctatgtcctttggtatataaaataaataatgatacaca

SEQ ID NO: 40192 - DNA, 327 bp, Glycine max
  unsure (1)..(327): unsure at all n locations
agcttaccttaatattagagacccattctcttatctctcaattagccnagcacgaagcgaccccgatagcttattccctcctatatctcttcaagcgaaagacaatcatatgaacctgtctattctcagaaattaaaatatcgaaatcattccaaacatcatatagagttctgctcaaaatacaacttacgaaatactcacgcactcacggtgagataatgactcgggcgcaaaaccatttaaactgttatctgagacatccctgtcaattgagcaagcgagaagaccatagcatgtaacaatctcactggtgatgttccaaaaaat

SEQ ID NO: 40193 - DNA, 520 bp, Glycine max
  unsure (1)..(520): unsure at all n locations
tgtgttggtatgtgagtgnnntgcgnnnnnnnnnnagatttctatgagtgttgtgagactatagaatacttaagctttgccagcagtgatgatgtggcaggagcaatttgtgatggttttaaaacaatgtgattactagctggaatagctttaacgactgnatcaagcgacaacactggaacgcatccaccagaatcgtcctctacatctccgccncacactgcgacgcacacaccaacgcgacaccctcatctcacaagtctgtgaaagaattctaactaaatattaaaatacggaatgggtagttccatgcatagatgactaatataatccctagtggttcagatactatttcaggtgaagaaggaaaagttgtgattgaagttttgacttgcaatnagagggaaatttatgtgataagatagaagtaccaaacaatggtaggagtgaaattacatagtgtatacttttcaggagtatggaatgtttaatttattgagtggaatttcatgagtttttc

SEQ ID NO: 40194 - DNA, 439 bp, Glycine max
  unsure (1)..(439): unsure at all n locations
agctttgactngagtcatcaagagattataaatatttgaccatggcatgagtttcaataattatcaatcatctttgaatcatcaatctttcaatcttttttcaacatcatctctcaaacatctttcaatcaatctttcaatatctttctacaaaattttctgattcatttctcttcatctttctaaaagttttttatcaacacattctcttccaagaaaagttctttgttcaaaaacttgtgttattcatctttttcattctcttctccctttgccaaaagagcgaaggactaaccgcctgaattcttttgtgtctctcgtctcccttacaaaagattcaaaggactaaccgcctaagatatcttttgttttcccctttacaaagattcaaaggactaaccgcctgagaattctttgtcccaaaacattggagggtaca

SEQ ID NO: 40195 - DNA, 129 bp, Glycine max
gagtgcatagttaatgatagacatgacaactgctaatagccgttgattcgaaaccattgcagtcaattgtgtggtaatatcatatgtattatgtatttatttagttataacgatgagatcttgattgag

SEQ ID NO: 40196 - DNA, 453 bp, Glycine max
  unsure (1)..(453): unsure at all n locations
agcttccgcggatgaatttgtctagagtaaattcttcattntatttatcatgtcgtggggatcgagggaaaaacgctcagaaactaatggcccactaccactaggaaatgaagtacatgctttatcagcattaatatattgttggtgttcattacaaaaaactaaataataaaagggaaattaattntaatcatatctcaaccaaaagagaatcaaataggaatttaggagataatataataaaggtgttttaggtcaaatgctttagatttctataaaataattttttatatattcttaaataaaagatatttctgaaatattaaataaatctgaatccaatataatatttatttaaaaaatgttctatgttgattattttatttacttttaagatttctaactcgtcacaactcataaatcctaataataaaattaagactgaaatataat

SEQ ID NO: 40197 - DNA, 75 bp, Glycine max
tataataatttttttttaaaaattataatattaattattatattaattataattatatattaaatttgaaaaatt

SEQ ID NO: 40198 - DNA, 450 bp, Glycine max
  unsure (1)..(450): unsure at all n locations
agctngcatgcaaaatagacaaaaaatgttgctttagtttgcaattatcatgttctttattaattaattaattattatcatcattttttttttgagtttgcgtatcatatgtttatgccataactgtccttgatttcagcctagtcactccccttcacagtctcatgtaccagatttcgaagtcatcaacacctctttactttaattctcaccaagtcagcattctctgcatgtgtagcaacaatattttaaagaagaggtaagcttactcattttttctcatttcctagttgcaattttttgctcaagaataagccattaataatttcttgcttgaactattattgaatctcttaagtgattacttaagtaataaaattatntaagtaatctatgaagtattgatcaatatttattactttaaggactaaattgaagagtttctaatat

SEQ ID NO: 40199 - DNA, 395 bp, Glycine max
  unsure (1)..(395): unsure at all n locations
ggtagaatggctagncatgatacatgtcaaggtttgttttggttcaaagataanagggatgccccacattatttccatgacacaaangcaaaaatgatgatttggaaattttangcaaaactggtcatgcatgcacctatctggacactcaagtgtcagatctttatgcgcatgtgatgctagggctcaggattcntttcctctattttagtcaacccaatgtttccaaaatatgtgcttttatcaatttgtgcattcatccgagtccattttgggccgccgggaaaattttcacagcattcacccttcaggtgtagacacatttttcaaaaaccagctatgatcagtgaatatttttcaaaagaaagctggaagatatctcttttcaaaagcat

SEQ ID NO: 40200 - DNA, 422 bp, Glycine max
  unsure (1)..(422): unsure at all n locations
ggattcttgtgtaggatntagttaatgaccaaatttgacacattgaatgaccttgatcagctatgtgtggtgccatccaatacaaaatgtggtgtccttcacttttaaattttttttctcaaaaaggttaaagtagagtttcgtaaaaactgtgtattcttgctttataccaaaactagtaaattctatcctaaacaccttgattattgtgttaatcttcctaggattacacgtaactagagtaaacctcatacagagctaaattacattggccctcaatgtgcaatgcaatcttgtcacaaatgaaattttcatccagacagttntcatatctttgccagctaagcttaaaatatatatatatatatatatatatatatatatatatatatatatatatatatatatatatatatatatat

SEQ ID NO: 40201 - DNA, 416 bp, Glycine max
  unsure (1)..(416): unsure at all n locations
tccttgataggttgtatataaatatcaccntggtttttggagtagtatctctgattnttttctaacttgtatgcagagagatgctccnttcaaatccccacctatgtctggtcttgtcaatgttcttatactcgactcatcctcccctttctcactccacccaattgattacttaattcataactgaatatgcatatcatttttcaactttntttaccaatctttgtaacctttatcttccctcctgttgttgtgatattacagatactaatgagtgccagtgttgatgctgcaagattttctcaatattttggtgtctgcccaattatctatgttctagggctcacatatccggtacctatatatacactatacaggattcgtttgtgaataaactaccaactagtttcatttga

SEQ ID NO: 40202 - DNA, 297 bp, Glycine max
cttgagtaaatagaatacacttttctatcaagcctctatcgtgcgtgaagatcgagagtgacttcatgactagcaatactcggatcgtaatcttatggagagattaacgatagtgctccgagtgacctaaaaaatactccttatcgacacaagtgccatcgataatacttaattgcaatcaaagagttgattagcgatacccttcaagtttcgaaggagaattgaacgtactctaagagttgagatgaaccactgctaaaattgccgattatctttactactattatattactcatc

SEQ ID NO: 40203 - DNA, 240 bp, Glycine max
  unsure (1)..(240): unsure at all n locations
accatcctctatatgaagagaaaanaaatgttggtataggaaacattgaatatatttcaagtcagagatgagatggaacaattgacatttctcatgatgctattggtatctatattatgctcactacctattgtcaggcttagaaaattggaaccataaaacaattaacaacagctatgcgacatatggtttgtatcaaacaaaggcatacacatttagaaacttacttatcgcattatg

SEQ ID NO: 40204 - DNA, 421 bp, Glycine max
  unsure (1)..(421): unsure at all n locations
agctnngccttggtttagatgtggtttatacatgatttatgacttgtaggattcaatttgggcaaaattggatgaaggctagagtgaattcgaaaatctgcactattatgcagaattttgctgttgaaaagtgcagtagaattttgagtttgtgcagaaaatgcttatgcatggctggttgtggaaagggttgtacatattgggttctggacgttttctagcagatcccaacgctcaaaatgtagacttatgtactagagacttccagtaaaattttcgagtcgatccaacggttaacgaattggaacgaagagaattttactgtggtatttgagtgtgaaaaactgtgatatttgatatgaacccacatggcacaagggctgacttangatcgtctangattaaaccttgatggaaaatg

SEQ ID NO: 40205 - DNA, 340 bp, Glycine max
  unsure (1)..(340): unsure at all n locations
aagcttattccttcagagctaagcatcagntctccttgcgagcttatatgcctanaagggattnttccctataaatagtcatgatggggttttttntaaggcgttccaccgttcacgagtcnacgaattgacagccaccaccgacccnccaagagaaagagaaaagaagaagaagaaagaagaagaaacgaagccgaggcgcgtccaaattgtgatcgtgatcattccctacatcgttctctnattctgtgtttcgcatgcaatagttgtttagttntgtttttaagatttaaatgtaatctatgtaccatttggggtcccctctatnattatgtgcata

SEQ ID NO: 40206 - DNA, 458 bp, Glycine max
  unsure (1)..(458): unsure at all n locations
ttaagtcacctgangctgcagctaagctccttcaactgcacaaagctcttaatatttgaagagtatccttgtggaacctttactcgacgaagacactgacaaaaacttatcttctccttcttggacaaagtatggcaggttgggggcaagtaaattttcttcccatcagaccttggatgcaactgtgatcgtatacccatatcagctagatcttgacgggtattcaagccatccttcgtcttgccttgaatgttaaggagcgtcctaatcacactgtcacaaacatttttctccacatgcataacatcaatacaatgtctaatgtcaagatcacaccagtatggaagatcaaagaanatggacctcttcttccatatgcaactctgacttttatccttcttttgggtcttcctaaatacagtattcaggtgctgaacctgctgatatacctactcact

SEQ ID NO: 40207 - DNA, 318 bp, Glycine max
  unsure (1)..(318): unsure at all n locations
taattttcatattcaatacatagatcatgtttacttgcctccaagttttcataaccatgatgaanttgtgaaaaatctccccataaatcatatctttcttcaattaagtgatcatgaagtttattgacccgccccaccttaacntgtaggtcttctaattggttttccaacctttaaagatcttccaataagtcagacttttctttacgaactttcatattttcaaggtggaactttgtagcctttagtttaggatattcagagacgtcacactcttgagtggaaaattctaaaagactatctacctttccctcaaac

SEQ ID NO: 40208 - DNA, 371 bp, Glycine max
  unsure (1)..(371): unsure at all n locations
gagcaattcanacgacaataacnttttacatggatgtctgattgagtcctgtcatatattcagacgctggaaattgaatgttgaatctctgntccaattcaaacgacaataactttttgctaggatgtctgattgcgtctcgccgtataccgacactctccaaattgaatgttgaagctctgagctaattcaaacgacagtaacttttaactcggatgtctgattgagtcctgtcataatatgagacgttggaaattgaatgttgaagctctgagnccaattaaacgacaataactttttacttggatgtctgattgaggtctggtatatatcgagacgctcgaaattgaatgttgaagctctgaggtaat

SEQ ID NO: 40209 - DNA, 447 bp, Glycine max
  unsure (1)..(447): unsure at all n locations
agctttgtagtcctctntgatcaaaggttcatatattataattctcaggccataatagggatgatagaaatagatctaaaccaaatagtctccctaatttatattgcccctaattacacaatgaatcttaatgatttcatacaaaacataaacctagaagtccaggcaatagggtttggaagaaactttgagggacataacttacacttggatattaccttcattggcagaataagtgatcaaatatcccctagatacatgataaacactaatccattagtgacaaccttatcatctgatggaatccaatttttgccacccgaaatctttgattcctctagaaaccaaaacaatcaatggcaaaaacatatagatgctggatcctctaggatggcaataaccattcgtggatcagctataataacaaacagaagagatagtctttta

SEQ ID NO: 40210 - DNA, 448 bp, Glycine max
  unsure (1)..(448): unsure at all n locations
tggaagaactaaacttgagaaattgcaatcctatgaggttgttgatggataacaaatcancaattgatttagctaagcatcctgtggcacntggcaggagtaaacatattgaaaccacatttcatttcctacgtgatcaagtgcataaggagaaacttgaattggattttttgaggtctgaagatcaagttgcagacataatgatgcaatcctaccccgcaaggcattggatagaaaaactccaagtagattgggccagagatgcaagagaaggccctaggcttcttatgagccttagggtagatttcgggcccataggctaagtacgaacccgcttatctttgtaaatattagattaaggtttcattatttttgggccttgtatttagggctccataatgtangtagcggaccctagaaatatangatttttcagcccttgtatttt

SEQ ID NO: 40211 - DNA, 468 bp, Glycine max
agcttgtccataaaaataggttgttgaagtttgtcatttcaatttcttactaagtaaaatggatcattttcaaggtccaacgccttaaaatgatcaccctttaagtaaaaaaagaatcacttgataagaaagaactacgtaggtctgatttcttcatcgcaattgagggatacgtaggagcaaagggaaacacccttgtcgaccacaaaaagaaaaaaatataaaaaaaagggtacaaaggatataaagatataaaaagggaatataaaaatcatccactctgatgaatgcttccaacaacagagaaaacgccaaaaattgagaactccttccatttctgatttcaggctttaaatagtgttgctgatttttggtcgttcgctcagccacattctggtttgcttagccaaattaagtgacatttggcttagtgcgcctcttcttcgcttagcctggaggtgcaagcgg

SEQ ID NO: 40212 - DNA, 356 bp, Glycine max
  unsure (1)..(356): unsure at all n locations
taagcttagacgaccttgtttgagtcgagantactttattatttatgttttaagtttgaatatgatggagaagaaaatgaatgtaagtcttttgtcccttcgaaagacttgttcacaccactcgtcccaactactttcaaccatatttgagttttttattccttattagtatatatgtcaggggtagagggtgtcacaaatgtaaggttaaagatattttcatagcttgatgtgggtagaaaaatgacattgaagaataaggtctgtgagcttgcatttctagatacgacttgaatgtgtccctctccagagaaaantaaaagataagattaaacctaaaattttcttaagaatta

SEQ ID NO: 40213 - DNA, 413 bp, Glycine max
  unsure (1)..(413): unsure at all n locations
agcttctacttcatgttcttcttcactctttatgttcttctttcatatttttctctgtnttacattatattaattatcatgtctacatttttgtcatttctttttctcggtgtatattaggagcaggtgtctatatggagtatggataatttttgtatactagaaaagtaatgatatatatcacatacctcagtaacatattttctctctttatctcacgaattctattacattatctcacttatcatatttatatacttttctcttggtggatcaagtggtctcggattaattaagaagggggggttgaattaatttttaatgtgtcttgactaattaaaaattatccttcttaatattactagattcaattacgctttactattaagttatgaggaagtaaagaacaaaaa

SEQ ID NO: 40214 - DNA, 438 bp, Glycine max
  unsure (1)..(438): unsure at all n locations
ggaggaaacattgcgacattttttccaacccttgaacaaaattaagacaaggcgttgcaagcctagtaaaatgactgcatggccttggaaatgtccacactccacacaaaagaggggcaaaaatntaaccaagatactctcaacgacgggaataaaagcaatccaaaaatacgtatgccaacctggaaggatctacagacatcataatagcaagattcacagtaatgttcttcgctaattagcaaaacaagcaactagatcaactactatttatagcaaaaagtatatgtcattattgttaattgtcatgcttgaaactcatccccaaatcataaaaaatatcttaagctcaaagctcgactcctttttcaccgcaaaaagtgttatttatattaacttcatgaccaaacacacaaataaggagatcaataagactac

SEQ ID NO: 40215 - DNA, 386 bp, Glycine max
  unsure (1)..(386): unsure at all n locations
agcttcactttntattctgagaactatggtttattggatctgacgtttatgatagcatgttttgcatggaatttagcttgcggtggagtgcattttttgctcagcgtgtatccgctttgtagagtgttgtccacaagaggggcttactggtttgtacattgttagtagctatgttattgcgtttgattttaatatattatgtgcatttattgtctgatgagcttttatttttacttataacctttgcacgtgtttcgttgcagagaagctgcggtctgggcttgaaaattatgtttttgactggttaataaatgcagacaggtaatgctgtgctagatccctgtattgtgctcatagttaatataaaaatattctataataaaact

SEQ ID NO: 40216 - DNA, 385 bp, Glycine max
  unsure (1)..(385): unsure at all n locations
ttaggaactatgaatctaagcttgtagggcttgggtnggaaataagagtgagactcaacttgtataccaaccttgtgctacaacaattgcagcaagaccctctatncataatgagaaaacaccccctgtccanaaccttgcatcttgtatgaaagatgtcttctctttgggtttgggttaaggcacaagattgactcccaaggatccttctcancattagaagatcaccatcttcataggggtaagcctcttagatatgctcatcacccttggcttcaccctcacttccacttgaggaaggagaagaagtagcctcctcttggctactatagttgtctngacccctcatgatcatggttttctttgtggggcattgagaagaaat

SEQ ID NO: 40217 - DNA, 411 bp, Glycine max
  unsure (1)..(411): unsure at all n locations
agctntgtagcagatgccactctactctaaattttngaaagatatgttaacaaggaagcataaatatattgatcaggaaaacatcatagtggaaggaaattgcagtgctgtgatccaaaagatccttccacccaagcataaagatcctggaagtgtaactattccttgttcaattggagaagtcaatgttggaaaagctcttattgacctgngagccagcatcaatttgatgccactctccatgtgcagaagattgggagagttggaaataatgcccactcgaatgactttacaattagctgaccgctccattactaggccatatggagtaattgaagatgtgttggtcagagtaaaacattttatcttcccggcagactntgtggtaatggatatctctaaagatactga

SEQ ID NO: 40218 - DNA, 369 bp, Glycine max
  unsure (1)..(369): unsure at all n locations
agctntgagccaattcaaacgtaagttacttttgaaacgaatgtcggattgagtcatttactaattcgaaacactcaaaattgaaaacagaagctctgagcaaattcaaacgacattaagtttttactagaaagtctgattcagtcatgtagtatatcgagacgaacgaaattgaaaatagaaacattttactcggatgtccgattgaaaacgaaagctctgagcacattcaaacgaaagtaacttttgacatggatgtccgattgagttatttaataattcgagacgctcaaaattgaaaataaagctcttagccaattcaaatgagaataacttttgactcgaatggtcaattgagtccttctataa

SEQ ID NO: 40219 - DNA, 390 bp, Glycine max
  unsure (1)..(390): unsure at all n locations
tctcaaggaagctacntagtctataaatagaagcatgtgtaacacttgttgtanctntgatgaatgagagtcttgtgagacacaacntanagttcaacttctctccctttttntcttccttcaatttcgtgctccccccgctctctttctctccctctttcttttccgtcattgaagcatccttccaagcttcttatccaaggctcatcttggtggtgaagctccttcttccatggcttattccctagtggatggcgcctcctctcccctcttctcgtttgtcttccgctgcatctccatggtggaaaaccaccattaagcgacctcattgaagctcaaagatccagcctccatagaagctcnccaagcaagcttccatcatataccatg

SEQ ID NO: 40220 - DNA, 443 bp, Glycine max
agcttgtgaatatagttacaaatgttaattgtatttattagttttgtgaaagcttatcaaatttgttgaaacaaaaacctgttgtaccatcacaaagccaagattctatagatctatgtcctgctgatagaaaaaaaaaagatgttggatggtagtaataacatataagtcaatgttatattactcatggtgatgatatcatcgcctgccaccagatggcagatgttggtgttggaatatataggtagaaagggtgccaagcaatgatggcattagattttgctttctagattgtatagttttcttttaatatccttggccgacttccgcttatatattcaatattggtgagtgttaatttcttgaattccttgtaagttttttagatgcccaaatgtaacatcccatattttgtaaataaataaaaagaatttatttaaaat

SEQ ID NO: 40221 - DNA, 350 bp, Glycine max
  unsure (1)..(350): unsure at all n locations
tagctaagctctagctcttaaggaaggnttcgcaaagaagcttctcacgaaagtgttctcatgaaagcttatcaaggaagcgatctagtctataatagaacatgcatacacttgttgaactgtgatgaatgaangtcttatgagatacacttcaaagttccacttctctccctgttttattccttcaatattgtgctccctccttctctctttctttgtctccattaaagcatgctcttcaagcttcttatccatggaaatttttggtggtgaagctccttcttccttggcttattccctagtggatggtgccttccctctcctcttctccttttccttctgccgcaacg

SEQ ID NO: 40222 - DNA, 400 bp, Glycine max
  unsure (1)..(400): unsure at all n locations
agcttcaacattcaattntgagcgtctcgatatatgacgagactacatcatacatccgagtaaaaagttatagtcgtttgaatttgctcagagcttcaacattcaatttcgagcatctcgctatattacgggactcaatcagacatccgagtaaaaagtttgttgtttgaattggctgagagcctcaacattcaatttcgagcgtctcgatatattaagggactcaatcagacatccgagtaaaaagttatggtcgtttgaatttgctcagagcatctacattgaattgcgagcgtctcgatatattacgggactcaatcagacatccgagtaaatagttattgtcgtcggagtatgctcagaggttcaacattcaatttcgagcgtctcgatatattac

SEQ ID NO: 40223 - DNA, 478 bp, Glycine max
  unsure (1)..(478): unsure at all n locations
atggactatgatacctactattacggaactatgatactaagcttctggtgagacgctcttggtgatcanaanatcttataaactaagtgtctcttattactagatatgttgaagtttttgtttgctgaatgtacaaccttcaaatcgtcgctcgctcccctctttcttttcccgctaaaagaaaatgagatgctgataaagacatggacgaccccctaccaacctcaagattacagaatacatggatgaaatgacaattaaaaagcacagttacctgtgtttcagagtgttttggttaattgtattagatgattatgtggaggggttttgtttaataataatatacttttgttgtacaaaaaaaacttatgactaattctttgttcattaatgcagtgttgtatgttattgtataaaagagtatggggtcatcaaagtggtttaattattgttataataattatgtggtacttggaag

SEQ ID NO: 40224 - DNA, 493 bp, Glycine max
  unsure (1)..(493): unsure at all n locations
cganctgatctgcnatgagccctcgtgaccggatcttaagcacctgcagctgcaacttctctttcatttacgatcttctcgatatattacgcgactcgatcggacatcccggggaagttatattggcgtttgaaattgctcccagtttctgctatcaatttgagcggttcgatgtactaccggacacaattagacatctgagtccaaagctattgtcctttgatttccttcaaactttgtgtttcaattacgagcgtttgcttatattacgggactcatattgacattccgagtaaatgtctttggcgtttgaatctcttatagcttaagattcacatgcaaaccactcgtcctattgagggactcactgggacatctcggtgaaaatgtatcagtcataaattttcatatatcttccgtcttgcatatggagcgtcccgacatacttcgcgacaccatcagcactccactctcaagttcttgtctcttattt

SEQ ID NO: 40225 - DNA, 74 bp, Glycine max
  unsure (1)..(74): unsure at all n locations
gaactataaatctaagcttgagtaattatacgaaattantttagtggatgttgantgagatggtaaatatagag

SEQ ID NO: 40226 - DNA, 440 bp, Glycine max
  unsure (1)..(440): unsure at all n locations
agcttgaaggcgcggaggagtatgccaatgcttactctgacgccgtatgagaggaggaaggtctggcatatgttgccaatggcgtgagccacgcaggactcgtcggggccgtgatcgcaaggcagcgagtccacgtggcggtgctgctgggcgtgagcggcggcgcggcgctgccggcgctggagctcctcgatggcgtcgcggaggcgctcctccgcttcgcgaaggcggcgctcggcatcggaattgtcaacaagcggaggagaggatggtggtgccatgggaatggagaatggtcacatcaaagtcgtggtttacttttcaatccgatcactgggtacaagtggtccttttattggtttgttagagcttcccttaattgctttctaagtactactttctatcaaatactctaataatnactgatcatanatattaat

SEQ ID NO: 40227 - DNA, 477 bp, Glycine max
  unsure (1)..(477): unsure at all n locations
tatgattagntgaactatatagtactcaagcttaaagtatgcncgagtcattatttntatgagatgttgtcgaagtattggctatcagaattggtattccttggattatagggttgaaccaagctcatgcttttacaaaaaggttcatcacgccaacttgacacatcgagctaccggcttgaaaattggggcaaaagatgaaatgagtcacatacttgttcgtctactggcaaacatatttaggattatngatgtccttgttacttcaagtttaccttgaaaagatgttatggaccatgttgaaaatctaaattgattgaagcccatatcttgcgtaaaaattcgcaatacttgaaatgtgcatcattcgcatgcatccatgctttttattggttgtattggtcgtgcattctttccttgaaaaataaaataaaagaaacttaattattgtattaaaagagagggacacgtttaaag

SEQ ID NO: 40228 - DNA, 444 bp, Glycine max
  unsure (1)..(444): unsure at all n locations
agctntanagcacagcaacacagaatctaggtgtccaacacccctccattcaatggcttttctaggtttgaaaggtgaaatttagaatgaggtaaattcaaagcaaactctcacctcacacaagtccataacctcaaactaaacttgctcaaactgaatttacacctaaaattccaccaaatcaaaatttgactcttcaacacccaattttgccctagaaatggctcttggttcactttggtcatttgtttttctctctagctcagcctaaccttcctcacatgtcctanatgacatttcaagctagtattaactcactntaacctccatttaccacagaattcagacttagccttccaactctcanagtctcactctttntccactcataacatcacattctcactttctaaccttanngtagttctacccttcgtctctaac

SEQ ID NO: 40229 - DNA, 342 bp, Glycine max
  unsure (1)..(342): unsure at all n locations
ntgtgtaaaagccaaaagtgacaatnaanaatacttgtgtctttgttaaaagatagtgaaaacntgatcggttgccaagaactgtgtttatatcntcaattctctcttgtatataactgantaaggattacactctgactctgcctcccacactcgttttagaatatgttaatggtcgtttatccttcttcgtttgtgaaaacttattctttttgcttaaaacttacaaacgatagctttttgtttcaaaaggtttgtgaaaaaattntaaatcacaatttttgaaaaaaatttcattagacttacaaattagttttgctaacatttnttaaaagtaatcat

SEQ ID NO: 40230 - DNA, 464 bp, Glycine max
  unsure (1)..(464): unsure at all n locations
agcttataagaacaaaattgccttaatcatttccaaatatgcatgtgaattangacgcatcaacaagaatcaagccaaggctattgtgcaagcaatcaatggggcaaaacacaccaaatgattataatgatggatggctcaaattctcacaaaggtaaaatcatcactttcaaattgagctttcaaaactatcatgacatgtagagaagaatcaaggatttcaagtcacaaaatgtcaagaacttttattttcaaaacaattacccatttcttgaacatatcctataattcaaagaaaaacatgcaaagtcatacgtgcacatgaaattgacccanaatattaaactgaaaatccgatgaaactaacaacattaacaaattaacacaactaacaaattaacaaaaccaacaaaactagcaaaaccaaagaacactctcccccccccatacttaaacaacacatt

SEQ ID NO: 40231 - DNA, 419 bp, Glycine max
  unsure (1)..(419): unsure at all n locations
tcgaagggaagagagagaccaatccnaagcacatagcatagtcttaaaggaggagttagctgcntgctcaaggtccaagagaagcttgtctcaccgtttatgcgagacagagaccaacatgtgagccatcgtcagcaagtacaaagaagaattaaatctagccacggcccacgagcataaagtggcagacgagtatgcccgagtcgatgcggaaaaggagactagaggaagggtgatcgactctntacatcaagaggcaacaatgtagatggaccgatttgctcttnccttgaatgggagtcaagaacttccccgattgctagccaagggcaaaacgatggcggacacctactccgcccccgaggagatccanggacttctcagctattgtcagcatatgatagacttaatgggccata

SEQ ID NO: 40232 - DNA, 481 bp, Glycine max
  unsure (1)..(481): unsure at all n locations
ttaagtcacctgcggcatgcaagcttanggtcaaaaagagaaagacccncganaccacagnctgaatgtattaatcanaattgggacgttgaanaaaaagaaagagaaaaaatagtgaaaggattgatacgatatgcagtccaattcaaaataaaaatttgatggttaattggtttcttccttattatatatatcaaggtagaatggttatttataggtatattttcttaatccacaatctttggtatgaaacattttgagtgagaaagttaacaaacttttgagtatatagttggaaattggaattatagataaataatattcataatggacatagtgatttgtttctgaaatatgtttcttagagtaactagttagtttgaccgtatagttacgttgaagtgtttctaatattngtaataaaaaattatgatctatcttgtatttaanatatataataataataataaataaataaata

SEQ ID NO: 40233 - DNA, 417 bp, Glycine max
  unsure (1)..(417): unsure at all n locations
aacttccttgagaagcttctttgagaagaattccttgagaagctagagcttagctacacacacccctctcataactaagctcaccgtcttgagaagcttccttaagaagatncctaaagaagctagagcttagctacccatacctctctaatagctaagctcacctccttgagatgagaagctagaactcagcgacacaccccctataatagctaagctcacacccatgacaanaaacatgaaaatacaaaaaaaaagtccttactacaaagactactcaaaatgcccgaaatacaagggtaaaaccctatactactaggatggccaaaatacaaggcccaaacgaaggaaaaacctattctnatatttacaaagataaaagggctcatacttagcccatgggcgcgaaatctaccc

SEQ ID NO: 40234 - DNA, 323 bp, Glycine max
actgtctatgtactaagatgggtcaactcttaccagactcattgagtctatgtgtccaaaccagtggtttgacaagatttaattattagttacattatctgatgtcttgtgatagtttttttaaatgagtaatcattttaagtcattgaagtaatagataaagtcaaagatgttattgtgtagaactgaatgcacaaaataacccgtgacttggattgtgaatgtatattataaagttatctgttgaaattaaatttaataattgaatggattttattatattatatatgaatttataaagcaagacttttgtaggtgctttg

SEQ ID NO: 40235 - DNA, 380 bp, Glycine max
  unsure (1)..(380): unsure at all n locations
cattaggattagtacctgacatctcaaacaanccaatcaaacgtcacaagacaattatagttgccgtttgaatacctcacccactcaagtgtatcacacaattatggcttttctctagtgaaacactcttgccttttaccactctnattccccttgagttcttaggcaattcaagagattatggccacaacaaagaacaattcaccaatatgtgtaaggtaaggctagacaaggaataggttaaccaagaaaaaggctaacaatgtttttaggcacaaatgaaggaaacaaaattcaagatttaggaattcaagtaacaatccttcatgcaaccaatatattaccttaaagagtttttntttttaagttcttcaagcatg

SEQ ID NO: 40236 - DNA, 345 bp, Glycine max
  unsure (1)..(345): unsure at all n locations
ntcactcggaggccncattcaggcgcataatatatcgagacgctcgaaantgncaacggaagctatcgagaaattcaaatggtctatacttctaactcggaggtcctatagaggtgcataatatatctagacgctcacaattttacaatggaagctctntggctntacaaatggtcataacttttcactcgagcgtccgattaaggcgcataatatatcgagacgctcaaaagtgaacaatggaagctcttgagcaattcaaatggtcataactngtcactcggaggtccgattcaggcgcataatatatcgtgaccgctgaaattgaacaatggaagctcttga

SEQ ID NO: 40237 - DNA, 247 bp, Glycine max
tacgtgatgtgcgcactatatgttgcatatagctatataggatagcatattattgatattgtgccatacaattgtatctactatctagggtatcaatatacgccataaagaacgaaatgctaccactcatgataataatctcctgttccttgaatgtaaaattacaaatgagctgtttcataccaatgaactgtttcaccaataaacaggtgatatgctttattctaccataggcatgcaccttatt

SEQ ID NO: 40238 - DNA, 443 bp, Glycine max
  unsure (1)..(443): unsure at all n locations
tcagctgcttctcaactcnntgcttctcaatgccccaccaagaaaaccatgattatgncgggccaagacatttatagtagccaagatgaggttactacttcacctttctatagtgacagtgaagaagcaaaagggaaagaatntagtgaagaaatctacccccaagaagaagggaaccttttaatggtcagaaggcttctaggaggccaatctagtgacttgaactaatctcaaagagngaatatttttcacacaaggtgtaaaattttttataacatgtgctctctcattgtagatggtggttcatgttgcaattgttgtacnacaagattagtctctaagttaagccttgctatcactccccatccaaagccttacaaacctcaatggctcaatgaacaaggagaaatgatagtcaatcaacaagtgaaagtgtcattctc

SEQ ID NO: 40239 - DNA, 488 bp, Glycine max
  unsure (1)..(488): unsure at all n locations
ctgccncagatttttatgaaatcgatcgcgttccagagacccttannagtcaactgcaggcgtgcgagcttatgcgatcaaaatagccttaaccgctttgctatattctcgtgacttaggacacatgtgcgactttcaacccaaggctaatgccctatcaaccaatggtgccaaacacacgctatgaatgcatgatgagacagtgctatagtacaacgcaccgtttcctcatacttccacacagagcatcactactatcttgacatgttgagcaattcacaagattcatgtacaacatgtcgaaccttaagcctcgaaacttctacccaatggagacatacctatatatataatgaccgtgcaaaggacatgtcacatgaattgaacatctctttacgaacaatcagaagaccacttcccctttagcgccctgataatgactaaccacagacatcatgctggaacgtccccgccctcttttctccttc

SEQ ID NO: 40240 - DNA, 416 bp, Glycine max
  unsure (1)..(416): unsure at all n locations
agtgttgtgttnggnaggagaagatgaattttattgttatgattgggacncttggcattgtttaatgctagttgaaatgaacgatccagacaaaggggatcacacaacccgcagtgacgacctcctcacctcagccatgtgtgtcttcatcaatcatttaatttatggaaaatgaatgtccttttgaccgagtcgtggcaggtttgatattggattataaaatagcgtagcaaggtaagaattactttgagagttttcttttataatttttgtaaaaattaaagagatttttgacttagtgatgggagtaaaccattatctgtgaaaaataacttataaatgttggggtataagttatacattgattttatatttaagatggaatattctatgtttgttataagatgtaaactgat

SEQ ID NO: 40241 - DNA, 422 bp, Glycine max
  unsure (1)..(422): unsure at all n locations
agcttgccctatatntacattgatgggaggattttatatgccatttttgctttaagagtaatgtcccactggtaaaactaactttccaaatgtttgccttcgcaggaatggccccgaggaagcttgcctcaaagaggtccaggaaggacaaggcggccgaaggaactagttccgccccggagtacgacagtcaccgctttatgagcgttgtacaccagcagcgcttctaagccatcaaaggatggtcgtttctccgggagcgacgcgtccagctcaaggacgacgagtatactgatttccaggaggaaatatggcgccggcggtgggcaccactgattactcccatggccaagtttgatccggaaatagtccttgagttttatgccaatgctnggccaacagaggagggcgtgcgtgacatg

SEQ ID NO: 40242 - DNA, 343 bp, Glycine max
  unsure (1)..(343): unsure at all n locations
tcttatccaaggcanntcttggtggagaagctcattcttccttggcttattccntagaggatggtgtctcccctctcctcttctcncttgccttccgctgaatctccatggtgtaaaatcaacattgaaggatctcattgaagctcaaagatccagcctccatagaaacttcacaagcaagcttccatcaagtggcaatcagagcacaagagcttcaagtatgtgctccttaaacntccattaattttttctttaccttctcttccattggtatttcnttatttttttttctccatgtatctcctcacatgtcttgtgctaaatgttgttaacatgattcttt

SEQ ID NO: 40243 - DNA, 442 bp, Glycine max
  unsure (1)..(442): unsure at all n locations
agcttctcatttccattccaactaattgagttttgactattagtgggaaccttgtgacttccttatgaagtgtttttctatttatgactgcaaatgataaatgacacttaatttgtaatggaggattaaagaaactttccaaagaccaaggaaaacaaagattctgggtacgtttcattgaaagtagaacccacttcaaatcgaacgatgattttcagcaaagacaagtcaaaagaagaaaatgatttggtacggacttttctttcattnttctattgcaaattgtgactatgcgaatcctaattcttaatttcttgcttgaatcaatttaattattggaaatagatcccctgcgcgggcaccattagtcaataatgtcggttgtgtcaccaacgttaaacagtatcgagcttaacatatttattttatctttttcaaacta

SEQ ID NO: 40244 - DNA, 191 bp, Glycine max
aaaagaagaaaggaaatcctcgatcaaagatcggaagaaaacagaagaaatatacagaaaggtctctggaccagagaatatctgaacaatacagaattgtcaccaaagaaacattgccaaccaaaaacctgtgcgtcagtggcttgttcgtttcgcgccaaacaaaaacagaaaggaaaaacgccaaaaac

SEQ ID NO: 40245 - DNA, 394 bp, Glycine max
agcttattgataacatcggctaaaagataattaataaagtcacattcctatggaattgtgaactattatctaggatggtaattgataattcacggatttgttgagcaaccgggaaataaagtaatttttatagatgaccagcggccatggttgttaaactcgagtgttacactagctaactcacatgagtttacatgttcactcactcaaaatcatgagttgggttcagattactaaaactgcccctacaacaatctgcctttatcattaggatgttagccctcgttattagctatcacctatcatgcattgtcagccagattcgtctctgaacacttcttctgcaatgacagatggtgatgaaacgaatatgccgagatcattaactctctac

SEQ ID NO: 40246 - DNA, 415 bp, Glycine max
  unsure (1)..(415): unsure at all n locations
aatgtgaacagattgatanccatgctatntacgtgacactatacnaatactaagcttattgaaagatgctaatatattaataaattgaccctttngatgtttaaaattgtaattaaatgttgtaaatattatgatacatccctcccccctcaccaccttatgcacccttgccacatgaggtgagatattttagataatgaaatttgatgaaaactttttaaattattaataatgtgtttatttttgtaaattaatttttaagaaaaattaactaaaaaatatattttttaaaatatatatatttagaaatttaattcgaagtatttaaaagagtaggtatatgaaatttttatattgaaaaatgttatttttaaattgaattattttttgagaactaattattttggtataaaag

SEQ ID NO: 40247 - DNA, 301 bp, Glycine max
ggtctcctgcaatgatgcatatatttttccatatgtatatctatagaagagatggcatgtacagagaatggctctatattgtgatgtgtcatcaataatcatattatgtctgaaacttacacttaatattataaacagaacatggtgcagatatatgtgggtgatgtactgatatgccataacatgagatacatactgcaagccaaatgcaagcaattcctgatgcacacgcataatctgttattatatagcacggcacgacatatggaaacctgcatagagattcatgttctgacttatg

SEQ ID NO: 40248 - DNA, 182 bp, Glycine max
tttaattattttatttttatacttgtgtattataaattaagatatttttgttgtgcttattaaacgtggataatttttaatataaattatatttattgttatataataattttatttttataataaattttataatatatcttacgtttgatgtttttaatattatatatttaatttaatta

SEQ ID NO: 40249 - DNA, 426 bp, Glycine max
agtcacctgcggcatgcaagctcgaatgaatgtaagacacatcttcttcatcctttgtgattcttgactccatttcattgaagcgcatatccacttgtaattccaaattgtcaaacctctcaccaacaaaggtttgaagaccatcaaacctgtccaaaatctttgaaaggagagatgaatcttctccatcatgtccttctacaccaacatgtcgaccacctttcttcacctaagagccatcatgctccttttgataaccaaaagatgctatgactgaagcgcctataaggaaagatctcttgattggaacataaggttcagaatcaagagggatgttgaagtgttgaaggaaaagggtaacaagatgagggtaaggcaatggagcattcaatcgcaatgccttatgcatgcgatatctaacaagat

SEQ ID NO: 40250 - DNA, 480 bp, Glycine max
  unsure (1)..(480): unsure at all n locations
atatgatcagatgacttaatgactaaggtgttcgattgattctatgtactcgtantggtacacatagtgttttgtgcatttctattcttgttctgtgtagtatttatagtaattgttgacgtggttaagctatgatacttaagtcatatgtggcttaacttacccgcgacctcccgctccaccgaacgtccgaattgtattatagtgaaactatggtgaaaatgaattaagaattgattggaagtggcggatatacgttggaaatgaaaaagtggaggtaagaataatattataatcaaaaacatcttgtagcgaaataaagaggtataattatcggacagtttctatttgggatttgttattcttaatggaattgatgaataactaaagtgaaaataatggtgaaaacgactgagttatgtaagctagtcgaaattatagtgtttgaagaaaggatataatttctgggtagtaaaaggc

SEQ ID NO: 40251 - DNA, 417 bp, Glycine max
agcttataatatattgatatgctcgaaattatacattgtaagctctcgagaaattcaaatggtcataacttttcacacggatgtccgattcgggcaaatcacatatcgagacgctcataactaaacaacggaagctatagagaaattctaatggtcaaaacttttcacacggatgtccgattcaggcgaattacatatcgagacgctcaaaattgaacaacagaagctctcgagaaattcaaatggtcataacatttaactcgaatgtccaatttaggcgcatcacatatagtgacactcgaaattgaacaacggaagctctcgtgaaattcaaatggtcataacttttcacactgaggtccgaatcaggcttataatatatcgatatgcctcgaaataaacatcggaaactctcgc

SEQ ID NO: 40252 - DNA, 397 bp, Glycine max
  unsure (1)..(397): unsure at all n locations
tacttgtccttcatnaactgcctttgggcttggcggccacgctcaacaaaggcctttcgacacctactgtacgttgatttgactcatgttgttatgggaatgttgcgacnatcctttaaaaccttattgatacattctgagaagttggttgtcatgtggccatatcgacgtctgttagctctttggcaaggtgaccaaattgctcgtagtaataatttctcggtaagccggctgttgtaccacagggattttgttgcacttatgtgaagtacntttcagtttgcaaattgtaaatttagtgtataaaattaaagggaatttaaatctatgtagctacttctaaattaaagaaaactaaccccataaataaagaataaagtctataaaatattactaa

SEQ ID NO: 40253 - DNA, 421 bp, Glycine max
  unsure (1)..(421): unsure at all n locations
agcttatcttaatttgttnttggtaccgtgtttataaaataaaaaaaataagcttattttaattaattaaacaagcttatattaataatctaatttaaatttaaactttttataataaaaaaaaaaaaaaaaaaaaaaaaaaattgggtcttaggctaaacctaaagtgggttagaccataagcactagattggccacgtgacctgtttcctagcagcaatggcaatagagttgggggcaatggttatatagtggtaattaacagaaatgaccatggtggaaataaaaagaacaattgctcggtgtggggttgtggttgaggataaaccaaaaatatttatatattttatcctgcctctctgtagcccatctttttggtatcaagcaacatctctccttttaggttaaaattttaactaac

SEQ ID NO: 40254 - DNA, 403 bp, Glycine max
  unsure (1)..(403): unsure at all n locations
tatngcatataaagtactggatctnntggtctagttaacttcttaccaatcatatttgttcggctaagattcttctagatttaactntgatccatcaaatgttgatttttgtgcacaaattntagatgatgttgattgtttaaggaggtctccaagtaaccaagttaaaatggttctctttggattgcaatcttagaagtaattttacattggttggaatacagtgcttcaaaatttaaagatagccttcattttttagttaattgagaatgcgacatcctcttgaattcatattggtgttcctgtatttgctaagtttttgtttgttcactttgattttatttaaaagattatttcttccccaatttcatcgaagttctctttccttgttatcttggaataa

SEQ ID NO: 40255 - DNA, 454 bp, Glycine max
  unsure (1)..(454): unsure at all n locations
agctntaagtaaaaaggaagcatgaaccatgatagcttaagaatcccgaatctaatgtccatgctcantttttaagactccaccaaaacatgaaacacttggatttcccaacggactgccatttttaaggcttgcttttcaaagttcaaattaataaaatggtaaatagtcacttttatatctgaatgtgtagtttactaacaaatgtgtccctganagatgaaaatacaaaatttagttcccaaaatggtaaaaagtgtgaaaaatatatctgactcttaacttccgtccatcaccattaataaaatagtatacgtgacacaaatgaatgaatttatcactgaaatgattgtcaacgtgattatctctactttntgtcttcccactctctangaatatgaatgagtaaatagtcacttttgtccatgaatatgtaattcgctaacaaatgtgt

SEQ ID NO: 40256 - DNA, 439 bp, Glycine max
  unsure (1)..(439): unsure at all n locations
tgcttcagattncagcacagaagggcatatgtctgtgtggtggtcggcccaggagcataaaccacagagtctagcgacaagcgcagatttttgattcacggccagttgtgttaccaggttaaccaaggaatctactttaccttcaagcttcatagtctcgggtgatgaagacgaattcgtggctacttcntgcactcctctaatgacaatagcatcacttttggcactaaattgttgggagttggaagccatcttctcaattaaatttctggcttcagtaggagtcatgtctccaagggctccaccactggcagcatctatcatacttctctctatgttactaagtccttcataaaantattggagaagaagctgctcagaaatctggtggtgagggcgactggcacatagtttcttaaatctctcccagtattcatat

SEQ ID NO: 40257 - DNA, 383 bp, Glycine max
agcttggagatagtgaggttttgaatattatgtgatattggtgatgtttttgagtaaattaatcatttagaaagcatatgggatcaatattgatgtgtttattgtgagtttggaaggttgggtagccattaatgggaccaaaaacttggatttacgaatataattgtgtgcagaacttttagctcaagctacattttctagctttagctgaattttgacaaaatagagcactatgcgaattttagttgtagccacgattattagctcaagctaaatttcaattgaattgggactgcttgattttagctagagttgaattgtttagctaaagctaaatttcgaaggaattgagattgcacaatctagctaaactaaaattttag

SEQ ID NO: 40258 - DNA, 480 bp, Glycine max
  unsure (1)..(480): unsure at all n locations
atgctgaacctattattacggaactatgaatagtaagcttcattaagtggatgaaagcaaagagcttttgtaggtgctgttaacaccttaattaattttcagttttaccttatcctacattgttgtctcttcattcttattctcatgtccactctgcccaaccacgcctttccntgcaactgtgttgggagcctccaatacgtaccaaacttccatctttgtgtaaatattttaggaaaatttttcttatgataatgagtgttttgtggggaaccttaaatgtggtcatgtaaacactcttaggatgacgttaatttacattttttggactttaatgttttgcttacttttagagcttattttgtttactagtcacgtctggtttatcttggtattgcattataatttattcttgtttataaatcttatattgaagttttttgaacattaggttttaacgttgtgcaaaagcacaaaaac

SEQ ID NO: 40259 - DNA, 198 bp, Glycine max
  unsure (1)..(198): unsure at all n locations
ttttttatataaaaataataagaacatcccatgaattnttactatgcaaattttgaaaatatatcactctccctttttggtaatatatactaattttttctttttacgcattaacaaagcagtttataaataactgttgcatgaaaaataaatgacntataaatacgagttattaaatttttacttaaaagttttaaa

SEQ ID NO: 40260 - DNA, 431 bp, Glycine max
  unsure (1)..(431): unsure at all n locations
tataacgggtaatanncganaataccttctcatgttctgatctagttgttaaagagtcctccttatcccgtatattttaagaggaanaagagtatacactatgagcataaaaaagtttacattgtcattcaatcacaacccccaatatatgataagtttgttgacttttatgataattattttaaaagtcatattatcagtaaagtgtgattgagcgacagtgtaaaagtattttacngtgccaatgcatgaccattactctcatttaaattctatttggacttttcctttgaatctacacataaacaggcttggacactactccattccataagagatggatgaggtttgtgcttggctaacatcaaaaatgggccttgaggggaacattgcttagttagcaaggcaaatgcgaaaaataattcttttcg

SEQ ID NO: 40261 - DNA, 418 bp, Glycine max
  unsure (1)..(418): unsure at all n locations
agcttgcaccaacattcattagtccaatacacactcaacaaatagtcatcatccatccacaattccaatcattcatgctcaatatgatgcatgcacctgacatcaactctcatatgcaatgtggtaccatccccaaggaaatagcctaagcgtgtccacacaacactttcacttatgaaaactatgcagtaagtgtcgaggtcaccctgtcgtgcacatgcaactccccccgtcccccctcacggtgatcagcctgagtctcaagggagttcctaaccaagtgacatgccccctagtacaagtattcctcctcatgagaaactacaagtccttactgacaaagtttatactatttccatgtcatatgaagtatgaaacatgggcaccatcanatgcactgactgtggataantaaaga

SEQ ID NO: 40262 - DNA, 251 bp, Glycine max
  unsure (1)..(251): unsure at all n locations
cagagttnttatagaatgattccattggaaatcaagagtgngttgatacacttcccactcctaaaaagaaaaatcctttatacctctgaattcttaacatgtaactgtaagacattagttagcattttactttacttaaaattgttaaagatacttattctcatgctttcatttcttgtgtatatatcaatataataggatcatttacctgtgaaggaaaaacaataaacaacgaacatgtttttgaagat

SEQ ID NO: 40263 - DNA, 409 bp, Glycine max
  unsure (1)..(409): unsure at all n locations
agcttgttagtgtgtgtttaaatgtctaaaataaaataaaaattatgtaataatgtttatttgaagaaaattttatcagtgaaaataaagtattntgaatatgaattntgttgtatttttttaattagattacgttggtgttaatgatttattagtgtgttaataattgatgaacgtttcaactttcatttaaaaaaaattgtagatcatatttatttgaagtaagtattttgagtacgaaatttattttaatatgaagttgtagtatttttttaattagattaggttcatttttttgtgtgttaaaaattgataagcgttcaagttgaaagtgttatttgatgatgttttgttgcttcttgtatcatatttattntaatatatttgtagtaattttgtaattacctat

SEQ ID NO: 40264 - DNA, 433 bp, Glycine max
  unsure (1)..(433): unsure at all n locations
ngatctgagtccttggaagttgcggtagagtcattactgaaacgtaatcctggttctgatgagaaccacaatctgtnacacccaccattccaagtgcgtaatgttaagctcaattttcctcgtttcgacggacctaaagtgctctagtggatcttcaagccgagcagttatttgactactataacactccagatcctcaacgtctcaccattgctgccattcacatggagaaagaggtagttccctagtttcaaatgactaatagagctgcaccttttcagtcttggattgaatttactcgtgccttagaacgggaatttggtccatccccttacgaatgtactagatctcagttntttaagctgtcacaagtagggtctattgatgattattatncacaattcattgctcttgcaaatcgagtacagggtgt

SEQ ID NO: 40265 - DNA, 351 bp, Glycine max
  unsure (1)..(351): unsure at all n locations
agcttgcttgtggtgcttctatggaggatggatctttgagcttcaatgaagtcctttaatgttgattttccaccatggagatgcagcggaagacaaaggagaagaggtgagaggaggtgtcatccactanggaataagccatggaagaaggagcttcaccaccaagatgagtcttggataagaagcttggagaggatgctctcatggaggaaaagaaagagggagagaaagacagaggggggagcacganattgaaggaagaananagggagagaagttgactttgagttgtgtctcacaagactctcattcatcaaagttacaacaagtgttacacatgtttctatttat

SEQ ID NO: 40266 - DNA, 406 bp, Glycine max
  unsure (1)..(406): unsure at all n locations
agctntggcacaatatatgtgttatggaccttatggatttcaagtctagcaggaggtacaccaatcctatcttagaggtaaaaattggagaccataccataccacgagtcatgtggctatagtatcttgggtccatcatgcaaaacaatggagagattgagagagatgtaaaccataggatatgattatggatgatgacatgaaggcatgcttatggtgttctatgtgacagaaatatactgccgaagcttaagggaaactcttctcagttataagacttgcattgttaagttattttttttttgctcagcaaaagtagataatatatattaattgagtaccagaggtactacattacagatattggaatgcccaagactatggttccataacagactaaaatgga

SEQ ID NO: 40267 - DNA, 426 bp, Glycine max
  unsure (1)..(426): unsure at all n locations
agaaaagaccaagtgagcgagctgcaatagtccactaagatggtgatggctgagagagaagacttagttgaaagagtgtcgcccacaccgccacccaagcgcgtatctctcctatggatagcagagaaggctaaaataatcttttcaagtacgcacccgtttcttgttttacattgaaactagtaaagcagtctcattgtatgtgatgtgtgttccgaggacaacttggacttctcctacactggtaacttgaagaatacatgtgccactggtgtcattttctttgacgcttttaaagccaccccgtgattaattacctgttgtaattattaaaattaagctagacttctgcgtgttattttttttttgataaatacaagagtgantataaataattggaacatgttaacaggtcataccagggag

SEQ ID NO: 40268 - DNA, 391 bp, Glycine max
ttgcagatttggtcttcgccagtgaaaggattttgtgggtccgaaaagaggcaaatttgatcatcctactaggacgactgagaaaactggggcaaataaagagggtgaggatgagggagaaacccatgctgtgactgccattcctgtacggccaaatttcccaccaacccaacaatatctttactcagccaataacaaactttctccttacccaccacccagttatccacaaaggccatccctaaatctaccacaaagtctgtctaccgcacttccaatgacgaacaccacctttagcacaaaccaaaaacaccaaccaagaagtgaattttgcagcgagaaagcctgtagaattcaccccaattccagtgtcctatgctgacttgctccc

SEQ ID NO: 40269 - DNA, 386 bp, Glycine max
tggagaggatgcttcaatggaggaaaagaattatggagagtattagagaggggggagcacgaaattgaaggaagaaaaagggtgagaagttgaactttgagttgtgtctcacaagactctcattcatcaaagttacaacaagtgttacacatgcttctatttatagactaggtagcttccttgagaagctttcttaagaaaacttccttgagaagcttctttgagaaaacatccttgagaagctagagcttagctacacacacccatctaaaaactaagctcacctccttgacaaaatacatgaaaatacaaaaaaaaagtccctactacaaagactactcaaaatgccctgaaatacaaggctaaaaccctatactaatagaatg

SEQ ID NO: 40270 - DNA, 389 bp, Glycine max
aacggatggtcagggtttgagaagtgaaattgagaatggggtaaatctggagcaaactctcacttcacacaagtctatatcatcaatctaaacttgctcagactggttctactacgaaaattctaccgaatcaaaatacgactcctcaacacccaattttaccctatacatggctcttgacctcactttggtcattggttatactctctaccacagaccatgctatctcataagtcctataggacgtttcaagctaggattaactgactttaacctccaaataccactacatccagagttggccttccaactctcatagactcactctttatccactcataacaacatattctcaccttctaactctagcttaactctacccttcatcc

SEQ ID NO: 40271 - DNA, 396 bp, Glycine max
tcaagcttgctctaaatttacattgatgtttgtatttattggaggaggttgtatgtcatttttgttttaagaatagtatcccactggtaaaactaactttccaaatgtttgccttcgcaggaaatgccccgaggaagcttgcctcaaagaggtccaggaaggacaaggcagcagaaggaactagttccgctccggagtatgatagtcaccgctttaggagcgcggtacaccagcagcgcttcaaagccatcaaggggtggtcgtttctccgggagcgacgcgtccagctcagggacgacgagtatactgatttccaggaggaaatagggcgccggcggtgggcaccactggttactcccatggccaagtttgatccagaaatagtccttgagtttt

SEQ ID NO: 40272 - DNA, 392 bp, Glycine max
agctagctctaaagctacatagatgtacgtatctattggaagaggttgtctgccaaatttgtcgaaagggtagcatttctaggtaaaaccaactctccaaatgatggccttcacacgaaatggccccaaggaagcttgcatcatagaggtccatgaaggacaaggcggccgaaggaactagctccgctcctgagtatgacagtcaccgctatatgagcgttgaacaccatcagcgcttcaatgccatcaaaggatggtcatttctacgggagcgacgcgtacatctcatggacgacgagtatactgatttccaagaggaaataaggcaccggcagtggacatcactggttactcccatggccaaagctgatccatatataatcctcgagatt

SEQ ID NO: 40273 - DNA, 384 bp, Glycine max
tgaagaagttttgtcttttacatgcccaactttcttaagtgttatttgtattgattggcgtattgtgtgttgcatcttattctctatcgtttcatatgtgcatcatacatcatcatgtaggagtaagaagaaaggttctaaagttataaaatctcttcagtgtttgaaactctatcttttaatcgattataagctaatcataatagattacacaagtgtttgtagcttccaaagaagtttcttgtatcaatttaatccgtaatcgattatacagttcatatgagacaatgattggtttttctggagcctttgctttaatcgattaccaagtgatataatcgattacttctctcttagaagtgtttcagaagtgatcgagaacac

SEQ ID NO: 40274 - DNA, 410 bp, Glycine max
  unsure (1)..(410): unsure at all n locations
ttaagtcacctgcggcatgcagcttcctgtggcttctttgagaagctttctcaagangatnctnngagaagctacatccttatctatccacccctctattaactaaattaacttccttaaaaataattacggatgaaaataacgaaacaaataatcaaacatcaaacataattactaataatatataatatatatcagggtgttacagcaaccgccttctgtaggaacatcctagaaggcccaagtgggtctggtttctatatgcacccncatttntactaaatacaccctacccttntttggtgattctttntccgtaacgttacagaaacttacgaattttgtaacgatactttgtttctttccgtaatgttacggaaccttacngattacgtaatcatccctttttt

SEQ ID NO: 40275 - DNA, 333 bp, Glycine max
gcgctgagtgaaatttcctctcgggttggggtttgcgctgagtgcgattccctctcgggttggaattacgcttattgcgcttctcgcgccaagctagatgtcaaaaattattttttttttcaaatcccaacggttgaatggtgtagactttggttatgaacctatagtataaatttgaaggcgatccaacggttaacaagtttgagatcgtgattttaccagagcacgcttagctgaaacttgaaatctcataattttaacctaagtcattaaaactccacataaatcaacattcatatcaagcaaatcacacatggcaaatttacaccatac

SEQ ID NO: 40276 - DNA, 365 bp, Glycine max
  unsure (1)..(365): unsure at all n locations
agcttcccgtatccgtacttggaagggatttgattttcttcttcctaaggcagtatcagtacaattctgatatggctcctgaccgtactcaactgcagaatatgttcaagaaagagggtgaaacctttaaggaatatgcgcagtgatggagggatttggcggcacaagtagctcctcccatggttgagagagagatgatcaccatgatggtagacactctgccagtgttctactatgagaagctagtgggttacatgccgtccagctttgcggatctggtgtttgccggngaaagaatcgaggttggattgaagagaggaaagtttgattacgtttcctccacaaacgtgaatgccaaaagaatc

SEQ ID NO: 40277 - DNA, 378 bp, Glycine max
  unsure (1)..(378): unsure at all n locations
tgcctcanagaggtccaggattgacaaggcttcttaaggaactagttccgctccggagtatgatagtcaccgctttaggagcgcggtacaccagcagcgcttcgaagccatcaaggggtggtcgtttctccgggagcgacgcttccagctcagggacgacgagtatactgatttccaggaggaaatagggcgccggcggtgggcaccactggttactcccatggccaagtttgatccagaaatagtccttgagttttatgccaatgcttggccaacagaggagggcgtgcgtgacatgagatcctgggttaggggtcagtggatcccgttcgatgccgacgctatcggccagctcctgggatatccgttggtgttaga

SEQ ID NO: 40278 - DNA, 439 bp, Glycine max
  unsure (1)..(439): unsure at all n locations
agcttcacaccaaagcaactcanaatcttgttatctaaaatccctcaatttaatggattttcaaggtttgagaagtgaaattgagaatggggtaaatttggagcaaactctcacttcacacaagtctatatcatcaatctaaacttgctcaaactggttttactacgaaaattctaccgaatcaaaatttgactcctcaacacccaattttaccctagaaatggctcttgccctcactttggtcatttgtttttctctctagcacagcccaagctttctcataagtcctaaaggacgtttcaagctaggattaacttactttaacctccaaataccactaaatccagatttggccttccaactctcaaagactcactctntttccactcataacaccatattctcaccttctaactctagcttaactctacccttcatc

SEQ ID NO: 40279 - DNA, 379 bp, Glycine max
tggggaattttgatggttgttgttagatgttttcaatgactcattaggatttttaggtttatgtcattactttaaacaacagtcacaatgctaataatatggataaatttgatgcccttgtctctcattctctcacaattatatctttgcttatttaactttcaatggaatgtgaatgtaagttgttggtttgtttgctcaagtgacatgcgctcctgagttaatatctaagtatgttcaatcagaaattgttcgttctccacgtttggtgaggttgccgtaaacgatgagtaaagtaaaaaaaaaaaaattgatcaaaaagaacatacattcatgtggacattttcttaatctgtcaattaaatatttcgttctccac

SEQ ID NO: 40280 - DNA, 432 bp, Glycine max
  unsure (1)..(432): unsure at all n locations
agctntgagaagcatgtgatcctttggttttcatttttacattcagcttgatcctttgtctacaatctccccctttttgatgatgacaatccctgaaatcaagacaagctatatacaagatgatagcacgttcacacaacccttactccccctatcttttggcatgtatgcctaagtttaatgattttaattgatttctaacccaagttctaagttctctccccctttggcaacataaaaaagaactaagcaaaacaatcaatatctaaacagagccaaacattaaaccaaaataagtccatacattgtcataaccaaccaaagcaaagtcgagaaatataatagaagtgcaagattgcgataactagagcaacaaaaagccaaatacatggcgataaaacaaactactaataatacttaatcataataata

SEQ ID NO: 40281 - DNA, 378 bp, Glycine max
tcaagatggggcatgagatttataataagttgccacaatattagtattttgaagtgatattgtcttcaaggatcaaaaccttgaaaaatcaggaagtgggccactattgaatgggttgaagctgagattcaacgactctaaattttgttgtgcacaacaaatttctggtaagtagtcatggagttggccagacaatttattgctacaaaggatcaattgcttcaattgacacaaagtgcgaaaattttttattattctaccatcaagttcattatctttgagatttagaaattgaagagaaatcatgtttgcaaagacatttgaaacactatgcaaagaatttaatgagagatcaagagatgtgaggactttgctaac

SEQ ID NO: 40282 - DNA, 449 bp, Glycine max
agcttcattctacacctaaaaaagaggatgagatagttgcacaaaagagaaagcttcctgatcatgagggagctaacaaaaattttcatgcaggtggaccttcttctagtaattctgacttgcagtagcctcctatccctcttccatttccacctagagcaattccaaacaaaaagatggaagaagtggataaggagatcttggagaccttcaggaaagtagaggtgaacatacctctgctagatgccatcaagcaaattccaagatatgccaagtttctaaaggagtcgtgcacccacaaaaggaagctcaaaggcaatggaaggattagcatgggcataaatgtgtcagcattgataggtaaatctgttcctcacattcctgagaaatgtaaggacccaggtactttctgtataccttgcattattgggaacaacaaatttgagaat

SEQ ID NO: 40283 - DNA, 393 bp, Glycine max
gacactatagaatctaagcttgacaggaattacttgtatggttggatgtttaattctggttgttcctggtgcggagatgatggtacagcgggtgaaccagaagcggaagtttcttttggtgaggtagccatggaaaagcagagcgtttggaatgatttcgtaaatctcagaaaactattgggaaatgctggtgaaaacacgaatgccaagcagatataaatttgaatgaagaatgtagaggggcgtgtgaagcaacggtcgaatttgctttgtggtgaacgtgctattaatgttaagtgattcgtttgggcacgttcagattgctgtagttgctataattcctctagcaaacaaatgcccagcttgcccctcagttttccaaactgatttgca

SEQ ID NO: 40284 - DNA, 356 bp, Glycine max
ctgcagctcttggatgctacttttatactttcagatcataatgcatcctccaaacaaggagaaaatggcattcatcattgcagatgccaacttttgctataggaacatgccatttgacctcaaaaacataggcgcgacatatcaacgactaatagaccgagtcttcaaagaacagatcagacgaaaaattgaggtatatgtggacgacatggttgtcaagtctcaaagcataccctaacatctggtggacctggaagaagtatttgggaactatgcaaatacgacatgtgcctcaaccctgaaatatacttttggggtaggtggcgacaagttcctcggcttcatgatcacacatc

SEQ ID NO: 40285 - DNA, 310 bp, Glycine max
cttagttgctgtgatgctcctacaaacagctgtctacaatgtactctcacccatcttcaatccttttttatgcctgaaccaacatgaccattaattcattggtggaccatttgtccctatgtgtatagaagaaaatcttaaacgatccatagttacagtggaatggtgtttagaatgaagtgcactataaaggactccaacatatcaacctctagcttcttaagtcgagctgaaatctctcacatttgcattatgtactcacacgcacctttcacactggtgagctgaagagaagagaacttcatgatca

SEQ ID NO: 40286 - DNA, 414 bp, Glycine max
agcttgccacccagctcgcccaggcgatttaggttgcttcctcctgaagcaaccgccttctggaggaattttctagaaggcccaagtgggtctggttgctatttgcacccccatttttactaaatactccccttgctcttttttggtgattctttttccgtaacgttatgaaactttacgaatttcgtaacgatgattgttttctttccgtaatgtagcaaaaccttacggattacgtaatcatcccctttttaccttccggagcgttacagaactttacggattgcgcactaacacttccttttaatttctggcatgtcacagaacttcacgaattgtgctacaatactttcttttgactttcggcatgtcacagaacttcacgaactgtctagcgatgggtgccaagtacct

SEQ ID NO: 40287 - DNA, 369 bp, Glycine max
tataagattataattgccttaatcatttctttatatgcatgtgaattaggacgcatcaacaagaatcaagccaaggctattgtgcaagcaatcaatggggcaaaacacaccacatgattataatgatggaaggctcaaattctcacaaaggtaaaatcatcactttcaaaactatcatgacatgtagagaagaatcaaggatttcaagtcacaaaatgtcaagaacttttattttcaaaacaattacccatttatttcttgaacatatcctataattcaaagaaaaacatgcaaagtcgtgcgtgcacacgaaattgacccaaaatattaaacttaaaatccgacgaaactaacaacattaacaaatta

SEQ ID NO: 40288 - DNA, 390 bp, Glycine max
caaaataacaagaattgcagggtgatgttttagtgatctcttgagcagagggaataaaatcaaagtataggtgatgcaacacatgtcaaactctacctaacacattagagagacgaactacaaatcaaggtagcacgcacctggcttccaccaaaaacgggattattgttgacactatcagcagaactttctaacatatttcttagatgagatagtttcttcataagattatgagcaacctcttccgcatctaacaattgatttttagaaaactcaaatgctctttctgcatgaagccgaacagaagcacagttcatacatgcacaaacccctctgcatactcttggatttctttataaaattccttgtttcaaaccaacagagggaact

SEQ ID NO: 40289 - DNA, 386 bp, Glycine max
gcgtgatccatcaaagatatatggatgtctattaccagtttttattcctgatcaagcaacatatgggactcttcaaacggtttttgactttctcagattggttataagtttttctgaaagttataactcttcttaatggtcttcttgaccagacacgaacagtctataaaagcaccgctttgctttgcattataaatcgatacattctttcacactctactttcccaatcaatcctttacaagccttgactctctatgaacttcttcttctgacttgtaccaaaagctttctgattttctaaaccttgaaaacttgcgctattgatcttttcattctgttctgcctttgccacaaaaaattcaccaaggactaaccgcctgaattc

SEQ ID NO: 40290 - DNA, 559 bp, Glycine max
  unsure (1)..(559): unsure at all n locations
cgcccccccaccacattcactgaggaatgaagaacgcctcaccatcgaactagcacaaccaaaacaccgtaaggcncnnntttgaaactgtagnacctcgaagaccccgagagncaccaggagcatgcagccgcgacaccgaccacaccanaggtttaggattgatggccgacactcccaacagnggcggcggcaccaggaaaaaactggacgcacacacggcgacagtggccaactgcacaaaaatgctaaacgaatactgccacagggtctagcaggggagaccgcagcaagggacaagtgaacctaaaagactcaaaaccatcagaatgcatcacagccgcaaacgcaaaaaacgcaacagaagacacgagagtcacccgttatacctccgaggtcgcggcaggaccatacagagagggcaccgccaccaccgaaaaagaaagggcaagagacaaacagaactgagagcggacgagacgccaatacgagcatgaaaatggaaggagaacaactaaccggcaaaaagcggccacaacaaccaaggaggacaacgacg

SEQ ID NO: 40291 - DNA, 389 bp, Glycine max
ttgaaatttatgactcaaaattaagtataaattatgtttactttcattgtacttcggtaagacttggttttagtttccgtttgaatttggtctttgtaatttccaaaaagccgtggtttttgtctctcctcacagtgaaaaagtgtgggatgagaccaaaaccactgtttttctaaggttagggaccaaatttggtttttctgaggttagggatcaacttgatcagagttaaaataggaaactaataccattttttttaccgaaagtacagactctaaaaacattttagtataatcataattaacaaaaaaaaatgctccaaccttactctcagcttttccacccttacgtgcggtagagcttccctgcatatctgcggcatcaaccac

SEQ ID NO: 40292 - DNA, 636 bp, Glycine max
  unsure (1)..(636): unsure at all n locations
ccacacacacccacaccantcctnccggaataatcacnaatatacagtcangagaccgtngcgcacacnannnaaccaaacancaaggcgagaggncgcnnnatggaaacantggtagacaccncggnnganccncnnanagncnnaccgagcgaggccacgcacacgctatacaactaacgacggctagcacgacaatatgtgatcgtagtacgacacaacggcacngcancgagcgacgcgcgtcagaaccacccaagacacacatacaccgcgaaacgataagacgagaagagaaagaccaccacaaacctgaatggcgatagccccacgcgaagccacgcacaacacgaccccgaaaaagccctcctggcgcgaggaggagcaaaaacgacggccaaagggtggagcggagcaggggcttcaatgagagaaaggaggagaaggaacaagcaacgtgaggaagagggagagcggcaacagattgccccgcgtcggccgagacgacgaaagaggaaagcttcacggcacaaagaagcggggccgggtaaggcgaaagaaaaatcaggcgcggccacacgaacgctaaagagggagagcgaaacgggccaacgaaccacgcgtgcgcgggaaccg

SEQ ID NO: 40293 - DNA, 385 bp, Glycine max
ttggccttctgttgaatcatctttggtgggtttgtttagttttagttatcttggaagggatactcaaggctgttattaaacttcatcgatcgtcaccaatggtttgctcaaaactaattacatgtgtctctatctctatctctatacttcttaatttctcttttgcaccatatgaacaattcaaattgcttactcttcccatcttcatgttttttaatcttttaattagaatgatataacatttacttaattttttttaggattaaccacttctatttggcttcaagtcttgactttttctggttttggatctcatcctttatagcacttgaaattagaaaggatatatatagtttgctttcaaaattctttttaatcatggaag

SEQ ID NO: 40294 - DNA, 216 bp, Glycine max
cttgtattatacgtagatgatattctgcttgcgactaatgataagggtatactatatgaggtgaaacaatttctctcaaagaactttgatatgaaggatatgggagaggcatcttatgtcataggcataaagatccatatagaaagatctcgatgcattttacgctcgtctcaagaaacctatatcaacaaagtcttagagagaattaatatgaaa

SEQ ID NO: 40295 - DNA, 384 bp, Glycine max
  unsure (1)..(384): unsure at all n locations
tatacggcctangatgtggttttgtgactgttttcaatttaaacacaagtcttttacttgccacattggtacaactccctccatcaatgatcaccatgcaaactttgccattgatcaaacatctagtgtggaaaatgttttctctttgactttcctccatagacttcaattgatgaccaagtaaccgcctaatcatcaacaattctccctccagtgttttctccacttcctcctcatcatcctcactctcttctcccttttcaacttcagactcattaatgtactctccatctctaagaatcatggctttcttgttagggcactcatatgcataatgtcccaagccttggcaccaaaagcacttcacatcctggctcttttttt

SEQ ID NO: 40296 - DNA, 375 bp, Glycine max
  unsure (1)..(375): unsure at all n locations
ataactcggatgtccgantctggcgcacaattgatcgagacacttgatattgaataacagaagctctcgagaaattcgaatggtcctaacttttcacacggatgtccgattcgggcgcataatatgtcgagacgctcgaaattgaacaacggaagctctcgagaaattccaatggacataacttttcactcggaggaccgattcaggcgcataatatatcgagacgctcgaaattgaacaacggaagctcccgagaaattcaaatggtcataacttttaactcagaggtccgattcaggcgcataatatatcgagacgctcgaaattgaacatcgaaagctctctagaaattcaaatggacataacttttcactt

SEQ ID NO: 40297 - DNA, 436 bp, Glycine max
  unsure (1)..(436): unsure at all n locations
agctttgacttctttcaacaccattttccaggtttgttgtcttacactcctatcattggtgtcaccaccatcagaaaattgggcccacacacttcgacactttccttctccactaaattcctcctcgcatcctgccacagtctttagcagttctgattgcagcaagggacaattttccttaagatactcaaaaccatcagattgcatcacagctgcaagccagaataaagtaagaaatgatatgagagtcaactgttatacatctgaggtcttggcttgatcatttaatgatgtctaggctatcactgaaaatgaaagttctagaagacaaacagaactgtgtacaggatgagatgccaatatgtgattganaaatgtagggagaacaaattgatatgcaattatgcatgcaattacaaactatggaagtacatag

SEQ ID NO: 40298 - DNA, 281 bp, Glycine max
tatacaaacttgctgatctaacttcgtcttcttaagccgagatggggaaactgagggtaacttatgggagaaactcagtacattcgaccttgttgtcttctattataagcgtgtatggataagtgcatccaaacacggcctaaattcatgatatccacttactgcctgatgccacctcttactcatttctatcaactgtttttggagcgaaaatgtatatataattgtcaatatcctgattgaattgcacatatagcactctataaatgctggaggcaagg

SEQ ID NO: 40299 - DNA, 378 bp, Glycine max
tttcgcaaagcttacggtattatctgggatttatccatggtagaagtctccacagaggccattgcctccctcgcccagtattatgatcagccgatgaggtgcttcacctttggggacttccagctatcacctatggtagaagaatttgaagagatcctaggaggccctctatggggaaggaaaccctacctcttctcagggttctatccctcattagctagaatttccaagatagtccaaatctcggcgcaggaattagaccacaggaagcaagtcgaaaatggggtggttggaataccgagaaaatatttggaggcaaaagcaagaatcttggcaggtaaaggcgagtgggccccattcatagatattctcacacta

SEQ ID NO: 40300 - DNA, 482 bp, Glycine max
  unsure (1)..(482): unsure at all n locations
gatccttgagtcacctgcggcatgcaagcttcccaccaatggtatttaaaattttatgatgtcatttcttcattcagctntgaagagaatatcatggatcactgtatataccagaaggtcagtgggagtaagatttgtttccttgtattatacgtagatgatattctgcttgcgactaatgataagggtatactatatgaggtgaaacaatttctctcaaagaactttgatatgaaggatatgggagaggcatcttatgtcataggcataaagatccatagagaaagatctcgaggcattttaggcttgtctcaagaaacctatatcaacaaagttttagagagatttaatatgaaagattgtttaccaagtgtagctcccattgtgaagggtgacaaacttgctntgagtcaatgccccaaaaatgattntgagcgggaaaacatgaaaaatattccatatgcttcagcagttggaagcct

SEQ ID NO: 40301 - DNA, 375 bp, Glycine max
tgatgtcattcaaaacacatttatgttacctttatgaagacttaacattcattgtttatttattcgtattcattatgcgatataattcgttgtaacccgtcactaaccaattaatattatcaactactcgtttggttaagcaaggaaattgttggtccaacaaaaatcatttacgcttacagcatacatcattgtcataattgacaacacataatgacatgcatgcgtgtaacagattgagcatgacaacacattggttgacttcagtacacattttgaaactagcagtcgctcaacaacacattggttgacttgactacacattagcgacaacacattggctgacttgactacacatttacgcgtgtctatttt

SEQ ID NO: 40302 - DNA, 368 bp, Glycine max
  unsure (1)..(368): unsure at all n locations
tgggggcttatgtactgtttatgatcgacatatgccatgtggcacttanagacacattccaccctccacgttagccctgctacaggagcacggatgtctgacccttagcaaccgagctccccaaccaacaggttatctctaaccaaactactattgtcacaacctacccttctgcgggagggcgacgcgagactcgcgggatgcctgttccatcaaaggaatacgcgcggagtcgccaccaacgtttatttgaggaaaacgtcggaaaaaccggaaaagatgcgatctacgaacttttaagtgaaaggttcgggagttgtatttacgcacggggaaggtattaacaccccacacgtcatcgaatgtgc

SEQ ID NO: 40303 - DNA, 433 bp, Glycine max
  unsure (1)..(433): unsure at all n locations
agcttgttgaaattgccatgtttggangtgnttaacatacccattctgttttagggtttttgtgatgatgtttgtgatgtttatatgctgaaattactgatggaaatctgttagagacgaagggtagaactaacctaaggttagaaagtgagaatgtgatgttatgagtggaaaaagagtgagactttgagagttggaaggttaagtctgaattctgtggtaaatggaggttaaaatgagttaatcctagcttgaaatgtcatttangacatgtgagaaaggttaggctgagctagagagaaaaacaaatgaccaaagtgaacaaagagccatttctagggcaaaattgggtgttgaagagtcaaattntgattcggtggaattntaagtgtaaattcagtttgagaaagttagattgatgttatggacttgt

SEQ ID NO: 40304 - DNA, 370 bp, Glycine max
ttgatgaattctagaagatatcacatgtttgtcatcatcaaaaagggggagaatgtgaatgtatgtatacatgattttgatgatgtcaaagaagaatcaaacaaggctgcttcaaatgataagcatttgcttcaacaaacaaagccttgtttcaagattcactaaagaccaagccttgccttaaaacagagtgctttcaagatatgcaaggctctggtaatcgattaccagaagacagggttgagaaatagctgttgaaaaagattatgaatttgaattttcaacatgtaatcgattaccagcaacgaaactcctgaaattcaaattcaaaagtcatgactcttcaaattataactgtgtaatcgattac

SEQ ID NO: 40305 - DNA, 396 bp, Glycine max
  unsure (1)..(396): unsure at all n locations
tagaacttaatcggattgaattttatatgccaacttttcttattgaattataggaatatgatttcatgcatatatgtgcgcgccaccactccaaaataagcacacattatttatactagctagagaatatgtagccatgatgtgccagaagaaaatgctgatgtggccagttgaacaaataatcaaatgtattcaaattgaaatattattggctgaaaaatgataatgaaaaaagcgtccattgatttagctctccatcactctttgtaccgttttgatttcgcaccatacgcttattagtccgaaggaaagagaanagaaaagtggtcgcgtgcatgttctatacactcatgagtagacttttatcttgatacattaatgcactgctgtggatct

SEQ ID NO: 40306 - DNA, 387 bp, Glycine max
  unsure (1)..(387): unsure at all n locations
gactctcacaatctaagcttgtgaaagtgacaacgcagagggattgttcaacctattcttcggcgggagggcgacgcgagactcacaggtgcgtcttccaagaaaggaaaatgctcagagttgccaccaacgtttatttgaggaaaacgtcaaaaaaaccggaaagacgtggtctacgaactttaagtatgaaaggtttgggagttgtatttacgcacggngaaggtattagcaccccacgcgttcgtcacaagggacgacagcctttaaatcaagtgtgcaaacatgacttcaatttgttttattttcgcttttcttacgttttatgtccttttgtatttttttttaatctttttggggccgacaagggtgtttcccttgctccta

SEQ ID NO: 40307 - DNA, 269 bp, Glycine max
ctcaagcttgctcgtggagcttctatggaggctggatcttttagcttcaattatgtccttcaatggggattttacaccatggagatgcagcgaaaggcaaaagagaagaggagaagggaagcaccatccactatggaataaaccaaggaaaaaggaacttcaccaccaaaaattggcttggaataaaacatgaagaggatctttaatggaagaaaaaaaaaaaggaaaaaaaaaaaaaggggaaaccccaaattttagaagaaaaaaag

SEQ ID NO: 40308 - DNA, 385 bp, Glycine max
tgtagagttatgtctcgtatcggtttaatcgttttcagtcttatcataatcgattacatagttatttttgagacaatgattgattcattcagaagtctctatttaatcgattaccatgtgatataatcgattacttttctttctataagtgtttcaaaagtgattaagaactctttaatcaattagattgaggatctaatcgattatattgttcttgagttgtttccagtttttgggaagaacactttaatctattaaaaagataatctaatcgattactttgttgaattaatcgattacattgtagatttaatcgattacaagcgattataaatgttttttctataaatagccaccttgtattctcacttctatgaagaacaag

SEQ ID NO: 40309 - DNA, 398 bp, Glycine max
aactcaagcttcaacttttattctatggagagaaccattttttttcacctgttgaaacagtagttttacagaaggacactttttttttttctatgaagtacagaatgacacttttaatcactttagagtaacgttaatattattaactcaattgttttatttttaaaaaattatattaatcactaggtctttaaattgtttgcaaatttttaattaagtttctaaattaaaagaaaattgtaatcgggtccttgagctaataaaattttatatttagatccttaaaattagataataacaacttgaaaacactaaaaagtgtcaatttgtgatggttttaaatttttggagactcaataataataataataataataataataataataataataatt

SEQ ID NO: 40310 - DNA, 390 bp, Glycine max
agcttgtagtaaatatattggaagttcttaaattttcgcttaccatttttacttttttatgaattttcttattaaatgtaaatctaatattacaaaatttcattttaacataatttaactgtactggttagtatatgtattagtgttgatgagttatttgcacaactttctttgcttaaactgcttattaaataaacagtatttctcaattatgaattaccttatggtaatattttgcttgtgtatattagaatttcaatatttcagctttagttcatgtcttttgcaattggtctatctcatacttactgtgcctgttcactatgatacacttatgtatgaatcaacataaaccttagaagtccattcttgtaatgtaaccatttgaca

SEQ ID NO: 40311 - DNA, 447 bp, Glycine max
  unsure (1)..(447): unsure at all n locations
agcttgttgattaacgaaagaaactttattttatctagttnttatagaacttaattttattgaattttatatgccaattttttttattgaattataggaatatgatttcatgcatatatgtgcgcgccaccactccaaaataagcacacattatttatactagctagagaatatgtagccatgatgtgccagaagaaaatgctgatgtggccagttgaacaaataatcaaatgtattcaaattgaaatattattggctgaaaaatgataatgaaaaaagcgtccattgatttagctctccatcactttttgtccgtttttgatttcgcaccatacgcttattagtccgaaggaaagagaaaagaaaagtggtacgcgtgcatgttctattacactcatgagtaagactttntatcttgatacatttaatgcactgcatgtgggatct

SEQ ID NO: 40312 - DNA, 329 bp, Glycine max
  unsure (1)..(329): unsure at all n locations
tggaggacaacngngnnggattattctaagatacttaataagggtcgatgatttgtcctcattagtaacttaaagtaaagagtaaagacaaaaaggctataatactctaagcttagcttctttaaggtacgcattattttatctctaactttttaacttttactcattctgacttgagagttgcagcctatacactcccattgcgaagctagacaagttaccattgaaaaaccagcacatatttcgcaattttacaaaatacgagataaaaatgaaaaaaaaaatacattgctcttttntagtattccttaattagtcatggaaacaaa

SEQ ID NO: 40313 - DNA, 563 bp, Glycine max
  unsure (1)..(563): unsure at all n locations
ccccacaccctccaccgtagactacacgccggcacgtcgaccccgaccgcatccagcggannnacgcatgaaacctagtacctcgtaagaccccnanancnaccagcaggcaagacaaccccnacgaagccgccaacaaaggttgtttcattgattagtccaccctacacgagggcggacgcgggagagactcggaacaccatgagtggagaccgtacgacaggggcgtgatacccctggggtgcgctcaaggaacgtgcgagcggagtgctcgacaccctatgggcctccacctgatcgcggttagccatcagcgacgctaagtccctgctcatggcggcactccatctactgcaatgcgggtataaaggcgccggagaggaatagaatccggcatgactaccatgggaggagcggacgccccgacaggagacccgcaatagaagccacaccgagcgctcaccacgggtcagaaagagacaaagacgagagacccgaaggtatgactcaccgccacccaccatgggcgtcaagggacctaccacagcccaacgggccacgcc

SEQ ID NO: 40314 - DNA, 368 bp, Glycine max
  unsure (1)..(368): unsure at all n locations
ttctttcctagtgtgcaatttaaagaaaatgataatgatcaacagagccttttacacttaatctttattcaatttttatgaaggtcaatcgatacagtaaattggtataccacagccatcagagaactagtttcagaaattctctaaaagctggtgctttaattagatagatgctgccaaacggtgttttattgcccaaatgaaaaattctttattactagtaaagtagaactgatatatcatttctgaatttgttatggcagcttcatacttttccagaaggaaaagtgtatcaagaagatgtgcctataangcggttgaaatggggaactgctagcctaattgttcgagcacctataactccaatt

SEQ ID NO: 40315 - DNA, 439 bp, Glycine max
  unsure (1)..(439): unsure at all n locations
agcttgtctgagcaggaaaagngcttcctaagcatcttcctgacaagcctctgaacctgtctttaaggctgtaaccagatggggaatgctaagggttgctggttcagctgctctaagtcttgggaagttggtaaatagagaatttaaggctttcagatactcgtcattcacagttccagaagcccataaatctttctcaatagcggctataanaataaaaaccttgttagaaatataaagtggggaggggtagatgtgtttctgcttaaatgaatcaccattgttcatcaatcaattctgtgaaaaaactgcaactatatacatgtaaattatgctttgaagtgcaatctgtaattgttcaaattacattaattgaatacttaaaaagcaataagtgtctatctttgctacaagaggctatataagcacaactgcagtc

SEQ ID NO: 40316 - DNA, 344 bp, Glycine max
gcgcttcaacatgatgactgacaagtatggcataaaccctggtatcaatcattattcttgtatggctgatcatcttggtcgtaaaggacatctcaaagaagctttagaaattattaaaagtatgccttctgaacctgattctggaatacggagtgcattgctctctgcttgcaaacttcatggtaagatggagatgggcaagcatgtgtctgaacagctatataaactggagccccaagtggcacgttccatacgcggagatggctaacatatatgcatcagctgaaatgtgggaaggcattgcagctattataagaaatatgatatatcttcaagtcatgaaa

SEQ ID NO: 40317 - DNA, 437 bp, Glycine max
  unsure (1)..(437): unsure at all n locations
agcttggatttccttttagtagggaanctantctttctaagatggagccaaacccagtcaccctcattaagaactagctcttttcttcctctattgcctttagttgaatacacctttgtttggttctctattttgttcttaaccctctcatgcaacttctttacaaattttgacctagattccccttctttatgtataaaagaagtgtccagtgggaggggaatgaggtctaacagtgttaggggattgaacccatagacaacctcaaaaggggactgcttggtggttctatgaacccccctgttgtaggcaaattctacatgaggaagatactcatcccaagacttatggttgcctttcagaagagcccttaanagggtggataaaaacctattcactacctctgtttgcccatcagtttgtggatgacaagtggt

SEQ ID NO: 40318 - DNA, 378 bp, Glycine max
  unsure (1)..(378): unsure at all n locations
tagccccctcaccccaccttatcttgccttagtccaaagtttgtcattcgatcaattttattttattagtttggcaaggaaagttgtttgtaactgtatcattcaaattttattgcatatatcaattatgatatatatatatatatatatatatatatatatatatatatatattatatatatatattatgatcaattttattttattagtttggcgaggaaggtacaaacagaattattatcaattacttttttgggaagcaaaattgaagttcaggcaaatgttctcttcccagtacttcattagaatactattgtttgccatctaatctttcttgcactgaggagaggagaacacgtgattatgtttcttcattn

SEQ ID NO: 40319 - DNA, 447 bp, Glycine max
agcttctatagaaggtttgttcctaatttctctacaattgcatcacctctcaatgagctggtgaagaagaatgtggcatttaactggggtgaaaaacaagagcaagcatttgatttgctcaaacaaaagcttactaaggcacctgttctagctcttcctgacttttctaaaacttttgagctagaatgtgatgcctctggagtggtagttggagctgtattgttacaaggtgggcaccctattgcttattttagtgaaaaacttcatagtgccaccctcaactaccccacctatgataaagagctttatgccttaataagagccctacaaacttgggaacattaccttgtttccaaggaatttgtcattcatagtgatcatcaatcacttaagtacattagagggcaaagcaagttaaacaagaggcatgcaaaatgggtagagtac

SEQ ID NO: 40320 - DNA, 377 bp, Glycine max
tttattgagaagtactgcactcatagacagttccatggtgatgcaccacaggccgtggacgcgccgccacgtcatcaggctggtccagccggatcatttgatacagagcagtatttgcggcatttggttcgccaacaggcggccaaccaccgggcacatgtacagactcatgattgtctttatcagatgagtcttagcctgcagagccagggctttacttcttttccgtgccctactctggaccagttcagggcagaggttgtgtggcctggagattggcccgagacccgggcaggagaggcaccagcggaggcaccagcagaggctcccgacgaggcagatgaggcccgcgaggacgaagaggtgaccgatttact

SEQ ID NO: 40321 - DNA, 295 bp, Glycine max
aatacggtcatggtcccgatcggaaccagctttagagtatgactaagcgagagcatgagtccattaatgaatatgcctaaagatggagagatctcgccgtccatgtcgtgccgcccatgacggaaagggagatgatcacaatcatggtgattacgttacccactttctactatgaaaagctgataggctacatgccagctaactttgcggatctcgttttcctcggagaaaggattgaatctggattacagataggcgatgtctaatatgcttccaacacaataaaatatccccg

SEQ ID NO: 40322 - DNA, 324 bp, Glycine max
  unsure (1)..(324): unsure at all n locations
tgaagctgttcccccantttttccaangantatcagcgccgannccccattcggagaagctgctgctccccctgattccccagatggagaagctactgatctctctgatttcctatctggagaaactcgtgctctctctgaatcccctggttttcatctaaataggcgaagaagaggcgtttaattcaggtaaccaagaactggcttaagacctttaaaatcctggaggattttgcttttggaataaggattataactttattactttcagtacattgttttttttagaaattttgattcacgtttatatatacttgtgctttt

SEQ ID NO: 40323 - DNA, 414 bp, Glycine max
agcttgaagtgagaaagtgtttattattagtcttcctacttttatttgttgaccacagagtggtacctggagatatgtcgcgggggtcaggagaccttggggacgttaggtggggtgctattgcctaaaaccaagcttgaccaatcccgacccaacccgggcatagtcagtcagtgagaacctgtgatgtacctaaacaggcgagctcctggcagtcaaccaataaaagaacaaagaccacaaagtaaggaggcttgtgtggtggctggccagctatggatcttgagtgatatctggaatatggcttctggtaattgattaccaagggtgtgtaatcgattacaaggcttaaaaatgaagacaataagttgagatggcctctggtaatcgattaccaaggagtgtaaccgatta

SEQ ID NO: 40324 - DNA, 356 bp, Glycine max
  unsure (1)..(356): unsure at all n locations
taagatttatcttaacaatcttagaaatcattgatcatgaattccgaaatatagggggagtaaacgctntatctatatacaattgtttgttgtttgcttgactcttgatttcaggtattgtattgtcatcatcaaaaagggggagattgtagatgcaatggtctttgatgttttgatgatgatcatgatgatgtgttacaattgatacaaatgggcttttcaagattgaattcaagacaatacttcaagattacaagtcacaacatcaagatgatcactagaatattaggaagggaattcctaattgaattagcaaaggtttggccaagtgatttaaattaaaaaaagtgtttctc

SEQ ID NO: 40325 - DNA, 465 bp, Glycine max
  unsure (1)..(465): unsure at all n locations
ccgccgccaccccaacaaaacgaacatatgcaaccccacacgancaaccncacccaccccaggagcnncccncntgaaacgtggacaccagcgacccaaganaccgcggacgcaacacccccaacaacaaaaaggtggagaaggaacgaaaaagccggccccgcggaaaccaaaaacccgaaacacgaaaaaacngaaccgcgaaaaaaccaagccacgagccccggacgaccaggggaacacacaaaagacccaccgcccccgacggcacgagcgacacagcaacacggcacagccggaagaccccacacgaaaaccaaccaacgaggacccgaacggaccacaagaacacggccacacacacacaaaaccgagacccccccgcggcaaagcaaaacaaagacccccccgcgaaccaaaaaaaacaccccgccacgaacgcacaacgaagcacgaaagaacccc

SEQ ID NO: 40326 - DNA, 400 bp, Glycine max
  unsure (1)..(400): unsure at all n locations
atactcaagcttcgaccaaatcttgggaaacctactcatagttaacctagtatttaatgngcctcccacattggaatagaatatgagggaattgttaatggaagttaatcgtgtcatccaaaggaccttaatgccgtggataattgacataatatatacctagcttgtttgtttatttgcctatctgaagcatttgtatcataatgtgattgtcatttgtcaacataatgcttttgaagatactcaaaagtatggtcttcttacaacaattatgtcatagaagcacaatatgttatgcgttaaaaaaaacataaaagattctagttcaatgacaagttattgcagccctttgtatctggtatacgattcttatgcaaaaaaaaatgttcacgcattgaaa

SEQ ID NO: 40327 - DNA, 390 bp, Glycine max
ttattatgccctctcccctcggcggggattttttcttcggtgtatgcgagatagttgttggcagtgatattattgaccagccctccgaaaccttctaccgagatgtcttgggccacatgggcctcgttcagaacttttattagcagagctcgatgaggctcggagctcatgagtaactccaacagcgagaccctggccggagttttgttgagctgttcgataaccttgaatttgctctgctgaattatacggaggaactcactggcttcctctagcgacacctcctttttaccatcctttttctccggaagacctttcgccgaaatatctttatttgaagtgtggggtgcttcaccatcttgttcctccaccacttttcctttccccttg

SEQ ID NO: 40328 - DNA, 377 bp, Glycine max
  unsure (1)..(377): unsure at all n locations
attatattgttcctgacttgaagttttgttacgtttctagtatcttttgtnnnggttagactatcctgtggtagcattttgttcattttttcaattaatcatttaatattgcctatagctgaatgttctctcattctttttgtaagtttcttaagtaggagttgcaaagccttgttattatgtatctggaagttgtgattgataatgatatgaatttcagggagtacattgttgacctaatggcagctcctggaacacttattccatctgatgctactggatcacacattgagtttgatgattcttcctttgtagccagtccttcatcaagagagcttgattcgtctcacgtagcatcattcagcagtggggttgga

SEQ ID NO: 40329 - DNA, 440 bp, Glycine max
  unsure (1)..(440): unsure at all n locations
agcttaatagctcgtatactgatcataatantatagcttataacacactcgagcagggactagtcaacacacttactgaacatacacttactacaatgcataaagtataaaaaataaatacacttgaataagcttgatctcacaattcttaacagcctcacgaacaacatggaaatcactagaatatgctatgtctttccatgctaaacaggattttcagcaatgacaattgcttatttactgtcacaataaatctcagtagcgtccatcttctccactcccaaatcaaacataattttcttcaaccaaatggcttagttagttgctgcagctgctgctacatattcatcttcagcagtagatngagatacaatgtcctgcttatttgagttccaagagaacatgtgtgagcctaacgaaataacatattcagtagtgct

SEQ ID NO: 40330 - DNA, 397 bp, Glycine max
aactcaagcttcatcgacaagcctatcgatgctcttggtagtgtataagcatttttggggcaagccttgttgaggtcggtgtagtctacgcacatcctacatttcttagttgctttcttcaccacgatgacgttggttagccaagttttgtggtccacttctctaatgaatttaacaaccaaaagtttctcggtttccacctcaattgttttcctcctttcgtctctcagtttgcgcttcctctgagctatgggtttatccttagggaagattgccaacttatggaaaatgaagtcagggtcgatgcctgacatgtcagaagcactccattcaaacaagtcggcattgtcaaagagcgcttgagttatctccttttgcacttcgtctcccatctctt

SEQ ID NO: 40331 - DNA, 391 bp, Glycine max
aagcttcagaccaaagcaacataaaatctaggtattttaaacccctcaatttaatggtttttcaaggtttgagaagtgaaattgagaatgaggtaaatttggagcaaactctcacctcacacaagtctataacatcaatctaaacttgctcaaactggatttacaccagaaattccaccgaatcaaaatttgactcctcaacacccaattttaccctagaaatggctctttgttcactttggtcatttgtttttctctcttgcacaacccaagcttcctcataagtcctaaatgacatttcaaactaggattaactcactttaacctccaaataccactaaatccagatttggccttccaactctcaaaaactcaccttttcccactcata

SEQ ID NO: 40332 - DNA, 461 bp, Glycine max
  unsure (1)..(461): unsure at all n locations
gatccttaagcacctgcggctgcagcttctcctattntctataatttttgagaagtgaaaggaaaaaatgttcagccctcctggtaattcgagattacttgaaattagtgaaaaaaattgtttctgtgaagaaaatccaagcctaggtgcttccgtaacgtttctgtgggtaatttcacgaagattttcaaccgttcttcgacgttcttcgttcgttcttcgtcgttctttggtcttcagccggtaagttcccgaaatcgaacttttcaattcattctatgtacccttagtggtccccatttgttttcacgtgcttttattttcatttcatttacttgttgtacccccttttgacgtgcttttgtcatttacttaagtcattntctcgcctaatcaaaaataaaataaatntccatcgatcatttgaattgtaatatccgttaatttctgttaaaatgaca

SEQ ID NO: 40333 - DNA, 378 bp, Glycine max
  unsure (1)..(378): unsure at all n locations
ntggagctaaaaatatatattatcaccaagtttctagttggagctcctctctttttttcgtttttagttttaggcttatcttcttcttttagacactttttcgttttgcaattccagttgctacttttcgttttagcaataaaatttcgttctatattgattaatggaaggctaaatctccagtgttgttttctcttgaggatcaagcacaactctctttgaggttctattattattattaaattctgctcagtttttcctcttcaccaattactctgtatttgttgctattaattcatgcatgcttagtgcttcattaattgtctctgcacttaatttacgttcatgcttaatgatcattcatgattaattggtgta

SEQ ID NO: 40334 - DNA, 446 bp, Glycine max
agcttatcatcattaagtgattgagcatttgtagtttaatattttctattcttcttagctcaattgacatctctttgactcttattttctcatcttaactcatttttggtctaaggcaagtgattgagcttaattgagaattgtagctaaatttcaaattttgtgcttacttgacatatctatcttgtgtagggcctagaggagactacagaactccaaatggaatgtgtaagtagtccctagaaagttgagaaaaggatcttcaattgtgttacaaatgctttagccaattctggcatttcaagggtcacattgagcttggaagtcagagcctctgcacttgaataattgggctataagtttggacttttattttgtgtaattagtttagttaggtagttaggtagttattaagttagttagttagttactaacactctatatat

SEQ ID NO: 40335 - DNA, 378 bp, Glycine max
tcaggttgctcattgactcctgattgctatttagaaggacatagatctgtatggtgatctgcagaagaacatataccacagactcttgcaacaggtgcatatttctgattcatggcaagctgagttactaggttaaccaaggcatcaagttttccctcaagctttttattctcagcagatgaagatgaatccatggccacctcatggactcctctaaggacaatagcatcatttcttgcactgaattgttgggagttggaaaccatcttctcaatcaaattcttagcctcagcaggggtcgtatcaccaagagctccaccattggaagcatcaatcatactcctctccatgtagctaagtccctcatagaaatactgc

SEQ ID NO: 40336 - DNA, 437 bp, Glycine max
agcttaatagctcgtatactgatcataatctcaaagcttaaaacacactcgagcaagtactagtcaacacacttactgaacatacacttactacaatgcataaagtataaaaaataaatacacttgaataagcttgatctcacaattcttaacagcctcacgaacaacatggaaatcacttgaatatgctttgtctttccatgctaaacaggattttcagcaatgacaattgcttatttactgtcacaataaatctcagtagcgtccatcttctccactcccaaatcaaacataattttcttcaaccaaatggcttagtttgttgctgcagctgctgctacatattcagcttcagcagtagattgagttacaatgtcctgcttatttgagttccaagagaacatgtgtgagcctaaggaaaaaacatattcagtagt

SEQ ID NO: 40337 - DNA, 381 bp, Glycine max
agcttgcctaattaacctgaaatttagatgaaaattttattaaacacacaaaatggaagtactaagtatgtattacctacacttaacaaaaaatacttataatactacaaaataaccataaattggaagagtttgatacaatttagacaagttttatacacaaaagttggtcgtattcaccgactaacaactcccccaaatttatagttttgcttgtcctcaagcaaaaagagaacaattcacttgtcctcaagtgacaataacatgcagtgaatatgtacaaaggtgtatgcaacaaaagttactgattgcatgataagagaatgaagcattatgtactcatcacttgtctttcacaaaatatgcagttattcaaagaga

SEQ ID NO: 40338 - DNA, 411 bp, Glycine max
agcttaggaatcaatagcagtttggtgtttttagtttttatgtataataatttcactggtaccctcccaccaaatctttgttttggaaagcacctggtcaggctgaatatgggtggcaatcaatttattggcagcatacctcctgatgtaggaaggtgtacaactcttacaaggttgagacttgaagataataatttaactggggcacttcctgattttgaaactaatccaaacctctcttacatgagcatcaacaacaacaatatcagtggagcaattccatcaagtttgggaaactgcacaaatctctctcttttagatttgtccatgaacagcttgacgggtcttgtaccttcagagctaggaaaccttgtgaatcttcagactttggatctttctcacaataacttg

SEQ ID NO: 40339 - DNA, 372 bp, Glycine max
  unsure (1)..(372): unsure at all n locations
tcttatacattaaaagcttttttcataatgttatcagggnctttacatcaaaataagcagctttaaggcacacatcatctaagagctaatatcaaattgaagctagttataacccctaagtttagaaaagtgcacgtatgagctttaattaagcatcaaagataaagtaaattaaaacttcatggagaaaaatgggaaagaggtgaggtgaaatttaaaacgaaccatcctataacaaattttccaaccattattagggaacaaaaagaaaatgagactttcaaaacaatattatatccttagacaaaatgtctcaagaaaagcaagataaacgctaaaaggtacatatcaatcatacagaagcaagaaatt

SEQ ID NO: 40340 - DNA, 437 bp, Glycine max
agcttcagtttgttgttgctgccccatttatcctctcggaacttgttttggccccgctcttcttttcgagctctctttgtttctcgctccaaagcttcggcagtggccatgttgacatccctcaactcgccatactctttcctgaccctagtggctgccatcttgaacttttctttgaccactcttgttctttcaagtttttcctttagggcttgcacttcctcgcgagcaggaacttcagcttctcccccacttgaaatctttagctttgggagccaagctatcccttgcgtccgaacctttaaccatttatgatagctgccaataacaccattgctgcttcctctaagctccttatcttttctatccacggcattccacactttttggactctctgaagtatttttgcattgctttcactgaaacctcgtgcgat

SEQ ID NO: 40341 - DNA, 396 bp, Glycine max
acgtacactatgaatctaagcttaggctgctaattgctttggttgctgcttggaagggcattggtctgtatggtggtcagcagaggagcacaaaccacaaacccttgcgataggtacagatttctgattcaaggccagctgggttaccaagttaaccaatgcatccagtttgccttcaagcttcttagtttcagatgatgcagatgggtttgtagctacctcatgcactcctctaatgactatggcatcatttctggcgctaaactgctgggagttggaggccatcttctcaattaaatttctggcatcagcaggagtcatgtctccaagggctccaccactggcagcatctatcatacttctctccatattactgagtccttcataaaaatattg

SEQ ID NO: 40342 - DNA, 370 bp, Glycine max
agcttaaaggagagaaccagttttagagttcccaccttatttcccctctctctagactgacatcattatccgacgggttgaactgggattattacaaatctttagaatcttttgtttacacacccacgcttcgtctatagatgaatatgcctgattgcatatatcagcttgttgctaagcactctacaccattactacctatcctgtcccacataccaagattttcaacgacaaaattcaaatttgaaccctacttcaatttctagcacacaagagccgatatacaagatgagacacatgagcttatattgtgtcatctaaactacggcgactctgttgaattcttgacctaccacttagcactactaac

SEQ ID NO: 40343 - DNA, 333 bp, Glycine max
accaaggagcgggaacaggcggcggtacacgtgaatatggaggtagagcaaaagaacacgatgacggctaggatcctttgccctcaacctcaccgggtctcggaaaggtgacctaccggacatccaggttctataccatagccgttaacatacgccaaatcaatggcgaggctcaatctctcgagggacaaggaatcagaacggacgcccctggcctcgctcgctgctgcgccgatggtgtgacagcggaccctccgaaactcgagccgcgccatgagtgtaagctgggtgtccatgaaggacccacggttcacgaccatctgtggcatcata

SEQ ID NO: 40344 - DNA, 423 bp, Glycine max
agctataatatattattacactcgaattatatcatcagaagctctcgagaaattcaaatggtcataacttttcacccggatgtccgattatggcgaatcacatatcgagacgctcaaaattgaacaacggaagctcttgagaaattctaatggtcataacttttaactcggatgtccgattcaggcgcatcacatatagaggcgctcgaaaaggaacaacggaagctctcgagaaattcaaatggtcataactttccacactgaggtccgattaaggattataatatatcaagacgctcgaaattaaacatcgaaagctctcgagaaattcaattggtcatcacttttcacacggatgtccgattcgggcgcataatatgtcgacacgctcgaaattgaacaacggaagctctcgagaaattc

SEQ ID NO: 40345 - DNA, 321 bp, Glycine max
accatgctatgtgctcgcgactggtccctttcttcccttcgcaactggagttcactattgctaccccatagagctccgcgaaatttgttccggccatactcttccttgcgagccctcttggtctcttgttcaagggctcttgcggaaattgtattctcttcccgtaacccggcacactccttccgaacgtgtgtagcagccaacttgaacttctccttggcgagttgtgcctttcctaactcgcttttgagagcttggacttcttcgtcctcttccggtgcttcaaaattctcttcgctgacgacttttaacttggcgagc

SEQ ID NO: 40346 - DNA, 407 bp, Glycine max
tgacactatgaatactagcttggagcatggatgaagcatctgcagtcttatgaaaaatctaaggatcctgtagataagggagctggaagtggtgtctgaataggtgaagatggaggtagagtagaagaagaagatgatgccttggatcctttgcccctagctttacgggttctcggaaaggtgacctagaggtcatccaggttctagcaattgtttttaacatatgccaaattaatggtgaggctcaatctctcatgggtcaaggaatcagagtggactccccaggccttgcacaaagcagtgatgagggtaggaaagccgagcctccaggagtcgtgctgggccatgagtgtaatctgactctaaatgaaggacccaaggttcatgtccatcttctgcataataga

SEQ ID NO: 40347 - DNA, 347 bp, Glycine max
tgcaagcaatcaatggggcaaaacataccaaatgattataatgatggatggctcacattctcacaaaggttaaatcatcactttcaaattgagctttcaaaactatcatgacatgtagagaagaatcaaagatttcaagtcacaaaatgtcaagaacttttattttcaaaacaattacccattttttgaacatatcctataattcagagaaaaacatgcaaagttgtaggtgcacacgaaattgacccaaaatattaaactgaaaatccgacgaaactaacaacattaaccaaataacacaactaacaaattaacagaaccagtcaaactagcaaaaccaaagaaca

SEQ ID NO: 40348 - DNA, 390 bp, Glycine max
ttgaataatgaataacataacaaaatagcctttcacgaattttttgctgctatttaaaaagagtcactcaaagtcactgggccctattacaatactctggcccaaaacgaaataaacattgaaccacataaaataaaattgcgaaatttcctaattagaaattaactaaggtaagcgctgctttatttgccctcttcaagtccacaaccaaaatccggattaagcccaatgtttcattaattactgaaattagattaaaaacatcaaattagctaaatgagcccaattaataaaactgcctaattaattgacaattaagaccaatcagtaattaaaatggtgcaaaaagggtttagaaaatagaagaaaatgatggcacatcaacaggga

SEQ ID NO: 40349 - DNA, 133 bp, Glycine max
gcgcaaccggcgtgaacttaccttaacaacaaataacaccactatctccggaccgaaaaacaaacacacaaacaccttctcataatacactaggtcacgggcaaagatctccagacatcaaaagaacacacgc

SEQ ID NO: 40350 - DNA, 162 bp, Glycine max
ccgccttttcaaactcttttgaaaaaattgcatcaagaggtgctcatctcttgagtatgtccccatcttcctgcagtacatcttcaagtggttcttatgacaagtggtccctttgtacttatcaaagtctggcaccttgaacttgggaaggatgacgatgtc

SEQ ID NO: 40351 - DNA, 387 bp, Glycine max
aaactagcttgcaggctgtgagacttatacttcttgtgtgtttaggaaggagatattagatatataatttagaaagaacagacaagctagctgtgacaacaatatataaatgtgctgagtattttaatatatttttttagataatatttcatggtatatactcatttgatgagttgtttattatatatctcattcaaataaatttacattatgtcttaaattgttaaaagaaacatatacttactacattgttgatcataagaatctttttaaaatttatttgtgattttttataagatattttttaactttagatacattaattatttttttctacatatttttacttaattattttttttttataattagagatggagtataaag

SEQ ID NO: 40352 - DNA, 218 bp, Glycine max
atctcgctgcaagggtaccgtagtggacatgttgagacttgcagaatcctcctattcctcttccatctccaccgagagcaattcgaaactaaatgatggcacaagtggattatgagatcttggatacctggctgacacttcacgtgaacatacctctgctagatgccatcaagcatataacaagatatgccaagattctagaggagtcgtgcacccac

SEQ ID NO: 40353 - DNA, 396 bp, Glycine max
actcaagcttgcatgtcgattgtgatatgcgaaatgcgaattttgaaatttaccatgactattctggtcctcccgcgcaatcaacgttggccacagttaagcaaactatagacatcacgtttgtgtccatcaatttgattactcaaaacacgtttttctttgtgatgtaacttgggacaatttctttgagtattctactaggctaagtacacggcccatacatatggttccgattatgtttgacattggaagaaaagaaaatgaagtaccgcaaattcaaactcagatgaaaccatatcaactgtgaaagaaaatagctgtacgtgttctttgtccatgttaatgacccagcatttttctttttttcctataaaaattcagtcataaataatcaat

SEQ ID NO: 40354 - DNA, 325 bp, Glycine max
agcactgagaacactgacatttattgtgaactcatggaaagaacaattggtggccgcggcagaggtatagaaatcggatcattactattagcgtattgataaagaaatctttgaacaaatactccatatgggaatctaacaaagtccaaaaaaaatcagaaaacgaggagggtgaatgttaccttgaatcaaccactttatcaaaggcactaatgtcatcaaactcttttattatactaattacacaaatacacaataggccatccaacagaaaacatatttatagggaagtgttaacgttgttgcgttgttaattggaaaacta

SEQ ID NO: 40355 - DNA, 406 bp, Glycine max
  unsure (1)..(406): unsure at all n locations
agcttataagaacaaaattgccttagttatttccaaatatgcatgtgaattangacgcatcataaagaatcaagccaaggctattgtgcaagcaatcaatggggcaaaacataccaaatgattataatgatggatggctcaaattctcacaaaggtaaaatcatcactttcaaattgagctttcaaaactatcatgacatgtagagaagaatcaaggatttcaagtcacaaaatgtcaagaacttttattttcaaaacaattacccattttttgaacatatcctataattcaaagaaaaacatgcaaagtcgtaggtgcacacgaaattgacccanaatattaaactgaaaatccgacgaaactaacaacattaacaaattaacacaactaacaaattaacaaaac

SEQ ID NO: 40356 - DNA, 377 bp, Glycine max
tgagatgaggaagtgttgaatggtgaaactttctgcttttattgttgaccacagagtggtacctggagatatgtcgcgggggtcaggagaccttggggacgtcaggtggggtgctattgcccaaaaccaagcttgaccaatcccgacccaacccgggcatagtcggtcagtgagaacctgtgatgtacctaaacaggcgagctcctggcagtcaacagataaaaggaacaaagaccacaaagcgaggaggcttgtggtggctggccagctgtgaattttgtgtgatatgtggattatgacctctggtaattgattaccaagggtgggtaatcgattacaaggcttaaaaatgaagacaggaggctaagatggtctct

SEQ ID NO: 40357 - DNA, 431 bp, Glycine max
  unsure (1)..(431): unsure at all n locations
agcttatttctcattttgttcttttactttaaatttgttaatntgtcgttaaagtgaatttcgtaatagtcgcacgacgtttgatttcaataaatctccttttacatgttttttaaatcttttaatcaatatctattttataaaatcacaatcgtccatttcatgtttagtgcaatttgtgtgaatttactttaataacaaataacatcactatttttggactgaaaaacaaacacacaaacaccttctcataattcactaggtcaggggtaaagatttttagatatcaaaagaatacaggcttatagatggaattgcttggagccaaatatatatatatatatatattattggaaatttctctataattaaggttggttcacattcaagtaaacatgcaagttcaaatacatgagaaattgaagagtaca

SEQ ID NO: 40358 - DNA, 365 bp, Glycine max
tgtgtattgctgcattatattaatatatggttttgtcaactgctttgcttgagaataacaattgcttgaccacaacaacgctggaggcggtaagggacaatggtctttcaaataaacctgttgtacatgaacaaagattatatcatgcggtgatcgtgtcaaacgaaccagcgaagtcattgcataattgttatactaactatattcaatgtacctgaacaaaatgatttccaaacacgtgaccgacgcatatcatgcggtgcccagaagaatcaggtggtggttgacttctaagaagaaaaaatgttatgctttattgtccggacaacgatacaaggatttacgtataccgtgatgcaatcaca

SEQ ID NO: 40359 - DNA, 438 bp, Glycine max
agcttgccgcccagctcgcccaggcgagttatgttgcttcctccagaagcaacagccttctggaggaatcttctggagggcccaagtgggcctggttgctatttacacccccctttttactaaatgcaccccccttttctatttttttgtaattctttttccgtaacgttacgaaactttacgaatttcgtaacgatggttattttcgttccgcaaggttacgaatccttacggattatgtatttactcttttttggctttcaaagaagttacgaaaactcacggattgcgcaaaaacacctcttttcgatttctgccacattacggaatatcacggattacgcaagcctgcttcctttcgatttctgagacgtctcgggacttcatttattgcatgtcatcaagtaataatccccggacgatattatggtatgacag

SEQ ID NO: 40360 - DNA, 354 bp, Glycine max
atatgatatagaacagattttacaagatttaaaattgaaattggagaatgcaagattgacaatgggaatgagaatgtgaaaattatgtgcaaattgcttcctatgtgaccaatttataggacccaattttaaaaaagtttaatgtaaaaaaaatataaaaaattaaaacataacatgcatccaaaattcacagagcaattgtcaattgtatgcaacgttctaaaattcatagagtaacggtcaattgtggcaaattgtctttcttttctgcattctttctcttttttctttctttctttctcttcttcccccttccaaaacccacctcctatgcccctattatctcttctcttc

SEQ ID NO: 40361 - DNA, 454 bp, Glycine max
  unsure (1)..(454): unsure at all n locations
agctntcttcaatcgtcaatacgggtgttatgtttgagaaatcttcaatgcctagtatatattgtattctttccatgtttcaattggatgaagctcgtctctttctcacggataggacatgcatgatgtcctttgacactatatccactcaaattctcatatgctggaaagtcattaatggtacaaatgatcaattgtcttccattggggagaatcagccagatgtcagagcaatccatcacttttttctgccatatgcatcatgttcattagcaaacaatcgcttaaaccttggaattattgaaagatactagcacacctttgctggacgatcattggttgtggttgcatcatcactacatttgtcatccttcattntgtaccacgataccccacatgtatggaacttgcacantttcggcaactaatttctatacaatatgcaatcattatg

SEQ ID NO: 40362 - DNA, 376 bp, Glycine max
ttcttaatgcggcttctatctttcgagctttttctgaggctggtgtctcaaagttgagtgcctggcagacagcaaggggtggggtgggtcatagccatagcagtggtcaagtggagcaatgccctcagtgtggtgccaagttttcctcagttactactttggtggaccatgtgcaaaaagttcacgagaggagtggcaaccgatctggatcgaatgttacaattgatgtttgtccaaaatgtagtagaggatttcgagatcctgtggccctagtggaacatgttgagaaggatcacggtggaagttctagatcataggtatgagttgatattgattattgaatgaattataacttgaagaaattacatatttttgc

SEQ ID NO: 40363 - DNA, 412 bp, Glycine max
  unsure (1)..(412): unsure at all n locations
agctntataagcgcgggtctgttagacttatgtcaagtggtcgcgatatgcgaagatgatgttccgagtacattggatttggtatgaccatgccctcctgatttccagttgggaaattggcgagtggaggaacgccccggcatttacgcaacaagcataatgtaaacctttacggttttaaaagctctatagttgggcctaggctttagagtttttccttttgttaaggctttgtgtcttttgtttttgaatttataatacaaggatctttcttcatctgttcctatgtctctacccattctcattcatttgcatgttcacttctttttctgaaacggcagattcgatgacgagtcccccgaaggtactaatacctgngatccgcttatcgactntgagcaagaaatgaatc

SEQ ID NO: 40364 - DNA, 348 bp, Glycine max
tccacaatattcaatcagttcaattccaaatatcatgaactaccctaaaccaagaaaacagagtagaggcaggaaactctgtccaaaacccactcaaataccacagctttccttactcatataccccagtaacattctcttcgttccgattcgttaaccgttggatcgccttgaaaattttactggaggttactagtatataaatatacattctgaccgttgggatctgctataaaatgcctggaacccgaaatgtactactcttcccatgactagcaatgcacaagcgttttctgcacatgttgaaaaattctgctgcacaattcaacatcatttttctgcataata

SEQ ID NO: 40365 - DNA, 435 bp, Glycine max
  unsure (1)..(435): unsure at all n locations
agcttcatgatgttgaatcaatattgattcttgagttttgatgataacaaagatgatgacaaaaagcccaagagaatgagttcaagattgaatcaagaacacttcaagaatcaagagagaatgagtttcaagatttaagttgaagattcaagaatcaagaaaagactcaatcaagataagtactaaaaagtttttcaaaacattgagtagcacatgaatttttcacaaaaccttttaccaaagagtttttactctctggtaatcgattaccagtagcaaaaattgttttcaaaaagctttcaactgaatttacaatgttccaattgatttcaaaatggtgtaatcgaatacaatgatttggtaatcgattaccagtgtggttgaacgttgaaattcaaattcaaatgtgaagagtcacatcctttcacanaaatg

SEQ ID NO: 40366 - DNA, 369 bp, Glycine max
tgcaagatccttaacctatctagagtttcgtctattcatccattctataggcccatacggcgttaaccacaatgtcaacctccagcactaggttgagggccttcctagtatcttcaacttgcatgcctactcacatgcaatgtcattcatcaatgcatgtatggtatgattatacattatatcacattcatcattacattcatcagccatcatcaatataattcatttcatcaacaatttaatccttcgtcaactcatcatgcatatctcattcaacatatcatcaattcaatattcacattttgttcatttcatcatcaattcaccattcatatccttctcaccaatcatgaactctcacatagttca

SEQ ID NO: 40367 - DNA, 253 bp, Glycine max
ctctgtgctttttttacacgccatatcatacgctgggaaatccttggagtaccctcacgatgtggtcactgaaaccccgtgcgatgaaaggcgcgatgctttcgtctaatggcgctcctctcatggggtaaccaaactatcttatggcgaggacacgattataatttatacaaccccttgttcccattaagggaacatttggaaatacttcgcatgaagataaaatactgattcttacctccttctagcgagg

SEQ ID NO: 40368 - DNA, 248 bp, Glycine max
aactagctcaatcccttctttcacccaaagttgtaaaatttttttgagcctggcctaaccttacctttggaacctccatttaaggaaggggaccttcctccctgaaactcggggggttgggtttggaacctatacggaagttaccaagttcggtcaagggtattgttgtaaggaaatgtgaattatgctaaacttgacatgttaatgaaccaaactgcagttgcttaggtcatatgagttcgaaatat

SEQ ID NO: 40369 - DNA, 376 bp, Glycine max
  unsure (1)..(376): unsure at all n locations
agcttgaaactgaacaacggcgctctcagaattttatggcttataanncattagatgtccgatgcggggaaataatatatcgagacgcacgaaattgaacaacggaagctctcgagaaattcgaatggtcataacatttcactcggatgttcgatccggggacataatttatcgagacgctcgaaattgaacaaccgaagctctcgacaaattagaatggtcgtaacttttcacgcgaatgttcgattcggggacataactcatctagacgctcgaaattgaacaactgaagctctcgagaaatttgaatggtcataagttttcacacggatgtccgattcgggaacataatatatcaagacaatcgaaattgaac

SEQ ID NO: 40370 - DNA, 387 bp, Glycine max
taagtatgaaattgattaggaaacccacttgtgaaagaacccatgaattaatatatagattgggaaaaaaaacaaaaaacaaaaaatccctgctttccaatttccagtgattgtcattcccatgcctcatgatggaaattttagatttcacaaacccaattgccccttggtgtaattaccagaagtcatgcaaagcataacatatgactaacatttgagcatcaaactcttccttgaatattaccatgtacagatgtactatgggagaagaaagtattcatataaatttagtagttacaacttatagggatgtggaatactactgaagcagtcaaggaaccaagttgaagagttatatttgaaggggaaaattatcatacctataat

SEQ ID NO: 40371 - DNA, 383 bp, Glycine max
  unsure (1)..(383): unsure at all n locations
tctttccatgcctcaatcggatgaagctcgtctctttctcacggataggacatgcatgatgtcctttgacactatatccactcaaatactcatatgctggaaagtcattaatggtacaaatgatcaattgtcttccatcggggagaatcagccagatgtcagagcaatccatcacttntttctgccatatgcatcatgntcattagcaaacaatcgcttaaaccttggaattattgaaagatactagcacaccnttgctggacgatcattggttgtgggtgcatcatcactacatttgtcacccttcattttgtaccacgataccccacatgtagggaactcgcacatttccgcaaactaattnctatacaatatgcgatcat

SEQ ID NO: 40372 - DNA, 387 bp, Glycine max
ttttggagtacaaacatgggaccaactcatcttatttcaatttgaaagtcgtatctagtcaaggtctgagagaccatacaagtttcctaacgatttctaattatgtgggccattaagtctatcatatgctaacaatagccgagaagcccatgaatctcttcgggggcggagtaggtgtctgccattgccttggccttggctaacaagcggggaagttcttgactcccgttcaaggtaagagcaaaccgatccatcaacatggttgcctcttagtgtaaagagtcgatcacccttcctctagcctctttttccgtgtatacttgagcatactcatccgcgattctatgctcgtgggccgtggctagacctaactcttcttggtacttg

SEQ ID NO: 40373 - DNA, 443 bp, Glycine max
  unsure (1)..(443): unsure at all n locations
agcttatcataataaacttaaattaaggttttttccaccataaatgcagaanaaaagatgttacatataggtgaacaattaaacaaatttatttcagtttcagtatgtgataggcaaaaatctgtgaaaataacagacagtgcctagacacacacagatgctgttcaatcattaatatccctcacttagttatgttgtaacttgtagtatgtttggaaggttacaggcatgcatgtgggtctctcagtaaattcaacaaaccaagaaagaactcttaagttggttctcttagattatggatgttatgtgggagacttatctataaagttagaaggtggtgcatcttggctttaccaattgtaagcaatcttcttcttacccacgtttctgaaaaatgggtaattntcatatattctttttttgataatgataattattctttt

SEQ ID NO: 40374 - DNA, 462 bp, Glycine max
  unsure (1)..(462): unsure at all n locations
acggcncnaacgaagcttgaagtctgagaaccncnnanngaccagaggcngcaagcccaacagaacaacnnngaanngtatanaataatcacncagcacaacacaggacaaggaaaacagaaaaaccaaacacaaccagcccnaaancaaagagaagaaacaagagaagaaaccacccacccgcacaaacggggggagaaaaccacacccacaagcaagcagggcaaccccagganggcacaacaccaacnccccgcggcaccagagacaacacacggcccaacaagggcngcaaaacccagacacgcagaacaccaccaagacagccaaaaaacaccaagcanaaaagcaaccacggcccaaaaggcaggcccncaaaagaaaaaacaccaaaaaaccgcgacccacngccagagctcccgcaagcaacgacggcgagggaaacgacacacccaccccgcc

SEQ ID NO: 40375 - DNA, 257 bp, Glycine max
  unsure (1)..(257): unsure at all n locations
ggaggtcaccgncaccaaaagggaccatcgaaagcacgaaagggaggacctggcaccacaggaacccagaaggcgaggggtacgcgggcgcaacaacaggaaggagagaaaagggacggacaaacgtgagngaanccagagcgaaacagncacaaacaagccacacaggccctgagaacagtctacaaaacgtgacacgtacatatatgggccaattgtgccgtggaggaatatgtgaatgctacacaagtatatac

SEQ ID NO: 40376 - DNA, 431 bp, Glycine max
  unsure (1)..(431): unsure at all n locations
agcttgtcgntggagctgacccatcaattgccctatatcttttagactggtggtccctaggctcttgaccttgacttgatagaacctctttttaagtgaaggcttttgacttgatcccatgttttactaaagtgaaacaaaaccccgtgcgaatcaaaactctggcatctatcatgggtggaatggatgaatgcatgaagaaatgcatatgatacagatgtaatttatgaatactggggcctggataattgtcttcttcttagatacaacgtcctgcggtaacaccgtgcccgacgtatgtatttaagaaggagacacggactttccattggtttgcccaagagaggggatgtacaatacggggatgcatatgcgaaaggtacaatacggggatgtacatagtatgacaatattcacaaactaatataagt

SEQ ID NO: 40377 - DNA, 378 bp, Glycine max
  unsure (1)..(378): unsure at all n locations
ttcacaagacaaatcaatgtaattccatttttcatgaaactaccttaaaaaaaacagagtggaggcagaaatctttacacagcgattcatttgaattccacagagtttttcctatccacatacctgagtaaaatcctttttgttccgattcgttaaccattggatcgccttgaaaatttaacagggggttcctaatagagaaatctaagttttgaccgttgggatctgctaatgaatgtctagaacacgagatatactacctttcctgtgacagcaggaactagcactgcataaccagtttttttctgcataattgggcagttnttctgcataactttgcagattttcgaaatctagcttgcatgcatccaattccac

SEQ ID NO: 40378 - DNA, 411 bp, Glycine max
cctgaggcatgcaagactggagaaataatccttcatgctttttttgtttagccactagcatcagcaggtgctcttcacacccattattatcaaatgatctacttattcatttaattcttatagattctaagattatctcttttgactcctatagttaagaaataaatctctttagttcttaaaatttaatagataaatctattaatctttgaaatttataattaactccgctaggtaatatataaactttaagaattaaaaaattatatttattaactataaagactaaaaagaattaaaaattattaagactagataggtactgaacattatacaatataaacagctaactgacactggattagcagaaataatgctcactagctagctagtattgagggtcacagacat

SEQ ID NO: 40379 - DNA, 326 bp, Glycine max
aaaaaaagacaaaacaacaactaatattccctgctattgcaattatgcagaagattgacatccgaatgcctcatgacggaaatctatattaccaaacccaattgccccttggtgtaattaccacaagtcatgcatagcatatcatatgactaacagtcgatcatcaaacacttacttgaataataccatgtacggacgaactatgggagacgaaagcatccatataaatctagtagttacaacacatagggatgtggaatagaactgaaccagaacaggaaccgagctgactacttatattttaaggggaagactgacatacctat

SEQ ID NO: 40380 - DNA, 415 bp, Glycine max
  unsure (1)..(415): unsure at all n locations
agcttaggactcgacctaattgaacatctacattgnggattcgnngggctttattatgagggaagcaccaacgtgggcttgccgacctccaatgcgtgaagccatggcggcaacacgcttccctgcgaccaccagatctagaagaccttcacatcaagatcatcattctctacggcttcgtcaccatccttgtcctctgcgacacaattggtgtcaacctcgactcctccgacaacgacatcgtcaaccagattcagataactcaactgctttggttattttaatactttatattttgagtttttttttttcaaatttggagttcaataagctcaaaagagtgaactcctgaagttgtttagtgattntattctgcctctaaatgtgctcactagacaacataatttagaatgat

SEQ ID NO: 40381 - DNA, 362 bp, Glycine max
  unsure (1)..(362): unsure at all n locations
tgnacatttgttataaattttatnnagcctttaatcntataangcatnctttngatacatcctcacttaaattgagctttctaggaccacaacttgtataacttgcttatacactctaagtgattcaaaagatgaaaacacatatggtgtttgatgtagttgtagttgcatttgacatcctatttagatgacaatgctctcaatatatagtattatttgcatgaaagatatagttatccaaattggataaatgattnttctatgtttctattttatcttttataatcccatttgttagtcatttactcaattatttcattttttcaatttttatattcactgtaaattagattctttagctt

SEQ ID NO: 40382 - DNA, 420 bp, Glycine max
  unsure (1)..(420): unsure at all n locations
agcttctagccaaatggacttattttgttttatttcctttgatagcccttntgagccttgtttccctttccttgttttgaagctcactacaagccttaagtgaaaaaccatgatattaccatatccttaaggaattttggagctttggaattgttttgggaataagtgtggggggtttttgtttcattggacaacttgttttgttggctatgcttcatgatgtattttgggccatacttgatgtacattgtatattggttaaatgttggacatgctgaatgaaatgttgtttctcaaaggctaaagagtaaaaaaaaaaaaaaaaaaaaatctaaaaaaaacaaaaaattcgacataagaaaaagacaagcaataaagttgagtgaataagatcttaaatggcacaagaatgatgaaact

SEQ ID NO: 40383 - DNA, 369 bp, Glycine max
  unsure (1)..(369): unsure at all n locations
tttacattctggaatcgtttatcctatctctgacagccaatggatgagtcctgtccaggtagtcccgaagaaaaccggtctcaccgtgataaaaaaatgagaaggatgagttgattcctactcgggtgcagaacagttggagagtatgcatcgactataggaggctgaaccaggttaccaaaaaggaccattttccactgccattaattggccagatgcttgaacgcctggtaggtaaatctcactactgtttccttgatggtttttctggttatatgcaaatcactattgctcctgagaatcangaaaagaccacattcacctgccccttcggcacttttgcctataggaggatgcctttcggcctat

SEQ ID NO: 40384 - DNA, 402 bp, Glycine max
atactcaagcttctgatatttggaataggaaaacagaacgattaatcagtatttatgacaaaatataagataggaaagaactctccctcaagccagcaggcctgcccaaccttttctaaaacaattccttatcctgttacccccagccagggttcataaccaactctccatccttccaaaatgattacctgcatcaatcttcctcccagtgacatcccttctcaactgaattgttcccctctatctggatgcctccctccataggccatcgttgggcctatggggttttcttcttctttacacattagttattggcctatcagtacatttaagagtgaacaaaaattataaaatgaaaataaaattaaatctctatttagtctccctgcattcatatgtctg

SEQ ID NO: 40385 - DNA, 384 bp, Glycine max
tgtgccgatgccgcatggttggagcattctttctaaatagttgaccctgactggtctccctatgattttacttagtgagagtgacttgacatacccattgtgtgatgtgtcttgttatgtactcctaagcgccccagggtgatttttcactgacatggtaccacattgcatataggcttgagtcttagcataactgttgcatacgcttgctaattgtttattatgaaattgatgtgttattatgtctttatcagagtgtgtgattcatgtgtaatgtgattgatgattgaaaagtgaattttaaatgacaaagtggtggagttacgtgaattaagtttaagtaagttgtatctcgtttatatcatatgtatatctagttgtctt

SEQ ID NO: 40386 - DNA, 398 bp, Glycine max
  unsure (1)..(398): unsure at all n locations
agcttaaggaggaagcctcncaagattttttatttttgccacatgaagccaccgcggtgtaaacgcttcccagccgttaaccttggatcttctcgaaatttggtctgcaactttaaaagacacttatccatgatctgaccgttgggatcttggagaagatgtctagagtgtgctagaagcctcttaatgaagcttttggatgaagcctcttaatgaatcttctagagaaaactacatgaagctgcctcggtaaaaacgctgcccagccttcgttaaccgttggatcttctctaactttggtttgaaacttcacaagacaattttccatgatctgaccgttgggatctttgagaatatgtctggagtgtgctaaaagcttccgttcctgagagcatctc

SEQ ID NO: 40387 - DNA, 385 bp, Glycine max
  unsure (1)..(385): unsure at all n locations
agctagctatattggtgtgtgtagctaagctcttgctagttatttaaaggngttacagctaagctctagcttctcaaggaagcttttcaaggaagctacctaggccataaatagaagcatgtgtaacccttgttgtaacttttatgaatgaaagttttgtgaggcacaactcaatgttcaacttttctccctcctttactccttcaatttcgtgctcccccctctctctttctctctttctttcttttcctccattgaagcatcctctccaagcttcttatccaaggcacattcttggtggtgaagctctttcttccaaggcttattccctcatggttggcgcctcttttcaccttttctcctttgtcttccgctgcacctccat

SEQ ID NO: 40388 - DNA, 305 bp, Glycine max
tattggtcactcacgtttatgcaacgctttgttcactcacattacaacactgaaatagcggaatacaaccgtcaagggaataactttcgagcaatagtgctgaaaacaagcttcataggctgcaataatatacacccgtgaaggttgcacatgcatgaatagaataaaagtagtcatgaagcatgcttatacgggcatttaaggtgaaatgatctatgatagcatggaatcctgccagaaataaagtagacaaatttaactgatgctgtaaacatgatctatgatagcatggaccaactcgcttt

SEQ ID NO: 40389 - DNA, 546 bp, Glycine max
  unsure (1)..(546): unsure at all n locations
ccctcacacccgcaccgacccntctaaatannncccaaagcaactatantancacgatncnnnnnacnnnaagggagctcgnnnnatggtgccctgtacnaccccgcgaccnnnanannnaccgngggcanngcaacancaatacaaggcgaganaacaaatttctctatctattgcaccacccgccaacgagccggagaagaacaaagcggcacccaactggggcgaaaaacaagagcaagcacttgatcngcccaaaacaaaagcacactaacgcaccccgtctaactcttactgacctatcaaaaacctttaaactaaaaatgtgaaagccacctggagagcgaagtaggagcacgaataggcacaacgcgggcaccctaatgcctattctagagaaaaccgctagagcccccccacaaccccaccagaaaaagcgcaacccaaacaaccccacaactggacagaccccggcaagaggggatcaaggacacacaccaagacacaagggcaacagaaacagagcgcaaaggagagaccaagcac

SEQ ID NO: 40390 - DNA, 395 bp, Glycine max
  unsure (1)..(395): unsure at all n locations
atactcaagcttggaaatatgaacttatttgattataatgattattattacctgattatgtnttctaagctggacttcaacgtccgtaccaaatgataaattagcagcaagtaacgtgaaaggatctactgtagcaccagaacaaaccaaactaggaatctggggagcgtaaaccaacttccacttagccaggccaaactctcccttcccttctattcgtggcattagtttttcaagagtagcagttacaaccttttcaaatgcaacatgaccattgttttccaaaatggattctgctaactgactatcaagtcttctggcaacctgcatgggttgaaataattaataagaccatgctactggaaggaaaaatcatgagaatattgatctttcac

SEQ ID NO: 40391 - DNA, 434 bp, Glycine max
  unsure (1)..(434): unsure at all n locations
agctttgagggtgcgcagcccaccatcttttatagtagagtaccgataatgtgtctaccatcacgattatcgtctccctttntgcacatgttctgtagttgcatcctatccggaaccatatcagaatagtactgatactgcctaacgaaggcaaccattaggtccttccaagtatggacttgggaaggttccaagttagtgtaccatgtaacaactaccccagtaagactttcttggaagaaatgtattagcagttcctcatcttggcgtatgcccttatcttccgacaatacatctttggatggttcttgnggcaagtagtccctttgtacttgtcaaagtccagcaccttgaacttgggaggggtgatgatattgggtactangaacaactcttctaggttagcanaggcataatctttacctccttcaatg

SEQ ID NO: 40392 - DNA, 381 bp, Glycine max
tgttgtgaaggtcttttcattttaggaagttacaaatctctctctcaaaaccctcttcatgtcttgccaattattaatcaacggccatctcatcctctcaacatcactcctcacttgattccaccgcactaaggcatatccctcaaactccatggaggccaatttgatctttttctcttcattgtagttgtagcaagcaaagactttctcaaccttcatctcccactcaagatacacttccgaatcacaagtccctttaaaagtagggatcttcaccttcactccctcaatcccttcctctctttgtccacctccatatcttctatgatttcttctctccctatacctctcattcctccatcctccctcatcctcttcata

SEQ ID NO: 40393 - DNA, 414 bp, Glycine max
  unsure (1)..(414): unsure at all n locations
agcttctggttggtattgattcttggttttaccctttaagaccttcatgtaccactcaactggatacatccactgtaaaaaaatgggattacataactgaatctccctcaccaaatgcacaattaagtgaaccataatgtcaaaaaatggtggaggaaaatacatctccaattgacaaaggacaatggcagtctcattctccaaatcatccaattgtcgagggtcaatggctttgttagagatagcattaaaaacaaagtacaaacgatttattgcaaccctaactttgtcaggcaagataccgcgaatcgctacatgcaatagttattgcattaacacatgagaatcatgagacttcaagccaaccaattntagatcattaatggatacaaggctcttgatatttgaagagta

SEQ ID NO: 40394 - DNA, 379 bp, Glycine max
  unsure (1)..(379): unsure at all n locations
tttagaaaatgtcaatgcctattgtatactatttttcttccatgtttcaattgtacatggcttgtgtcttcttcatatatagagcatgcatgatggcccttaacactatatccactcaaattctcgtatgctggaaagtcattaatggtacgaaatagcattgcacgcaacttaaatgtcttattttgataccatcaaacacagtaacccccttgtcccacaactttgtcaagtcttcaatcaagggactgagataaatatcaatgtcctttcctagttgtcttgggcttgatatcatcatagataacatcatgcatttttgcttcatgcacaaccaaggagacaagttttaaattactagcanaatangccatgaact

SEQ ID NO: 40395 - DNA, 436 bp, Glycine max
  unsure (1)..(436): unsure at all n locations
agcttatggaggaagcctcttaatgaagtttttatagaaagctacatgaagctacctcggtaaaaacgcttcccagccgttaaccttggatcttctcgaaatttggtctgcaactttaaaagacacttatccatgatctgaccgttgggatcttggagaagatgtctagagtgtgctagaagcctcttaatgaagcttttggaggaagcctcttaatgaatcttctagagaaaactacatgaagctgcctcggtaaaaacgctgcccagccttcgttaaccgttggatcttctcgaactttggtttgaaacttcacaagacaattttccatgatctgaccgttgggatctttgagaatatgtctggagtgtgctaaaagcttccgttcccgagagcatctcttatntaagcatttcagcctttgctttcgtgtagc

SEQ ID NO: 40396 - DNA, 367 bp, Glycine max
  unsure (1)..(367): unsure at all n locations
ttacgtctatggacttagattgtttgccttttctttcattntagaggcacccatgtgatttggatatcaatccctttaaactttgaaatgaccactttttcatttattttaattatgtttatttttggtatacgttttgatgcattggatacatgcctcgaaatacaaggctaaaaccctatactactagaatggccaaaatacaaggcccaaacgaaggaaaaacctattctaatatttacaaagataagcgggctcatacttagcccatgggctcgaaatctaccctaaggctcatgagaaccctagggccttcccttgaatctctggcccaatctacttggagtcttctatccaatgcccttgc

SEQ ID NO: 40397 - DNA, 252 bp, Glycine max
tgcccctaactaataagatttcctgtgcagggtatcattgcttctgcatgactgatggctaccttggggctggagattttggttgaatctgtctcgagtgttatttcgaaggtattagaaataatcctttgttgcggctcgtctattatatacctaaatctgggttgaagactacttattcaacatgtggattatcctccataataagtgattctatcattagagcacatgatattatcatttgaccttgct

SEQ ID NO: 40398 - DNA, 317 bp, Glycine max
  unsure (1)..(317): unsure at all n locations
tgaatactttcagtggggttttccgagatacttgtgtacatattgctaaacttataattntaaaatattttactaattaaatatgtttattttcttttttgatcaagaaactattattcatttattaaattttggagcgttttgtaagtaacactgcctgccgtcaacactcaacaacttttgagtgaacaatgtgggtgttatggataaattaaatgttgtattatgacatcacgcccatttgttgaaatttaagtaattactactaagatatatgggggttctttttggttctttaatttgatgagaaatttatg

SEQ ID NO: 40399 - DNA, 405 bp, Glycine max
  unsure (1)..(405): unsure at all n locations
agcttagcagattatcagcatttttgatanttaaatttccttgttgcggctcagtccaataccacttcaactcattttcaaacacagcccagttaaaatgcttcacaacgaagttaacaaagtcctcattgtcaatgttcattctactgatgcatgttccaattgggaaatcattctgtgtttgtataacttttaccgaggtgttagcatagctgccagagtccagtccagagaatttcaggataacatcacgtttactaatctgcagtgcagcaagtacgtataaattaaaatatatataaaaataatgcaaatcatctcatattctatcaatgaagaatggatcatgtaatattaagataaggcacagaagtctgaaacatacttagcttcatgcaacattta

SEQ ID NO: 40400 - DNA, 368 bp, Glycine max
tctcacataaagctaaaatgaacttatgcatttatcttgtacagttcttttcagggtatattggattaggatttcaaaggattttaaaagactttttttttttataaaaagtcttgtgatattcaatcaggatttttacaggatgaaaaagtccaccaaaatttcttttgtcttatcacacataccctcttctctctttaatattcttcaagatgcgtgtgccatatatatttctcctattcttttggaataaaaaaatgtcaaatatatttattccttctgcactttttccactgttttctaaattaaattaatgtttatcttatgtactaaaactaaccatgctttccttatattgattatgctca

SEQ ID NO: 40401 - DNA, 399 bp, Glycine max
  unsure (1)..(399): unsure at all n locations
agcttataacacacactgttttgtatttttgatagnnacatgacactaaaattgccaactatgcacctccctaatggcattacttttaaatttaacaacaaggactattttgcaacacttatgcaaagataatgactattttttacatttcaaaaggatatggactaatttgcaaaatggttacaagacagggaccaaaattcctattcactcgataattaagtcataaaagtttaaagtatagggtattttcgtaaatgactatataactattttaaaaatagaattttagtctaattagttggtgactaattaaagtatctaattatatgatgtagaataattaaaataagttggagttataacaccttaataaaaaattacagctcaaactgacaa

SEQ ID NO: 40402 - DNA, 364 bp, Glycine max
tgtgcattttgtatactgttcattgcccactttgacccgcgtgggagaataggtggcccggcatggaaggcgcaattgatggacgagatcctgtcggatgaacatgtgggtattgccacggtgcaccagtaccactacagggtggccaccgagcacgcccaataaacgcaaaatctctgggggctcgatgacccgctcacgagtgtacacttatttgggtcgggcccgggtcaagaggctgcacaagatcaaacgggtcatgaggcggtgtattgggcactatatgaggagggaggactcgtgcattccatgattagcacaaaaaccctagaggcacaatggtggcctctatggtatgtctcga

SEQ ID NO: 40403 - DNA, 443 bp, Glycine max
  unsure (1)..(443): unsure at all n locations
agcttcaagaaaaagatggctcttagcaatanttcttatttccagaagggaattctatcaatagacctccaatctttaatggagagggttaccactactggaaaacccgaatgcaaatttttattgaggcaatagatctaaatatctgggaagccatagaaatagggccttatatacccaccatagtagaaagagtttcaatagatggtagttcatcaagtgaaagcataaccatagaaaaacctagagatagatggtctgaagaggatagaaaacgagtacaatacaacttataagccaaaaacataataacatctgccctgngaatggatgaatatttcanggtatcaaattgtaagagtgctaaggagatgtgggacactcttcgattaacacatgaaggaactacagatgttaaaagatctagaatatatgcactaact

SEQ ID NO: 40404 - DNA, 365 bp, Glycine max
  unsure (1)..(365): unsure at all n locations
tgtctttgttttagatgttttttatacacgttttangacttgtaaaatccaatttgggcaatattgaatgagggcaagagtgatttcgaaatctgcctaatttgtgcagcaaaaagctgtcaaattttgtgcagcagaatttggctcttgtgcagaaaatgtttgtgtattgttggttgtggaaaggatagtacatattgggttctggacgttttctagtagatcccaacggtcaaaatgtagatttatgtactagggacctccagtaaaaaatttgagtcgatccaatggttaacgaaacggaacgaagaaaatgttactggggtatttgagtagagaaagctgtggtattggaatgttgtttg

SEQ ID NO: 40405 - DNA, 394 bp, Glycine max
aactcaagctttacaaaactgtgtaaatagaaacataaacttattataatttcagcaactctcttgcctctcagagatcaatacttctattggcagaccccgaagaaaaggaatacttgtaagggtacaacatcatggactttggtagctgaaacactgaaaccacacttgttaagctcaatcaggaacactttagttatgaataagagaagcacaacatagaaagaaataacacaacacaaatgagaagagcatattcagtgaaaacttatgatcttctccatgcactattgatatcatatcataactcagtaaacacaaaactcacattttgaaatgccagacacaaaaaaaaaaatcagcactaaattcaaaatccaaaacagcaatagtg

SEQ ID NO: 40406 - DNA, 395 bp, Glycine max
aaactcaagcttattattgtgagagtttcttctataatggcgtgctaaacactctagttggggattcataatgaacggttgatgtaaatacctaatatctaattgattatgttttctatgttcaatgcttaatgtttgaatgcttttggtctaatcatccatttgtgtgcatagttaggtgactttagcattggaaattgtactgttgccttataacttgattgaagcacgatcgaaacttaatcttacaagagagatctgcggattacgttatggttttaattatgttgctacaataatgctgtttagtctagcctactcttacaagagggatttgtggacgaagcttaggctaaaagttcttaagctgcttgagctgagtctagtcttacaag

SEQ ID NO: 40407 - DNA, 383 bp, Glycine max
  unsure (1)..(383): unsure at all n locations
agctngaaccttcaaatctcacacgaggagtatgttttatggaatttgaatnntatttattatatcatgacacaaactatctgcgtcacaagtagaatagtgaatctctttgcagtatggaactggttccctttcattattttgatcataacattggataaaggccctagacaaacgcgtgagtctttctaagtttaaccattaggtggatttgaggagtgatcctatattcctatatattgacatattaatcttggtctgtggagggggatgtatattatttgccatttctatctactggctattgctctatcaagcaccatcattatattaatcatgtaaatgttaatatgttaaatataaggttctgagttgaggggggc

SEQ ID NO: 40408 - DNA, 388 bp, Glycine max
tggtggctaattcatggcattaatgctccaatacttcaaaatattgcccttaagctacttgcgcaaccttgttcatcttcttgttgtgaaaggaattggagtacatattcatttatccattctttaaagagaaacaagatggcaccacatagagttgaagatttagtatttgttcatagcaacctacgacttctctcaaggaatactccacaatatcatcaagaggaaactaaaatgtgggatgtagctggagatgattttgggtcacttgatgattgtggtattcttgaaattgttagtttgtctttagatgaaccagagttagagggtgtctttttcaatgatgattgctagtttgtggaattcttgaagacttgaagttgctaat

SEQ ID NO: 40409 - DNA, 441 bp, Glycine max
  unsure (1)..(441): unsure at all n locations
agcttgtgcattcaatatcctgataaggttgttccatatgttctcaagactggactaatacatttgcattattgggaatagtaaatttgagaatgccatgctagatctaggagatcagttagtgtcatgcctctgtccattttcaattctttatcccttggacctttgcaatctacagatgtggtgattcatttggcagatagaagtgttgcttaccccgcaggtttcatagaggatgtgctggttcgggttggtgaacttatttttcctgttggattttatgttcttaatatggaaaagggagttttcccatggttcaattccaattattttaggtaggccatntatgaaaacagcccgaaccaagatagatgttatgctagccattgctatagaaattgtgatattgttgtcatttaacattttgatgcatgaacatcc

SEQ ID NO: 40410 - DNA, 366 bp, Glycine max
  unsure (1)..(366): unsure at all n locations
nggngctttaagggctnttataaggngcattttatttctaccttccacactttccttcaacttttaaattttgcacaattgctttagtaatttttgtttgaaaattagaaacatatatatgatgaggggtctacgtacaattgtacacgtttaataaattttaacgacaaaagtaaattttattaatcaaaatattatatgaaccattatgtatatcaacctgtaagttttttattttaatcctttaaagatttaaaatttgtggtttaagtccctattatcaagtaacaacattgatgaagaggtaatagcgacattgacagtccaattaactttccgcatcaccaacaagtttgacaaagtaat

SEQ ID NO: 40411 - DNA, 440 bp, Glycine max
  unsure (1)..(440): unsure at all n locations
agctnttctaanaccaaaaagctaaatatanatataaaccaaaatgcataaacccccattccccacaccttanacaccgtcacaaagcatcatgagtgaagcttctacaggcttttggagtgactgaatcctgacacaattgacaacaaaccaactctcttccctctctttctaattatgttttaacctcacacacactcctaaaccagaattgacactatcacagtctccttcatccttctctctctgaatctatcaattattttctctctttctctttcatgcatattcacaaacacatagtaatcaccacctagctcaacctcaaaccaccaaagaaaaagccacgacctatttcaccaaattcagtatcctccaaccccatcaaaccaaaatccaagaaaattccaaaacgtataaatgtaatccatatagacaaa

SEQ ID NO: 40412 - DNA, 380 bp, Glycine max
  unsure (1)..(380): unsure at all n locations
tggaacataactgaagcatctgatactgattatatctccaaggngactccagtgggcagagtatattattgaatttaggtgggaaagagaaagaaacagaaagacagaagaaacagaatggagaggatagaaggaaagagaatagaaacagaggtcagaaatgtgcactgcactctgattatcattcagtttgtctaaaatacaaaaaaacctgccttatttatagacagctacctaatagccataaaataacaatagctggctaaaactaactaattgacataaagttgtgccttggtgacttgttggtcatgggttcgaatccggaaacagcctctttgcatatgaaagggtaaggctgcgtacaacatctctcccca

SEQ ID NO: 40413 - DNA, 425 bp, Glycine max
  unsure (1)..(425): unsure at all n locations
agcttcttcatcaaatactntntcctcttttntcttcttgnntctcatcaaccacttctagttcagttgtcactagttntactatcatctcatctttcctttgtttagtcattaacttgtttgatgtgtatattagaccacttcgagtcataccatcttacaatgtttgtaacaccaggagctacttccttggtattctttgattggtttccatcaaatccttccgcacttacgccatactttcatggcaccgccttgttatctttataaggggaagcctttggtactcgtatagtaacaaattttggtccactaggagtctagtaagtagcacccctagtgtaatggacaactaagggcttcgggaaggtcattgatgaaccaattgtcaatacatcattttcaaagtatcctacctatatgtt

SEQ ID NO: 40414 - DNA, 381 bp, Glycine max
tgtccttggcttttcccactttcttatatttttcgtggtattttatggaggttgtttggggtcactaaggttgcaaccatactcaagaaaatcgaaatagaatgtcatttttcttttttgaaaacccaatcatttctaccttggtttctggattaaggatttgcatatttgaacaaaaccattatgcaaatgaaaaataatctctaatagaaaagaggccaccaagaggagaagcaaactagattcttctaaccattttgcatatcagaagggcatgggcaacattttgggggagagaccacatatggggcaaacgttctccacatgcactcccagcttctaaagatttgtcataactgggatgatgtctttgcaagctct

SEQ ID NO: 40415 - DNA, 439 bp, Glycine max
  unsure (1)..(439): unsure at all n locations
agcttgtcccacaagcctctcctacanttggttcatgaaaggcaaaagaaagtggtctttcctcatggcttctttgagcttgtggtaatcgatgcatattctccagccagtgaaagtccttgttgggattaggtcattcttttcatcctgaatgattttcgtgccccctttctttggtaccacctggattgggcttacccaagtactatcagaaatggggtagataatccaagcctctagaagcttgagcacctcttccttcattgatgggttaaggcttctcttgggctgtctgactggtttgtaatcttccgccatcattatgttgtgcatatagtagacagggttgattcttttgagatctgatatgtgccaccttattgctcactgtcaatgtacatccccttcttggtgaagatgtccttcatgaatttggcgt

SEQ ID NO: 40416 - DNA, 372 bp, Glycine max
  unsure (1)..(372): unsure at all n locations
tgcctcanagaggtccaggatgtacaaggctttcgaaggaactagtgccgctccggagtatgacagtcaccgctttaggagcgctgtacaccagcagcgctttgaggccattaagggatggtcatttctccgggagccacgcgtccagctcagggacgacgagtatactgatttccaggaggaaatagggcgccggcggtgggcaccactggttactcctatggccaagtttgatccagaaatagtccttgagttttatgccaatgcttggccaacagaggagggcgtgcgtgacatgagatcctgngtaaggggacagtggatcccgtttgatgccgacgctatcggccaactcctaggatatccgatggt

SEQ ID NO: 40417 - DNA, 447 bp, Glycine max
agcttgcattgttgcagaacctgccttttatttttgttattggatctataagcagacccgctgtataatgatagatgacaataatgtattatgttgcattcaaattcagcaaccagtattttatttcatcattcttgccctcatgtaaagatattgacgaggaattaaataaaaagtaattgatgtgtcattttctgaatttaaatgttttacttcttcatattaaagacgaacattgcagatcgattagaaacgcgacaaacacaatctcaattcccagcacaacaaaaaaaacacgggcgttgctgcctaaaagatagtaaaatcgatgctcacgaatttaaacgtttcgtcaactctttttttcccatttaattgtgtaaagcatgcgcatcttatacagagctataccatacagaaaactagttttaattttggtacattatg

SEQ ID NO: 40418 - DNA, 374 bp, Glycine max
  unsure (1)..(374): unsure at all n locations
tatacgtagncaaggacttttctttgctgttattacgtacccctaaggtgtaggaaaaatagggaatacaaatctaattaggggattgcacattattctttccactttggcccaaacagtggttgtacgctaatctgtcctgcacccaaacaggtttgacatgtcccaccaaaatattcattaagtattctatgaaattcttaaaattatgggatcaaatgtgttggaaaaaggacatctaggactaaattactgtaaaagggtaacccctagttcttccagacctgtacacatgaatttatgcaatgcaaggcatgcagtcaaaattttccagcaagcagttttgggattgaagttgctttctactactagac

SEQ ID NO: 40419 - DNA, 337 bp, Glycine max
  unsure (1)..(337): unsure at all n locations
agctntttattntgactagattatgattaatctgtggccacctcatggactcctctaaggacaataacatcatttcttgcactgaattgttgggagtcggaagccatcttctcaatcaaattcctagcctcaacaggggtcatatcaccaagagctccaccattggtaccatcaatcatactcctctccatgttgctaagtccctcatagaaatatttaagaaggagttgcccacaaatatgatggtaagggcagcttgcacataatttcttgaatctttcccagtactcatacaagctctctccactaagttgactgatgcctganatgtcttttc

SEQ ID NO: 40420 - DNA, 366 bp, Glycine max
tgggttcttaggcctagaattgcattcgggtactcattttaaatccttcatgctgtccctatacatataaaacagtcccacaacccaaagctcacaaaaccatgctcatatgtcgttgaggcatttcaccgagcacttggtgggcgcatgtttaggcacgaaaatcaagagaatggggacaatgtggcatgcgccattacttcagaatacgccctaggccaaggccatcccttacaacccctcaatccaacaaaaacaagcaacaatttgaggataaatccctcacgtttcttagcaaacacatgcaatttagagcaccaaaatacatcaatggaaagctagaaagcccaagaatgaggtacttac

SEQ ID NO: 40421 - DNA, 436 bp, Glycine max
  unsure (1)..(436): unsure at all n locations
agcttcatggtgaatcaaatgttattcttangtgttttgatgataacaatgatgatgataaaagatgatgacaaaggtgatgacaaaaagctcaaagatcaatcaaaaaatcaagaacaattcaagagttcaagataagaatcaagaaggattcaagactcaagattcaaggatgaagagaagactcaatcaagataagtattaaacagtttttcaaaactttgaatagcacatgattttttgacaaaaccttttaccaaagagttttgaaaaagttccaattattttcaaaaagttgtaatcgattacaatgttttggtaatcgattaccagtgcctttgaatgttgaaattcaaattcaaatgtgaagagtcacatcctttcacacaaaagctntgtgtaatcgattacactaatttggtaatcgattaccagt

SEQ ID NO: 40422 - DNA, 370 bp, Glycine max
taaaggagcactcaaatctggtgtatttactcccaaggcctacactccgaagagtttgtcagggcctctccctcctgattcaagtccaacccagaaaatattttagcacacagactctatctatgaattgtacaaaacacacgactcctcaattgttctcaaaatagttttatcttgtcgcgcttgtgattatactcgtcgggtccccacagtggttcccgtcacagtactcgtcacgcattaactcgtcgcccttaaagggacttagcattaactcatcgtttttaaagggtcttagcattaactagtcgcccttaaaggattttatagtcaaatgattatacaattcatagctcacaactcaatgcac

SEQ ID NO: 40423 - DNA, 433 bp, Glycine max
  unsure (1)..(433): unsure at all n locations
agcttaagatactatagaagtttaangtangatgcctgactaaaatgaaatgaaaaccccaccagatctacttccccattcgcaccaaagagaattgtattacagtagaagcaacagcatataaagtacctcatttgttatcacttcccacttctcaggctaattcatatggaaataatggaaaggtcatccaccagagaaaacaatataactactctgcatgttacatttcaggacagcgacgggatgggggatcaaatctagaaattcttacaaagtaaccaattcttcaccaacacctaggagcctaatctaatcaattgcggcatatttccctattaagtacatcttattgttaccaaggtagtaagccataattcaaaagtcaataaaaaagcatcaacctaactacaacaacactaacaataaccat

SEQ ID NO: 40424 - DNA, 363 bp, Glycine max
taaatgtttgtaatcaaatatgttttgctgtggtatatgaaggttgttacctgcggtaatgtgcctcttgagtcatctttccagaaagttcccagatgtgtatatacgtcaacaagtttatatgagtatcgaggatggaactcaaaagctgccaatcctacacaccgtcggcttacttggggccttagactgctggaagtaagttactgactattttttctgggttagttattatggaatttaatactttactctgacatcctttgtacaattttacttctattattgcccccaagagcgtggcagtgaaggacatgcttcttctgattaaatttcaagttgaatttattgttctgaattaat

SEQ ID NO: 40425 - DNA, 269 bp, Glycine max
  unsure (1)..(269): unsure at all n locations
agacgcttacaaataattactgataataattttaaaataacaattctaattccaaaaattattacacttaaactttaccttcaatttttagtctaacaaataaatctattacttcaactaatattntgtcaatcataacaataacaatatttatttgctcgctctattaaacttaaactagacattcatattttattctaaanaaaaatattacactgattaaataatttgtgaaaaattcctcaagttcanaatcttgcactatcacg

SEQ ID NO: 40426 - DNA, 94 bp, Glycine max
ctgcagcttatagcgcggttcggaacaaggttcttcttccgagatcttttatgatatgccgagtactttggatttggaacgaccatgccctcct

SEQ ID NO: 40427 - DNA, 429 bp, Glycine max
aaaatgatatttaatggagactacttactatattatcatggttgctactttccctacttcaacaaatcttgtgtgatttaactatttgatgtgaatttggaagaagccatctcttaaaacagaaaattctcaaagcacttctaatacaaataactgacaccataattgaaaaacagcacaacacagccattacttgctaacctgctaactttttttttcaaacatacaaagatcatagatgtcaccataccagagatagaagcaatgcgcctggcacactatataacaattggatctgagtgtgccactgcacttgattcttttaaagaagagtatgccatcttatgaactcttatctttcctctgtattgccctctagaatgaggaagtatggtgctgacatcaccaaattactactaaagaaatttg

SEQ ID NO: 40428 - DNA, 396 bp, Glycine max
  unsure (1)..(396): unsure at all n locations
tcaaggaacaaagaatttcttattgtttgaccttctttgatgacacanaagaaatgtgtttgttgttggggtctttgggtaaagtgaaagatgcaaaagaagtggtgacaacacctcttctcaaaaaccctttgcaaccttctttttactatctttctcttgaagctatctctgttggggacactcgattgtccattgagaagtccacttttgaagtgngggatgatgggaatggtggtgtgatcatagactctggcaccacaatcacctacgttcaacaaaaggcctatgaggcactcaaaanagagttcatttctcataccanacttgctttgacaaaactagctcaacaggggtggatctatgtttctccttgccatcanggtcaacacaagt

SEQ ID NO: 40429 - DNA, 503 bp, Glycine max
  unsure (1)..(503): unsure at all n locations
ctgcagcttcacccactcataagcctccatggacatanaaataaagagtaattttttaactacgcagtcatcatctaagcatccctgcctacctatagtaaacagaagctacagaacaacataacagaaatagttgctaacatcttagcatcaaccacatacattgatatcgaaacacaatgatttcatcttgttcatttaaatatgaaattatttaccaataaaatcaaagattcaaaattctaaaaaactacacaaccacacaacccctganatttaaattntattgtttcatgtcttttatttccacgacagcagttatggctgccctgccctaccctgatggtgaaaacacccgcaacctcaacccaattgattcctttctctgtaacanaacctataccataatccacacgtccctagtaaattcataagataataattacaacaatcaaagttcttggcagtggtcttacaacaacagactcacagtgaaccctaat

SEQ ID NO: 40430 - DNA, 509 bp, Glycine max
  unsure (1)..(509): unsure at all n locations
gatactgatttgaaattatgattctcataaactaggagattgggaaacaaaaacttcctcatcaatatatccatttagggaaacactctttacatccatttggtacaacttaaaattcattattcaagcataagcaagaagtaaccttacaacctctaatctagctaccggtgcatatgtctcatcaaagtctataccatcttgtgggttataacctttggctacaaggtgagccttgaaaacctattttcctagttataacactattttcatcaagcttgttcttaaaaacctatttagttcctatgatgttcaagttattagtacttgttatcaattcccatacatcattccttttaaattgatntaactcatcatgcatagacataatccanaactcatcttttaatgcatcatcaaaaattaagggttcaacttaagacacaaaagccatatgttcacaaaacaaacttaaagagtgtctagtagatactctcttctcaatatca

SEQ ID NO: 40431 - DNA, 297 bp, Glycine max
  unsure (1)..(297): unsure at all n locations
tactaagtatttattacctatacttaacatataatacttataacattacaaaatagccataaattgggagagttcaatacaatttatacaaattttatacacaaaagttagttattttcactgactaacaactcccccaaatttacagtttcgcttatcctcaagcaaaaagagaatagctcacttgtcctcaagtgacaatgacatgcagtgactatgtacaaaggtgtatgctacaaagtgactgatngcatgatatgagaatggagtaaaatgtcctcatcacatgtctttcac

SEQ ID NO: 40432 - DNA, 575 bp, Glycine max
  unsure (1)..(575): unsure at all n locations
gcggcaatgaaccttgactncgagnnagttacagccnnncncnaactgatacatagatnacggacncntnnanacnnatgcttattgcgcattatctcgaaacaatatgagacattccttgatattctgatactggggacagatgtcgtaccggatgtcacgacatcacgcttcataacatgcagatggtatttgactggttgaacagattaaacaagtgaataacacacgataataggaacctcagtcggagctacgtcacatacatcttgaggctaccaagccagggaggaaatccactaaaatagtgttagctcgaagatctaacagccactgtatacaaccttctcacctaaccactacccgtgctagcactacctaagagccactcttagatatgagaacccctctcactctctctaaacactactccgtgttacagtgaatcaatacacaccagagatgctctctgaacatagagatcaactccacactattagatcactctcacactcnggtcgagacatgtgtagagtacatcaggtggctacaaacactcagtccaaactcataat

SEQ ID NO: 40433 - DNA, 439 bp, Glycine max
  unsure (1)..(439): unsure at all n locations
gaacaagtcatcaacttctctttcagaaccatgccatgttctcgcgagtggtccctttcttcccttcgcaacttgagttcactattgctaccccatagagctccgcgaaatttgttccggccatactcttccttgcgagccctcttggtttcttgttcaagggctcttgcggtaattgcattctcttcccgtaacccggcacactccttccgaacgtgtgtagcggccaacttgaacttctccttggcaagatttgcctttcctaacttgcttttgagagcttggacttcctcgtcctcttccggtgcttcaaaattctcttcgctgacgactnttaacttggcgagccaatctaaacctcgtatgcgaactttcagccattcgggtacccaccaatgatgccattacgaatgcctctaagctcttgatcttttcctta

SEQ ID NO: 40434 - DNA, 601 bp, Glycine max
  unsure (1)..(601): unsure at all n locations
agcgcgcnnatgagacccatgannnncnnnnnnnagnnnnacggnnnnnnnnnttctgaatgcctttgagnaccngacctatagacactcaagctngagngcnnatcnngcnngaaataccatnngnatngngaatgttgatgcccatacctcntttcctgaagnaggggggccccttcaagaagaggatcttgacgggaggggtatagtagaaatttatatgcagctaggaaatccatttgcagccctaaaaaagtaccagaaatttgtatcttatattttggattgaacagattccattaagaaatcggtgatgttttatgttggccatcggtgatgtaattaagcaacaagaaaaactgctgaaaggttatttgtanggactgatactgactttacaaaggatggattatacctaatattgccataataatttaantcaatttgagtcataataatttaaaaaattgggagggattctaagagaataattgttgagtaaataatttataataaaactcctatttataaaaaaaataattgatttaaaaattaaacattgttgatataaaatcctctctatatctgtccggccaaatag

SEQ ID NO: 40435 - DNA, 312 bp, Glycine max
agcttatgcgcataattccttacgaacgttcacttgcacaagacatgctatctactaagaaaaatgcacccatatacaatcaaggtagcttcattacctagattatttacatgtacttccaaggtgtatttgttatttacatcacacacgcctccttggctgaatttacatacatgcatactcaaagcattttggggtaccaaaaactgcacatgcgctcatcttggtatttctaatacccctacatatacaaacttcacgatgaatcttgactacctacacaataaggtgctacatttcatgctttttttt

SEQ ID NO: 40436 - DNA, 335 bp, Glycine max
  unsure (1)..(335): unsure at all n locations
gcccctactttcgaggggcaactcccaccttatgacgactatcccgggcaagacgatgaggaaggagatacccatcttggccccctgctccacctcaaagatccgtccccccatgaactaccccaaccgaacatagtttgccatatcccgacttcacccacacctgtaaaagaatctgttcccttcgcggaagataangngaagatggaggcgcttgaaagaggttaagagcagtcgaaggccttgcaattacccattctcggatnntggcggattatgtctcgtgcccaacattgacatccctcccaagttcaaagtaccagactttgataagt

SEQ ID NO: 40437 - DNA, 326 bp, Glycine max
gtccggactctcagccacttatgatagccgccgatgatcccattactgcttcccctaagctctctgtcctttcttcacgccgcatcccatgccttgcgaactccttggagtaccctcgcattgtggtcactgaaaccccgtgcgatgaaaggcgtgatgctttcgtctaatggagctcctctcatggggtagccaagctgtcttatggcgagaacgggattataattaatacaaccccttgttcccatcaagggaacatttggacatccttcgcatgaagatagaatcttgattcttccttccttctagcgagggaaccaattaat

SEQ ID NO: 40438 - DNA, 495 bp, Glycine max
  unsure (1)..(495): unsure at all n locations
naatgattgccattgcattacgcacactgatacactgagtttcatcatattagctatgctcgaagtgatcaagatctctgtttctcaatatgggctcttatacaatcactttcaaagatgatgcctctctcaatcgaccatcatnggttgagggagagcattttatgttcttgccaaagagaatggaaatctttatttaatcaatngacctcngtgcatggaatgctattgttaaaagacccttcatccaactanaaaagttatgggcttatgattccctaagaatggctgagttgaagatgatagaaaaaaaatctcaaatatccaaagctaaaacatttaacttttggttatcttttaaggaaattccatattcccgtgtaaagtccaggagaaaaggaaatactttttatcaattttacctttgataaaatgtgaaccttcctaccaaaaaaatacttctatgatattactgtctcgagaattatataaacg

SEQ ID NO: 40439 - DNA, 475 bp, Glycine max
agcttcgagattttcctcttgcaattatgtatccttaacatgtgcgagaagtttctgttatatcttgagagacttgcgtgggatattaaagataagtcatttggtacagtgtcaatacacgtttcaggaaagaattgttcatgatcttcaacattgttagtcctttccttgttgtaggaaactaattcctttccctagactaaacacaacattcttcttttataatgaatataacataatattctattattgacttatattgtgttaaagatggaaggatctcaagagtaagtctttattatagtaactttcagggaaaactcatacgagttactcaatttcatataatatttcacattgttttataatggaacatcatattttgtactctaaacaatcaattaacttttactctactaagagactatggtctcaatagatccacatatattatataatatttattatattctat

SEQ ID NO: 40440 - DNA, 540 bp, Glycine max
  unsure (1)..(540): unsure at all n locations
aggacgtgtttcttgtcatttgatnancggccancnntnaanacannanccngcnggttgantngcattgcagnancncgcaccananaanacncattctngttagctagnanngagagccannagcgaggcgaaatgtctttgtgaacatagcctngacagtacatacggggaaacgctaactgntatgttctatgcgttttcctatcctttttatcctaaatatatttatcgaatgtctagatacatctgtaaaaaaaatatagtttatgtcttctatgcattatacaattgcatctcgttctcaactgagttgacaaacactgacatgtcataggggagagntcagatccagggggtttcagtgaggttgcgaacatacttatgtgcatttaaaacgctgcaatattaaaaaatttcaaagactaacagatttgattatgcgagagtaaaactgtggaggtttttcaattaggtagagttaagatttgaggtgtcatccatatataattatagtattagtttaatgttgatcgagtg

SEQ ID NO: 40441 - DNA, 583 bp, Glycine max
  unsure (1)..(583): unsure at all n locations
agggacgacgagattgaacccattgagnnnccttgannnccnantggananncnccnattgaaaccatcgtanaaccgcnganctctagagacgaactgcttgcatgcaagcttatnctatatgacactctttgtaccaccttgattctaactcagtcaattttaaagtcctgctaaatgagtaccaagtgaattgcaccagcttggtgaagaactaagcattactttgtctggtcaatttttaaatcatatcaatttaatggtaatttaaggatgtgctgagtaccatgtcctcatttatgaaagctacaagattcacccatctgaacttggaagggattatggagtgtaggattgtttataatcaatggagaaagaacgaaaaaattggaaatggatggaggaattttgcacaatcacaacatttgcaagctagaactcanatatatttgagttctagatgcaacttctaactttaatttattttggatttggtataagtagagacattatactatagantatcgactataaattttgttataagcttggggatatatttgtgggactgaacatctaaccn

SEQ ID NO: 40442 - DNA, 373 bp, Glycine max
  unsure (1)..(373): unsure at all n locations
gatcaagatagggggaagtacaacgattatattgagaaactntataagggtcagagaacacgacctgttcagtgagcctgcataactccacattcccacaaaattcggcaactgcatgaagccaatatgaattcaattcaatcccaaggtaaccccaatagacaattaaatgtgtaagaacttccttatagtcacaacaagagaatatcagtcagagctaaattacataaacttcacaatgatacacttacaaaataaaggtcaacttattcacatggtccctaatagtatcctcattttaagttntagtctccacatgaaaaaagtgtaagtttaagtcctacatgtatataaaaagttagtttttatcctt

SEQ ID NO: 40443 - DNA, 563 bp, Glycine max
  unsure (1)..(563): unsure at all n locations
acgccgtgagatgaacctatgagaccctgatncttaagacaccgccgtgatgcacctcgaagaacgcgcanatccttgttgaacctgctcanggaacatttctgtgattggtccagagaagtcttaccactgaaggaaccaatttgggaaattataaactgtgctactcttgaagtaaataagctatgagtgctagtatttttttggtttggtgccaaaacacttttggtcaagaatctatatagtccctataggtgtaacctattggatcaaaaggcacaaattttttttgattccattcaagattgatccaaattttctgggttgtagaacttttaaaatttggattgtagaagcggtgttaaaaggcgtcttttggatctttgagatgcttaatacaaattgaagccgaatctattaaaaaaatttataaanaaggcctgtgttttgagtgctgctggttgaaatggatactggaggaacacctcggctatagctctaaagggaatctgtcccatattccgctcatctgagaaagttgagagtattctgaaacatactat

SEQ ID NO: 40444 - DNA, 382 bp, Glycine max
tgcaagcttgaccaatcccgacccaacccgggcatgttagtcagtgagaacctatgacgtacctaaacaggcgatctcctggcagtcaaccgataaaagaacaaagaccacaaagcaaggaggcttgtgtggtggttggccagctatggatcttgagtgatatttggaatatggcctctggtaatcgattaccaagggtgtgtaatcgatttcaaggcttaaaaatgaaggcaagaagttaagatggtctctggtaatcgattaccatgggtgtgtaatcgattaccaggtctaaaaatggggtcaggaagttgagatggcctctggtaatcgattaccaagggggggtaatcgataccaggcttagaaatggaaatgggat

SEQ ID NO: 40445 - DNA, 125 bp, Glycine max
ttgagcctatgtgtcccattccttgataagaagctctctactagccttaagtgaaaaaccatgacatcaccgtacccttaaagaattctggagctatggaattgttttgggaataagtgtggggg

SEQ ID NO: 40446 - DNA, 398 bp, Glycine max
  unsure (1)..(398): unsure at all n locations
ggaacaatgtggaaacctctggaatattctggagatgtgtggatctcttctggaaccttatggattatgtatggaagggagtagaagagtgtagagactcctagaatgtgtggagcattctagagaattaatatccaccctaggatacaagtaatctccatcattcattgtggaggtggagtaatataaataagggtaggagtcttcattcctaaccatccaagacaaagagtgaattcacttcttagagtaagaaaaagcctctntgatagagaagataaatagctnggaaagtctctatcctcaagcttgagtgagccaccatagagtgagtcaattntgtaaacacatccttgntaaccctactatcatttgtatagtggaagaatctccatatt

SEQ ID NO: 40447 - DNA, 292 bp, Glycine max
  unsure (1)..(292): unsure at all n locations
atagaattcttcacttcagctgtgtcgcaagctttctctttgcgggcgagcgatgcaaggctcacaggtgcgtcttccataggaagaaaatgcgcggagtctccaccaacgtttattgaaaggaaaacgttagaaaaatcaaaggaaaccggtcatgaagaatattccagattcgggagttatctttacgtttgaggaaggtattagcacctctcacgtttgtccgcaaaggacaacagccttagattagaattgtgtgaaattatgtatctaaacttttatnttcttttta

SEQ ID NO: 40448 - DNA, 391 bp, Glycine max
  unsure (1)..(391): unsure at all n locations
agtgcggtcggaacagccgcgcgacttacttatggcnggatttatgtctctgaggagcaaacacatgaacgcgttttctaccgtcatcgccaccaccaacagattcaagcttcataagaatgtatgtttaattaatacctgcaacctctcctcccttccctttttctctttaccactagataaactttatatctcccattattatatcgacctttttctcacgattatgagttnggtgccttctctttctctcctttcaatgatttcacagttttttaataactgcaacggtgcctctgttccacggaagctacgttcatgtgcgtgcctttcaaattccaaatccaagcctgtaaatgttgttatgcataatatgcactttcctttgtat

SEQ ID NO: 40449 - DNA, 401 bp, Glycine max
  unsure (1)..(401): unsure at all n locations
gtcacctgcggtcatgcacgctntgngatgcttgtccaaaaggcaaacatgtcatagtctctnttaaattaaaaaggtgtaagtttctacatctaaacctttggaacttttacacttggacttgcttggcccctctagaactatgagtttgagagttgactattatgctcttgtcattgttgatgattactcaagatttacgtggactttttttcttgctttaaaaagtgttgcttttaaagctttcaagaaacttgcaaaagttattcaaaatgaaaaagatttgacaattaagaccttgagaagtgatcatagaggtgaattccacaatgaagattttaaaactttttgtgaagaanatgggatttcacgtgattnttctgctactagaacttcacaac

SEQ ID NO: 40450 - DNA, 248 bp, Glycine max
  unsure (1)..(248): unsure at all n locations
ctactatgactngagaaacgaagatgatcaaatatcttgcaaagatntaagaggtactaggttgcctcctagtagcgctgctttaacgtcttgagctggacgcgtgatgacttgtcggccacggacctagtactttgcttacctttggctttggacttggtcgcctgctggtcgaccacgggtcgtatgcaacgctccagcctttgtagatgagctgagggactctggaggtggcggcgatgcgtcta

SEQ ID NO: 40451 - DNA, 176 bp, Glycine max
  unsure (1)..(176): unsure at all n locations
gcgcgaacggaatctaaaatgcgaaaatgatgaccctagggctgcaaactcgtcaatctcgtgggtatggctnttgaaaggngggaaaagaagtntttgaatgtaaaaacgccccccctttcgtcattcttataatttggtgcaggggtggctcgcccaggcgagctaacctgcac

SEQ ID NO: 40452 - DNA, 312 bp, Glycine max
  unsure (1)..(312): unsure at all n locations
tttcattctcttctccccttgccaaaaagaattcaccaaggactaaccgcctgaattctttttgtgtctctcttctcccttttccaaaagaataaaggactaactgtctgaattcttttgtgtctcccttctcccttgtcaaagaattcaaaacgacacagtatgataattcttttgattcttccctttcccttatacaanagtgttcaaaggactaagcgcctgagaattcttttgtatccccattcacaaagtatcanaggtttaacagcctgagatctttgtctcaacacattagagggtacacccttt

SEQ ID NO: 40453 - DNA, 246 bp, Glycine max
taccagggatgcagtttctggcagcaaactcttgaggatcaatcctcatcctcgtaaatctagaataggtatgcagtgtctcaccctcctgcagaactactgtggtctctaataaggtgttcaggctgtcagcatcaatcttaattaaatgccctcttaccctcactttcttagggctctggacttccgggctatataagttagcataaaactccttcaccacagctacatctatgcttacatctt

SEQ ID NO: 40454 - DNA, 405 bp, Glycine max
  unsure (1)..(405): unsure at all n locations
agctntctccctcttcnctacgtagctntntctttcttcttcatcctccattgaaactccattaaagctccaacctttggtgcccatttctgctccaaatcgtgaaaggaaggcattttcgaagtcgtgaagcgcatctctacgtgtgggacctcgaaatttcaggtttgggtagacttctttctcacttgattttcgtgggtattgggttttgggagatatgatgggtagtgttgctaggtttctacttcatgatagttatttgtgaagaaatttgttgaaagcatgttgaacttgccatgtttggatgagttaagcttacccattcagttntagggtttttatgatgatgcttgtgatgttgatgtgctgaaattgcttatggaaaactgttagagaagaatg

SEQ ID NO: 40455 - DNA, 593 bp, Glycine max
  unsure (1)..(593): unsure at all n locations
aaacatgtattgatacattgannnncnccnnnnnnnnnnnnnnnccnnnnttttgatactttgatnacngacacatananacncatcttatctgtgcctaacctatctgtagaagaatatttttttgntttcangctaagcgccagtctgntgcgcttactccttgagtaaaattttataaggtgtgctaangtcagcctgctgcgctaagcacccaatcaaaatttcatttttaattttatgtttctgntgaaaataacctatgctaatctcttgtgttttatcttatactttgcagatggcatctaagaaaaggaaggctccttctacaccttcccaagttagatttaatcggtctcggttcacatctcaagaagcttgggagaggtataccgatattggggtgcctangaaactactacccgatangaatgtgatagtttattacacttgagttgacgagttcaaggangaactcaganaagacactgngatganngagtgactgattttactgacagtagcataaatgtcgccattgtgaaagaattgacgcgacctttattgactcangataaatacctagcacgtgg

SEQ ID NO: 40456 - DNA, 386 bp, Glycine max
  unsure (1)..(386): unsure at all n locations
agcttcttagttcttatgatgcagatgggttttatctacctcatgcactcctctaatgactatggcatcatttctggcgctaaactgctgggagttggaagccatcttctcaattaaatttctggcttcagcaggagtcatgtctccaagggctccaccactggcagcatctatcatacttctctccatattactgagtccttcataaaaatattggagaagaagctgttctgaaatctgatggtgggggcaactggcacatagtttcttaaatctctcccagtactcatacaggctctctccactgagttgtctaatacctgagatatccttcctgatggctgtggtcctggaagcannggaaaattnttctaagaatactctct

SEQ ID NO: 40457 - DNA, 591 bp, Glycine max
  unsure (1)..(591): unsure at all n locations
cgagcgtttgaacccttgannnccccnnnnnngnnnnnnnngnnnnnnnaatgantacctttgatnacgngacctgtagacactcattcttctatncaangctcatcntggtggtgaagctacttcntccatggtttattccctaangganggtgcctnctctcacctcttctcctttgtctttcgctgcatctccatggtggaaaaccaccattaaaggacctcatngaagctcaaagatctaacctncacagaagccccacaagcaagctttcatcaatatgtgtgcattttttgaactttgatcttttgaaaataaacttcagatttcagagctcttttagagcacaaaatttcgtgctcttctcttcctctcccttcattcatcttcttcttccttcangctcttatacatgacctcttatggtggtgagcttcttctagactcatcttcttctttgagtgcatcttctctctctctctcctttctcattccgctgcattcatcntccagaagcaaagaattcattaagaaaagatccangcctacagcttcatgagctacatatgtggtacagacatctcatcagg

SEQ ID NO: 40458 - DNA, 407 bp, Glycine max
  unsure (1)..(407): unsure at all n locations
atccttaatcacctgcagcatgcaagctggagggttttggggacccggtgctgtgatgaacgaggataanggctacgtatgagtgtgtgagctcaatttacaggtgggcaactggagatggtgtgcttatacctgacttgtggaaatgggataattgatttgcatcatcgcccgatcgccacctattaccacatataacgagtgtcccataatccaataagcttgatatgaggaagcatggaagagtcagtcttcctacttttgtttgttgaccacaaagtggtacctggagatatgttgcggnggtcaagagaccttggggacgtcatgtggggcgctattgcccaaaaccaagcttgactaatcccgacccaacccgggcatagtcagtcagtgagaacctgtga

SEQ ID NO: 40459 - DNA, 638 bp, Glycine max
  unsure (1)..(638): unsure at all n locations
aggatgtggattgtaccattgannncccccnnnagnnnanannnnnccnnnntttgatacctttgattnacggacacnataganactcattctcgaggantcaactctatccacactgagagacagacacgtctgaactatgtttatcatagtcccatcagactnctagcgaggtcgtcgttatataccacagaattccacctccgctatcctctctagaagatgattcgtcacagctggcatttgagaatcgcagctcatgaaacattgggagcaacaaggatacaagtgcctcctcacatggggcttcaatcgacgtctctctacgtgtgatattatcaccgagttctanggatgcacaccactcctatgaaggtgtgggaatgcattcacgattatttccacaagccaacaatagccacagctagtcaacttcgcactcaactttgtgctatgacacttgcaggcaactcaatacgtgaaattcttgcacagattcgagcatttctgattcctaacttctgttggaagccggatatgttcaagagcatattgattctattcttgatagtcgttcgccggatgatcatccgatatttggatcattgaaagcgaatgtgacctccacctatcgatcg

SEQ ID NO: 40460 - DNA, 284 bp, Glycine max
  unsure (1)..(284): unsure at all n locations
acaccttgttctctatgnggcctgattattacatttctttgaaagcactcaaggcaaaacattattaacaaaagtctaacatatttaaaattttcttctaaaagtttgttgtcattaaaacattcatctcattaagggttctgcttccacactaagaatatcatattccatggtctattgaaagtgggttgtaataaatgttctcgaaagagtttctcaaanaaaggtaaattagtattggcaaaatatttctaaatacttaattcaccttttctcttttcttg

SEQ ID NO: 40461 - DNA, 343 bp, Glycine max
  unsure (1)..(343): unsure at all n locations
ctcttattactagcctatttgaattctttagtgtgaatgtatgtatacatatatttgatgatgtcaaaagaagaatcaaacaaggctcattttgcttcaagattaatacaagaatttttcaacaaacaaagccttgattcaatatttcttcaagatcaagccttgcctcanaatgtagagatttcaagtcatccaaggcacatgtaatcgattaccaatacatgtaatcgattaccaaggcacatgaaagtgtgtaatcgattacacatcatatgtaatcgattaccatagactctgaacgttgggaagtcanattataactggtgtatcgattacacaaaca

SEQ ID NO: 40462 - DNA, 485 bp, Glycine max
  unsure (1)..(485): unsure at all n locations
ttgcatgcaagctngagctctgatntaaacatattgnnatattgaagttcgtagtcttgcttctaggagttctcacactaataattatctcatatgtcttggacaacttgcatataagtcatgggaacacctttcttttccaaagcattntataacacttctcttggtactcaatcatgttttttcaagtcaataaaaactatatataagtttccttctttgctttggtaccttaccatcaaccctcgtagaagatacatagcttctattgtagacctttgcataaatcctccaaattaattctttgcaatctcagtttttttttctttatttacgctcaaaagcctttntcatattttcatagtgtgaactcataagtttatcctcttgtaattacacaactttcaatatctcccctattcttatatatagtaccaaaatgaaacactcatctaacattttcttacatctcaaaatatcattaa

SEQ ID NO: 40463 - DNA, 475 bp, Glycine max
  unsure (1)..(475): unsure at all n locations
ctagacatacagnnggtattgttactattggntagaaggattatatgtcatttacgtcaattttttaataagaatttgtctaatatgcttggtgtctatttaacaggaggcttgcgaatcaatttccgagaggttggagcgtcatctcaacctatgggtagtcacgctaggcacatcgacacatgaagtcattgaagaatgcctcgggattgccaggagtatcacagaagactaacttgtgtatgtgaggtctcgacgtaagcggcgcacanatcgaccataggttttgtntctttacacatttcatattgatattcgatgtatatacatttcttngacctcgaaacacttttgtntttatagaacattttgatatctaaagtaattttgttatacattagtgtaacctttaagcctattttaaattactgatccaattcatccaaatcgttgatattccatgttcattactaaa

SEQ ID NO: 40464 - DNA, 413 bp, Glycine max
  unsure (1)..(413): unsure at all n locations
tatgtcaaaagttctntactattaatagtttctgagtatttatagaactaggcttattattataactaagcctctaataaggcttatttacatcaagctcaagccgattacacaaatcaagaaaaattaggaattttcataaattcacactgaaggtgtgcgctaagccccggcgctaagccagacaacttgtgctaagtccagtttctcctcangttggaattgggctaagcagatagctcacgctaagtccgacagcttgtgctaagccccaacgctaagctaaacaacttgcgctaagcccaagcgtgctattcaacaatcttcaacctgctccaattcagctccttgtgattatatccttccttgcctttgatgagttgntcatccttgatcctcttggccatctcttc

SEQ ID NO: 40465 - DNA, 223 bp, Glycine max
tacatagaacctttcttggttgctagctactagtttttctactctatcagagctattaatcaagatgttcataaaatatatctaccatgatgatcatagaaaaatgacaaacttctcgccatgagttaatgaaatctaatttttgtggagcctaaagaataaagaagtcaaagaatctagcttgatactctgatatgaaccctcatggcacaggggctgactt

SEQ ID NO: 40466 - DNA, 351 bp, Glycine max
  unsure (1)..(351): unsure at all n locations
agctagccacaagaatatctaggatgctttgcttcattgaatgaaagcagtgagagcagtgagtgtgtggtggaacatcaacatggtgctagttttcataatgaggtggaaacagttaatgagtccaagaagagcaaggggcatgagtgcccaatttgcctaaaggtttttccatgtggccaagccttgggtggccataagagatctcatatggttggtgggtctaagagtagaagctttcaaacaattgtgcttcangaaccagtggcagaaattagggacttccttgatcttaatcttcttgctgctactaaggaagaaagcaatagccatgctgactctaacagtaac

SEQ ID NO: 40467 - DNA, 428 bp, Glycine max
  unsure (1)..(428): unsure at all n locations
gatcctctgagtcacctgcggtgtgcacgcttacccctatggcttgcctccggacttcactctccgtgccgctccgaaagatgtgagccaagccccaccttcgaagggcaacttcctccttatgccgattatcccgtgcaagacgatgaggaaggagatacccatctcggccccctgctccacctcaaagatccatccccccatgaactaccccaaccaaacatagttcgccacgtcccatcttcacccgcacccgtaatcgaatctgttcccttcgcagaggataagggaaagattgatgcgctcgangagaggctgagagcggtagagggccttggcaattacccattctcggatctagcagacctatgtctcgttcccaacatcgtcatccctcccaagttcaaagtaacggacttttataagta

SEQ ID NO: 40468 - DNA, 132 bp, Glycine max
  unsure (1)..(132): unsure at all n locations
tttattctcgnttggttactttntataccctctgttgacgtgcttaagccattntacttaagtcatttctcgcttaacttaaaaataaaataaatttccaccgaacgtttgaattgtattatccattaactt

SEQ ID NO: 40469 - DNA, 506 bp, Glycine max
  unsure (1)..(506): unsure at all n locations
tgcaagcttgacttaacttgctngcatattctngttttctctggccaaaagtctcaaccatcaaatcctcttccttctctgccttctgcttataatacaacaagcatactgccacaataaatagcagactcagaggtgctcgaagcgcaatgcagtatgttacaaacaaaagcattgttgatgaatatattggatgacggacccaacgataaggtccaaattgcactacagaagttggctccaccacattttctgaatacttagcgagatacaatgtagcattatactgcattagcagagttgtaatgattaaagcccagattccaagattgctccacccacccggtatgaggtgaagctcangcccttcanatgctgcaagccaatggccaaccatgactcctgtgctgaacaatangcgagaccacattggcaagttcacgtcccactttgngtcatggggctgagcanaataatctccatataaccgctntctaacactaaca

SEQ ID NO: 40470 - DNA, 196 bp, Glycine max
  unsure (1)..(196): unsure at all n locations
tatgacacagtctcatggtcggtcctggacattatgcatgatagacagcgctcctgtcataaatggacaaagcggatctcaccttgtcttcactcagcaaccatctctatccttattaatggcagccctacaaaggagtttaccccatctagaggcttgaggcaaggggatcccctancccctctactctttaaca

SEQ ID NO: 40471 - DNA, 397 bp, Glycine max
  unsure (1)..(397): unsure at all n locations
acgcggacaagcatcgcagggatgttttatttgttcctgnggactgngttctggttcgtcttcgcccttaccgacagtcctccgccaaaggggatccctcgaccaatgtgaaattggctcgccgctattatggcccatttcaggtcacggctaagataggaccagtagcatatcgtgtgaactttccggcaggtgtacgcattcacccggtgtttcactgctccaacctcaaaccttttcggggcgagcccggatccactcctgcaattcctttaccacccaatttccatgagaatcagccgcttatatttccccttgccattctgggatctcgtcgcgcaacagctgagcctcacaacccttggcaggttttggtacaatggcaggggctctcacc

SEQ ID NO: 40472 - DNA, 375 bp, Glycine max
  unsure (1)..(375): unsure at all n locations
tgctccttanacctctattagattttagctttaccttctcctccattggtgtttcttcattatcctccatgtatatcctcacatgtcttgtgctaaatgttgttaacatgattctttagaatttccaccgattaaacttgctatagaaactagatttgatgttctatggttcanatttcttgttcttgaaccatgaattgtgttgagtttaagttcctttcagttttgatttgctatttttaatggctgaaccctaaaccataaaattattacaaaaacattaaagtagaagaaaacctgaaaaatctagagtgactntntcgcctattgtaagtttgtcatagaagtcatttctagtcatgaaacttgtcacat

SEQ ID NO: 40473 - DNA, 196 bp, Glycine max
ggattaacaccgatgttgttgagcaacaaatacctacaaactttgatggatgtaacgaagaggagagacagcaactagcagaaaatgatcaacaaattccaccagaaaatgtagcagatacttcaggttcaccaacaatggcatcagatgatgaacaacctcaatgtgttaagaaaaagcctgcctcgatgaccga

SEQ ID NO: 40474 - DNA, 400 bp, Glycine max
  unsure (1)..(400): unsure at all n locations
agctngtggaaactattataacatatntaacaatgatgacttaatntaccctattttaatcatgaataaattgaagtcaggcggatngggcaggacactcatgcatttactgtcaaagataatatntatgttaggcattaaccaaggtgattctctttcacttttttctattgaaagattntcagattgcatgttggctaangggaatacaggtaattggattccgatatctatgggctgaaatggaccaaagatctcttttttatttttttgctgatgctaaaatattggtgccagaagctttgaccatcatgtgaatgtgattaaggatacgctttcaacatctggacaaaaagttaatgatatttaaatccaaacttatttctnnttcttaaaatgt

SEQ ID NO: 40475 - DNA, 325 bp, Glycine max
  unsure (1)..(325): unsure at all n locations
tctatatattggtcctctaatcttgcagatgcctttatgttattagaaaaggaatgtactggctgagacctcttccaagaagtgcagcacatatgtacttaagtcanggggtgtagctggtacttaattcatcttgtgaccactatgtcaaatatatttgactcacgtacctctgtactcttcatctatctaaacaatctattttgctgaccaaaaaaaaatatctttgctgataaagaatacataataagacactgccctaaataccacatatactactactgtcacttgcataatatatacaacaatatatctatacaataca

SEQ ID NO: 40476 - DNA, 457 bp, Glycine max
  unsure (1)..(457): unsure at all n locations
agcttacaaaaccaatgctntctctgcaaaagtttctctgcttgctgcctccatagttctattcccgaaatatgcactgtggtgtgctgtggaattntgtgcccagggcatcgtaccctaattctgcacaaaacaggctttaaataggctttgaatttttgacattgcacttagtgccaccctcgcgcttagcacgagtaagtggatttgaccttagtgctagtcgtgcactgagcctagctgaagacaaatgctgcgcttagcctactgatcttgcacttagcgcgcggccttgatgatgatgtcctattagattcttctatcgtgctaagcgcgctgaagctgcgcttagtgctggatgcacgcttagcccactgatgagctaagctcaattgtcacttttagcacttcattacttatcctcattttcacctgagattgacatatgtatcataaa

SEQ ID NO: 40477 - DNA, 330 bp, Glycine max
  unsure (1)..(330): unsure at all n locations
tatcttttgtgtgggatacncaatgtgagcatagtttccagaccctttttgaaagnataacgaccgctccagtgctagttttgcctaacccgagagaaccctttgaggtgtattgtgatgcatcanagatgggtttatgcggagtgttgatgcaaaatgaccaagtggtggcctatgcttctagacaacttaagactcatgagaaggaatatcccacccatgatctaaagttggttgctgagtttttgccttaagaattgaagacatatctgtttggctctaagttcgaagtgtttagtgatcataagagccttaaatacttgtttagtc

SEQ ID NO: 40478 - DNA, 464 bp, Glycine max
  unsure (1)..(464): unsure at all n locations
gatttacgtcatcttctctgctcacaagatctgtcatactgacttttgagtcacgctgacgggcggaaatacccgagtggttatccgtataaactttttgcattctgtaagatgaaaagcctaatagcacgcagagactaacgtcgtattctgcccccttcgtcaatcgcgatcgacaagcccgttggcacgcggagattttcgtcatgttccgcgctcacaagatctgtcatactgacttttgagtcacgctgacgggcggaaatacgtgagtggttattcatataaactttttgctgtctgtaagccgaaaagcctgctagcacgcaaagactaacgtcgtcttctgcgccattcgtcaatcgcggccgacaagcccgttgacacgcggagatntaccttatcttccgcgctcacaagatctgtcatactgacttttgagtcacgctgacgggcggaaatac

SEQ ID NO: 40479 - DNA, 317 bp, Glycine max
gtgccatgacatgactaagcacatatactgtgatgtatctgtaaacgtgaacgcggagaaagtttctacatacaataactcggctgatatgttcacaaagtctctctttagtgtcaagttcaagcacttcctgtacttgataatattttaagatgcctaaagcatatttgtagaagtgcattccctgaatcttttatatacactctcttatttttatcaatgtggatattcgcggtgtgtgactcactatcacaacaggcacatatgggatagctttaagacgtgtcataactgaattctattattataaatgaatt

SEQ ID NO: 40480 - DNA, 448 bp, Glycine max
  unsure (1)..(448): unsure at all n locations
tcacgattgtcacgtgctcttgccacaattgttagccgtggctatacgagacatcttgccaaacaaagtcaggttcaccataactcgcctgtgctttttcttccatgctatatgtagcaaagtgattgatccaataatgtttgatgagttggaaaatgaggccgcaattatactgtgccagttggagatgtattntccccctgctttctttgacatcatgattcacttgactgtgcatctggtcagagaaatcaaatgttgtggtcctatttatctacngtggatgtacccgaatgagcgatacatgaagatcttaanagggtatacanagaatctatatcgtccggagcatctatngtgagaggacatngagaaaagccatgaatttgtcagatactanagaagctaaagctgtggcttctgagtgcngatgatacagagtggtgan

SEQ ID NO: 40481 - DNA, 545 bp, Glycine max
  unsure (1)..(545): unsure at all n locations
gttaaaccttgggnccnnttttgatccttgattaccgccccatnganacncagcctataagaaaatgatggtgtgatttaacccaattacactatgtttaagagctattgaagaagttcaattattgtgatgtaaaatatgggtctactccttatgactcatccatcaagttaaagaaaaatttgagtaaaagaatttcttcacataaatattctcaaagtattggttctttgttgcatttgaccaacttctctaggcttgacattgcatatgcaagtggtagaataggaagggatactaataagtctgatcattctcattggattgcattagaacagagttttagatactttaaanggaccatctattatggccttcattatacatgctttcctgcantaattgangggtntaatgatgaaaatggattnctgattctgatgaaacantatcgagcagctgctcattgtctactttaactggtggtggtagatcatgggaatcgtgtaacaaactattatttacattctactatggnagataag

SEQ ID NO: 40482 - DNA, 439 bp, Glycine max
  unsure (1)..(439): unsure at all n locations
ttgcatgcaagcttgagcatgtattgctgaacggggaagcatgatacgacaaanaatataatgcatgatacgacatcaaanagtgaatgaaccaactagcaatcggccggtcatattagcattttcaatgcaaaccattttgcgggcatcatgatttgaataaagatgcttccagtcaccaaacaaagtgccctcaaaaggtacaccttgactacttaattttgtcaatgaataaaataaagactgatcaaccacaatgggaattntatgtacctaagaaaagataacaccatccctaatttttagattattataaaagatacgaactaactcacgatagtatggcattttgagagacatacaatcgatttaattaagaatttgaaatacttgacaacaatcaaaattctcttcttcaaagaactctaagtctaaatat

SEQ ID NO: 40483 - DNA, 365 bp, Glycine max
acttctagaatcgatacataccttgtgtaatcgtttacaggcttttaaattcaaattcaaaattgtcaaattggttcagaaactaatttagccactggtaatcaattacatccactggtaatcgattacatcctctggtaatcgattactagagaggaaatatcatattcttgaaaagataattgttctttaaaaaacttttgtaaaatatttcctttagccaaacctgtgcaacatcaattaaggaattctttctaagatcctaactaagtacatcgctcttcttgcatttctgaattcttgacttgaatcgcgctcatcttctgcatcatcaaaacttcatatcatatatgcttcctacaact

SEQ ID NO: 40484 - DNA, 553 bp, Glycine max
  unsure (1)..(553): unsure at all n locations
cgagcagatgaacccttgagacccttgagnccntgagacancngcagttgagacccttgatgctcacgggcngtccttgaagactctatggaagaacatgacctttctcgcttagacatggagcttgtctatgcttctctagcctcagtcgtaggccacacatatttgatctgactgtggagtaaccctagctgagctgtggtattattatgaacatggacatgaacctggggtacctcatcttgcaccatgactctgtgaatgcagaccctgacatattgagactcggagacactgccttgatcctgctctatgcacgtcacaagagatattcagactcttgaccctagagagcaagagccctagcactaattatcttctgtggagaagaccattggacgctcatgatcatattgacagtattaggggaagcatngattccagacccatggtcgtctactgtacacacctaaagacctctttatccgctctaaactcagatatgcctacacttttggcgtgcccaattgtggtccataacaacggacaggtn

SEQ ID NO: 40485 - DNA, 327 bp, Glycine max
gagggacatttctggccattttaaaaaatgctgtgtgcacctagcatcaccctatttgtagcgaaatcatgggccaatcaaggtgtaaaagtcacgggaattagttggacagataggttgtgtataatgttgaccctattaatgtagcacacattatgctgataaaaaaaaaaggatgtaattctagaacatcaaaactcgggtacaatatttaatttcaacttatctccttcaaattgatcaaattaggtttagattcatgtacaactgcgatcaattatgaaataggtattatgtacatagaaatatttcttaacacccataaac

SEQ ID NO: 40486 - DNA, 299 bp, Glycine max
  unsure (1)..(299): unsure at all n locations
ttcagaaacttctttacagcgacggctatgtattgtgccgatgtcttttgcaatacaaattatacaatgcataatgtttatacagatctcaattgccagatggaatgctacacaaattatcggtagagacaactctttcaaacattttgtgggaaattgttactgatatctatgataattaaagttactggctntattgcattgcatatgggcttgcatgattttgatgcatataatgaatctaataagcagcttttccccataagacggccacattatggtcgaattaatggaatacc

SEQ ID NO: 40487 - DNA, 372 bp, Glycine max
  unsure (1)..(372): unsure at all n locations
atatttatgctatctaattaattcttttataaaacaataaaatttatcaattagcaatgtataaggtctgtgcaggaagcaagccatctccaatattaattgcatcatccttttacttctcttcctttgaattcttttattctttcaaatattgaaacgtttttcttatagatagtaggagaaatcaacgtgtcttcttctttaagaaatcttgtattattcaatcttactttttattttatatataacaatagttntatacattagatagataaaatataagttaattggttttaattgctcatatacaatataattataatgaatttcttatactaactataacaacactaataatttcatctgctatat

SEQ ID NO: 40488 - DNA, 425 bp, Glycine max
  unsure (1)..(425): unsure at all n locations
agcttattggagttatcatcacagaatgctntttatgcaatcctaccccgcaagggcattggatagaagactccaagtagattgtgccagagatccaagggaaggccctagggttctcatgagccttanggtagatttcgagcccatgggctaagtatgagcccgcttatctttgtaaatattaggataggtttttcctttgtttgggccttgtattttggccattctagtagtataaggttttagccttgtatttcgaggcattatgagtagtctttgtagtagagaattttttgtattttcatgtattttgtcatgggggtgagcttagctattatagggggtgtgtagctaagctctaccttctcatctcaaggaggtgagcttagctattagagaggtgtgtgtagttaagctctagcttc

SEQ ID NO: 40489 - DNA, 372 bp, Glycine max
  unsure (1)..(372): unsure at all n locations
atgaatgatgctctcctacaacctattacaaggtagaaggagatatactgtataggctcaaggttcaatcaaacaatcatactttcagctcanaatgggtgcaagggataaatcaatcatgcacaaggtaagctttttagctaagtggctatcttcaatcaaaacatggccttcatcatcttcaatttcatgcattcatgcaaaaatcattactcaatgttagtcgttctctcacaattaaagatcacactctcaccgggttgtggctaatgagtaccttcacaatcaaactgtcaaactaagtaacatcttcaatcatgatcctaatccatgttctttctcttctaatcactgcacactcattcaaaacat

SEQ ID NO: 40490 - DNA, 434 bp, Glycine max
  unsure (1)..(434): unsure at all n locations
agctntngatgctattgtagctcgcttggattttattgatgagcataggctaagttgcttttggnggggacttaaacaagaagtccagatgcttgttcgaatgtttcaaccaaattctgtccgacgggccttcacattagcaaaaatgcatgaggcagcaactgtgcatggttctgttacaaaatcttggaataaacagtctaaacctgaggtttcttctaaaccaccattgttacctacacctcctaaaactatttccaagacacaagatatacccaaaataaaacagcaagcctctaaaactttaacccctgcgtatatgagtgatagaagagcaaaagggttatgttatttatgtgatgaaccctttacgcctgagcatggtttgagtcataaaacactgcagatgcatgtgatggaagtggatgagttac

SEQ ID NO: 40491 - DNA, 574 bp, Glycine max
  unsure (1)..(574): unsure at all n locations
agcgtgtattgttctctgattaccngcactatgatactaagctgctgatgangccatgttgaccnaannattttgngtcttttgcanagcgcgagcctggtgcgcttagcccatgactaatagtttataaggtgcggtaagcccagccttctgcgctaagcgcccagtcaaaatttcagttntatttntctgaatttgtngaaaataacctgtgataatcttttgttggttgatcttatgttttcagatggcttccaagaaaagaaaattatttgcttcttcatcttcccagaatagatttgacagatcacgattccattcacaggaagcttgggaaagatataatgatattgtggtacctaggaagctgctgccagagagaaatgtggtagtataccacactgaattngatgagttcaagaaggaactcgagagaaggannatggatggagaanntgaccagtttgttgaggcagcatcgatgttgcatagtaaagaatgtggaccaatggctcatatactagaagggtgattattnccactacaaactttacccttctatgaaaagtcaaag

SEQ ID NO: 40492 - DNA, 366 bp, Glycine max
  unsure (1)..(366): unsure at all n locations
gcgagtgacagagtgtcnctgaagccgattgtccctgaagcaaccattgtttttctaactagataatatcacagaaagcgaaagcaagcaagtgtgcaatgaaataacatttgggagaggaatggtgggacccacgattgaggaacgcagacatggacgtcgtagaggccctgacgcacgagggcttcgacgaggaatgtaaggcccggtgactcaatgctgtcactgttggtgaccagcacgatgagcttggagttggagctggagcaatcgtcggcgatggcagcgtcctctgtggaggaagaagggtccggcattgtgttgggttcttgttggggggcgtttctgtgagaagcacttcttgga

SEQ ID NO: 40493 - DNA, 216 bp, Glycine max
tctttctcatcacaccaaatgtatgattcctttgcttatctattattctttctctaccaaaaccaacaaactggtatctagagcttcttcttaaagaggctgtgtgttctgatatgcgatgaattctgaaacaagtgttttccaagccattcttcccgtcattactgtggaagagtatgatctctgggagtcagaatggagacttacctgaagaca

SEQ ID NO: 40494 - DNA, 507 bp, Glycine max
  unsure (1)..(507): unsure at all n locations
atcctctgagtcacctgccgcatgcaagctngctcgtctttctgatatntatcatgcatattnttctgatgatgaccgattgtcaattagggatcaacttgaaacttatgtgcttcaagtgagaagaaatgcttctttttccacttgtgaagatgttcaaagtttggctatgaagatggttcaaactgagaaacatttggtatttccattggtttataaacttattgagctagctttgatattgtcggtgtcgacagcatccgttgaaagagctctttcagcaatgaagattatcaagtctaaattgcgcaataagatcaacgatgtgtggttcaatgacttgatggtatgttacaccgagcgggagatattcaagtcacttgatgatattgatattattcgaacatttaccgcanagaagtctcgganaggacacttgcctcgtaattttatttaacccgctatggtaagaaatatgttatctctttattttaaactatatttttg

SEQ ID NO: 40495 - DNA, 60 bp, Glycine max
tataaggataggatcatatatatatagagagatggggggggggggtgcctccccaactaa

SEQ ID NO: 40496 - DNA, 243 bp, Glycine max
  unsure (1)..(243): unsure at all n locations
ctatttcatatgttatctggctattaggtgactaatagtntgccattgtctcctttcagtgcacagcttaccaaggcgtataacacagctaatgttctttttgaagttntgaaggctgttaacatgacacaatctatggaagttgatcgcgaggttattctctgcggctcctaagatgttatcttcctattgngctccccttctatgttaaccttcattgtttatgtatattcaaataacttg

SEQ ID NO: 40497 - DNA, 432 bp, Glycine max
  unsure (1)..(432): unsure at all n locations
tctataatattgcatctacatgcgatgattcttagtattgtccaaggtatataattttgttagctcaaaataacctttatcaaactcatataaccataaatgtgactgccaagtaaatttaagcaatggtttaattagatgtattttgattaaccgtaaacaaatacatgttaaaagtcgcgttttatgcactattaaaacatattntgtaaagtatgcgtctgatgtggtagataataaaaaanaataaagtagtgtctatcaattattatttttaaaaaaatactttcttgagtctcttttatttaattatattgttaatttaagaataaatacagtgacagttaanaaaccatccctattcgtaaaattgaccttttgaacttgtaacttaacattgttgtgaactccaatggatgaaaatatataata

SEQ ID NO: 40498 - DNA, 281 bp, Glycine max
  unsure (1)..(281): unsure at all n locations
actcatatatactcatattagaagcatacactaactnttcatgtctttcatcctcgcagtcacgagaatcaaatgcaaaggcggtagaggtagcttacagtaaatgtgttagaaattatgattgcaatccctaccctccttatttggattgtatgagagtttcagttggttgttatcaagacacttattattgttattgggaatgatttgaggttgtaagaatcaagactccaacaatatggtctttgccagaataatagtgtgatcatacatgattcatg

SEQ ID NO: 40499 - DNA, 376 bp, Glycine max
ataaatagggggttaagtgaagtagaggagggttcaaccccttaggcacttctctctctctcgaaatagctgaggaaaattagttccatgaagaatatccaagccgaggcgcttccgtaatgtttccgtgagtaattacgcgaagattctcgaccgttcttcaagattcatcgttcgttctttgttttcttcagtcttaaaagtaggaaacaacattgcatggtaaaccgtggccgcgttaccgttttaccttgatgggtttcggcctccaacttcatcctggcatctgaccatgaccagttgattctgcccctattatgacaaaatatgcatgtgtatgcgtatgcatgaatgcaaaaaaattttagtgaaagct

SEQ ID NO: 40500 - DNA, 151 bp, Glycine max
  unsure (1)..(151): unsure at all n locations
tctagaacctcataatcactcacagactcatctcatgctctcaggatggctttctcttcactcttagttctctgccaatcttcgcacaacaaaagctctcaaaactctctggaacgtggacctttctctctctagaaatctctanaaacat

SEQ ID NO: 40501 - DNA, 212 bp, Glycine max
  unsure (1)..(212): unsure at all n locations
gcccttatgcagagcttgaaagagctctctggtagtcgaagagatattgaagtccatagccatcaaagtctgaaaagagtatgatgaactaagggacgtcaatattgccacagctgaagccttggaacgagaaaccaagaatgctcgaaaggaagaacacgaccaacacaagttntgaggggctttatatggcagcaatagtgagctcaaac

SEQ ID NO: 40502 - DNA, 368 bp, Glycine max
  unsure (1)..(368): unsure at all n locations
gtagctcaccatcttctcatagtagaccactgtttatgtgtctactatcatagttatcatctcccttttcattattgagggaaccacttgngctgccagatccctctacctttgggtgtattctttgaaagatccatgccccctcttgcatatgctttgtagttgcatcctatccggagccatatcagaattgtactgatactgcctaacgaaggcaatcattangtccttccaagaatagactcgagaaggttccaagttagtataccatgtgacagctatcccagcaagactttcttggaagaaatgtatcagcagtttcccatcttttgcgtatgcccccatcttnccgacatacatctttggat

SEQ ID NO: 40503 - DNA, 352 bp, Glycine max
  unsure (1)..(352): unsure at all n locations
tcgaataccatatatgtgtaatcgattacacagtgcagatnttgaattcaaattttaatagctgttgtaaatcagttttggccactggtaatcgattacatcctctggtaatcgattaccagagagtaaatctcttgaaaaggatttttttaacttaaatttcttggccaaaccttttgctacttcaattggaattcccttcctatttaatatactcttcctaagactctagagactgtcttgattcctcatcttgaatatctttgaattctntgtcttgaataaagctttgagaaacatgtgatcctttggcatcatcaaaacattcagcttgatcctttgtctacaatct

SEQ ID NO: 40504 - DNA, 353 bp, Glycine max
  unsure (1)..(353): unsure at all n locations
gcttgtctttcttaacttgtcctctntntannattgtatatctctcattcgtgtttaaatttcctctaccatgtgatatttatgatccgaatggcgttctctaactatgtaaatgtttgggctataaagtaataaacttgctgtttaacaatcgtaatatataagcactttttcttttcttgtttgcatcgccatcatgacattaattggtggagattgttagtgaccatcatcacatgtatgaatatctctcatacactgtgtagactcttatttgtacgaactattttataacctgtattatgtgactaatgactattgctttatatacaagttaccgtcattatgattga

SEQ ID NO: 40505 - DNA, 407 bp, Glycine max
  unsure (1)..(407): unsure at all n locations
agctntgaattcactctatgcacccttaggggttcctcttgttgcttttcacatcttcatctcattcctctaccattagtgatctcatttctttgtgtaaagcgatttcaaccgatcgtttgtgctgtaatctcaccttatcactgtaaaataaaatttcaatcgatcgtttgtgaagtaatctcggtttattaatgtaaaataaagtttgaaccgattatttactttgcaagtcttcttttaatgagtttgaaagtaaataactaanaccaaagttaaaatcaacacataaacaagctnttatccatganaatcacctgaatccgttcaaaagtcgaacgccttaatggtctcttttacttttatcagttaatatgaacctttcagaaagtttaaaatcaacccta

SEQ ID NO: 40506 - DNA, 270 bp, Glycine max
  unsure (1)..(270): unsure at all n locations
ctcagctgcttctacagaaagngattatttctctctagtggatattatgagaatgagataactagccatgactgcggcatgtgcataatgaactgtactgatgttggactacttccattattcttgctttccaaagagatcattgttgctccaacaaaggattgtacagaggaacacgagtctttgtcttctgatgatgtagttagagtaatcatagatcagtggatctatcttgagtcaacaacacttgatgcttgtcagatgaactac

SEQ ID NO: 40507 - DNA, 443 bp, Glycine max
  unsure (1)..(443): unsure at all n locations
gctttagctcgtccttcaagatcatgcctnatatctcatgatgattcctttcacctcttcggagattgagctcactattgctgccctataaagcccctcanaactntgccttggtcgtgttcttcctttcgggccttcttggtttctcgctccaaggcttcagcggtggccatattgacgtctcttagttcatcatactcttttcagactttgatggttatggacttgaacttctcttcgactacccgggctctttcaagctctgcctttagggcttgtacctcatcactttcttccgaagctttaacctcatcgtctctcacagtctttagatttgngagccaatccaatccttgtgtccggactctcagccacttatgatagccgccgatgctccattactgcttcnctaagctctctacctttcttacaccgcatacatg

SEQ ID NO: 40508 - DNA, 420 bp, Glycine max
  unsure (1)..(420): unsure at all n locations
tgcaagcttacatggagcttcatcattgtggttctttttcttttcaaactgtctcnttcaaatgatntaagcatttttntatatactgtctatttgtcacaggatgttagaaagaaggcacaattcatccagaaacaaaacactgcccctcatgtgttgtctcgtgggggttatgattttcttgaacaaaaagttaatggagaaaaacaaaaaaatgattggagcaagcagcccaatccggaagcactgaaacaattgttaatcatccatctcccatcagacaacacgtgaagtggaagatggctcgcacaaaanaattgagtcacatgacatctcaggtggcacgccaaattactgataggaattgtaagttaattttattttcaatggtcattatatataataacaacaatagtctat

SEQ ID NO: 40509 - DNA, 293 bp, Glycine max
  unsure (1)..(293): unsure at all n locations
tggactgattcatntgcttccagaggagcatggcctttcttgtgaagacccgcacagacatttgaaagaatttcacattgtctgctccaccatgacacccccagatgtccaagaggatcacatatgtctgaaggcttttcctcactcattataaggagtggtaaacgactggctgtattaccttgctccaaggttcatcacgagctgggatgaccttaatagagtattcttagataatattctccctgcttccaggaccacagccatcatgaacgatatctcaagtattatac

SEQ ID NO: 40510 - DNA, 510 bp, Glycine max
  unsure (1)..(510): unsure at all n locations
gcatgtcgaacgttannaaattgaatgtttgggtttaagttntcaattataaaaaaaatgcttgaacctttattgtttacgcttgcatttctccttactgagttctctttcttcttgagtgtgagcttctgcttgtgcttgctttgtgctccttggttcaaatttggtgcttccttccttcaagtgtgtgcccttatccttcctttctagtgagtgtttataaaataaataaaatgtatatattctgttaataaatattataagtttaagttacttagtattaacaaatattttaagttagttagtatgtaaatagtacgttagttactattaacaaaaattctaaatttaagttagttagtatcggtaggtattgtgttgatatttcttacgtattaatagatatatcaatgttagattagttactataaaaatattatttggttggttagaatgacaatttattgagttatcgtatgtattgtcagacattatatgtgtgatatatat

SEQ ID NO: 40511 - DNA, 465 bp, Glycine max
  unsure (1)..(465): unsure at all n locations
gcttggctngactacttgcataaatatgttttatattattttnntaactataaatatgttatattgttatatctcactctttntgttattattaaataaaattaaataaatgaagggtaaaatatgttctcttccactcgttttatttttcttaatttttttcattatcttttttactgcagttttagtaattattattgtttttagtcagtgactccgtgttttttgtttaaggttttagccgctattaactgttacaaaanttttaagtctaaatgtttatttttgtaacatttatggtgatttcagaaaattttgtgtctagagttttgatttntttttggcagttataatttatcagaagctntgcagcaattaaaattgtcagaaacttaaaccaaaaagtttagataaataatatttctgtcattgaatagatggttgagtggtaacaaatntatttct

SEQ ID NO: 40512 - DNA, 311 bp, Glycine max
attcattacaagtagtttctaggtggccataaattgccacgaattgcttacgtgacttatttgaatggttctaaatgtattctgctggcttttagtcgcacaaaattgctacatcccacactctaattctagcactaaactaattatccacaaattccaattcactctataaccaatggtatgaagatcataccaatcaacgtactacatgatgggtcagtggttgactggtgagtcctaatcgacaacacaatcatgataatcaactttaaatatatatgaattagaaaataaatatgtatctccaatta

SEQ ID NO: 40513 - DNA, 345 bp, Glycine max
  unsure (1)..(345): unsure at all n locations
taaacgcaatttgtcttccatacataatttaccccccgcctgtttaaatttttacttctgcatgatctttctggtaatttattttaccgcttattcctattgagacaaattgctttttgtggtttccacccttttatgattaccattcttcctatttatcttttctttaggaattgtcttaatgccttgtttttaaacggacattctaaagtaatcttgtattctttcattttaaattctttatttgtccttgttcttgttctgcttttcttacttctcattttgtaatttttttcttatttgtggcccncattttttttatttttttttttctcaaaacctctt

SEQ ID NO: 40514 - DNA, 397 bp, Glycine max
  unsure (1)..(397): unsure at all n locations
tggactgatccacttgttgcccaagtttcatagtcttgcaggtgaagaccctcataaacatctgaaagaattccatattgtctactccaccatgaaaccttcagatgtccacgaagatcacatctttctaaaggcctttcctcattctttagagggagtggcaaaggactggctatattaccttgctccaaggtccatcacaagctgggatgacctcaagagagtattcttaganaaaattttccctgcttccaagaccacggccatcagaaaggatatntcaggcattaggcaactcagtggagagagcctatatgaatactggggagagattaanaaactatgcgccagttgccctcacccccnnnatttgagtaacttctctctatattttatg

SEQ ID NO: 40515 - DNA, 421 bp, Glycine max
  unsure (1)..(421): unsure at all n locations
agctntanaattngtattataacgttcaagatctgctggtaatcgattaccatatatgtgtaatcgattacacagtgcanattttgaattcaaattttaatagctgttgtaaatcagttntggccactggtaatcgattacatcctctggtaatcgattaccagagagtaaatctcttgaaaaggatttttttaacttanatttcttggccaaaccttttgctacttcaattggaattcccttcctatttaatatactcttcctaagactctagagactgtcttgatcctccatcttgaatatctttgatttctttgtcttgaataaagctttgagaaacatgtgatcctttggcatcatcaaaacattcagcttgatcctttgtctacaatnctcccccttttgatgatgacnatacctg

SEQ ID NO: 40516 - DNA, 438 bp, Glycine max
  unsure (1)..(438): unsure at all n locations
agcttccatcaagngttatcatagcacanaatcttctgtaggtgctccttatacctccattaattntcagctntaccttctcctccattgttgtttcttcatttttctccatttatctcctcacatgtcttgtgctgaatgttgttaacatgattttttataatttccgctgattaaacttgctatagaagctagatttgattttctatggttcaaatttcttgttcttgttctagaaccatgaattgtgttgagtttagcttcctttgagatttgtattgctattttttttggttgaaacttgaaccataaaattctttcaaaaactntaaagtagaagataacctcacaaatctagagtgacatgttcacctattgtagttttgtcatagaagacatgtctagtcttgaaacttgtcacataagaatacttatgtt

SEQ ID NO: 40517 - DNA, 330 bp, Glycine max
  unsure (1)..(330): unsure at all n locations
catgatgatgaatcaactntattcaagtagtgttgatgatatctataatgatgaaacaaagcccatagaatgatttcaagattgagtcaacaagttcaagatcaagtttaatctcaagtgtcatgagaagaaatcaaatagtntcaagaatcaagagaagcttgatttcaagattcaagagaagatgaattcaagattcgagagaagaaatcatgaagacttcacaagggaagtattgaagagattttcaaaaaacaaacatagcacaattgtgtgtttcacaagaagttttctcaaacaagtttaagataccagagttgttactctctg

SEQ ID NO: 40518 - DNA, 476 bp, Glycine max
  unsure (1)..(476): unsure at all n locations
ctgagcgagcttttcttgcaccaaatggctntttttctataaatagccatgcaggggaagggtttaagggtttgaagaactaacgaaagagaggaaaaatgcagaaaggagaaacagaagaagaagaaaaaaaagaanagccaaggcgctgcctaatcgaaccatggatcgttttctacatcatttctcttgcaagtcttgtaccctttgtaacagtcggttagtttttcttaagattttgatgtaatctttgtacccttatgtatccttcttgatattatatgtaatcttttctactcanatatcacttgagatcgtttcaaggtccaacaccttaacaactctcttcgcttttcaaaatctanaacgccattgataactgtgaaatataagctaatttgataataaanatatattgaaaatattcttaanaatatttattataacagtatctttggctanatgatatgaattaa

SEQ ID NO: 40519 - DNA, 150 bp, Glycine max
  unsure (1)..(150): unsure at all n locations
tcatctatagagtcgccgcggaagatataggattagaggtgagagatgacgccatccactatagaataagccatggaatgagaagcttccncaccaagagaatgtcttggataaaagcttcagaggaagcttcaatggatgaagagaatg

SEQ ID NO: 40520 - DNA, 311 bp, Glycine max
  unsure (1)..(311): unsure at all n locations
agcttcttatccatatgctcatcttggggngattctccttcttccatggcttattccctagtggatggcgcctcctctcccctcttctcctatgtcttccgctgcatctccatggtggaaaaccaccattaaaggacctcattgaagctcaaagatccagcctccatagaagctccacaagcaagcttccatcaaataccattgtcaatgtgttgaaattccatgtcatatcccctagtgttactagccattcaattcctaatactaaatcacaacaaccgagaggtaacaacatcatatcagaagtaaag

SEQ ID NO: 40521 - DNA, 337 bp, Glycine max
  unsure (1)..(337): unsure at all n locations
cttctatggaggctgaatctttgagcctctttgatgtcctctaacgggggatttccaccatggagatgtagcggaagacacatgagaagaggtgagaggaggtgccatccactaaggaataagccatggaagaaggaacttctccaccaagatgagccttatataagaagcttggagatgatgcttcaatggaggaaaagaaagaatgagagaaagagagagggaggagcaagaaattgaaggaagaanaagggtgagaagttgaactttgagttgtgtctcacaagactctcattcatcanagttacaataagtgttacacatgtttctatttata

SEQ ID NO: 40522 - DNA, 396 bp, Glycine max
  unsure (1)..(396): unsure at all n locations
cgttcaagatctgctggtaatcgattaccatatatgtgtgatcgattacacagtgcacatattgaattcaaattataatagctgttgtaaatcagttttggccactggtaatcgattacatcctctggtaatcgattaccagagagtaaatctcttgaagaggatttttttaacttaaatttcttggccaaaccttttgctacttcaattggaattcccttcctatttaatatacttcttcctaagactctagagactgtcttgatcctccatcttgaatatctttgaattctttgtcttgaatattgcttcgagaaacatgtgatcctttggcatcatcaaaacattcagctngatcctttggctatcatctacccctttttgatgatgacaata

SEQ ID NO: 40523 - DNA, 452 bp, Glycine max
  unsure (1)..(452): unsure at all n locations
aatgttcgtgctgngatatcaacctacatgcgccgacatgaggaggatttccctacgaaggaagggaaggagcgtgggctattctcaaggaccgtaagtgaaagaagttcccatgtgtcacatcaacaaaagctttgtcagctagggttggatgtatgaagggcgggttgccatgatacatgaagggacccctctagagtatccaaattgggtgcagttgtgccctcctaagttcgaattgtggaactggagaattgtcaaacaacccagaatatccatggcaaacacaatgtaattcgttagtcctaaccctataactgggcctatgctntatggttctctccctatatgggcatgccttttattnaccccaataaaacatatatatatatatatatatatatatatatatatatatatctatatatatatatatagatatatatatatct

SEQ ID NO: 40524 - DNA, 561 bp, Glycine max
  unsure (1)..(561): unsure at all n locations
aggacggcnattggaccatgagaccctgganctctgagtcacctgcggcatggcaagctgggtcattcgcatcattttaatttaatttttattattcatagtatctctcggattaatgcaaaagagaaatgtccaaattatntatgaaattattcttcacttatgcagctcanatcattatatatatatatatatatatatatatatatatatatatatatatatatatatattacaatgcgttttctagaacagatttagcttagttaagtataaaaatgggaaagacatatattttggctttcccgtttttatatgagagaaaaaacacgcacatatatatatatatatatatatatatatatatatatatatatatagaacagagagtattatatataattgtgtatgatcaacaaggtaaaactcaccctcgcctataattaaaaaacaggaggtaatatatgtgtgatatatatattaatcaacggagtatttagctggctgcactcaagagggtgtgaccttataagataacctacattctcttattcttacttn

SEQ ID NO: 40525 - DNA, 394 bp, Glycine max
  unsure (1)..(394): unsure at all n locations
caatcacaaggctggacacanaattgtgaacaccttctaaagggaagtagcaaagaacaatttcactacctgtaagaacaaattatatggaaaacaaggaatagagaacacacttgacacttaggaattttatcaaacaagtcgggtgcaaggaaatttaatgactacagctgctgtactctgtggttttttcttcttctttnttctactgaatttaataaacaacagccacaagttgtgcaattntttttcttttataacataaactgcttctaataacgaaatntgtaacattgcaatcaaacatttaagttgcagcaacaaattcactacattaccattccccacaacataggctcatctnntacaatcaacagaaatcaacaccaacaac

SEQ ID NO: 40526 - DNA, 534 bp, Glycine max
  unsure (1)..(534): unsure at all n locations
agtcacctgcggcatgcaagcttccttggggccatttcttgcganaacaatctattggaagttagttttacaagatgatgcttattntaccacanaaatgacatgctaatccctctggtttagaacgaactcatgcgcacgtttaaagtaacacatttatgcacatgcgtatgtgtaagaatatcctactatttatgtcaacatacaaggacacccaacacattctaattgccatacatctatgtgcatcttgaaaagaacacacattcccatgcttaaggcgttgcgtcaaactttacacctaattatttcctaaatatttgctatntacaaactacttacacatatttgaaatatatatcatacaaattntattgtttcactcacatttatttatatgcatattggaaagctaattatatcctgctcacacttgcattcaaaagggaattccacgctatcatatattcatttaggaagataatccctcacttttttctatgaatntcatgccccttatacttacatatatat

SEQ ID NO: 40527 - DNA, 439 bp, Glycine max
  unsure (1)..(439): unsure at all n locations
cagagcacaagagcttctgtangtgctccttanacctccattaagctccattgttgtttctgtcatttttctacatatattgactcacatgtcttgcgttgaatgctgctaacatgattctttagaatttacaccgataaaacttgctatagaagctagatttgattntctatggttcacatttcttgttcttgttcttgaaccatgaattgtgttgagtttaagttctttgagttttgtcttgctatcttgtggttgaaacttanaccataaaattcttacaaaanaattaaagtagaagaaagcctcanaaatctagagtgacatgttcacctattgtagttttgtcatagaagtcatgtttagtcatgaaacttgtcacataagattcctttatgtgtgctgaattttatttttcatgtttctatgttggatcgag

SEQ ID NO: 40528 - DNA, 448 bp, Glycine max
  unsure (1)..(448): unsure at all n locations
cttctatggaggctagattttttgagcttcaatgatgtcctttaatggtgattntcttccatagagatgcagcagaagacaaaggagaagaggtgagaggagacaccatccactagggaataagccatggaagaaggagcttcaccaccaagatgagccttggataagaagcttggagaggatgcttcaatggaggaaaagaaagagggagagaaagagagaggggggagcacgaaattgaaggaagaaaaagggagagaagttgaactttgagttgtgtctcacaagactctcattcatcaaagttacaacaagtgttacacatgcttctatttatagactangtagcttccttgagaagctttcttgagaaaacttccttgagaagtttctttgagaaaacttacttgngaacctagagcttagctacacacacccctcttataac

SEQ ID NO: 40529 - DNA, 363 bp, Glycine max
  unsure (1)..(363): unsure at all n locations
agttttgagatnttgttgtgcgaacacctatagatataccgagcttggaaaggaagtcgtcttgagagcatgagatgagtctgtgagtgattgtaaggttctagaggtgaaggagacatcctcaccgcttgtattccttcaatccttcattnttctctactctntgttgtaaaggaagcttcccagttatggagaactaaatcctttgttggttcttccttgtaggtacttgatgtaaatacttgtatatctatntaatgatgttttgtgtgttcactatgctatcagaacttcattctagcatgctttngccttgatgcatgtgtngttaggatcattcaacagtggaaactggtctgcttc

SEQ ID NO: 40530 - DNA, 470 bp, Glycine max
  unsure (1)..(470): unsure at all n locations
atatagagggtttgatgacttataaagggttttaagaatatattgcctcaagttttttttggaattattattctcctcataatgtaaaagcatcttttgaattaaaaaatattaagattgataattaaacaactttagtttcatatttaacgacattattttaaaattttattagattttaaaataatatttaagattaaaaaaaagcataggcaagtactatttcatattatatcttccttttttttcaacatgctctcataaatacgaaagagacacgaaatagttaaaccccattaatttccatttgaaaaaagtaagccccattaataactattaaataaggtcacttattntacantttttcccctttgttagatagtacaagcggctaanaaaaaatctaaattcatgctctctgaaattacattatcaacgggacaaattataagtgtaaatgtctaatattg

SEQ ID NO: 40531 - DNA, 335 bp, Glycine max
  unsure (1)..(335): unsure at all n locations
tccggatttgacttctatagtcgattcttctgcccgaaagatggagtcaatgaggtaagtggttgattattatgattgcaatgttcctacaatatcattgatcatgtctccttaattaaacaatatataagaagacctcaagggtaaattcagattttgactttgatctcaataaataactgccagttctttttcatgttgtttacccctacaatctactgctctgctagcagatccganggccagtttttaaacaagtacttcaccattntaaattattanaatatactaacttatanatcaaggccaaatatgctattactactacctacttt

SEQ ID NO: 40532 - DNA, 297 bp, Glycine max
  unsure (1)..(297): unsure at all n locations
gcttcaccaccaaaagagtgtcttggataagtatcttacagaggaagcttattgaagganaagaatgagaaagatagagtgatgcaatcctaccccctaagggcattggatagaagactccaagaagattgggccagagatgcnagagaaggccntacgggtctcatgagccttaaggtagatttcatgcccatgacatgggctaagtatgaactcacttatctttggatattagattaagggatcattattattggcccttgcattcagggctccataatatatgtagggtaccct

SEQ ID NO: 40533 - DNA, 344 bp, Glycine max
atcactctatctcctgcgatattcctaccacatgagatctacactataaattgtcatcatctcctgttgctctcaccagataggttattagacccagaggtctaagactgactttgtccacactttataattattttttatcgtgtttgcatctttttgtttatgctagatccatgagccaaggaacaaaaccccattcatggacctccgttgcagatctactcagatggaattcggtgatcatgtctcatatttctttaccctctcttttatgctttgccgcatcgtttgttctaaccatggccaataaacatctttcacgaccatgatttctttgataacta

SEQ ID NO: 40534 - DNA, 339 bp, Glycine max
  unsure (1)..(339): unsure at all n locations
cacttcttattttgagaatagaatatccatggtttgtcaggataatagggtgaatatcaccagctaaaaccagaaatgaaaggtcaatagaaaaataatggagtgtctaatatatgtatgaataaagataaagatataaagaagaagcgtataccagaaagaacaaggaacaaaacgtgatcccgattcttggttagtggagtaataggatattgcatcgcactcttgtcagatttgattgttgcgggaataagcttctacctctaactattcatgacgaagccagaacattgcacgctctttcttctcgtttggngttctttcacccacgtgtcctca

SEQ ID NO: 40535 - DNA, 333 bp, Glycine max
cttggatatgatggcacacataatattatatgtcatatattctgcgtatcaggtgtgctcttaatgtagaattttaggctactaagctttcaccttatcaattattataattataactgcgtaaccctttctttcgaacttttggcaatgtcaacctgtgctggtagagcaagatcacgacaaaacagagaatcggaaatcatgaaaacgtaatgcacgaactcaggttaatccaaaccctgatccagttggcactgtcgagccttcaacgacaagtactacttcctaatatagcactcaagactaatatgtatctggagttccaacatattg

SEQ ID NO: 40536 - DNA, 560 bp, Glycine max
  unsure (1)..(560): unsure at all n locations
cgccggaatgaccctgannctgancctgagacccgatgatgacactgaagccgccgcancgnnaaaacatatataagaaagaagcccttataccacnggngcgacgagttgtttcagagagcncaagaacggggcgcgagagaagatataacaaactanctcgccacaaaaaaacacatttcaccgcctacgcaagtgataaaatccccgaacaatgaacttctcaaacaatagacgcacaaacaaacaattcgaacatgaatataaagcgcataataaacaaaagacttcaatggaagagaaagcgcaaactcagaactatacctggtacggccacacccttgagccgacgtgcagaccccaagcaacccgcttgagagctctactatcccgcaaattcctgttacaagttctaaacacacaaagacgacccgtcctctgtggttataatgcctttacaacaagagacacgcggactctcatcccctacatactagaaggagaagagaaccgacccctccagaagagacagacctacagactgaccacncaagagcccg

SEQ ID NO: 40537 - DNA, 520 bp, Glycine max
  unsure (1)..(520): unsure at all n locations
ccaatgtactganacgcttgaactgtctcagaatgncatgactgaaggaggtaagagtaattcatgtcaaccaaactcatattggccactctaagttaacttagtcgtgaaatatacatattcaatccaaggtcgttcgtagccatctaaatggaataaccctaagtatgtagctacgactctactctagataatcttgttcacattaagagtacactcgataatatcggactatgcttaattgtattctagtttttaaaaacaaggagcattanagtatatattctcacaaaataactaacgagatttataatattatatactggaagagaatatatatcaacagtcggtaagacattattaatattgataatcatatgatcatcactatgattactattatagtactatatattacatagataatatattacctgttgcttgcttctttcacctggacgtcataggaattactactacttaactatttactatgaagtattgtacagtgatatatttn

SEQ ID NO: 40538 - DNA, 322 bp, Glycine max
  unsure (1)..(322): unsure at all n locations
agcttcagaatactttttcgagcgtctcaatatattactggactcagtcagacatccgagcaaaacgttattgtcgtttggattaactcagagcttcagaattcaatttcgatcgtctcgatatattacgggtctcaatcagacatctgaggaaataagttattgtcgtttgaatttgctgagagcttcaacattcaatttcgagcgtctcgatgtattacgggacttaatcagacatccgagttaaaagttattgttgtttgaatttgctgagagcttcaacattcaatttcgagcgtctcgatattntacgggactcaat

SEQ ID NO: 40539 - DNA, 600 bp, Glycine max
  unsure (1)..(600): unsure at all n locations
agacatgtcctgtaccatgcanaccngcncantnanacnnnnnccnnnncctgattaccttgcatttacccngacacataganacnncattttgtaangatatggngtacccatcacatgngggactanggtggtgatctggcgatggngcacaacaaggtnttgcacattcacaatgcgcgcataaacccaccattccctggtggccacctncaactgagcacacgtactcccacgtagcccatattctcgtttctctcaacaccgggtcccgtaatatatcgagacgctcgaaattgaattctgaagctctgagctaattcaaacgacaataactttttgctcggatgtctgattgaagccccgaaactattgagacgctcgaaatngaattctgaacctcagagcttattcaaacgacaataaccttttatctcgatggttgattgagttcagaatacatcgagacgctcgaaattgatgttgaagctctcagcatatttcaacgacaatacctttttactccgatgtctgttgagtccctgatatattgagacatcgaaattgaatgtgagctctgagctattcaatgagcatact

SEQ ID NO: 40540 - DNA, 406 bp, Glycine max
  unsure (1)..(406): unsure at all n locations
agctntntagcaattcatatggtcataacgtttcactcggatgtcggattcaagcgcataatatatcgagacgctcgaaattgaataatggaagctattgagcaattccaatggtcataacttttaactcggaagtccgattgaggcacataatatattgagacgctcgaaattgaacaacggaagctctcgagaaattcaaatggtcataacttttaactcggaggtcggattgagacgcataatatatcgagacgctcgaaattgaacaatggaagctcttgagcaattccaatggtcataactnttaactcggaggtccgattcaggcgcataatatctcgagacgttcgaaattgaacaatggaagctcttgagcaattcaaatggtcataacttttcactc

SEQ ID NO: 40541 - DNA, 569 bp, Glycine max
  unsure (1)..(569): unsure at all n locations
agccggagattggacatgannnctgaanccattagacccggatgttacgtcgacctgccgcatgcaatctntgcacacagttctggcaattcattctctataccgataggggtccatggatgcttctaangaaggacctgaccacattggcctaaacttggtagcgtctgagctacttacaaactcgctcccacttctcacacctctgacctgaatgtggatcgggctcgaatattctacaggttggtgacacacatggacatcgacctgggcagcatgatatcaagacagatcgcccaattcaacatctccccactaagatatcccgcattagtcacaacactatgcgatggtatgggggcacttcaaacaccctgaccttcaagtcgctgaaacatgtgatcaacttggcatacatctagaaaaactgttgggaaccaggaaacccttcatcactttctcatggccgangaaagtcanaactcgagctgttctatacgctncactatcccctcaaccactattttcgccgccattaacacttcacctgccgcactaagcaactcttt

SEQ ID NO: 40542 - DNA, 412 bp, Glycine max
aatcacatgtgtgtcatcatcatatatatggagaatgtaaatcatgcaagctgtgatggtgtcaagaagaaatcacatgtctgtcatcatcaataagagggagaatgtgaatgtatgtatacatgatcttgatgatgtaaaaagaagaatcaaacaatgctcatttgcttcaagattaatacaagagtgtttcaacaaacaaagccttgattcaagatttcttcaagatctagccttgcctcacaacgaaaggtttcaagtcatccaaggcatacataatcgattaccaatacatgtaattgattaccaaggcacatgcaattgattaccaatacatgtaatcgattaccaatggttggaaagtgtgaattgatacacatcatatgaatcgataccaggactctgaacatgg

SEQ ID NO: 40543 - DNA, 257 bp, Glycine max
  unsure (1)..(257): unsure at all n locations
tcttctcttgaaacctgaattcatctattcgtgaatcttgaaatcaaacttctcttgattcatgaatngttgactcaatcttgaaatcattaacttatcttttgtcatcatctcttggtatcatcgaaacaacttgaatcaatcttgattcaaaatcatgaatcttgcttctacacctccttatctacatatatctanggcaactgacatcaagatgattgtggatagggtctacccttgtgtacaagtatgggatg

SEQ ID NO: 40544 - DNA, 258 bp, Glycine max
  unsure (1)..(258): unsure at all n locations
cagcagaacaattatgacctctccagcaacagatacaaccctggatggaggaatcaccctgtcgcaacctacccttctgcgggagggcgacgcgagactcgcgggatgcgtgttccacgaaaggaatacgcgcggagtcgccaccaacgtttatatgaggaanacgtctgataaaccgaagaagacgcgatctacgaacttttaagtgaaaggttcgggagttgtatttacgcacggngaaggtattagcaccccaca

SEQ ID NO: 40545 - DNA, 269 bp, Glycine max
  unsure (1)..(269): unsure at all n locations
cagcttaccactttgataagggatatggngaaggtattaatagctggattgttcacattgaggtatgtacctttaagcaaagtggcaccaataatatgcctttntaatacgttctgttatgtgtatgagtacaatacaactagaagaacgcgtcaacaacactctttattattagctgacatttattgaaaattaccaaccttggtggctcttttttttttaaggagtctctctcatgatttagaagtagaaattaccaaaatttgtga

SEQ ID NO: 40546 - DNA, 426 bp, Glycine max
  unsure (1)..(426): unsure at all n locations
tgacttgatacactntgtatcagcaacaacacggttattttataaagccaaacattatttggcaaaaggtacgcaagttaaaaataaaaacattagtgcaacaataactaaacaaatatgtattcctgtatcaatttctaatatatagtgataaataccatagcaacatataatttgattcaattnttcatacatatagattgcaaacttgggggaaattgtctaaggaatattctaaatctgcaacttaagaacaaaagcatataatattggttatggaaaagacatagggaagtcctaacctgattntagataaggcgttccagagataagtcaaataattgtaccatattttatcaacgcatttacattcacaagttttgagtacacaaaaggatagtggttatcacanagtccttatctaat

SEQ ID NO: 40547 - DNA, 418 bp, Glycine max
  unsure (1)..(418): unsure at all n locations
agttcctcattgaatgtgctgttcacaccattatttgcctcatttgtttcattctgatcccatcccctataaaaatataaaaagaaaaaaaaatgtaaacaaaaatggacattttgtgtaaaaattgaaattagaaagagatgaaacatatacttctgaaaaaaaatgaaaatagaaaataatcatagtattttagtgaattccatatactcactcaaacctctcttaacaagtaaggatgtaccacanaaattctatttccttnttgctacatcaagaatgtgtcatcaccaaaatgtgtgacaatgatcctttgataattccttgggcaacatntattagctttcataaatgattatggactgaaagcccanaanatatacttctgaaatctaccacttacccctggactcttatt

SEQ ID NO: 40548 - DNA, 485 bp, Glycine max
  unsure (1)..(485): unsure at all n locations
gcttacaagcaagcttccattaagtggtaattttagcacaagagcttctttaagtgctccttanacctacattaattgtcagctttaccttctcctccattgttgtttcttcattnttctccacgtatctccttacatgtcttgtgctaaatgttgttaacatgattctttagagtttccaccgattaaacttgctatagaagctagatttgattttttatgattcaaatttcttgttcttattcttgaaccatgaattgtgttgagtttaagttcctttgagttttgtcttgctatnntttgtggctganacctaacccataaaattcttacaaaaacattaaagtaaaggaaaacctcanaaatctagagtgacttgttcacctattgtagttntgtcatagaagtcatgtctagtcattanacttgtcacataagaattcttatgtngngctgaattttattttcttgttctttgctaatca

SEQ ID NO: 40549 - DNA, 295 bp, Glycine max
  unsure (1)..(295): unsure at all n locations
ggtgtggcaaccccgacgactggaagagaatngcatgtngatgtggcttgttaagcccccgagcctagacaagtattgtctaggctgcttttgtcaagttgttcgtgatggacatgtctttggcgtgtcaagaaaggtaagtcgtccgattatacaactcttcccttttttgactattggagaatgcattaaagataggcattatgttctgtctattgctgcaggcgtgtgcagcgcatgcacaatacttttgcatacgtgtcgctcacagagtgggcccgtactggagtctgtg

SEQ ID NO: 40550 - DNA, 509 bp, Glycine max
  unsure (1)..(509): unsure at all n locations
gatcctctgagtcacctgcggtatgcaagcttcaccaacaaattaacctcatgcctgaagtcctgactgtataaaaattaacacacaaaatatgagatatcataaaaaaaaaactgggacagagaaaatatgatttatattgctgcaacccccctccccttcccatggttttgataattcatcatacacagacataactaaccatccaaatatccaatctgttagaataaatcanttggccctaaagaggtagtaggtttaatctgagcaaaatgcatttagcaaaaacagttcaattactagccaatatctctccatatagccccgagtaaaacttgacagatgacaggtaagagaaagtcattagaccttagtgttaacaatttctccagtcacaatcacaagcaatcaaaagacattcacatcacagataacaactaactagcagcaaccaaattgaagacaaaatactagagacgaaagagagaatctctcatctccaatctatc

SEQ ID NO: 40551 - DNA, 315 bp, Glycine max
  unsure (1)..(315): unsure at all n locations
ctaccttcaatggtgcaatcatgatgactntgatgaagtcccattggtgtagtggtgtctatatattctgaacaaaactcaatagcttcctcagcaacgtatctttcaacaatgctagcctcttgtcgatatatcaattttttgtatatcctttcaagaccttcatgtaacgttcaactggatacatcaagcgtaaaaacacaggcccacacaaccgaatctcacgtacaagatgaacaattaagtgaaccatgatgtcaaaaaacgatggaggaaaatacatttctaattcacacaggataatggctgcctcat

SEQ ID NO: 40552 - DNA, 398 bp, Glycine max
  unsure (1)..(398): unsure at all n locations
agcttcttatccaggcaattcttggtggtggttatatctccttcttccatgtcttattccttaatggatggtgcctcccctatcctcttctcctttgccttccgctgcatctccatggtgaaaaatcaccattgaaggacctcattgaagctcaaagatccagcctccatagaagctccacaagcaagcttccatcaagtggtaatcagagcacaagagcttcaagtaggtgttccttanacctccattaagtttttttctttaccttctcttccattgttgtttcttcattnttctccatgtatctcctcacatgtcttgttctaaatgttgttaacatgattctttagagtttccaccgattaaacttgctatagaagctagatttgattntctat

SEQ ID NO: 40553 - DNA, 298 bp, Glycine max
  unsure (1)..(298): unsure at all n locations
tttatgagaggggtgtgtgtagctaagctctatcttcttaangaagttttctcagagaagcttctcaaggaagttntctcaagaaagcttctcaaggaagctacctagtctataaatagaagcatgtgtaacacttgttgtaactntgatgaatgagagtcttgtgagacatacttcanagttccacttctctacctcttttattccttcaattntgtgctcccccctctctctttctctccctctttcttttcctccattgaagcatcctctccaagcttcttatccaaggctcatc

SEQ ID NO: 40554 - DNA, 357 bp, Glycine max
  unsure (1)..(357): unsure at all n locations
cctaaccccattacatgcctataaagtccttcggattcaattttgtgtgttcattgctgtatgacataagatgaaatgcacatgtngggacttgtgttaattgtctatgatggaatgagcctaaacacttgagcttgagtgaaacaatgactgtaaggttttggttgatgatccttccttgatttctgccatccttactagcttatttcagttgtgactctaatatgtatgttcctatctttganaagctgcatgtttgtgaaaatcaattgattgaagaagtccatgatattcagttcatatggttgaatttctctatgaagcacacatcattcttgagtgaccactgtagcttct

SEQ ID NO: 40555 - DNA, 330 bp, Glycine max
  unsure (1)..(330): unsure at all n locations
ctctttgnctcctctctctcctgttggtgttatctctctccttacatgttggcaatctccccatcgatccgccgccggtcattgttccggcgaaacgaagcttgtttgtttcgacacctcttctaccgtcgaatgcaatagaagtaaaagatatntgttttcgtttgtgtgaggattgaagtntctttctttcttgtgctaagatgagatgaagaagcgaaaacaaagggggagggagcttcgaagcggatacaaaggggaatgggaaggggcatgatgctgggagacagtgaacgttcgattgcattctatatgcacacagtggagttt

SEQ ID NO: 40556 - DNA, 397 bp, Glycine max
  unsure (1)..(397): unsure at all n locations
tgctccttatacctccattaattnttttctttaccgcctcttccattgttgtttcttcatttttctctccatgtatctcctcacatgtcttgtgataaatgtttttaacatgattctttatagtttccaccgattaaaattgctatagaagctacatttgattttctatggttcanatttcttgttcttgttcttgaaccatgaattgtgttaagtttacgttcctttgagttttgtcttgttatatttgtgtggttgaaacctacaccataaaattcttacataaatattaaagtagaagaaaacctcanaaatctagagtgacttgttcacctattgtagttttgtcatagaagtcatgtctagtcatgaaacttgtcacataagaattcttatg

SEQ ID NO: 40557 - DNA, 425 bp, Glycine max
  unsure (1)..(425): unsure at all n locations
atcgattacacagttccattgagaccatgtttgattatcattagtctatgctttaatcgattactaagtgattgtaatctgttacttcattcctganagtgttcccaagagtgatcaagaacactttaatcgattaaatcaagagtctaatcgattacattgttcttgaatgttctccaagtgttgggaagaacactntgattgattaaaatgagaatctaattgattacttcttcgagataatcgattacataggcaatttaatcgactacaggctgttataaatttttttctctataaatagtcaccttgtgttctcactnttcaaggaaggagaatgagctgttagaataattnnttgcgactcacatattctactaaatcattntgaagcattcatnggtaaagtgtgtggtaacatcttt

SEQ ID NO: 40558 - DNA, 342 bp, Glycine max
  unsure (1)..(342): unsure at all n locations
tgctgccattgtatccctaccaccccatttctcttttgcttcactcggtctaactcttgtgccaagatcttgaccacatttgctactcttgccatggaggtgtagaatccggaaaacagatatggcttccttcttcctagcgggcatcccaagatcccttcaaactcttctatggttggtaccaatcgaaagtccccaaacgtgaagcatctgagcgactggtcataatattgagcgagggatgcgatggcttcaacggacacttctatcatggccaaatcccagattntcccatatgccttgcagaaggcttgatgttgaacttgatccatctgcttccct

SEQ ID NO: 40559 - DNA, 166 bp, Glycine max
  unsure (1)..(166): unsure at all n locations
ggaatacttacttgtggcgatgaataaaagcgctataggaatcgaagaatgcgaaaagtagatatcctatggctgcaaactcgtaaattccgtgggtatgacttttgaaaggagggaaaagaagtntttgaatgcaaaaacgtcccccctttcgtcacttttatat

SEQ ID NO: 40560 - DNA, 399 bp, Glycine max
cagtaatgatgttttagttatgttggggaacggttacgaacccgggatgggtttaggcaaagacaacggtgacataactagcctgataaatgccaaaggaaatcgtgggaagtatgggttaggctataagcccactcaggcagatataaagagaagcatcgtgggaaggaagagcggtagtcaaaactcgcggttgagacaagaaggtgaaggaagcccaccctgccacataagtaggagctttataagcgcgggtctgggggacgaaggtcaagtggtcgcgatatacgaagatggtgttctgagtacattggatttggtacgaccatgccctcctgattccagctgggaaattggcgagtggaagaatgctccggcatttacgcgacaagcataatg

SEQ ID NO: 40561 - DNA, 552 bp, Glycine max
  unsure (1)..(552): unsure at all n locations
aatgataccattgatnnacggacactatagntactcattctatatacacaanagaaattcaatgatggtagcnagaacaattatgaanatgaaaatggaagaacaaagggaagaattctagtgaatgatcaagcaattattcgaatcataactagaataaagaanaacaacaaaaggaatggtggaagcaataagggtgccaagaagaaattcaacaataaagggatccaatgctataactataaaaaatanggtcattttgctaacaagtgatggggtaagaaagtgccaagaaaggaggatgaagctcanatggcacaagatgagtngtatagttctaacgatgtattnngtgatggcactaccaattcaaaagactaaaatnttgatctttggtattggacataagaatgctccatcacatgactggccatagagagtgngtcacgagtcttgatgaaanggtgagaacangataaaattatctgacatagcaagtgatgatcagaagagaaatgatcatcattcttcataaggatgtgctttatgtct

SEQ ID NO: 40562 - DNA, 421 bp, Glycine max
  unsure (1)..(421): unsure at all n locations
agcttaagatatctctntatggacttaaacattctccgatgcaatggtatggtagacttagaaacttccttcttgaacaaaaatttgagagaggaaaagttgataaaacacatttcattaaaaagttctctcataacattntactcatgtaagtttatatggatgacatcatttttggttctactaatcgatctctttgtgaagattttgtacacaagatgcaggaggagtttgaaatgccaataatggggggggggattaaattactttcttggtctctatgtgaagaaaattgaccatggaacatttctctatcaaacatagtattgcaaagaacttctcaagaagnttaagatggacaaaagcaaggaggatgaaactcctatggctactaattgctaccttagtgcagatgaaaatg

SEQ ID NO: 40563 - DNA, 407 bp, Glycine max
  unsure (1)..(407): unsure at all n locations
gattatacatatgttaccatggcttatgtttcaaaaaaagatcaatcatcaagcatctttgaatcatctatctttcaatctttttcaacatcatctctcaaacatctttcaatcaatctttcaatatctttctacagaattntctgattcatttctcttcatctttctaaaaaggttttgatcaacactttctcttccaagaaaagttctttgttcaaaaacttgtgctattcatctttttcattctcttctcctttttccaaaagaacaaaggactgaaccgcctaaattctttggtctctcttctccctttgcaaaagaacgaaggataaccacctgaattctttttctctctctcccttacaaagatcaaggacaaccacctggaatctttgatcttccttccc

SEQ ID NO: 40564 - DNA, 279 bp, Glycine max
atcacactggcgctgccctgaaactccttgcatctcatcttatgctcggagttccagtgcgcctgctgacatgcttgtgaactgaataataaaaatcaaccaaaagtaaattctcctttcaattcccttcagctcaaagaaacacaaacacactgaacaaaagaacaacagcctcaaataatatttataataataaaaagacaatatataccaaaccagtcaacccaatcggtcaacctcgaataaaaaacccgacaaccaacaaaaagctaatgaaac

SEQ ID NO: 40565 - DNA, 422 bp, Glycine max
  unsure (1)..(422): unsure at all n locations
tactattgtctcttgagagaattgaaatatatgtatggaggaggacaagcttgtaatttccttctttttcgatattntgaggtgacaaaaagaatcgtatcaatggtgggtacataaaattcacaagaaaaatattattgtttaagtgtggttatgtagtggctaagtggagacatgatctgaataatccttctactagttcataagtggattgtctctggagtaaaatagggacaacggaatgcacaaagatggtggttggtggctagaaaccataatggaaatatgagaggctntatgtttccaatgaccccttcanagcatgttttgaagaccaatggcgtagatgaagtcccttatcagctggacattcatatttctaaagatgccagtgaataatactagtattctattgaaaaata

SEQ ID NO: 40566 - DNA, 377 bp, Glycine max
cgacaatatccttcggagccaaaccctcgcagatgctcgccagcttggcgcgagcctccctcatgagctcgacctcggcgtcggagggcttcctcccggcacgcacagtggccatggtggagagaacgagcacaatctccgccactctcttcaattcggcgccttcgtcgaatatatgtttcttggcgcagcgctcgtcggagtacccgttcagaagcggcggaggacgctgcggctgctcctccggctggggatcggtgacggcatcctccatgggagggaaaccctagagagagaggataagaaagaggtttgaattggatgggttaattaaaattttggcgggtaagtgaatgtgtttgacaaatgagagggat

SEQ ID NO: 40567 - DNA, 545 bp, Glycine max
  unsure (1)..(545): unsure at all n locations
agggcgtggttttgatcatcgaagctttgatanctttgatcanctgcggcatgcaagcttgactcggacatccgtgtgaannagtatgtttatttgaatttcgcatttatcttncgagggtcaatttcgagccgcgcgacatattatgcacctgaatcggacatccgtgtgaaaagtcatgaacatttgaatctctcgagagtttccgatgtttaatttcgagcgtatcgatatattataagcctgaatcggacatccgcgtgaaaagatatgaccatgtgaatttctaagagcctcccgtgttcaattcgagcctctcgacataatatgcgcccgaatccgacctccgtgtgaaaagcatgagctcttaattgtccagagtttccaaagttaattcccacgtctcggatattgtgcgcctgaacggacacccctgtgacaagttttaccctttgattttccacagcctctctgtttatttctacttcctattttgatggcctaaatgacacccttcaaaaaatgatctctgattctcccccccg

SEQ ID NO: 40568 - DNA, 317 bp, Glycine max
  unsure (1)..(317): unsure at all n locations
atggtcataacttttcacgtgaatgtccttttcgggcgcataanatgncgagaagcgcgaaattgaacaacagaagctcttgagaaattcatatgggcataagctttcacacggatgtccgactcaggcttataatatatcgacacgctcgaaattgaacatccgaatctctcgcgaaatttatatggtcataacttttcacactgatgtccaattcgcgcgcataatatgtcgagaggctcgagattgaacaacggaagctctcgagaaattcacatggtcataacttttcacatggatgttccaatcgggcgcat

SEQ ID NO: 40569 - DNA, 489 bp, Glycine max
  unsure (1)..(489): unsure at all n locations
gatcctctgagtcacctgcggtgtgcacgctcgaggcacagactntcaagagtgcncctttttgaacccatttatctttccagaaaatgatgcttctctcatccccaatgagctaagagatatttctctggaatttctgccaacaagcgtgaatgccacaccataagtttgaacaagtggtgttcaagttaatggaaggcaaaagattattcgtgcatccatacttagccctgacaacttgagcccaaaggttgtccttattgttacacatgtctcgaatgaccttcagctagcatatatgctntgttatgctcatcaacatcatcccattggaaagatgagtcaattgatcaagtttatcgcatgtggatcttgtgaggaaagaggatngcatggtatangcagcactactataacataataatttaatgtcggccagttaacatcgactgtaganaaatcgatgtaaccanaagcgaagtgatattt

SEQ ID NO: 40570 - DNA, 375 bp, Glycine max
  unsure (1)..(375): unsure at all n locations
tgaatgaatggtgtcgacgtaatgtgcaaaattaataatgtctctaggataattcggggtggttaatgataaatcgaacataaaaacctaagtttcacgtgaaaagataatactaagataaattgagtacatcccttattttacaagttggccaaattttgtaattaaaataaacacattttctatattataaaatgatatcaaaatatgttctatatctattaatgaatcacttatcgtattactattcatgcattgatcgagctcaaaagtgctaagcgtgtgagaaagtgtacttataaaagcttatagttcacgtcgacatacagttccataatcacattttaagactangtgaaataatatatatggggt

SEQ ID NO: 40571 - DNA, 392 bp, Glycine max
  unsure (1)..(392): unsure at all n locations
aatcactgtcttatatttaacacttccttctaagcttgggattntataaactatgcaagtgttgtgatgtgaatcttgtggatgatgcaagaacaaaggtattgaatcatgttgttgatctttgctccaagcaaaaacatttctgaggtttacttgcatctgcagacgaacaatgaagatgccataaacttctacaacaaatttgggtttgaaataacatagacaatccagaactattatacgaacattacaccgccagactgctatgttctcacgaggtatacggcaagcacaacgaagaaataacagttcatccagttattctgaggggaagtgatcaaagattgttgcatcgatntatggttctctccatggatatattacactatagt

SEQ ID NO: 40572 - DNA, 297 bp, Glycine max
  unsure (1)..(297): unsure at all n locations
agttggaagccatcttctcaatcaaattctttatccttagcacgagagacatatcaccaagggctccaccactggcagcatcaatcatactcctctccatgttgctaagtccctcatagaaatattgaagaaggagttgctcataaatctggtggtgagggcaacttgcacacaatttcttgaatctttcccattactcatgcaagctctctccactaagttgtctgatgcctgaaatgtctnttctgatggcagtggtcctagtagcaaggaagaatttctccaagaacaccctct

SEQ ID NO: 40573 - DNA, 417 bp, Glycine max
  unsure (1)..(417): unsure at all n locations
tcttcatgcaagcttgagctatttgatgaagacacaaatggatttctattacatttctaacagctacaacagtaactttcatgtctgtctctcactgttatgaattaatgcatcagctttttaaaatatttgtaccttatgcttattttctcgttttacaggtttcaattgcgagagttcacccaatatcagctactactagttacaaaacaacattgaagaaagtggactttactgaagaggaatatactctaggtcttcatcttccaaacgtaggcattgttaaactagatgtagaacaacttatttcaattntacaaaaagcatttgattttagcatagaagtagatgttcgtgaaatctatgaaaaaaatgtcatgtcaaagaaatatgttattttacagataatcatatatc

SEQ ID NO: 40574 - DNA, 298 bp, Glycine max
  unsure (1)..(298): unsure at all n locations
aagctccttcttccttgtcttatttcctagtggatggtgcctcccctctcctcttctcctttgccttccactgcatctccatgatgaaaaatcaccattgaaggacctcattgaagctccaagatccatcttccatagaaactccacaagcaagcttccatcatataggccagagtttattttgatggattacataactnttggtctaaagaactaactaaggccgcatttctaattttcctttacttttcatatattattttcatgtcataagttcatatggtcgctaacactcttt

SEQ ID NO: 40575 - DNA, 360 bp, Glycine max
  unsure (1)..(360): unsure at all n locations
agctttggtagttttagatgaagatagggtggtttttggagaaacaaattgttgtaaaggatggcattgatgaaaagaaagaggaggtaacagatgtgacaagtcaggagagtgaaaaccaataatggtcgaggagaaagaaataaacgaccaagaaaaaaaaatagaggtagaaaaagaaaaagaaaatgaagaanaagaaaaagttgaaaaaaataaagaagggaaagaaaagagtagaagtgagaaagcaagagaaaagaagaaagaanaagcttcanataaggatacagaagtaccatatcctgtggtaccttccaagaaagacaaggacctccatctggcgagatttcttgatat

SEQ ID NO: 40576 - DNA, 399 bp, Glycine max
  unsure (1)..(399): unsure at all n locations
gaccctctccacccgcggtcttctctctagtaaacgagctaagctnttctctttcctttcanaagcaatcctcctcttgtttgttgcacttgtaggcttgtaccctaaaccaaacctcccacggttctcaacaatcttcagcaagcttactgtgccatcaccatttcggcccaaacccattccaggctcatacccatcctttagcataactcgagctaccatcaaagaggtatcagacagacatggtcataccagaggagactacacataagcactattcataatttcaaatgcttgaaacaaggtttctaatgactcctccactgcttcaacataaggcgtagaagacagataacntactagtatgtcctcctcacctgatactataacaagctgacc

SEQ ID NO: 40577 - DNA, 587 bp, Glycine max
  unsure (1)..(587): unsure at all n locations
agggcacgctgacgattgangnccttttgannnnctttgagagccattcgtananncncngattgtnagagtttgtatgacgcgatgcagcnaganncattttcatacgagannggactactcatccgaggggggattttattttgcgangatattgggagatagagccaatgtactaagacgcattctcatatatcatattggtcaaattctagtgcattgtacacggagagtgctattggagaattgatgttctgtaatctgatctctcaaatttggaaaatgaaaacgtcacccctgccatattgaggaccattataaacctcactatatgatctcctattgcactgctttcaataagtttcaaaaatggactgatatatctgtgatatgtaactcatatggaatactttgttctgcttacatattgcatgaaatgtaccttgcttatcacccaaccataatagataacggctagttgggctatattcaaacacctaataatttctcctgctacaccacggaatacaattgacttcatcactcctgtgtgcgaaggaatgtcatactaacattgacatcaatct

SEQ ID NO: 40578 - DNA, 546 bp, Glycine max
  unsure (1)..(546): unsure at all n locations
nattgaaggctttgaganacgaccttgagancntcgttcttcgatgganatagaagggctattaaccacacngaacagnngtgatataccccatngaaggaatctgcagcggcggattgaagtactgacagctcttctcttgattaatttgtaactaatcttattactcggatgggctnttctggacaggaggggttatgatacctataacacccatatgcttatactcctgctataatccatcgtgctttattattgtgagaatgcacaactctaagcacatgttaacacgaagtctcataacatctgataattagctaataccatatncagatagtacctacttgacaatccatgtgcaacatgtgtgctatgattattgcgaagatgcaagttatcatattatactactacaaacctaaagctgctgaagcgtgcacagcggtaacggcccatgcaaataacctttgtaatgctccctgtgcaaagagaccagaggattaaccgaatgcgttcctagacacttgtaaaactccatctactcct

SEQ ID NO: 40579 - DNA, 375 bp, Glycine max
  unsure (1)..(375): unsure at all n locations
tgcaagcttgtaccacattttctcaatagcaacatcttttatatccacgagcaagggggcgacatcangtacatggttgtgaatgacagttccagtggagattattttttggagggtgaaatagacatgactgcaaatttatgaaggatatagaaggtctgatcgtccaactgcagcgactacacacctagaattgggagcgagattcaagtgggggatatacaattgggaatgcttatatgatgcttgatagggattcgacaaatgaaaatcaggatggagagtttactacattatggaagttaaaaatcccaagtaaaggcttattctttgcttggagattaatccgggaaggactgccaacaaagagtaact

SEQ ID NO: 40580 - DNA, 199 bp, Glycine max
tgacatctcaaacaaacaaatcaaacgtaacaagacaattatagttgctggttgaatacctcacccactcaagtgtatcacacaattatggctgttctctaatgaaacactctttccttttaccactctaattccccttgagttcttatgcaattcaagagattatggccacaacaaagaacaattcaccaatatgtgt

SEQ ID NO: 40581 - DNA, 469 bp, Glycine max
  unsure (1)..(469): unsure at all n locations
agcttatgcgcatgtttccttacgaacgttctcttgcggaagatatcctattaaccgaanaaatgcacccatatacaatcaaggcagctntgttacctagattatttacacgtacttccaaggtgtatttgttacttacatcacacacatctccttggctaaattcacatacatgcatactccaagcatttggggtaccaaaaattgcacatgtgcacatcttggtatttctaatacctatacatacacgaacttcatgatgaatcttgactatctacacaataaggtgctacatttcatgccctttntcaagttnttgctacctaaagccgcatgcaaattcaagcatatnttcctttgctgactaaaattgtattcaaattatatatatattnnttggaatatgttntctttcatacaacattcaacatatntatatatntttttnttttgtgagacattttgacta

SEQ ID NO: 40582 - DNA, 115 bp, Glycine max
tagacataactattcacacggatgtccgattcgggcgcataatatgtcgagaggctcgaaattgaacaacggatgctcttgataaattcaactggtataacttttcacacggata

SEQ ID NO: 40583 - DNA, 401 bp, Glycine max
  unsure (1)..(401): unsure at all n locations
agcttatccttatggctcgcctccggaattctctccccgtgccgctgcagaagatgtgagccaagcccctaccttcgaggggcaacttcctccttatgccgattaccccccgcaagaagacggcgaaggagatacccatctaggccctctgcttcccctcaaggatccatccccccatgaattacctcaaccaaagatagtccgccatctcccatcttcacccgcacccgtaaaagaatccgttcccttcacagaagataagggaaagattgatgcgcttgaagagatgctaagagcagtatatggcctcggcaattacccgttcttggatntatcagactatgtctcgtgcctaacatcgtcatccctcccaagttcanagtaccggatttnataagtac

SEQ ID NO: 40584 - DNA, 371 bp, Glycine max
agctttgaaaagtgttgtttttcatcttctcgctaagccaatccgctggcttaacgagcctccgctaagcgcaacactcattggctaagcgcaaggaagaatctggaagaagatgagttgtacaggttcactaagcacaccgcttcagtccatccgctaagcgagaaaggcacgcactaagccgaaattcattaatgtgcgctaagcgattcaaagttgcgctaagcgcacaagcatgaacaaagccacctatttaagcctgaaatcggatttagagaagcgcacaagcatgtctagagattctagagagagaaaggtccaagttctagagagttttgagagattttgctatgtgaagatctgtagagact

SEQ ID NO: 40585 - DNA, 367 bp, Glycine max
tatggcttgatcacccatttgtgtgtatttttatgagctttagcattggaaaatgtactgcatccttagaactggatagggcagggctaggttatcgaactaccagacacgaagtgcagtaatttagtttttatcatgttgtaattgtaatgttgttcgattaggctaagtttatcaagagacatctgagaacgaagtttaatttgaatttggccaaactcgcgagacatcggtgtttggtatttgtgccttcagcatagaacacaaaaataatttcaagaagagaaaaaccccaattgcatcaagtatctcagtagaaggacccaacgcttttacatatctattttcacacttgctcacaattact

SEQ ID NO: 40586 - DNA, 354 bp, Glycine max
tggcaagacactgaatctatcatgtgaaacctactatgagctaatttatttcaagtttttcctatgaagtaacaaattaatattaaaaaaatttagtgtttgatcaagtttttttaagaaaataagaatgtactgaaaaaaatgatttctgattattttgagaaactactttgagtaatagtttctatttttgttgttttctatctaaaattcaaatttagtgaatttagggttttatatgaggatactatcctagcctctctactaaagactgaccattttcattaatttaattagagtcgtttcttaaaatttgaccttcatttaattcatcacaacatttattatgatctg

SEQ ID NO: 40587 - DNA, 365 bp, Glycine max
  unsure (1)..(365): unsure at all n locations
actcagctatactccttcacttggttgaacctcttgctcggtttgatttgttcccatgcttgctaaagtgagacaaaagctggtgcaaatcaaaactccgatatctcatgggtggaatggatgaatgcatgaaggaatgcatataacacagatgcaatctangaatgcgggggtctggggaattcgtccccttcttagacacaacgtctaggggtagcaaagtgccccaacgtacgtttttaagaaggcgacacggaccctccgttggtttgtttacaaaagggatcaagacagaacccatatgcgatgcctatgcaaaagacacaatgcgggaatgtacacagtatgacaatattcactgaaca

SEQ ID NO: 40588 - DNA, 394 bp, Glycine max
  unsure (1)..(394): unsure at all n locations
cttgcaagctatgagaaacatgcgattctttggcatcatcaaaacattcagcttgatcctttgtctacatcattgactacttcaatcaattaattttcacaaacatgcaacttttcaaagatagaaacatgcacattagagtcacaactgaaataagctagtaaggatggcagaaatcaaggaaggatcatcaaccaaacctcacagtcattgtttcagtcaagctcaagtgtttaggctcataccatcataaacaactaacacaagtcccaacctttgcatttcatctcatgtcatacaaaaatgaacacacaaaattgaatccgaaggactttctaggcttgtaatggggttaggcttccaacaaatcatggttnttctaggattcaaaagc

SEQ ID NO: 40589 - DNA, 358 bp, Glycine max
tgtagggttaaagtctcacgattgtcacgtgttgatgcatcaattgttagtcgtggctatacgagacctcttgccaaacaaagtcaggttagccataactcgcctgtgctttttcttccatgccatatgtagcaaagtcattgatcctgtcaagtttgatgagctggaaaataaggccgcaattatactgtgccagttggagatgtattttccccctgccttccttgacatcatcattcacttgattgtgcatctcatcagagaaatcaaatgttgtggtcctgtttatttgtgatatatgtactcggtagagcgatacatgaagatcttaaaaaggtatacgaagaatctatatagt

SEQ ID NO: 40590 - DNA, 390 bp, Glycine max
agcttattactttgaaaacttatttaaattgaaaagtgttatttgtaagacaactcatacaagcactaaaagaccaacaatagttaacacaagtgttaatgatttatgtcttttaatcaagtaattcaggatttgaatcatgattgacaattgggtatgaaataaattgtgttgagagaaaaatactcaccttgtgtgtgcttatggttcctaacaaagatttgtcactacttttgacgaaacaattttatactaataccatgataaaaaaaaatacaagcactaaaagaaaaaaaaacaacttgcaacaaattctaattatttgcatttgattcatataatttgcaatcactaaaagagtttaatggttatacaccgatagtataaaat

SEQ ID NO: 40591 - DNA, 363 bp, Glycine max
tggagcatttgacttatatgctccagcttgagggggagtgttggaattacacacattgtatgggtagttgttccacacattgtatgggtaattgttccaacaaagaatagttattaatgtacctagttagtcacatattcatgtatctaggaattcatatgcatgtacataggtactagaacttcattaatattcttgtaaatttcacattgtatttactccctaagtctatataaatatagattagctgagtgggttaagcactcaagcatttcacaacctctagtctcttcaataggcaacaattgttacgaagcttggaaggcagcctattaattagaaagaatgcatgtgtcactgcat

SEQ ID NO: 40592 - DNA, 390 bp, Glycine max
agcttccttgagaagctagatcttatctacacacacccatctaaaaactaagctcacctccttgagaagctttcttgagaagctagagcttagctacacacccctataatagctaagctcacccccatgacaaaaaaaacatgaaaatacaaaaaaaatcctactacaaagactactgaaaatgccctgaaatactaggctaaaaccctatactactagaatggccaaaatacaaggcccaaaataagaaaacaacctattctactatttacaaagaagagtggacccaaccttggcccatgggctcaaaaatctaccctaaggttcatgagaaccctaaggccttctttatcaactctagcccaatcctcttggagcctcttgctcatg

SEQ ID NO: 40593 - DNA, 337 bp, Glycine max
cttccttttagtgcgtcacatttaaagcctttctcgatggtggtgcgtgcctttgatggcactcggcgggaagtaatgggggaaatcgacattcccattcagataggcccccacacttgcaatgtggtgtttcaagtgatggatataaatcctgcctatagctgcctcttgggaagaccttggattcatgccctgggagtagtcccatcaacgcttcaccagaaattgaagtttgcagtgggtggacttttagtgatagtgtcgggtgaagaggatatgttagtgagctgcccttcctccgcaccgtacgtaaaagcggcggaagaatcattggaaa

SEQ ID NO: 40594 - DNA, 383 bp, Glycine max
agcttgaagtgagaattcgtttaagagtcagtcttcctacttttatttgttgaccacagagtggtacctagagatatgtcgcgggggtcaagagacctcggggacatcaggtggggtgctattgcccaaaaccaagcttgatcaatcctaacccaacccgggcatagtcagtcagtgagaacctgtgacgtacctaaacaggcgagctcctggcagtcaaccaataaaagaacaacgacctcaaagcaaggaggcttgtgtagtggctggccagctatggatcttgagtggtatctggaatttggcctctggtaatcgattaccaagggtgtgtaatcgattacaaggcaaaaaaatggagactggaagttgagatggcctct

SEQ ID NO: 40595 - DNA, 362 bp, Glycine max
tagccctaaaggggatgtgtccttttcatgttttggagaggatcaataataatgcctataggttggacctcctagaagagtatggagtcagcaccacttttaacatttctgatttaattccttttgcaggtggagctgatattgaggaggaggaactaacagatttgaggtcaaatcctcttcaagagggaggggatgatgcaatcctccctaggaagggaccagtcactagagccataagcaagaggctccaagaggattgagctaaagctgctgaagaaggccctatggttctcatgaacctcagaatagatttttgagcccacgggctaagtttgggcccaattatctttgtacatatt

SEQ ID NO: 40596 - DNA, 385 bp, Glycine max
agcttcaaaccacagcttctttaaatctaggtgtccaaaacccctcattttaatggattttcaaggtttgaaaagtgaaattgagaatgaggtaaatttgaagcaaactctcacctcacaccagtccataacatcaatctaaacttgcccaaactggatttacacctaaaattccaccgaatcaaaatttgactcttcaacacccaattttgccctagaaatggctcttggttcactttggtcatttgtttttctctctagctcagcctaacctttctcacatgtcctaaatgacatttcaagctaggattaactcattttaacctccatttaccacagaattcagacttagccttccaactctcaacgcctcactctttttcca

SEQ ID NO: 40597 - DNA, 361 bp, Glycine max
tcacttaaggtaagggggatttttccacttcttgatccttaacctttttgtctagcaaaatttatgtataaaacaagtttaaggtcttttgtaggattaaagttactttggatatgttggatcaagtggcctctgaataattaagaaggggggttgaattaattattactgaacctttactaattaaaaatgtacccttcttaggcttttactataatgttaagaaagtaaataacagaaatggaaacttaaccaaaagtaaaagcaataattaaagtgcacaacggaaaataaagagtgtagggaagaagaagacaaacacaagagttttatactggttcggcaacaacccgtgcctaca

SEQ ID NO: 40598 - DNA, 387 bp, Glycine max
agcttatgcgcatatttctttacgaacgttcacttgcacaagacatcctatcaactaagaaaaatgcacccatatacaatcaaggtagcttcattacctagattatttacatgtacttccaaggtgtatttgttatttacatcacacacgcctccttggctgaatttacatacatgcatactcaaagcattttggggtaccaaaaactgcacatgcgctcatcttggtatttctaatacccctacatatacaaacttcacgatgaatcttgactacctacacaataaggtgctacatttcatgcttttttttttcaagtttttgctacctaaagccacatgcaaattcaagcatattttcctttgctgactaaaattgtattcaaat

SEQ ID NO: 40599 - DNA, 357 bp, Glycine max
tatccttatggcttgcctctggacttcatcccccgtgccaccccggaagatttaagccaagcccctactttcgaggggcaactcccaccttatgacgactatcccgggcaagacgatgaggaaggagatacccatcttggccccctgctccacctcaaagatccgtccccccatgaactaccccaaccgaacatagtttgccatatcccgacttcacccacacctgtaaaagaatctgttcccttcgcggaagataaggggaagatggaggcgcttgaagagaggttaagagcagtcgagggccttggcaattacccattctcggatttggcggatttatgtctcgtgcccaacatt

SEQ ID NO: 40600 - DNA, 386 bp, Glycine max
agcttataacaacaaaattgtctcaatcatttccaaatatgcatgtgaattatgaagcatcaacaagaatcaagccaaggctattgtgcaagcaatcaatgggacaaaacacaccaaatgattatgatgatggatggctcaaattttcacaaaggtaaactcatcactttcaaattgagctttcaaaactatcatgacatgtagaggagaatcaaggatttcaagtcacaaaatgtcaagaacttttattttcaaaacaattacccatttcttgaacatatcctataattcaaagaaaaacatgcaaagtcgtacatgcacacaaaattgacccaaaatattaaacaaaaaatccgacgaaactaacaacattaacaaattaacac

SEQ ID NO: 40601 - DNA, 355 bp, Glycine max
tcacacaatttatttttctcaaacttgatttttggaagaccaattaccatgtctttcctaactagacgattgagatgatgcatgtttatatgtgtagtcctatgatgcaacaaccaagaatcatctatcttacttaccaaacaacgcagctcatgaaatgatgcatgttcaatgtttaacatatagaaattacctattctctttccaatatggacaacctaatcgaacatagcttcactaataagacaacaattcttgttgaattcaattttgatgtcgttgtcacaaagttgactatgctttagtccatccacatatagaacattctttatctaagtattgtacttgtcgcaac

SEQ ID NO: 40602 - DNA, 368 bp, Glycine max
tagcttaggaccatagtttgttttctcctagtcttggaagtttggactatccttaggtgcttccagaatgatggcctcggttcgaaaagtctttctagacatggtgcaaccccaaggaagaacaacattgatgggacaaattagacccatcaattgttgaagatccaagggaatagagaaaagggcatctcaaatggttcaacatctctatttttctagacaatggcaccaggaggatataccattttttatgttgggctatgctcgaatataaaatcgttgtgttggatcaagcggcctcagaataattaagaaggggggttgaattaattattcctaaactctttactaaataaaaattactcttc

SEQ ID NO: 40603 - DNA, 360 bp, Glycine max
tgtccgtaaaaaatcactttttaggattttaaggttcaatacctcagtttttctcaccaagtaaaaatggaccattttaaggtccaacgccttaaaaggaccaccttccaaataaaaagaatcgtttgattcacccttttgaaagaactacgtaggtctgatttcctcttcgatggagggtacgtaagagcaagggccccgcttttgtcgacctcaaaaataaaaaagaaataaaagtttagatacgcaatttcacacaattctaatttaaggctgttgtcctttgggacaaatgtgagaggtgctaataccttcctcaaacgtaaatacaactcccgaatctagaatattcttcatgac

SEQ ID NO: 40604 - DNA, 376 bp, Glycine max
agcttgcctcatagatgtccttgaaggataaagcggccgaaggaaccagttccgctcccgagtatgacagccaccgctttaggagtgctgaacaccagcagcgcttcgaggccatcaggggttggtcatttctccgggagcgactcgtccagctcagggacgatgagtatgccgatttccagggggagatagttcgccggcggtgggcatcactggttacccccatggccgaattcgacccagacatagtcctcgaattttatgccaatgcttggcctacggaggagggcgtgcgagatatgagatcctgggtgaggggtcagtggatcccgttcgatgcggatgctatcagctagttcctaggatatcctttagt

SEQ ID NO: 40605 - DNA, 356 bp, Glycine max
tctcaaagattctacgaagaatcttctttagaagcctcttaatgaagcttctagagaaagctacatgaagctgcctcggtaaaaacgctgcccagccttcattaaccgttggatcttctcgaaatttggtctgcaacttcacaagacacttgtccatgatctgaccattggaatctttgagaagatgtctggagtgtgctagaagcctcttaatgaagcttctggaggaagcctcttaatgaagcttctagagaaaactacataaagctgcctcggtaaaaaggctgcccagccttcgttaaccgttggatcttctcgacatttggtattcaacttcaaaagacacttgaccatga

SEQ ID NO: 40606 - DNA, 372 bp, Glycine max
agcttctggtgggacatcttgacttgctttccaatctgacattcaccacagattctgccttcttctattttcagattgggaatgcctctaacagcacctttgtcaatgattttcttcatgcctcttaagtgcagatgtccaaatctttgatgccatattttgacttcatcttctttggaggatagacatgtggaggagtaactggtttcttgaggtgtccataggtaacagttgtcctttgatctgctgcccttcattagaacttcactcttctcatttgtcaccaagcattctgactttgtgaagtttacattgaatccttcatcacacaactgactgatgctgatcaagtttgcagtcagttccttcacc

SEQ ID NO: 40607 - DNA, 346 bp, Glycine max
actcttggccatttcttttaaacttttcacttaaaaaggtgggacttttgaaaaaatcttcaaaaacaagtcactagaaaaattgtgacttttggaaatttattttttgaaatcagtcactggttatcaattaccattaaggtgtaatcgattacacatcaacagatgtgactcttcattttaaattttgaaaatcaaaacgtttagaagttctggtaatcgattacaagtattgtgtaatcgattacacaagtttaaaatgatttgaaaatgtttaaacacaagttgtaactcttgaaatttgaaatcttaacattttaaaacactggtaatcgattactacctt

SEQ ID NO: 40608 - DNA, 391 bp, Glycine max
agcttgctaacccatggaatctcctaatatctcccacactttttggggtgggccattcttggatggccttgattttctcagggtccacttggaccccatttctaccaactacaaaccctaagaaaactatattatctacacaaaaagtacatttctctatatttacatagagggtgtttttcctaaggactgaaagaacttgcctgagatgtcctaagtgatcatctaggcttctactgtacactaaaatatcatcaaaataaacaactacaaatctacctatgaaatcccttaagacatgatgcataagccttataaaggtgcttggtgcattagtgagcccaaaaggcatcactagccattcatacaaaccaaacttggtcttgaaagg

SEQ ID NO: 40609 - DNA, 365 bp, Glycine max
tttggaaagtcctaacacgttaaccacatttctaaaaattcactgtttataactgaaaaatgtgacttttgtagtatgtctagacactctaagtttagatgcatccataagaagaaacgaatgtctaagagtactaatgcccatgcacccaaaaagatatgggtaccaaaatctcaaattgttcccattgtagatatcctctataggaaaagaccagggtttaagttggtacctagacagtggatgcgcacaacacatgacagaggaaaggtttgtgttcctcgacctaaaacccattgaaggaggaacattttcctttgaaggcatgggtaaaggaaagaatatgggtataggtaaaattggta

SEQ ID NO: 40610 - DNA, 384 bp, Glycine max
agcttctagatgagttatgtttgttattcggacatcctgtgaaaagtgatgaccatttgaatttctcgagtgcttccgttgtttaatttcaagcgtctcgatatttatgtcctcaaatcaaacatcggagcgaaatgttatgaccattcgaatttgtcgagagcttccgtttttcaatttcgagcgtctagatgagttatgtcaccgaatcagacatctgagtgaaacgttatgaccattcgaatgtgtcgagagcttccgttgctcaattttcagcgtttagatgagttatgtcaccgaatcggacatctcggtaaaaagttatgaccattcggctttgtcgagagcttccgttgctcattttcgaccgtcttgatatattat

SEQ ID NO: 40611 - DNA, 370 bp, Glycine max
tctatataagctgaaccattttatcaatttacacaagtttagttttattcagaaaattagagtttatctcttttatcttagtgagagtgattctcctaaattcttgagtgattcaagaacaccctggctgtatcaaaggactttcacaacctttgtgtgttgccctcgctggaaagagtgattctttccttcctatcatctccacccttgttctttcaaaccacaattccagaaaatccacctctgcccaaaattatctcgtgaccataactcccatttcacacactcaaattaagtgattcttgagcctaaattgaatttcaaaacgagacctttcacctcgttttggaatcacctcatttggagccct

SEQ ID NO: 40612 - DNA, 377 bp, Glycine max
  unsure (1)..(377): unsure at all n locations
agcttttataaatggcttgttcattaaaatcctctcactctagccatgcttggtgctgcacattcagctaaatatcttcttttgttgaatcgctggacccatgtttgtttcacatgtcgccacttcatcaaatgttngtaatgttggcacttcataattttttttcaatggtggaacaaacttaccattcctctcaatcctaccaaaattagtcaaaactttattgaattttacccctatttggggaagctttcctctattgatgaatgatgattttctccctttgcaaggctaacacatcatgctagagaaaagcttatccatgcattgagtatgggatagaaatgttcttgtgagaaattacactcacttttgtg

SEQ ID NO: 40613 - DNA, 363 bp, Glycine max
  unsure (1)..(363): unsure at all n locations
tgtgtttgtcagctatggtagtgttgctgttttttatttttatttttgcttggnttgcgggtatgcacatggaagttaaattatacttgtgtttttaagctatagtagtgcatccttttgtatatagttgttgccttatgggttatgcatatggtagtagcttcatgtacacgctactagaaaagaggctttggtggcacaattctgtttctggttctggtaaaatatcaaaggaaatatgagaggaaattttgcatggatctggctcctcaataataagagcacttagaaatttttagtgaaatcattgtctatactgtaagttctgcagatttatcggtgttgtgattgattgcatacttc

SEQ ID NO: 40614 - DNA, 128 bp, Glycine max
  unsure (1)..(128): unsure at all n locations
agcttatccatcaaacccattgattcgatagatcctgaagaaaatggggggaggggggttatcnatatcacccccacctacagaattactttcattcaaatcctgccaaccttaactactcattacct

SEQ ID NO: 40615 - DNA, 362 bp, Glycine max
tgaattgatggatctttttgtgagtaatttaatattaatatgtccactttgactgttgcattttgcaaatgtcttaatggagtagctcaaactatatgttttggtcttaaattaactaacctttactttttcaggaaaccagaatctccaaaatcaagatcaagacctaactttgaaatgaaagacgctactccaaagaagcaaaagcagtgcaattgtaaacactctaaatgcttaaagctgtaagcaaaactctctctctctctctctctgtggatgagttgtcaaacttgagagtttacttaaactagtggtcctctgtagactcgatttgtaaactaagtttacccaattataacaat

SEQ ID NO: 40616 - DNA, 386 bp, Glycine max
agcttgtagtgtacatgtcttcttctaataaggaggatatgcctgtactttacaagtttcctagggctcttcattccaagacccttgtagacattcctttctctgagactctaagagtggattcgggtcatgagcatcctttattccaagacccttgtagacatgcctttctcactctgcttttctttcctttttcatgtaatatggctaagtacgattaccaatccatcaaaagaaaaaaaagttgtcaatgttgaagtggcagaagattgggctcctcctcctcccatcaacactgagtccgacgagaggaaggatcttagtttttcttctcaagatgttacaaggaagaagcaaagagtggctactccatcatcgattatcgc

SEQ ID NO: 40617 - DNA, 359 bp, Glycine max
  unsure (1)..(359): unsure at all n locations
tataatattctttaatacgacattnttttttattttttgattggttaaatttaccatgcatgcatctattaatgtctttttgtttattttaatcattgcttcctttcgggtgctgatgtcattgatgcaagtgtttgaaggagctaaccactatgaaatttgattctttgggatccagtgatgttgatgctttgacatttacttcactatatctccagataatagagcttcttgtagatgtatgggacgacttgttgcctgcaaaaaggttgtatgctcagggaatgggaaaattggaattcaaactgggaaagcttgataggagggttaaagaattgataagtagggttataggttac

SEQ ID NO: 40618 - DNA, 381 bp, Glycine max
agcttcagcctttgatgatgtattaccgaaaagagaaagagagggttgatgagattcgaaggctcaagaagaaaagagaagagcttctttttgctttacaagaggctgagagaagatatgatctggctagagctgcagacctgcgatatggagcaattcaagaggtggaaactgcaatacaacaacttgaagggagcactgaagagaatctgatgttgactgaaactgttggaccggagcaaatagctgaggttgtgagccgctggaccggtataccagttacaaggcttggccaaaatgaaaaagaaagattgattggacttggtgacagattgcacagcagagttgtaggacaagaccaagctggtaatgctgttgctg

SEQ ID NO: 40619 - DNA, 366 bp, Glycine max
ttcagtaactttcttattttatgtcttttatgcacgataccacattgcctgatcaggctttatgaaggttatatgtcctctaagactgaaaaaagcaggctgcccaaagcaacagaagagacaagttagactagaaactcggatgaaaatccattaaaatttgcaggagttgcaataacatgtctaatgaatgtttatatcaaacaaccacatggaactgtattagcaatgtccaacattcaggaaaattaataaccaaatacctttccatctcccaatgatgggtttgagattatgtcagaaagatgaatacgatcagtgtacactgatctaatcccattgttagatattggacttgaaccagag

SEQ ID NO: 40620 - DNA, 388 bp, Glycine max
agcttgtcagcacaagtgttttcgtccctatatatgtgagaaattctaaaactaaaatgttttgttaagctctatacttttcatccaacgagtgtaaatagaccaatgcattgacttaagattgttaaaagcatgaaggagttatgagtctgtttctaacaaaaaatatcgtcaactacaagatctagccttttctatggaaaaaatatctgccattgtcttcgcaaaaaaagctatagaaatagccacattgcaagcacatgctcccaaaaaattaagatcatcgttgatgaagaattgccacttccaactaaatcgaggcatcctctagttgccccatctatgttacatttgacccaatgcactctcgcttgcctccaaataactt

SEQ ID NO: 40621 - DNA, 363 bp, Glycine max
tgtagagttatgtctcatatcagtttaatcgattacagcgttatcataattgattacacaattatttttgagacaatgactgatttattcaggagtatttgctttaattgattaccatgtgatataatcgattacttctctttctttaagtatttcagaagtgaactagaacattttaatcgattactttgagtatctaatcgattacattgttcttgagctttttccagattatggaacaacactttaattgattaaaaagataacctaatcgattacttcattgaattaatcaattacctagtagatttaatcgattacaagcggttataattgttttctctataaaaaaccaacttgtgt

SEQ ID NO: 40622 - DNA, 352 bp, Glycine max
agcttctcgatatatttttttgtctgaatcagacatctgagtgaaatttatgaccatttgaatttctcgagagcaattgttgcccaatttcgtgcgtctggatatattattcccctgaatcggacatctgagtgaaaagttatgaccatttgaatttctcgagagcttccgtttatcaatttcgagcatctatatatattatttcccggaatctgacattcgtgtgaaaagttatgaccatttaaatttcttgagagcttccattgttcaatgtcaagcgttctgatatgttatgcgcctaaatcggacatccgagtgaaaagtcaggacaatttgaatttctagagagctt

SEQ ID NO: 40623 - DNA, 356 bp, Glycine max
tctatataagctgaacctttttatcaattatcacaagttgagttgtattcagaaaattagagtttatctcttttatcttagtgagagtgattctcctaaattcttgagtgattcaagaacaccttggttgtatcaaaggactttcacaacctttgtgtgttgccctcgctggaaagagtgattctttccttcctttcatcatcacccttgttctttcaaaccacaattccagaaaatccacctctgcccagaattatctcgtggccataactcccattttacgcactcaaattaagtgattcttgagcctaaattgaatttcaaaacgagacctttcacctcgttttggaatcacc

SEQ ID NO: 40624 - DNA, 386 bp, Glycine max
agcttctgccagaagttagatgagatagggatggactcgtcaccgacgaagcttccgacgagatgctccgccgtgtccggcgttgacaacgccgaacccattgacttgttctgattgaagaaaaaaatggttttttttttggcggggttcaggaaaacggcattgcgcggaatcacggtgagatgcgaaaagggtttgaggtgggttttgaaaatgaggagagttggtgcagcacagacacaagaagaggaggaagaagcaagaaatggcttcaaaaccaaggcttttgtttccttcccaaacaaactacttgtttgttcaatgactttttagttttggatacaatgcagtcaaatattattatgtcaagcagaactgtcaacttt

SEQ ID NO: 40625 - DNA, 354 bp, Glycine max
tgaggaagttgatggtgtttctgtgatgtgtcctcgtttcaaaagtatacttggcgatgtgatagtcaagtgacgtgttccaatggaaaaagctggcggtacaagtctagaagtgtcaccattcagtacttgtgcagcagattgggaaacataccagattttgtgcaagcaaagcagaagcgtgatgagcatacaagaagattggagatgaaattaaaatttaattaaaggaaggatttttgggaaatatttcaaatttgtaatttcaaatatctaggatattgtttagatttaaaaaaggatattgtcttatttctaggatgctctttagaattaaaaatatattctataaat

SEQ ID NO: 40626 - DNA, 383 bp, Glycine max
agctttcattaaagttttttttaggactttttccacttatggcccttgcgggtaaaccgagcttctctccctccttgctagggcgaatctcctcaagttggcgtgcgtaggatcatatcccaacccaaaccttctgcgattctctgtgaactccaccagacttgccatgccattcccgtttcggcctaaacccattctgggctcatatctatgtcccaacatcacctgagccaccatcaaaggggcatcatatgagcgcgactgcaccgggggagattccacgtaagcattgctcacaacttccaatgcttggaaggatttttccaatgattcctctgcgacctcaacataaggcgtagaagatggatagctcacaagtatgt

SEQ ID NO: 40627 - DNA, 332 bp, Glycine max
tgttctctatgctgatgtttaactcctttgcatagggattattctcataattgttttgttgaattgtctgcaagtaaatagggaagttctagataaataaaacaggccaaacacaaatttttgtttgatgaggaagagcttatatgactattaaaggatgaaatcaccatgattgcaatttaatacatggcaaggacctatttaaactatataatgtccaatccactgaaaaaaaaaaaaggatcagtaagggaaggatggagggtgagaccaagaacccatgataatatgacctgcaaaatgtctgtctcttgttcgcggggcctttgaca

SEQ ID NO: 40628 - DNA, 382 bp, Glycine max
agcttctggtacacttgagtatcagaccaaacaaaataacctcctggacgcaaaactcgattcaattccaaaagcaacatgccacctggaaaagagtttcacatttctaagtaactatggttaacacaaagctaagccattatgaagattcaatatgaattgaaaaatccaaattcgagagaagtgttagtaagaccaaccatctagatgccaaggtactctacaacgtgcacaatgtacaagatcaaagacactgctgggaaatggtagcctttgagaacccatgacagcagatatggcaggaatccctctttcaagagcaaattgcacttgtgcttcatgttcatctttaggtgcaaaagacattgcaataacatctctt

SEQ ID NO: 40629 - DNA, 359 bp, Glycine max
tgtcctcatcttgaacaacatttttggatcccaatataccctctaagtatcgaacatcatcatcattcaactttgagaatctggggttcctttgaaccgacccagccatagaaccaaagcatttgtgccgaattccaacaccccattgtttggtttccgcgaaatttcttgaaggattgaaaaaagacaaaacttgacgatgatccccgcgaacaatattgctcggtaactgcgtgaatttttcatcaaaagctgtccccgaagttaaccgacgacatgacgttgctgaaggaagaagaggtgagttcattcggcgatggaagaaggggatgaaggagcgtaagaagaatctgctattg

SEQ ID NO: 40630 - DNA, 362 bp, Glycine max
  unsure (1)..(362): unsure at all n locations
gttccttatcgactatcaccacattcaaacagagatagattggaaggatacaattctgccagaattaaaaatgtgctacatgatttcccctccatttttgaacctccaaaaggacttcctccgcaatggcttcaagaccatgccattcacctcaaagaaggagcccaaataccaaatatcagaccatacaggtatccttactatcagaaaacagaaattgaaaaattggttgctgaaatgttagaagcaggaatcattcaatcgtccacgagtccttattccagtcttgtcatactagttagaaagaaagacggcagttggcggttttgtgtagaatacagagctttgaacaaaatcaccan

SEQ ID NO: 40631 - DNA, 347 bp, Glycine max
  unsure (1)..(347): unsure at all n locations
ttatgcaacttatgatgctacttgatattttgaccgtgtcattcaacttgatcggaggagctcgaggtcaggctaaatgacataataatatatttgtattattagtttaatatgattttaattatttgtttcaattatgtgtttttatttttaatattgtaagatcttagtgatttgtgtattaaatataatttataatatatacgttagataagtaacggtttgtctaaaaaatattgacaaacaagaacttattaagcatgaaatttgaaataactttattttacttgaagaaattttcaagtaaaatgttcaaacaactatgattntatttttaatggtttaaa

SEQ ID NO: 40632 - DNA, 281 bp, Glycine max
  unsure (1)..(281): unsure at all n locations
actgatcttacatccagtctcgttgccattgtcactattgggtttaatgtaagcttcgtctttttttcatttctagtttagttagcaaacatcttcaagtttgtttctgttaagagtttgatttttcaaggaatctattactactttggtttgctgcaacccaacctagatatatgaacatctttagatcgactactgtacctcaaaatttggaatggtttagtaaattgattttgtttaattntttatccccattggtagcttagacaataataatgatg

SEQ ID NO: 40633 - DNA, 372 bp, Glycine max
  unsure (1)..(372): unsure at all n locations
tatagtcattacttgttgagaaccataatctaaagnngtttgttcctttgatatagtaaataatttgttttgtggccttgagatgagtagtggttggagtctccatgtattgactgatgagtcgagtaccatatagaatgtctggtcttgtggacgtcaaatatcacaaactacccaccaaactcttgaaatttgtagcacccatcttttttgcttcgtcaaactttgataacttcattttgcactccaccggtattccaattggcttgcatagttttgctatgaaatgaagattcaatcttccttttgctttacctcaataccaagatagtatgacattagtccaatatcggtcatcttgaactccttgac

SEQ ID NO: 40634 - DNA, 356 bp, Glycine max
cctaaaattaaaataacttaatgccattaacctaaggaattaaaaacaaactaaatggctgaatggtactgaaattgttggcaaccaaaagtcacccccaaccagcaacaagtcagccaccatttggtctcccaaaaagctgatgcctaggttgccaattgagcccttattacaacttgaactaaagcccttttagttgattaacccaaaacatatttttggtcagccaactttacaaggattgggccattatttagacaaactaaacactctaaaattgaaataaagtggtgtcatttagtcctccatttgggccatgatacaactcacaaacttggacttttctccttgaaact

SEQ ID NO: 40635 - DNA, 377 bp, Glycine max
tcaagcttgctcacccatggaagctcctaatatcttccacactttttggggtgggccattcttggatggccttgattttctcatggtccacttggaccccatttctaccaactacaaaacctaagaaaactatattatctacacaaaaggtacacttctctatatttgcatagagggtgtttttcctaaggactgaaagaacttgtctgacatgtcctaagtgatcatctaggctcctactatacactaaaatatcatcaaaataaacaactacaaatctacctatgaaatcccttaagacatgatgcataagcctcataaaagtgcttggtgcatcactgagcccaaaaggcatcactagccattcatacaaacca

SEQ ID NO: 40636 - DNA, 391 bp, Glycine max
agcttccttgagaagctagatcttatctacacacacccatctaagaactaagctcacctccttgagaagctttcttgagaagctagagcttagctacacacccctataatagctaagctcacccccatgacaaaaaaaacatgaaaatacaaaaaaaatcctactacaaagactactgaaaatgccctgaaatactaggctaaaaccctatactactagaatggccaaaatacaaggcccaaaataagaaaacaacctattctactatttacaaagaagagtggacccaaccttggcccatgggctcaaaaatctaccctaaggttcatgagaaccctaaggccttctttatcaactctagcccaatcctcttggagcctcttgctcatgg

SEQ ID NO: 40637 - DNA, 353 bp, Glycine max
tccttttagtgcgtcacatttaaagccgttctcgatggtggtgcgagcctttgatggcactcggcgggaagtaatgggggaaatcgacattcccattcagataggcccccacacttgcaatgtggtgtttcaagtgatggatataaatcctgcctatagctgcctcttgggaagaccttggattcatgccctgggagtagtcccatcaacgcttcaccagaaattgaagtttgcagtgggtggacttttagtgatagtgtcgggtgaagaggatatgttagtgagctgcccttcctccgcaccgtacgtagaagcggcggaagaatcattggaaacggctttccaatcctttg

SEQ ID NO: 40638 - DNA, 384 bp, Glycine max
agcttcttgaacgtgatcaatatatttattggcataaattgaaggatgaagttgtggtacgcgatctgttttggtgtcacccagatgtaatgaagttatgcaatgcatgtcatttggtgtttttcatagatagtacctgcaaaacaaataggtacagacttccactacttgactttgttgggatgacaccaacggggatgacattctctgcttggtttgcatatctggagggtgaacgtgttaataattttgtatggactttggaacagtttcgaggtctatttttaagacgtaatcgcctccctgtagttattgttattgatagagacctagcattgatgaatgcagtgaaaactgtattccccaaaaatgcttgggagtatg

SEQ ID NO: 40639 - DNA, 357 bp, Glycine max
tgcctcaaagaggtccaggaaggacaattttgccgaattatactagttccgctccggagtatgacaatcaccgctttaggagcgctgtacaccagcagcgcttcgaggccatcaagggatggtcgtttctccgggagcgacgcgtccagctcagggacgacgagtatactgatttccaggaggaaatagtgaaattctgatacagaggtcagatgtcgtaccagatgtcacgacatcacgcttcagaacatggagattatatttgactgtatgaacatattaaacaagtaaataacacaagagaattgttaacccagttcggtgcaacgtcacctacatctgggggctaccaagcca

SEQ ID NO: 40640 - DNA, 387 bp, Glycine max
agcttaacaattatcacgctttatatgataaaactccagaattttccataaaatcaaaactgaacaaccttataagcatcagtgagttaaaaaaggattcatttcatccacaaactaaaacaacaaagtggggacatgctaattcaagctttttaaaagcccagaacaagaaaacagaagatcaagagtttccaaacacccattaaaacattcttcacacaatcacaaagttgggatttttagcagataccccagatcgatttctccaattccaccacaaagtaggaagccacccacaaaacaagggattcttaaaaacaaattccaaatcaattattcatctgcgtataagttaatttcagaaaaagccatgcacagaaaataaaa

SEQ ID NO: 40641 - DNA, 312 bp, Glycine max
tatcaaagaatttattgctctatatattttgtatatatagaatatagaattcctatatatagagtaattcatttgttctttaaccacttaaaataaaagatatcagagaccaccacaaaaataaaaaaaatccaaaaaaaatatatttaacgcatattaagactttctacgacgggtgttttataaccgtcgtaataatgcatgtaatgaagactgtcgtagtatatggagactttctacgacggctgttctataaccgccgtagtttctaatgtaggcatatgacatactaaaacggttttggaaataacc

SEQ ID NO: 40642 - DNA, 385 bp, Glycine max
agcttagcaaagattctattacaatatttgctttctacttagatgttagtttcatcaagtagtcaactgtaactttaaaatttctattttgtattttcacatacatctctaatcatactgccatcatgtacctatggctactaatactgatcaattattagttaagttcataatttttctatcgtacctgaatgatagaaaaagtatggttttgtgttagtatcactaattttgtctgaactaataatacaatgaatggcaagtttttacttgtatggattttaatgtatacaagtcatcaccaacagattaaattaaaaataaaagcagatgtttatacaaaatctacctgtagatactaatacattatgtactctaatcaggg

SEQ ID NO: 40643 - DNA, 359 bp, Glycine max
tttagctcgtatgatgcttagaatagatactctagtgcaaggctatgatgttgaattggttgagtatcgtgggttgttacttttaccaagcacaatccacccaagttcgagggcaactttgacccggaggggtgtaacatccctaattgtcgacctcttggagtctctcacactacaacacttcacgtggtgacacttctctcaacatccttgttggtcagaaccctccaccggtcataaccctctatagacaaccctttctaagacctcaaaaatcagctctgcctacttccaggatcaatgaatgaccccacaaaccaacacaagactttttagcgtgttttgtccttactcacaca

SEQ ID NO: 40644 - DNA, 384 bp, Glycine max
agcttgtgcaaatcaaatcattcctacatttcatctctagcatgcattttctttctttacccactcctcacgtttggttttttagggaaaaacgccataactaaacgcgtcgcaagggatccctatcgcaccagatccaaatctagaacgatgggtgatcaagaggagacgcaggaacagatgaaagccgacatgtcggctctgaaagaacaaatggcctccatgatggaggccatgttaagtatgaagcagctcatagagaagaacgcggccaccgccgccgctgccagttcggctgccgaagcagacccgactctcttggcaactacgcaccatcctccctcaaacatagtaggacggggaagggacacactggggcacgat

SEQ ID NO: 40645 - DNA, 365 bp, Glycine max
tataccacgtggtggtttcgtgtgcccgtggttgttgagcgtccatccattttttaggcgtggtttgtctgacatgctctaactgttctttttttttcaaaagcctataattgctcttgaaataacaacaatcacactagaaaaggattaaatagtgtgttaatcaaagataatgacttttaattattatagattcagacatacatgtgtgtatatatatatatatatgttgagtttccaccgaaaagaaatgagttttgataaagctaagtttaatcatttagtaactatgtaaataaagttctaaaacaatttttcaagcaaaaacttggtataaaaagagtgacagaaagcactaagagaat

SEQ ID NO: 40646 - DNA, 284 bp, Glycine max
agctttcgtgaaattgttatgtcataacccttcacacggatgtgcgatttaggcgcataatatatcgagacgctcgaaattgaacagcggaagctctcgagaaattaaaatggtcataagttatcacacggaggtccgatacaggaacatcacatatcgagatgctcgaaattgaacaaccgaagctttcgtgaaattgaaatggtcataacccttcacacggatgtccgattcaggcgcataatatattatagaactcttgaactgaaccgaggacttttttt

SEQ ID NO: 40647 - DNA, 354 bp, Glycine max
ttacagcagattttagttttgacccactttcctagaattaaaataacttaatgccattaacctaaggaattaaaataacttaatggctgtgtgtaactgaaattgtggcaaccaaaagtcacccccaacagccaacaagtcagccaccatttggtctcccaaaaggctgatgcctaggttgccaattgggcccttattacaacttgaactaaacctaactaaagcccttttagttgattaacccaaaacatatttttggtcagccaactttacaaggattgggccattatttagacaaactaaacactctaaaattgaaacaaagtggtgtcatttagtcctcctccatttggg

SEQ ID NO: 40648 - DNA, 378 bp, Glycine max
agcttgtatgagtattgtgtttgattcaagaattgtgtgcaagctgtcctcgccaccagatttctgagcaactccttcttcaatatttctatgagggacttatcaacatggagaggagtatgattgatgctgccagtggtggagctctaggtgatatgacccctactgaagctaggaatttgattgggaagatgacttccaactcccaacaattcagtgcaagaaatgatgctattgttcttagaggattccatgaggtggccacggattcatcttcatctactaaaaataaaaagcttgaaggaaaacttgatgccttggtcaacctagtaactcagcttgccatgaatcagaaatctatacctgttgcaagagtct

SEQ ID NO: 40649 - DNA, 356 bp, Glycine max
tgtaggattatggggtactcatcacatgtggtactatgtggcggtcgggcgatggtgcacaacaagtttttccacatccacaatgcgcgcataaacccaccatcccctgttgcccacctccaactgagctcacgtactcccacgtagcccgtatcctcgtttctctcaacaccgggtccccatcaatcctcccaagcttccacaacatccaagcaaaacaacattcacacagcacaagctatcacagccaagcaaaacagagcaaaggcagaaaactctgccaaaacaccaaccaaaaatcacagcttttcccactcaaagaccccagtaacaattccttcgatccaattcgttaa

SEQ ID NO: 40650 - DNA, 374 bp, Glycine max
agcttatataatttttttgcttaattggcacatgcctccttcgacccaaaattcacaaaatcgtcctccttttccccctctccttttttaccactaccaccaaattattttatgtcatatactcaaaccccttccaccttaaattcgcaaagttctcaaaacatttccttcaatttcaccaaacaatcctaccatgttttcaaatgataaagttgtatcgtaatttccacaattttctgtccaaattgagctagaagatatcacagttgatgaaatataagggtcttctacaaaaaggtagcctcaacttgcatttgcaattgaagaagatacgcaccttattagttcattgctcaatatctcagccgataaaa

SEQ ID NO: 40651 - DNA, 266 bp, Glycine max
aatcctcaagcttcaaggctctatacttgaccttttatgcatttacacgcctccctgggtagctaactctcgagttaactcgcttacccttacgagtttacaaatttaattgacctctgcgagtctactcttgagttaactctttttttattagactctacgcaaactctataaactctgagtaaactcactgaactctctagtttaccaccgagtacatgagtaatcaagggaaaaaaattacaccagaatgttaatcactcttt

SEQ ID NO: 40652 - DNA, 375 bp, Glycine max
agcttagtcttgaattcatctaattttgtatggtaattcatgacactcctctaaggcaggatcttcctgccaatcacaatgtcggagtagcgatcccaggcctcctgagatatgaatctagagcggtcatagcgggcctgagatgctgaggctggtgcctatcttttggggaagccatctgaaaagaaatagacaataaaaaaggattaaacaggagttattcacaaatgaaaaatagaaaataaaattgaaaataggactgggcgcttagcgcagcaggctgagcttagcgcaccttatgaaaatttgtttgtgggctaagcatgacaaccacgcgcttagcgagagaactcagaagatctgtttctgcataaa

SEQ ID NO: 40653 - DNA, 350 bp, Glycine max
tatgctgcatacatctacaattgaccactttaacctcagcagcaaaatcagccacaacaaaataattatgacctctccagcaacaggtacaatcctaggtggaggaatcatcccaaccttagatggtcgaatccttcacaacagtagtagcaacaacaacagccttattttcaaaatgctgctggccgaagcaaaccatacgttcctccaccaatccagcagcaacaatagtaacaaccccagaaacaacaaacagttgaggctcctcggcaaccttcccttgaagaacttgtgaggcaaatgactatgcaaaacatgcagtttcaacaagagaccagagcctccattca

SEQ ID NO: 40654 - DNA, 381 bp, Glycine max
agcttcataaatttgatgattgaagccaagtttggggacaatttgggaagacactctatgtttcttggggtggacacgaaactaatatgatgacccttttgagcaatgagcttggcaagttcaaggcttgggattaagtgtccgaaggctagccatggaaacattactaggtttgacaaaatttttgttttattaagaactcaatgcaaaaaaattattatggaccaaaaaaagtttaagtctttatttaactagcaaacattatattttgtttattgaatatattaaatttaagaaatattatatttaataagagtattaaatttaattatatattatatttaacaaatatattaaataatagcatttaatgttaatata

SEQ ID NO: 40655 - DNA, 346 bp, Glycine max
tgcactgcccttagtggacaatcttccttaaaacgttgaagccaccattgatgtcccttatgatgtcgttcagtatctcaaaaaagcctacgatgatttggaagaacccttgacctgttttctcaaatcttccaaagttgattggcatttctatgacccatatatgttacagttaccaaaaaggttcaaagagaaaaccaaatggtgtggaatagtaagccccggttgggcaccatagttgaaggtattgagccacaaggcagttggtggggttttgactcactctggttggacctctgtggtggaggttgtttagaatgaaaaacctctattttgttaatgtttc

SEQ ID NO: 40656 - DNA, 387 bp, Glycine max
  unsure (1)..(387): unsure at all n locations
agcttgaagactacagngagtaaaattctcatcttttgggacaataaaattgttatcagtctttcaaaaaatccgaaattgcattctggagaaaaatatatagaaattaaacatcattgtataagaaatcatgttcaaaatgggagagtggacttgcagtttgtgcccactgattatcagctttttgacatctttacaaaacgattaactgaggaaaggttgattttgttaagaagtcaacttggaatgatctttattaatgatttatttaatctctatatgtcatccattgttgcatccaaggatatatcgtccactagacttaaacacacactcataacattcaataaatggacaacatatcatgcattaattntttttttttat

SEQ ID NO: 40657 - DNA, 330 bp, Glycine max
tttttattattgtgttatttatctaaaatgcatgcatgtttcaaataaacctcactgtttggaagagactttttgtctcttgatgaagtatagactactttgaattcaaaagaattgaataaaagaaaagaaataaagtcctctggtactggtgaaggactaacagcaagaggcagatcatcaaagcaagacaacgacatcacaagaaaggatctaagccacaatagaagagtagtggaggaaatgttcctaacatcaggtgttatcactgtaaaaaggaaggatacacccgaaagcactaccctgtgagacaacagtattgaaaaaatg

SEQ ID NO: 40658 - DNA, 384 bp, Glycine max
agcttgccacccagctcgcccatgcgagctaggttgcttcctccagaagcaaccgccttctggaggaattttctggaaggcccaagtgggcctggtttctatttgcaccccatttttgctaaatacaccccttgctcttttttggtgatttttttccgtaacgttacaaaactttacgaattttgtaacgatgcttgttttctttccgtaatgttacgaatccttatggattacgtaatcatccctttttttgccttctggaacgttacggaactttacggattgtgcactaacacttccttttaatttacggcatgtcacggaacttcacggattgtgctacaatgctttcttttgactttcggcatgtcacggaacttcacg

SEQ ID NO: 40659 - DNA, 365 bp, Glycine max
ttaaaatttgaattaaaatgttcagaatctgctggtaatcgattaccatatatgtgtaatcgattacacagggcaaattttgaattcaaattttaataactgttgtaaatcagttttggccactggtaatcgattacatcctttggtaatcgattaccagagagtaaatttcttgtaaaagactttttaacttaattttcttggccaaaccttttgctacttcaattggaattcccttcctatttaatataccctttctaagactctatagactgtcttgatcatctatcttgaatatctttaattgctttgtcttgaataaagctttgagacgcatgtgatcttttggcatcatcaaaacatcg

SEQ ID NO: 40660 - DNA, 385 bp, Glycine max
agcttctacttatgtggcattgcgggcttccttcactttcttgtctccaacgcgagctttgaccactgttcttccttcccgcgatgcttcttttcatgtctgcctgagtgggcttatagcctaaaccatacttcccacgatttccttgggtatttatcaggctagttatgccgccgttgtctttgcctaaacccatcccgggttcataaccgttccccaacataactcgggccatcattaccgctgcatcggacagacaaggctgcccaaagagggagtccacggaggaaatgctgaccacctcaaaagactggaaagcagtttctatcgattcttctgcggcttccacataaggcatggaggatgggcagcttaccaagatgtc

SEQ ID NO: 40661 - DNA, 364 bp, Glycine max
gcttcgaagaaaggatgaggtacaagccctatagcagatcttgaaagagcccgggtagtcgaagagaagttcaagtccatagccatcaaagtctgaaaagagtatgatgaactaagggacgtcaatatggccacagctgaagccttggaatgagaaaccaagaaggcccgaaaggaagaacacgaccaaaacaagttttgaggggctttatagggcagcaatagtgagctcaagctccgaagaggtgaaaggaatcatcacgggtcaaaggcatgatcttgaaggacgagctaaaggtttgccttaggtcgaaaagaaatttgtcccaacagttaagcgagactgaagggaatatgtgggccat

SEQ ID NO: 40662 - DNA, 373 bp, Glycine max
  unsure (1)..(373): unsure at all n locations
agcttgtaagccttggatcttcttcatcaatggagtcctttgcttcttgaagatgaatgtcagcataatgaagaaggaagaaagatgattggagatgcctcttcaaggagaagatgagtcaaaaagaaactcaccaccatagaaagccatggataagagtttgaaggtaggagaagatgtgtggagggagagggagagaaggagcatgaaattttgtgcctcaaatgagatctgaactttgaagtgtaattctaaaatgatcaaatttgaacaaatgcacacacatggcctttatttatagcttaagtgtcacacaaaattggagggaaatttgaatttctattcaaatttcacttgaatntgaaattgaatt

SEQ ID NO: 40663 - DNA, 353 bp, Glycine max
tcttagtttcagctgatgaagatgaattcttggctacttcatgcactcctcaaatgacaatagcatcatttttggcactaaattgctgggagttggatgccatcttctcaattaaattcctggcttcaacaggggtcatgtctccaagggctccacctcaggcagcatctatcatgcttctctccatgttactgagtccttcataaaaacattggagaagaagttgcttcgaaatctggtggtgagggcaactggcacataggtttttgaatctctcctagtattcatataggctctctccactgagttgcctaatgcctgaaatatcctttctgatggtcgtggtcttggaa

SEQ ID NO: 40664 - DNA, 393 bp, Glycine max
tgcaagcttgagccaaaatcccaacttaccataaaccttgacccgagatgagactttccatcctcgccctcgaaagaaaacaaaaaaagaaaaataaagttcccggtcaaagatcggaagaaaacaaaaaaaaggattcccggtcaaagatcggaagaaaacaaaggaaaaaaaatccccgatcaaagatcggaagaaaatgaaagaattatacataagggtctttagaccagacaaatatccaaacaatacaaaatagccacaaccaaataatgaaagaattatacaaaaaggaatcctgtgcgctggcgactttctcgccccgcacaaaacaaaaacataaaagggaaaggccaaaacactcagagccaaatttcccaccaaaaacactat

SEQ ID NO: 40665 - DNA, 340 bp, Glycine max
  unsure (1)..(340): unsure at all n locations
cttgtggggaactatccatatttcnttaacattgtcaacaaacattgaccatggtgaacaagaaatatcaaacttcttcngacnntcatcgaactgatgctcgaaacgacaatcaaccaaactcccctaagcatccatgacatactcttatgcatttttttttaccaattagggatttacatttttgccttgacattcttgtcaatgtgaaacctacacaacaagttagaacaatcaggtaatacaattttcactgcattcatcaatgttaggtctctgctagtcacaataactctagggaagacatcacatcttagaaaaagtccttgaaatcgttcta

SEQ ID NO: 40666 - DNA, 389 bp, Glycine max
agctttatgtaatgtttggtctctcctaactagtaagctcgtttcattcaagggtccacacaaagaaagcgcgtttctttctgtgaacttcgcagttcccccaagtcccaacggaggcgcctgccaatataacctaacatttcatcaaaagtcacaaactaacaatttgaagtgctatcactatcagtaattacgaaaaacaccaagaaaaaaaaaaatactccttagaatacaccaagaaattaaatataaagaaaatgtcaaaaacatctcttaaaaagctgttttaaatcgctgtaaacgtcaatcctcccaaatctgctacaaggaaagcctgtccatgtgtaaggtgttatattcaattggtcatccatgcttaatatcacatc

SEQ ID NO: 40667 - DNA, 353 bp, Glycine max
tattattaggttttgacttatctcaaacttctcctttcttgaagcgtgtttatttattttttatataaaaaggatgaatttgtgtattcagcttcttcttttttgtgtgtgaatactagcctatccctgattcatgtgtaaaaagactaattatttgagatacaaagatttgtttaaagagatttatctctcccaataattaccattatatacttgtagacacaatggttgaattagaccacatccttactcttgagaaaatatttttttacattttacattttatattcttaattgcagaattggtggctctgcctcattttcatctaaacaatgtgagtttcatacaaatg

SEQ ID NO: 40668 - DNA, 388 bp, Glycine max
agctttgatggtgtcgagattaaatcacatgtttgtcatcatcaaaaagggggagaatgtgaatgtatgtatacatgattttgatgatgccaaagaaaaatcaaacaaggttgcttcaaatgataagcatttgcttcaagaataattcaagagtgcttcaacaaacaaagccttgtttcaagattcactaaagaccaagccttgccttaaaacaaagtgctttcaagacatgcaaggctctggtaatcaattaccaggaagtgtaatcgattaccagaagacatggttgagaaatagctgttgaaaaaggttttgaatttgaattttcaacatgtaatcgattaccatatgtctgtaatcgattaccagcaacgaaactttggaaatt

SEQ ID NO: 40669 - DNA, 187 bp, Glycine max
aatcagttttggccactggcaatcgattacaacctttggtaatcgatcaccgaaagctaatgtcttgtaaaagacgttttaacttaattattcttggccaaacctttggctacttcaattggaatacccttcctatttactataccctttctaagaccctataaactgtcttgatcatttaacctga

SEQ ID NO: 40670 - DNA, 384 bp, Glycine max
agcttagatcaaaagataattactttgaaattattatatatacagcaacagctaccaggtctcaacattgcatggcaccaggcaggttcagcatacaaaatatgctgcaaacaccctgatctccacatgaattgaatgttagaacacatatagttgtgtaggagtccagggaactaagcaattctattctagttatctctatccttgtgttgttcattatcttcaaacaagtcctctggggggtcgtagatgatcatacctgggaaaatctctaagaagtcgtcgtcttttattttctctcttaattctggatagggaatgagcccttttaatatcacgcgaaaaggcaatgaaaggggaggctcaagagactgtctcatttct

SEQ ID NO: 40671 - DNA, 354 bp, Glycine max
tgtccttagatggtttactaattctgaatgctttatacccttttatggtatactaattatgaatgctttagcttgtgcctctgaaatgtgtgcaagaatttcaatgatgtaaatccatcagtcatttttcctggctgaaaatctttgacgaccatgaaagaaatgaagaaggtgaacagaattagctgcaagcgaatggagaaggatatgaagaagatgaaggcgaactgtgaaagatgtttcacaaaggaagacaatgtgggtttctgaaatcctaaattggattattggggaaatatatttcaagttatgttccatggtagtacaacaaaccaaggattgactaaacataag

SEQ ID NO: 40672 - DNA, 383 bp, Glycine max
agcttcaataaaagatatatttaaacacaacattaaaactcaacatcagttttacagaaaccgatgttaatatcgtcacgttaacattggaaaaaaaaccgatgttaacaaaatcagtttatttacaaaaatgtcaccgctcttttgttaacatcaattttatcaaaaatcaacgttaaaatagcaatgttgaaagtgttttttttagtagtgcatgcatggtgattcaactatacccaactaactaagcccacgttttctcgaaacttaactaacaagccatggaaatgtttcccttgtttccttactttcttcccttattttttctcacattcaagctattattctcccaaagaagaaaatacaaaaacctgccaccaggt

SEQ ID NO: 40673 - DNA, 349 bp, Glycine max
tgcttgagaatatgttgtatcaatttttctcacatgtaattttataattattgataaattttgactaaagtaaaaaaatgtgttagaatgtatgactataatttttaggacaaaatatttttttcctcaacttttgatgttttttgtttttagtctttaaacaaaatttggtctagtctttatttttatatttttctttatttatgtttttagtctttattgttaactatcattgttaggtgatgatatagtaaccatataacttatcaagtgacttactaatatgatgtggcaaccacatatcaaatttcagggcaaattatatttgtactcattcatcttttaacag

SEQ ID NO: 40674 - DNA, 386 bp, Glycine max
agcttataaggatttaatattgttaagaaaaaaaattagggaaagaagtgaaaaattgtgtgcacaaaacatgggccttttgtttattttatatagttttagtaaattttcttttttaaagaaattatctatttccttacgggttatgtgatggagatctgggttcaatgaaagtctaaggatctaatggctcctttccacttgctttaagagtcttggcagtctggaaactacaggcttacatgatagtgatacaattattttcttacatgatatgattattttttcagttgtctatttgccataaagaatttctattattgacctttgttcttgtttgaaacttttaatgtgagaaaattaagtacttgaaactaatttacaca

SEQ ID NO: 40675 - DNA, 319 bp, Glycine max
taacttatatgtttttattagtaaacaatactcaaagggaacatctacaacttattttaacacacattacatacaataagctttgaatgcacctacttttcaacctaataagtactaattaaacctgatatttttgaaccttatgaactcttaattgcattattgcaatgcacaccatacacaaagactaataagccagaacaagatccaacttttttcaatactgaggatcaaagctatatgatgttgtcagtcccctcatcaaacaggtataagcctaagttaaataaaattaagtccaactaattagtattttaac

SEQ ID NO: 40676 - DNA, 382 bp, Glycine max
agcttctatagaggttggatctttgagcttcaataaggtccttcaatggtgattttccaccatggagatgcagcgaaagataaaggagaagaggtgagaggaggcgccatccattagggaataagccatggaacaaggagcttcaccaccaagagagtgccttggataagaagcttaaaaaggaagcttcaatggaggaaaagaaagagagaaagagagagagagagagagagagaggagcactaaaatggaggaaaagagcgagagaagttaaactttgaagtgtgtctcactagactctcattcatcaaagttacaacaagtgttacacatgcttctatttatagcctaggtagcttccttgagaaacttccttgagaag

SEQ ID NO: 40677 - DNA, 355 bp, Glycine max
ttctcccaagtcctaaatgacatttcaagctagtattaactcactttaacctccatttaccacagaattcagacttagccttccaactcttaaagcctcactctttttccactcataacatcacattctcactttctaaccctaagtgaactctacccttcacctctaacagttttccataagaaatatcagcatataaacatcacaaacatcatcacaaaaaccctaaatcagaatgggtatgtctaactcatccaaacatggcaatttcaacaagctttcagcaagtgtcttcacaaataatcatcacacagcagaaacctagcaagactacccatcatatctcccaaaaccc

SEQ ID NO: 40678 - DNA, 375 bp, Glycine max
agctttaccgaggtaagcctttactcacactcatccattttcgataaaaccacacttatttcgcaaggttaattcaactctccccaaatggtcagatcatagagtgagactatgttaagaaatgtgcttgggttaatcgcttaaaaagtgaaatcttccaggagtaaagagtcaacgtgacataacacaatagttagacatgtgtattaataattgtgacttaagaatgatgtgttacttgaagagttgtattagtacatggctaatgaaaaaatagaggatttctatatctctttttaacatcttgatcttatattttgctttatatgttgtttcctttcaaaatgagtttatccttgcattttatgttgatct

SEQ ID NO: 40679 - DNA, 350 bp, Glycine max
tgttcacacatttaaataaaatttaaattatatttaaataattgacctaattttttttccatttaataaaatttaaattaaataacatatattataaaactaaattaaaatagatgcaaaacttaaattactaactaaaatactctacaaataacaaaattaaaaattaaaatacatacataaatttaaataaatgacctaattttttttccatttaataaaatttaaattaaataacatatattatacaactaaattaaaatagatgcaaaacttaaattactaactaaaatactctacaaataacaaaattaaaaattaaaatacatacataaatttaaataaatgac

SEQ ID NO: 40680 - DNA, 386 bp, Glycine max
  unsure (1)..(386): unsure at all n locations
agcttgagaataatttgtcacacagatgttgttctgtcggtgtcggtgtttggtggtttttgggtaacccgaatttccccagtggacccattggttggcacgagttgcaaatttcgatttagggtgcagttggtacagtagggttgtttgtggctagttttttttaaccctcttcaacaacatgtatattcctttcaccattgctctctggagataggtaccttttcaaataccctcaacatttaggaaagttgtattttgcggcttaagattaccaagctagaaactgtttactttgtgttttttttactcaataacttcatttttcccattttgccaaattctattctcattttggattatcttgctntgtttacactgattct

SEQ ID NO: 40681 - DNA, 374 bp, Glycine max
gaatcctcaagcttgccatcgattacacatatactataatcttttaccagatcagattttcagaaaatattctcaacagtcacatctttttatttggttcttgaatggctatcaaaggcctatatatatgtgacttgagacacgaatttgctaagagtttttcagaacaaaaaggtcttatcctcttaaaaagcaaaatcgttttatcctcttaaaaattccttggccaaaacacttgtgattcaataaggaattatttgagtgctcaaattgttcaatctatctctttcaagagagattacttcttctcttcttctttattctgaaaaaggattaagagaccgagggtttcttgttgtaaagaaatctgaaca

SEQ ID NO: 40682 - DNA, 390 bp, Glycine max
agcttaaaggagcactcaatctcgggtgtacttaccctcaaggcctatactctgaagagtccatcagggtctctcccttctgattcaggttcaacctagaaaacattttagcacacaaactctatctatgaattgtacaaaacacacgactcctcaattgttctcaaaataattttatcttgtcgtgcttgtgattaaattcgtcgagtccccatagtggttctcatcacaatactcgttgaacattaactcgtcccccttaaagggtcttatagtcgtttgattgtacgattcatagctcacaactcagtgcatacaacatctcaatgcacatatatattacaagtcaatacatactcaatttatcacatacactcggtctcaatcaca

SEQ ID NO: 40683 - DNA, 354 bp, Glycine max
tgctctaaatttacattgatgtttgtatttatgggaggtggttatatgccatttttgctttaagagtagtgtcccactggtaaaattaactttccaaatgtttgccttcgcatgaatggccccgaggaagcttgcctcaaagaggtccaggaaggacaaggcggccgaaggaactagttccgctccagagtacgacagtcaccgctttaggagcgctgtacaccagcagcgcttcgaagccatcaagggatggtcgtttctccgggagcgacgcgtccagctcagggacgacgagtatactgatttccaagaggaaatagggcgccggcggtgggcaccactggttactcccat

SEQ ID NO: 40684 - DNA, 363 bp, Glycine max
tcctccacgcaggaacctttagatccatttaatagtgccttgaccaatggaatacaacccaaagctgactggttaagaaccccaaatttcctccctcctgtcttgtgaatcccctaatgtaattaatgtttcagattacatatatcaattagaatggtatacgatttatagcaagttgaactatgatgcttaaatgtagaagtttagagcatgtttgagtaagtttattcagaaacacttgtaagagaataaattatataagaagggaaaaaaatgaaatgagttttttcataaattcaaattgacttatgtattggttaatttataaatactttctcatcttttaaaaaagttgtatgagaa

SEQ ID NO: 40685 - DNA, 387 bp, Glycine max
agcttttggcgaatgaagaattatttttaaattcaagacgatgctcaaagagattcaaaggttgtaaaggattgtaatatttgttcaaaagttatagaaatgtaagtaaaggccttgcttttatagactcttccagtctggtcaagaaaaccattggaagaggtataacctttagaaaatcctgaaaaccattggaagagatacatcttttgattttttttcaaaacttgttactagtaatcgattaccaaatcagtgtaatcgattacacaaagcatttttgtgaaaggatgtgactcttcacaattgaatttaaatttcaacgttcaaacacactggtaatcgattaccaatatcttgtaatcgattacaccatttcgaaattaa

SEQ ID NO: 40686 - DNA, 286 bp, Glycine max
aagcttctccctttcttttctataaatagggggttaagtgaatatcaaaagggttcagccccttaggcacttctctctctctcgaaatagcggaggaaaataagttccgtgaagaaaattcgagccgaggcgcttccgtaacgtttctgtaatcgtttccgtgagtaattacgcgaagattctcgaccgctcttcaagattcatcgttcgtgcttcattttcttcagtcttcaacgggtaagtacctcagaccaagcttttgaattcattctatgtacccgtggtg

SEQ ID NO: 40687 - DNA, 356 bp, Glycine max
agggctcaattttcttaatcagtttgtataatagcttcacctttttggcatgttttgggaggaacttggacatggatgctagcctgccattcaacttataaacttcttggatgtaatttgggttgcgcatctctagtatggcagtgcatttgtcggggttggcttcaatcccccgatgtgtgatcatgaagtcagggaacttgtctttgcctaccccaaaagtacatttccctgggttgaagcacatgtcatatttgtggagttctccaaagacttcttccaggaccgccacatgttgtggtatgctctgagacttgacaaccaagtcatacacatataccttgacgttatgtcca

SEQ ID NO: 40688 - DNA, 364 bp, Glycine max
ttgaagaagaagatacaaatcatacatgtttttattctttcattttttttctgtaaaaagttttttgtatattgttgtaaagttcaaaagccctcaaatcactttgaatatattgagagaaaatgatgaaagagagttgattgtatatttttctctaagacattcatagtttagttagtgaacaatctcaaacaacaaatcatttgatttgtttagagccaacaatgatttggtaaaataaagaatactaagttttgtcaagcttgatgtagagcttgattgtgtaagagtaaaaagtgatactaaacaatacttgtaacttgtgtgaagttagtgaaatttgatgattttccaagaattggac

SEQ ID NO: 40689 - DNA, 359 bp, Glycine max
  unsure (1)..(359): unsure at all n locations
tgcatttctctcccatggttgatataaattctatgatggnatcaaagctcttgctttgaagagccctgctgcgctacttatattcttcctctcgattatcatatccttcattcttacatcatgagtgaacaacaacaagatcaatcacttaatgtacacagtccttattacctttatctgggagaaaatccagcgatagctttggtttcttcggttcttgattcatccaattataattcatggagtcgatctatgcttattgcattaagtgcaaagaacaaatctgagtttgtcgatggttttattcaaagacctgcatcagatcatgcacttcatgcagcttggaagaggtgcaataa

SEQ ID NO: 40690 - DNA, 378 bp, Glycine max
  unsure (1)..(378): unsure at all n locations
agctttgagccaattctaacgataataactttttactcggatgtccgattgagtctcgtaatatatcgacacgctcgaaattgaatgttgaagctctaggcctattcaaacaacaataacgttttactcggatgtccgattcagtgacgtaatatatcgggacgctcgaaattgaatgttgaacctctgagccaactcaaacgacaataactttttactcggatgtctgattgagtcccgtattatatcgagacggtcaaagttgaatgttgaagctttaagccaattcatacgacaataactttttactcggatgtctgattgagtctcgtaatataacgaaacgctcgaaatngaatgttgaagctttgagccaat

SEQ ID NO: 40691 - DNA, 355 bp, Glycine max
tcaacattcaatttcgagcgtctcgattatttctggactcaatcagacatccgagtaaaaagttattgtcgtttgagttggctcagaggttcaacattcaatttcgagcgtcccgatatattacggcactgaatcggacatccgagtaaaaagttattgtcgtttgaattggctcagagcttcaacattcaatttcgagcgtatccatatattacgggactcaatcagacatccgagtaaaaagttattgtcgtttgaattggctcacaggttcaacattcaatttcgagcgtctcgatatattacgggactcaatcggacatccgagtaaaaagttattgtcgtttgaattggc

SEQ ID NO: 40692 - DNA, 323 bp, Glycine max
  unsure (1)..(323): unsure at all n locations
ccgggcataatcgggcagtgagaacctgtgatgtacctaaacaggcgagctcctggcagncaacagataaaaggaaaacaagaccccaaagcaaggaggcttgtggtggctggccaactgtgaatttcgagtaatatgtggatggtggcctctggtaatcgattactaaaggtgggtaatctattacaaggcttaaaaatgaagacaggaggctaagatggtctctggtaatcgattaccacggggtgtaatcgattaccaggcttgaaaacgaagtcaggaagcctctggtaatcgattaaccaggggtgtaatcgattacc

SEQ ID NO: 40693 - DNA, 352 bp, Glycine max
tttcactcggagatctgattcaggcgcataatatatcgagacgcttgaaaatgaacaacggaagctctcgagaaattccaatggtcattacctttaactcggaggtctgatttaggcgcataatatatcaagacgctcgaaattgaacaacggaagctctctagaaattcaaatggtcataacttttcactccgaggttcgattcaagtgcatgatatatccagacgctcgaaattgaacaatagaagctctcgagaaattcaaatggccataacctttaactcggaggtccgatttaggcgcataatatatcgagacgctcgaaatttaacaatggaagctcttgggcaat

SEQ ID NO: 40694 - DNA, 351 bp, Glycine max
agcttgccacccagctcgtttatgctagcagggttgcttcctccagaagcaacagccttctggaggaatcttctggagggcccaagtgggcctggttgctatctgcacccccatttttactaagttcaccccctgcctttttttggtgattcttttttcgtaaagttacggaaacttacgaatttcgtaacgatacttgttttctttccgtaatgttacggaaccttgtggattacataatcttcccctttttgacttacggaatgttacggaacctcactaattgtgcaacgatgcttccatttaatttccggtgtgtcacggaaccttacggaatgtgcatccatattt

SEQ ID NO: 40695 - DNA, 355 bp, Glycine max
tccttaagaagattcctattgaagctagttcttagctacacatacctctctaatagctaagctcacctccttgagatgagaagctagagcttagctacacaccccctataatagctaagctcacccccatgacaaaaaacatgaaaataaaaaaaaagtccttattacaaagacaactctaaatgccccgaaatacaaggctaaaaccctatactactagaatggccaaaatacaaggcctagacgaaggaaaaacctattctaatatttacaaagataagcgggctcatacttagcccatgggctcgaaatctaccctaaggctcatgagaaccctagggccttttcttggatc

SEQ ID NO: 40696 - DNA, 357 bp, Glycine max
agcttgaagtgaggatttggtgtatggtgagacttcctacttttattcgttgaccacagagtggtacctgtagatatgtcgcgggggtcatgagaccttggggacgttaggtggggtgctattgcccataaccaatcttgaccaatctcgacccaacccgggcatagtcagtcagtgagaacctgtgacgtacctaaacaggctagctcttgacagtcaaccgataaaagaacaaagaccacaaagcaaggaggcttgtgtggtggctggccagctatggatcttgagtaatatttggagtatggcctatggtaatcgattatcaagggtgggttattgattacaaagcttataaat

SEQ ID NO: 40697 - DNA, 361 bp, Glycine max
tccctcatcatgaaatttttctttcttgtaacatcataagtgagaacaccattccacaactttttcagatcatcaatcaaaggttgtaaataaacatcaataccaattgttggattaaatgggttaggtacgacacaactcacaaacatataagttttagtcatacatatttctagaggaagattgtatggggtaacaatgattggccaataagaataaggtgaagacgatgcttaaatatatgggttaaatacatttgtgcataaaccaagtcgcacattttgcgtatcaatagaaaaatctggatgtacccgttcaaagtgcttccagacttcatagttagagggatgacttaacatgc

SEQ ID NO: 40698 - DNA, 377 bp, Glycine max
agcgtcttcaatttatggttctactatgcgcaatttcgtcgtccctggaaaattgttatctgagttcttagccggtttgtgtaaacagagacgtttaacattttttttttcaaggacggagttgaaatttacgcgattttgttatgtggaactgcagttagctttttaattggtaaaataaaataacataaaatgccgtgtgctacaatcactggagaggaggtattcaattcaattattcaataacgaacttgaaattttcattgaaatggaattcgttccatttggttgtgcatgattacgagttcagttaattaggtcagtaacgtgttgagtttaaagttctaccgtgcgcaacatggaaaaaatgtcacctg

SEQ ID NO: 40699 - DNA, 352 bp, Glycine max
  unsure (1)..(352): unsure at all n locations
tgttaaaaattatactacttacattngattatatnttaatataaatggacttcttaaatatttttaaaggtgattcttgacataatcaacaattagttttgactatatattactaactttgaaatgttagaagatagaataaagactatacccaaaaaatttaagtcgagatagttaaaatcacctcataccttctaaaatactaaaattaataagatgtttaaaattacttattagttgcttgcgatgctaaacattgaaaaaggcaaaatattattggaaaagatatttataattattcactaatgctaagatattcctttatattgcaaatctaacacataattcatag

SEQ ID NO: 40700 - DNA, 378 bp, Glycine max
agcttctcgatatgttatgtgtctgaatcggacatgcgagtgaaaaattatgaccattttaatttcccgagagcttccgttgttcaatttctagcatctcgatacgctatgtgcctgaatcggacatgcgagtgaaaacttatgaccatttgaatttctcgagagcttccgttgttaaatttctagcgtctcgatacgctatgcgcctacatcgaacatgcgagtgaaaagttaataccattttaatttctcgagagattccgttagtcaatttcgagcgtctcgatatgttatgcgcctgaatcggacatgcgcataaaaagttatgactattttaatttctcgggagcatctgttgttcaatttctagcggttcga

SEQ ID NO: 40701 - DNA, 352 bp, Glycine max
tgacactctaaaacactcttgctagcagccactgtttaatctcgattctgctcttcgcgtgcggatctagctgctaaacgaaacagcttgagatgaaaagctagagcttatctccgcacccactataataacatcactcagacgcatgatgtgccacctgattactcaagggacttgattattacgctgacaactctaaacgcccgcaactacggggctactatcgtttactactttaatggatgtgctactgagtctagacgatggagaaaaatatgctgatgtttactatggatagcgggcttatacgtatcacatgggctctacatgtactcgtaggcttatgagaacc

SEQ ID NO: 40702 - DNA, 386 bp, Glycine max
agcttgcatcaactaatttttctatgaagaagaagggtgactcagagcatgaggctcccaccaattgaggtctaaggggagtatagaagtgcacagtaaacttaccattgcaccaaggctcaccctcaatggtgaaaagatgaaatgggaaggtatatttttcttgtcataggcaagaggtaagcttaggaggctaagccccctttgaggaaactttttcatggagacaattttttgctgatctttattacaatttttttttctgcgatctttattacaaatggacagggactactcccaaaagttagctcaagggaggagggttgtccaagtcttataaggagtattctagccatgttcctagccaatgtgggacaccttaacac

SEQ ID NO: 40703 - DNA, 366 bp, Glycine max
ttttgactcctgattctttggaacttgtttaactctagattctttggcatcatcaaaataatcttggaaagcattgcttccacaatcttagctactataaatgtcttggcctctcataatcatggttatcttggtggggcattgagaagcaatgtgtactcttccaagacatttaaagcactttatagagctaatcttcccttgcatactagccttaggaggttgcttttctattgtcatccccttgtcatctttgggcttagaaggtgtatcccctaagatgccttgacctcggtatttctttggataatagtgaaagccataaggttttgaagaaagcttccttttaagttgttgttctaccct

SEQ ID NO: 40704 - DNA, 386 bp, Glycine max
agcttcaagaattatggccttattttactacttgtctcccgagggaaattctataaatagacctctcatctttagtggagtgggttaccactactggaaaacccgcatgcaaatctttatagaggcaataaatttaatatctgggaagccatagaacaaggaccttatgttccctctataatagccggaagtgcaacaatagaaaaacctagagcagattggactgaggaagaaagaagattagcacaatataatttaaaggccaaaaatattattacatctgccttacgaatagatgaatactttagggtttcaaattgtaaaagtgctaaggatatgtgggatactctacaagtaacacatgaaggcacaacatatgttaaaag

SEQ ID NO: 40705 - DNA, 363 bp, Glycine max
tctgagtaagaatgaaagcatgcccatatgtaaaatagttccaacaagtttgggaaacaaagaacctattgaggcgtgatcacggaaacaacaaaagtttggaggcagacatgcaatttccaaataagctgggggctaacaccttaatttggtgatgttttgcagcattaatgagtacaagcacctaagatgttacaactgttttttgtgttaagaattatttgactttcaatacaggtgaccgttgatttttaatggattattgatttcctacatgtacgagttagaaatttaagttattgaacttgactagggatacagtaatataaacacttatcgaaggcaccatttgaaaggggcatg

SEQ ID NO: 40706 - DNA, 384 bp, Glycine max
agcttatagaatagtgtaccaaactatcgctgctccggccaagctatcttggaaaaagtgtattaatagcttctcatccttagagtgcgcgcccatcttgtgacaatacatcttgagatggtttttgggacaaacggtccctttatacttgtcgaagtctggcaccttggattttgggggaataacaacatccggtactaagcaaagatccatcatgtccgtgaacggatagtcaccaaagccttcaacagccctcaatctcttctcgaggagatcgagtttccttctttcttcggccgctgggggtggtccttccgcggacaaaaatattggctgtgctgtgaggttgtgttgaggcaatgtgtcgagtgtccgcccctctac

SEQ ID NO: 40707 - DNA, 364 bp, Glycine max
tgctgaggaagctacatgaagctgcctttgtaaaaacactgtgcagccttcgttaaccgttggattgtctttaaattttgtttgcagcttcacaagacacttgtccacgatctgaccgttgggatcttggagacgatgtctggagtatgcacgaagcttccgttcccaagagcatttctcatttaagcatttcagcctttgctttcgtgtagcttaggaaaaatgccatttcttctcctttctttcttccaaagtcatttctaaagtcccaagcactttctccatcacccacaggcaccattagccaccacaaaccgtcgttgttctccgttgaaaccccacaccgagaggaacccttcaaccg

SEQ ID NO: 40708 - DNA, 235 bp, Glycine max
gaagaccagatacgaacgatcgcctaactaaatgagtcgacatgatgcatgctaacgtgtgccgcctacgacgcgacaaccaagaatgatcgagtttactcgccgaaccaccatgcccatgaaatgatgcctgataaatcgtttaagaatatacgatattgacacgtccttgtactaacaaggacaacctcaccagacatggctctactcatacggcaataatccttattgaatt

SEQ ID NO: 40709 - DNA, 351 bp, Glycine max
tcagcttcaggattatgggatacccatcacatgtggtactatgttgcggtcgggcgatggtgcacaacaagttttccacgtccacaaatcgcgcataaacccaccatcccctgttgcccacctccaactgagctcacgtactcccacgtagctcatatcctcgtttctctcaacaccgggtccccatcaatcctcccaagcttccccaacatccaagtaactcaacattcaaacagcaaaaattatcacagccaaacaaaacagggcaaaggcataaaactctgcccaaaacaccaaccaaaatcacagcttttctcatttaaagaccccaataataatttcttcgctcca

SEQ ID NO: 40710 - DNA, 390 bp, Glycine max
agcttgatgcaacccaatattctttattttaccaagccttgttgtatctatacaaatcaaatagatttgttgtttgattgcacaataattaagtctcaatcgtcttaccgatggatatacaatttcaacacttagttttttttcctcaaagcgctcaaggtgttttgagagctttttagaactatacataaatatacaaaaatctttttacataaagaatttgaatgaaagcatgtaagttccttgttcatgtcttcaaagcttttgatatttataggtcttcttcaacaagtgttcattgtttgtaaatggatctttcttgagcttacatctaaagattgtggtcgtttgagcatttaatgcttgcatcaaatgcacgtactcctacat

SEQ ID NO: 40711 - DNA, 335 bp, Glycine max
ctgaagcttcgatggtgccaataagaaatgatatgtttgtcatcattaaaaggggggagaatgtgaatgtatgaatacatgattgggatgatgtccaaagaagaatcatacgcagttgcttcaaaagataagcatggcttcaagattaatacaggattgcttcagccaacatggccttgctttaagattaactcaagatcaagccttgcattaaaacatagtgtgatctagacatgcaaggctctggtgatcgattaccagaagacaggattgagaaatagctgttgaaaaaggttttgaatttgaattttcaacatgtaactcgataccgtatg

SEQ ID NO: 40712 - DNA, 377 bp, Glycine max
  unsure (1)..(377): unsure at all n locations
agcttgtgtacctcattctctctcactcactcaagctttaattaagcatatacttcctttactttcctcactcaaattattacttgaccattgaagtcttttgttttgcaagtcacccctcctgtcaaaggcacccttccaagctgacgtgtgaagttcgggaccccactcaaccacgtccaccttgacgtgccacggttctagattttggtaagaacatataatatataacaatttcttttgtttttgttcttctctatttattatttctcatgccttcaacacaaaatctgaaccttagagtcaaatgggtaaaaaccattgttacgaaattctttttttttttttgtgcagctttngattgctacaaccaatgt

SEQ ID NO: 40713 - DNA, 280 bp, Glycine max
ggaacaaaaatttgtttttacgttgtacattctaaagcggttataaataaccgtcttagaatgggtgccagtggcaatgttgtaattagtataaattaagacaacgttggttcttaccctaggaccgtctttgtatagcataataactgtagttctccaaattaaaaccctaaagtccacgacgaagcggtagccactccatacccttcgtccccgccttcttcctcttcctcgcgtggatctcactcggcctccagcgcggtcctactcctacgtgccc

SEQ ID NO: 40714 - DNA, 384 bp, Glycine max
agcttgcctaattaacctgtaattgagagaaaatgattattaatcacacaaaatggaagtactaagtatttattacctatacttaatagaaaatacttataacactacaaaataaccataaattggaagagtttgatacaatttacacaagttttatacataaaagttagtcattttcaccgactaacagttggtctcccacatttttcatcatgaaggtagacatgtatgccctctacaagtccatcgcatgtgcgccaaaaagggaaaagcaaattgggaggaactcttggcaggtgtggtaggagtgtccgttagttggttcccccgatggaaagatacactgatgttattgtgcctaggaagcttttgccagagaggaat

SEQ ID NO: 40715 - DNA, 358 bp, Glycine max
tgagttaaggagctagatgtggaagtgtttaatacttgtaacttattgaagttagtggaacttggtagtttaccaagaattggaagtagtcttggtgcttgagatggactagtataatttcctatgtctcatcttgtttattttctcttttgtgctttaaactgacccagggttcgaatttgattttttcatttgaaaatctctaattattttacatgatctaaaactattatccaaatcattttgcaaaaatctaataattgttttcttacatattcaccaccagacaataatgttgttttagaaagaggttttatttttaaaaatctaaattcaaccccccttcttgtgatatttg

SEQ ID NO: 40716 - DNA, 492 bp, Glycine max
  unsure (1)..(492): unsure at all n locations
caatggtacctacacatcgttatgantttatcgaacgataacatntttacaagccagacggtgtgctctgtgctcccaaccgantatataaatcagctgcagcatgcaacttgatacaatagtttttgctttaggcatagtgaaagcgaacaaacaggagacgacaaatattgacactccgaaaatgaaagtataataagcctgatggccaaagccatggaaccttctaagaagcaaccactcggaatattctagctaagattggcacgtcgcggcacacgtgtacacaaaaatattccatatctaaacaaattccgaggctatatatgaaacattgaaccaattagttcatggcacacacactggtgtttccaccaagaacagggagcaaagctagctaaaaattaaaacatgggtttcgccaccagggattccaactatgaacattctggaatcctgtgaactatacccacttggacacgattcctggan

SEQ ID NO: 40717 - DNA, 352 bp, Glycine max
  unsure (1)..(352): unsure at all n locations
gcttgaacatattacaatgttccgnacttttaaatattttgcgtttctttaaaattaaacaatctacggaattgttaaatgaaaaaatttcttttaaaatgaatttgtttctaaagtgaatgaataaggatattagattttggtaaattgggacaataattgattttaaatcaaattaatgatacatgctaggtgaataaaattaacaagacggtgagtttcaataagataatagttgaaatttttttttatgtacattaaaaaaacatttaccatttctttttacaaaagacgttacaagacatttaatgttacaataatttaatatgccccaagaaaaaaacacaaattt

SEQ ID NO: 40718 - DNA, 380 bp, Glycine max
agcttgtaacaccctgatatatatatctatatattattagtaattatgtttgatgtttgattatttgctgcgttatttttatccgtaattattttcaaagaggttaatttagtttatagaggggtgtgggtagataaggatctagtttctcaaagaagtctcttgagaaagcttcttaaagaagccacgaggaagcttcttgaggaagcaacatgagctgcctcggtaaaaacgcttcccagccttcgttaaccattgaatcttctcaaaatttggtctgtagcttcacaagacagttttccatgatctggccgctgggatctttgagaagatgtctggagtgtgcgcgaagcttccgttcccgagagcatttctcattt

SEQ ID NO: 40719 - DNA, 349 bp, Glycine max
tataatctcacagcactttggagagtcattatagacaataaccacaaaaaaggttaggaatattaaacatattaacaatttaagcggaccagacctactgctattgaaattcaatacaaattaccaataatctcatgcacaatacacacatttaataagaggatattatctttcctactagcacaaatatgtaatccaaaggaacaagcatgaaccaaaaatcagactgctcaacacaagatctgcaaggtcctggtaaggcgagagatcaacaacaaaagactataaaaattaccttcaggaagtttactagggtcttccccacatgagaaacatgccttcaaaaatg

SEQ ID NO: 40720 - DNA, 345 bp, Glycine max
gcatgcaagcttatatatataaattttttttattgtcggatctatgcgatcgagtttgactcatttgaagacatgttggactcgtggaaagagttaaactgctagcacgcaatgcagagagagtactgattgtggacttgctggcaaaactgtatggctagctacagcatcttggcttaccataggccattgcatgtctgcttggatgtacatccaactgtactagataaatattcttgtttttagtgagtgctaagattatgttggattatccaaaattatgttgacttgagattttagggaaatatatctatgcttagatttaaactgattcttaatccataa

SEQ ID NO: 40721 - DNA, 352 bp, Glycine max
tatttatttgttgctttagttatatgttgattcttaactcacaaggctttcatttcttcatgtgctcttgaaactgagttctatttatggtggtaatcttaacaggcgacaatcaggcagccagtattcaagaacatgatgaaagccctgtattttcagtttactgttggagttctgccattatatctggtaacctttgcaggatactgggcttatggatcttcaacagctacctatttgaggagtgatgtcgatggtccagtttgggctaaggctatggccaataatgcagcctttcttcaatcagacattgcattgcatgtagtaacttctaaacttcaatttagagcta

SEQ ID NO: 40722 - DNA, 380 bp, Glycine max
agctttttggagtagaaacatgggaccaactcattttatttcaaaaaggaagtcatatctagtcaaggtctaagagaccatacaagtttcctaacgatttctaattatgtgggccattaagtctatcatatgctgacaatagccgagaagcccgtgaatctcttcgggggcggagtaggtgtctgccatcgctttggccttggctaacaatcggggaagttcttgactcccgttcaaggtaagagcaaaccgatccatccacatggttgcctcttggtgtaaagagtcgatcacccttcctctagcctctttttccgcgtatacttgggcatattcgtccgcaatcctatgctcgtgggccgcggctagatctaactctt

SEQ ID NO: 40723 - DNA, 252 bp, Glycine max
taacgataactcgcctgtgctttttcttccatgctatatgtagcaaagtcattgatccagtcatgtttgatgagttggaaaatgaggctgtaattatactgtgctagttggagatgtattttccccctgctttctttgacatcataattcacttgattgtgcatctggtcagagaaatcaaatgttgtggtcctgtttatctacgatggatgtacccggttgagcgatacatgaagatattaaaagggtata

SEQ ID NO: 40724 - DNA, 381 bp, Glycine max
agcttgtacccaccagtactatgatagcccagcataatcatttgttcaccctttttgtccagttttcttcttaattgatttggaacatgcttgaagcacaagcatccaaacacccttaggtgcttgagacaaggcttacttccactccaagtttcttcaggtgtcacattctctagcctctttgttgaacatctgttgagcagataggctgctgttgacactgcctcaccccaaaactcctttggcaagtgaaaattccttagcatacacctggtcatgttgactatggttctattgagtatctcaaatacaccattgtggtgtggtgcatatggaggtgtgatcttatgaatattaccctcatcctcatagaatttcttg

SEQ ID NO: 40725 - DNA, 349 bp, Glycine max
tgcacaagaagttactaaatactttttttttcaaaatgaagtaactacctaactaactaacttccactaatatatacagttactactcataaggaagggatggtccttgattaagcccatctaatctacctaattaaactaattacacaaagcaaaacccaaattcgcagtccaattattcaagtgcaaaggttctgacttccaagccaaatttgacccttaaattgacagaattggcccaagcttatttgtgacgaaattgaagatattttgtttatctttctagggactactcacacgcttcatttggaattatgtaatgtcctataaaccttgcataaggcagata

SEQ ID NO: 40726 - DNA, 388 bp, Glycine max
agcttcaactcttggctgacttatctaaaatgatgcatcttaagtacagaggagcatgcacttagctgataaggactcgtttagcgctcacattgccgcaatgaatctcgcttagctgccatgactggtgcttagcttcatggacctcagttatggtcgtaaggaattgtgtttatcgacaataggtcacgcttagccaaggataagttgtcgcttagcgatcaagctgaagcttagccgaattcagattgaattaaagttagcttagctcaaccttggctagcttagcgcaccaaatcagccttagatgcaagggttggtcgctaagcgcttgagactcacggcttagtgcatgaacagtgatgcgcttagcgcgaggcttgcgctt

SEQ ID NO: 40727 - DNA, 366 bp, Glycine max
ttggcagatcaaggagagtggacctcgttcattgacatattaacactattggtgtttgggaccatactctttccaaatgtaaacgggctagtggatttagcagcgatcgatgcttttcttgcttatcatcacaacaaggaaagcctgatcattgctattttggtcgatgcatatgacacattcaacctgagatgcgaaaagagtggtgcaagaattgtctgttgtacaaccataattccacgccctatcgaccaaagatgaatggggcagttgaggctgccaataaaaatatcaagaaaatagttaagaagatgattgtgtcatacaaggattggcacaagatgttgccctttgcattgcatggtg

SEQ ID NO: 40728 - DNA, 386 bp, Glycine max
agcttaagagcatgcacattgcattattgaattaccataatgaacaaaaggaaaagagaaagaaactgaagggcaagagtaggagccatctttctgctaataataagtagaaagaaagcctgctattggagaatgccactgggattgagaagtagtaaaccacctttttataggggctagcgatcgagataggtttcatccatttaatatgtggttatagaataatactaccatatcgagcacgcaaaaacttggagattagaacatattaatatattacaacgctgtacgtaattgcttaacacacaagaaaaatcagtaattatttattatatatagtttataaaatatctattattagaggagagaaacatatgtgtactcat

SEQ ID NO: 40729 - DNA, 364 bp, Glycine max
tgccaaatgtaatttgagagttaaattgttcatgaagttcaaagagtttaacaatctcccgtctacaaaactatgatcaaatttgcaacataattaattaaaatgttttaaaaaaagaaaatatttaatcaagttgcaagtatctagcttatcgaaacctgtaagcaaaggccatgattagtacaattaaaatattttccaaataaaaatctgttgaaatgtgacagtagtactctaatttctggccatcatttcatttaatcgattgtacacaacaatatatacatacataggaaaaaaaaaaaaaacgtaaacaggaaccctaaaccaagacaaattaccaaatcataacacctaaaattac

SEQ ID NO: 40730 - DNA, 388 bp, Glycine max
ctgcagctttaatttcaagcattgaatcatgacttatgcctagggatctaaattttggttttaaatgggcatgaatattatgacatgtttgagagggtttttactagaatttggctgccccatgaggaataccttgcacctaggtagcatggaaaatacccttcaacggtatgaatatatggcataaaaataccttgcaaagtgtgaatgagtagcaagaaaaaaggcctttcaaaatatgtatatttgtggataggtagtataggacccttttttttttaaaaaaatgtacccatgtcaaaagtggcacgaggatgcttcccgaatgaatatatgatgtggaattgcccctcaagtgtatatggatggcatgaaatttccttttcaa

SEQ ID NO: 40731 - DNA, 364 bp, Glycine max
tgctaagcgcaattccttggtagagtatttattgtgcttagtgtgcatgtctcacttagcgcaattccttcaattgaagtctttggttgatctcaaggactgaagaagagttagagagtggaaaaagacaagagtgaacattatagaaaagtgtatgaaacatgagtgttgaagagtgtaaacacttacttagtgagtggtaggtctaatatttgtttttactaaccttgtaaaaatggttttcgaatgtgatagtgatctaccttcccctagatccgctaagctaatggcttcattggctaagcaaatggataatttgcaaagaaacgttgagaggtggatgggagatagatttgaagagata

SEQ ID NO: 40732 - DNA, 388 bp, Glycine max
agctttgagcttacccttattcatcttgcttaagttgaacacaacatgactgaagatgtttgttggacaagtggtctcaataacttaagaggggggtgaattaagtttcaaaattttcccactaacaaattttaacccccttttaaatgatatatgataggctcagaatgcaaaagaagaagaagtaatcaatttaataatgttcttttaactgtgcaaggcaaagtaaactgcaataaaataaccgagataagggaagagagaaatgcaaactcaatttatactggttcgaccacttcccatgcctacatccagttctcaagcaactcacttacgattttccactatctctataaatcctttacagtctttgaacacactgaagtgt

SEQ ID NO: 40733 - DNA, 340 bp, Glycine max
tattatgtatatactcattgagtgattttaatacattttctttcaaacatatactatttgtgaaagccaggagtggcttagttacatagaatacttagatcttaatctcaggggaagattaattgtagtgccaagagtggccctgtcgcaacgtgcccttcgcgggcgagcgaaggtgaggctcacgggtgcgctttcctaagggaggaaagatgcgcggagtcgccaccaacgtttatttgtggaaaacgtcgggaaaaccgaaggaaaccggtcaaaatgaaaattctaagttcgagagttgtatttacgcttgaggaaggtattagcacctctcacg

SEQ ID NO: 40734 - DNA, 413 bp, Glycine max
  unsure (1)..(413): unsure at all n locations
gatcctntnagtcacctgccgcatgcaagctttggaagcaatcttttattgttgcttccctcatcattcctgtcaagccttcaacaaccaagtcaaacaatagagggccaaaggatccctttgtctcaaacctctttgaggcttaaattcagaggttgagcttccattcactagaatagatatagaggctgatgtgaggcaccccttaatccatccaatccatctgtcatggaacctcattcttctcatcatatgaaaaaggaattgccaagacactaaatcatatgctttttcgaaatccactttaaacaccaagcaggacctcttagacctcctagcctcctcaagtacctcattagcaaccaaaacaccatggagcaactgtctatccttcacaaaggttgtctgccttt

SEQ ID NO: 40735 - DNA, 361 bp, Glycine max
gaatacctaagcttgcttgtggagcttctatggaggctggatctttgagctttaatgaggtccttcaatggtgatttttcaccatggagatgcagcggaaggcaaaggagaagaggagaagggaggcgccatccactagggaataagccatggaagaaggagcttcaccaccaagatgagccttggataagaagcttggaaggatgcttcaatgaaggaaaagaaagagggagagaaagagagaggggggagcacgaaattgaaggaataaaagagggggagaagtagaactttgaagtgtgtctcataagactttcattcatcaaagttacaacaagtgttacacatgcttctatttata

SEQ ID NO: 40736 - DNA, 381 bp, Glycine max
agcttgtggttattatatcatttaatgcttgcattaaacgcatatcctgcttcatgcaggaaaaccactatgattggctttcgtgttgatcactataacaaaaaatcagttccttttagtcaaagtagatctatcacagtaaaacacatcttttgatgttgtttgggaacttttagaacttaaacttcatttattcttcataggattcgacaaatcctgaaagaatgtcttgtgagacaatttctgccaaatgaacctcagacacaaagtactaaatgaagtcttaaatgtcatctttaatattgtatcagatcatgacttattcatacttctgtctgaaatatcaaatagaagatcatgaagcataatctgatatcacat

SEQ ID NO: 40737 - DNA, 332 bp, Glycine max
tagcttcgaaccaaaaattcaacacatttctattttgtgaggatgaaaaacatactgaaaattttgcaaggataaattccgaacattttgatatttataagaacaaaaaatatattttagccttgtttttattgttaaaaaaaaaaaagagaaatgctactaacattttctttaacacactccttcatacacactttctcttatgtgttaaaatgtatttagttgaagaacaagttccacaaaatcttgaacctaccaagtgtgatggttgggattggtatgagtgggatcatttgccacaccctttggttgggcctcttgagaaaatggtc

SEQ ID NO: 40738 - DNA, 383 bp, Glycine max
agcttgagaactctccttatggaattctttcttctcttcataattttctatttcatttttccatcccttctcctccatcaatttctataccccttttcaagtgtaagaccccttatggctatgagaggctaaatccttagttaggcctgacagacctaaaaagccaaaagatgtattgtatgtttcatatctatcaatgcaaacaagtgttttctttcctattatcctttcttactttaatttcatgtatcattcatccttatatcatctttaggggttaggtgctcgacagagggtaatccttaatagaattacaaggaaggtcttacatgcatcatttttagggattagtcgttcgatagaggataatttctaatagaact

SEQ ID NO: 40739 - DNA, 357 bp, Glycine max
  unsure (1)..(357): unsure at all n locations
ttttgttaaaaagttcttattattngtttctntatgtgtcattgttaaaactatgaaatctacccatttcatttgcatttatcattgttaaatgtcatttagctgctgccatacgcacacatcatatctcaataatgttttttttttaattctggacctggctgtgttggctggattcagattatatactctagcctacatcataggaacttggtttctctaatgtggcatttagtgtgtggacaatacggaatggaaaaaaaatcaaatgtttcatacctttctatctcttgtacccccaaccaacaattttaggttaatggttacatgattgatctcatgttaaataattgattg

SEQ ID NO: 40740 - DNA, 208 bp, Glycine max
  unsure (1)..(208): unsure at all n locations
agcttttgttctcaatttctttcgtctcggnatattacacgactcaatctgatatcggagttaaaagctattgtcgttcgaatttgctcacagtttctaatttccatttcaagcgcctcgatatattactgcactcaattcggatgtcgtaataaaaagttacggtggtatagcaattgctaccaacttctattttcaatgtccagca

SEQ ID NO: 40741 - DNA, 351 bp, Glycine max
tttttacaaacgctggcttattatatttttttacggtagaggattcttttttgtgtggtgttgccgtaaaaatttacaatgtaggtcggccaggttttttcgttcgagctcaaccgaagttgtgtttcggccgaccccggcatgttttcatttactcggcaaggaaaacattaccccacctcggaaagaaacatgattcaccgatactgatcgaaaaaaatgctagccggaaagatgacagatcgatttttaaaaaagaagcatcaccggatgtcgccgatccaacatttccaaatagacatcatccaaatattatttaaggattgaatagaaatacaatagccgacatcg

SEQ ID NO: 40742 - DNA, 379 bp, Glycine max
agcttgtagggttaaattcttatgattgtcacgtgctcatgcaacaattgttggtcgtggctatatgagacatcttgccaaacaaagtcaggttagcgataactcgcctatgctttttcttccatgctatatgtagaaagtcattgatcctgtcaagtttgatgagttggaaaatgaggccgcaattatactgtgccagatggagatgtattttccccctgctttctttgacatcatgattcacttgattgtgcatctggtcaaagaagtcaaatgttgtggtcctgtttatctacggtggatgtacccgattgagcgatacatgaagatcttaaaagggtatacaaagaatctatatcgtccagaagcatctattgtt

SEQ ID NO: 40743 - DNA, 352 bp, Glycine max
tcattaagaggcttctattacactacatacatcttctaaacgatcccaacggtcagatcatggaaaagttttttgtgaagttgcagaccaaatttcgagaagatccaacggttaatgaaggctgggcagcgtttttaccgaggcagcttcatgtagctttctctagaagcttcattaagaggcttcctctataagcttcctcgtggcttctttgagaagctttctcaagaggattctttgagaagctacatccttatctatccacccctctattaactaaattaacttccttaaaaataattacggatgagaatgacgaaacaaataatcaaacatccaacatgattactaa

SEQ ID NO: 40744 - DNA, 370 bp, Glycine max
agcttatctgattactctaatcgacctggttggcggaaaaataatcgtcttaccgtttgtgattcgtgaattccaagaaggggaatccctttatgtgcaacttgctttattaaatccttcagttcatctatggtacatgttgaaggaattagaaatttcttaagatatttttctgtgaacgcgcatccaacatatttgttctgcggtggcatgttccatttcccgatgtaatacaggatcgcgtcatgagtacgggacatagtgcgttgaagtaagtttattactccatctggtgtgcttccaacaatgcatattaactcactctgactaacacacaaaaattgatcattacacattaacattgtgttgg

SEQ ID NO: 40745 - DNA, 350 bp, Glycine max
ttgacaagacattacacactgctgtcttctacaacaagataaaatagggaaatctactctaaagatacatctaataatacccataattataacactccccctcaagctggagcatataaattatatgcaccaagcttggaacatataaactgaattctaggcccccttaaggatttagtcaaaatatctgctggctgatcattggaattaatgaattcagtgacaatctctttagacagtagcttctcccgaataaagtgacagtcaatctctgtgtgcttggttctctcatggaagactggatttgaagcaatatgaagagcagcctgattatcacaatacagcttcat

SEQ ID NO: 40746 - DNA, 378 bp, Glycine max
agcttgttgaataaatagtctagaaaattaagtcgttatttggtttaatcaaagagttgaacttctgtctctttctaaattgttgtgacatagatcactattaaactaaggtttagtttatgcacatgcgtgcaatacaaaaattgcttgaaatggagagtgattgatacgcaggaggattttcaagagactagacacaaaagcctttgaattttgagaatggaggtttggttatgaaggtgtcgcggcccatcacaaaactagtcacaagcctttttgagtccatttaggctaacatgcaaacctttcaaatgtttttttttctttctattttattaaatgtttttaaaacctaactatgccaattagtatatacaa

SEQ ID NO: 40747 - DNA, 367 bp, Glycine max
  unsure (1)..(367): unsure at all n locations
tgacactatgaaactcagcttaaagaaatattacatgattatgattatcaagtctttatcaatttctatgtcacatataataggtttatcgaaagctctacatgacatgtgacatgtangtgagtataattcattntgaaatatttgattatgtcatgtgaagattagtcaagatcataaacatgtgagggtcttataccatgtaantaattttctctagcaagattaattggttacttgttggtgctattcaaggaatgaattacaaggttgttaccattttgattgataaaaatactgaagtcaacgggagaatgaagtggttgtttccattntaattaatgaagccattgatttagctgacttt

SEQ ID NO: 40748 - DNA, 381 bp, Glycine max
  unsure (1)..(381): unsure at all n locations
agctttatgcttttcaaacggatataatacaatacaactaccagcaacactgaaataagtaaacaacagtgccacggaaagctgacagtattacactaactagttttgaccagaaacaagatatttaaggaaaatgttatgaatatatgatatttgatcaagttgagcatcattctattgttctgcaaagtaattgacagtagatagacccaaatcaaatttcaaatgaaaaacttgaggaactgcaaaataactgacaataacaacaaaaacttgaggaacttcattcacaatatttcttcagcaaaacaatacttataatatcagaagatgctactacaaatttttcctanaatatattcctcctaaaactaacattat

SEQ ID NO: 40749 - DNA, 350 bp, Glycine max
tgtgtatattgtatcaaacttctccaatttatagtttttttgtaatattataagtactttctattaaatataggtaatagataatttatacttttgttttgtgtgtttaataatcaatttctctcaatttcaggttaattagacaaattggcaaaaatgttgttttcaccttctcgctaagccaatctgctagcttagtgagcattcgctaagtgcgacactcagtggctaagcacgaggaagaagccagaagaagatgagctgccaggttcgctgagtgcaccgctctaagtcatcaagcgcaccgcttcagctcaactgctaagcgagagaagcgcgctaagccaaaa

SEQ ID NO: 40750 - DNA, 388 bp, Glycine max
agcttgtagaattcaccccaatttcagtgtcctatgctgacttgctcccatatctacttgataattcaatggtagccataaccctagccaaggttcatcaacctccatttctccgagaatacgactcgaacgcaacgtgtgcttgtcacggagaagccccggggcgttccattgagcatggtagggctctgaagcgtaaggtgcaaggtctaattgatgcgggctggctgaaatttgaagagaattgcgtgtaaatcctgacattgacaagagatgccacacatggggcaattttgaaagctgttgttaggtgtccctaatgactcatcaaggtttccaagtttatgccattattgtaaaccacagctacaatgttaaatgaaatgga

SEQ ID NO: 40751 - DNA, 355 bp, Glycine max
ttataagcgcggtctgggagacaaaggtcttgtggtcgcgatatacgaagatgatgttccgagtacattagattcggtacgaccatgccctcctgatttccagctgggaaattggcaagtggaggaacgccccggcatttacgcaacgagcataatgtaaacctttacggttttaaaagctctatagttgggcctaggctttagagtttttccttttgttaaggctttgtgtcttttgttgttgattttataatacaaggatctttcttcatctgttcctacgtctctacccattctcattcatttgcatgtttacttctttttctggaacggcggatccgatgacgagtccccc

SEQ ID NO: 40752 - DNA, 389 bp, Glycine max
agctttggccaaaccccagcagcttttgtttccttagagacttgccttagcaccttgtctttgagactgaggataattacactgtgtgccttttgcagtagtgctttcttatccccatcagccatcatcttttcaagtttggcttctccatcaagtgcttccaccaggccctgctgaacaagaagagctctcatcttcaatcgccataacccaaaatcattttgccctgtgaatttttcaacctcatacttggccgagtccatttcttgaatcgaactcaaaaatcgctccacgctcaccgcaccaatttgttgtgccaagatcagattttagttcacaaaagaatgagtttcttgtatgaacaagaataagcaaaatgcagaaaagaa

SEQ ID NO: 40753 - DNA, 361 bp, Glycine max
  unsure (1)..(361): unsure at all n locations
ttagtgcccttaattntgaagcaatatttgacattccttgaaattctgatactggggacagatgtcgtaccggatgtcacgacatcacgcttcaaaacatgcagattgtatttgactgtatgaacagattaaacaagtaaataacacacgagaattgttaacccagttcggtgcaacgtcacctacatctgggggctaccaagccagggaggaaatccactaaaatagtgttagttcgaagatctaacagccactgtttacaaccttctcacctaaccactacccgtgcaacctctacctaagagccactcttagatatgagaacccctctcactccctctcaaacactctcccgtgttta

SEQ ID NO: 40754 - DNA, 378 bp, Glycine max
  unsure (1)..(378): unsure at all n locations
agcttcccatctcatttgttttgatctcttcacagnttactgctcctgaatgacatgccagcttatgcatggcagaaacctttctggagtataaaatttgtgtcattttgagatctttaaaaactcaaattaagatttctgactatatattcccgctgggaaaatgagaaccgagccagtttcaagtgtctcttttgtaaaatctaaaacaaatgtcttatgatatcccctaatatatgctagttttttttttgtttttggtcatgttttaagtgttgtatatgaatctgttggctttcctacggaaggcaataacaatcaaagtagcactgtggaagatgttgctacaagtagcttgtcctctgctctctgggcctt

SEQ ID NO: 40755 - DNA, 365 bp, Glycine max
tcatatcaagcacaagtgtcattcccttttccaaaatttactcttgtatatcacgagaaacagttttctccactaatataacatttggatggcacatttctatacgatccattttagatttcagatcatctttctcctataagcgaaaaaataatcagccagagaatggaatattaataaggaaagaatccaatctaattaagttacctggtccatggagtcaaaggaagacagtccattgatagaatggccaagcacaccgctaatcagtaataatcttggatttttatacttagtaggcatatgcttgtgagcagcatgttttttgaagaccaaacctctgattagttgactgcaacacaata

SEQ ID NO: 40756 - DNA, 387 bp, Glycine max
agctttaggtgttatcaaactttttcatttttgcaaagaaagctccaaaagactaggtgctttcactttcattttttcaaagaaagcaccaaaagactggcgcattcagttatttttaatttttgcaaagaaagaaccacaatatatgaagagacactcctattgtttaggcacccccttcatcagtatttcaaataaaaaaatgaacatttttaataatgtttacaatataaatgatgccacacattttttatttatttaaatgcttaataattattaatgataatataaaaataatataatgaaaatatgaaattattaatattaataataaataaacctttgaaaaaatgtattaatgaataaataataagaaaataaaattta

SEQ ID NO: 40757 - DNA, 357 bp, Glycine max
tactgaagctaatagactgtcatcctcattaatgaatatcctttcatccaattcactcttgttgcgaatcatgtaatcataatctttttctaacatacttagactagaaggtagagacgattcttccatcaggtctttaaaataggtcaaaccatctacaaacaaagggataataaacatcagttagagagatcaagtattcctgatgcataaataataataacacaatgaaaatgaacctttatcgatattctctaggttttcggtttcacattcagatgccaagcaaggctgcttcttcaatatatctgctattacattattggctttctccatggttttcctcaactcatcttc

SEQ ID NO: 40758 - DNA, 377 bp, Glycine max
agctttggggctgataaactatataacagcaccaaggttctagtttaggccctccttctctctcttctctctctcctcccctctctctctctttttcgttttagttttagagtgctactctcttttccgctttagtgacttttcattttagcaataaaatttcgttctctattgattaatggaaggctaagtctccaacgttgttttctcttgaggatcaagcatagttctctttgaggttctattattactatcaaattctgataagttttttcctcttcactaattaccatgtatttgttgctattaattcatgcatgcttactgcttgagtaattgtctctgcgcttaatttacgttcatgcttaatgatcgct

SEQ ID NO: 40759 - DNA, 353 bp, Glycine max
  unsure (1)..(353): unsure at all n locations
gcttttctttacattgnncctgtttatagttttacaattctaattgcacgatcacnttcttgttctttctttgtctaacatacacacttgctcaaacttatgaaaaaaaacacaaacttcatcacaatcatgcattcaatccaaaatcagtttataacacccatttcacaaaaagataaaagagtttcactgcatagtcctcaagatcaagtcaaactgttccatatacttcaaaacatgcatactaactattcacaacaagtatataacataagtttaaaccaaaattctctaaggaaaggtacttaaaacataatagttatgataattatcaacataaacagaaggacatg

SEQ ID NO: 40760 - DNA, 384 bp, Glycine max
agcttggcccgagaccgacttcttgatgcacgaatttgttttgccccagatatcaagattggactcccacgataaaagatcccattgagacacaaccttagacttttttgaacgttggcctataaaacagaatcctcatcctttcccccgaagcaaaggatagtggaatctcctcaagggagagcaaatagaatgccaaaacccgatttcccaatgaaaataaagaaaaggaagaaatgaaaagaaagaatagggaaaaatgaaaataaagaaaaggaaaaaaatgaaaagaaaggaaaagaaggattcccgatcgaagatcggagggaagtaaaaaggaaattgaaggaaaacagaataattcccgatcaatgaatgaaagat

SEQ ID NO: 40761 - DNA, 348 bp, Glycine max
ttacaattggttgtttgcatttttcgttttggaacttgagaacatggaaacaaaggtaaggggaagttcatttaaccttggaacccacacttttgattgaaatggatgaaccctacattttggtgatgtgaaaatatgatttattttcattttttcctctatttgacctactgggaatgatggatgtattattttctttttttgagtacaaaaatggattcattgatcccaaaaacttggtaaaacatttaaaattcgttgaatttggctttgtataactctagatattgcaatttgaagttcaatatcaattatacccttaaggtatctgaatatacgtttcataac

SEQ ID NO: 40762 - DNA, 381 bp, Glycine max
agcttgatctataccaaccttgaacatcaaaatattcatatagtacctctgtcatgtttataaggaaagattagtcccaaattaaaaaataaaaaagggatattagctcaaccaagaacatgatatttcttttattccatggtagatgcatggtaacacgttttttaaacaagagatatctcctaactgagaattaaggattactctcttaaaagtaccgagatttattttaaaggattgacctctctctatttgtgtacacaaaaaccccccaaaaaaaaaaagaaagaaagaaagactgcataatttacataataatttcacataagtgcttccttaattaacttcttgcataagtgtttcaaaagctcaagtttcatg

SEQ ID NO: 40763 - DNA, 357 bp, Glycine max
tcacaagagtttatatggctggaaacatttcccgatgcagtggtacaagaagtttaatgattttatgagcaactcaggattcaacagatgtgacatggaccattactgctatgttaagaaatatactaatagttatgttatccttgtcgtgtatgttgatgacatgttgattgcaggatctagtatggcagaaattaatatgttgaagtagcagttggcagaaaactttgaaatgaaggatcttggtccagctaaacaaatcctaggtatgagaattcttagaaacagatcagaaggaattttgaagctgtctcaggagaaatatatactcaagttgcttgacaggttttaccttga

SEQ ID NO: 40764 - DNA, 387 bp, Glycine max
agcttgctatgatcatttggtgtatttggtgaagaaggaatgacaaaatatggaacaatgaagagttcaatcctcatatctcaatatccttagctctccaatttcaataagattggttgcatgctaggaagattccgaccatcatccttatagctccaaacaatgatgcttcttctcaacagaccaaaccaccacaaggtatcataaaatgcttcttctgcccaaaatcattttggagtgggcatatgtttatgtgatgatcttggtcattttccgaaagcaaaaacatcttgcaaaactagcagccccaagactatggaagctgaagcttggggactttggcaagctctattctggttgcatgcataatcttaatatccataacat

SEQ ID NO: 40765 - DNA, 348 bp, Glycine max
tttaatggaagtcctgatcttgaaactgttcggacttcgttaactggtgagcaggtcttccagcgggttgaacaccttaatattgtatttggaaagacccagaagaaggataaaagtaagagttgcatatggaagaagaggtccattttctttgatcttgcgtactggtctgatctaaatgttagacattgtattgatgttatgcatgtagagaaaaatgtatgtgacagtgtcattgggacactccttaatattcagggcaagacgaaagatggtctaaatacccgtcaagatctatctgacatgggtatacgatcgcagttgcatccaaggtctgatggtaaaaaa

SEQ ID NO: 40766 - DNA, 381 bp, Glycine max
agcttatttgaacctggttagttacgagtttgactctaactcccatcatttttaattaccgtgcctaattatttcaagagaaaaaattgaccaaacaatttactccctccattctgaaatataagtcattttaaaaataaaaatttgtttcaaaatataagtcattttagaaaatcaaggaaacattaaatacatttctctaagaatacccttaatcattattaagagtgttattctcgagtttcataacttcagcttccacatgcacgatctatttaccatttcgaagtatatattaatcacagaatccaactaacaataacatttccaatatttagcccaaagtacataacacttgcacgggtgaatttgttccaatgt

SEQ ID NO: 40767 - DNA, 345 bp, Glycine max
  unsure (1)..(345): unsure at all n locations
tgcacgaattttgtaagaaaaagaaagataaagaaaattaagaatctcttaccaaagctttgatgaaagaaacctcatgagctcttgtatgaagcttggaaaatgaagaagaatgtcttcctctccctctcggtgaactcgtgcaaatgaggaagaaaagggttccaaattgatttttaaagaatcatgaagatgaggtttaaggctttgttcaaaggaaacttggttaggcttatgttgacaagcttaattggcagcatgaatgactaatgaccaacttaaggttaacgtgccaagctatgccatttgaggttattgttgcttttgaaattntaattaaaaaat

SEQ ID NO: 40768 - DNA, 378 bp, Glycine max
agcttgtgctgcaagcatcctgcttttataaatactgtccaacacttagtcaatcaagtggaatacatttcattcagaaaacatatcacactctctcactcagttttcacacactgtaaaattctaacatggtatcatagagcctctttcaatcgttgccaatcatcatggattattggcaaaatttgttcacttcccttgatcctcaacagtccatcattctcctcaaatttcaatccctgcactgacaccaattaccttctctcacctcactctatccccgtcactcaacaagaacaacttcttgcaatggctacaacaaatgaactatttgatccagctatctgaggggatgaacttcaactctctaattcaatc

SEQ ID NO: 40769 - DNA, 352 bp, Glycine max
  unsure (1)..(352): unsure at all n locations
tcttgtccaagtttgtaagattatgtatttttntacaataaatcatatgtcaaacgttttttgttttttgtgagttacagaaagaaagagaattcataaattttttcgtttcatttcaaaagagaatgttcatcccatcccatgtttagataaaataacatatttaataagttaattatgtcacatgttagtaaacaagaaaatttttatttatattatattaaaagtataataacaataaattaaaaaaaattaatttaactctaataatttaaatgttaatgtagttttagataaattgtttcttcttttaagttaattgtaaattcttattcttgttttaataaaaaaa

SEQ ID NO: 40770 - DNA, 381 bp, Glycine max
agcttcatgtcactgtgcctcttaacatttcccgccaacaacttttagttcaattcaatttgatttaggtaattattttaatttttctttttctttttttaattataataatatctattactatgcattttttgaaatttctattgaatgtcgtgtgattttctagctctactttgagctacttggaactttgattctaaataagatatcaatggaaattgttagtacttcattttaaattttagtacttcactttaaattgctaagttatcacttgattcaataatgtttgtctagatacttccactatgaacaacatctcaaattgagtgcctagtattgcacatgtcgttttccttcaatggaagacgcacccttggg

SEQ ID NO: 40771 - DNA, 346 bp, Glycine max
tgatgctgtttaattaatcattatggtttttcatgcttgtttaaattttggtgaatgtttcgtgaactcttcttacagatcactataatagtacatttagtccattattaattgttattcttctgaagccagagattctatttttttgataaatcgacgctacgtatttatgtgtgtttagatagccttttaaaaatgtaataacatatctttctctaaaataccattttatgtgaaaaaaataatattttttataaatatgatcatttttagaaaaaaaatataaaattttgataataaaacatgtaaacgtaggaatatacaaatcataatccaatgctacaat

SEQ ID NO: 40772 - DNA, 460 bp, Glycine max
  unsure (1)..(460): unsure at all n locations
atgattgcccagaatgttatgaatgcaatctacttggacatctgagggttgattgccccatgttgaagaaaataatagagaaatctgaaaagaaagtcttcaatgaaaagaaggctaagaatgcctatgttacatgggatgacaatgatatggactcttttgaagaatcagaaaatgaagttgtaaacctgaatctaatggctaggaattatgaaagcgatgagaaggtgacatcttctgaaaaaaacttatccatttcatttgatgaattacaagatgcatttactgatttacatatagaatcagttaaacttgccaaactagtttcatcttctataagacaatntcatatctaaaaaaagaagtgttaaaattaaacaaagaattataatatcttaaaatggaagtataactttaagacacatgatacaagtcattcttctccatgcttgatatatag

SEQ ID NO: 40773 - DNA, 410 bp, Glycine max
  unsure (1)..(410): unsure at all n locations
ttagaaaatccctcaatggaatttctataatagccagccaacctcaagatacgttgaacttctgttggagttgtcggttgttgccactccataaccgactccactttaatcggatccaccgcaaccccatctttagaaatcacatgttccaagaactgcactttttctaaccaaaattcacattttgacaagttggtgaacaatttcctatccctcaggatatgcaacacaattctcaagtccttctcatgctcctgcttattcctctgatacactaggatatcatcaatgaacacaaccatgaactgatctaagtaatcatgggatatacggttcatatagtccatgaagatagccggagcattagtcactccatatggcatgactanatactcataatgcccataccg

SEQ ID NO: 40774 - DNA, 329 bp, Glycine max
cttcgtgtgtatgacatccactccacaaggtttgaagtataagagaccttcaatcctattacgcaacgtggcggacaaaagcgggcaattaacttgaatggccattattgtcaatgcggaaggtattatgcgcttcactatccatggtcacctattattgcaactaggggttacgtgagcctgaacttctaccaatatatataaggtgtttacacgaatgaacacatcttaaaagcttatccctgaccctactacaattcatgcgaaatggtggtccatatctacaaggattatgaatgatatggattgggtccaaccatctgaacact

SEQ ID NO: 40775 - DNA, 261 bp, Glycine max
cccttaactgcctgacccaagattctctcgcctttgtggccagatgtatgaatgagtgcctatctggatttgatgactgcatgacaaagactcattgttttagtgaaacaaacggtatcctactaatatagatacataatggctgtatcgtaccctggccatctttgcatgacggtctaagctgatccagtgcctagactgatctagaatgcggcaggaggatccagacatgcagtgatggtagatccatcgtcaccttgg

SEQ ID NO: 40776 - DNA, 830 bp, Glycine max
  unsure (1)..(830): unsure at all n locations
gagaagaaatggattatttacaccaccccacaaatgaaagatacctaagttatttgtattatccctaattcctctaaacaatagaaaagttcgttaataaccacctaccaaagattaaccattaaattaaggagaagtttgaatacaaatttacaccaagtttttatacaccaaaaagttaagtcctctttcacccgacttaacatcctctttatccaaaattcttggttcacttctccacaaaaggatggctcatccaatcatgcgctcanctananaaaaatggctcanccaatcatttgcttatctcnataaggatggctcatccaatcattccctctnccnnataaagatntctttnccnntttngccacttctggcttanttctcctcttcttctctcnnccnatcccctctttttttnnnnnttnccctttcttcctncnnnnntccttctttcccnctctttcttttttttctttcctttcctttccncncnntttttncttcccttcnnctcnctcctttcttcttttctcctcccttttctcctttttttttccctcctctcccccccccttttttttnnnncnttttcttcccttttccttcttttctttccccctcttcttcctttttccccctctctttctttttntccctctcctccttttcttccncncccctctccctttcncttccccnccggctccgcgggggggggggggtggcgtttcggcnnnnnnnnncccctcnnnccccccntnnnnaaaaaaaaaataattctttaagttggngggcgttattattaaaataatatatgcgtcgca

SEQ ID NO: 40777 - DNA, 244 bp, Glycine max
  unsure (1)..(244): unsure at all n locations
gagtggtacctggagatatgtcgtgtgggtcaggagaccttgtggacgtcacgtggtgtgctattgcccaaaaccaagcttgaccaatcccgacccagcccgggcatagtctgtcagtgagaacctgtgatgtacctaaacaggcgagctcctggctgtcaacagataaaaggaacaaagaccacacagcaaagaggcttgtggtggctggccaactgtgaattntgtgtaatatgtggattat

SEQ ID NO: 40778 - DNA, 854 bp, Glycine max
  unsure (1)..(854): unsure at all n locations
nnnnnnnnnnnnnnnccctgctcggtccactgtctccntncnccnnnatnctagaagatnnnnnnggantgctgctttctggaaagtgtgctgccgagcggtntttatagtatatctctggaaaggcgaccnccattatttggggcatctcttatccctcctttggaggtgccacttggactggcgggtgtctccatctttgggcgtattctttgagagatgggcgcggcagtncctctcagactgcccatcattgggcgtactcttctttatagtactgccccctgttgcacatgttcttctgctgcatcctgtcccgatccatatctacattcctctgatactgccctactaacgtctccattaagtccttcccctattgtactcttgcccgctccccattactgtaccaantggccccttctccccctttactttcttntatnaaatgtttcagcccttcctgcttcttttcnatatcccacctctttcnntcttacttctttctatntttctttnnncccttnnccccttttncttttcttcnctctctccttttctttctttttcctttttctctcttttaactcttctttttttccccnccctntcctttcctcctccnttccctnnacctttctctctnatcccctttttccctttctccttcttggtttnncnncccnccccgcccccccggngcggggcgggcttttctttttttctttctttnctccccngggnccccccccccnncccncnnnncccaccaaaccaaccaaaagcacttttttttttttttttcttaacacccacccaccaacaatccccccttttctttttgttttcttttt

SEQ ID NO: 40779 - DNA, 471 bp, Glycine max
  unsure (1)..(471): unsure at all n locations
gcttagtgtgtgtgtcacataagcctaaatgcctaanaaataagcataaaccttaataaaaatcatttgtcataaaatataacctaattgaaaatgtttaagattcagaaatattctcaacgcttcacgcgaatcaagttgatccgcaagtttcacgcaataagagcacggatcaagttgacccacaataagagcacggatcaagttgatccgtattaatcctgcggatcaacttggttcgcgtgaagcttgcggtagaacttcattcgcattctacctgcggatcatctcacactaatgcggaccatctacattcacactatgcatacgcggatcaaccacacacatacagcatcaatggaaacgcacatgacaagggagtggcttaccttgacaatgccgcgagctaaagaagaagaacacgaacacagcacgggacgcgacctcaacaagaagtagaccaacacacca

SEQ ID NO: 40780 - DNA, 400 bp, Glycine max
gctttgatgatatggtcttcaccgacgaaaggatcattgtgggtctaataagaggcaaatctgatcatcatgctttgataaatgccaaaaagactagggcaaatgaagagggtgataatgatggacaagcccatgttgtgactgccattcctatacagccaagtttcccaccaacccaacaatgtcattactcagccaataacaaaccttctccttacccaccgcccaattatccacaaaggcaatccctaaaattaaccacaaagcctacctaccgcactttcaatgacaaacaccacctttagcgtaaaccaaaacacccaccaagaaatgaattttgcagcgagaaagccttagaattcaccccaattccaatgtcctatgctaactttgctccata

SEQ ID NO: 40781 - DNA, 416 bp, Glycine max
  unsure (1)..(416): unsure at all n locations
catggaataagctntacttcttggatatgtnttatgtaattgtgagatgttcaagcagcttanatacaacacatccacaaagttgttaatcttgtgacctgttaaagagcttgtactttaaggatcagtatagttgtagtttatttagtttgatagcaactataggatgcttgggaattgtttagttgtgctcattccatgcaacttgttttcatttgaagtacatgatgaatttttgagcatgcataacatgcagctaggcaaaaaagttctatgaatccagcttcctcttatagatataaacagtggactaaaagtataaacagtggactaaacatggataacatgcagcaagttaattctgaacaaagagatatacctattgaagatttaatgggaggaagaacttgtggatc

SEQ ID NO: 40782 - DNA, 491 bp, Glycine max
ttaataatgacccactttctcttttattaaaataacttaatgccattaacctacggaattaaaaaaaaacttaatggctgagtgttactgaaatcgtggcaaccaaaagtcacccccaacagccaacaagtcagccaccatttggtctcccaaaaggctgatgcctatgttgccaattgggcccttattacaacttgaactaaacctaactaaagcccttctagttgattaacccaaaacatatttttggtcagccaactttacaaggattgggccattatttagacaaactaaacactctaaaattgaaacaaagtggtgtcatttagtcctcctccatttgggccatgatacaactcacaaccttggacttttctccttgaaactcgggcttgtattcaaatagtatggacagcacttgttgaagagcctccttggctttccttgctctagcccttgtcataagtccctccaagtcttcaagtggatcc

SEQ ID NO: 40783 - DNA, 313 bp, Glycine max
  unsure (1)..(313): unsure at all n locations
ttcaaaatcttttgaaattgaatgtgatgcttcaacatgtgggattggagctgtattgttacaagaaggtcatccaattggcttatttagtgaanaattaagtggtcctacccttaactattctacttatgataaggagttgtatgccttagttagagcgttgaacacatggcaacactatctttatcccaaggagcttgtgatccatagtgaccatgagtccctaanatacttacaaggacaaggtaagctaaataaaaggcatgccaaatgggtggaatttctcgagcaatntccttatgttattaaacat

SEQ ID NO: 40784 - DNA, 431 bp, Glycine max
aactaatttaaaggtccaagttaaatatgtttttaatcataatttctatttattgtaattttggcccaaactgtttaaaacgcccatgtctatttttatctttttgttcagatacactataagtattggtttttgttttcaataaagaaacttttggcatctgataaaatttggtgagagttactcgctgagttccttgttgaaccaatctcatacttatcaaggtaatccttgtgacgtctaccctgacttatcttccttcactggaagtggcatcatccaaatcttcgtagcctgtatcaaacgatccgctacaacttttggcattttcataaaataaaagttgtagaaaattttataaaaagagagaagaatataagattgaataaacaagtgggtgtttgatctttgaacacgagattgtggaagat

SEQ ID NO: 40785 - DNA, 399 bp, Glycine max
  unsure (1)..(399): unsure at all n locations
tttctgagtgactcatgacaaccctgagtttacttcaattattgttatttatagaatntgtcttttttaaatacacttaagaaaactcatcaatagacataaactcaaaaggcttatgatttctatttagaaggtttgtcataatccaagggttttagactcaacaacaaaaaaatccaaattataaccactaacaattgatattgttaaaactagaaagaaatataaaaaaggatactaacatcatcaacttctatatcctttatcacttttttgggataacattttgtcctccttcaattttgttgagcttgaanaagaaaacaagtacattcaaatatctaattatcatgaatatataattaaaagtgttaatgtaattaccttccatgttgattc

SEQ ID NO: 40786 - DNA, 289 bp, Glycine max
  unsure (1)..(289): unsure at all n locations
tgtgtaccccaccatttttcatagtatttcactggtaatgtgtctactattattgaggggntctctttccccgtcattggaggtgccacttgagctgccaggtctctccatctctgggcgtattctttgaaaganggcgggatcttgagctgccaaatctttccatctttaggcctactctttnaaatattcatgcccctttttgcacatgttctggtattccatcctatccggaaccatataaagactgannnnnnnctgcctaactaatgcnaccattaagtccttc

SEQ ID NO: 40787 - DNA, 397 bp, Glycine max
  unsure (1)..(397): unsure at all n locations
ggtcttcgccggcgaaatgatcgaagtgtgtctaaatagaggcaaatctgatcatcttgctttgataaatgcaaaaaanaactggggcaagtgaagaggatgagaaggagggagaaacctatgctgtgactgccattcttatacgaccaagtttcccaccaacccaacaatgtcattactcagccaataacaacccttctcattacccatcacccagtcatccacaaaggccatccctaaaatcaaccacaaagcctacctaccgcacttccaatgacaaacaccacctttagcataaaccataacaccaaccaagaaatgaattgtgcagtgaaaaagcctgtagaattcaccccaattccagtggtctatgctaacttgctcccatatctactta

SEQ ID NO: 40788 - DNA, 350 bp, Glycine max
  unsure (1)..(350): unsure at all n locations
agcttgaaggtgagaacccactcccttttatagctctatgatgctaatgagtgataacttcctgtgggtagagaacacatgcatgttgatcgtcgttcttctccaagacacatgctattaataatcaagccatgactgcgaaaaaaaaaggtcaatagaactatcgctatccatctttattgtgcgaacgataaaatagattagtgcccctaataactcattttttgatggtgcatgatatatctgacacatatcaaaattgccaattttctgcataacaaaatgacccattatgatctttcgtaaatactacctggtaagctcccacaaatcttccttnttctttgata

SEQ ID NO: 40789 - DNA, 381 bp, Glycine max
tgtcagtcttgttgttcatacttcacttagagcttcagctattgaagattggtacctaaatagcggctgttccatacacatgacaggagttaaagaattcctggtgaacattgagccctgctccactagctatgtgacatttggagatggctctaaaggaaagatcattggaatgggaaagctagttcatgatggacttcctagtctgaacaaagtactgctggtgaagggactgactgcaaacttgatcagcatcagtcagctgtgtgatgaaggattcaatgtaaacttcacaaagtcagaatgcttggtgacatatgagaagagtgaagttctaatgaagggcagcagatcaaaggacaactggtacctatggacacc

SEQ ID NO: 40790 - DNA, 501 bp, Glycine max
agcttgcaatttaatgttcctgtcacaccgaatatattatattgcatgtatgtataatgaaactttagagagaaagcagggggatataaaatgaatatgccactttattataaagctttctcataatgtcacaggcaaagattacttcagcaattaactaagtcaaaaactctttcttttctgttttggttgaagaagaaaaaagtcagttaatgataaaataccatgctgcattatgatcatcagagtctggacacagcggtggctcattctttgaacgttgctcgtaacactcattagaagttggcttcttgatacagctacacctactccatttacttgatccttgctgatcgacacaacttcccaccacatggcttttgtagtgtcttcatggctgccaataaattcataacacatcaggattaaaaacctacattaaaagcacaagagtgccatatataagtctagctataattacccttcctatttaacatcttc

SEQ ID NO: 40791 - DNA, 365 bp, Glycine max
  unsure (1)..(365): unsure at all n locations
cctgtaaccgagcttaatgatgtcctgtgattcatgtaccaacttcatatagttagataaggctttgttgttgttgttgttggttacaatattaatgaattgttttgagatgccttcctttgttttgtctgctgatttagtttgatcgatgcctttgtgcagatgttgttggatctgcaattgggtttgcagtatgtgcgacacttctcagttcttggagtctaacatttgccattggaggggaacgcctcttcggccctgtttgggatcaattgngtatgtacaatcttgctgataggttaggcttaacaaggtggagctagttgtgtggcacctctgatacaaatattttgatcttttattac

SEQ ID NO: 40792 - DNA, 387 bp, Glycine max
  unsure (1)..(387): unsure at all n locations
atgacagccaccgctttaagagtgctgaacaccaacagcgcttcgaggccatcaagggttggtcatttctccgggagcgactcgtccagctcagggacgatgagtatgccgatttccagggggagatagttcgccggcggtgggcatcactggttacccccatggccgaattcgacccagacatagtcctcgaattttatgccaatgcttggcctacggaggagggcgtgcgagatatgagatcctgggtgaggggtcagtggatcccgttcgatgcggatgctatcaactagttcctaggatatcctctantgcacgaaaagggccangagtgtgcaccaccaccacctcatcatgctggcccggctgggtcatttgacatggagc

SEQ ID NO: 40793 - DNA, 407 bp, Glycine max
  unsure (1)..(407): unsure at all n locations
agcttgcttctacaactccaagtagattgggccatatatgcaagagaaggccttanggttctgttagtcgatgaatacgactgaattttgtgtataaaacctgtgtaaattgtatcaaactcctccaatttatggttattttgtaatgttgtaattacttttgttaaagataggtaataaatacttagtactcccatttagtgtgtttaataatcatttcctcttaatttcaagttaattaagcaagtttgtgaagtgttgattttcatccgctcgctaagtcaatttgttggcttagcaagccattcgctgagtgcaacactcctttggccgagcacgaagaancatatggaagaaggatgagctatgtatgttcnctgagcgagggctaatcctgctaaatgcac

SEQ ID NO: 40794 - DNA, 386 bp, Glycine max
gttaaccatgccttaagtaccctgttcaattattttgtttctaagtgaaatgggttatgatccgacatggtttgctcggggtgcctaacacatgaaactaagaatgtgtgtgaactttcacgcttccgccttttttgtttttgttttgtagatgaaaacgcaacgatgagccaacatgaaaacaaatggatgcaattttcatatcaaaaagcttgttgaacgcatatgcatgatgatgccatgactcattgcaaatgtgaggctgaaatatgataacggacaaatgcaggatatgtccattatgatgttatgaagagatgcttatgcgatgcatgatatgaatgcctttcacggacaccagaacccggaaaattatttctttttac

SEQ ID NO: 40795 - DNA, 327 bp, Glycine max
cctgtctcaaaagtctatggagtatgctcctctgccgaccaccacacagatcttttcccttctctgcaacaacctggagcaattgagcatcttgaagctcatgctgcaaacattgaccacagacctcctctagctcagcttcagaataaaccacggcagagcaattatgacctctacagcaacagatgcaagaccggatggatgaatcaccctaatctcacatggtctagccctcaacagcaacaacagcagcctgctccttcctttcagaatgatgctggcctaagcaagccatacattcctacaccaatccgacaacagcaacag

SEQ ID NO: 40796 - DNA, 307 bp, Glycine max
aatgttttttgctgataggaccctcacgttgatagtgatgattttaccattgctattaacccttggcggaaatccatcatgaagtcttgcatgttggaacacatggatgcttattatttgcgcaaaaattcacgaggtattggtgatgatgtagttcattgttcaaaatttgctgcagataaatgcttatgtgatatactgacttttgaatgttattatttgtcttggccaatataattcacctgttgatcggatggatgcttgtgacgattgattggcaaactaatgggtttgtgcctgcttaaat

SEQ ID NO: 40797 - DNA, 253 bp, Glycine max
ccgagagagggacccaagcccttaatatgatagcgtggatatacacaagttcataactcagctctttacccttcaactcctgagccgtaattttcatcaacacagcctcccccagaagctctacctactattcctagcaccatgcttgctacacccagaccttcaacagagtgatatacctgagaggcatattacgacacaacgcgaaaatacgaaaaaagaacaataaaaacctagctatcgcgattgtgga

SEQ ID NO: 40798 - DNA, 591 bp, Glycine max
  unsure (1)..(591): unsure at all n locations
aggacagtnnnnnaatgataccatgcattacgtgcacacatagtactccagctatggctanagtgtcaaccattagtaagtgggtcaactagcatactatcttttcttttatatatatatatatatatatatatatatatatatatatatatatatatatatatatatatatatatatatcctgactgaattctttctctaccaaccatgcgagcgagtaaccaactcactggggcgaacgcacactgacggtggagggaagcacacccgactgggcggcacactcaatacctacccacctacctattgtatgatacaaacngtaggttactgacagacatatagatgcatatctatcggatggatggctcacggaagggatatacactcactcaccccgcgcggagatagatgcttacatggagggtgtgctctctggacgtacatcctgcacanacacaagatacataccgagcgctatctngtcagacatacgatatgataacatgcatgatatatgtctctctctataacacacagcacagtcaactaactactatcgctagctacacacactatatatatatatct

SEQ ID NO: 40799 - DNA, 520 bp, Glycine max
gctttgaatgctctattcaatggagctgagaagattatcttattactgatcaacacatgcacagaggccaaagatgcatgggagatcctgaaaaccactcatgaaggaacctctatagtgaagatgtccagattgcaactattggctacacaattcgaaaatctgaagatgaacgaggaagaatgtattcatgacttccacatgaacattctcgaaatttccaatgcttgcactgccttgggagagaggataacagatgaaaagctggtgagaaagatcctcaaatccttgcctaagagatttgacatgaaagtcactgcaatagaggaagcccaagacatttgcaacatgagagtggatgaactcattggttcccttccaacctttgagctaggactcttcgatggggctgaaaagaagagcaagaacttggcgttcgtgtccaatgatgaaagagaagaagatgagtttgacctggatactgatgaaaggctgaccaaggcatttgtgctcctttgga

SEQ ID NO: 40800 - DNA, 446 bp, Glycine max
  unsure (1)..(446): unsure at all n locations
tgaaacaaataactatagntatatattataattgaactgcactgaactgaactgaatgtttggattgctgccgattgcaaaggcttgaaatggttctttggctgtctgctggccatcttattccacagaattctaaaaggaaaacaaattgaaatggttctgtggctgtctgctaaacaagataataaactgttagaattcagaacttcttaacgacctgcccaattgaaatggtcgaaggaatataaaaggatgatacccaaattgaaattctgaatgacactaatcaaatgggaatntattgtgtgacatgcatatttattgcatacagacacaaaagaatgttgaaactntaagatcccacacctaattctctacctaaaccgtggctttaccataatatgccaatggatgatgaaacntngttatgtagtgcactacacagc

SEQ ID NO: 40801 - DNA, 315 bp, Glycine max
ttgctctttatatacccatttcccaaatctaatggcctatcttaagttttggatgagaaaccctcgtaaagagtcaaccttttgctttctcataagggtgagccctttggtactaatacttattggcttatttcacagacttgaggcctctttttatctttcattggactcaaaatcctcgcttttattttttaaaggactcaaagtcctcgcctttacctttcacaagactcccagtcctaacctttatctttcataggactcaaagtcctcgcttttatctttaatgggactcaaagtcctcacatttattta

SEQ ID NO: 40802 - DNA, 310 bp, Glycine max
  unsure (1)..(310): unsure at all n locations
atatataaaacagtcccacaatcctaattttacaaaaatcacactcatatgtcattgnggcatttcactgagcacttggtgggcgcatgtttagacataagttgcaagagaatgggggcaatgtggcatgccccattgcttcaaaatacaacacaggcctaaggccttcccctacaaaccctcaactcaacaaaacaagcatggattcagacgtgaattgcttcacgaatttcgcanaanatgagcaatntatagcaccaaaacacatcaatggagagccaaataaccaaaggaaattgtacttacttgt

SEQ ID NO: 40803 - DNA, 571 bp, Glycine max
  unsure (1)..(571): unsure at all n locations
cacatggagctacgtcatgtggtatcaagagcacctccgtctangtgatgtttttttgcttcctctatcttttggttcggtcaattcactttaattccttgttcttcatcttattctccatgtatatcctacattgtcttatggtttggtgttgtttaaagtatattcaaaaaaataaaccgattaaatcttatatctacacttgttcttgcatttctatggttcaaattttatggatctactcttgaatcatgtttttgtgttgattttaagatctgtcttttttcagtcataatcttcttgtgttgaacctttcgatctaaattttcttccaaaatattgattagaaaaaaaaaacacaaaaatctaagtgtaaatcacttaatccttgttgtcttagagtcatgtntagtcataataattgtcacattaagttctaagtttgtgttgaatntttattttgttgattgaattctagatacattttgtatgtattcttgtcattcttagcctatcttttgaattttgagtctaatcatgcatgttattagttcataaacatgtctaaatc

SEQ ID NO: 40804 - DNA, 436 bp, Glycine max
  unsure (1)..(436): unsure at all n locations
tacttattntacttagttggaattgattctttgtgatccttaatggtttgatgagtctttcaatatagtttgataataatgtgaaattggtttatcattgtggatggtatgattgatttttgtttgctacaacaaagagataatgtagttgacgagttgaatactcgtagtatatatttgtcgtttgctacaacaaagagataatgtagcctatggttcaaatactcatagtatatatttctcgtttgctacaacaaatagataatgtagcctgagtcaaatactcacaatatattatttgtttgctacaatgaatagataatgtatcatatgagtcaaatactcatagtatatatattntccatttgctgcaatgaagagataacanagtctatgagtccaatactcataatatataccatttnnttctctacat

SEQ ID NO: 40805 - DNA, 472 bp, Glycine max
agcttctcatctcaaggaggtgagcttagctattagttaggtgtgtgtagctaagctctagcttctttaagaatcttttcaaggaagcttctcaaggaggtgagcttagttattagaggagtgtgtgtagctaagctctagcttctcaaggaagttttctcaaagaagcttatcaaggaagttttctcaagaaagcttctcaaggaagctacctagtctataaatagaaacatgtgtaacacttgttgtaactttgatgaatgagagtcttgtgagacatacttcaaagttccacttctctccctcttttattccttcaatttcgtgctcccccctctctctttctctccctctttcttttcctccattgaagcatccttccaagcttcttatccaaggctcatcttggtggtgaagctccttcttccatggcttattccccagtggatggcgcctcttctcacttcttctc

SEQ ID NO: 40806 - DNA, 402 bp, Glycine max
  unsure (1)..(402): unsure at all n locations
gatattcaagatggatgatcaagacagtcaatagagtcttagaaagggtatattaaataggaagggaattccaattgaagtagcaaaaggtttggccaagaaaattaagttaaaaagtctcttacaagaaatntactctctggtaatcgattaccagaggatgtaatcgattaccagtggccaaaactgatttacaacagctattaaaatttgaattcaaaatttgccttgtgtaatcgattacacatatatggtaatcgattaccagcagtttctgaacgttntaattcaaaatttaaagcttgtaatcgattaccagagcagattntcagaanatattctcaacagtcacatctttntatgttggtcttgaatggctatcanaggcctacatatatgtga

SEQ ID NO: 40807 - DNA, 357 bp, Glycine max
gcttgagatgaggaagtggtgaagggtgaaactttctgtttttattcgttgaccacagagcggtacttggagatatgtcgcgggggtcatgagaccttggggacgtcatgtttagtgctattgcccaaaaccaagcttgaccaatcccgacccaacccgggcataatctttcagtgagaacctgtgatgtacctaaacacgcgaactcctgccagtcaatagataaaaagaaccgagaccaccaatcaaggaggcttgtggtggctggccatctgacaactttgatagacatgcgggttatggtctctggtaatctaataccaacgcgtgggcatctattacaaggctcaaaaatga

SEQ ID NO: 40808 - DNA, 393 bp, Glycine max
  unsure (1)..(393): unsure at all n locations
tctatagaaggtccgttcctaatttctctacaatggcatctcctctcaatgagctggtgaagaagaatatggcatttacctgnggtgaaaaacaagagcaagcctttgctnttctcaaagaaaagcttactaagggcacctattctagctcttcctgaatttctaaaacttttgagctagaatgtgatgcctctggtgtgggagttggagctgtattgttacaaggtgggcaccctattgcttattttagtgaaaaacttcatagtgccaccctcaactaccccacctatgataaagagctntatgccttaataagagccctccaaacttgngaacattaccttgtttccaaggaatntgtcattcatagtgatcatcaatcacttaagtaca

SEQ ID NO: 40809 - DNA, 482 bp, Glycine max
  unsure (1)..(482): unsure at all n locations
tgcagctatgccatattccctacgaatgtcacttgtcaagacatcctattaactaagaaaaatgcacccatatacaatcaaggtagcttcattacctagattatttacatgtacttccaaagtgtatttgttatttacatcatacacgccatcttgtcaaaatttacacacatgcatactcaaagcatttctgggtaccaaaaattgcacatgcgctcatcttgggatttctaatatctatacatatacaaacttcatgatgaatcttgaccacctacgcaataaggtgctacatatcatgctcctttttcaagtttttgctacctaaagccgcatgcaaattcaagcatatttttctttgctgactaanattgcactcaaatttaaaaggtatatttttttgcaatatagtttcttcatgcaacatttttatatatatttttttgtgagacattntgactaccaaaaattatatatacata

SEQ ID NO: 40810 - DNA, 357 bp, Glycine max
  unsure (1)..(357): unsure at all n locations
ctcagctgaacactatgctggatatattatagctgctngtcatgagagagggcaatattctgctatatactagccaactaatattcaaatcaatggttgatgtttcntacttcattgtaaaaagagataaatcatcctttacttgtaaactaaataattatgaaacaacaagttatttaagctggcttaaataatccaccataaattgacttacttaatattaaggaccacctaggaatatcttagtttattaaattatatgtaccgccttacatacatttcatgaaacttatatggatgaatgtggactgattggctacataactgccatactgatggatcactactagctgtgtc

SEQ ID NO: 40811 - DNA, 407 bp, Glycine max
tttttttttctttccctaactggtacaggccatagacacaagtggaatcgatcctctatcttaactccaaaaggtattgtattatagatcactttcagtataaatactaatcggaacatttgatgataacgcataaaaacttaccccacttctatttctaacctttatattcacaattgattggtgcaccttgcgtcggcaaaatctgatggaaatgtgatggaaaaattgcatcagtcaaatattttggattcctttgggttgaaaggagtctatctctaactatgagaagctgaggctgacatttcatcttcctggaaagctcagccttgaattccatagatgaatttctacgacaaatgggaaaagatgacggcttctaacttcttggagaaaactctataaaa

SEQ ID NO: 40812 - DNA, 173 bp, Glycine max
gcgttttgtatctatgcataaaacattttcactgtagttgcgttattcgtgtgctttatttataacatttgtaatgtagaacaacttctgagatgaactgtgtgaagatatcacctaaagacaacactgctgaatatgataatatgagctttcagataccgctctgtgaaaca

SEQ ID NO: 40813 - DNA, 491 bp, Glycine max
agcttatcgcgcatgaggtagcttggaaggccacatatcaagcatctaaaggctgttaggagaatatttgaagtttggtgcgtgcttagctaattatttcttgtgccactagtttgggttgagcatgcatcccgggcttagcgtacaaccacttaaacaagtactatttttttgtgtgcttagctcagatactaggctaagcgcccaagcctttatgagacagctttttggagcaaaaagtttaaaagaaggagcatttattatggttagagcttagaggtttaacaaggacacttttggatgctcttgtgcttccttgttctccattttctcttcttctctttgtattcccattcttgttttaggtctctcatggatatgagagactaaattttccattgttgggggcttgaatccaaaactctatgatgtaactatctttattatccatttaatggtatctcattattattgctttatttctatgggta

SEQ ID NO: 40814 - DNA, 399 bp, Glycine max
  unsure (1)..(399): unsure at all n locations
accatttntcatagtaaaacactggtnatgtgtctactattattgtgataatntctttctccatcattggaggtgccacttgagctgccaggtctctccacctttgggcgtattctttgaaagattcatgcccctttttgcacatgttctgtagttgcatcctatccggagccatatcataattgtactgatactgcctaacgaaggcaatcattatgtccttccaagaatggactcgggaaggttccaagttggtgtaccaggtaacagctaccccagtaagactntcttggaaaaaatgtatcagcagttcctcatcttttgcgtatgcccncatcttccgacaatacatctttagatggttcttggggcaagtagtcccattgacttgtcaagtct

SEQ ID NO: 40815 - DNA, 459 bp, Glycine max
gagtctatggtctatgttcttctacagatctctgttcttctttgcagcaatctggagtcaatgagcaacttgatgcttatgttgtaaacatttataatagatctcctcaacaacaaaaccaacaacaacagaataattatgatctttcaagcaacagatacaatccaggttggaggaatcatccaaatttgagatgggcaagtcctccacaacaacattagcctgtccctcctttccagaatgctgctggtccaaggaagccatatgttcctcctccaatacagcagcaacaacaacaacagtcataacaaagacaacaagtaattgaggctcctcctcaaccttctttagaagaagtagtgaggcatatgaccatccagaatatgcaatttcagcaagagacaagagcctccattcagagtctgaccaatcagatggggcaaatggctactcagttga

SEQ ID NO: 40816 - DNA, 401 bp, Glycine max
  unsure (1)..(401): unsure at all n locations
tcaagattgatacaagacttcaacatcaagcatcaagaatccaatccaagattcaagattcaagagaagaaatcaagaatccaatccaagattcaagattcaagagaggaaatcaagaagtaacaagtcaagacttcatataggataagtattaaaagaatttttcagaaaccaaatagcacaattttgttttacaaaagaattttctcaaattttctaagttaccagtgtgattactctctggtaatcgattaccagtgaccagtttggttttcaaaatgttttcaaatggtttacaacgttccaaaatgattntcaaatagtgtaatcaattacactatattagtaatcgattacaagtgaatctgaacgttggaatcaaatccaatcgtgaagagtca

SEQ ID NO: 40817 - DNA, 907 bp, Glycine max
  unsure (1)..(907): unsure at all n locations
tgcncaacgaanatttgatcgtgctgcactcngatcctctgagtcacctgcggcatgcaagcttgtgtatcggttctnctcaaataaaaaccactgtcagaaaaacatatctctgccgatgttgctggcatgcatcagtgtagaatcttccaaaaaatccctgagaacaccattctttgtacacacaatccacataagacgataatgtcatactgactatgtctatccgcttcatcacctagaatgaatattttttaaataattaaatatataaattattaaaaattgtgataactaaatatttataatatttgaattatatttaaaatttataataaataatttatggtgcgatgcattattacttttaattattgataatttctttaaaaagatattcaaattcaagttgaaactaaaaatattataaattatagattggaagagataaaagttacgctcaatcaacatatatatatatatatatatatatatatatatatatatatatatatatatatatatatatatatatatatccccagagggtgttgcggagcatatatttatatgtggaagtattcttactatttcgggagagctgttctcacccctcttgtttctttatgaagttatacaccccccccagtaaataaatattagaaagaaccggggggcgcgggcttgaggaaacaaaattttttatgttttttattggggggggtttttgttgccccgcacacaaaaattctgttctccccgactcattgtgtataaacacatctttggtggtgcgtggcgcccatatatacacacttgtaggcgaaaggaggggtattactatgggggcgggcgccccctcaccctcgtttattctcattaaaggaataaaaatatccctgtttcc

SEQ ID NO: 40818 - DNA, 583 bp, Glycine max
  unsure (1)..(583): unsure at all n locations
cgggccnaaatgaaccatgatgacgtgagacttagtctccagctcnacacttgtgtatcgatacgatcaacctgtaatctattgacacaaagagttttaactatagaggagatcttctaactatagaactgttcttctaacccctacatgatgatgcatgatgcacatatgatatgatagagactaagatgcaacacacaatataacaatcaatacaaatgccactcaagagagttgggcatgtaaaaaataaaacatcttatagctcttcttcaagcttcaaggctaagttatcatgttgctcctcctatctctaacaatattntgatggcacanaacatatatatatatatatatatatatatatatatatatatatatatatatatatatatatatatatatatatatatatgtatatatatatgaaagtgagctatattattntctatttagagcgggtctacaacaagtctattaatagtgtatcacaagaatgtactactacgcaattaacatcgcacacaactctcttttgngattatttatgaagcttactatatgatgtgcgtgtacatgtggn

SEQ ID NO: 40819 - DNA, 1280 bp, Glycine max
  unsure (1)..(1280): unsure at all n locations
cggaagagaaacgactcctcatactttntctcttnctcccctctcggcccccctcctgtagtgtaacaatcggacaaccataccanaanacagaaganccggggattgatgtcatggcagttgcaannncccnnnnnnnnanaannaacgtgcngcctgcagnnnnnncgcgcacaaaggaagagggaatgttttttttaccgccttacagngcctctcgtcaaactttgaatctacctgcggtcctcatccactacatacctgagatattattataagttggaccccctcccgagccatgccgacaaccacacaaacatagtcttcattcttgcgagggccatccactcaatcaacgaaatgctgccggcgcccacagcgcctttattaaataccagctctgttgccgccactaacatgttataaacacaggaaccatcttttatacatcatcatcttacaagcttaaccaaggacaccttaggatgctcatacgccgtccccatgtaccagccactatgcatctcacatcactatcaggaatacaccaactcctactccaatagtgcgccctccaatagcacgactgaagagaactaacacatatgtcgtctcgcagtgcggcgcacttcacacaccactcaatctccaactgaacacgaacgcgttcctaccacgtcatcgcactgactaacggttagctccgacatacaacgactctgcgactatatctatcactcacgcgactactcgctcgtagctacgagttacatatcgtgatctcaccacaactcgtgccaccactatattgctcgactaatagcgtaagtgactcatacgtgggaacgagcgatgtactctctctacacnaccgaagncatnacataggtntgngcatacacaagcggagcccatctcatcgactcacatcnanatacgatattgcgcgcgtcgtgncaaatagtacaataatataatcgctatcgctctacgcacgacacacgtcgacaangtctcatcgatctctgcgctaatagcacacgtacctaccncnacatgcatctgctntgtctgactggcccaatcctacgcatcaaaactgatatagntatcgcgtatacacgtctaacacactgtacgctatatagacgtgcaagacagcatacatatatacataactactcactatntctctacatcatcaatcatcgtctgctgcgtctcacactaaccacagctaaacacacactatatgacatcagttgantaccactctcctn

SEQ ID NO: 40820 - DNA, 187 bp, Glycine max
aactctcctaagaatattaatgctgcattccttttcgtgttgctgcgagaattcttactttttgacgaaattatgtttacttggctatgaccgcatactttttcactattgatggactgaactttaccgcttgacatgctgtgcaagtaaatattgcttgttctataagttctttgggagtatgttg

SEQ ID NO: 40821 - DNA, 459 bp, Glycine max
cctttctttttcttggcattttcttcatgttgatttagtctcatgagttccattttgtgttcctgaaactttccaaacaaagttgcaagagacatgtgcataagatctcttgattctataattgtcattacctttggttgccattccctgcttaaacatcttataactttgttaataaaatcttcattgggaaatatctttcctaatgatgcaagatgatttactatatgtgtgaatttcttttgcatatcctgtatagtttcattttgattcattctaaacaatttatattcatgggttagggtatttattctagatctttttacatatgttgttccttcatgggttacttgtaaggtatcccacatttcttttgcattcttgcaggttgatactctaaaatattcatccctgcctaatgcagatgaattatatttttggctttaagttatattgacc

SEQ ID NO: 40822 - DNA, 366 bp, Glycine max
  unsure (1)..(366): unsure at all n locations
ctctacaatggccccacctctcaatgagctggtgaagaagaatgtggcatttacttgnggtgaaagacaagagcaagccttttctttgctcaaagaanagcttactaagtcacttgttctagctcttccagacttttctaaaacttttgagctagaatgtgatgcctctggagtgggagttggagctgtattgttacaaggtgggcacactattgcttattttagtgaaaaacttcatggtgccaccctcaactaccccacctatgataaagagctttatgccttaataagagccctccaaacttgggaacattaccttgtttccaaggaatttgtcattcatagtgatcatgaatcgcttaagta

SEQ ID NO: 40823 - DNA, 1027 bp, Glycine max
  unsure (1)..(1027): unsure at all n locations
gcaacgcgttttaggtcgngtcgtatcggccccncnnnttntnaancngcccgccggctgctagactagagactccagagggtgtggaggttttttttttgggcncacaaacgggcacagaccttagctgccgccagtctaatgggtctcccctctgcacgcaccctcataaatatataatctaggagcgccccctgtgcgacgggcgcccacccactgaaagatccgctggatcgaccccggaaggacgcatagtcttctcttagctggccgatgtcctccatttcctctggtagcggtaagacgtctacacgcaattggcttgttcttaccctttcgcatccccatgctccagggtaattaaccctcgggaatgaccccttaatcagcggatgctcgcgcgggagaagactccttcccgtgcgctctatggacgcgctgtcgatcacaaaaacgaccatttcctggcgttcatggcagacgtcattcgcgagcagaggcttgctctcgagctcctgcgcaaaagacttccatgacatttcgcgcgtgccagcgttgtcgcttcccacatcctggactgtcgtgtcgcctcctgctcttcggcactactttcctttgatgggcatctctccaccactggtccaggaactctgaattacttcctcccacacgcggcgagtctcacttggggtctcgtcctcctattcatggcttgtcaccctcattgagcaaaataggctcctaccgcctaccacctttcgcggcgagagaaacagagctctgtccatcctacgaggcactgtactcgggcgcaatcgtcatnctcttctcgctcatcaaaacaaactcctgcgggacaaccgtatccgtcggccacacctccaacatccgcctgccataaactatatccttgcgatcccccctgaccctgcggcacggtgctggccanttgtacttgcgcaccgacctcccatctctcgccctcttcgggcatctgggatctacgtgcctcccagtcctgtctcct

SEQ ID NO: 40824 - DNA, 212 bp, Glycine max
aagagctttcgttgttcagtttcgagcgtctcgacataagatgcgcccgaatcggacatccgggtgaagagatatgagcatattaatatctccagagtatccgatgtataacttccagcgtatcgatataatataagcttgaatcggacctccgtgtgaaaagatatgaccattagaatatctcgagagctttcgttgtagaatttccagcg

SEQ ID NO: 40825 - DNA, 476 bp, Glycine max
aaaacatctctctgccgaagttgctgccatgcatcagtgtacagtcgtccaaaaaatccctgagatcaccgttcgtcgtagacacaatctgcatacgacgatcacgtcgtaccgactatggctatccgcttcatcacctataatgaatatcttttacatcatcaactatataaattattacaaattgtccaaactaactattcatagtggatgaattatatctaaaatgtataaggcataatctacgcagagatgcatcctgacttttaattattgataattgctgtaacaagatattcatatgcaagttgaaactaacaatattaacaattatagattgaaagagataaacagcacgttaaagcagcatctctatatctatctatatatatatatagatggcatatgacctctctatatatctatatatatataaatcccaagcgtgcgttcggagcctgacttaatatatgggg

SEQ ID NO: 40826 - DNA, 222 bp, Glycine max
ctctaaagacaagatatagaagcatttgatggtcacttgcgatgaatcagatcgtgagcagagtatcatctcacatgatggacatgccaacatctatctcatggcagatacaaatgataagactaacgtaaaaactggttctgaatctaataattttcttgtgctctcttacacgatgaagaggatatgccctatgatcttcttctttataactttcatatg

SEQ ID NO: 40827 - DNA, 856 bp, Glycine max
  unsure (1)..(856): unsure at all n locations
cgaaaccgcnnnaaatgaactgtcattcggcnncgggaaataaaaagcgaactgcaagcatgcaagcttggatgtcataggagaggaaccactctcattataaacagaactccgccgcggcaagccgcctggcattagagtagagacctcctgaaaacgcctgagaacaccataatattgtacgcaccgtcgacctaagacgagaatggcatactgactatgtctaaccgcttcatcacctagaaagaatactgtttaaagaataacatatatgaatgattaaaaagtcgccacaactaaataattataatatgggaattactagtaaaagctataatacataatttatggtgcgaggcactatcacttttaaatattggaaattactttaaaaagatattcaacatccacgtgcaactaaatatattgaaactatagacggagagagataagagcacggtacatcaacctatatatatatacatatatatatatataccaatatatacatatatatatatactggatgtatacacatatctcgaaggcgtgctcggagcatattttaaaagttgcgaacattctaacctagggggaaagggtgtcaccgccctgtctatattaagaccaaaccccccacgaaataaattgagaaaaacggggacgggggctgtgaaaacattttntaatgtcgatgtagggggcatttggcccgcgacaagaaattgatactcccgagtacgtataaaaantccgcgtgggacggcgcgcccaataacgtcagcgaaagagagacaaattgggtgggcgccgccacgacgcgggagttctctcaacttgcaagcaacagccttcg

SEQ ID NO: 40828 - DNA, 556 bp, Glycine max
  unsure (1)..(556): unsure at all n locations
gcccaaatgaaccatgannnctgagtcctgatgtcgctcctataaccctaacattatatactcctgctgtatattcaccctgagcttatctgtgagggtattttaactataaacttatgtctacccctacatgagtgaagcatgatgcacttatgatttggaagaaactatgatgcgcctcctgttatagctatcaatactcatgcgacatcatgatgaggtggcgtgactaatatatcacttattaaagctgattgctaagccttaacgctaagttctcatgttgctcctactatctataacagtactttgttggctgccaacatatatatatatatatatatgtatatatatccctatatatatatacatatgtatatatatatatatctatatggacatctactcatatgtacatgcgtcccctgattgtatactttaggggggatacgccacaagactcctctcgtgtgaatttgatgtactangagcggcagaacaacctcatttcctcagcttttctttgataatcataataacagaggggaacatgtcg

SEQ ID NO: 40829 - DNA, 1086 bp, Glycine max
  unsure (1)..(1086): unsure at all n locations
gcgcgagcgagcgcgcagactcgcgaccagacatctctccnatacacaccggacagagcggaggacgaatcacgactgattggacacagcaaacaccacncncntacaaananntaganttttgtaggcatcgcaccanccncgannanaannananannnagnnagnaagcaacaccancagaggggacaacagccacgggagagagtgggcaatctatttgatacagatcaagcaaagcacgcgacagagccacacagttactcggactcccgggataacttgcgcaacacacaagtgcgcagagagaacaatgatatataaaaatactcggagggaggcacgagatcggcgctcatccgcactggcaatgacactcgccacaggcataatacaactataacaaacctgcgaggaactaacataccgccggcgcggccaaaaattcgacatcatcaatgacagcgaaatatcaatgacaactaaaacgcgcggaaacctcgctgtcaccgcaaaacccaaaaaacgtagcccattctcaagtaccaagcgaccacaataatagagctcgtcggcagagaggcagaccaattcccccatcacacatacgaagacctgagaccatcacacgagaacatcaccacggaaaacccccgcacagcgaagcaggagaacccctaagacacactaagaaaggccgacaggccgagcggcggagaacatagtctggccgcctggccacaacaagggccagttgcctacccagtcctcacgaaaggcaaacgagcagcaacacacgccggtgggacccaacctctgcgggagtaaaggactacagcatacggcataccaccaacgaagaaagcaaccctccggcaagaagacacaaagcatcatccataatcggggcgaccacctctactaatggaagcccaaacgataaaccgcgcagacataacaaccgggagtgaccccagaaattcaactgtctcaaaacctccaagaaacaaatcggccaaaacaccgccaaacaaacagcgagcaccggcgcacaaacccacgattcaacatatataccacaaacag

SEQ ID NO: 40830 - DNA, 454 bp, Glycine max
  unsure (1)..(454): unsure at all n locations
cctctcaagcattngatccatgaagggaataggaaagtnggtatttgttgttgccttgttgaggaggcagtaatcgatatacattctccaactggtcatggtccttacaggaattagctcattcttgtcattctttatcactattattctacccttgttggggactacttgcatggggattacccatgaactttcaaaaatggcatatatcattccagctccaagaagcttcagtacttcttttcgaacttcctctttcatcaccaggctgagtcttctttgtgggtgtgctactggtttgaagtcctcatcattgtgcatgcaaataaatggacatattcctttgagggtgaagaattgtcatcctaaggcttgtctgtgcttctttagtacctccactagtctcntttcttcctctttgtgcaatgtgctactaatgatggctaagttctca

SEQ ID NO: 40831 - DNA, 343 bp, Glycine max
cctgtatcgcctacggtattaactactttgaggctcgcgttaaataattgcgcttggggaaaaccggggcaatgaaattgtcattttggtcactgcttaatccttaccggtgaaataatcctaggctttgttgtacaataaatttattttattaaaccctttaggataaatggccgtatatacccgtgactccccatctttacataattatgtacaaacatgcagaatatttgttggattctccctaaactatataaaacatttctattctttaggaaacagggtacaaggtggaactttcacttactcaactgccgctttcttacagtatgatttcttcacg

SEQ ID NO: 40832 - DNA, 285 bp, Glycine max
agctttctagcttttaattggagtattttgatctctcttttggtgctctaaattgtggcaatgtgcttaaatatgtggggcaattttggtttgtcttcttgcttgattaagttgaattgggggtttgtatgggatggccctacgcctataatgcattttgaaacaatgggacatgccacattgtccccgttctcttgctattgatgcctaaacgcgcgcccgccaagttgttggcgaaatgcctctatggcattagcgcgtgacttttataaagaaaccacccat

SEQ ID NO: 40833 - DNA, 353 bp, Glycine max
  unsure (1)..(353): unsure at all n locations
ntgaattgaagttgtgttgtgttgtgagagagtctgctattgaggggtgaaagggttcttatataaccagctnttcttccaataccttgagctgttctagaatttgtaacctctcttcctcaaagttcgccaatgattcctctaaatatatattggcagatcaaagaattaatgacaacaactgcaccttttacttcttcctcccanaatacaggtccagcgaanacaattagtaataagtgttattnttgtaaacctcatatcgcaattcacagccaataaccagtgcccaaggagaatatagaacagaacaaatcatgtgtataatatgttcacaaatttaaaacgataac

SEQ ID NO: 40834 - DNA, 270 bp, Glycine max
tttgaatttccacgttcaaaggcactgggaattgattaccacaacattgtaatccactacagctttttagatataattggaacgttgttaatttagatgaaaactttttcaaatccattttgctactggtaatcgattacaacaatctggtaatcgattaccaaacagcaaaaactttttggtaaacatgtcttaagaaaaatccatgtgctactcagtttttgaaaaaaccttttcatcactatcttgaacaaatcctctctttgattc

SEQ ID NO: 40835 - DNA, 357 bp, Glycine max
  unsure (1)..(357): unsure at all n locations
taaccgcgagcctttacctctattcttcctttccgaggtacttttccttatgtcagcttgcgtagggttatagcctaacccaaacttcccgcggtttcctctggtggatactaagctggttctgtcgccgttgttcttgcccaaacccattccgggctcatagccgtaccccaacatcacccgggccaccatcattgccgtatcatacaggcaaggctggccagagagggaatctacagaggcaatgcttactacctcaaaagattggaaagctggttccaatgactcctccgcggcttccacatatggcatagaggaagggcnacttaccaagatgtcttcctcacccgatactat

SEQ ID NO: 40836 - DNA, 441 bp, Glycine max
agcttataatatattattacgctcgaaattaaacatcttaagctctcgagaaattcaaatggtcataacttttcacccggatgtccgattatggcgaatcacatatctagacgctcaaaattgaacaacggaagctcttgagaaattctaatggtcataacttttaactcggatgtccgattcaggcgcatcacatattgaggcgctcgaaaatgaacaacggaagctctcgagaaattcaaatggtcataacttttcacactgaggtccgattcaggattataatatatcaagacgctcgaaattaaaaatcggaagctctcgagaaattcaattggtcatcacttttcacacggatgtccgatttgggtgcataatatgtcgacacgctcgaaattgaacaacggaagctctcgaaaaatcaaatggtcataacttttg

SEQ ID NO: 40837 - DNA, 313 bp, Glycine max
  unsure (1)..(313): unsure at all n locations
tctatataagctgaaccattntatcaataaacacaagttgagtgttattcagaagattagaagttatctcttttatcttagtgagagtgattctcctaaattcttgagtgattcaagaacaccctggctgtatcaaaggactttcacaacctttgtgtgttgccctcgctggaaagagagattctntccttcctatcatctccacccttgttctttcaaaccacaattccagaaaatccacctctgcccaaaattatctcgtgaccatagctcccatttacacactcaaataagtgatcttgatctaaattga

SEQ ID NO: 40838 - DNA, 250 bp, Glycine max
attcttaccaccctcgccagtaccctcctacgcctcgctctcacgtgccgcctggttaggtcgcatcacactaccgcgctcctcctctgccttatcctttggaatggggaaacccaaactggccgtcgacagatgccccaatgctgactcccctccctatgcgcgatcgcgagtccctgccctgcaccaaggcggcaaagccccacacgcatccccactccgcttctcatggctggaaaaggagatggct

SEQ ID NO: 40839 - DNA, 355 bp, Glycine max
  unsure (1)..(355): unsure at all n locations
actcttagtggtgactttgtgcgtatgtttatggaggagtccgagtcaatttctgattattcttttcgagtattggccgtatgcaatcatcttataagatatggtgaagatgttgatgacgtgaaggtcattgaataaatacttctaactttatattcatagtttgacttcattgntaccaacattgaagagaacaaggattttatgaccatgactattgagcaactcatgggtgccttacgagcatactaagataaactaaagagaataatttaacaagatgaggctacggagcaactactacaactcaacgtaaaggaagcagacttatcatattacaagagccaaagatgac

SEQ ID NO: 40840 - DNA, 489 bp, Glycine max
gcaagctttaaccgatcgtttaagccgttatctctcctattatataataaaatgaatttcaaccgatcatttgagttgtaatatcgtttaatcactgctgaaataaaatctaaccgatctttcacgctataacctctgttaaaccaaaaaagcaaaataataataaaataatcaaaatatcttgaaaaaaatgataataaaataatcaaaatatctttgaataaaataataaaaaaaatcaatcggacgtttttctttggaagtttccttgaatgaattgactaataaccaaagtgaaactaaggctaaaatcaatacacaaatcaaactttgtccgcaaaaatcactaaaaaccgttttaaggtccaacgccttaaacagtcctctttgcttttatcggttaacatggaccgttcaaaagcataaaatgaatacataactttaccgcttttgatgaactacgtaggtctgatttcctcatcgcaattg

SEQ ID NO: 40841 - DNA, 342 bp, Glycine max
  unsure (1)..(342): unsure at all n locations
agattcaaaggatgtaaaagattgtgatcaatgtatttaaaatgcaagttaagttcttgcctttatagactcttcaagtctggtcaagagaaccattagaagagttataacctttagaaaacctttggaagagttacatcttttgattcttattcanaacttatcattggtaatcgattaccaaatcattgtaatcgattagacaaagcatttttgtaaaaggatgtgactcttcacatttgaatttgaatttcaacgttcaaacacactggtaatcgattaccaatatattgtaatcgattacaccattttgaaattgaatggaacattgtaaattcagtt

SEQ ID NO: 40842 - DNA, 507 bp, Glycine max
tttcttgaagagggcaggaacccatgcacaaagatagagatcctcacaccattaaacccattgttcgatattgggttgaagaattggctaaactggcttcttttgtacttttcacaagtattggagatctttctacctttcaagaggctatgaatagccaggagaaagacaaatggattggtgctatggtggaggagatagagtctttacagaagaatcaggcatggcagctagttgagcttcctacgagcaagagagtcatagggtgcaaatgggtagacaagaagaaacctctagtatcagaaaaagaaaggaaaaagttaaaggcttgcctagtagcaaagggatatgcatagtagaagaggttgattatgatgatattttcctccctaatcatgagagacacttctatcatggcgatgttagcctttggagccagtcatgacattcacttggagcatatggatgtgaagacaccctttttcaccatgatctaggggaacaaat

SEQ ID NO: 40843 - DNA, 438 bp, Glycine max
  unsure (1)..(438): unsure at all n locations
ctccccgttaatgggtgccttntcgtctttggtattgtgatgtcatacggattaacatgatccgtattactcattcagatcaacttgatccgtatgagtcataaggatctagttgatccgtatgacttatacggatcaagttgatccgtatgacctttgttaattcaaaaaaataataaataggtatttgtgtttagaaaatgttttaaatacgagtttattcgtagttttgtataaaaaacagattgtttgtgtttaaaaaaaatatgtatgatgcatggtgtatgaaatagtataaatttaatagtaatattgaattttgagttgttgtgttatttatctcatggaaatagcatatttattaatatgagtcgtattattatgaattggtctaatatgatcatatatgctttagaatattataatgatgtttattca

SEQ ID NO: 40844 - DNA, 359 bp, Glycine max
taatgcatgatacgacatcaaaaagagaatgaaccaactaaccatcggccggtcatattagcattttcaatgcaaaccactttgcgggcatcatgaatggaataaagatgctttcagtcaccaaacaaagcgccctcaaaaggcacaccttgactacttaattttgtcaatgaataaaataaagactgatcagccccaatgggaattttatgtacctaagaaaagactacaccatccctaatttttatattatgatagaagatacgaactaactcacgatagtatggcattttgagagacataaaaaccaattaattaagaattttgaaatacttgacaacaatcaaaatttctctcct

SEQ ID NO: 40845 - DNA, 428 bp, Glycine max
  unsure (1)..(428): unsure at all n locations
ctaaaagatgtacaaacattttaaacttctagttatctattacataccttgtgtaatcgtttacaggcttctaaattcaaattcaaaattttcaaattgtntcagaaactaatttagccactggtaatcaattacatccactggtaatcgattacatcctctggtaatcgattactagagaggaaatatcatatttttgaaaagataattgttctttanaaaactttngtaaaatatttcctttagccaaacctgtgcaacatcaattaaggaattctttctaagatcctaactaagtacatcgttcttcttgcatttctgaattcttgacttgaattgcgctcatctttggcatcatcaaaacttcatatcatatatgcttctacaaactagataggagaaacactagtggcaattngccacttgta

SEQ ID NO: 40846 - DNA, 296 bp, Glycine max
gcctgcacccgatgaagccgaccgagcattccctaatttactttatccaatggttattcagggagtgaatagaataaacaatggccggtgtcggtccttatatggcccccactgatatctttcaaccgacattgcgcaatttcttttacaaacgctggccgataaataattttttttttaccgcagaggaagttttttgttttggtgttgcctaaaaaatttacaacgtatgtcggctaggttttttcgtgcgacctcatccaatggttcgttccgaccgacactgggatgttgtc

SEQ ID NO: 40847 - DNA, 396 bp, Glycine max
  unsure (1)..(396): unsure at all n locations
agcttattaagaggcttctatcacactccanacatcttctcaaagatcctctcggtcagatcatggaagcgtgtgttgtgaagttgcagaccacatttctagacgatccaacggttaatgaatgccaagaagcgttcttaccgaggcagcttcatgtagctctctctagaagcttcattaagaggcttcctctagaagcttcctcgtggcttctttgagaagttntctcaagaggcttctttgagaagctacatccttatctatccatccctctattaactaaattaacttccttcaaaataatgaccgatgaatataacgcaacatataatcaaacatcaaacataattactaataatatatagatatatatatcagggtggtacacatcatata

SEQ ID NO: 40848 - DNA, 509 bp, Glycine max
agcttccatggattccaatttctatgcatctcaacttcgtttcgcagcgacccaagcctccatgatcttcaaacttgatctcattatcctgaaactagataccatgatatcccgccaatgctccccatttccttcttcggtgcagccaccgccgccgccagctcctccgccgaacgcttattcttaccaccccagccagtaccctcctccgcctcgctctcacgtgcctcctgctcagttcgcatcacactaccacgttcctcttcagccttatccttaggaatggggaaacccaaactggccatcgacagatgccccaatgctgactccccttcctatgccgatcgcgattccatgccctgcaccaaggcaacaaagccccacacccatcccgactccgcttcccatggctggaaaaggagatggtcctagtatcggaataaattccggcaccacctacttccccgtcagagtgtggcaacaccaccgtgtcgacatcaatcacctct

SEQ ID NO: 40849 - DNA, 351 bp, Glycine max
  unsure (1)..(351): unsure at all n locations
acattgaacaaatggaagaagaaactaaagctgaagctctacaagagccttcacatcaatggactcttttaagttattcatgattcanaagatgaacactatgcttcacctccatcaagagcactcagctaaggttcatagttcattggaaaatatatgtacccgactgggaaacattgaaactaggttgacccttagcaacctccttaacctgtatgaggatgaagcttagttgtgtttaagtgcttagttcagttgtgtgagtgtcatttctgattatgctcaatattgttttggctctgtccttctttgttaatagctgagactatacaatggataatgattgttgtg

SEQ ID NO: 40850 - DNA, 911 bp, Glycine max
  unsure (1)..(911): unsure at all n locations
cggcncttgaatacgacgccgcagccnccngccnnnnanagnaaancnggccggctggacagcctcctaatccactaccccgcccgagggcctattcttttttcggcaccacaagccaccgaccaaaagagatgctccatgaccccaagtctcgctccagcggagaaagaaaaaataaatatcacccccggctgcccgaaacccccaaagtgccagattaccaacaaacgggcgccggcaagcttcgtgacaaaccgcgagccatccctttccggcttgggtggcccttacttcaagaaacagaacaacacgggatgtgagaacagcggagccaccaactgaaagggaaaaatcccgacgtgaatccactgccgaaagccacacccacgcacctgcctcatctaagataatgggggcgacacccccacatcgaaagcgcgtaagcggtcggcctggaccccccggccaccccacggaccgacggattctcgtggcgggccccgcgtgcgcctcgccacatagccgaaacacaaaggacgcggccacctctagcgcgcctagagggacaaaagaggtcctcgtgtttccggtggcgtccgaccccgacaacacaaatggtaattgtgggaaaccacaccgtgaggcggaactttgcttcgtctggaaaaatattcctagccgcccacccgcccacatctgttctcgggagacacaaaatttgccagggggcccacacccctaacaaaactgtgttcacttacaccagccatgacccaaagacctaaccacatcaacgggcggggcttatcctaaaaacaccatcgcctcaactctgaagcttcgccacagagccgtagcccaacgcaaggtgagcccctgtggggaaagcacccattaaacaaagagattag

SEQ ID NO: 40851 - DNA, 412 bp, Glycine max
  unsure (1)..(412): unsure at all n locations
catatgtttatacgtcctcaccccattacttctattatttcgttatcatgttctgagctcctgaactccagaatgaattccataagtacaacccatcacctaaacatgatactagagcaaattgaggttaaggttctcttaataggcattttaaattgatatgaatatatcttttattccattaagcaggaaatttactttgattgcgtacaacataatgtgtcctctttcaatccttggtaaaaattattcctatacacccattagtatgtcttattatagaagaagtctttacattagtatttttgctggtctatctgatgtactgaanaactcagataaaagtaattattatcatgttagctgaatgccaaatttaacagatagtgtatctctttaatcgcttaatatt

SEQ ID NO: 40852 - DNA, 414 bp, Glycine max
  unsure (1)..(414): unsure at all n locations
tgtcagaagtctataccgctgatttaatgtaattagagcctatagatntcctttctcttttgttttctgaaatctacctcattaaataaacaaagagatcttgtttcatctgttcttgcagttccaccttttctcatatcatnttgcatgtttntgtttctttggtcttgtttggtatagatatgagggtcgattctttgaggatcctaacaacgagggtttgacaatcgattntgatagagatataagccaaacgataaacgaggaagaggaagaggacgtcctgtcaccagagttggagaggttggtcgctcatgaagaacgtgaaatgaagccttaccaagaagaaaccgaattggtaaacatggggaccacggaggaaaagatagaagtaaaggtaggaaccgatatgat

SEQ ID NO: 40853 - DNA, 507 bp, Glycine max
  unsure (1)..(507): unsure at all n locations
agcttgcggactataccttcgaccgaacacggtcgtgtttttgtctangcccggattcgaggcgggctgcaacactggctccgcttccctaactgtactaaaggcgggtgcggtggctttatcctctatggttttctataagtttaacatgacctccgagttggaagccatctgatcttttaaggccgatagatcggccttcatctggtcctgcacgccctctttattatccatttttctggatcgagtgttataggggtgccttgatgttctcttacttatgatgaaattcccaaagaaataaacaactgtgagtatgcttccaaaacatgagtatgccaatggatgatcggagcacttggatccacccccagatttttaaataactaatgagtccagaactcttcattttataaaaaaaacaacaaagctctcatctatccaagaatatacaaacggggttacaaaagaacctaacgattcctaattatttgggccctcaaattt

SEQ ID NO: 40854 - DNA, 375 bp, Glycine max
  unsure (1)..(375): unsure at all n locations
tcagcttcacatcagaccacttccagggtgctggaactacttcatatggacttgatggngcctatgcaagttgaaagccttggaggaaagaggtatgcctatgttgttgtggatgatttctccagatttacctgngtcaactttatcagagagaaatcagatacctttgaagtattcaaggagttgagtctaagacttcaaagagaaaaagactgtgtcatcaagagaatcaggagtgaccatggcagagagtntgaaaacagcaagtttactgaattttgcacatctgaaggcatcactcatgagttctctgcagccattacaccacaacaaaatggcatagttgaaaggaanaacaggactttgcaagaagct

SEQ ID NO: 40855 - DNA, 477 bp, Glycine max
agcttgccacccagctcgcccaggcgagctaggttgctttctccagaaggcaccgccttctggtagaacttcctggaaggcccaagtgggcctgattactatttgtaccccctgtttactaaatacatccccttgccttttttgctgattctttttccgtaatgttacggaactttacgaatttcgtaaagatacttgttttctttccgtaatgttatggaaccttacaaattacgtaatcatcccttttttggcttccagaatgttacggaacctcacgaattgtgcaacaatgcttccatttgactttcggcatgttacgaaacctcacagattgtgcaacgatgcttccttttgacttccagcatgttacggaacttcacggattgcctaacgatgggtgccaagtacctcgaagtggtcaaacgagggtcgcatcccaacaaatggatgggtccttgatgaaaatatggtatg

SEQ ID NO: 40856 - DNA, 380 bp, Glycine max
  unsure (1)..(380): unsure at all n locations
acataacaatggtgaccaaaccaaggccatgacattcacagaagcagataaacaaaataagcataagcaatgtagctgaaagaataaatgaattgaagtaattcaaaaacttgacaaagaacagcatgccaaatactttgttgtaatgaagagactggcttaacagcaacacatcaacatttttccataaactatntattatccctctccaaaagctgtgtaggactgcctaaccatgtgccaggctggaaatgtttaagtaagataaagaaataaccaaccaatatcttctctgcaatatataactgagtgaagatctcaggagatcaaacaagtttattacagtagacagaatatggaagcatntcatatatatgtat

SEQ ID NO: 40857 - DNA, 867 bp, Glycine max
  unsure (1)..(867): unsure at all n locations
cgggaccgtnnnnttttgatgccgtccgttcgncgcgatccattatatanaatctgcctgcatgcaagctatctaatccataacttcccctagacgctattcttctgcaacacaagaagcccttggacaaaagaaacgcgctatgacaccagttagctcatgctgagatagatattatatttacttacatggattcatgaacgcccaagtacagatatctatatataggcacggctagctagtgacatacgcgagctattcttttagctatgggtggcctgntctatatagatagatcagtaagtgatgcgagaacattgactgcaaaattccgaagagaagattcttgctgtctatcaactcatgaaagcaatacctccgcggacgactcaattagaaaatgggggctaaaccttagcatggaggtgcactcagtgatggacttggaccaccggacaacactatgaagatagatactgtggcggacccaggtagtgtatcgtcatagagtgaaaaaatataattgcatcataacatgcgtaataagagaataagtggatgtctgtgtccgaggcctagaccangagacataagtgtgatataaagaatagaacacggtgagcgatatttggtgtttgaagatagatatcctaagcccacaactcggacctatttgttggagggacaaaatatagtaagggtcacattctttcacaacgattttaataacgaagtcatgattaaggaccttagctataaaggagtgtgttatcctcaaataacattggtacaatgggacgcactgcccaatgccccaatcttaaaatggttaacctgcttgtcaaaatccttttattagaagctttg

SEQ ID NO: 40858 - DNA, 269 bp, Glycine max
  unsure (1)..(269): unsure at all n locations
gttataagaatgaattattacgatagtcttgggttaaattactcgagtatagatntaatagagttaacaaaatttagattgagaataacattttgttgggttgcaaggaaagcctaataccacaaagatctttcatcaacagaccaaatgaaaatcacacaagtcatctaatataacccanaaccttaaggtattaggtgtacaagtcattgcaacttatatgatactcaagtaactcaacttggacattcttattccatgtggaactt

SEQ ID NO: 40859 - DNA, 423 bp, Glycine max
  unsure (1)..(423): unsure at all n locations
atgaataatgtttttagataaaattgccctcatataaaatgggcaaggacactctgcgctntattcaagcaacaaacaacatacttgttcgagttgctttcaacaactttaaaagtttgatacaccttcataacatatttgttcagtgcattttttaccgcatctntagtatcaaaattcatgccaacatataatgtttgtccaacattaaaactcgatgacatctccaaaccacaaatgtcttcctcatcaggatgactccagttgatattgttataatgcaaagcatcattccacaatggattttcaattcctggtacacctaatagttgaagaaaaatcatatcatacttatttaacactaaatagaattgacatcatatgataaatgtattcacctattcttttatctaatatattata

SEQ ID NO: 40860 - DNA, 411 bp, Glycine max
ctcttcttcgggagttaaagattgacaatttacaagaggatttggaacaaatggaagctttgaccacccttattgcagataaactgccataacaagagtgccattttcaattagtcagataaaaaaggattggatatatctctttgtgccgctatgaaagattctcacgtgatgtgtttccttcaatcatttgggcttggatggcaccaacaaataatctctcatctcgcattcaaacatttgtagatgtgtcatctcttgtttctttagacgtgcccaatagtagcctcccatcttctatcatatatttctaaggaccttccactgcttcaaagtctttgtataaacgtggctcaaaacttcaactttctctaaatgctgcaaatattatggatgccttatattccccaa

SEQ ID NO: 40861 - DNA, 374 bp, Glycine max
  unsure (1)..(374): unsure at all n locations
ctctctttttctttccatcgcctctttacctaggtgcattncttctaagctctgttgttctatagaataccaaagtctgtttggggaactcttggttaacccaaggacctttgtttggttttgtcgcaaggattgggaaacttgtggtgacctgacgtacattttgtgtcgtggtcactggtgctcataaggtctcaatttgattgaagtaagtngtgctcactctgcagttctttgaaagcttaatgtccattgtaaaactacggtagtgtagtgtagtgtagtgtattgtagtgtagtgttcttcattttgtgtgacgtaatgttgtgtaatgtcgtcatttggatgaacaattctggcatgttttttatgt

SEQ ID NO: 40862 - DNA, 659 bp, Glycine max
  unsure (1)..(659): unsure at all n locations
gccgccattggtcgatgcattcgacccaagnaactcagctgcagctttgcgtaggactaggtatgcgctgttttttttgctacctgttactcttcatggaactgtggatttctgcagtggtcattttatattttttaatgggggtgctctagataccgaatattgagtggaaaaattcctgcttagtgaacaaattgccttttctataaaggtgttttcaattattcattctgcttttgacaaacctacacatgctttaactcccactttaacactccaacatggacttaaccttaggcctgccctttccattctgctcaaacacttttgaggattccacctattctttctgagaatggtacctctatactgactgtgtacctgccctattttttacccttgcttgaactttatctaggtgtataaccctactctccgttcctttttgtacgtgtaaaaactttctgtgagtctccctcgtgaatctattcttaagaaatatttgcaccaaacaacccccttgcttgtgaacttgctaatctacacccacccccctaggcgggtcaatttgtcaccttcacaactatctgtcgtttacctacgcattactcttttttccctaggctctcttttaagggaattcctatacacaagctctc

SEQ ID NO: 40863 - DNA, 270 bp, Glycine max
atagagaactaatgatgaagaaatggagatacaattgatgcttaacaaaagagacatacactttaaccaaatctgtccaaacaaaagaaccaactgcacctcacagtattaatgattataatacgtcttataggtagggaaaaaggttatctatagaaattttttaatatttcgaaaagggattaaaataatttattatagcattgtcatatcgctaaaaaaatttattattaaaaaaatttatttaaaaacctttaaatcttttaatat

SEQ ID NO: 40864 - DNA, 821 bp, Glycine max
  unsure (1)..(821): unsure at all n locations
ggctgccaanattaatctgtgtgtcggcccattatagtaatctgcctgcatgcctgcttctattcaacgantccatcggctgtgagttcttatttcatgcctgaaccgtccccccattccattacatctttctaagaaagaagccctatttttgaaccccttaaggctagaagaggtttctatgcggccgatgggtcgtattctgacataagaccctgcaccctagattgtatgttgaccttctgaccgtctggatcatttggtaactcctttctctgctgccctgacgactccccccttattttccgtgccccccaccttaatcgccgcatttcttgagcctatcccaaccttattgcatttgtactcacaggtctgactgcgtcccttaaatcaccatgtcgctcgaccttgactgattaatctgtatgcagtcatgtacgagcaatatctttttacattgttgtatgcatagttttccggaaagatatatacactctatgttatttgttatccgtttacctccgaaggaggcaatgctattcaacgcttgggtgttgagatctcctacttctctacgtataattagtgttttcgtttgcggggtaacaacatctttttctgggggaaattttgctccggaatgtgacccccctaggaagcgatctttttcgtttccacgcctttgttccgggttgccagaggaggacatattccaggcgctcaatttagttggccccgggcactataccacagagggtcttccccgttcttacttgctctgaggattgttcgccgaataaaaattccctctgtacact

SEQ ID NO: 40865 - DNA, 410 bp, Glycine max
  unsure (1)..(410): unsure at all n locations
acctgattgtgtgaataatatctttgtcttcagcaacatccaagacaaatgagtgactaatatgtacagagtacttgaacctgagcgcccaactctttctcaataattcatcaacactcggagggacaaccttgacctcatcaccactctatgattgaataaacaattaataagaccaataatgaatatagacaacacacgtggatgacactatctcggataacatattaactgtgtaacccatatactacgatcaactcttgtcgacactgatcagctcttttgcaaagattctgatgcatgttccataccaaaaatggaactctgtcttttccctatggtgttctcatctcaaaactaacttatacctaacacaatctgtgaccttatactanacactcgaacaatat

SEQ ID NO: 40866 - DNA, 416 bp, Glycine max
ggatgatgccgatcgagcatgagctaagtttcttccttcagatagctactcagggattgaaaacaataaacaatggccggtgtcggcccttatatggccccgactgatatttttcagccgacattgcgcaatttcttttacaaacgctggccgataataattttttttttaccgaagaggaagctctttgtttttggagttgcctaaaaaatttacaacgaagtcggcaagggttttccgcgcgacctcaaccgagggtgcgatccaaccgacactggcgtgttgactatcttatataggaggcccacaaaacgtcggcacaccccggccaaaacaaaaacaaaatattctccacaattgatcgaaaaacatgatatctgacgtccgcatggagagatgaccgatcgatgtctaaa

SEQ ID NO: 40867 - DNA, 319 bp, Glycine max
tcatggacaagtgtcttttgaagttgcagaccatattttgagaagatccaacggttaatgaccgctgggcatcattattaccgaggaagctccatgacgctacctataacaccttcattaagaggcttctagcacactccacacatattcttatagatccctacggtcagatcatggaatagtgtcttgcgaatatgcagaccaaatttcgagaagatccaatggttaacaaatgctgtgcagagtttttaccaaggcatctccatgtagctttctctagaagcttcattaataggcttcctccataagcttcctcatg

SEQ ID NO: 40868 - DNA, 251 bp, Glycine max
ttccacatatttccttgtcggatggggtcaatttgtcgcccttgttttatgaccagaggagggaggagatgaagttcccctccgcggcgacgccccgcaccgtcatttcccggctggaggaggtggccaacgccgggaagttctacgtcaggagtagccagaccactgtgaggctttagggtcaggaacgtgggaggacagggaagctggccattgccgccgatatctactccgtgacgccctcgtttatg

SEQ ID NO: 40869 - DNA, 403 bp, Glycine max
tctttcaggatgcctaaagattgacaatttataagaggagtaggaaccaatggagtccttgacaacccttattgccgattaaactgcactaacaagagtgccagtgtcaatagttagattaaaaaggatcggatttatctccttgtgcggctatgaaggattctcacgtgatggtgttccttcaatcatttggtcttggatgtcaccaacaaatagtctctcatctggcatccaaacattagtagatgtgtcatctcttggttctttaaaccggccacataagaccttcaatcttctatcatatatttctaaggaccttccactgcttccaagtctttgtataaacgtggctcagaacttcaactttctctagatgctgcaaatattttggatgctttatatg

SEQ ID NO: 40870 - DNA, 277 bp, Glycine max
catttcttctttttctttctttcttccaatccatttctaaagttccaagtactttctccatcacccacatccaccattatccaccacaaaccatcattgttctccattgaaaacccacaccgagaggaacccttcaaccgaagcagaatttccaacttggcttgcggtttcggtagagaaacgaaaccctaatctgatctttcgttttctttcgaggtaaccatggatctatgcatggttcttgttagatccatcttggctttgcatcgtttctaac

SEQ ID NO: 40871 - DNA, 469 bp, Glycine max
gctttgagcaaattcaaacaacaataactttttactcagatgtctgattgcgtcccgtaatatatcgagacgctcgaaattgaatgttgaagctctgagccaattcacacgacaataactttttactcggatgattgattgagtcccgtaatataacaagacgctcaaaattgaatgttgaagctatgagccaattcaaatgacaataactttttactcggatgtctgattgagtcccgaaatatatcgagacgctcgaaattgaatgttgaacctctgagccaattcaaacgacaataactttttactcggatgtctgattgagtcccgtaatatatcgagacgctcgagattgaatgttgaagctttatgcaaattcaaacgaccataactttttactcggatgtttgattgagtcccggtatatatcaagacgcttcgaaatgaatgttgaacctatgagcccatt

SEQ ID NO: 40872 - DNA, 398 bp, Glycine max
  unsure (1)..(398): unsure at all n locations
tcaacattcaatttcgagcgtctatatatattacaggactcaatcaaacatccgagtaaaatgttactgtcgcttaaatttgcttagctctccagctttaaatttcgagcgtctcgatatatgacgggactatatcagacatccgagtaaaaagttattgtcatttgaatttgcttagagattcaacattcatcttcgagtgtctcgttatattacgggactcaattatacattcgagtaaaaagttattgtcgttcgaattttctcagagcttcaacaatcaatttcgagcgtctcgatatattacgggactcaatcaggcatccgagtanataagtattgtcgtttgaattggctcagagcttcaacattcaatttcgagcgtctcgctatattac

SEQ ID NO: 40873 - DNA, 290 bp, Glycine max
gcttggattaccttttagaaggaatctttccttcttattatggagccaaacccactccccctcattaagaactagctcctttcttcctctattgcccttaaatgaatacacactttgtttggttctctatttgggtcttaaccctctcatgcaacttctttacaaactctgacctagattccccttctttatgtataaaagaactgtcaagtgggacgggaatgatgtctaaaggctgtaaaggattgaacccctacacaaccttaatacgggattgcttggtggttcta

SEQ ID NO: 40874 - DNA, 392 bp, Glycine max
  unsure (1)..(392): unsure at all n locations
atctttctcaagcccataactagagctctatgataaagatgtcatcanggatgggtctgagataccatgcttcaacaagttaacctagatgatacaagtacagcatgagtcaatccttttagttttcaatatactaatagtctttacaacatacaattataaaagaattaagaatttgcacatgatgtacaaggattttaaattaaacaaggaagcccaaaatactgcaaaattgctaccgaagacaaaaaaagttaatgaaatatttaatataagtagtcaagacaaaatgcactagccaataatactattactaaccaagaccctacgaanacaacatatgatatggagaagaaaaatgatatatacacactatcctctatgtgtcaacg

SEQ ID NO: 40875 - DNA, 428 bp, Glycine max
agcttggttcgaggtacttacccgttgaagatcgaataacgatgaagaacgaatgaagaacgtcgaagaacggttgaaatctttgcgaaattcctcacggaaaacgttactgatacgtttcggaagcgcctcggcttagattttcttcacgaaaacaatttttccaagcaaattcgaaagagagagaagtgcctaaggggctgaacccttttcttcttcacttcctcccctatttatagcaaaataggggaggtggttgccgcccagctcgcccaggcgagctcagctcgcccaggcgagctcagctcgcccaggcgagccaggttgcttcctccagaagcaaccgccttctggaggaatattctggagggcccaagtgggcctgggtgctatttgcacccccatttttactaagtaaacccccctct

SEQ ID NO: 40876 - DNA, 287 bp, Glycine max
  unsure (1)..(287): unsure at all n locations
agatggaccatttcaagtgctnganagaatcaatgacaatgcttacaaagttgagctgcccggtgagtataatgttagttccaccttcaatgtctctgatttatctctttntgatgcagatggagaatccgatttgaggacaaatccttctcaagagggagagaatgatgaggacatgaccaagagcaagggcaatgatccacttgaaggacttggaggacctattgatgaggacatgccaagagcaagggcaaggatccacttgaaggacttggaggacctatgac

SEQ ID NO: 40877 - DNA, 267 bp, Glycine max
agctcaggagaaagacgcctccagacgtcgagctctctattcaatacatgcggatactgaacatctgttataggggaaaccctctttctatactcattccccccttcactggcattatccattcatcttctcccattaacatgaatccctataatgtgaagtctctctgtgactatgagaggctacacccccgttgctgggaacctatcacgcggatgcccataccatgtagactttccgtactgtgtctttagtacaaagccaatt

SEQ ID NO: 40878 - DNA, 353 bp, Glycine max
  unsure (1)..(353): unsure at all n locations
tcttcatntatgtccttcaactctcgcattntctgcatctaagttgcttcatatgttgccttcaaagctccatacattaagtctctaatcattgtccctcctccaaaccattatntgaagttgttgtacaagtgtgcctaagacaaaatctatgttgagctttctctcctatcatttctctgacacaataatccaacccttaacacaaataattacacgtgttaaataacattaaactaattaaatatgtacatcattaaataacacacttgcaatgtgaacaaacatacctgtatngatatgagtaaaggaccannaatattatatggatcccatatatcttgaaaagtagt

SEQ ID NO: 40879 - DNA, 441 bp, Glycine max
agcttaacaactgctgcaagggatcccgttacctatttccctcgactaaatcttcgatctcagcatcgttagctttgaccaaccccaatgttcctcttaaacgcctatcctcagaggaattagcctctcatcgcgattatggcttgtgttaccattgtgaggagatgtaggtccaaggccatcgatgtaagccccatcttcagttattcattgtagacgaagatgaccttgcagcggagaacccatcaactgagcaggaacctccttcacccatttccaaggttactacacctcaactcagtttgaacgctttggctgacatgcctaggtcgaaaacaattcatttataacaacatcagcaaccatcacgtccttattctcgtggatgatggaagaaccccgaactttgtccaaacccatatcgcgaagttctttccctcc

SEQ ID NO: 40880 - DNA, 305 bp, Glycine max
caacatagttgacacggaagggatatctcctctatatataagcataacatcatatgcaaaagccaaatgagatagttgaatacctgcacagttgggattgaaattaaaattggcatcatccttgaggctgctcatatctctggaaaagtgctccaaacagagcacaaacagattaagggagagaggaatcccttgtctaagaccccgctatcctttgaagtgaccataaatgaatccattgactgccacactataggaagtggaagaaacacattccatgatcaaagtacagaactgggctggga

SEQ ID NO: 40881 - DNA, 978 bp, Glycine max
  unsure (1)..(978): unsure at all n locations
cggccaacaaaggcaaacgacgtatcacacgacacaccacgtgccactttcagcaaaatccatccccaactaccaaagacacgcccatgtgtcacgcgctccgcccccaaanaaaagaacgccgcagcaaccatcaaaaaaccaacacagcaagaattttttatccaacaccacaccaccccggacccaggaggaacaccacgacagacaaccccaccaaccacaccgaaaataaaaaaacacgctaatgcagcggaggtcataagcgggagcaaatcaaacggcaccccacaacccacgctggagctagaccaaaccatatcaaacaccacctcctcagacccgagcaaggggagaaccactaaacgagccccaccagagcccaacaacactgtgaatgacccccccccactcaaaaaagaacaccgaacaaagaaatcattcacaccccgagaccacagtaacgcacaagctcaaaggaagccagcaccacaaacaacaaataacgccggtcgcgccccgagtacagccaaccaatcgacccgcgagaaagaaaagagccagtagacaacgagaacatcttacaaacacggaccattaccaagataacgctgcaaggccaggcttataaaacacccaaacagtcaaccccccgagacacaaaactaaggacaaacacgcaggtggcctcgctagcgcacaagccacctgaaataaaacaaaacgcctatcgggggggacagcaaaccgggaccagcccaaacatgacgccgcgggacgggctggagaaaaaatcgcaaggacaccaacatcgccacacaagcgaacttaccgaaaacagcccctcaacaaaaaaatagatacaactgcaataaccaaaaatactactccccgcttgacgcgcgacaaaacacacacgaccaaccaggagaacaagaangacaccacactaccaagactcgaacagacagcaccgcg

SEQ ID NO: 40882 - DNA, 299 bp, Glycine max
aaactaataaaagtgtttcttaatagtaatttactatgactaaatgattaaaaaattaagataaatttaatatcatttaaagataactagtgtgttcgtggacatctttatattattatgacaaattattgtaaagtagtttgtatagaaataaatatattttttttttatctcttaacatcataactatttccaaatctctatatacattatcaaaaagaaggggccttgggttatcaaggtgctttcacaactgtttgctatatttaaactactaatcagtactagatgtgaaaaga

SEQ ID NO: 40883 - DNA, 1028 bp, Glycine max
  unsure (1)..(1028): unsure at all n locations
cgcgcgcctcatgtgaaatgtttatacagactcaatctactcctgatgcacgctaccactctgttattagttagatactctttactcatcnncctctgtagccctgcncnnatttagacagcggtcgcccgcnccacctctaaaannaaactgcaggatgcaagccttcggttttcatattcaaccgtctcggatatgttatgtgctctattcgacctccgagttaagggtattgtcgtttgatattattaaactgtcccttcccagaaactaaaaatatctaaattattaacgggaacaccagaccggacaccccgagtgaaatagaaattggcccttgaaactctctcagagcgtgctatatatcaattaccaagcagacacgatataattaccgggacccagtcggacattcaatcaaaagatattgccgatagaaaattgctcagaacctcttgtttctaaataccaagcgccctgatattttaccggactcaaaccggcttcccaagtcaaagttattggcgattgaatatgctcacggcttctgttcttcacctacgagcatcttggattaatatcgggacacaatgcggacatcccaattcataagataattgtcggctagacgtttgctcaaagcttctggttttaaattactgagcgttccaatgaattgacggccactcatccggtcttcccaactaagcagttgttgtcgtttgattatgaccacagctttagttgttaattacaagggtcctgatatctcacgggaaccattcggctctccgatcaaaagttatagtcgttcgaattttctcagaacctccgattcaataatgaccgtgttatattcatatgcgacaccatcgggacattcgaagtaaaatgtattggcactgggactgcttcgcaagctctttatttacaaaaccgagcccttcggatgtataacgggcaccaatccgtcatcctataataaattataggggcatgactcttctcaagctcttgctaaaaacaaa

SEQ ID NO: 40884 - DNA, 1049 bp, Glycine max
  unsure (1)..(1049): unsure at all n locations
cggacaactaatgatgacctacccttcggaaacnccngnaancantaaaatacatactgcacgcagtgctagaccttacaacccgcagggaaaggagtgccgtgttcactttttctcctctgacaaatatctatctatacccagacaacggttagcattcgacacaacacccgaatgtgtccctctcataacgcgctatttcttctaatgtgaattgaggccgcccccactctgccaattactggcctcagttgattactcattcggagagtgaagatatgtatgttccaccggcgccttcacgatgtatacacctccacactttcagctatatctcacttgtagtaccaaatacatgaccattggcatagtgataaaccctaacacacctgaacacgagatccttcctctcccccatattccaaaagttactacatcctcacacttaaggtatgactcctttcggcttgacaccgccataaggctcgataactatatctatttattatcaatccatacatccacaccatacatcgtgtctgactatctctatggatgagagaatagataaccccgtaacttctggtcctaaatcacactatcttacaatgtattatttactctcgcatgaccgacctaaaccctgtggaatatcatatattgactgggatatatggattcatcatctgactatgacatcctcttgccctcgatggtccgataattataccaggagcacacgtttttactgccattttaatgcactccactaccaaacaatcaacgaccttcatcctgataaaatggcaagcaacatctctctcttcataactggcaatctacaaagaacaagtatccaacccgcaatcattgaacgtgctcaatcatacgtctcttgccgtatcaatgcgaacttcatcttaatggcttcttcacagtattcggtcgggctgggcatagtatactcaaagactataatctctcgtgctatacgtgcccctcgatgtgataaaatcttgtgtgccctacatcctgctcgctcccccccg

SEQ ID NO: 40885 - DNA, 918 bp, Glycine max
  unsure (1)..(918): unsure at all n locations
ctgcnncatttagactactgtgtccacgncatcctntanagtagaactgcatgcatgcaagctttgcacccagaggtacgcgtgtgagcattgttcttgttttgaaacacctaatcctgcacctagggatcacgttgaaggctttcatggtctgtcactatgcaatatgattaacttgtacgtgtcgaaaaggctatcctctatagcaaaataacttgaaaaacaaccctagcgttggggttcggtgtgttacgttttcatgctataaatcaaaagatgatggaccttcgttctttatcgcttacaaaacttactttgcaatcccttgctatctcatctcggagcaagacagatgacagtgtttggatagatctgcgctcctatacttcaacagtccttcaagtgcccttagcgtgcgtctaacgttctgctatgtaacttcaaaccacgacatgctcataaataatctaaacatagctaaagtgggtttactattaacaagaatcctcaaatagtattagatgccataaagcggttatttatccttacacaaagctcgaacacggaggttttatcgacgagattgcactcgcgtttattataataattattagttaacactccctcgtacggccacggagaagaacaataactattaggctcggggagcttgagctcagaacctcttttggattggtaagaattccattcctctttaagttagagttgaaccaatagagtagcggaaccaatgtgggggtgagaacacaacaatattaacaggaaggcgtgctcaccgccagtcnttatcatgggggtatngatttctctttatcatacaaacacaagattatcttacacttcgggatcatccctgttattagagggtatctttacttccaaacgaattgtttctcc

SEQ ID NO: 40886 - DNA, 586 bp, Glycine max
  unsure (1)..(586): unsure at all n locations
gagtngcnnnaatgtagccatgcagnacctgatgcctttgacgtagccccgggaangcggcnnccggagtgtgtatataagatccaattgttcactcgatggctttgtgatccagatccacttgctatcaggaggctctacactcgtggctcccacgtatatactccgtccgtacgtatttataataagactgacatacccagcaaattttcttgtccctgtcataagacttcattagattgctctcctattaatcatgttttttgtactgaaacttcataaagttgctcttcttccgtcttatgatgattgaagaagatgagtaggttgtcaataaagttaatgatcacctcgagacaatattacttttggaaagttaaagataggagtataatcatggacaaatgtaagtcgtacaactatgattatntacgtctctaactatacgtcaattactctactcgggacgtatgaggtagggcacgagggaanataggatatactctgttgtgactctctttatgcactcttcaattactcgtctgtttgccggtaaatagacgaagataataattgcgcagttctn

SEQ ID NO: 40887 - DNA, 836 bp, Glycine max
  unsure (1)..(836): unsure at all n locations
cgggaccgcnnattggatngtcggtcagcaacnccgngatnatatagagtcgagctgcatgcatgcatgctggtgcccatgtacccccagaggggtgcattttttgtcaaagancagcaggggagatgcaggagaacatttaccacaaacgcttgctcccccgcagaaactttatttaatacattttgaagcgctcggggtcaaatgtatccacgaaaaccgttagcatttatatctcttgcataagaaaaacaatccgggggcgccaaaagggcctctcgccgacaatggcctcttataatgcatagaagtgcagggagttggaagccattttctcaagcaaactcaacgcgctacagggggctcatctcccacaggcgcgtcacgtgggttcctcaataaacacccgcccttgggagtaaatgccgcctaaaaaaaccgcgcaatgagacggcatatatctcccggtgatgacacctagcccacccntcctatatctgtccagtgctcatacatgtgccttcccaaaattgcatgacgcccgaaaatttttttctctgctcggcgcagggccttggggaatcttctagacccctctaaagagccacatgtgggaacgaacttgttaaacgctagccccgagtatatttcgggcggccagaagtggaagtgccctaaaggtacatttcccgtacccccggcttcttgttttataccaaatttatattctaaacctgaacagcggggacttttcacatttccagagcaaaggccaaaaatgtgaaacacatggcccgtgtgttctctaacaaaacccttaggcatagcgttccccg

SEQ ID NO: 40888 - DNA, 275 bp, Glycine max
agatggcccacatatattgcggtgattcgcatgcaacaatgatgattacgaaattttatgtagaactggtcatgcatgcgcctatgtggacactcaagcatcagattatttatggtcatgagacactaaggctgaagatatatatctcctacttaggtcaagaccatgtttacagaatatgctcattgatcgattcatgcattcattcgactccagtttgggtgtttctggaaagattcgcagcattcacacttcgggtccatacacattttttc

SEQ ID NO: 40889 - DNA, 802 bp, Glycine max
  unsure (1)..(802): unsure at all n locations
acgccgcccggaacggtaacttgtccacaatcaccgatctatcaccaatcctaatcancacagcnnccgagacgcnnaatagcatgttcacgcaatanaaaaaatgaagagcaactacctaaaaaaacactgacaaatattttttttatcatcacacgctaaaggacaggaacacttacataaaaccccaatcccaaaaaaaaaaaaaaatttaagcccggacataaaccgggtaaagaagtagaccgaaccacccaaagatcatacatttaaaaaaatatccttaaaagaacacgatcgaacactaaaggttaaaattgaacagaatctatagcagcccattagatataacgaatgaatattcaccttgatcatatccacttaaagacgcccaccaaacaaaaatacccgtagtcccatcgccccaaaaggactaacacagaaatgcaacaaaattcgtccaaaaatcctacacacgtgtcaaactactataaaagccctggaaaaaggcaaaaccgacgaccacgtacttaaaactagtagaaacaagagtccctgtaactggttaccacttacatagcgcagcccctaggaaattattatatagcaccaaatgagcatcaggcgcgtctgagaaactataaggacaacacaataacaccccgaccactatcaaataaacctatccaattaattgaaacgcacaaaacatagaacataccccacccgtggaaaaatacaaacctcctcctaccgaataaatattaggacaccaactgtaacaccttaaaaacaaaaaacg

SEQ ID NO: 40890 - DNA, 261 bp, Glycine max
  unsure (1)..(261): unsure at all n locations
gagtatagcgatgattctgcttacagactatctctatcagaggacacacaagctctcaatcagctggtatgcagctcttgngctattattgttgtttaatctaccctttatctttgtgtgagatnnttaaatattaactggctttgctaatacaaaatgcagaatgctcttacccaagagggaaaggagatggcatcagtgctttacacatatcgtagctgtgtcaaagcactctctcacgtaagttttctcttaagctat

SEQ ID NO: 40891 - DNA, 375 bp, Glycine max
  unsure (1)..(375): unsure at all n locations
acgacaattacttttaacttggatgtttgattgagttccgtaatatatcgagacgctcgatattgaatgttgatggtcgttgcaaattgagacgacaataactctttactctgatgtctgattgagtcccgtaatatatcgagacgctcgaaattgaatcttgatgctctgagcaaattcaaacgacaataactttttactcggatgtctgattgagtcctgtcatatatcgagacgctcgaaatntaatacgaaagctatgagcatattcaaacgacaataattatttactcggatgtctgattgaatctcgtaatatatcgacacgctcgatattgaatgttgatgctctggtcgatntcaaacgacaataat

SEQ ID NO: 40892 - DNA, 897 bp, Glycine max
  unsure (1)..(897): unsure at all n locations
cgcccgcgccgaggttatgtcccgtctcacctnaccctacgaaacaatatccatacctactatcactctcctcctctccagccccgggcaatgtgtcgcgttcgcccaccccccaaaaacgaagctgccgcctccatcctatatacggggggagacgtttatttattaaaccctactccacgactaagaaccctctgagggctcaaaagttccaaacctccagcatgatatattataacgtgttgaagacgtatccttcacgacgaagaatcgtggaaaacaccccaacggcaccgagcgcgggttaacctataacgtaaaatacaacaaaggagtccagtcgccgtttaggcttaaacaaacgtacctggcgcaacccctgaaaacccatcaccagccagacacaagagcggtgcttgtggtattgagtcctttcactccaaaagcggccccactaagccccaaagaagggcctcacgcgactgagttgaaaccccacacaccaacacccaccgaaaacgtcgagactaacgcggtggtgtgccctcatccacgacgcacgcaaagtacgtcacgcacagggcgtcctatcactaacccaagcccgagctccaggggcttccagcacactcgctcccctacagtatataaaaaatcgccgacgccaccgtaggcctcgcggaaacaagacccggaccccgggctgtccgaacccccccgaaggaaaaacctctcctcctaaaggacaacccaaccggatgagatagcggcgagtggacgcaactcagaggaggggggcctccagacgcgaatacggggcgagaactccaaaaaaaggaagcagtcagctcgccgcagcttccaccatagatggggtgcacttcatcgtggtgctcc

SEQ ID NO: 40893 - DNA, 199 bp, Glycine max
tgcatcaataacttgtcatcccacgaatatgcacccatcttacgacaatacatatttaggtgattcttatgacaagtcgtccctttgtacctatcgaagtcacgtaccttgaacttcggagggatgacgacgtccgacaccaggcatatgtcggtcatgtctgctaacggattatttccaaacccttctacagccccta

SEQ ID NO: 40894 - DNA, 546 bp, Glycine max
  unsure (1)..(546): unsure at all n locations
ctgcaagcttatactttcaatatgagttctcccatcgtgtttgtgacaatggtttgagagttagactagaatatgatattggtaaaatttttcattttttattgaagaagaaaatatattatatatgcatcgtagtactcccgaaaaagatgtaattttaggacaagagttagtcatatcacaaaataccaaatttagactatgacaatcacgtggagtataaaatgatcgataattaaagtctaaaattcttttttgcacaccttgatgttatcctttcatatttgattcattatcataaccctgtcctcttaagtaattaatatcaagtgaaatattatttatttcattcataatagcttcaaaaaggcctttntccggttgtatcatctacctttaaaaattataaaaaaaatttcaaaaacttgtatttgaattgaagaaacatctacatatcataatacaaaagtcatttgttctcgatgacttatatcacgaggacaaccaagtatgattgaaaatattgtgcattattgatatttttat

SEQ ID NO: 40895 - DNA, 305 bp, Glycine max
  unsure (1)..(305): unsure at all n locations
cctctcctaagatacaggaattttcataagtccgctcctattcggtcacatcatctgatatcagagcttcggctcttgatacaggttctatcctatcctatcctttnnttttcttttatttctggaaatttgtccttgtcttgctcttgtttgcgtcttgttgcgttcttgtttgtgtctatgtttcgttcttgttcttgtatgttcttgacacattttttttgttcttgtccttggttcttgtgtctttcagactatgtgtaaaaaaaaatctatttgagttttatttctagttataaaaattg

SEQ ID NO: 40896 - DNA, 410 bp, Glycine max
aacagtggatatattgtaaactttactccagaataaattgtatacagtaacagcaaaagccgttacgtggatgcaatgatgattgtagtttgtagaaaacataacctttagagaggagaacaaatccaatattgtgaaatttggctttaagctttgtttaaatcagctttagaacatcaattaaatcatgtcagttaaggttttttatttttattttgatgacacaagtgagggacatataaagataaacaaaagtgaacacaaaggagaacttgaaaaaatatcaatgaactgtaaagttcactggaattcattttaaactatttgctggcgaaaattacttgctggctcaagtaaggttatttttccagtaagaaacaagctggtgtgaagaactacatcatgaaaaa

SEQ ID NO: 40897 - DNA, 340 bp, Glycine max
  unsure (1)..(340): unsure at all n locations
atccacatactctaatgatatttctataccacaaatgtgggacttaagctctctattacgttggaaaatatcgccaaacatctctttgttaaagatattggaatcatttttaacctccttgaagtaccccgcaatatttcctcttcttctaaaccaagcataaccaactgatgtgccattattntctcctatttcttaaccctttttgcaccattttaagtactgattaatcttaattgtcaaattaagtaggcagtgttattattcgggcccatttagctaatctgatgttttaatctaatttcaggaattaatgaagcattgggcttgaatccagaat

SEQ ID NO: 40898 - DNA, 253 bp, Glycine max
actcctcttctttactaacaacgctcttgagcatgaaaacatgatattctgatcctatgccccccccaagaatgctatcttttgaatgtttgggatcctaaagaaaagttaaattaagagagaagttttcgaatgatgagaccaccacctgcagagaaggtttatgtgccataatgccttttaatcttctatcatcgatccagtgagccccttaatgacccatgaaaccagtagtgaaatcctatagttacat

SEQ ID NO: 40899 - DNA, 322 bp, Glycine max
  unsure (1)..(322): unsure at all n locations
acctgcaatactccctccaaaatagccgaccatataccttacattcacacatgcacacactcaagatggaaaaaagaataaaataactttaacgggcaaaaatggcttctccaattcctggtatgtaagctacaaccacttacataanataattgtataaaaaacaatctcgaaccacatatatntaaaacaaaaaataggatggaagagacataagtgtaaacttatagagagagaaatggaaatacttgagaaatattggacaagaatgtttgctttgcataatgaattcatgtggaggtggcctttacaatgaccctgc

SEQ ID NO: 40900 - DNA, 505 bp, Glycine max
ccaatggtgggttgccttagaaaggaagaataattgttataacagtctttttattttttatattgtggttcagttttgaaagttttacgtgaagtttttatgtctctttccattccgtctctttgcaccccatgcccatcactcaaggcctagtaacctatgccaaacacaaccaactaatcacacataaaacatggtttaaacataaacataaatataaacatggataaaaataccacaaccatcacctcataattaattaattacacatttaaatttaaatttaattacacttgctaattaattaaaaccacttaatcatacatgatgaaaaacatgatttacaaacaggatgttacttgatgggttgagactgatgtgccattattttctcctatttcttaaccctctttgcaccattttaagtactgattaatcttaattgtcaaattaattaggcagttttattattatggccccttcacctaatttgatggttttaatc

SEQ ID NO: 40901 - DNA, 426 bp, Glycine max
acttttcagatgaaagtcccattcagccgcataatatatctagacgcttgaaattgaacgccggaagatgatgagaaatttaaatggtcataacttatcacgcggatgtctgattcaggccaataatatatcgagatgctcgaaattgaacaatggagctctcgagaaattcaaatggtcataacttttcaattggatgtccgaattaggcgcatcacatatcgagactctcgaaatcgaacaacgaaagctctcgagaaattcaaatgggcataagttttcacacggaagttcgattcaggcgcataatatatctagacgttagatattgatcaccggaagctcttgagaaattcaaatggtcataacttttcactcgcatgttcgattcaggtgcataatatatcgagacgctctaaattgaac

SEQ ID NO: 40902 - DNA, 428 bp, Glycine max
tgctgcatgctagctttgatgcagcatatggagaggctaatgatataacgttatgatgcgctgcatgacacgctcgctcaatatggctaatcgccatccttatgaggaagaactgacgacaacacgtaatggatcgtgttcctagacaaaacctgattgatcgttttaaacttctcattcctccatttaaaggaaagaatgatcctgaagcctacttggagtgggagattaaaatatagcatgttttctcatgctacgactatgaggacgaccaaagagtgaagcttgccgccacggaggcttcctactatgctcttgtgtggtggaacatgcttctaaatgcgacatccagaaacgaccagccactgggtgatacatggaccgagatgatatacatcatgatgaagcggtatgtgccagctacttac

SEQ ID NO: 40903 - DNA, 293 bp, Glycine max
cgcatcacatatcgagacgctctaaattgaaaaccggaagctctcgcaaaattcacatggtcataagctgtcacacggaagtctgattcatgcgcataatatatcgagacgcttgtaattgaaaaaagaatgcgctcgagaaagtcaaatggtcgtaacttgtcaaacagatgtccgatacgtgcgcataatatttcgagacgctggaaattgaacatcgtatgctctcgagatagtcaaatggtcataacttatcacacggaagtccgattctggcgcataacatatcgaga

SEQ ID NO: 40904 - DNA, 948 bp, Glycine max
  unsure (1)..(948): unsure at all n locations
gaacagggatgacaccacctctaaaaaatacctaaacacctgaacaattatgtccctttttnatcccctaattcagcacgcnnataggtcctggcctccgcaccccaaanaactagagcagccagcctctaaagngagtgcgaaaaagggttttattgtcccccgccccttgccctctggggggggaaccagctagagggcgcactcgcaaataccgcgattaataacaattcttcgcatcctccccatgcccaatactcctgggcgagtaacccatgccccgcacccacgaacttcaacacagcccaaacgagtggcgaaaaactttgccctcatgtataaacactgtgataagaacaatgcaccaaccctctcgcccttctacttatatttactcacaccatctacaattttgcaaatgacgcgcccctgcgacaaaagcccatcctctatgacgagcccaatgggcctttttcatcaagaaacgggtgaccaccttaaatctggaggcccgaggcccatcaccaggaattaattctataaaccagctgggaccatataaaaaaccttctacactcgtggtgggaaatcaagctcccagacaaattaaggtgagcccagtcgctgtacatctccggggttattcaagaattaggagtgaacaaaccctcccgctcaggctcataaaagagaagggactgaaacaggcccctcatttgtccgttccgatataagtttggtacacaaatattaaaaaaaacttaatggcaaaaaaagctcccacgagctcgtatggaaaaaacctcactacgagccatgcctaatgcgatgaaaccgcctccaacaaaaggaactccgaggccgatgtgcgataaatatttcatccgcaagagagaagaaagacatgcacccgccatacgatgttgatgagaccagacagctctcccg

SEQ ID NO: 40905 - DNA, 483 bp, Glycine max
  unsure (1)..(483): unsure at all n locations
aatggaatttctagggttgagaagtcaaattgagaatgggacaatattgaagcaaactctcacctcacacaagtctataacatcaatttaaacttgtttaaactggatttacgcttaaaatctcaccgaatcaaaagttgactcttcaacacccagatttaccctagaaatggctctttgttcactttggtcatttgtttttctctctagcatagcctaacctttctcataagtcctaaatggcatttcaagctaagattaactcactctaacctctaaatactaccaattccagagttggccttctagccctcaaaaattcactctntntccactcataacaccacattctcgctntctaaccctaggttaattctacccttcatctctaacagttntccataagcaatntcagcacatgaacatcacaaccatcatcataataaccatanaacagaatgggtatgntaactcttccaacat

SEQ ID NO: 40906 - DNA, 437 bp, Glycine max
ctcaagcctctctgtggtattaactcatgcgaagggctgcccttgacaaatactgagattaatactattttaggcatccctccattcattgaatccccttggagtggaaacccatcctccgcagccagtcaagcacatagtcccatgatactgaatcatatgccttctcgtatccactttaaagacaatgcacagcttctgccctctcctatcttcctcgaccacctcatttgcaattaccgcgctatgcaacaaatgccttcctttaatgaatgcaaattgccttttgtctatgaagaacggcatgaccttcttccatctgttggctagtagctttgccaagggatttaatcaaataactacgtccggatatttagaaaccttttcacctgttgctgtgaaacctgccccaatcaaataatagtgactattgctct

SEQ ID NO: 40907 - DNA, 460 bp, Glycine max
  unsure (1)..(460): unsure at all n locations
atgtgttgtttcttattgattgatgtgtgtatgaagttcaactagtagtaggtactttatttctcacatcaaggaagcattgttaattcaacgagtacacaagctgtgtactcataattaagttgtcagttttcacaactgtaattcttttattattggttatggcgactagaagtctctacacactataggtcagggccatggctcaaaggttaggctatagctcagaagagcactactttctatgaatctagattatttaattntaaagggtaaaataaagatattatagagtatatctgtttgataattntattaatacaaactaattaattaaaaaatataagattaattcgtttgtctgacaatattatagttgataactgtattacaacatgataatgtataatatacatggtattacatctaatatcattttctatcattgacatatagtatt

SEQ ID NO: 40908 - DNA, 414 bp, Glycine max
  unsure (1)..(414): unsure at all n locations
ctgcttttggggatgttggactagactttagccatgtttcacattangttgtattgtacttttttcttcccattagtctccttgaggttgttccgatatagagtctttggaacatggctcttatatgtcttctcctagtcttcctagtatatgtttcccttttctaatgcaccttattacttttgtgatggaatctatgaaaagtacaacctcatttctaagaaccttggatacgatagtcttctagtccttgaactgagcattgctctagaacattctaatgagttttgggtatatcatgtgtggatcattggagtagcccccgataccacaatatagttaggtatgttttatgttgagccctaacccttccaacactccaatggtaaaagaagtgctctatatgaatagtgt

SEQ ID NO: 40909 - DNA, 417 bp, Glycine max
  unsure (1)..(417): unsure at all n locations
cacaaggtgatgtttattcaaaanattatagtgtatctctgttatcttggtgagagtgattctcctaaattcttgagtgactcaagaacaccctggctgtatcaaaggactttcacaacctatgtgtgttgccctcgctggaaagagtgatactttacttcctatcatcttcacccttgttctttcagaccacaattccagaatatccacctccggccaaaattatctcgtgaccatatctcccatattacacactcaaattaagtgattcttgagcctaaattgaatttcaaaacgagaccttgtcacctcgtttggaatcacctcatttggagccctgtagctttcgtaattgccatatctatatttgtgtccaggcaccacttaacctacgtttaccatccattcatcatttat

SEQ ID NO: 40910 - DNA, 1164 bp, Glycine max
  unsure (1)..(1164): unsure at all n locations
ggaaagaaggtgctcttctcctttcttggtccggagtgaacctcatactaatttataacaaaaaaaagaagcntttgtgcatgcgtgacccatcttnataactgtgcagcagcttctagaanatataggggagtacatcttctatctatttcctacatcagccgcacaagatatgtaactcgtgtaattgaccccagagaagataaaacttaattgttatgatttttacccagaagcatgatgcttggccaattttttattcttaattgctccaatatgtaatcggttggaaactgcttctagaacattcaacgggggcgattccacatatgataatggggaggcccgaattccgggatgcaatgtactattggcgactcacaaaaatcgcaacatcttgatcgtctaggagatattctactggcactatgttttatgaaagctattggcataaaggcgactagacaataaaccgaacaggctaactgttgtgaatccccaggaattctggatggagaatacatccatatggttagaactgcagttcttcccagagatgttactattactgggtgccatgagatgtccggggcgtcaaattatcgtctacgcactggtaatgaatcggatctatcaatggatacctatgatcgtaccaaggatctgctcatcggagattcgagcccggtacgcgtgtctactctggagcggaaggtgggaatattctataaaaacagatcccactcaggcaataccaatatataaatatgacggtctatatatctctttacagtactgaganaggactacaatatgatatgatgctggtatggactattggtttataacactagcacacaataagacactatgcggtacgacatattgtangatacatanaatagaatggcgttactaactattgtngcggttgacacatgtctcactctcactcggctgnttntcagaatactactataagcgcgtcacagaaattncagcagtcctaatatgctctactatatacaaatatcaacatcgcgtcgactaagtatataacatccagggtattgtgcgtcataanaggtcactatcatctctaatgtgcgatgagacgngcacggaantngtatcgcatgnctctctctacnagactatatagcc

SEQ ID NO: 40911 - DNA, 438 bp, Glycine max
  unsure (1)..(438): unsure at all n locations
tcgtggcttctttgagaagctctgtcaagatgcttctttgagaatctagatccttatctatccacacccctcttttagctgaattaacctcctctaaaataattacggatgagaataacgcaacatataatcaaacatcagacataattactaataatatatagatatatatatatcagggttgtacaactctcccacccttttagaaatntcgtactcaaaatttaccttactcaaacaaggatgggtgagcttctcgcatctgactatctaattaccacgtggcatcttctcctgatgcacctcctcagatcaccttgaccaacgaaatctctttccctcttaagtgtntnggtcgcctatccttgatcctcaaaggcaatgtttcatatgtcagaatctccttcacttgaccatcatcaattaatcacatgggat

SEQ ID NO: 40912 - DNA, 275 bp, Glycine max
ccttgaaccaatgtgagaatatctatccttgccctcggaagagaacacataaagaaggagaatccccaatcaaagaaagggagaaagcaaaaaaaggaaagaatattcccaattaaaagagggagaataagacaataaaaagaagaaaggaaatcctcgatcaaagatcggaagataacagaagatatatacagaaaggtctttggaccagagaatatctgaacaatacagaattgtcaccaagaaaacattgccaaccaaaaacctgtgcgtca

SEQ ID NO: 40913 - DNA, 551 bp, Glycine max
tgccagcttcaaccacaatgttgaatagaaacggtgcttatgggtccccttgcctcaggcctctctgtggtatgaactcatgcgaggggctgccattgacaaatactgagatataagcagattttaggcatccctccattcatcgaatccacttggagtggaaacccatcctccgcaccaagtaaagcacaaagtcccatgatactgaatcatatgccttctcgtaatccactttaaagacaatgcacagcttctgccctctcctagcttcctcgaccacctcatttgcaattaccgcgctatgcaacaaatgccttccttcaatgaatgcagattgccttttgtctatgatgaacggcatgaccttcttcaatctgttggctagtagcttttgcaacggatttaatccaataactagtcaggattattcagaaacctttccacctgttgctgtgaaacctgtcacaatcaaaataatgttgactattgctcttgctcatcactggtctattcaataaattgtgtgaacaatgctctccttaatgggcatt

SEQ ID NO: 40914 - DNA, 296 bp, Glycine max
  unsure (1)..(296): unsure at all n locations
ttacattgatgtttgcatntatgggaggaggttgtatngccatgtttgtttaagggtagtgtcccactggtaaaactaactntccaatattttgccttcgcaggaaatggccccgaggaagcttgcctcanagaggtccaggaaggacaaggcagccgaaggaactagttccgctccggagtatgacagtcaccgctttaggagcgctgtacaccagcagcgctttgaggccatcaagggatggtcatttctccgggagcgacgcgtccagctcagggacgacgagtatactgatt

SEQ ID NO: 40915 - DNA, 493 bp, Glycine max
  unsure (1)..(493): unsure at all n locations
ttaagtcacctgcngctgcagcttgatgaatggtcttaccgacaaagatcttatgatctaaaagagcaatctgatcatatctttgataaatgcacaaaactaggccatgaataggtataatgaaggataagcccatgctgtgactgccattcctatacaaccaactttcccaccaacccaacattgtcattactcaaccaataacaaaccttctccttacccaccgcccatttatccacaaaggcaatccctaaatcaaccacaaagtttgtctaccgcactttcaatgacgaacaccacctttagcacagaccaaaaacaccaaccacgaaatgaattttgcagcgagaaagcctgtagaattcaccccaattccaatgtcctatgctgacttgctcccatatctatttgaaaattaatggtactcataccccaacccacgttatcaacctccattgctcgagaatactactcgaacacaacatgtgcttgt

SEQ ID NO: 40916 - DNA, 405 bp, Glycine max
  unsure (1)..(405): unsure at all n locations
ctcccgtaatctaaaatcctacctcggtttgcgtgtctgttctctggttccagtccctcgtgtttctctgcacaccatcgggccagtttttgaaggtaagcaatatatatatcaaaatgcttagaatgaaaccccgagcgtggttcagaggttggttntgttaaattntaagttgcacgcaaaacgataatgtttagactaattaattgagaattaatctataactatccagttatggatttctcttcgttaatcagcctaacccgcgtatctttcccccaaaatacctacttctaccaggagtatatatatacactgaataatacttttgtatatgatcattcaaaatgcatcatttacaaaattccgggtagaaatntccaggatgtcacaatactcccaccc

SEQ ID NO: 40917 - DNA, 425 bp, Glycine max
tcagctttctagaaactgaacaaaggaagttctctagatatttgaatggtcataacttttcacacagatgtccgattcggggacataatatatcaagacgctcgaagttcaacagtggaagctctcaagcaaatcgaatagtcataacttttcacaatgatgttcgattttgggacataatatatcgagatgttcgaaattgaaaaacggaagatttcgagaaattaaaatggtcataacttttaacacggatgtccgattgggggagataatatatcgagacgctcgccattgaacaaccaaagctctcgacaaattcaaatgggtagtaattttcacacatatgtccgattcggagacataactcattcagacgctcaatattgacaatgggaactattgagaaatttgaatggtcatacctt

SEQ ID NO: 40918 - DNA, 325 bp, Glycine max
  unsure (1)..(325): unsure at all n locations
ntacagcagattntagtaatgacccactaacttagaattaatataacttaatgccattaatctagggaattaataaaacttaatggctgagtgtaactgatattgtggcaaccaaaagtcacccccaacagccaacaagtcagccaccatttggtctaccacaaggctgatgcctatgttgccaattgtgcccttattacaacttgaactanacctactaaagcccttttagttgattaacccaaaacatatgtttggtcagccaactntacaaggatcgngccattatttagacaaactatacactctaagattgagacaaagt

SEQ ID NO: 40919 - DNA, 488 bp, Glycine max
  unsure (1)..(488): unsure at all n locations
aaagctaaatcctntgtaggcactatgatgtctaagagtctggaggaagctactgtaatcattgactccatanaagccagtgattatcaaagtcatcatgatagagcttcaactcaaagaaaaggtataatggagatggacactcagagtgcaattcttgcttaaaactaactctagatgcaataaattaaggccttaacaaagtagattggccaacttcctcaacaatatcaccaaggtggaccatagaagacacatcaagctcactaagttcaacaaattttgagatgtgatttatgtggtggtaaccatcacaatggccactctttagcacctagtgatggacaaaaagaagatgaggcccattatttgaagaaccaggccaaacctcaacaaaactttcaagaaagctaccaaggctataaaggtggctcangtcaaaattagccttatggctcgagaccacgaaattctagtcccactaacac

SEQ ID NO: 40920 - DNA, 449 bp, Glycine max
  unsure (1)..(449): unsure at all n locations
tataagaacatatatgccttaatcatttccaaatatgcatgtgaattangacgcatcaacaagaatcaagcctatgctattgtgcaagcaatcaatgtggcataacacaccaaatgattataatgacggatggctcaaattctcacaaaggtaaaatcatcactttcaaatngagctttcaaaactatcatgacatgtagagaagaatcanggatttcaagtcacaaaatgtcaacaactcttattttataacaattacccatttcttgaacatatcctataattcagagaaaaacatgcaaagtcgtacgtgcacacaaaattgacccanaatattatactgataatccgacgaaactaacaacattatcaaattaacacaactaacagattacagaaccaccaaactagcaaaccgataacactcccctccncatactaaacaaaca

SEQ ID NO: 40921 - DNA, 523 bp, Glycine max
agcttaacaaaaggcatgtgaagtgggtggaattcctatagcaattcccttatgttatcaaacataaaaagggaaaaggtaatattgtagccgatgctctttctcggcgtcatgcattactttctatgcttgaaacaaaattgattggtcttgaatgtttgaaaagcatgtatgaaaatgatgaaacttttggagaaatttttaaaaattgtgaaaaattttcagaaaatggtttctttagacatgaaggctttcttttcaaagaaaacaaattgtgtgtgcctaaatgttctactagaaatttgcttgtttgtgaagcacatgaaggaggtttaatggggcattttggggtccaaaagactctataaacattacaagaacatttttattggcctcatatgaaagaggatgtgcagaaattttgtgaacattgcattgtatgtagaaaggcaaagtctaagggaaagcctcatggattgtatactccattgcccaattcccgagtattcttggattgatttat

SEQ ID NO: 40922 - DNA, 435 bp, Glycine max
  unsure (1)..(435): unsure at all n locations
cgaggtacttacccgttgaagatcgaagaacgatgaagaacgaatgaagaacgtcgaagaacgattgagacctttgcgagattcctcacggataacgttacggaaacgtttcggaagcgcctcggcttagattttcttcacggaaacaattgttccaagcatattctaaagagagagaagtgcctaaggcgctgaacccctttcttcttcacttcctcccctatntatagcaaaataggggaggtggttgccgcccagctcgcccaggcgagcagggttgcttcctccagaagcaaccgccttctggaggaatattccggagggcccaagtgagcctgggtgctatatgcacccncacttttactaagtacactccnctctgctggtttttggtgattctttttccgtaaagttacggaaacttacgaatttcgt

SEQ ID NO: 40923 - DNA, 328 bp, Glycine max
aatagatgaggcagccgtaaaatgaactataaaaactcaaaaagggacactccatagggtctcaagctgtcatcttttggggaagtgattttctgtcaagcttgggaagagattccctaggggatgaagccatggatgtggcttgcacggaaatggaaaaacttgagccaatggtgccatcaaagcattgctggatataccataaatttaaggtcttgaagatgcaactcatagagggcaaacaatgctccatatggctacatacaatcccattctgcctgcttgtactttcgctcttaataaatccctaaatgcacgtcaaatgaaa

SEQ ID NO: 40924 - DNA, 397 bp, Glycine max
  unsure (1)..(397): unsure at all n locations
cctgactcaccatanaccttgacccagtgtgagaatgtcaatccttaccctcggaagaatcaaaggaaagaaggaagatttccaatcaaagagaaaggaaaaaaggaaagaaggaagatttccaatcaaagagaaaggaaaaaaggaaagaagaagatttctatctaagagaaagcaaaaaaagaaaagaaggaaaattcccaatcaaagagtgggagaaagcaaaaagaaaagaaagaaaattcccaatcaaagaatgggagaaagtaaaaaaggaagaagaagaagganagaaagctcctgatcatggatcgaaagataacagaagaaatgtgcagaaaggtctttggaccggacaatatctgaacaatacagaattgtcactaaatgaacaaaa

SEQ ID NO: 40925 - DNA, 454 bp, Glycine max
agcttgatgttgtaaattacctcgcttatcaatgattgttttgtaaagctctcattgaggttacaagtatcatactctgcctgttccagataatttgaagcctatagaggaatgtggattgcattaactgacaagtatttctaaaaaaataatgaaaatagcatgattgatccatatgtacatgcgcagtttgtgaacttacaccatcacaatttatactcactttggttactgctcgtataacaaagagaaaagtgaaatacaaatttctaacacgatcagggtatcttacgactcggtcatacatcgaagtaacaaagaaatgttgcatactgaaatgaaattgtgagagcgaactgagaaagataagataaaaaactattaaccactgggagggggaatgcgtataacatggtggtgggatcctccttttcattaattaaaatagttgggt

SEQ ID NO: 40926 - DNA, 374 bp, Glycine max
  unsure (1)..(374): unsure at all n locations
aatgcataatagttggatatccaacagctggaaacattgaacaaatggaagaagaaactaaagctgaagctctacaagagccttcacatcaatggactnttttaagttattcatgattcagaagatgaacactatgcttcacctccatcaagagcactcagctaaggttcatagttcattggaaaatatatgtacccgactgggaaacattgaaactaggttgacccttagcaacctccttaacctgtatgaggatgaagcttagttgtgtttaagtgcttagttcagttgtttgattgtcatttctgattatgctcaattnctgttttgtctctgtcctcttttgtaaatagttgtagtctattacaatggta

SEQ ID NO: 40927 - DNA, 957 bp, Glycine max
  unsure (1)..(957): unsure at all n locations
tggcatgtcnnnnttaagatcantgncnnnttcgacacgcctctaantcgacctgcaggcattgcgggcctagcatctacaaaaagattcgcaaggcggggctgtgactgtttgttgtgccatacacaaatcgcccgcttttatccctatcgtatgttctcagtgtgtgtataagacttcatttgatatccggcctgttccaaagtccaatatcattatatgttatagtttactgtaataantagagcactagcaagatgagttgcgacagctatggactactcagatcagcgaaacgtcgtaactacttaccacttgagtctttaagagattanacatagatgcacaattcagtgtcttactcctgacaatttcaaattataaaaaaaggttgctaacattatcgcaaacatgatgatttcgtcggatgaaaactaccatcttttaaaaataaaataacgtcttttatgcctaccagaataactttatcattccttaagaaaaataacttctttatccaaaatatatattgtacaaagaccccattctgagggggagagcctgaaaaaataaacaacgctgtgtattattgggaaaatcttataaaaacaataatcctggtggaagagtattccttttatttcgaccacttttttctacttttaaagtttgaataaatactgagggtcgtttaataaaacggcgcttaagggtgttgtgtcctcacttctcttagaactctacgacgtcgctaaaacacgctggactatacacttttcaccnttctttctatcgaaatatgaacgccgtcgtggagagcacgacttgtctacctctcgtaaaaggtnatngcattaaacccgcgccccacaaaaatggtaactcaaacaagcccctcttatcccactcccttatttcacaatttgaaacccctttaccaacagtaaaaaggcaatc

SEQ ID NO: 40928 - DNA, 577 bp, Glycine max
  unsure (1)..(577): unsure at all n locations
natgaaccttgaanaccttganacttagatgacccctggnagacctcnacctatatatggattagcccgtgccatgtttctatcgctgatatcgacgaaactgtataacacaatgaacaaacgctataatcgagggcatcttagcgagactcactacgagactactcagatgccgtgtcgtacatcaacgcatgtatgttatgatcatgcaaatcaatatcatacatcatcacgcaatctcaacaattgttggaggtgataacctcttagactcaccattcatatgctcatcatactcatatacggggagatagtgcgacaatcataacaagacattgtagcagctggtattcttgaaacaactcactaaaaactgatatgaatgtgaagctcatacataagggcaacgctaatagtaacataacattatctcaacccatctcatatcatcatgaaatcgttacgatctcaaataggtaacttaggcgcaaagttaacgaacattaatctctgtcacatcacaactgggtatttggactcgaagtgttcactagactcatatctatgcataaacacn

SEQ ID NO: 40929 - DNA, 388 bp, Glycine max
catcacatgtggtctatgtggcagtcgggcgatggtgcacaacaagttttccacatccacaatgcgcgcataaacccaccatcccctgttgttcacctccaacttagctcacgtactcccacgtagcccatatcctcgtttctctcaacaccgggtccccatcaatcctcccaagcttccacagcatccaagcgaaacaacattcatacagcacatgctatcgcagccaagcaaaacagagcaaaggcagaaaactctgctcaacaaatcaaccaaaatcacagtttttctcacttaaagaccacagtaacaattccttcgaacccattcggtaaccgttggatcgactccaaaattttactggaagggtataatgcataagcctaca

SEQ ID NO: 40930 - DNA, 402 bp, Glycine max
  unsure (1)..(402): unsure at all n locations
tgcggatatggtcttcgccagtgaaaggatcgatgtgtgtcctataagaggcaaattttatcatcctactangacgactgagagaaatggcgctaataaagagggtgaggatgagggagaaacccatgctgtgactgccattcctgtacggccaagtttcccaccaacccaacaatgtcattactcaacccttctccttacccaccgcccagttatccacaaaggtcatccctaaatcgacaacaaaacccacctaccacacaaccaatgctaaacaccacctttggcacaaaccacaacaccaaccaagatatgaattctgcagcgaaaagcctgtangattcaccccacattccggtgtcatatgctaactngctcccatatctacttgataacgcaatg

SEQ ID NO: 40931 - DNA, 401 bp, Glycine max
  unsure (1)..(401): unsure at all n locations
agctttgaatccaactcgtgcatcaactattctttatcatataggttttttctcactgtattcatcattattatatctatttagttagtggtggcttctaaggtatgccgctaattctagggtgaatatgctgcttancagtggcaaaatgataatagattcatggacaatgataatacctcatccaaaaggttaggtggatgctggtgcggataaccaatttgtaacttcttaatggcatgcctggtaatagcttttgttctaccatggcacttccacgtaaatatgttctagttgaggagtcaaacactatttcttcattcatatcttcatcactgcctaaatgatgaatgcatcattgggtccttgtatattctttttcttaaggggggggaatgctt

SEQ ID NO: 40932 - DNA, 373 bp, Glycine max
  unsure (1)..(373): unsure at all n locations
tgctcaccaacactagataagaatccctcatgttgtttcatgtaaacctcttcttctagatcaccattcaggaacaccattttcacatccatttgatgcaactcaagatcaaaatgagctactaatgccgaaattactcgaagagagtctttcttatatacaggggaaaggtctctctgtaattgattccttctcttttagtgaatcctttagcaacaagatntgccttatgtctctcaatgttgccttctaagtctttctttgttntgaagacccatctacatccgatggcttttacaccaacaggcaactcaacgagatcccaaacttggttagatgccatagaatccatctcatccctcatagcattata

SEQ ID NO: 40933 - DNA, 465 bp, Glycine max
  unsure (1)..(465): unsure at all n locations
agcttcataagttgatatcatgctccaaagttagtttactaccaaaatagatgtggcagccttaaaatgaactataaaaactcaaaaagggacacatcagagggtctcaagctgtcatcttttggggaagtgagtttctgtcaagctgtggaagtgattccaaaggggatgaagccatcgaggtggtttgcagggagatggaaaagcatgaaaaaatggtgccatcgaaacattggtggagattccagacatttaagctcttgatgatgcaactaagagagggcaaacaatgttccttagggctcctacaaatcccattctccctgcttgtactttccctcttaagaatttcttagatacacatcaaatgaaatgcattcattggaagcactataaagtgagcttctgagttatcataatatgcagattccaatcatatctcangatgctctcaccaataaatgc

SEQ ID NO: 40934 - DNA, 486 bp, Glycine max
  unsure (1)..(486): unsure at all n locations
taacctcagagcctcaaacacttagtatagtaagaggtgctcattgcgggggtgaagctagtaagagaagttagagctaataagntgcgatgctacatagactcccaacttgtgcatggacaggttgccaacatataccagaccaatgaaacagtgctgctcaagtactatcacatcgcgaagactctcgttaacaatttcacatgtttcagaatgtactatatccccagggaaagcaacactagagttatcctgctctccaagctggccagcaccaagaaggtcggacaccttaagaatatcatctacgagatgctccatactcccaccacgtctctagtacgtaccacttcacgagtgccacgtatgcaagagcacgctactttgactctagtatgtgccaccccacaagtggcacgtatgctagagcaccatgtctccagtacgtaccactccatgaatgacatgtatgcaagagcatgcctg

SEQ ID NO: 40935 - DNA, 816 bp, Glycine max
  unsure (1)..(816): unsure at all n locations
cggcgcatnaatagctgtcgttccacaacaaatnntnnnntntcccgcggcgttaagcanaaacttcagggcggggagggatttttttctttgcgcagaaggggatatcgagcgctcgttttcgtgggtgccaggacatctctgtcccttccctcgaattatattatatttgaactgccccctgtggctcgtattcgaaactgacatgcggggcttgagtcgttttatactgtctcagtgcgggaagaatataccaccacaattttatcccccactttgcctcctgctctcagacatagaaaaatttcgtagccagcatccttctcccgctcgagtattttacgtctccaccctactctctcgtcccctacacaacgtctcttcaagcaccggggttgtgaggcccactgatcaacaaactatccatacttcctctctcttttactgcgacatcccttcttccnttctttttcatacaccatcctttctctctctaccccctctctccttttcccttccctcttctcctctttcccttttcctctttctctccctcttctcctctctcttcctcttccctctcccctcttcttcccttcttttcttttcccctcctccttctcccctctcctntccttcttcccctttctcccctctttctcttcccctctttccttcttcttccttttcttctctctcctcctcttcttcttccctccctttcttttttccctctccttcccctctccctccccctcccccctccgcttctctctccctcttctcctccttttctattattaagatattgtactc

SEQ ID NO: 40936 - DNA, 515 bp, Glycine max
  unsure (1)..(515): unsure at all n locations
agaggaccnagtgaaccttgaaactgnacctgtgatcctgaanacgcannataataaatatcttcgcattattactgaagntattgactggagatcctattgttgatataatagtaggcctgatatgtgtcaagaaaccctttcttgctgattccagcagaatattgtgtcattacaatcactgcgaccaaggagaactatcattagcctcactcgggcttgagacatccagtcccctgaccaatcataaaggagtcaggtaagagttcaaacgtttatacctcgaaaacaaatatgctggacaggtgatagaaattctacttccttgaattcggacttgagttcttttcataagtcaatctcttcagaacattgtatatcatatatctcctctttgccctgcgaaccaaagaaataatcaatatccacttactcttgagtatttgacaatgaacatataactctagtgtcacacttattaatcagatccctctcgctgttgacagtgatacttn

SEQ ID NO: 40937 - DNA, 384 bp, Glycine max
  unsure (1)..(384): unsure at all n locations
agcttttaaaaaggacttgtgtaattagcnntgtttttgatattattattaatatgatacacaatgttattattattttattgaaattaaaaaattattttagtgattttattttattgaaattaaaaaattatgttagcgattttagtttgacacatgtaatatttgtaagcaagtttttatcacattttatggtttaaaataaccttattgtttttaaagaaaatattcgattttttttagaaaaaagttaatacaaatacaacagtgatttgttgcctgtctgtnnnntacatcttatggaataaagaagaagctttaaacccaggaaaactgatattaaatactaagaatcgaaattccttatttatcaaacagaatact

SEQ ID NO: 40938 - DNA, 358 bp, Glycine max
  unsure (1)..(358): unsure at all n locations
tttcctatatggatgngacatcatgtgcagtaaatcccaactttccatcgtggattcagtcacagaacaaacttgaatatgttggactatctaacacggggatcttcgattctattcccacacagatgtgggacacacgtcctcactgtttggatataaacctctctcataatcacatccatggtgagagtgggactacattaaagaatcccatatctatccccgttattgatctaagctcanatcacttgtgtggtacattaccctatctgtcangtgatgtgtctcagctagatctttcaagcaattcaatctctgaatccatgaatgatcttntatgcaatgatcaagacgagcc

SEQ ID NO: 40939 - DNA, 341 bp, Glycine max
  unsure (1)..(341): unsure at all n locations
gggcaacacatggaagaagctttttttcttggatatgnattatgagatagagagatgttcaagcagcttgaatacaacacatccataaaggggttaatattgtgacctattaaagagcctgtactttgaggatcagtatagttgtggtttatttagcttgagagcaaccataggatgcttgggaattttttagttgcgcgtattccatgcaacttgtttccatttgaagtataagatgaaattttgagcatgcataacatgccgctctgcatgaagaattatacgttgagatatataaacctaaattcaatccgatctactgaatgtgaaaaatggggcac

SEQ ID NO: 40940 - DNA, 318 bp, Glycine max
cttgatgccttgtgtaacctagtaactcttcttgccatgaatcacatatctgcacctgtggcaagagtctttggtctatgttcttctgcagatcaccatacatatctctatccttcttcgctgcaatctggaatcaatgagcaacctgaagcttatgctgcaaacatttattatatacctcctcagtagcataaccaaccacaacagaataattatgacctttcaagcaatagatacaatccaggttggaggagatgactactcagatgaaccaagctcactcccaaaattctgacaaattgccttcacaaactgtgc

SEQ ID NO: 40941 - DNA, 380 bp, Glycine max
  unsure (1)..(380): unsure at all n locations
agcttgtgcattcaatatcctgatgaggatgttccatatgttctcaagactggactaatacatttgctgcccaagtttcatggtcttgcaggtgaagatcctcataatcatcttaaggagttccatcttgtctgttccaccatgaagtccgctgatgtccaggaagatcatatctttctaatggctattcctcattctctggagggagtggcgaaagattggctgtattaccttgctcccaggtccattactagctgggatgaccttaagagggtgttgttggagaaattcttccctgcatctaggaccactgccatcaaaaaagacatttcaggcattangcaacttagtggaaagagcttgtatgagtactgggaaag

SEQ ID NO: 40942 - DNA, 352 bp, Glycine max
  unsure (1)..(352): unsure at all n locations
tcacatagtntatctttttcaaacttaagttntgaagaccaattaccaagtctttcgtaactagatgatntaaatgatgcatattaatgtgtgtagttgatgtgtcattattttctcctatttcttaaccctttttatcaccactttaattactaattagccttaattgtcaaattaattatgtagttctatcatttgggcctacttgactaatcttgtgtttctaatttaattttaggataattataagcaattgngcttggatccgaaattgngctgaaccggcttggacttgaagagaatagacaactttagttcttttcattttgggcttggacttaaacatattcgt

SEQ ID NO: 40943 - DNA, 388 bp, Glycine max
  unsure (1)..(388): unsure at all n locations
agctnttcctttgattgttctgctagggtttttaatcattaaagagaaggagaaattgaagccttcattccactgtctgcgtgtgatgagtatttttccctccccagacattaaattgaaaatcccaacagtgaagatatgcaaaaatgaattgcgagcctagtgtatttcacaatgatccaacggttaatgagtcggaatcatagttttacccagacaagttttgggtgtctagggaaaaagaaaagctcaatgcgagggacatttcttccaccgaagactttatcttcaaaatcccaatggtggttctgtgaggaaataagtttcaaacctcgtgtataaatttcacaatgatccaacggttancgagtccggaatcattatttta

SEQ ID NO: 40944 - DNA, 353 bp, Glycine max
  unsure (1)..(353): unsure at all n locations
gttatagacagganatcatatattgaatatatcatcaggcttcatatcttccaaagaaaccctttccatgctaattccaagcagaaaattgaatcattcctaacctgtanactaggaaaactatcatcagcctcacccggtcttgaaacatccagtcccctgaccaatcatcanaggagtcagtaaagagtttcaaactttcaatacctcggaaaacaaatatgcaaggacaggtgtatagaaattcctacttccattgaattcggttcttgagtttcttttctataagtccaatcccttcaagaacatntgttatatcatatatcctcctcttttgcacctgcagataccaa

SEQ ID NO: 40945 - DNA, 281 bp, Glycine max
tggcccatgggaaacgggggcaaagaaatgtccttttggtcccgttaaacaaaactggtagaacccccccggatctgctgaaacaaaaactttttcactaatcccttttggaaatatgccagatttcccctatccccctcacttgctaatatttgcgaaaaaataccggaattctacgggtctttcccaacctcataatgttagttttcctagaatacgagcataaggtgaaactttccctttccctccttctctcttctactctatgacattcgtaaact

SEQ ID NO: 40946 - DNA, 408 bp, Glycine max
  unsure (1)..(408): unsure at all n locations
agctntataattatgcctganttaaaattgtacaattatacgagaatctgccagttattacaatcagagaactgctatatggtaccaaaataatatcacacgaattgcacgaaaataatacagcattgaatataaacagagttgaatctgataaaaaaaaaggtttagtcttttttaaagccataaaatatacttcaaatctcagttaagaaattcaggtgtttacatttaatgttggattattttttaagtatcgccatctttataagagatatacatgagaatttggttttttgagaggagatatacatgagaataaaaatgctataatacttgtagaaatgaactaattactacttatttttagttgcacgtgctatcaagagaatccagagggaaatggacaaa

SEQ ID NO: 40947 - DNA, 428 bp, Glycine max
tcgacgacgacacaattctgcactgtatcagtatagttacctttcatcaatcagtcgttgcagcctgcatcagctatctcctccgtgccggagattactccctgagtcgacgagaactctccaaggaggaatcagaatcatgcgaacatgaattcaaaggattgttttagggatgaagagaccttactcgtttggatttgaacatgcagagtctgccgtcagagagaatggtgatggaaccggcgacggcgtcgccgtggcggtaccgtagagggagtagtagtttctggagcaagaggccttcaccgtttggatcgttggggaagccaagggtgttttcgtttaggtattataaaggaatgaagtcactgttcttccggcgaaggagatttttctcgttgtcagagtcgagcgtgaggtacggcacg

SEQ ID NO: 40948 - DNA, 402 bp, Glycine max
ggctttaggttgctcaattgctccaggttgttgcattgattggcaaaggactgtatggtggtcagcagatgagcacaaaccacaaacccttgcgacaggtacagatttctgattcaaggccagctgggttaccaagttgaccaacgcatccagtttgcgttcaagcttcttattttcagatgatgcagatgggtttgtagctacctgtcataccctaatttcgtccggggacctttgcttgatgacatgtgaccattctttggtccttgtgaggtgcttggcacccatcattatgcaatttatgaaattccaggacatgccgaaaaaccaaaaaaatgttgatgcacaatccgtaagtttccgtgacacatcggaaatcaaatggaagcatcgttgataatt

SEQ ID NO: 40949 - DNA, 429 bp, Glycine max
  unsure (1)..(429): unsure at all n locations
tgtccataanaataggttgtgaagtttatcatttattatntttactaagtaaatggatcattttcaaggtccaacgccttaaaatgatcaccttttaaaataaaaaagaatcacttgataagaaagaactacgtaggtctgatttcctcatcacaaattgaggaatacgtaggagcaaagggaaacacccttgtcgaccacaaaaaaggaaaaatataaaaagggtataaaggatataaggacataaaagggaacataaaaaccaaagtcacgtttgcacattcgattaaaggctgccgtcccttgggacggacgtatggggtgctaataccttccccgtgcgtaaatacaactcccgaacctttcacttaaaagttcgtagatcgcgtcttttccgattnttccgacgttttcctcanaataaacgtt

SEQ ID NO: 40950 - DNA, 420 bp, Glycine max
tgcatgcatgcaagccccttgcgtagccgctcttggtgcttataaaattctaaattttaatccctcggattactagctattttgaattctttagttcctaaatgtgcaaccttcaaattgttgctcgttcacctctttgttttatgcaaaaaagaaaatcaatatcaaacaaaacatggagagaattgtcatcgttattattactcgaaccagaaggaataacatctaaacaagtcattttattcttagaatgtgaaaactctggatatttatggagaacatggggtatggaggcacgtaagcatgtcaataccacacgtcattttctccaattcaagggcttgattaattgctctaggaaaaaagcatacatctggtatattgtttggtttgcagctgtttggagcatttggcaattca

SEQ ID NO: 40951 - DNA, 423 bp, Glycine max
tatcctgtaaccgccaaagccttctggtaatcggataattcttattattatcgattagatgggccttgttctatggtaatcgattacagggagtagtaatcgattaccagatcctaaaatatggtatttcaagtgaaataatcacgaaaatcaattatttgtcacccgcaaaactacacatttagtataaataatcaaaatagacaatcgtgaacaatcatcataaacaatcaaaatagacaatcatcataaataatcatgaacaataattagcaaacacaagcacttcactcaacaaaaaattaatcaatcatgaaagataactatcaaacacaatcatttttcttaatcaaaggaaacaatcatcataaacaagcataattaacagccattaaagccaatttattataaacaatcaaaatt

SEQ ID NO: 40952 - DNA, 410 bp, Glycine max
  unsure (1)..(410): unsure at all n locations
agcttgatttgtgagttgattntagctttatttttattttggttattagtcaattcaattaaggaaaatcccaaagaaaaacgtccgattgattttttttgattattttatttaaagatactttgattattttattattattttgcctcttttggttttaaacgtggttacggtgtgaaagatcggttggattttattttaacagagattaaacgatattacaactcaaatgatcggtggaaattcattttattattcattaggcgagaaaatgacttaaataaatggttaaagcacgtcaaaagggggtacggaaaacaaacaaaataaaaataaaagcatgcgaaacaagtgaggatcactaagggtgcatagaatgaattgaaagattcgatttcgggaacttaccg

SEQ ID NO: 40953 - DNA, 425 bp, Glycine max
  unsure (1)..(425): unsure at all n locations
tcttatccaaggctcatcttggtggtggagctccttcttctttggcttattccttaatggatggctcctcctctcacctcttttcctttgtcttccgctgcatctccatggtggaaaatcaccattaaaggaccccattgaagctcaaagatccagcctccatagaagccccacaagcaagcttccatcacattcccttgttgttggtacccaaaagtgcgccaaccaagtgctcgatgaaatgcctcaatggtacttttgcctaagtttgtgaatatggccttttgattggatttgggtatgtatgattaccatttttggatgcggacagcttgcgaaaattaggataaaagccaaaacatgacttangcctagggggggtggggggcaaacctttgtttgttgaaaatacaaaaaggtatgat

SEQ ID NO: 40954 - DNA, 418 bp, Glycine max
agcttatgctgcaaacatctacaatagtttcttctcatcctcagtttcaaaatcagccacaaaagaacaactatgacctctctagaaataggtacaatcccgggtggaggaatcatcccaaccttagatggtcaaatcattcacaacagcaacagcaacaacaacaacagcaacaaccccagaaacaacaaatagttgaggcttctccgcaaccttcccttgaagaacttgtgaggcaaatgactatgcaaaacatgcagtttcaacaagagaccagagcctccattcaaagcttaactaatcaaatgggacaattggctacacagttaaatcaacagcagccccagaattctgacagattaccttctcaatctgtctagaatcccaaaaatgggagttccattacattgagatcggg

SEQ ID NO: 40955 - DNA, 423 bp, Glycine max
tcagcttaagatggatcttactgtgggatgaaattttgttttactttattcgaaaaatgcaaaaaatagtgatcctagggctgcaaactcgtaaatttcgtgggtattgcttttgaatggggggaaaagaagtttttgaatgcaaaaacgtcccccttcttcattttttatattttggtgcaggggttgctcgcccaggcgagctaacctactctttttttttcgtagtttatcaacatcgcccaaaaccttgattggacaacatcccagggatttttttaaaagtcgattgattttaggagacaactgtacacgggaatgactcgcgtgaggggaccaaagcttttgatgctccgccagccactccgtaaggtactgatcgaaacccccaggatagattaggcatcgaacatatgtaataat

SEQ ID NO: 40956 - DNA, 362 bp, Glycine max
accgataatagtggacggacttctctttccatatagcaagatcaagatccaaaacaccaacatgaaattggactttctcattccagtcaaagaagttaagcccattacaaattgatacagatgatacatgagaatttagtgaattgtgacacaggtactacataatgaaattcacataaacattgtgagacataaaacacatgtcatacatataattcatttacataacaataaatgtatattgatgctctcatttaggtgatacaccaacacacgacatacaaacatgatgatgttaataaaactcttaacattatttggcgattaaatatgcaccaattagaatcacctactacctttgg

SEQ ID NO: 40957 - DNA, 421 bp, Glycine max
  unsure (1)..(421): unsure at all n locations
gtgttgattnttggggttggcctcnntccttacgttatctgnnnggaggacttagccgccattgatgctttcctcgcatatcaccatagcaaggagagtccagtggtggctatcttggcagatttgtttgacacctttgaccagaggtgtgagaaaaacagtgcacggattgtctgttgtttacccgctctctgtgtgtcgttggtttcacacctattcctacaagacacccgtgtccgcttcaaagttatcgctcatgcgccgaaaaaggaagagtcgattggaaccaacatttggctgggataggaggcagcgcaatcaattggtttccttgatggaaggaaggcaaggagggagttcttttctcgtgtggggactaccctaatgttccgttgatagggacgaggggttgtattaacta

SEQ ID NO: 40958 - DNA, 391 bp, Glycine max
agctcggaatgcatgatttgctcgattatgggaagagaaatcatccgtgtgaaatcaccaaaggaacctgacgagcgtatcacgttatggtttcatgaggatgtgcttgatgtattattaaaagaaagtgtcagacctacaattatttattttggatgtgctatactaaatgccatactttcattttacattattgtcaatatgatttcacagggaacaaaagctgttgagggattgactttgatgcttccacggagtaatacaaaatgtttgagtactacatctttcaagaagatgaagaaactcatgttacttcaatttgctggtgttgaacttgctggagattttaagaatctttcaagagatttgagatggctatattgggatggat

SEQ ID NO: 40959 - DNA, 430 bp, Glycine max
  unsure (1)..(430): unsure at all n locations
atactaagctgcgttcttnttataaaatgagaaagnnctttactctttatttttctaaaaatcttggggtggatccaagtgctccgatcatccatttgcatactcatgttttggtggcatactcactgttgtttatttctttaggaatttcatcataactaagaaaacaccaaggcacccctataacactcgatccagaaaaatggataatgaagagggcgtgcaggaacagatgaaggccgatctatcggccttgaaagatcaaatggcttccatctcggaggtcatgttaaaactccagaaaaccatagaggataaagccaccgcaaccgcctccagtacagttagggaagcggagccggtgctgcaacccgccttgaatccgggcctagacagaagcacggctgtgttctgtcgaaagtataatccg

SEQ ID NO: 40960 - DNA, 361 bp, Glycine max
gccttatgggactatgtgtaagcagccagcacactcaaaacccaagacattcccccacttaatgtttcttctaactttagttgatcttgtctttcggttgaacatataaataaccttgtgtgtatgggtctgtctcatcgagtaactctcatttcaattgattccaaatcattctatctcactttatccttcactcctggtcagtcttccctctccaagacatcattctgtagcatcatttcctcacagcagtttccatggaggtattattctcataacttttaatctcattactgttacacggattggtcagatgttatccttcgattctatcatggtgttgacacatcttgtcactctt

SEQ ID NO: 40961 - DNA, 402 bp, Glycine max
  unsure (1)..(402): unsure at all n locations
tgcaagtgtccaattctttattntcggcctcnnntttccaattggacgaagttgtggaggtggtggtggtagtaacgccaacacaacttgagagaaaagcttatcttgttcataattttgaggacttgttctactacctttcgattttggtttgtttttctctttttgtcttccttttttctttgttcaattcagaagagcagcgaatcaatccctaattattttaagttgtaagaaaataatcaagtactttttaaatcaaagataattagggatttttttttaaacgcctagtatttggaaatcatattgaatataatctcattcatgttgatttggaaagaaccacttaactctcctctataatgtatgattnttttagagaagataacatctgaaatt

SEQ ID NO: 40962 - DNA, 403 bp, Glycine max
  unsure (1)..(403): unsure at all n locations
tcaagctttaatagaaaagtattacatgtttatcttttaganaacgcggatttgagatatatgacatgatacgctaactgataatggacaaaaaataacagaggttgggatatgcatgtcttttaaacactttgagacaaatagttgtcccatgatgttctgagataactagaagattactttttgtcctgtcatcctctgattaatatttatttgtgccacttccgtacattttaacaaaacaaatgatcccttaaaaaaattgaccccctcatgacattactcttagtaatgctaatgaataatcatcaataattcaatacataaggtatgcttataatagtcttattatgattcatatatgaattaaactttcatcattttttttaaatttaactcttta

SEQ ID NO: 40963 - DNA, 236 bp, Glycine max
ttacactttatacatagcttatttctgggggggaggggacatacgcaatgctggcacacaaggtatccacctatattctctagcgatctagataaggacccaaccctcaccctttatgatctcaccctctcatccaatcactaacgtatcaactgctggacaaccttttttcctccaacccaaagccatcattatgacgaaatcgactctcctgaacattacttacatgcatatca

SEQ ID NO: 40964 - DNA, 405 bp, Glycine max
agcttgcttgtggagcatttatggatgttagatctttgagcttcaatgaggttcttcaacggtgattttacaccatggagatgcagcggaaggcaaaggagaagaggagaggggaggcaccatccactagggaataagccaaggaagaaggagcttcaccaccaagatgagccttggataagaagcttggagaggatgcttcaatggaggaaaagaaatagggagagaaagagagtggggggagcacgaaattgaaggaagaaaaagggagagaagttgaactttgaattgtgtctcataagactttcattcatcaaagttacaacaagtgttacacatgcttctatttatagactaggtagcttccttgagaaaacttccttgagaagcttctttgagaaaact

SEQ ID NO: 40965 - DNA, 413 bp, Glycine max
tcttgcaataaaagaaattaacagtgaaattattatctacttggtctttttttttaattgttattagtgtaaaatatctattagtgttatcgataattaacctttatttaaaaatttagctaattatctttagtgaaatgtacttctttctaataatattttttttccattcataaaattgagttcaaatccacttcaaattattgattggtatttggtgtaaaaatccaagaaaaacttgtgcaaattatataatcaaaagatagattcaaagggacaaaaaaggaatacacggggggattggagtgtaggcatgattccaaaaatattgagtggcaccatgaccagtggggtttgtgcgtaatttcccaaaagctcagcaaaaccatattccaatgcatgttggtattttc

SEQ ID NO: 40966 - DNA, 391 bp, Glycine max
agcttctcaatctaccaatttataaaaggggcaattactagacaactttagaattcctagaaaaagatattaaggtctacttatatgcaagaaagtttctaagcaatccaacaaaagttatatttttaagaaagaagcaacaaatgtttttaagaaaaaaagaattgcactatgaggaatgctggaaaggttaagacctacgctagttatttttagtcaatttaattacataaccaaaaattagtaatatagtaatttttcaattttgtcctttctttctaattattttaaaatattgaatttttttttggaaattaccaaaatgcaaccaaactaggataatccctttataatattataattataaccatggcatgtaaatgagtcaacg

SEQ ID NO: 40967 - DNA, 392 bp, Glycine max
  unsure (1)..(392): unsure at all n locations
tgctcgagctaagcgcanatacctttaattgattgtttgaatggntcaactaagcacacatcgctgcgctaagcccaacaccttcactgtaagttgcaccttaagcagtgggcttagcgtggatgatgcgctaagtgccacttccttgcaaagacaatccaagtaagttagcatttctacttttactttcatcctccaaaccttaggatagctgatttatagttttagtgactagtattgttgtaggatacgttacttagttttagggctaggtattttaggactttaggtagtatagaagcccattatgggcaatgtgattaaaaaggggtgaagacccctgtgtatctttctgagattcgcgatgaacgcgctaagcatgcctgctacac

SEQ ID NO: 40968 - DNA, 391 bp, Glycine max
agctttaaaatttgaattattacgttttataactgctggtaatcgattaccatatatgtgtaatcgattacacagtgcaaattttgaattcaaattttaatagctgttgtaaatcagttttggccactggtaatggattacatcctctggtaatcgattaccagagagtaaatttcttgagaaagactttttaacttaaatttcttggccaaaccttttgctacttcaataggaattcccttcctattttaatatactctttctaagactctagaaactgtcttgatcatccatcttgaatatctttgtcttgaataaagctttgagaaacatgtaaccctttggcatcatcaaaacattcagcttgatcctttgtctacaatctccccct

SEQ ID NO: 40969 - DNA, 410 bp, Glycine max
  unsure (1)..(410): unsure at all n locations
tgtaggattatggggtacccatctcatgttgtactatgtggcggncgggcgatggtgcacaacaagctttccacatccataatgcgcgcataaacccaccatcccctgttgcccacctccaactgagctcacgtactcccacgtagcccatatactcgtttctctcaacaccgggtccccatcaatcctctcaagcttccacaacatccaagcaaaacaacattcaaacagcacaagctatcacagccaagcaaaaacagagcaaaggcagaaaactctgctcaaacaccaaccaaaatcacagcttttctcacttaaagaccacagtgacaattccttcgatccaattcgttaaccgttggatggactccaaaattntactggaagtctatagtgcataagcctacatt

SEQ ID NO: 40970 - DNA, 407 bp, Glycine max
agctttagattgttaaaaatataaaggttctttatgttatgttaaattcatgctttatcttttccaagtttaaatttgtgtttttagtagtttataacatatgctatgtaattttatatatgtaaagcaattttaaaatgatgtttccattgcacctttatcaacttttcaccaaacaatttcaaatgatcatccacaacatccttatcttgacacttgaagcatacccttgtgcggcctaactattcgcatgtttttggtagggttatatactatattctgaaaaacaaaaacttaaacaagagtatattggcctttctggaaatgaaataaagaatttgaagtcgtttggcatggaggctagtcttaactattatacaaatcaatgatttggcaaatttgactat

SEQ ID NO: 40971 - DNA, 443 bp, Glycine max
tataccatactcaagcttgtaattacattacactcaactctcttaactctactatgaattgttttttatatgagttttggttttttagtaattttcttctcctctttttttttttatcatccattgcttgttctatctttccaaataacactatttacttggcaaatcagttgtgtcatccctatgataccttccgatgcttggaacaggcatatgttatgcacataaatgttttgccactccaagcaaaataggtaacaaaattattggtggataccaaaatgctatttgacacttaggtgatataatatattaagaagaaagatagagatagataataaatgttaatggagtgttaatttgaaacagaataatgttcactaatggttattcaatagttaattgctatataaaatgcttgaatctgcacagttatctacttt

SEQ ID NO: 40972 - DNA, 405 bp, Glycine max
agcttgccacccagctcgcccaggcgatctatgttgtttcctctagaaggcaccgccttctggaggaacttcctggaaggcccaagtgggcttggtttctatttgcaccccctatttactaaatacaccccatgcctttttttgttgattctttttctgtaatgttacgaaactttacgaattccgtaacgatacttgttttccttccataatgttatggaaccttacggattacgtaatcatcccttttttggctttcggaatgttatggaacctcacggattgtgtaacaatgcttccttttgatttccggcatgttatggaacttcacggatcgtgcaacaatgctctcttttgacttctggcatgttatggaacttcacgtatcgtgcaacaatgggtgcc

SEQ ID NO: 40973 - DNA, 314 bp, Glycine max
tctagaggacgcttccgtgcaggaacatactcggttatagtttgaacgtggaggggcgcatgggaccatagagtcctgaggattacccgattaaccttgaactgcatctgacgagaccctattcgtcttgatattacaagatgaacacatgttgctatttatgcctatcacatgggaggcctccttgccaagcaagggtagtccatttcttgccaagctcaaggaacaacgcttccttgcgaagctcgaggactattactacttctaccgcgccagctctactgaccattatgccttgccacgttcaccctttt

SEQ ID NO: 40974 - DNA, 413 bp, Glycine max
  unsure (1)..(413): unsure at all n locations
agcttataagaacaaaattgccttaattttttccaaatatgcatgtgaattaggacgcatcaacaagaatcaagccaaggctattgtgcaagcaatcaatggggcaaaacacaccaaatgattataatgatggatggctcaaattctcacaaaggtaaaatcatcacttccaaattgagctttcaaaactatcatgacatgtatagaagaatcaaggatttcaagtcacaaaatgtcaagaacttttattttcaaaacaattacccatttcttgaacatatcctataattcaaagaaaaacatgcaaagtcgtacgtgcacacgaaattgacccaaaatattaaactgaaaatccgacgaaactaacaacattaacaaattaacacaactaacanattaacaaaaccaacaaa

SEQ ID NO: 40975 - DNA, 423 bp, Glycine max
tgttccagtggcaaacaaaaggctcaggattcagctatgtgattatataggagcaggctgatgaacttttagaagcaaccaatttgtggtactcagagcagagagatatctgttggttttcaccaatagaggaagatgttgctatgtggctttttgtctcgactacctctgaccttgattcttgccataatcatgtttcaacttcaagtagttatgatatacatacagctagaagttggaggcttgctcttttgatgaaaaatagcataatttttggaagtcccttggatctaaggtgctatgaagttttttctgaatttgaatatagttcgtcatgtgttgcttaattctgttaagatctttactgtttttcacttcaaatctagatttaattgggaagattgtaaggaaccattagttata

SEQ ID NO: 40976 - DNA, 412 bp, Glycine max
  unsure (1)..(412): unsure at all n locations
agcttctatagaagggtcgtacctaatttctctacaattgtctcacctcncaatgagctggtgaggaataatgaggcatttacttggggtgaaagacaagagcaagcctttgctttactcaaagaaaagcttactaaggcacctgttctagctcttcctggactttctaaaacttttgagctagaatgtgatgcctctagagtgagaattggagctgtattgttacatggttggcaccctattgcttattttagtgaaaaacttcatggtgccaccctcaactacactacctatgataaagagttttatgccttaataagagccctccaaacttgggaaaattaacttgtttccaaggaatttgtcattcatagtgatcatgaatcaacttaagtacattagagggcaaaac

SEQ ID NO: 40977 - DNA, 426 bp, Glycine max
tctatggaggctgaatctttgagcttcaataaggttctttttggtgcttttcagccatggagtagcagcggaagataaaggagaaaaggtgcgatgagacgccatccattagagaataagccatgaaatgagaagtttcaccaccaggagagtgtcttggataagaagcttggagaggaagcttcaatggaggaagagaatgaaagagagaggagggggggggggcatgggaatttaaggagattaaggagagaagttgaactttgaagtgtgtctcacaagttactcattcataaaagttataacaagtgttacacatgttggtatttatagcctagcacatgggaagcttccttgagaagctagagggggctaagctcacacccctgcaatagctaagctcacacccatgccaaaatacatgaa

SEQ ID NO: 40978 - DNA, 417 bp, Glycine max
agcttattcttcttcattatgcgacggtattcatgttcttctacggcgtggacacccacacctcattctctgatatcgggccactgacatgggctgcggcgggtccaaggtggaggacttccccgcggtggttctgtgtagagagcgaaaggcgttcctcaaagccgcatcagagcaacgctacgctctcgccgctgcacacgtggcgtatttccattcgctgagtgaaatcggcgacgcccttcacaagttcgccgaacaagacctcaccaccaccaccggttcctcctctccggttctcacattaccctcggaaaccaaaagcatcaacaataacaaactctcatcctcttccccttctatagcatctaatgaaaaaaaactatgaaaaacaaaacgaatggcttaattcactgg

SEQ ID NO: 40979 - DNA, 419 bp, Glycine max
tatccaaatagacccatagacaattgtcaaacaacttattgtttgatttaccttttgtttgattggtgattttacttcgtggtagtttttttcaaagatgtggtagtaccaattattttgaattttaaatgcatacatcattattatattgcatagctaagagcaggagggaagttgggtcctacttttacttctaatgtaaaaatggtataatttgtgaaaaaatgcttgttgaacgtttctacaaaacacagaaaatgagatgacattaattataatcagatgttgtaataatgtagatgtagatgatgtgtgtggaaagatgtgctttgatttgtcatgtataatatcatttgttttagcgagttcatctgttttatcagtcaaacttaaatttccctcccatcttttccccacat

SEQ ID NO: 40980 - DNA, 382 bp, Glycine max
agcttcgcccaaaaccatgttcatttatcttctaggagagccatgttgtagaacacctcaatcccatgcaaacgacaataatcaattttgttcttaatagcctttaacaagtaatgatccccaacgggattttcgcacggtttcggcgacgacccagttacgaaaaacacgcggggcttgttgggtcgaaggaaattcgagaaattgggattctcgcgaagccagcgagatctctgttcgtcccagatcgatattttggggccgagacgatacgcctcgtgtgggttaactttctcgcggttctcgtcttctgtttcgcctaccaagatggtgttgatgtctaacgcgttgtaattggtggtggaagtggaactttcaaacg

SEQ ID NO: 40981 - DNA, 354 bp, Glycine max
tcattgggcgttgttgattggtttacaagcctcgtttaatatttgctcctcacagatcgtaacactttaaagttcaatctccccattgtccatatcatacgctaacaaagcaagaatatatgaaagaagatgaggtcttcaatcatatttctttgcattctggtgtatctgaacgagggagctgcggaatagtcagctgacgacgttcttgagaaatacgatctcccagttgggcttcttccaaaaggtgccacagggtatgaattaaacgaaaagaacgggcacttcacagcgtatttgaatggaacatgctactgcagcatagagtcgtatgagctacagtacgagtccacc

SEQ ID NO: 40982 - DNA, 398 bp, Glycine max
  unsure (1)..(398): unsure at all n locations
agctntgactaagattgctataaatgtatatgaaagaagatattgcttagcttcttccctataataaatgtgatccacgtcaactagaagataaatcatgttagtccaaatgttaactcaggcatgttatcattaacaaaatgtcttaactaacacattgagtgtcttcatgacacacatgttctagtcaacaaagactagggctttgcatggcatactagacctttatgccaagaacaatttcattggtacctcttcttgaatccttgtcccacccttggggttcacctctaatatctcttccactcttgtgccttagatctttgcatggcataatttaatttaaggttcagagagaaagagaattatttgaaagttaaggttagaggttcatcgac

SEQ ID NO: 40983 - DNA, 422 bp, Glycine max
  unsure (1)..(422): unsure at all n locations
tcaagctataatgagaagaccacaggcatattntttttttcttatgccaaatttatagatgctggtgtaagcaagagtatttcacctgcacagaagagtactcatctacaacagctagcatatgtgaggagttttcctagtggggagagaaactgttacagaataaatgtaacaagtggtactaagtatttgatcagagctactttcttttatggaaactatgatggtctcaatcagcccccacaatttgatcttcatcttggagctaatatatgggacacagtgaacttccccaatgcttcactcagtgaaatcagtgagatcattcacactccatcactagattacatacaaccatgtctggttaacacaggcaaagggactccattcatttcagctatagaattgaggactntgaacaa

SEQ ID NO: 40984 - DNA, 404 bp, Glycine max
  unsure (1)..(404): unsure at all n locations
agctntgctaaggctaatgactcgctcttgctcttcgaaactctcaaaacacaacaagaataaaagcttccaacttaaggtctaaaagaaagtacatatagccttaggataagtaactgccagcatgttttgatcacgactgtggtgactttttgtactcaattntgcatttggccgtgatcgaaggatcatggcttggataatcgtcaactattttccaatgttgggccatgatcaaaccatcatagccttggtgacttccaggttgatcacgactgtgatgactgatcacaaccatgatagagtagccagattcctcacttcatcaatttggcctattttgagccttttttctcaccaaattctccctaatcacttggttaacaaatctaattataaaccat

SEQ ID NO: 40985 - DNA, 421 bp, Glycine max
  unsure (1)..(421): unsure at all n locations
tggagaggatgcttcaatggaggaaaagtattagtgttatagaaagagagaggggggagcacgaaattgaaggaagaaaaagggagagaagttgaactttgaggaccgttcctatgtatgttgaactttgaggaccgttcctatgtcttgttaagcatggtatattgattgccttgggcttactttcaaccttcctatgtatgttgaactcactagtattgtttaccacagttttaggagttcaatattcacttaggatcaacatttcagtcagcaattcaatcaccaaaactcaaattcacaatagacacaatcataaggaaacctaaaagttcaagaaaaggttcacaatcaaagactctctaagaattttgcatgaacatgttaaggactaattaacatgaaagatttgactcanatc

SEQ ID NO: 40986 - DNA, 400 bp, Glycine max
agcttccttaagaagatttctaaagaatctagagcttagctacacatacgtctctaatagctaagctcacctccttgagatgagaagctacaacttagctacacatcccctataatagctaagctcacccgcatgacaaaatacatgcaaatacaaaaaaaatccctactacaaagactactcagaattcctcaaaatacaaggctaaaaccctatactactagaatggccaaaatacaaggcctaaacgatggaaaaacctattctaatatttacaaagataagcaggctcatacttagcccatgggctcgaaatctaccctaaggctcatgagaaccctagggccttcccttggatttatggcccaatctacttggagtcttctattcaatgcccttg

SEQ ID NO: 40987 - DNA, 425 bp, Glycine max
gcttgtaatcgattacacacatactgtaatcgtattcctttatgttattttcagaaaatattctcaattgtcacatcttttcatttggttcttgaatggctatcaaaggcctatatatatgtgacttgagacacgaatttgccaagattttttcagaacaaaaaggtcttatcctcttaaaaagcaaaatcgttttatcctcttacaaattccttggccaaaacacttgtgattcaataaggaattatttgagtgctcaaattgttcaatctatctctttcaagagagatttcttcttcttttcttctttattctgaaaagggattaagagaccgagggtctcttgttgtgaaagaattataaacacaaaggaaggattgtccttgtgtgtttagaacttgtaaaaggaatttacaagatagtgg

SEQ ID NO: 40988 - DNA, 409 bp, Glycine max
agctttccgctgctaccattctcaatctttaacctcacatcctgatcagttgtgctgctgcattgcaacaccaaaccacatcgtcttttccttcccactctataacacgcactcgtggttctggatcctcttctacttctaacaccatagtactccaagtttgagcatataagtttctgtgaagcattggggttgctcgccaataaatgagccattcatgcataaaccaaaccaaggctaggcttcctcacttcacattttgtattcggggtgggaccgattggtacttatttgtgtggcctttctggcttctgttattgtggctgccatttatattttgatccatatgccacgtgcaatcatgtcagccaagaaaactatttttttttttccatttcatactagaatt

SEQ ID NO: 40989 - DNA, 421 bp, Glycine max
  unsure (1)..(421): unsure at all n locations
ttatatgtttttatgtttttacattgaatatatcttctgtcgatgtgaaatgttaaccaccttaaagttaatatccgattggccacattctatgatgtttagctatttttaaatacacttgcaataaactcttataagttgcaattaaggcgagacatgggtgaatgcaattaaaatgactttcgaacattcctctcacacctaggacaatgaacctgaaacgtgatattgtggatggaccaacaaataatttagaatatactttattatcaacttgaaatagaaaataaaatttaattaatttaataatttttcaatacaagcattagtctatatggttactaaacttattaaagaaaaggttaaaatatgttttttttttctataaatattaaaatgttcaacactcatccttganaaa

SEQ ID NO: 40990 - DNA, 392 bp, Glycine max
  unsure (1)..(392): unsure at all n locations
ctgcagcttgcttatcatnttatttcctttctaggctttttcgacgactcaccacctgcttcaaaagatgctacaaaccggaagaagcactagtgctatagttatcattgtattaattgtgcttgtgctcttttctttgttctcctttgtactttttaagctgtggctgaagaaaaaaagggaggagcaatatgctcgtctttaatgctaatgtttttggctttgtgttttccagcttccaggggataaaatattaggtctggcaaaaatttcttgggtattggaatcccaggagatgccaaggacttcttcaatcaagtcgagtcattaggttttctagagagcaatatgaaagtgctttactaaaaacaatcttattatagattgcagct

SEQ ID NO: 40991 - DNA, 419 bp, Glycine max
ctcagcttagctctcacctaaacttccttcacattatctgttttaagattaataggtggccttgttcgtgttcgtgtgggtagtgtaattctaaaccacttagcgcacattagtgaattttggcttagcgcgtgcgtttctcgcttagtggatggactgaagtggtgcgctttgtgagataaagcggtgtgctcagcgaacctgtacagctcatcttcttccagattcatcctcgcgctaagccaatgagtgttgcgcttagcagacgctcgctaagctagcagattggcttagcgagaaggtgaaaaacaacatttttcaaagttgcctaattaacctgaaattgagagaaaatgattattaaacacacaaaatggaagtactaagtatttattacctatacttaacaaattaaatat

SEQ ID NO: 40992 - DNA, 393 bp, Glycine max
  unsure (1)..(393): unsure at all n locations
agctntataatcgcgggttttggagactaaggcgaggcgttcgcgatatgcgaagatgatattccgagtactttggatttggtacgaccatgccctcctgatttccagctgggaaattggcgagtggaggaacgccccggcatttacgcaacaagcataatgtaaacctttacggttttaaaaagctctatagttgggcctaggctttagagttttcattttgttaaggctttgtgtcttttgtttttgaatttataatacaaggatctttcttcatctgttcctggtctctacccattctcattcatttgcatgtttacttctttttctggaacggcagatccgatgacgagtcccccgaaggtactaatacctgggacccgtctatcgact

SEQ ID NO: 40993 - DNA, 415 bp, Glycine max
tagtaaagctaggcactaacaatctccctctttgtgttaattttgtctaaaacatacttagacacttcctgagcaggtacgagcagttatgcaagtgggatcagcaactttcattatcagagtaatcaagcacagcggaaattctgcaagttgcaagtcgtttccaggatgtcaagacatctcacatgacatcagctttctgcttctgctccccctgtctccatgctcttactgcagcatcttctatcagctactagtcttttccaggatgtcaagacatctcatgtgacatcagctttcccttgtctccatgctcttactgcagcatcttctatcagctactagtagcttacatcagtcatcatcagcagcagcagtctccccctcaaaatcatgtacatacaactccccctca

SEQ ID NO: 40994 - DNA, 414 bp, Glycine max
agctttgagccaaaatcccaactcacttatataacctttcccgggatgagaatttccatcctcgccctcagaaagaaaaaaaattcccaatcaaagattggaagaaagcaaaatggaaagaaaaaatcccgatcaaagatcagaagaaaacaaaagaaaatatatagaataggtcttttggaccaaacaatatcttaacaatataaaattgtcacaagcaaacaagaaaagaaaagaaaccatgactggaagtggtcatctccctttgattaccaaccaaaatcttgtgcgccggcgaattttttgccccgcactaaacaaaaaaaacaaaaaaggaaaaaggccaaaacactcagagccaaattcccctccaaaaacactattcctaagaaaaattcctattgatccatgatc

SEQ ID NO: 40995 - DNA, 438 bp, Glycine max
  unsure (1)..(438): unsure at all n locations
tactcaagcttgcnatcgattacacacatactataatcgattaccttatgagtttgttttaaaacattctcaacagtcacatctttttatctgtttcttaaatagccatcaaaggcatatatatatgtgacttgagatacgaatttgacaagagttttgaagaacaaaaaggtcttatcctcttaacaagcaaaattgttttatcctcttacaaattccatggccaaaacacttgtgattcaataaggaattatttgagtgctcaaattgttcaatctatctctttcaagagagattacttcttctcttcttctttattttgaaaagggattaagagaccgagggtctcttgttgtgaaaggattctaaacacaaaggaaggattgtccttgtgtgtttagaacttgttaaaggaatctacaagatagtggaactctc

SEQ ID NO: 40996 - DNA, 408 bp, Glycine max
  unsure (1)..(408): unsure at all n locations
agcttaaactaatttcaactaaatcatttatagaggttttaaatttcatattatagtcataccgagccaaatcggactgtatgatttttaagtttgattcaaatggcatgtaatgaaaaaactaaactaaatcgcatcagaatattttttgtaaaattattttatantaatttgtgtgatgaagaagagggaaaaaatgaaatcatttaattaatgtaataatgagtttaaaaaactattttacaaagacttaaatatgtttttggtctctgatatatactcaatttttgtgtttaatccctaataaatttttccttcgaatcggatccctaatattttaaaagttttgtctaaggcccctgccattaactatgattcattaactgcttacgtggtcgttaacttgac

SEQ ID NO: 40997 - DNA, 427 bp, Glycine max
  unsure (1)..(427): unsure at all n locations
taaggtcagaatgaactttgagcttggaacgtagtttgaattttcgatccttggntaatggttttttgaagatgtcagcaatttgatccacagaagatacatgacagatttggagcaatttggattcaacaagctcatgaatgaaatggaaatccaaagcaatatgtttggacctagtgtgtataacaggattcttggtcagaaaaatggcgctgacattatcacataacaataatggaggacgtctaagaggaacacaaagatcttgaagcagttgtttgatccacaacagctcagcagcagtgtatgcgagtgaacaatacttagcttcggtgctagatcttgcaacaactcgttgttttcgagaagtccagctgataagattggatccatganagatggcataaccatactaagacctgctatc

SEQ ID NO: 40998 - DNA, 356 bp, Glycine max
acatgtgacggtcgtgtgataatattataagagttaaagttaaccaccaacgctaaaaggacaatctttgtttattatatacttaaccaccttgttcatagcatgaatacatttttcaataaatgaatatgcctaaatttaaaacaatagtaggagttaatatgtgcactatacacatatcaaatcatctaggatcatcatttttttgtaatttataatgaaaggttggctttaaattgaaatccaatcaaatgtaaacaattaaatattaatgtaaccttaactatgcgcattactaatcaatacatatagcttagatgatttccttcgtatgagtgaaattattccctcagatg

SEQ ID NO: 40999 - DNA, 423 bp, Glycine max
tagaagagccaaatagcagtacaaacatatgtaaggtatatttcaatttactcgcgactaatatcagagtgtaaaacagacaaaaaatagttgagtatagctttaggagttaataactcacaactctattggaaatcttttcatataaggcttgataatcataaacagtacttgtctggcgaatctcaaatagttttgcctgatgattggtgtaggaggagtggccaaatctaagttccaaggctttagtaaaagtagaccaatctgacagtgggcagttgtgagacgtccatttgaaccagctgagagcctcacctttcatgtttcatgtagaaagaggtcatagataagcattagtccaagggaatttggtagtagagaaaatattgctcagtctgaaaaatccaattcaagggttcaaat

SEQ ID NO: 41000 - DNA, 409 bp, Glycine max
  unsure (1)..(409): unsure at all n locations
agcttctattntaatggggggcncattttctatatctatcatgtaaaaatttcttgatgggaactatgttaagtactcacaatatcattttcttggtcctcagcattggtcacatcaatcctgaattatatgcattaggagctgatagttggaattcggatgcctctcaaaagctatcagaatcagatatctggatgcagaattatgctaatgcactgtgcataaattcttggcaggtacttgttgaatcttatactctaaattatgagttactgtttctacaatttttctactcaaattttggctataaagttgtgaaatggaccttgatggtgtggtgcacttcaaaagttagaatacctccctttcctggatgcagcatttgctcttatttctcctcagagatatt

SEQ ID NO: 41001 - DNA, 421 bp, Glycine max
tgaggtgagtgagaatttgatcaagagtttgcaatttgatgttctggcattgagggaggaattggatagagttaagagcttgaatgtggagcttgagtctcagaacacaaagctcactcagaatcttgctgctgctgaagctaagatatcaaatgttggcattggcaacaatggaaaggtgagaatttgttatgttttgcctcagaaaacatgtactttgaattcccttccaatgtccctattaagtgttgttttcttattctgtttataattccaagtgtggttaatccgtttattagagtcatcagtcactgtttgattggattttccatgttgttagttgttactcttaacttatactatggtacaaaaatgagtttaaatatctgttttatgcataaaaaattatctgtcactatgc

SEQ ID NO: 41002 - DNA, 421 bp, Glycine max
  unsure (1)..(421): unsure at all n locations
agacacctgaggcatgcaagctcgtgtaacatttgcggcggcggttatatcaaatttctaccttgtgnacgncaaccacaagtttttgtcttccgattcataatgttgcaatttacttctaaaacaatgaatcggtgttttaatctatggaattaatgtcatttactatttactatattctcaaagaaagctgaacgatatctaactcagttagttaagttacgtgcttaagttattgtaaatctttgatacttgtctttctatagataaaaaaaaattcttgaagaaaacttctagcgtgaaaaatgaatgcatgtaataagtaatgtgtctttgaagttaaagtctaaaactaacatttttgcttatgatgcgtttggttgagaatatgaaaatagagaaaatgaaaatgaaataaaaa

SEQ ID NO: 41003 - DNA, 411 bp, Glycine max
  unsure (1)..(411): unsure at all n locations
tataaaatctanaatcggacaggtcatatataaaatttatattgagttatcaagngngagnngataaaaatcttgaaattttagttttagctcttcatttttaaaatgaatgattttagaccctaaaatacaatttaatattttttccagattaatctttgacgattggtctaatcattttgagtctaaaaaaacattatcataggatttttcttcctaaaagaaatattctaacttcaattctaaatattaactttattggtgaaataattgtgcctcttaagaagtcacgatacccattgctaacatgaccatttaattagatgtgacacattcatgtagaatatattggccaagtcaccatcaaaaggctcaaggtaaaaacaattctaaacaaatgaatgacattca

SEQ ID NO: 41004 - DNA, 401 bp, Glycine max
agcttcttatccaaggcatttcttggttgtgaaactccttcttccttggcttattccctagtggatggtgcctcccctatcctcttctcctttgccttccgctgcatctccatggtgaaaaatcaccattgaaggacctcattgaagctcaaagatccagcctccatagaagctccacaagcaagcttccatcaagtggtatcagagcacaagagcttcaagtaggtgctccttaaacctccattaattttttttctttaccttctcttccattgttgtttcttcatttttctccatgtatctcctcacatgtcttgttctaaatgttgttaacatgattctttagagtttccaccgattaaacttgctatagaagttagatttgattttctatggttcaa

SEQ ID NO: 41005 - DNA, 137 bp, Glycine max
acactatgaaactcagctttattggacgaaagtgcaaaactcctatttttttactatgatggagaagcagtacttcttggacctgaaatgctacaacagattaacgaacaagtgagggtgattcgagagaaaataaa

SEQ ID NO: 41006 - DNA, 387 bp, Glycine max
  unsure (1)..(387): unsure at all n locations
agcttatcttagaagtgttcgaagtattttctatantgatngagacataatgtgccgaacctgacgtgtcgattgttgaatgtggaatgaatggcatcatcaataaaagtctgaaagttgtctcttgaatcatataatgaatatacttgtcataagtagctagttagatgataatatcttcgggctagattaaaaaaattacattaaggtgtggtttttgcactacataccatgaccatctttgacttaataggaattgaatgaatttcaattactacatagagatcgtcacgaattgatagttgattatcaaccttacgattataagaaattctttcttggatcggctattgtagtaacagacatgtgtcgtaaactcaaattgta

SEQ ID NO: 41007 - DNA, 298 bp, Glycine max
agacagaagtaaccttaagtagtgatttattagaatgaattatgagagtttccagatccactccaggattttttttaacatccagatttcacttttagtgaggaacttattcccatgcagaacactctttcagctattatgctcctatgctaaaaaaaacgtgaaaggaactgcctacctgagatagaatgattggaccaccatgagactgaaatagcttttcattcttcatcatctggactattttctgagtgaaaccttgctttgcggctaaagtaaaaacagtaaaaataagtgt

SEQ ID NO: 41008 - DNA, 395 bp, Glycine max
  unsure (1)..(395): unsure at all n locations
agcttttcaaacttatcctttcctcctttattattgattatanaagcaattttgaggctttatttaactgctttgtggggctaaacccctctttcttgctaagctgttttatctcgaaattgaaataaaaaattaagcatgaagtcctatctcactagcccaccatgctttccaaagcggtaggccttgcgtgatagcatgacgagaagttccttgatcaactttagtccacctgtactcgtactttgactttgcatttatctccttcacactcatgctcgttcactcctttgtttcatcggcatgtttctgatccgcaacctctccaacaactgccttagttaattcctaaaccatagtctctgctaaagcacaagcacttctttgatgccaaa

SEQ ID NO: 41009 - DNA, 431 bp, Glycine max
gaactataaaactcagcttgagctccttgtgttgccccacaaagcttacgatatttgtctcggccatgctcttccttgcgagccctcttggtttcatgttcaagggctcttatggtagctgcattttcttctcgtaactcgacacactctttccggacgtctgtagcgactaacttgaatttttctttggcgagtcttgcctttcctagctctatttttagagctcggacttcttcatcctcttccgaagcttcgaagttctcctcgttgataattttcaacttggagagccaatctaaccctcgtgtatgaactttcagtcattcatgataaccaccgatgatgccattacggatgcccctaagttctttatctttccttaacagtctttcccacgccttgtggactctttgtacaatcttgaaactttg

SEQ ID NO: 41010 - DNA, 405 bp, Glycine max
  unsure (1)..(405): unsure at all n locations
agctttaaaaacacaaatatctcaccattcataagttcttcatcattngaagcaagaatgtttgtaaaagacataaaaacaaaatgataatggggaatttttttcagcttgaatctctaaacaatcagtgttatataagaaaatcagcttgtagttattatatatagacttgagctttggatcatttttagacaccaagatattttgaatcaataagtttttcctttttcaagtactttccgaaaattgttgacatattttttcttgaaagatgcatgaattgtatcactctacacatataacataaacatatgttagtcgaatttaaattagaaaatgttgcataaaaaatacaatatttgaatttaagataatcttttcatccaaaagaaacaattcaatact

SEQ ID NO: 41011 - DNA, 424 bp, Glycine max
  unsure (1)..(424): unsure at all n locations
agaaactcagcttttaaaatcactttgaaaccatgctttgtgtttttttattnggcttcgctatgacttcattagcaatcatcacaccatggagaatatgccttcctttgagaaaggcagtttgcctttcatcaataatgtgaggcaaaacaagagccaacctattagcaaggactttagacactattttataagcacaccctataagagagatgggtctataatcattaagagattgtgggttaatgatcttggggataagggctatgaaggatgcattgcttcctttggggaatctgccatttatgaagaactcatccatgaacctgataaaatcaggttttagaatttccaaaaactgtttaataaagttgaagtttaacccatccgggccagggcttttatctccaccacaagcccaaac

SEQ ID NO: 41012 - DNA, 342 bp, Glycine max
agcttttccggagcccattatattgcgttttcgttcatgtgtctccaccttcgagtttggagctatgcgtagtgattgcttagtgcaattctccattctcaacctttttcggagccccatgaattgcgttttcgttcatgtgtcctccaccctcgagttcggagctatgcgtagtgattgcttagtgcaattctccattctcaaacttttttggagccccatgaattgtgttttcgttcatgtgtcctccaccttcgagtttggagctatgcgtagtgattgctttgggcaattctccattctcaacctttttcggagcccatgaattgcggtttcgttcat

SEQ ID NO: 41013 - DNA, 390 bp, Glycine max
  unsure (1)..(390): unsure at all n locations
ntacatctcaggctaagcgcatattcctttttttttgtgttgcagaaagtgctaagcgccacctactgcgctaagcccggatgctcattggaatttgaaacttcaaattgggcttagcgtgaggttaggctaagtgcatgggctttaaactcaaatgtcatattggcatgctaagtgcgccaaacaaaaatgctaaaatgaattagaacttccataggtggttacctttacacaaaacttttgcttcttttgctgtgctttccttctgtgtgtgtgcattttgctgttgtgcctcaagtactttctacatcttcttgcatttaattccaatccaagtaagtagtgcttcatttccattttcatactttgaaacttaagatagacgatttc

SEQ ID NO: 41014 - DNA, 392 bp, Glycine max
agcttcaggctgttcaattgtttcagtttgttgcacagaagggcaaaggtctgtgtggtgatcggcagaggagcataaaccacagagtctggcgacaagtgtagatttttgattcatggccagttggattaccaggttaaccaaggcatctagtttaccttcaagcttcttagtctcgactgatgaagatgaatttgtggctacttcatgcactcctctaatgacaatagcatcacttctagcactaaattgctgggagtttgaagccatcttctcaattaaatttcttgcttcaacaggggtcatgtctccaagggctccaccactggcaacatctatcatacttctctccatgttactgagtccttcataaaaatattggaggagaaact

SEQ ID NO: 41015 - DNA, 257 bp, Glycine max
  unsure (1)..(257): unsure at all n locations
tgtgcaaatcaaacactccacttttatctctattatgcatnnnncttgtcttcgtacccactcctcacgtttggttttagggaaaacaccataactaaacgcgccacaaggcatccctatcgcaccagatctaaatctataacgatgggtgatcaagaggagacacagaaaccgatgaaagctgacatgtcagctctgaaagaacaaatggcctccatgatggaggccatgttatggatgatgcagctcatggagaa

SEQ ID NO: 41016 - DNA, 397 bp, Glycine max
agcttgaaggtgtgtagcccaccatcttttatagtagaatactggtaatgtgtttactatcattgtcatcattttttttcgtcattgaggtgccacttgagctgccaggtctctccacctttgggcgtattctttggaaagatctgtgccctctttttgcacatgttctgtagttgcatcctatccgaagccattatattgacacaacctaacgaaggcaaccattaggtccttccaagaatggactcgggaaggttcctagttagtgtaccaggcaacagctaccccaataagactttcttggaaggaatgtatcagcaattcctcatttcttatgtatgcccccatcttccgacaatacatctttagatggttcttggggcaagtagtccccttg

SEQ ID NO: 41017 - DNA, 407 bp, Glycine max
  unsure (1)..(407): unsure at all n locations
tgtttattttctcaagtgttncattcaattttgtttatgctncggntgcttcaaatacaatggtgctcctacgatggttaacctccaagactaaaaaatcttcctacaagcaatgcaccaatttcctcttccaatccttattgtaggcaacacataaacaaaaaaaaaaaaaaaaagacaagcaagaaaccaaaagatgaaatgaaagctaaaccaaaatgaaatttaacatgacattaattcaatgagattcaaggaaaataaagcaaaaggacagcaccacattccaaagtggaacacaaaggaagtcctagaatggcactagattagattgacaaattaaaaacaagactcaaagcaaaattccagttatttcaatttggcaacatgtctaacagataaacaac

SEQ ID NO: 41018 - DNA, 408 bp, Glycine max
agcttccctttcttcggccaatgctggttttgtttggcagtgatttccttggcaatttgatgctcagaaacagcaatatctatcactccatcagtaggtctgcccagatatttgttgatcacagcaggggagaatctaacacactttcctctgacaaatactttttgatactcatcactctttctgtttgttatgtcagagggaatgttgacaatgaattccctgactaggccttcataacagtctcccaatttggtgactgtcttcagtagtccagcagcctcgatgaggtccatgatttccttgcaatccaaggcatttcttcccatttctctttctaaagcaagccttcgttgatatacaaatttccacctttcaacattgccaatggagtggaaagagatgttg

SEQ ID NO: 41019 - DNA, 359 bp, Glycine max
  unsure (1)..(359): unsure at all n locations
tgccgctggagctgacccatcaactgccctaactcttttatactggttatccctangctcttgaccttgacttgatagaacctctttttaagcgaaggtgtttgacttgatcccatgttttactaaagtgaaacaaaatcgatgcgaatcaaaactccgacatctatcatgggtggaatggatgaatgcatgaagaaatgcatatgatacaaatgcaatttatgaacacgggagcccgggaaattgtctccttcttagatacaacgtcttggggtaacacagtgcccaacgtatgtatttaagaaggtgacatggaccttccgttggtttgccaaagagagggtgtcgcaatgtgccct

SEQ ID NO: 41020 - DNA, 408 bp, Glycine max
agctttcgaggtgaggacacccgaatgtttttcacatgccatctttacgaagctttgatgcaaaagaaaattaaaacctatatagatgaacaacttgaaaagggagatcaaatcgcactagcactcaccaaagccatcgaagattcttgtatatctattgtcatcttctcagataactatgcttcctcaaagtggtgcttgggtgaactcttcaagatcttggaatgcaagaaagaaaaaggacagattgtgataccagtgttttacaatatagatccatcccatgtgaggaagcaaattgggagctataagcaagcctttgcaaaacttgagggagagcctgaatgcaacaaatggaaagatgctcttactgaagcagcaaatttagttgggttggactctaaaaat

SEQ ID NO: 41021 - DNA, 431 bp, Glycine max
ggaccttaaatctcagctgtgcttaacaattgcacaagacccacttccatatgttagaacaatttttttttaaaaccttgcatctcgtatgaaatatgttctctctttaggtttgggttaggtcagcggatttactcccaaggagccttctcaccattagaagatcaccttcttcatagggtaaacctcttcaatatgctcatcacccatggcttcaccttcatttccacttgaggaaggagaagaagtagcctcctcttggctactatagatgtcttgacccctcataatcatggttttctttgtgggggtattgagaagcaatgtggcctttcccaatacatttaaagcacttaatgttactagttctatcttatgaactagcctttggagtgatttcctctatgcatttacccttatcatcctttggc

SEQ ID NO: 41022 - DNA, 393 bp, Glycine max
agcttctcccccaatttctataaattttggagattttaagtgtttaagggttcagccccttaggcacttatctctctttcgaatttgcttggaaaaattgtttctgtgaagaaaatccaagccgaggcgcttctgaaacgttttcgtaacgtttccgtgaggaatttcgcgaaggtttcgaccgttcttcgacgttcttcattcgttcttcatcgttcttcgatcttcaacgggtaaatacctcgaaccaagcttttcgattcattctatgtacccgtggtggtccacattgtgtttcgtgtatttttattctcgcttcatttactttttatacccccctttgacgtgcttaagccattttatttaagtcatttctcgcttaacctaaaaatg

SEQ ID NO: 41023 - DNA, 423 bp, Glycine max
tgccacccagctcgcccaggcgagctcagctagcctatgcgttcatgtgttgcttcctccagaagtaacagccttctggagggcccaagtgggcctggttgctatttgcacccccatttttactaagtacaccccattgcctttttttttgtgattcttttttcgtaaagttacggaaacttatgaatttcgtaacgatacttgttttctttccgtaatgttacggaaccttgcggattacataatcatcccctttttgacttacggaatgttacggaacctcactaatcatccccttttttgatttccggtgtgtcacggaaccttacggattgtgcatcaatattttcttttgttttccggcatgtcccggaatttcacaaattgcctaatgatgggtgccaagcacctcacaaggaccaa

SEQ ID NO: 41024 - DNA, 415 bp, Glycine max
agcttgtaggattatggggtacccatcttatgtggtattaggtggcggtcgggcgatggtgcacaacaagttttccacatccacaaagcgcgcataaacccaccatcccctgttgcccacctccaactgagctcacgtactcccacgtagcccatatcctcgtttctctcaacaccgggtccccatcaatcctcccaagcttccacaacatccaagcaaaacaacattcaaacagcataagctatcacggccaagcaaaacagagcaaaggcagaaaactctgccaaaaaaaaacccaaccaaatcacagcttttctcacttaaagatcccagtaacaattccctcgttccggttcattaaccgttggatcgactcgaaaattttactggaagtctttagtacataagcctacat

SEQ ID NO: 41025 - DNA, 426 bp, Glycine max
  unsure (1)..(426): unsure at all n locations
tatttcattntttccatcttactttctactcgtattttgttttatgaaattttttattctaacaagcccttaaatatgcaaattcattacaagaagttagagaaagtaagtttgttaatgtgattgagaaggttcaagttaagcagtaaaacttctttcacaaaacaactacaccctaactgtagcaaaaccatagtcaattcaaatacaaactagtgaaaaacataatattaagaacacaaacttccattttcaactatgcaaaaagggaaataataactgagcagaaaacacactcacattggtgtcaccgttggagagaaaggtcttcatcttcctaacagaatcattggcgtcgcggaaaagaaataggaaattatgctcaactagcgtcataatgtctctcatagaaagcaatctaccacc

SEQ ID NO: 41026 - DNA, 414 bp, Glycine max
  unsure (1)..(414): unsure at all n locations
agcttgtacacgacaacaccaacaaagtttatgaatccctccatatcaatgatgttcaataccaacacgctctttcccaccttctctctgtctctcaggtatatttgcaattcatgcatattgatatgctcatatgcaaaaactagtttcaaattttattcttgcatatggtgtttgtttattatatgcatagtttgtcaatcttccttaaaactttattttaatattaatggtatgtattgaatgattttaatggttgagataggtagcactgacacagaagagctgaatttattggcagttgaaaatgttgaaaggagaagagatacttgagcaattcgaagcttctagttcttctgagccggtggcttctataactcaggaaacaganagtgaaaatgaggatgatgggga

SEQ ID NO: 41027 - DNA, 429 bp, Glycine max
ctcaagcttgaaacattggaacccttggcttcagccactatcttttcgaatcttctttcttagagggacccagggaaacttcatgaagaagcagaaactaataaattagttttaataatatagattttgaattaagatactgtttctgtaaagacattaacttaatggtattgagttgactggtgcagctattttgtactcaaaagaagccaaatagaagtcatcaacttttttgtttggtatgataaactaggcataacacttttggcaaatagtggttgattttagttgcttgttagcatataatggattcatagcagctggtaaaatagacacccaaattaaagccatgacaactaaagtttagcgcattctcgtttggacttaatatacagtgatttgcatgtcatgctcctgtgaattatcatt

SEQ ID NO: 41028 - DNA, 388 bp, Glycine max
agcttgctactacaactgtttttcttattctatgcctcaggttgcttggatcgcaacatgttttgtgccaacaacacatatcgtgaggatagctgtaataagctctttctagcacgaatatgagctctatctctacataatagcaatgtcacttacagccatattatccatgagatccatggcttgttacgggtctaacactgattattccccttgtgcaaacatcacacagcaacatggatagaggtctgaacccatctataaaaacgttgaactgtatcagttctgataatacatgagtgcgagtctttctcaataaaccacaaaatctttataacgcctcactcaaagattcatctgcaaatcggtgaatagaagagatggcggc

SEQ ID NO: 41029 - DNA, 381 bp, Glycine max
tctatcggagcgctgtgtgcccgtgtgctctagcatgacgttcttcatagacatctacctattcatctgctcccccgaacacaagttcaagatcatcacacgattcaaacacaacaccacacacggagtgagttatcacattccttgctaaaagagaaacaagatcattaagctatacatattatataaatgagataatacttgcttaaacatagctcaagtaacttcaccacttcgtcattcaaaattcacttttcaatcatcgatcacattacacaacaatcccacacttcgatcaagatataataacgcatccattagcgagcatatgcgacagttatgctaagactcaatcctatatgcaatgtggtaccatgttag

SEQ ID NO: 41030 - DNA, 401 bp, Glycine max
  unsure (1)..(401): unsure at all n locations
agcttgcaacatgagatctttagatattttttatttattnggatttagtgtaagactacatgtgtttgttagttactatgtgcaatatggtattaacaatgtaagagtttggtgttgctcattgaattaaaacatcattgttgtattactaattaaaatcaactgatgttttgatgcagcaagatcattcaacctcgaggtttcagttttatagttaatgcatgtatacttcaggcaatgtttatacttagtgtcttaagcaggtgtggtgtaagtcaaagttagtgtgactttgtattaaatcctcttttgtggttaaatggtatgacattttaatggtgcaatttttaattttgagtcatgataatcaacttttaaggctattatatgcaaggtatcat

SEQ ID NO: 41031 - DNA, 396 bp, Glycine max
  unsure (1)..(396): unsure at all n locations
tctaaactgtgtacaagaacgaagctctgtaccatatgctttacagnggccacagatatcttaagaagggggggttgaactaacatattgcaaactgtttgccctaattaaaaaaaatctatgtgactttttactcttgttatgaaatcccttaatgacaatcttcctaaatattaatccaaatgaagcatcttgaatatgaatatacagctttgataagtaaaggagattactggaagatgaatacgctaacatcagttttatacttggtcggccacacccttgtgcctacgtacagtacccaagcaacccgcttgagagatccactatcttcgcaaatcctttcacaagttctaaacacacctagacaatccttcccttgtgtctatagatcct

SEQ ID NO: 41032 - DNA, 405 bp, Glycine max
agcttgtgaggatcggtgtttgtctttatgtcaaactctctcacggagtgatttgttggagagcaagctgtttatcaaactaaccaactacatgataatatttcaaagattcagacccctgtgataacagaactagatataaacactaattttaatctatatatgatctataaaaaaagggaataccatctgctagttagacatctgaatatcttattaattatgtactatttttcaatgtttataaatttagaaaattacggtcaattgttagtattcaacactttttcaagttttatgaatattaaacttctaaccattttcttaaataatatttaatgcatttttaatttatcaaacaattagttcaatcaaatattttttttgttgactcacgttaaaaag

SEQ ID NO: 41033 - DNA, 401 bp, Glycine max
tgtacaatattcagttgcaggagaaaatctgtctgttttttatactacattgggggggaactgttagagtatgaatgccatatccaatgtcagaaatcattagattctatcgattgtgtacatattagtatttagtacatggggttagtatttctggttcagttgtgtggatctatgcaacatggtggctttagttaaacctctacccatggatagttttttctgagtaatctattgctaattattagttttttcctgctttggggaagtataaacccacagagaatatggtgtcaaactctgattggagatgtgaaatcgcagtttatttgcttaacaaaaaagtagttattgatttgtgcttgtcatatatcgatgagttctactgtggctgcagtaac

SEQ ID NO: 41034 - DNA, 366 bp, Glycine max
  unsure (1)..(366): unsure at all n locations
gagcttcnggaaggaatatttcggtgtgtttgcaattttgcaatccggcatcccaaatctctggagagtttcaccagcatatttcctttgatgcatgacaatcccatattcagtccacaagaattctaacccaaggaaatatgacaatttccctaagttagtcatttcaaattcactcatcatgagtgaagtgaaattatcaatctctgttgtatgattaccagtcactagtaaatcatcaacgtataggcacaccattaacaccttgttatcctccttcaacatgacataaactccatgttctaccacacaccttttgaagccaagttgagcaagatatgcatcaattctcctattccatgctct

SEQ ID NO: 41035 - DNA, 419 bp, Glycine max
  unsure (1)..(419): unsure at all n locations
tctcctaccaatatatttatnnacancggatgtctatcctcattgactccananatagcgcaatgctcggttaggcaaacgatctatgactatgaagcaaagaggtaggtatcgtattgctcgacatctaaagtttcaacacttcatcttttgctctgttaggcaaacgatcattgaacaggtgaggtatgtaccgcccaacattagggtttaagaaatcaacataccacatggagggagttccttttctcatcagtagtagctagtaggaaccaagaagaagagtaatgtctttttatattctactgaatagctagcccatttttatttttaataaagggagttttttttttttaataaggagaaattaaaaacagcatcaaaaacgtataataattcatacactttcttcagtcaat

SEQ ID NO: 41036 - DNA, 408 bp, Glycine max
  unsure (1)..(408): unsure at all n locations
agcttgcagagaannntttttactcctttctttcttaaatcacttctctatgaaaaacttttccctctttccattttcttaccttctgttcacacccagcgcacacaagagaacaagaagagagagacagaaagagagggagaaagagaaaatcaaaaaccctctttcaaggcatgtcatagatcgtgtttaagtaataggcaggcaataacataggagataagatatataccaagttatcagactcatttgtacataattgttctgtagcacacatttctgattccaaaatcagttgaagaataacttaacagaaattggaggcagattctcatctttagtaaaagtgttccttcccatattaaattagatgatcaaacaaaattgtactacatattttttttctct

SEQ ID NO: 41037 - DNA, 421 bp, Glycine max
taatcgttactgcccccggcttgtctagttcttgtctcatgttctagtatcttgtattattgcaacacctgcaactctgctccctgacattcatgcatgaattcacctgtcagaaagacttttgatgcaaagaactctatatccatgaatccatcaacgccatcttactagctagtcaccaagtcaaaccattgattcttgatatcaaattttttgaaaaatccaagagagtaaatactagagaaattttccacaataggtcaccaaacaaattacataagtaaacttgatatcatatcttagagttccaacacttatttttgaataaaaaaaactgtaggtggattctagaataattttaatagcataagagataggcaaaaccaaaacatagttttagttcacaaactaaacaggatct

SEQ ID NO: 41038 - DNA, 396 bp, Glycine max
  unsure (1)..(396): unsure at all n locations
agctntagaacaagcctttgttaactttatgattctcatattttaactaaaaaatgttcttatttgaaagaatagctttgtaatgctcataaatgaaatgattagctcaaaatagacactgaaatacttttagaaaaaattagtttgcaagaatctcatttcaagctttctaaacagttaaaattgagaagagagacaactgcaaaaagagtcatctatttttgaccaaactcaaattttgattttttataaattatttcttgttataaatttgattttgtataaattctctattgttattttgattttgtatgaattctctcttgttatattttattttcattaaccttgatgcgtacgatttgttttagtttgttctttttcctttatgtgagg

SEQ ID NO: 41039 - DNA, 359 bp, Glycine max
ttgcgccaaaatcccaactcactttatatcttgactggtgatgagaatttccatcctcgccctcggaagaaaacaaaaaaaaaagaacaagatggttcccaatctaagatcggaagaaaacaaaaaagaaaaaagttcccgatcaaagatcggaggaaaacaaaagaaaaagaaagttcccggtcaaagatcgaaagaaaacaaagggaaaaagaaaatccctgatcaaagatcggaagaaaatgaaagaattatacataatggtgtttggaccacacaaatatccaaacaatatagaatagccacaaccaaataaggaaagaaaggaaaccatgacttgaagtggtcctctccctttg

SEQ ID NO: 41040 - DNA, 397 bp, Glycine max
agcttcaagataaggccaaactcccctttaaaatctgatttcaggcttaaataggtggctttgtttgtgctcgtgcgcttagcacaattctgaaccgcttagcgcgcattagtgaatttcggcttagtgtggacttttctcactcagcaaatggactgaagcggtgcgcttagcgggatggctcttcgctcagcgaacatgcacagctcatgcttcttccagattcttcctcgcgctcagccgaggagtgttgcactcagcggatggctcgctaagccgacaggttggcttagcgagagggtgaaaatcagcactatacaaactcgcctaattaacctgaaattgagagaaaataattattaaacatacaaaatggaagtactaagtatatattacc

SEQ ID NO: 41041 - DNA, 410 bp, Glycine max
tcgatggagaacaaccttaggatgcagtatttacatgcacagagaagaaaaaagtgcaagcaaaataggtcacgtctaatataatttaaattgtaagttcaacatcggttttcaataaaaaaaaaaaaaaaaaccaatgttaacaacttgatgttaacgttaacatcgattttattaaacaaaccgatgttaacgaactaaggttaacatcggttttctgaaaacccgatgttaactaattaatgttaacatcggtttttccaaaaccgatgttaaagtcacttcattaacatcggttttcttcaaacatgatgttaacgtatacacattattcacaattatgccaccgcgttatcttaacatcggttttttaaaaaaccgatgttaataaagtctcattatttatcatt

SEQ ID NO: 41042 - DNA, 401 bp, Glycine max
agcttcaatggagcttgcatcaccaccttctttatatattacaataccgatgatgtgtctaccatcacgagtatcgtctccttttccatcattgggggtacaacttgggctgccagatctctccacctttgggcatattcttttgaaagatctgtgcccccctttttgcacatgttatgtgattgcatcctatccaaagccattatactggcactgcctaacgaaggcaaccattaggtccttccaagcatggactcgggaaggttccaagtcatgtaatatctaccccagcaagactttcttggaaggaatgtgtcagcaattcctcatcttttacgtatgcccgcatcttccaacaatacatctttagatggttcttgtggcaagtagtccccttgtac

SEQ ID NO: 41043 - DNA, 487 bp, Glycine max
  unsure (1)..(487): unsure at all n locations
aggggnnnnnncttgcnaatgatacgctgatgttcngtgtcactatacaatactcaagctgttgccaactgacgggctgatgcaacaaacctgtttatgttttatgtatcatgtaaaattaggaagaggaaaacagagacttgttaaatcaagcgaacataattaagttagaccacaagtacatcaggaagaagttgtgtaagtggaaataggaaggggacatatcagacacatcactgaagccctactatgacaagatgtggaaagacacgctaatttcctaacgcagcgcctgagtttagaagtcacataaaacccaggaaaaatatctttgaaaattaaaaactatatatatatatatatatatatatatatatatatatatatatatatatatatatatataattttggatgaaatcaaaatgggtgcgattactaaatctttgtcaggacacatgctatggcgggggagcacagataaaaag

SEQ ID NO: 41044 - DNA, 408 bp, Glycine max
  unsure (1)..(408): unsure at all n locations
agcttgaatgaggaanaatcangggtattattggttttattgcaaanggaaatggaaaatagtaattctgataggaagcctaaaagcataccccttttcgggaaaccagaaaataaacataataatgcttgcttaaatgagacagttccctgaaagaacatccaatgaaaagctagtgccaaaagtgactgaattgcatataagaattatgcctattctgctgacatgaccataaaaaccaaaatggtacaagatgctggacacattgcatttcatcagtaagcaattcagagctagtgccaaaagtgactgaattgcatttcaactaatattctacgataaatcacagggtaaaactagcttaaacaaaactcagcaaagaacaaactatcaccgtacagaagtagt

SEQ ID NO: 41045 - DNA, 430 bp, Glycine max
tactcaagcttggacagcaccttttgcttggtatactatggttcatttttatagagttactcgggaatttttattatggtaattggatgattaattctactttcaattctgtggatccctgctgctgggaatttacggaagtagaatcttgttcagaagatgcatcttttagacattggagagcaattgggctaacataacacaaccagtaataatactttattgacggcgatgttttaaaaatgtcgaatcaacttatggatcgccgctgttcaattggcttagttgatcttgccagattctagtagaatacgatacatactggggtaaatggttgaactcgggacctgtccgttgtacgtttaattaacaagttaaattcacttgagtatgtagcgttatatccatttatttttcacacaatggagta

SEQ ID NO: 41046 - DNA, 407 bp, Glycine max
agcttcttatttgatccagagaggagtgcatacattttattttactcaagtcacgcccactaaactctggcacaatagacttggtcattgccatcttgaaagaatgctaaacatgaaaaaaagggaaatatgcaaaagaaaatttgaagaagtttcaaatggaggaatgcaaatctgttagcacaccaatgaatcaaaaggagaagttcagtaaggaagaacgtgttgataacaattatgaaggatattatgggaacttgattggatgtctaatgtatctcattacaacaaggccaaacattatattttctcaaaagaacaaaactggaatttttgttgacaatcaagtagtcattgctattgcaaacaatctcgtgtgtcatgggaagactaaacatattaacatc

SEQ ID NO: 41047 - DNA, 284 bp, Glycine max
aaactccacatcctcacatactgtgatttaatttaaatactattatttctaatgccagaaagaatgcatctaaggtggttcatttactcctcggaccaccctatacttaccttcatatatatcaattatcttttccagatatgagaaggcttggatatccaattggcttggagtcttacatatcatgatgcaagagagtgacattgattgtatgcgtttaagtctgaagatccagattccttactaattgtcaccttatgagaatagaagactggaacttggat

SEQ ID NO: 41048 - DNA, 408 bp, Glycine max
  unsure (1)..(408): unsure at all n locations
agctntacgcatccagttttgccaacactattggcgtgtacaagatcttcctcactgttgcagaggttgttgcatattgttctccaaagctggttgaggacccttgaaaaatatatatgaattttgttgtcggggaatagaaatagagaccagaagttttcagtttactaaagttagctagtgaaggatatatgaagaagaaggtgtgaaggatgagaattaagatgagattggttgttacaaaaagctatagtagaagaaaggggcctatccgattttgctactgtctattagtgctactactagctccaccattcttatcttaaaagtgttgaaattaaatactacaaaataaaacagagataaagttaaggtgcatgcaccatataggcatcaactcgttctctt

SEQ ID NO: 41049 - DNA, 435 bp, Glycine max
  unsure (1)..(435): unsure at all n locations
tagaatactcagcttcttatccaaggctcatcttggtggtgaagctccttcttcttggcttattccctagnggatggcgcctcctctcacctcttctcctttgtcttctactgcatctccatggtggaaaatcaccattaaaggacctcattgaagctcaaagatccagcctccatagaagccccacaagcaagcttccatcaagtggtaatcagagcacaagagcttcaagtaggtgctccttaaacctccattaattttttactttaccttctcttccattgttgtttcttcattattctccatgtatctcctcacatgtcttgtgctaaatgtttttaacatgattctttagagtttccaccaattaaacttgttatagaagctagatatgattttctatggttcaaaattcttgttcttgttcttaaccat

SEQ ID NO: 41050 - DNA, 412 bp, Glycine max
  unsure (1)..(412): unsure at all n locations
agctctagggtctgcttcctgaaggtttatctctttctttaatgtncccataattataatacacaaccttttccatttgatgtgttccctctcgcactttcctctattttcattcttctgcatatttatttttgttgcgattaaatgatttttacctctcccttgtggtattttggtgctttatttgttattttctttgcaatgtttgtgagataaattgtttgcaaacccatgatcaaaaggcttggattggtggttgcaatagatggctctaggcctatctttgattctgttgtaaatttgcatgtcatattgttctttatcccttttttttacatgttttaacaagtgcccatcaactgtttgataaaatgccacaatgaccattccatgtgttgtcttgaaatttgaa

SEQ ID NO: 41051 - DNA, 423 bp, Glycine max
tggttatctccttcttcactacatcaagaatcacctggttgtgtcttctctgtggctgtcttactggtttagctccatcctctaaatttattcgatgcatacatgtggatgggctagtaccaggaatgtccgccagggtccaacctatagccttcttatgcttcttgagaacagacaacaacttctcctcttgctcatcactaagggaggcagatataatcattggaaaacttttgctatcatccaagtaagcgtattttaaatttgatggcagaggcttcaattctggtgtggttggctgggtagtggtagaaggagatggtttctcagcctgtacctcataaagaaagtcagaggtatgtgtacttcctgaaacatggttagtcctatctgactctataaaatcaatctcaagaggcaaaa

SEQ ID NO: 41052 - DNA, 205 bp, Glycine max
gttttggaaaagaactcatacttacagaaccttatcacggaatcttctgagagggacgatgattggctaaaaagcggctagggggggttccagatcacaaatccaagatgagccaaaatttatcgggggcgcagagatcacgtgagctcaccagaccaaattctgacaggatctattgtgtacagccagaacaacttattttgtt

SEQ ID NO: 41053 - DNA, 367 bp, Glycine max
actcgggcaagtgtggccatgtactccgctttacttgccgaaagagcaacaactgattgttgatttgctttccaactgattgttgtaccaaacaaagtaaacacatattctattaaagacttccttgtgtctacatttcctgcaaaatctgcatctacatatcctgtgactgctgcctcgtgtgctgtcttcttgtaccttaaactagctttcaaagatccatttaaataccttagtgtccacttcacagcttcccagtgtgcactgccaggatctaccatgaatctgcttataatacttacaacatgagccaagtcatgtttactgcaaaccatttcatactctattgttccaacaccactggcat

SEQ ID NO: 41054 - DNA, 403 bp, Glycine max
  unsure (1)..(403): unsure at all n locations
agcttgtaggaatatgggtttcccatattatgtgttactaggaggcggncgagcgatggtgcacaacaagttttccacatccacaaagcgcgcataaacccaccatcccctgttgcccacctccaactgagctcacgtactcccacgtagcccataacctcgtttctctcaacaccgggtccacatcaatcctcccaagcttccccaacatcaaagtaaatcaacattcatacagcacaaattaccacagccaagaaaacagggcaaaggcagaaaactctgcccaaaacaccaaccaaaatcacagcttttctcacttatagaccccagtaacaatttcttcgatccaattcgttacccgttggatcgactccaaaattttactggaagtctatagtacata

SEQ ID NO: 41055 - DNA, 410 bp, Glycine max
  unsure (1)..(410): unsure at all n locations
tactcaagcttggttcccaacgctctgtacaagctctgttttatttacagttttatcnaagatctttggcagatactatgctatatggcacaccatgtaactagacaacctcacttatatacaaggtggtgaacttctccaaggaaaatctgatattaacgggaatgaagcgagtagacttagtcaatctgtcaacaataacccagatagaatctaaacctctacgggttctaggttgtcttaccacaaaatccatggaaatactgtcccacttgcactggggtatctctaacggttgtaacttcccttaaggtctctgatgttatatattatccttctgacagactacgcatgcatacacacactcactaacctctctcttcatgttgggccaccaaaacatcatcttt

SEQ ID NO: 41056 - DNA, 305 bp, Glycine max
aacgaggagaggggctacgggggagtacttgagctcacatggacgtgggcaacacgggatggaggatttattcactcattgtggatgtggaaagcaagtagagaccaaaagttcctaccttactatagttacctagtgaagggtatctcataaatatagaggcttggaatgaagaaatgatgagaggggatgctaccagaatctattgttgaacacaggggcgtacctgaagatatgtctgggtggtaatgataccttggggaccccatgcgtagtgtaatagcgttgaaactaacttgtccaat

SEQ ID NO: 41057 - DNA, 385 bp, Glycine max
tgatatgaggaagtgttgaagggtgaaatcttccagtatttattgctgaccacagagcgggagctggatatatgtcgcgggggtcacgacaccttggggacgtcacgtggggtgctattgcccataaccaagcttgaccaatcccgacccaacccgggcataatcggtcagtgagaacctgtgatgtacctaatcaggcgaactcctgacagtcaacaaataaaaggaacaatgaccacttctcaaggaggcttgtggtggctggccaactgggaaacttgattgatatgtgagatatggactctggtgatcaatgacctaaggtggtgaatcgacttcaaggcttaataatgaatacaggaggctaatatggtctctggtaatc

SEQ ID NO: 41058 - DNA, 430 bp, Glycine max
gatccctaagtcacctgccgcatgctgctttagggggggggatataaaatttcacattcgaaaaaatggcacacctatttatggtccaatcagaatataacacgtggtaaccaatgttcatgtgtaacagttaacatccaaatttgggttccatgaccaaatttacgggattgggcataaatggggggctaaattcattaataaatttaaatgaggactaaaatcgaaattgtagacaattagggggaccaaatttgcaattttacttattaaaaattaaaaaaataatttgacaatcaaggaaggtgtggtaatgcattatttcctttagtgcttttaataaacaataacaatttaataagttaggggataaatccacctcgtcaatgcaagaagccaaataaatgttttttatataattaaaatttat

SEQ ID NO: 41059 - DNA, 423 bp, Glycine max
  unsure (1)..(423): unsure at all n locations
ttatacaagctatcaaccaaaataaaaactataaaatgatattttaaagactgaaacataaacataaatctaaattataaaatgtactaaagacgagataatattaaaactgttcaaaaagcagggaaataaaaatcctgtcagtgatcctagtcctgtggtgatggtgggtcctgatccatggcctcctcgttcaagtccagtgcaggagtgtctgctagagatgcctgttgagtaccctttgcggtcactagatcatcctaaaaaataaatggctcangtggagtgggagtggcttaagaagagtcatcctcctggtctggctgaggttcctgggctgcggaggcctcaccccttcccaaaggagaaggcaggactcttggccaggcaacctgttgcaaaaacatctccatgctcataacc

SEQ ID NO: 41060 - DNA, 390 bp, Glycine max
agcttggactgtgctagatataaaatttttgaccaaagtgaaccaagagccatttctagggcaaaattgggtgttgaggagtcaaattttgattcggtgagattttacgtgtaaatccagtttgagcaagtttagattgatgttataaatttgtgtgaggtgagagttagcttcaaatttacctcattctcaatttcacttctcaaacctataaaacccattgaattgaggggtattggacacctacattctgtgttgctgtgttttgaagcttgactttggtttagacatgattgatacatgatttgggacttgtaggatttgatttgcgcaagattggatgataggaagtgtgattttccaaatcttcactctatgcagaattttgct

SEQ ID NO: 41061 - DNA, 388 bp, Glycine max
  unsure (1)..(388): unsure at all n locations
ntgtccctaaaaccctctgngtatatcaaatctattttcctgaaaccctctatgtaaattagacagcctcgtctctcccttcctgaaaacccactaaaaactgcctaacccccctgctgttactccataatttattctgcaataactgcttaaggcagttacatatggtcctaaatcactacagattcagttacgattaaccctttgtgcctaactagggttttgaaacatcacaacaaagacagaccattgaacaatggattttcatcattaacatacaacagagacataccttcgatggaagcgcagacacgaactccacaaacgcgaactcgacaatgtggttgcaatcacagaagcgcagcccagtttgcgacacacacgaact

SEQ ID NO: 41062 - DNA, 396 bp, Glycine max
  unsure (1)..(396): unsure at all n locations
agcttcggattatagtgatgatgtacattccctaaaggcagagcttgaaagagcccgagtagtcgaagagaagttcaagtccatagccatcaaagtctgaaaagagtatgatgaactaagggacgtcaatatggccaccgctgatgccttggaacgagaaaccaagaatgcccaaaaggaagaacacgtgccagcaaagttttgaggggctttatagggcagcaatagtaagctcaaactccgaagaggtgaaaggaatcatcacgggtcaaaggcatgatcttgaaggacgagctaaaggcttaccttangtcgaaaagaaatttgtcccaacagttaagcgagactgaagggaatatgtgggccatcatcgatgagtgcaaagagaagctaaat

SEQ ID NO: 41063 - DNA, 416 bp, Glycine max
tgacttagcgcgtgaagagattgttcttatcgcaatgtttgcgcttagcggataagcaatctgaaattttttctaagtcattttctactaaacaagctgaaatcaatcacaatcacaagcaagatgtcctatctacatgcaagaaataaaaatgaagataaagaagggaaagataagctgggttgcctcccagtaagtgcttctttaacgtcattagcttgacacatcatcctgttatccaagatccaataatgttcccacttcaaggaccttcttctcagaccttctttcctccatcacatgaaatttaaaatagacattccggtcaggtggctctttatcttcatgaaataaatcaaaactgattttctgatcttctatgcccatgtgcaacatcttctttcccatatctacta

SEQ ID NO: 41064 - DNA, 399 bp, Glycine max
agcttaccaaaaacaaacatacaacaatttaggaactttgtcatttaacattatataagcttatcatctttaaatcatggtatttgataataaatagaactaatagcatttaactcgcataagcagaccatctcatactcaaccatcacgaaacaattcaatagtcaccatcaaacaataactatcaaacatacccatcacgagtccattaataatcttcaccatgtacaccaacgatagaatctactccatggagatttacactacatgagcaattaactcaagtacatcccttaacatagtcacatgcaccttgaccattcatagagactcaaatcaaccttattgagaaagtgtggttatatccaaaatggataagcatgtgtagtgcctcaccta

SEQ ID NO: 41065 - DNA, 423 bp, Glycine max
  unsure (1)..(423): unsure at all n locations
tgtttcttgcaattccaagacacaagagagcttcctttatgtggcatgtaattngcaacctgcacaatcagaatctctatatcttgactcatccactgatttacctttctcatctaagtcaaggtaggttgaagttgtcgttggagtatatggttctttgcattttttatgccaaatttcttaattagttctatagagtatttggtttgacataggaaggttccatgtttcatctactggacttggagtccaaggaagaaatttaactcacccatcatagacatctcaaattccttctacatacaactagaaaattccttacacaaaatttcattactagcaccaaatataatatcatcaacatatatttgaacaattaacaactcactatttactttcttaataaacaatgttttgtcaact

SEQ ID NO: 41066 - DNA, 408 bp, Glycine max
agctttgataccactaatgtaacgactttttctcgtttctacaatatcaccactctaaaccgcagaaatttcaatttttaaatgaaaactccattaatttgcttatgaaaaatgaaagtaaattttttgcaagggtgatgctgacaattatgcatgttgtaaagaaaattcaacaatgaattatatattgattttaacataatgtaatatttgcaaaaggataaatttgaactttaaaatatcagtcatgaatgataatattgtagtatgaaccttcaaataacgagtaaaagaaggtccactgtataaaatttgatgtgaacaaaaaatttagctaatgttgatcaagctagtacatgttcagctaaaggaaataaatattgatgtgaagatttttgtcaaaagtaa

SEQ ID NO: 41067 - DNA, 423 bp, Glycine max
  unsure (1)..(423): unsure at all n locations
tattcaggatatgggatgtcactctgcaaatgttttgtaatttgtgcttgaatggagaagacacctttttgacaatgaagtgcaagcggcagccagtttcttggatgatatcttgcggggtcatattgatcgttggacatcagactgctgggtttggaaaccagaacctaatggccagttttctacaaggagcgcatactgtatgctactagaaggagcaacaaattagactgtggatgaggctttagaggacctatggcagctcaaaatccctttaaaaccaacaacattttcttgacgattgatcaaagatagaatcccaactaaagggaatttgcggagaagacagctggagaaaggctntgcccagccctacaactattggtctagtaatttatcaacatcattttttgattagggtag

SEQ ID NO: 41068 - DNA, 401 bp, Glycine max
  unsure (1)..(401): unsure at all n locations
agctttgagggtgcgcagcccaccatattatatagtttattctganaangcgtgtaccatcacgattatcgtctccctttccattattgggggtaccacctgngccgccagatccctccaccttttgggcgtgttctttgaaagatccgtccccctttntgcacatgttctgtagttgcatcctattcagaaccatatcaaaattgtactgatactgcctaacgaaggcaaccattatgtccttccaagaatggactcgggaaggttccaagttagtgtaccaggtaacagctaccccagtaagattttcttggaaggaatgtatcaacaattcctcatcttttgcgtattcccccatcttctgacaatacatctttagatggttcttgagacaagtagtc

SEQ ID NO: 41069 - DNA, 427 bp, Glycine max
  unsure (1)..(427): unsure at all n locations
tgtaggattatggggtacccatcacatgtggnnacttgtggtattctttcganggcgcaagacaattctccacatccacaaatcacgtataaacccaccatcccctgttgcccacctccaactgagctcacgtactcccacgtagcccttatcctcgttcctctcaacgccgggtccccatcaatcctctcaagctcccacaacatccaagaaattcaacatcccatcatcacaaactaaaaaaaccaagcaaaacagggcaaaggcagaaaactctgcccagaacacaaaccaaaaatcacagcttttcacatacaaatactccagtaacattttgtttgttccaattcgttaaccgtcggatcgactcgaaaattttactggaagtctctagtacataagtctacattctgaccgttgggatcta

SEQ ID NO: 41070 - DNA, 411 bp, Glycine max
  unsure (1)..(411): unsure at all n locations
agcttcaaaccaaggtaaagcaaaacatttgttccttacccaccaaannnagngaattttcaaggtttgaaaggtgaaaatgaaaattaggtgattttgaggtaaactctcatcttcatcaagtctataacattgaattagacttgctcaaactaattttaaggtaaaatctccacctattcaaaatttgacctctcaacactcaatttacactataaatggctcttttctttcacatttgccactcattttcctcatttgctctgaccaagctttcctacaagtcctaattgacaatctaaactagaatcaactcactttaaactcaaatttccactaaccccaaatttggctttctaaccctcaaaatctcacacttttccacctacaacactaccattctcacattta

SEQ ID NO: 41071 - DNA, 421 bp, Glycine max
  unsure (1)..(421): unsure at all n locations
tcccgaatccattcctgtgaggaacctaaggngtattcttatgcagngncggnataatggcttcggataggatgcaactacaaaacatgtgcaaaaaagggggcatggatctttcaaagaatacgcccaaaggtggagaacctggcagctcaagtggcacctcaatgacgaaaaaatgatagtagacacattaccagtattctactatgaaaatatggtgggctatacatcttcaagctttgatgatgttggtcttcaccgacgaaaggatcaaagtaggtctaaaaagaggcaaatctgatcatcatgctttgatacatgccaaaaaaactagggcaaatgaagagggtgagaatgagggagaagcccatgctgtggctgacattcctatacagccaagtttcccaccaacctaacactg

SEQ ID NO: 41072 - DNA, 412 bp, Glycine max
  unsure (1)..(412): unsure at all n locations
agcttgtaatatggttgggctccaaatattaatgttttttctagaanacaacaaagcatcaaggggttgagagagaaattgtcaaatgaattacataaaatgtctcactctcatcatttcataatgaaaaccattcctaactcaatcagccttttccaattaaatcatgtgtcaccatgattccttgattctccttttttttctttcttcttattcatatcattttttaataggaactaaataaaatgaacaacaagtattcatgtcacatgtgaagagaggacaaactacaattagtgacaatctttttaaactcaacaattctatgccaattcaaatcaaccattaaacatgagttttttcccccaacctaaatggaccccccttcatgcacaatttctcttgtacctag

SEQ ID NO: 41073 - DNA, 422 bp, Glycine max
  unsure (1)..(422): unsure at all n locations
tctgcacttgaataattaggctacgaganagggcttttgtattgtgtaatnagnacaattaggtagcgatttagttagatagttagtgagttagttatttactaacactctatatattagtgttcgtgagttagtgattgaacttcacttcacttaacttgaacttcttttgtgtacaaaacttgttgcgcaagctttcttttttctctcttttttctctcaatagatccccattcttctttatcttttcacttccattctaccattttcttgcaccacattttgtggtttctccattggtgatgatcatggagggctaaacaattaatcagatccaatgatgtactccgagcaaggctaaatatgagttctggctttgctcttctactctctgcgaatgttcttcattctcttcaatccta

SEQ ID NO: 41074 - DNA, 481 bp, Glycine max
  unsure (1)..(481): unsure at all n locations
cgcanacaagcccacgcatganatcattgangactttgtagcatcnncagattcncnagagnggacccgcgcgcatgcaagccngcagaaaaaaccattattagnttttttaccaagccacacgcgggcgcggacgcaaattaaaanatccgaggacgacggccacaangaccagangaaaaaggacagacaaacggangcacagacgaagcacacagnnangccncncaagaaacacaaagngccccgagagcnnaagagccggacacgaaangacaaagagccaagaacaaaaaaaaaaaccgaaaganggcgctcaaggacgaaactattgtttcaagacccttagtatttataggacgatgacgtcctgtgtctgaaagctctatagaccaatacatctatcacttgagattcaggctagagcttgtgatcatagaagcatttaatgctggctgaaatgttcgcctcattcatgctg

SEQ ID NO: 41075 - DNA, 481 bp, Glycine max
  unsure (1)..(481): unsure at all n locations
aggggncagggccggcnaatgatactagacattgcaaancngngacactannnaagactcaagctgcagaaggctcaagcgacggccaaagaaatgagtgtacttctacngccgcaacaaggcacattggaggatgacaagccctcgccatcacacctgactggatgtaggtcgtccaggaacattatctccaagacggtcgaatgcccttggccgaagaactaaacttccgcccaagcatacccagagaactcatactgtctaccactcaactgaactgaggatatgactggtgttcaagataaagaagacgtgcgaccaacacaagaacctctagaagccatctcattatattgacgagtggtgcaaaacaagacgtcatactccctcaaatagaaccttaccaaaatggtcaaacgcataacccaccctactcgtgagagatagtgatatctcgcactatatctagagttggggagtn

SEQ ID NO: 41076 - DNA, 402 bp, Glycine max
  unsure (1)..(402): unsure at all n locations
agctntgatgcaacatttgttgaggtttttgaaatatcgagatgatgcgctccatgagaggttggatcaaatggagaatagagatcataatgaagaagaaaggaggagaagagggaatgatggtgttcctagacaaaaccaaattgatggtattaaactcaacattcctccatttaaaggaaagaatgatccggaggcctacttggagtgggagatgaaaatagagcatgttttctcatgcaacaactatgaggaggaccagaaggtgaagcttgccgccacggagttttccgactatgctcttgtgtggtggaacaagctacaaaaggagagagcaagaaatgaagagccaatggttgatacatggacggagatgaaaaagatcatgaggaagcggtatgt

SEQ ID NO: 41077 - DNA, 422 bp, Glycine max
gcttctgttttcaaattcgagattctcaatattttacgttgactttatcggacatctgagttaaaagttattgtcgtttgattttgctgagagcttctgttatcaattacgagcgtctcaatatattacgagacttaatcggacatctgagtaaaaatttattgtcgtttgattatgctcagagcttctattctaaatttcaagcgtctcaatatattacgggacacaatcggacatccgagtaaaaggttatggtcgtttgaatttgcagagagcttttgttttaaatttcgagcgtctcgatatattacgagactcaatcggacatccgagtaaaaatttattgtcgatagaaatttcttagagcttccgttatcaattatgagcatctcgatatattacaagattcattcgttgatccg

SEQ ID NO: 41078 - DNA, 406 bp, Glycine max
  unsure (1)..(406): unsure at all n locations
agctgtgcgganagcattgtttagacttaattcggcgaacaacactactttgatcttgggacatttgattaacaaaatcttgaaaacgggaaataatgaagatgtgatgatgtaaactgctaatttatagcccaaaagattaccacgtagcactttcggagtgctttagtcaatctgacctgagaaactcaagcaacgagtaacatcattacccttaatgttgatatcaaaagaaataagcatccaaactgaatggaaagaatacaaacacctcaccacaagaacagaggatcaaatgaaagcatgactggcccagcagaccgagaaacaattaatgttgatatcatattcatattttagtgagggcattggtgaggtataatcaaaccgtaactggtcaacaatc

SEQ ID NO: 41079 - DNA, 420 bp, Glycine max
tgaaccaccatgtaagcacgagaggatgtgtttattttcttaaccacagagaaatgggaaaaatctgacatccatatcggacacaataggtgagcgaggtacttgtatgtgaacacctgtggatggattccacacgtgaagactttgacaacaatccaaaagtacaaacccccgacatgaacctaggattctaacataataaggtttgggtggcagaaagtcaagcttcaatgcactataagcataattatcgtgaacggatgcatggaagtctatggatcggaattcacgagcacaaggtgccaaaagcacaagtctttcattgtgtatggcggcttgttcaaaatgtgatattgcaaagagaggatcacatattatagagagccataacttgcacacacatttgaaacgcacaagaga

SEQ ID NO: 41080 - DNA, 399 bp, Glycine max
  unsure (1)..(399): unsure at all n locations
agctttgagggaccaatctttgncgtgttttaattatttcgtacngaggaacaatgaacgaagcagttgattcttccaaaaagaattttccaaggaagagaaatacttgaaggatctttcaattgatggattaagtctcatgactcctatgtacaagcaagaatgtttgatgttttgatgatgccaaacgatcaagtgctttcaagttttattcacgactagaatccaagaaaatcaagatatatgatcaagtttgatctctttagaatctttaggaagaagtttccaaattgaaacaaacaaaggtttgaccaaagaattctatcatttcaattcgagatttgctctctggtaatcgattaccagtagctaaaaatattttaattcagatttttaaaa

SEQ ID NO: 41081 - DNA, 431 bp, Glycine max
ggaccttaaaactcagcttctcaagaaccacgagaaagctcgttttatgtctcttattgaagcttctagagaaagctacatgaagctgcctcggtaaaaacactgcccagccttcattaaccattggatcttctcaaaatttggtctgcaacttcacaagacacttttccatgatctgaccattggaatctttgagaagatgtctggagtgtgctagaagcctcttaatgaagcttgtggaggaagcctcttaatgaagcttctggaggaagcctcttaatgaagcttctagagaaaactacatgaagctgccttggtaaaaaggctgcccagccttcattaaccgttggatcttctcgacatttggtttgcaacttcacaagacacttgaccatgatctgactgttgggatccttgagaagatgtctgga

SEQ ID NO: 41082 - DNA, 409 bp, Glycine max
  unsure (1)..(409): unsure at all n locations
agcttctcccttccctatgttatatgcttgtaaacttgaagggactgccataagtttttgaagtatatatgcagacctatattaatttcttttagtcaatttcaaaatttgcagaaacgcataaaaatgattttatttatttatttataaaaccaacttttactaacaagtgtttctttatcaaatgtcattaaccactcaattgtacaatgaaagcttttctattttagttttttaatagaagtctttaattgtcacttcacaaactagtaaattacattaaaagataaaggttcatgaatgaaaatgttgattcttatggatgaaacaccattcaaaagcttgtgcttaaatattggtttgtgattntactaagtctaggaattttgaagaaactctgcccataaga

SEQ ID NO: 41083 - DNA, 419 bp, Glycine max
tgtatgagtactgggaaagattcaagaaattgtgttctgtctgtcctcaccaccagatttctgagcaactcattcttcaatatttctatgagggacttaacaacatggagaggagtatgattgatgctgctagtggtggagctcttggtgatatgacccctgctgaagctaggaatttgattgagaagatggcttccaactcccaacaattcagtgcaagaaatgatgctattgtccttagaggagtccatgaggtggccacggattcatcttcatctactgaaaataaaaagcttgaaggaaaacttgatgccttggtcaacctagtaactcagcttcccataaataagaaatctgcacctgttgcaagagtctatggtctatgttcttctgcagatcaccatacagatctctgtcct

SEQ ID NO: 41084 - DNA, 390 bp, Glycine max
  unsure (1)..(390): unsure at all n locations
agcttgtgaagcgtngcaatgtagtnattatagtacagngcagggcctgtctctttgtcatagccagcaagaaggatgttcacagagtatgggttctatagaaaaaagaaaattaatggttgaggcttcaaatgaatcattaaccaactattgtatggtctaaggcactgtttggataatatgaattgatctcataaagctaaataggagaagtaagatgaataagagcataaattgattttagcttcttaatttgttttcctataagtgagagccaaaggacatgatatatgagagttagggtttagaagagataccttgcggagagcagtggcaagttcgccacgtgtgaaattggcggcggcggcggtggtgagagggatgccgtta

SEQ ID NO: 41085 - DNA, 406 bp, Glycine max
  unsure (1)..(406): unsure at all n locations
gtgcacaacccaaaactgaacctttcaattcgcaatgtatnanactctcgaccaaaactaacttaaaaacacagaattatcaaactattcctcaccaaaaattaccaatgcagccattggcggccctgtctatgtgacagaactcgtatacatcaaaccattgctaagaacagacaacggtggttcccatatattggaaacagcaaaaccgtcaactcaaatcaaaacatagaaacttgagagggtgggcaatggccacactcattcaaaggatagcccgaagcaccaaactcctgaatccacatcctctgaagtcaacaggaacttcaggacactaaactcaccatttcaatttcaaaactgcaaactcttcaaagctcacaaaagaccaattatgaccactgag

SEQ ID NO: 41086 - DNA, 355 bp, Glycine max
caatggtccgagctcatcgataagccaggattttatgcaaaatggttttggctccatgagtggtaatgaaaataaagagactgtaatgcaggtttctgaagaactttctgaaataaaaaatatgaagaacatgtatatccaactaactctatcagcacttcataccttggaacaaatcaggggtagaagctcaactgtaagcatgttcccatcttctccaaacaactaggctttgcaattacaagagaattgaaagaagaagaaaaattgcactatagaaagcaacctaatatctaatagtgagaataacatggatctacttgtgtatgacatggctgatattatagagactaat

SEQ ID NO: 41087 - DNA, 410 bp, Glycine max
tgtaatttcctcttaaagttatattactttttatctccataatgcaaaagggttcttgttcatatttattcatctttaccatggctgtttggaaccataaattgcttcttatgagataagctcatagatgcatgctaatcatgttctgttcttgtacgaaaggttggagggagggttggggtgagatctaactaatatgcgagggattcattttacatgaaaaattgagaagtttattacttatatataggttgaagttaattctataatttatgatacgaacttatgcatttggtcacaattttaactgttaatttctaatagctataacttttcacgttcctctcagaagtaatctttcattttaaaggagctaaactcgtggggcaatggggccaaagaaaatgcat

SEQ ID NO: 41088 - DNA, 281 bp, Glycine max
aaatgattctggaatattgcctgtacttgtgtgggataaagacaatgtctcaggaatatgatagatgcactatatgcccgagagttggtcctgatgatctaactgttcaagatgcaagataacaccaaaagaattgtcccattcagtaagtttccatttaaccttaacgatgttggtttgaaaaccctgttatattgttggcaagggccctccaattttatctgaagatccaaaaatgaatgttgaatttaaagtgtgatgcactcccctcttttgtttat

SEQ ID NO: 41089 - DNA, 424 bp, Glycine max
  unsure (1)..(424): unsure at all n locations
tatatggcaacttactgaatgggacaattccttcttggtgtttatctttgncatctttggtggatttagatctatcaggaaaccaattatcaggccatattagtgcaatctcatcatattccatggagagattgtctttatcccacaacaagttacaaggcaatattccagaatcaatttttagccttctaaaccttacttacttagatctatcatcaaacaatctaagtggatctgtcaaatttcatcgtttctccaagcttgaaaatttgggaagacttcacctttcacagaatgatcagttatcactaaatttcaaatccaatgtaaattatagtttttcccatttattcagtttggacttatcttctacgggtttaactgaatttccaaaattattgggaaaagtcccaagtttggaatc

SEQ ID NO: 41090 - DNA, 412 bp, Glycine max
agcttgttgcctccctttgccattgatttccccactatcagtctatactaaagtactcatatcttaaacatattcataaataaggataaagaaagatgacctaaaattacaggatcatattagcatcatcccttagaaagggtgacatgttcgaagcaaccaatggcatagccacctctatgttagcaacagtttgcttcgaagctaccatacttatcgtttgggatccattccatatagtaggctttgtagtctccatatccatatgcattgcaagcgtatttattcttttcatctggagaaagattagtagagactccattataagccagactagagttggtcgaggatcccaccatcactactacaaaaataagatttaacatcgtctaactaacatcggttttgataa

SEQ ID NO: 41091 - DNA, 413 bp, Glycine max
tgcttgtggggcttctatggaggctggatctttgttctttttgagttcctttaaaggcgattttccaccatggagatgcagcggaacacaaaggagaagaggtaagaggtggcgccatccactagggaataagccatggaaaaaggaacttcaccaccaagatgagccttggataagaagcttggagaggatgcttcaatggaggaaaagaaagagagagagaaagagagaggggggagtacgaaattgaaggaagaaaaagggagagaagttgaactttgagttgtgtctcacaagactctcattcatcaaagttacaataagtgttacacatgcttctatttatagactaggtagcttccttgagaagctttcttgagaaaacttccttgagaagcttctttgagaaaact

SEQ ID NO: 41092 - DNA, 415 bp, Glycine max
agcttaagctccttaaacacaggctgaatgtgtggattatagataacacagcagatgtatgttctcaagtaaagcaacttcagcagaatctgaatgacttggaaaattcaatgtcatctcagccttcggagcagcaagctaaacagctgaagaaagtccaatctgagctttgggaaaaagctaatcttcatgaatctatcatgagacaaaagtccagaagtaaatggattaaagagggtgatagaaatagctcgtatttccataagctaatcaattacagcagaaggagaaatgctttaaggggtctgatgattgatggagcttgggttgaagacccttccttggttaaggctgaggttttgcagcactttcagaacagattccaagaacctcatgctcatagacctaatctaga

SEQ ID NO: 41093 - DNA, 425 bp, Glycine max
  unsure (1)..(425): unsure at all n locations
tggttntgggcaatagcaccccacctgacgtcccttatgtcttctgacccccgcgacatatctccaggtaccactctgtggtcaacaataaaagcaggaagtttcacccttcaacacttcctcatctcaagcttgtagaattatggggtacccatcacatgtggtactaggtggcggtcgggcgatggtgcacaacaagctttccacatccacaatgcgcgcataaacccaccatcccctgttgcccacctccaactgagctcacgtactcccacgtagcccatatcctcgtttctctcaacaccgggtccccatcaatcctctcaagcttccacaacatccaagcaaaacaacattcaaacagcacaagctatcacagccaagcaaaacagagcaaaggcagaaaactctgctcaacacatcaa

SEQ ID NO: 41094 - DNA, 433 bp, Glycine max
agagatcacctgagtgcatgcgcgctcctacctacaggagacggaccatttttgtgttgtagaatatcaacgaccaggcctacaagattgacttgcctagtgagtataatgtaagtgccactttcaatgtgtctggtctatctctttttgatgcagatggaggagccttggatttgaggacaaatccttttcaagaaggagggagtgatgaggacatttgataaaatttggtgagagtttctctctgggttccttgttgaaccaattatcagacttatcaaggtaatccttgtggcgtctacccagacttatcttccttcattggaagtggcgtctacccggacttatcttccttcaccggaagtggcgtctacccagacttatcttccttcactggaagtggcgtctaccctgacttatcttccttcactgg

SEQ ID NO: 41095 - DNA, 196 bp, Glycine max
ttggagaaattcatggtcattactttgcactcatatgtattattctgacgaataatatagagagacgctcgtgcttgaacaaccgacgctctctagaatgcgccatggtcattactcctcactcggaggtacgacccttgcgagttctatatagctacactcgctattgaacaaccgacgctatcgagaaagccca

SEQ ID NO: 41096 - DNA, 262 bp, Glycine max
agcttaatttgacccctgtacacccatgtagcctctggcttgcctgcgcccccaaatatcttatgggtgaagtaaccaacacgcttggacgagctgagcttgcctatgttggatcaagtggcctcacaataataaggaaggggggttgaaataattatgaatgtgtcttgactaattaaaaatatatccttcttaatgttactagaaataattaggatttactacttaagtatgctgaaggtaagaacagaaacaataactt

SEQ ID NO: 41097 - DNA, 417 bp, Glycine max
  unsure (1)..(417): unsure at all n locations
gtgcttccacacaagcaactngnatnntttttatcttcgtaaagcacgaagcaaagttaaaagttccattcaaatatctaaaaatgcatttaacagtagataactaaacttcccttggtgccttttagaatctggcacaaaggtatacactgaacataatgtcaggtctggacgcaatgagatatgaaagagatctcatcattcctctgtatgtcttttcatccacctgctttgattcttcgtccagtccaagtatactggttggatgtatggggtctttattgggcttgcatcgtccatcttgaacttcttcaaaagttccttcacgtacttggtttgatgtatgtatatgccttcatctattttcttgatctgaagtccaaggaagaacttcaattcttccatcatactcatctc

SEQ ID NO: 41098 - DNA, 401 bp, Glycine max
  unsure (1)..(401): unsure at all n locations
agcttgtggagaacgaatttattcatgtcttcagtaacggngaattgatccatgaaaggaaaatattaattgctttatctcacaatgggacctgtgaagacatgcaaaaggaaaaaggtaatcagagtcaaaggggtgcaggggaggagcagggagaagcagctatcgagctggcagaactgaatcagaagcaaaaaggtggtcaacctaattgcgtggagattccacctcctttattagtaggccctaaatttcaaaaagaaggggggggacttgggccagcaaacaataggcccaactacctctgctgtcaaattttatgtttgaagaaaaggaaatagggagtttaatgtagaggcccaatctgttctggaacctcccatacaaataactcttcagaa

SEQ ID NO: 41099 - DNA, 420 bp, Glycine max
tatgaacctctctaggcactcgacaactgtctcatttactttatactttatgtttcatcaaatcaaccataaacacattaagctatagagaataaattctatcaagaaaacatatttccatgttggcccaattctaaatagaattgggtgacaacatagagtaacatgtgaaggtcatgctaattagagaaagtggaaacaattacaatttatagtaatcattctcactagccttaccactctaagttgtgaaaagactactatgttccatagttgacttttcatcctcgctcaaaaagtttgcaaaattgaggataatttaaccccttaacaaaggtgtcatcttgtctatccatttgggataaggcttcctccagacaagttggtcattgtgcatcaaatagaccctaaaatgcttct

SEQ ID NO: 41100 - DNA, 404 bp, Glycine max
  unsure (1)..(404): unsure at all n locations
agctntaagacagnnngttatatcgtttttgtatattcaacaagaacatcctatttcttgacattgacaccttagtgattaggttgtttctcccatctctgatggaaagacttgaatctttcatgtgaatatcatagctttttttgagtaattgtcctaaactcaaaatattgttcttcatatttgggacgtagtaaacatttgatatgaattcatgtcctccatctttcaaacgaattaagatcttacctttgccttttacatgagtcttagaattatcaccaaatgagacattgccacttattgattcgtcaagatccacgaacatgcttcttttttcgcacatatggttgcttgcaccagtgtcaaggtaccatgtgttttcttggctaccttcattgcct

SEQ ID NO: 41101 - DNA, 416 bp, Glycine max
taagagctctcttttgacctcagcaggcttagtcattcttatcctacccactaaccttcattaacagactaacagagacatgtcttcaacatagtttgatgttgtatttgcacttatgttattttttaagctcaatgaattaagtgtacttgtattgaaattgaactaagactcctcgtttgtttatgtgaaagatgtcaggctggcaggaattgtgcatgtggaatcaattaggaagactcacgaagccttttatggttactgctctagtgctctatcacaataaacaagcaaggagcagttcttaacaatattaattatcttaaggtgacatactcaatacaagtacaccttgtccaagtgtactgtgcttgtgctaataaataaataacaagcatggctactcttacttgttt

SEQ ID NO: 41102 - DNA, 332 bp, Glycine max
agacaatcttagatggagagacgctttctaactcgagatgattgattaacatgtactgtaatccattactattactcttggaaacttaacgcgctccttgtgtgatgaataatctataccacaagtcgcaatctattattccaacaagcaagagaaactctttatttgaaagaaataatggggtgcaaattatatgacgaggttgaacaaactggatttttgcgaattattggaataccctatttggcgattgattaaatatggttcaccggtcgaaaacatttacatctgttaacgtgttgactagtatctcttatttgtcacaagtcgta

SEQ ID NO: 41103 - DNA, 422 bp, Glycine max
  unsure (1)..(422): unsure at all n locations
tagacaaaacgattctcagatggaggacatatatcttcaagttaaatggacaacaaagagagcaagaatgcttagatggagaagaagacaacgagaaggagaagacagcgtgaaggagacgaaacatacctaggtatggtggcgaaggagaagaagcagagacttgtgatgatgctcgagtgcgacaaacacgatgctcagatgcagaacagagaccttcaaggtagacggagattagaagaagaagaagagagcatgaaagcttagatggagaagaaggcagcgcgagcttcatagggctcacgatattttttaaaatataagttcaacatcggtttttttttaaaaaaaaccgatgttaacttatcaaatgttaacatcggttttctcanaacccgatgttaataaacttatgttaacat

SEQ ID NO: 41104 - DNA, 390 bp, Glycine max
agctcgatcgtcatcgcttttgtgtatgatatccactccataaggtttgaagtagaggataccttcaaccctataacgcaacatggtggacaaaagtgggcaattaacttgaatggtcatcattgtcaatgcggaaggtattctgtgctttactatccatgttcacacattattgaagcttgtggttacgtgagcatgaactactaccaatatatagatgttgtttacacaaataagcacatcttaaaagcttactccgcacaatggtggcctcttgggaatgaagcggctattcctccttctgatgacgcatggacactaatcactgacccaactacaattcgtgtgaaaggtcggccaaaatcaacaaggataacgaatgagatggat

SEQ ID NO: 41105 - DNA, 416 bp, Glycine max
ttgaaaattgatgttgctatcattcgaatatggttttaacgcctcaaccaggtgaagttcttctttgcacccttttcattggtcaacactctttgaaagtgatggtgtgtggttagcttttcgaccatgaaaccattgtcctctcctttccgcaagctcatttgtggtcaaagagaggatacgttgaagaagagggaaagagaagaaggaaaaaggagaaagagggttgacacagggaaccgcaaccattctcacgaaccatgatgttctcattgttgacattaaaattcataagatgagaattcctatgtataggcttacaaccaatatgaaatttctaaacaatctaatctattagacttatttgaaatttaaattaactaactaaaactaaagataaaagacaaaatctgcaa

SEQ ID NO: 41106 - DNA, 416 bp, Glycine max
atccttaagtcacctgcggcatgcaagcttctcctctatttgctataaatatgggaagaagtgagaaggaaaagggttcagccccttaggcacttctctctctttcgaatttgcttggaaaaattgtttccgtgaagaaaattcaagccgaggcacttccgaaacgtttccgtaacatttccgtgaggaattacgtgaagattctcgaccgttcttcaagattcatcgttcgttcttcgttttcttcagtcttcaacgggtaagtacctcaaaccaagctattcaattcattatatggacccgtggtggtccacattttgtttcatgtatatttcttcttgttttcatttactttttatacccccttttgacgtgcttaagccatttatttaagtcatttctcgcttaatgtaaaa

SEQ ID NO: 41107 - DNA, 416 bp, Glycine max
  unsure (1)..(416): unsure at all n locations
gtgtgtaatcgattacacttattttgtatttgatttctcagngactgtttctgaataaatcaaaagatgtaactcttcaaatggtttttgactttttcaaattggttttaagtttttctaaaagttataactcttcaaaatagtcctcttgaccagacatgaagagtctataaaagcaaaggctttgttttgcatttcaattatgttgaacaacctttacaatacaatccttttcaatctttgaatctctttgaacttcttcttcttctttatgccaaaagctttctaaagttttctggttttctaaaccttgaaaacttgtgctattcattcttttcatctcttctccctttcccaaaaagaattcgccaaggactaaccgcctgaattctttntgtgtctctcttctccctttt

SEQ ID NO: 41108 - DNA, 394 bp, Glycine max
  unsure (1)..(394): unsure at all n locations
agctttgatatatattcanattaagatatttttatattcggatgtccgattgagtgccgtaatatatcgagacgctcccaattgaaaacagaagctctgagcaaattcaaatgacaataacttttgactcggatgtccgattgagttccgtaatatatcgagacgcacaaaattgagaacagaagctctaagcaaattcaaacgaagataactttatattcggatgtccgattgagtccggtaatatatcgagacgctacaaatcgaaaacagaagctctgagcaaattcaatcgacaataactttttactcgtatgtccgattgagtcccgtaatatatcgagacgctcgaatttgaaaacggaagctcgtatcaaaagtcaaccgcaataac

SEQ ID NO: 41109 - DNA, 413 bp, Glycine max
  unsure (1)..(413): unsure at all n locations
ttgagccaattcaaacgacaatatctntttatttgtatatctgattgtgtcccgtaatataacgagacgctcgaaattgaatgttgaagctcttagcaaattcaaacgtcaataagtatttactcggatgtctgattttgtcccgtcatatatcgagacactcgaaattgaatgttgaagctctgagccaattcagacgacaataactttttactcggatgtctgattgagtcccgtaatatatcgagacgctcgaaattgaatgttgaacctctgagcaaattccgacgacaataactatttactcggatgtctgattgagtcccgtaatatatcgagacgctcgcaattgaatgtcgaagctctgagcaaattcaaacgacaataactttgtactcggatgtctgattgag

SEQ ID NO: 41110 - DNA, 410 bp, Glycine max
agcttaaagtatgcccgagtcattcatttctatgagatgttgttgaagtattggcgatcagaattgccattccttggattatagggttgaaccaagctcatgcttttacaaaaaggttcatcaagtcaagttgaagtatggaagtaaccatcttgcaaaaattggggcaaaaaatgaatcgagttacatcactgcttcatttactgccaaacacatttaggactgttgatgtccttgttacttccagtttcaccttgaccaagatgtcatgaaccatgttgaaaaatctaaattgattcaaccccatgtcctgcgtagaaattcgcaatacttcacctgtgtatcattcacatacatccatgcttttcattggttgcattgctcattgcattctttccttgaaaaagaaa

SEQ ID NO: 41111 - DNA, 426 bp, Glycine max
tgcttctacagttggtgcacgctaagcacattgagttcgcttagtatgatgactactttggcacttcttcaaaataactcctttttgcatggaattaaaggaaatttaacattaattccatgtaaagaggcttctactgagcagagatcaaaacaaaacaattttatttacaatcctaccaaaaagaaccataaattgggaggtttatatacattttggaaaacttttctatacaaaagttagtcgtaaacgatgactaacagttgagctatgacccaacccaacccaattatattgggttaggtattttaagtgtttgggtcaaacttgatcatatatgagttaggtaacaggttttgtaacacctcaaattttaaactgaaaatattgcttgaaaacacttaaatttaatttatttttgaaata

SEQ ID NO: 41112 - DNA, 409 bp, Glycine max
agcttccctaagggcagtaatgcatctctttctggctttaatacctaaatcacacaacccccagacgtttaatgactatagatccatctccctcattggttgtatgtaaaaagtaatagccaaattattggcatacagacttagcaaagtgatggttgaccttattgatgaaaggcaatcggcttttataaaggatagacacatccttcatggagctttgattctcaatgaggtagtagaggaagctaaaaggtgtaagaagccaacattggttttcaaagtggactttgaaaaggcctatgactcggtttcatggtcatttctggagtatatgctggataggatgggtttttgccttaaatggagaaattggatcaatgcttgtatgcaatcagccactgtatcagtc

SEQ ID NO: 41113 - DNA, 425 bp, Glycine max
tctatcatcttcattgttgctagttgaagcagattttcaatttttccttgatttagcattcctcgatgtttttgggacctacataataaaatcatgatcataattcaacataagtaaacaacataactcaaacattctagcaagtataaaagaaaagataacaaaagaagcatatagaaaaagagaatatgaaattgacctccagtaaaaatcttggaagaaggacctgtattttgtatttacatcggtgcctgaatcctcccaatagacaggggatttgattgagataacaccctccaacgtcaaaggcacctctccaccagctttctcataaggttgattgaacgccctatcccacaacttcttggtttcttcaaactccttttccttcaccttttcaaacagagttgccaccttctccagat

SEQ ID NO: 41114 - DNA, 413 bp, Glycine max
  unsure (1)..(413): unsure at all n locations
agctntgatgatatggnctncaccgacttatggatcttattgagtttgaaaaaaggcaaatttagtcatcctgcttggacgaatgagaaaactggggcaaatgaagagggtgagaatgagggacaagcccatgctgtgactgccattcctatacagccaagtttcccaccaacccaacaatgtcattactcagccaataacaaaccttctccttacccaccgcccagttatccacaaaggctatccctaaatcaaccacaaagcctacctatcgcacttccaatgacaaacaccacctttagcacaaaccagaaacatcaaccaagaaatgaattttgcagcgagaaacctgtagaattcaccccaattccggtatcctatgctgacttgctcccatatctacttgataattc

SEQ ID NO: 41115 - DNA, 409 bp, Glycine max
aatatccgaaatgtcaaagaatgggctttgatttagcataacaaaactttctgtgattggtttaaagatacaatctttgcagatgagaatgcttcagaaacattaagaaaactagcagatgggcctaaaagaaatgttataacctggcaaggatatgacataaacaggtattcattttacacaaaagcacaagatgacaaaagtacaatgcagaacagcggggtcaccctaagggctgaatctcaacactttgcaagtgtcaatgacgccaatccctgtgtagcttccatcccttactttgggttcattgatgaaatttgggagcttaattatgtgaaatttacagtatgtgttttcaaatgtaaatgggttgacagcaacaccggtgtgcgcaccgatgatatatgat

SEQ ID NO: 41116 - DNA, 414 bp, Glycine max
  unsure (1)..(414): unsure at all n locations
agctntgcggatttggtctttgccagttttggattttgtgggtctgaaaagaggcaaatttagtcatcctgcttggacgaatgagaaaactggggcaaatgaagagggtgaggatgaaggagaagcccgtgctgtgactgccattcctatacagccaagtttcccaccaacccaacaatgtcattactcagccaataacaaaccttctccttacccaccgcccagttatccacaaaggccatccctaaaatcaaccacaaagactacctactgcatttccaatgacaaacaccacctttagcatacaccaaaacaccaaccaagaaatgaattttgcagcgagaaagcctgtagaattcaccccaattccagtgtcctatgctgacttgctcccatatctacttaataattcaa

SEQ ID NO: 41117 - DNA, 425 bp, Glycine max
tcccagatccgatcatggaaggacttggcaactgttttcatatgcaataccagtacaatacggacatggctcccgatcagaaccatcttcagggtatgactaaacgagagcatgagtccattaaggaatatgcccaaagatggagagatctcgcagcccaagttgtaccgcccatgacggagagggagatgatcacaattatggtagatacgttacccacgttctactatgaaaagatgataggctacatgccagctaactttgcggatctcgtcttccccggagaaaggattgaatccggactacgaaaaggcaagttcgaatatgctgccaatatggcccccaacaacaacagaagagtcccagtagtgggcacgaggaaaaaggaaggagatgcccacgtggtcaccaccgccccaacatcg

SEQ ID NO: 41118 - DNA, 372 bp, Glycine max
  unsure (1)..(372): unsure at all n locations
agctngagaatgcaagaacttatgtgcttttgccacgccaacggcgattttgcagcgccgttgccaacttaaactgttgacaatttcgcttaacttctccccctcctcgtgctcgtacaccaagtaccctctcttcccacacctacacgtcgcaataaggttaatgatattcgggtgacgaacctttctaatttttactgtctcttcccacatactcattggaagtgaattcaagtcgctgatttccttcaccacgaactgcatgtcgttttccatgcacttcccttcgtaccaaacccagtttgttcctttcgacacaacttttccttctttaaccgttttcaaaacatcgtctacattgatcaaccttgc

SEQ ID NO: 41119 - DNA, 398 bp, Glycine max
  unsure (1)..(398): unsure at all n locations
tgagtctagagtattngtngcatatcgcttgtgtttgactttcatcggattaataattgcggctcgatgttattttctggagtggatgaacttgaatggatgtgcataatatgtgtgattctgttgaaatggtgtcaattatataaattcacccgtcagtattatatgtttcacatgctctaacattttattatatatgaatgtgataactcattcccggtgcgtgtgtgcgtttgttagggctgattgccatttgttcaggtgagccatcatatgatgaatcccatgttagagccagagagacttactctgtgatagagacatactcttatacgtgtgacatcggagcatacgattttcttcacatgatatattatccgtacacgatataaccgtgc

SEQ ID NO: 41120 - DNA, 403 bp, Glycine max
agcttatgcgcatatttctttacgaacttgtacttgcacaagacatcctatcaactaagaaaaatgcacccatatacaatcaaggtagcttcattacctagattatgtacttccaaggtgtatttgttatttacatcacacacgcctccttggctgaatttacatacatgcatactcaaagcattttggggtaccaaaaactgcacatgcgctcatcttggtatttctaatacccatacatatacaaacttcacgatgaatcttgactacctacacaataaggtgctacctttcatgtttttttttcaagtttttgctacctaaagccacatgcaaattcaagcatattttcctttgctgactaaaattgtattcaaattagaaggtatatatttttttgtaa

SEQ ID NO: 41121 - DNA, 415 bp, Glycine max
  unsure (1)..(415): unsure at all n locations
tctcccccaattntttataaatagggggttatagtgttgtgaaaatgggttcagccccttaggcacttctctctctttcgaatttgcttggaaaaattgtttccgtgaagaaaatccaagccgaggcgcttccgaaacgtttctgtgaggaatttcgtgaaggtttcgaccgttcttcgacattcttcattcgttcttcatcgttcttcgatcttcaacgggtaagtacctcgaaccaagcttttcgattcattctatgtacccgtggtggtccacattgtgtttcgtgtatttttattctcgtttcatttactttttatacccccttttgacgtgcttaagccattttatttaagtcatttcttgcttaacctacaaataaaatacatttccaccgatcatttgaattgtatta

SEQ ID NO: 41122 - DNA, 401 bp, Glycine max
agcttcacttagatgcttatagcctcttaagtttaaggatgatctcaaagcatattttgcacaccctagccatgacagcatcatcaagggaaacatgctccccatcatcaacgatctcactgacctcattacattgtcaagttttgttgttcatgtcagcttcttgaaattgaacgaggacacggataaggatgaggtgttgggtgtggccagaggaattcccaagagttctaagcatattagtgatcaagttcagcttttggggagaatttctcactggggagagccaagggtttcttgattgcttcacttgtggtttttttgggaccaagggagttggaggcaatggattcaaacgaggagttagagaattaccaaaaggataaggttaaggatcaaat

SEQ ID NO: 41123 - DNA, 411 bp, Glycine max
aactcagcttggatgaatcgtctgacgagggatcgtgtttatatttttgctcaacatagaacacaagagcatgattgataagagaaatatttatatgcattagcttgtttgttagaaagacccaacatttctacctgctgttgtcacttttacgtaccttgcattttatagtttttagcataaaggtttagtttaaattctatttgaaattagcaatcatacatgttctctcaacaatacttcatttctgaacttaactcaggctaacattagttccctgtgctcgatactcggattcatccattttaatttttaaatacttgacgatccgatgcactttccagtaaacccccattgaaattctcttgaaacataattgagcaaaaagtaactgcaatggggagtcaacac

SEQ ID NO: 41124 - DNA, 488 bp, Glycine max
  unsure (1)..(488): unsure at all n locations
aacccacaaacggccaacctttgaaacttttgtacgatctntgcaccnacncngagancaccnnagaggcaccgcgggcatgcgagctggacgaacgggatgttatgatttatgtgagacnaaaaaggaggaagatggggcattttagatagaccgaagacaccccggngcgcagaagaaaagggaggcaaggaaggagagacccgtgctgagacggccctacctatccagcctgattagacacccactcctcgacgtcgttaggtgggacaccaacaaggatgacacttacccgccggccatgaataccagagggtgaacgcaaaaataacgcggaatgatccttacagcggttccaaggacaatctccaccatgtgactacctcacaacagtaccgagactgacatatgcagcgagatgctcagtgcaatgcaccctatgtcccgtgactatccgaacttggtcccatataactcacaaacaagat

SEQ ID NO: 41125 - DNA, 486 bp, Glycine max
  unsure (1)..(486): unsure at all n locations
ggccacggcnacgcctctgtatctgtactcgcannnnccnnannaaanncaaacggcagcgggaagacagaaacagcnnggacaacaagttcgaatttcagatnaccagccnangagggaagggaagaggcaccaaacccaccccccgggcggagagaaagcggcatcaacaaacgaaaaagcaacaaaccggcgcaagaaaaaagaaaacggcagaacaagcaacagacaatatacaagacagaccatgacagacaagacgatagaaacggcaagcgacaccacacatgcaacgagaatcagaagaacgaaaagaaacaaggatagaaaacccaaagaagcaagaaagaagagagcccacacccggagaaagacacgacagaaacagcagcagagaccgaacaaagcagcaacagaacagacccacaaacgacaccaagaggcacgcaagaaaggacaccaggggaaccacacaccacacgaacc

SEQ ID NO: 41126 - DNA, 420 bp, Glycine max
agaccctgaggcacctgccgctgcgactagccccgacaggtggtgatttattgttttggagaggatcgataactatgcctatatgttggacctcccagaagagtatggagtcaacaccacttttaacatttctgatataattccttttgtacgtggagctgatattgaggaggatgaactaactgacttgaggtcaaatcctcttcaaggggaaggggatgatgcaatcctccctaggaagggaccagtcactatagccatgagcaagaggctccaacaggattgggctagagctgctgaagaacgccctatggttctcatgaacctcacggtagatttctgagcccatgggccaaggttgggtccaattatctttgtacatattagactaggatgtcattatatctgatccttgtattt

SEQ ID NO: 41127 - DNA, 419 bp, Glycine max
  unsure (1)..(419): unsure at all n locations
tacccaaatagatcctatgctaatatcatgtctctttgttttatagagcataatttatatcttgaataaatcttttgttccattcatattcatattttttcagttggataaatcaagtctttctgttattgaaattcttttacatggtaacaagtgttgttttcataaactcaccctatgatatttttagggactttggagaaaccattccatagcaagacattgcaatggaagagccaattgttcctagaaccatccctatatttgaatcctatacttcaattgtttgactcaagtctcatactttgtaatcagattgaaacgttcctagaataaataatcaaattcaattgaatatatataactcacactaaattaagaaattaaaatgaataattgataaatntattaataattat

SEQ ID NO: 41128 - DNA, 402 bp, Glycine max
agcttatagtatcatttatgtttgcattaacaaaatattttgcgcacacagttatatgatcgtacctctatatcacaacaaccacagactatcccgtttccctgtttgtaacctccaagtaatttctgaaacacacattaatcatggaaaagaataaaaatcaagtgcaaatcaacccataagcaccaaatgacaaaaaatatttaaagaaaatattaagacacctgtcctttgacatagtaagccaactcagcaccatctggtagcccatttggcataaaaagcaacctgtgtaaatcattgtccctgataaaagcaaaaaatcaaattcaaactacagtagctaagctattgcaattcacatagagaagctagaggaatggaacaggcatccccaaaaac

SEQ ID NO: 41129 - DNA, 415 bp, Glycine max
tcacctgccacacagttaaggcattatattttccttatatcatctctgacatatttattaagcagttgtcagattaaattatttttaaggatatatggtatatttttccttcaaacaaaggattagtatatttacttgtaagtgtttttttgtgttttaacattttataataaaagtaatattttctgttaaaacattcttttccccccatcggatcctttagtagaaatattttagccactgttttagtaatgaaacccctcttacgatttaataacaaatcaaatatatattattatatccaaaattaaatataaaattgttatatatttgtcataactttgattgttttaattcagattgctttaattcatgttttcattttcactaatttaaacacataacttcatatcag

SEQ ID NO: 41130 - DNA, 392 bp, Glycine max
agcttctccgtttggcatggttatttttattttcctgaaaatatctaagaatctcgccaaatggcagtccttctgcttcttggaaggtaccacaggatatggtactttcgcaccttcattcataactttttctcttttcttctctctagcttgttcacttctagtcctctcttcattttttttttttcatctttttcattttctacttctttttctttttcttggtcatttaattctttttttcttgaccattatttgtttttccttttcctagttgctttcacttctcacatcatctttcttttcattagtacctttcttttcagcagctttcttcttggatagaacattatcctcatccttcgcctccacaaacctcttactccttgtca

SEQ ID NO: 41131 - DNA, 403 bp, Glycine max
  unsure (1)..(403): unsure at all n locations
tccaatcattacccccataaaagttattattttagttatttgtgagacaaaatgatcaagaggcaatgggaccctgaaagtgtgaagttgagagaaacctagatgaagtgtaggctactttatgagtggcgttagtctatgctcaagtccttggaaagtggttattgtgtgtggaactgtatggttcatgttggatcaagtcgagaatctataagggggttgaatagattatttcaaaatcttgtgttgtcaccacaatctgttgcccttgcactttatcacacaagaacccagtatcaccatcaatatgagttatggtatagaaanaatttacaaggtctatgtagtaggtgcacttcatctccaccaatttcttcaacccgtgataatactagttcaactc

SEQ ID NO: 41132 - DNA, 392 bp, Glycine max
agcttacctttcgtttgtcaatgattggcgaggacaagatcttcctcactgttgcagaggttgttgcatattgttctccaaagctggttgaggacccttgaaaaatatatatgaattttgttgtcggggaatagaaatagagaccagaagttttcagtttactagagttagctagtgaaggatatatgaagaagaaggtgtgaaggatgagaattaagatgagattggttgttacaaaaagctatagtagaagaaaggggcctatccgattttgctactgtctattagtgctactactagctccaccattcttatcttaaaagtgttgaaattaaatactacaaaataaaacagagataaagttaaggtgcatgcaccatataggcatcaac

SEQ ID NO: 41133 - DNA, 362 bp, Glycine max
  unsure (1)..(362): unsure at all n locations
tcttatccaaggctcatcttggttttgaattgtncttcttccatggcnnaggccctagtggatggcgcttcctctcacctcttctcctttgtcttctactgcatctccatggaggaaaatcaccattaaaggacctcattgaagctcaaagatccagcctccatagaagccccacaagcaagcttacatcaagtggtaatcacagcacaagagcttcaaataggtgctccttaaacctccattaatattatactttaccttctcttacattgatgattcttcattttactccatgtatctactcacatgtcttgtgctaaatgttcttaacatagattctttagagcttccacacaataaac

SEQ ID NO: 41134 - DNA, 331 bp, Glycine max
  unsure (1)..(331): unsure at all n locations
cacattctctggggagaagctccttcttccatgtgctattaccttgtggatggagcctccgctctcctcttctcctgtgccttccgctgcatctccatggtgganaatcaccattgaaggacctcattgaagatcaaagatccatcctccatagaagctccacaagcaagcttccatcaagtggttatcagagcacaagagcttcaagtaggtgctccttgaacctccattaattatttgctntaccttctcttccattgtagtttcttcatttttctccatgtatctcctcacatgtcttgtgataaacgtttttaacatgattctttag

SEQ ID NO: 41135 - DNA, 411 bp, Glycine max
  unsure (1)..(411): unsure at all n locations
ccactctatgcctcattttgcggatattctctattccgagttcttttcaagtggaatctggttggatataagggtgatagtgataccctagtgaatgataatcagtactataagcaacgtgtttcttgtattattttttaaattgcatggaatcaatataatacttttaagaattaattcgattgtaaaaaaatcaagaattcttaagtaaattaagtaatcctggataatgacataattagatatgagtaacgagagtgtcgaatcaaccaaattctgatacctattagagcctcgttaattgagcaattgaagataagcactagttgcttaaacacgtaattaatgcttgtatntntgtcatccaaattaactactctaatgacacaacctattatattatatgcaatg

SEQ ID NO: 41136 - DNA, 253 bp, Glycine max
  unsure (1)..(253): unsure at all n locations
agaagtggaatgtggaagtgtttggttttatgaacactaagttgagacaaatagagataaatcttaacgagcttgacattntttattanagtgatggtctaagagaagataatttanagaagtgactacaacttcaaaaagattctttgagagttgccaactttaatgaatctttattataccaaaggtccagagaaagatggctaaagaagggaatattgtaattcaattttttttcattccattatcaatt

SEQ ID NO: 41137 - DNA, 599 bp, Glycine max
  unsure (1)..(599): unsure at all n locations
tggggcgtggggatgatagctatgattangcgtcgctatcgttactcaagcccgcgaaagagatttctatacctacattacacgcattgagcgacttacatgctctcccatatacacgagtttggctgtgcttgaccagctaaagaacagatcacttgcacttactgtgacgtagactggggccactctgatgagggaggggtgcgactcatcttcggcatcttccatatgcactgtgtaacgtggagtgctttgatgacttacttatcacacgcatgcacantttccatgataacatcactcttatgagatgcacacctgacatgatgctatgggcgcactgaggactctatatgcttgtagaggnggatcgctgacgtccatgcatggagtatctgcgatataaaagcttatgttctaagagagcattcgtccatataatagccttctctacttgattcataccttccacatactagccctatttcttagcattcatacctganatggtagcatagacactcaataagcgtatgtatgcttacagctctctgctaacacatgatacacaacagagtgatatactcgtgtgcttgaga

SEQ ID NO: 41138 - DNA, 343 bp, Glycine max
acccactccccagcgagctaggtttcttattgggcctaattgctatatgcaccccatgtttactaaatacaccccttgcctttttttggtgattctttttctgtaacattatggaaacttacgaattacgtaacgatacttggtttctttccgtaatgttacgaaaccttatggatcacgtaatcatccccttttttggcttccaagatgttaccgaactttacggattgcgcactaacacttccttttgacttctggcatgtcacggaacttcacgggttgtgcaacaatgcttatctttgacttccggcacgtcacgaaacttcactaattgcctaacgat

SEQ ID NO: 41139 - DNA, 501 bp, Glycine max
  unsure (1)..(501): unsure at all n locations
gacttaccttgaattaattcctttgatagcctctttgagccttaattgttaattaattacgtagttttattatttgggctcatttaactaattngatgttcttaatctaatttcaggaattaatgaaacattgggcttaatccggattttggttgtggacttgaagagggcaaataaagcagcacttaccttagttaatttctaattatgaaatttcgcaattttatcttatgttgttcagtgtttatttcattttgggccagagtattgtaatagggcccagtgactctgagtgactctttctaaatagatgccatgggattcgtgcagggcatgctgttatgctatcttcattattcagagctttggttntaggttctcancgttttctgttcccttgttacggttttcgttcttaatgcaaatctcccgtntctgcttgtaattacgagttcattcttgcttcttcttctactatcattgacgtttctgtctcaatta

SEQ ID NO: 41140 - DNA, 422 bp, Glycine max
  unsure (1)..(422): unsure at all n locations
atggatgtatccatgcttattgatttcttttctgtgtatgtgacagggggggaaaaggagtgatgggcgaacacctgacggaatacgtccaattaactcgagatgtggcctattacctatagcacatggaagtactctttttacaagaggcgagacacaggtctgagccaactntatatgttttccagtttatgctcttgatgatatctgatggtgtctatatatgcttatgcaagtcacattatctcttttctgtgttcgtagctttattacaacggagatcgaatgatcaaacacaaacgaggaacacaactaataatgctgactccttggaccttaacacacttcttattaaagtctccattgtagtcacctggatatatctaaaactagtgttggagtcagattttgatactcacgta

SEQ ID NO: 41141 - DNA, 429 bp, Glycine max
  unsure (1)..(429): unsure at all n locations
ttcttctagccacgggagtnataaatattatccttgaatgtatgcaaatcttaatcatgtgagtaatatcaactaatcaagaatntagctaagcaaaatgatgacacaaaagggcaaatatgaaagtaaaggggtagtaagacagagcattaccacttttatttgtgaccaacacaagaacatctccatgaagtgatccccttttggaggcctcgtgaatggctctgaagttggatcctccaccagacacgaatactgctagctttttccttcccaccgtgacctgagccgttacctcatggccctcctttggttctgcagcactactactactactactactactactactactactacaccatatcctcctccaagaactagaacacacttctntgtgcacaatgctgataggatggacagctctgc

SEQ ID NO: 41142 - DNA, 553 bp, Glycine max
  unsure (1)..(553): unsure at all n locations
agcgcnnatgaagccatcgcagacccgngatcctctaagngaccngtttgaaagcactgctagaccgaganangcanagngaaccgcatcataccactctttgcctcattatgcgggcaatctctattgcgagttcgtttcaagcggaagagggaaggatataatggtgatagagagaccctaatggatgataatcagtgatatataacaacgtgtttcatgtattatgattacaagacgacggtatcattaacattctgctgaccttgcctttatagtggcaacacaaaataaaaatgtataatgatttttattttttaggagatgatcaattattgcaaccattgattntgaagagagantaaacaaatnagcatttaattaaagatactaagactaacgttatttttaaaaatttatatatttgattctataaatctcaattattggtcttttatataacatagaaaatattgagtaccctaaaaggatggataatacaaactatgatcactctggtagagcgaaccacaaggacgatcgctggtttgac

SEQ ID NO: 41143 - DNA, 212 bp, Glycine max
cttcttatctgaatttattttgacacaatatgagagatatcatccaattatacattaaactaatggaatgatcaaaatgaaacattttcgactgtaagaaccatattgaatcctaaataaggataaaataaataaaagttcacttaagaaccgaattgaaacaataaatctaattatgaaccaaaattatattttactcattacatattaat

SEQ ID NO: 41144 - DNA, 595 bp, Glycine max
  unsure (1)..(595): unsure at all n locations
aggcgtgnnntttgaccccttgnannnacgnnnnnnnacnnnnnnnnnnattgaaaccgatcgagnacccgngtgctctanatcganccgcngcatgcagcctgatcaaaccattatctaatcattccaattcactcaaatcatacaattgctcattcaaatcattctcaaacactcatttcatgccaaacaatccactacatatcattttcaatcaattcattggtcaaacacgcttttggtacaaacaaacaactcaaagtgctgaaatttatataattgaaatttaaaaaaattgaaatataaaatctgaaattaaaatgactgaacataaatcataaaataattgaaaataaactaaaatgttcgagatngcacaaattaaatgtcctgctcctgtgngtgctcctatgcatgctcattaaggtccaacacctgagcagctggtgcagaatgtgtggcataatcaaatatgggtgctaaggatggcttttgaatctgntttgaaaaacatcctcctcttgactcttttgcacatatcctcttcggcacaagaggaagatacagtgccgttcaaagagaaaggagagagccc

SEQ ID NO: 41145 - DNA, 511 bp, Glycine max
  unsure (1)..(511): unsure at all n locations
cgctctanattacattgatgtttgttttatgggaggaggtatatgccatttttgctttaagagtagtgtcccactgtgtaaattaactttccaaatgtttgccttcgcaggaatggccccgaggaagcttgcctcanagaggtccaggaaggacaaggcggccgaaggaactagttccgctctggagtacgacagtcaccgcttcaggagcgttgtacaccagcagcgcttcgaagccatcaagggatggtcgtttctccgggagcgacgcgtccagctcanggacgacgagtatactgatttccaggaggaaatanggcgccggcggtgggcaccactggttactcccattggccaagttgatccagaaatagtccttgagtttacgccaatgcttggccacagaagaaggcgtgcgtacatgnatccttggtangggtagtggatccgttcgatccgatgctatcaccactcctggatatcgatggtatggagaggccgaatgcagttg

SEQ ID NO: 41146 - DNA, 555 bp, Glycine max
  unsure (1)..(555): unsure at all n locations
gtttgaaagcccatcgtanaccccgngatcctctagagtcgagctgcgtgtgtgcaagctgtaactttctgataggaagctaggctagtgttatctgttggctctacctgctctataagaggagtggcgttaagaactttggtaacaagctaagacacattagacagatgatcgagaagctggcagttctgcacatgaagacccacgttatgtcaacgaataacatcaggctgcgcaatgcactataccagaataaatgtcaaatgaacaattgaagctgcaagattcacgacggctgatacaaagtgctgacatactgcaccgaaatactggaatcgctggacaatgcttattgaactcctgttcgcaatgagatagccgattcacgatggcagaatacatgtgctgacatcctgcacgaaatgctggacatgctgtacgtgcaagaaaaattcagtgctaagtgaacagcagatcacgatgccagctgagcctgatctcgcacgtaaacatgactatactctgtatctcttacagagagtggcggttcatacg

SEQ ID NO: 41147 - DNA, 444 bp, Glycine max
  unsure (1)..(444): unsure at all n locations
gccttgatatgagtagtggttagagtctcgatgtattggctgatgagtactccagtagcatatataatgtttggtcttgtgtgtcaaatatcataaactacccaccacactcttgaaatctatagcatccagttttcttgcttcgtcgaactttgataacttcattntgcactccatcagtgttccaattggcttgcatctatccatcttgaatntattaagcatcttctttgcgtagctntgcagtgaaatgaagatntcatcttctttctgctctacctcaatggcaagatagtatgacattnttccgatatcggtcatctcaaactccttcatcatttctttcttanactctgaataattgtatgccataagtatatttgngattaaatcatataagaattgtaatnttcctctctatntcttctttttggtgaataatat

SEQ ID NO: 41148 - DNA, 626 bp, Glycine max
  unsure (1)..(626): unsure at all n locations
ntatacacactcnnnnnntnnaaggcgtgcanaatgatatcatgtagaanccgcgcaccntnanannnaacccttgaaaccattgagancccncattgtctccattgagctccagtgtttattctagctagacgctctatcatgactaggtattctatcagacaacacgacgccgtcccgtggtttattccaaagaaccgctaatcaatcactcacgcatcttatctataccatgcgtttatcattctttaactactcctcacatttggatttataggaacaacaccttatctaatcgcaccccaaggcatccctaatcgagcagatccatctctatcatctatgggtgatcaagaagagacacctgaaccgatgaagctcacatgtctgctttgatatagccaatggcctccataactaaagccatgttaggaatgatgccactcatggagaaaaacgtggccaacggtgtcagttgatcttccagctgctggatgtacaaacaaatcgtgcgacctacgccgcaccatatatctccaggatgcgttagacaagatatgagccacctgcgcacaatgactcactcattgggatacatcagggggttacattagagtcacgacacc

SEQ ID NO: 41149 - DNA, 286 bp, Glycine max
  unsure (1)..(286): unsure at all n locations
tcatgatgaatggtgtattgtttcaatcctgcaactcattatacccacatatctctctccttatctcangtgcttgcacttcaatgtatcaacaaaaaaagggtttttgctcattctagtcatcagctgaagccaaacattngtgtatttgcttggttactatgcagaaataaagaanaacaaacaattaaatgcttaaacagactnttgttcacaatataaactatattggcgcacagctaatttcaacaaaagaagaactacttnattatttatntataatcat

SEQ ID NO: 41150 - DNA, 580 bp, Glycine max
  unsure (1)..(580): unsure at all n locations
aggagagnntttgaaccatgaanaccgggannnntggannaannnatgagaccactgagacccggttgatgacgatgtagnacccgttgattntntagagnagaacgggaagcatgcaagcgtgagggattatgattctacaatnaggatttaccatacaggtgtctagcttcgtacgaacatgagcgccattctaaacattcttccactaggtgacccccccccccccccgacacacacaagatgcatatcaatcatgtcataatgattcatagctgaagtcgtaacactagctntatgggaaaggaaggactcaccttggacttcagaggcaaaaatggactcattcaaatctcctataattatccgaggtcttggatagagttcctgaggacccaaatggtccagaggtatatcaaagagaggatttgataggcattaatacagaacaaccaagtgacaagcctttacaacagataggtatgacttgtccatgtatcactatatacattgacatatccaatttttaggacagatgcggagttagggacctgatnataccataccacgggaccantca

SEQ ID NO: 41151 - DNA, 368 bp, Glycine max
  unsure (1)..(368): unsure at all n locations
taactcaccatagatcttgacccagtgtgagaatgtcaatccttaccctctgtagcaaataagaagagaaggaatatttctcatcaaagaataaaagaaggaaaacctccaatcaaagagaaagcgaataataaaatagagagaaggaaaatttcccatcataggaaacaagagaggacaggaaattcccaatcaaagagtgggagaaagtgaaaagaanagaaagaagattcccaaccaaagagtgggagaaagtaataggaaggaaagaaagctcctgatcaacgatcgaaagaaatcagagagatgtgcagaaaggtctttggaccggacaatatctgtacaatacagaattgtcaccaaatgaa

SEQ ID NO: 41152 - DNA, 286 bp, Glycine max
  unsure (1)..(286): unsure at all n locations
acctctctaggtgatgtgaatctaaacaaacctactcaaaggtgcaaataaggcgacccctaaatcctcacgctcacggcagcctaaagcatgacaatgcaggtggctcaacaatgaatcaatgataaattattaccatcttataataagaanactcccttatgcttanggataacatctagagcacaaagaaatatggatgacccaataacaaatcttggttagactntgatacctaatttgaatttgggcttaaggcctaattcaacccctcaaaatcgccttg

SEQ ID NO: 41153 - DNA, 437 bp, Glycine max
  unsure (1)..(437): unsure at all n locations
atgatctttntgacggagtgtacttagaaaactatatganttttttctctgtcttgaagccatgaaatgccttgtattgtagtgacatcatatccaatcatgtttctttaaacttcgtgaaatttgctatgcttgtgtaattaanaagattgaacgattacaaattacaaataagagaatgaaaatgaggacaactctacacaagtttgaaagaattgaatntgttggtaaccatttatatcattntctcanacttatcaagcatttttaccctttgcatggatctgacaaatagtgtcataaaaatacctgcacatcgaaatgctatatctatcagccttaagaaataattgaacatgattagacaataacttgagagaaagctgtataatatatagtcacctgcaccaatgaaagatccattcgcaatagttatg

SEQ ID NO: 41154 - DNA, 547 bp, Glycine max
  unsure (1)..(547): unsure at all n locations
cactcacacatagcgtatntacccctaaggcctagactccaaagaatccattagagcctcaccttcctgattcaggtccaacccctaaaacaacttttgcacgcaaacactactcaagaattatacaatacccacgacctcacacttgttctcaaacacgtttaatacattgcactacaatttaacacttcaggttcctaactaggaaccccacactttccttntaacacttcatgcataaacatttttctcaaggtaaacaccagtcgggttattgtataattcacaactcacaacacaggtattgtcacatcaagtattaaccatacatttattcacaaccatatcccatgtctgcaatntaacatctcgcaatgtcacgatccaccatcgcatgtttacgtatatntcacaaattaacacatgttcaactntgcactcatactcaatttcaataacaatgttataatctcanagcaacatgttatctcataattcatcacatattngaattatcacttacacataatntcaattacaatataaa

SEQ ID NO: 41155 - DNA, 168 bp, Glycine max
actctgtctgaattccacggtcattcccttgcacaatcaactccgataaaaatattgtcgtgaattgctcaagctttgttcatttgagtgctcgatatatacgattattcgactcgataaacttatcgtaaattgccaactttatttcatacgacgttcattctacga

SEQ ID NO: 41156 - DNA, 380 bp, Glycine max
  unsure (1)..(380): unsure at all n locations
cactccatcattaggattagtacctgacatctcanacaaacaaatcanacgtaacaagacaattatagttgctgtttgaatacctcacccactcaagtgtatcacacaattatggcttttctctaatgaaacactcttgccttttaccactctaattccccttgagttcttaagcaattcaagagattatggccacaacaaagaacaattcaccaatatgtgtaaggtaaggctagacaaggaaaaggttaaccaagaaaaaggctaacaatgtttttaggcacaaatgaaggaaataaaattcagaatttaagaattcaagtaacaatccttcatgcaaccaatatattaccttanagaagttttnttttaagttcttc

SEQ ID NO: 41157 - DNA, 400 bp, Glycine max
  unsure (1)..(400): unsure at all n locations
attctaccctctgatcccttaacatacttaatgctttccctaattntttntacagcaggaccgactactttcaacccctcttgaacactaaggtttaaaatgtgagcacaacatcagatatgaaaaaattcaccaccacttactaaaccattagtatgcaaaagtctttccttcaaatagtcttgcattttatcattggaagaagcatcatctagaattaatgaaaatattttctgctcaatccaccattcttccaaaaaaaaccatatataactttagccatctcacgccccgagtgtggaggaggaaaatgagaaanattaaccattttaccattcaacttccaatttgcatcaacataatgcgcagntaatgaaatataacctcagaagtacaagat

SEQ ID NO: 41158 - DNA, 537 bp, Glycine max
  unsure (1)..(537): unsure at all n locations
tatggcgtacccatcacatgaggtactaggtggctgtcgggcgatggtgcacaacaagctntccacatccacaatgcgcgcataaacccaccatcccctgttgcccacctccaactgagctcacgtactcccacgtagcccatatcctcgtttctctcaacaccgggtccccatcaatcctctcaagcttccacaacatccaagcaaaacaacattcaaacagcacaagctatcacagccaagcaaaacagagcaaaggcagaaaactctgctcaacacatcaaccaaaatcacagctnttctcacgtagagaccacagtaacaattccttcgatccaattcgttaaccgttggatcgactccaaaattgtactggaagtctatagtgtataagcctgcattntgaccgttgggatatactagcaaacatccagaactcattctgcactagactttccacagccaaccacacacaagcatttttctgcacttgtgcataattctgctgcacaatttcacagcaaatactctgcataa

SEQ ID NO: 41159 - DNA, 348 bp, Glycine max
  unsure (1)..(348): unsure at all n locations
tttcagcatctccgaaccactgtatcaggaaataaaacaaatatatataagatatcacatgcaaaagaagaaaataatacacctttaaacgactgaaacaatttatataagaaaaataaatgggcaaaaaaacttcaaggaacttgattntagaaaaactagtgaattctaaagccatatgttnttacttaattctatttatctatcctccaatccagattgaagtacttgcacttcaagttctcttggtgtgttttcttgcaagttctttgtttaagtttctaacctattctcttaatcattanatgtatacttgataaatccatttggaagtccaaaacaccctct

SEQ ID NO: 41160 - DNA, 457 bp, Glycine max
  unsure (1)..(457): unsure at all n locations
agtttcattttgatatgttntcaacaaaactgatcngttttgtattttttttggttnttttctaaaacatttaattctgtcaatgttttaaattntaaaacaataaattttaaatagtggtgattaattaaaaatcattactatctttattttattttaaaaattataaaacaatctaattcctaacctcttttctttcctaaacaccaacagtcattacttcacccctccccccaccatgcccaccaccttgcccccgagttcctcctctagcatgcctcccttgtcgcctccttctcccatcaatntgttcacaaaatcacaaaacatactaatcatgccactaccatctttaagcttgttgcctanagtagatgacgaagcacatcttaagacagacatggatggattaacggnggtaaatgaagtgaatggtttcataccaagtgacaaaatt

SEQ ID NO: 41161 - DNA, 316 bp, Glycine max
gcagttcggctaggtttcttcgtgcgaactgtttctaagttgtgtttccgcctactggcatgttctcattttgtcggccaggaaaacattaacccacctcggcatacaaaacatgattcaccgatactgtcaggaaaacaataatgctagccgacgtccgccaggaaagatgaccgaccgaggtctgaaaaagaagcatgaccggatgactccggtcgaacatttcctaacagatatcatccgagtattattcatggatggaatagaaaaaacaatagccgacatctgtagttaaatagccgtgactgatattttt

SEQ ID NO: 41162 - DNA, 359 bp, Glycine max
  unsure (1)..(359): unsure at all n locations
atgctagacganatatagatgggaatagaggtaacaatggcggtaatgacggaccgaggcagaaccgggttgagggagtaaagctcaatgttcctcccttcaaaggtagaagtgatccagatgcctacctggactgggaaatgaagactgagcacgtatttgcctgcaatgactacactgatgcgcagaaagtcaagctagcagcagctgaattctccgactatgcccttgtttggtggcataaataccanagagaaatgttgagagaggaacggcgagaggtagatacatggactgagatgannagggtgatgagaaaaaggtatgtgcccactagctataacaaaaccatgcgacag

SEQ ID NO: 41163 - DNA, 565 bp, Glycine max
  unsure (1)..(565): unsure at all n locations
acgggacgactgcnnagatgatcagccattcgagnancccattgataccctttgatnnacccgcacgatnngatactcaagcttgcctganagcatgtgcggctgattatcnttcanagtaccgttttactcagatgcgcgatgatnctaatattgagtgcataataactgggtgtgcatgaaccatgattatagtatatgtaatacccataattggtactctcatctgacatgatctatgtcaacttcgcttgtgcatagcttgcagctcaccacggttacgttcgccggtcatgttgaaaaacaagtcattcaacctggcggataatactgcaattgcggtcatatagcagatattctctcgtcttggaattgtattacgagtgatataaatatctacagcttaccttgaaaactgattgtagagaaaatgttggcctttgatcagaagaagtgataaacggctaaataccttccatcttttggactgtattgaaaattagcaattataattttatagcttatctttaaatacatgttctgtttctaaatattcttatcatat

SEQ ID NO: 41164 - DNA, 383 bp, Glycine max
  unsure (1)..(383): unsure at all n locations
acatcatgaatggatttaagacacaagttacaatggtcacgtatgtaaattttgtgtatggtgcacaaatttttttagccttagatcaatctttggtgcaaaagtttattatacaccctcccagactaaaatgttccctttcttcatcttctcctccctctcttgcaacctccatggtgcatccacctctctttgcctagccattgtatgccaccgcccanagcattnttcgacagtcactttttttctttcaaattcatcactacaacatatgcacaaaaccaagctttcatcacttccgcttcacaacaacattgatcatgagctcttcctataaccgcacgctcttactatcagagccttgcccaaatctgggtttcctg

SEQ ID NO: 41165 - DNA, 508 bp, Glycine max
  unsure (1)..(508): unsure at all n locations
cacgttagaatgcctcattntcgtttttcctttgtcttctactttgtttagctgacacccttcatgttcaagtgcaacatcccatatgccacacacgactatattttgcatactctgcaaatcttcattntgtcttctcaacggttcctagtaagagaaatagaatagtgttagttaaagtaaatgttaggggtatcccaaaatgttaatggtaacgataaaagggatataatcggttagagaanataaaaaatttcactaaatactggattccagataacagaacacacatctctaataaaaatgttaatggtattagatttggtcttattagacaactaatgttaaagganaacattagtgtgaaagtacaatctcanaggaattataannataacttaatagctcgaagaggatntannaaaaaaagaanaaaatcatgagttcctgtatattcttaataaaatgacataatataactatcaatgacctatccgctcattcgcag

SEQ ID NO: 41166 - DNA, 580 bp, Glycine max
  unsure (1)..(580): unsure at all n locations
cgcggcnattgaatctgaganccgacncttaagaacccatgatccgtttgtggcaattanaaagagcttggttttgttattagcatcaccgaaccactgttgcgggaaattaacaacatatataatatatcacatgcagaagaagatagttatacacctttatacgactgaaataattatatatgaaaaatctttgggcaaaaaatcttgaaggaacatgattttcgaacacacagtgaactctctaaccttatggaaatactctattctatttatcgatactccaatccagattgaagtacttgcacttcaagatcatctcggtgtgctatcttgcaagttctctgctaaggttttaagctatactttaacattaaatgtttacttgataaacccttttgaagttcaaaacactctctagtgtctgtatttttctttttgaggagagaaatatagcaagattaatacaaatctgtgagagtttaggagatataagccgcagtcgtgcttattatcttattgatatattgctcggggacaacgattgaccatatcgtcaagtagatgcaccaaatcgttg

SEQ ID NO: 41167 - DNA, 396 bp, Glycine max
  unsure (1)..(396): unsure at all n locations
cttaagaacctgtggccttgtgatgttcccacgttggcatagtggtaagcgaattcagccgcttgtatcatagcacttatgaagggataaaagtgtattctattcttgtttgtgttggatctgtaatatctcatatattgctgcacttacgggcatagctgttggcatgtacggaactaaagccttacaggtcactattgattggctgcatatctggcttggcgtaatntaatgcggtgtgtgtaacatggtgcataactacagatcatattaaggcaagtcgattattttcggacaaacgatggtggtgctttaatgctacaatggcactcttgggtggtggtgagtactatccagttcttaatgttccattgtgtgccataagttccttcaatc

SEQ ID NO: 41168 - DNA, 265 bp, Glycine max
acgattggaatatgttgaaccattatgaataagccacaacacattgctgtaacccttatcagaagcaaacacacttaaccacctacaatgtagaagcataccatagcttaaccatcaagagcagaagctatgcatggtgtttaatcactcaagacagaaggagtacacaattattgaatgcttaaccactataaacgcataagcatcacaacaatgtgtaaccatccatggtacatgcgagacatcaatgcttatccaccgtgga

SEQ ID NO: 41169 - DNA, 396 bp, Glycine max
  unsure (1)..(396): unsure at all n locations
tatgagttgattntagcctttactgtcacttggntattattcaattcattcattgaaactttcanagagaaatgtccgattgattcttgtgatctattttattattatnttttccaagatattntgagtggtgtattattatattgatttttttggtttaaccgatgttagagtgtgaacagatcggttatatcttgcttatacaatgattaaatgagattacaacgcacatgatcgattganattcatattatcatttattacgcgagataatggtttatataaacggttaaagcacgttaaaaactgaagataagagatcaatagtgaacgagatgaatatgaatgccaacaaaacaagaaatgaattgaaagtctcggattcaaacacttacc

SEQ ID NO: 41170 - DNA, 366 bp, Glycine max
  unsure (1)..(366): unsure at all n locations
cttgagagagttctaagagggatatcttatgttttatagggtgtgtgatctagagagtaattagagtgaacaatgaaaaacgtgtaacatcctttacccaaaccaagttattaaataaaatattacagaaataggatataattttttgttgcggaataaatgataagtttaataaaaaagtctaagttgattgaatacgtgagtattgtaattccttatatcatgtttaattcttatatataanaaaaatatgaatttaaaactttaataaccatgcagtacaaaggcatcacatatatcctcataataaactcaaacttcattaaatactataataacanataaaaggtatcgatcgtcaatgat

SEQ ID NO: 41171 - DNA, 422 bp, Glycine max
  unsure (1)..(422): unsure at all n locations
ctactggagagaatgtataatatatatcgatcccaacttgttgagtatatcctgtggcaatcaatcgagctttgtatctatctatagagccatccattntgtatttcaccttatacactcatctacatccaatatagtgcttatcaggtggtaatggaacaagtgtccaaatggaatatgcttcaagagcttggatttcctcattcattgctcgacgccattcangataagaagcaacttgatgataaaattgagattcatagacaactganatgtgattaatgaaagctctgtaaagggggctaagaggcaacaaggagcaataatgttggatgggatatgcagcctgagaatgtgaaatgacataatcagacaagtataagggaggcttagagtggcgtgtactccttcttaaagtaaca

SEQ ID NO: 41172 - DNA, 471 bp, Glycine max
  unsure (1)..(471): unsure at all n locations
ctactattaagagttgtntagtatatatagaactagcttataaagcctttaataaggcctatntacatcaagctctagctcgttacacgaatgagaaaaagtaggaatctttgttaattcatgctaaaggtgtgtgctaagccagacagctcgcgctaggaaggaaggaagaagctaccatttccttactgcactcttggtatgcccctccaggcggtaggaatgaagaagctaccgacatcagctcactatcggccaaagtgaccaatatcaccgtgctgagtggcataactcgcagcggtcgcgtgttcgcaccccctagcctactgatatagcccacanacactanaggggaaagcaggatgaccgaatgacaggatggtcaagtgatcgccgcaccagacaaggatgttcagacgaaggatcntttcganggaagagagggttgtggaaagaagacgtatcactcan

SEQ ID NO: 41173 - DNA, 377 bp, Glycine max
  unsure (1)..(377): unsure at all n locations
ctctcatctntagagtgtgcgcccatcttgcaacagtacatcttgagatgggttttgggacaagtcgtccctttatacttgtcgaagtccggcactttgaacttcggnggaataacaacatcgggtactaagcaaagatccgtcatgtctgtgaacggatagtccccaaatccttccgcggctctcaatctttcctcgaggagatcaagcttcctcttttcttcggttgccggnggcggtccttccgtggacaaaactattggttgtatcgcgatgttgggttgaggcaacgtgctgggtgccggaccttcggngatcggnggatagaactcgacatcccttcgagcatagtcttgagggtctttgtggacttcttc

SEQ ID NO: 41174 - DNA, 364 bp, Glycine max
  unsure (1)..(364): unsure at all n locations
gtctgggtttgtctaagtgttattgctactagaatttgntatatctttgtgttgagttcagtcattcaacaacaaaaagccttttccgacgaggtgaggtcttccacatggatcatatgatgtcgtttggctcgattaaagacccatctaaatatgattnttgttgacttgagaaatacttgaatgccgtttgcattcaagtatattgatttgtacatggttagttaatatattattataaggaaaggcagtccagggagacctggatcgagcaggagcaggagcacgacaagtttctagaaggtttccaattgtgagtccctttntctcttaatttcattttatattatgctntgcttttcat

SEQ ID NO: 41175 - DNA, 439 bp, Glycine max
  unsure (1)..(439): unsure at all n locations
ctatcggtctgcaacatanacaagagaataaaaaagctctcattatcaatatggtaaaattatatatatggcatatatatataattaattntttttattctaatagatcatatgtttattctttgttgaaaataatcctactcaagtcaaacaaaactattattatagacggcaaaatttctctctaatgctgagtgtagatatagaggctaattattntttggagatataagattgatccaattattggagtagggtaaagggagaagagaanaaaaatcacaagttggaatcctccaattaatatttttaacaaagttaacagattaacatttatttattgataaaaaaattgaaacctttntatttcacgaaaacttaattaaagatgtaaactngaatttttccttcaggcacatattcctttaagaagttcttc

SEQ ID NO: 41176 - DNA, 327 bp, Glycine max
aatattgcatgccaaggcaggcacaatagtttctagaggaggaccagcagtctccagccgtagatgcaccgtcgctacctctacggcagccaccatctctagagtccatctctgctcacctgtggaggatggagctcttgatgcacgcatatatgcagcatgtgaccgaccagcaagcggttaatcatatgggtcaagtgcagctgaatgagagcttctaccaatacaccctgcatcagcagagccaagatccaagccctttcccatggcctacccccgagcagtttgtggccacagttgcatggcatggaaagaggcctagttttc

SEQ ID NO: 41177 - DNA, 506 bp, Glycine max
  unsure (1)..(506): unsure at all n locations
ttcacatctacaaaagagttcatctccacagggacttgagtttacttaattcattcagataaaggttatcagtttaatagttatgtataaattaaatcaaatgtctttggttntggtttgattagctatagacaacttanagtaaaagaaaagtaaaaataatggatttacaaaaataatggaaataacagaaatacggatataatggaattcaatgcgtcgganatatagaaattgcgaanatgatttanattaattcaagaaaacatagcattggatttcatcattcatacccttagtatcctaataagattaacatgtataaatcattntctaacattactgatgcacacatagttatccctagtcgattcctcgcacttggaacctaagaatatntactaaatattgatccctcgcatacacaataaatatcccagcattacaattatattctcgtgctntttgcaataaaacgttatactctatttctagcaacgtaacgt

SEQ ID NO: 41178 - DNA, 440 bp, Glycine max
  unsure (1)..(440): unsure at all n locations
agatacaagtatcattcaaggtaagctatntggtcaaaagagcttgtgtctatacaattcatggccttcatcatgttctgagttagacaaatcattctagaattcagagatttatgctaagatcaatattcacagttagtcgttcactcacagagtaaggtcacactcttaccggttntggttcaagcttttctttcacaatcaatctgtctactgactaacaattctaattacaagtttacattcttgttctttctttgtctaacatacacacttgctcaaactcatgataagaaacacaaactccatcacaatcatgcgttcaattcaaaataaaagcatacacccatattcataagtcaataaaagtgcttcactgccatgtcatcaaaacaaggtaaactatttcaaatacttcagaataagcanactaactaccc

SEQ ID NO: 41179 - DNA, 322 bp, Glycine max
  unsure (1)..(322): unsure at all n locations
ttgactcattctctccttgaagtgacgtctccaatcacctttcctccttctccattctgctgccattgatcttcaagaagcaaaggatttcattgatgaagaagatccaaggcctacaagctctacatggagctacatcatgtggtatcaagagcatcttcatctaagtgatgttcttttgcttcctctatcttttgtttggtcaattcactntaattccttgttcttcatcatattctccatgtatctcctccattatcttgtggtttggttctggttatagtagattcaaaatataaatcgataaatcttagatctatac

SEQ ID NO: 41180 - DNA, 438 bp, Glycine max
  unsure (1)..(438): unsure at all n locations
catatcttccgtaatactccccacctctatcatatctaataattntcacatttatgtctaattgcctttttacttcattctagcatatttctaatcctgcctaggttagctttgctattcttagccggtcccaagcccggataaaaggagagggttgtgttaggctttcgacagccaacgtaaaactttgtcgaatctctatgacatggatcaattacgtaataatgtgaatgctangtcgttgcccggaagcaacgcactgtatggctcgagtacagtgtcaaaagagcaagggccgctgcatcgccgcccagatgtagtgaanagtaagcaagggttcccacattttcgtgaacgggtgtgggtaaagaagctagttcatgacagganggatcgctntggtacatggaatatagacacacttactggaaaatctat

SEQ ID NO: 41181 - DNA, 484 bp, Glycine max
  unsure (1)..(484): unsure at all n locations
gctcttgaactggctctgtaaacatatcagccggattgtgcagagtgctgatgttatgaactntgattcttttttctgaccgaatgaagtgatatctaacatctatatgcttggttctatcaagatgaacctgatccttggccaagcatataacactaaggctgtcacaatagatgttagcaaattcttgattaattccgagatcatttatcagacctcttagccaaattccttcttttgcaacttcagtaagagccatatattcagcctcagtagttgagagggaaacagaaggttgaagtgttgccttccaactcaccaagcaaccactaagggtgtaagcataccctgttaatgaccttctcttgaccaaatcagcagcaaaatctacatcagaatagccagtgaggcagcaatctgggtgagatccatagatcaaacctacatctgtagtccctttaagatatctgannaatctcttcac

SEQ ID NO: 41182 - DNA, 169 bp, Glycine max
tggacttaccttgaatcaatttctttgatagcccctttgagcctatgttcccctttctttgttttgaagctcattacaagccttaagtgaaaaaccatgatatcaccttacccttaaggaattttggagttttggaattgttttgggaataagtgtggggggggggggg

SEQ ID NO: 41183 - DNA, 437 bp, Glycine max
  unsure (1)..(437): unsure at all n locations
tgaacttagagaatgttcaaagtggaaaggtatttgtcgaacaatttgttaccagatattctcttgaatcttcattatatagcctttttattcatatatttgttgtgagtgagagttaattcaatcaaaaccttatgagtcttcattaaatgcatgaagacttctattatgattcctgatgcaatcctccctangaagggattaatcaccagagccatgaataagaggctccaagaggattgggctagagctgctgaagaaggccctanggttctcatgaatcttangatagatttctgagcccatgggccatggttgggtcaacttatctttgtacatattagattangatttcattatntttgggccttgtatttagggctccataatatangtagggtattcctataaattangaattttcagcccttgtattt

SEQ ID NO: 41184 - DNA, 388 bp, Glycine max
  unsure (1)..(388): unsure at all n locations
gcttgtcaatcttttgagcaaagacaacctctaatgcgtaattggatgcatcacacataaactcaaatggggctgtccaatcacgtgcctgaatgatatgggtggtagtcaccgcacgcttgaggtaagcaaaagcctctntgcatcggtcatcaaaatcaaactccacctgcttttgcagcatattggatagtggaaaggctattatgctaaaatccttgataaagctcctataaaaccctgcatgacctagaaaataacgaacctctcacatgcaacaggggtaacggaatcgtgaaataacatctaattaagcacgggctacctctatgcacctattcaaaatgatatgccctaaaactataccttcgtctaccatgaagtgaca

SEQ ID NO: 41185 - DNA, 411 bp, Glycine max
  unsure (1)..(411): unsure at all n locations
tcggtagaactacagattctcatgtttatcacacatctatcataacatcaaatgctgcatccctcaaaagtaattcccacgaccaagggagagttttgccacgtcatatgcaaatttcttttgngggaaattacataacgcccctgccaccccaagggcaaccactactcagtaacaaccagcctttgtgacaacagctcaaggaactccatatagtgtggccaatgcaaagtcaaatttggaaagaagtaaagctagttcgtctgtgaacgcatcacaactgcaacaaactgaaaattcagctgggagtggccaaaaatattcaccattatgtgggagacatgtcccatcaatattgagttcatgctccanccacctatctgagctaaagtattagatatcatgtcatat

SEQ ID NO: 41186 - DNA, 590 bp, Glycine max
  unsure (1)..(590): unsure at all n locations
agcgtgggatgaaccatgagacccgcannnnnannnnccatganacgttgagaccnggatcttaagtcaccgctgctgcagctatctttagatattttatgcgaacatatggggcngatcnttaactccattcacaagatgaaatatatttatatcaacacacacgtgtatattaacttccaagatctctgttaccatttgttaggaaactgctagaaaaattgttagaatagtttgttagatctttaagaatgaaagggagacacctctgtgtatatatacttgatcctataatgtatcaattcaaatctttcaatgaatgatataatgttctccataacttaatatgggatcagaagtgtaaatatcgcaaccttatttctctcttctcctctcttcatncttcatctccaaaagtcttcaaccattcgagctttctgccatggacgatccatatgatccttacatcatgaacaatgctaatagtcctggtctgattctcgtatcaaaacctctcacattagagaaatggaactcatgganacgagcantgctcantggctctggtagagaaacanactcnaattgtn

SEQ ID NO: 41187 - DNA, 440 bp, Glycine max
  unsure (1)..(440): unsure at all n locations
ctgatacctcttgttgggaattgttaataaactgtatacaataccacatgagcaccataacacattacgttagattatcaaaaggtttaaggaatacctggatccatagagcttgattaacacgcagcggaatttgatagtggtcacaaacaattggtttaatgaccttcctcaaccaaatcaccttcttccttatgggaccttcgttntctcttcagatggtgagaggagaaattgtttgttgattttggtgtattggggatcataaccatgccttatgtttaaacctattanggttccattatcnctaatgggccaactggttccgctattaaccatataatttctggatctatggctacttaataatacttatttgacccattgagccatactattaatgtatattatatcagccatatcatatagatataaatcta

SEQ ID NO: 41188 - DNA, 390 bp, Glycine max
  unsure (1)..(390): unsure at all n locations
cattctatgtgcccgtagtggtccacattgtgtttcgtgcaattttattctcgntntgtttactttttataccccttgttgacgtgcttaagccattttacttaagtcatttctcgcttaacttaaaaataaaataaatttccaccgaacgtttgaattgtattatccattaacttcggttaaaataaattccgaccgttcggtcgtgccgtaaccacgttggaaatcaaaaagaggtaaaaaataaaggctaanatcaattcgcctagtcaagctcgtccataanaaataggctnttgaagttgtcatttcatttctcactaagtaaatggatcattttaggccaacgccttaaatgatcacctcttaagtaaaagatcactgataaaa

SEQ ID NO: 41189 - DNA, 297 bp, Glycine max
  unsure (1)..(297): unsure at all n locations
gatgatgtggtcttcaccgatgataggatcanagtaggtctaanaagaggcaaatctgatcatcatgctntgatacatgccananaaaactatggcaaatgaagagggtgagaatgagggagaagcccatgctgtggctgccattcctatacagccatgtttcccaccaacccaacaatgtcattactcagccaataacaaaccttctccttacccaccgcctagttatccacaaaggtcatccctaaatcaaccacaaagtctgtctaccgcacttccaatgacgaacaccacctt

SEQ ID NO: 41190 - DNA, 425 bp, Glycine max
  unsure (1)..(425): unsure at all n locations
gtcttaacacattggttggtacatcctttgatgtacaagtagagggtacatctacttgngttgttgactgagagcaagagagggtacatctcttgtggatcagttctagtggagggtacatccactatgttgttcaaagagaacaagggagggtacatcccttgtggatctttngcttgtaaaggatttttacaaggttgaaaagaaatctcaaggaccatatgtcgctttgggactggatgtacgcacgggttgttgctgaaccagtataaaaactcttgtgtgtgtgtctccttcttccctactcttttaatttccgctgtgcactgtaattcccgcttttacttntgtggtaagttcttttctattcttcatttacttaacaacatagtaaaagccttagaagactaaatntntaattagta

SEQ ID NO: 41191 - DNA, 545 bp, Glycine max
  unsure (1)..(545): unsure at all n locations
tgacgtgnnnnattggatccattgaananncccggannnntaganannancngattattaccattgnagacccgngattatntcncttnagacccatgtgtntagattanggatggaaaacntaattgttggagatgattaaaagcgcaagacggtatatagaaatgngaagaatgatgatgttatggctgttaacgtttaaagtacctgggtattgctgaataaaggagggaataaaagtggttgaatgctggaacgtctcccctttcgtcattcttataatttggtgcaggggtggctctcccatgcgagctaccttcatatttttttttgatgggacattaccatgtccctctattcatgatatcagtttgctacttgaacttgcttatgtacatacgcatgatactattttcctttaaaccacaagtggtagaaactcaattcaagatccggctgctgcaattctctatgttgttaccaagaaggcaacatcgcgtaaacactgcccgtgttcgctaatctgcatataacacagttgcttc

SEQ ID NO: 41192 - DNA, 385 bp, Glycine max
  unsure (1)..(385): unsure at all n locations
aagatgagaggagtcagtggagagaataaccaataattgtcggatggaaagaagtataagacaatgaataagaaatagagggagaaaaacataaagaataagaagataacaaatttgaacaataaagaatagggaaagagtaagagtgaaaaagcaagagaaaagagattagagacaaattcagatgagggaaaggaagtgccataccctttggtactttccaagaaagataaggaatgccaccttgcgagattcctagacattctcatgatattggagataacaatgccttttggagaagctctacaacagatgccactctactccaagtttgtaaatgacatgttgacaatgtagcacaagtacattcaccangaaaatatag

SEQ ID NO: 41193 - DNA, 274 bp, Glycine max
  unsure (1)..(274): unsure at all n locations
gctgtcaatcttttgagcaaagacaacaccttatgcgtaagtggatgcatcacacataaactcaaatggggctgtccaatcacgcgcctgaatgatacgggtggtagtcaccgcacgcttgaggtaagcaaaagcctctttgcatcggtcatcaaaatcaaactccacctgcttntgcagcagattggatagtggaaaggctattacgcttaaatccttgataaagctcctatgaaaccctgcatgaccaagaaaataacgaacctctcacatg

SEQ ID NO: 41194 - DNA, 439 bp, Glycine max
  unsure (1)..(439): unsure at all n locations
tagtttcaattatgtcanaggtttctacaattaagagtntttgagtatttatagaactaggcttaagaagataactaagcctttaataaggcctatttacatcaagatcaagcccattacacaaataaacaaaaattatgaattttcataaattgacgttgaaggtatgcgctaagccaaacagctcgcgctaaggccaattttttctcgggttggaattgggctaagccaaacagctcgtgctaaggccaatttttcctcgggttggaattgggctaagctagacagctcgcgctaaggccaattnttcctcangttggaattgggctaagccaaacagcttgcactaagcctgacatcgtatgctaagccagacagcttgcgctaagctcaagcatgctattcaacaatcttcaacgtgctccaattcaactccttg

SEQ ID NO: 41195 - DNA, 149 bp, Glycine max
atctatctatacccctctattaactaaattaatttccttaaaaataattacggatgaaaataacgcaacaaataatcaaacatcaaacataattactaataatatatagatatatatatcacggtgttacatcagcacctgcacaacct

SEQ ID NO: 41196 - DNA, 459 bp, Glycine max
  unsure (1)..(459): unsure at all n locations
tgtctcagcgtttatgcgagatagagaccaacatgttagctatcatcgccaagtaccaagaagagttaggtctagccacggcccacgagcatataatcgcggatgagtatgcccaagtatacgcggaanaagaggctagaggaagggtgatcgactctttacaccaagaggcaaccatgtggatggatcggtttgctcttaccttgaacgggagtcaagaacttccccgattgttagccaatgccaaggcgatggcagacacctactccgcccccgaagagattcatgggcttctcggctattgtcagcatatgatagacttaatggcccacataattagaaatcgttaggaaacttgtatggtctctcagaccttgactagatatgacnttccgtttgaaaaaaatgagttggcccacgttttactccaaaatagtgcaataaatcactctacattta

SEQ ID NO: 41197 - DNA, 414 bp, Glycine max
  unsure (1)..(414): unsure at all n locations
gaactttgaagttaattctaaatgatcaaagtgaaaaaatgcacacacatggcctctatttatagcctaagtgtcacacaaaattggagggaaatttgaatttctattcaaatttcacttgaatttgaaattgaatttgtggaaccaaattttggagccaaaatttcactaattatgattagtgaattntagctatggttcaatccactaatccaagatcaagtccaagattctccactacgtgtgcttaggtgtcatgagccatgtaaagcatgaaggacatgcacaaagtgtgactatatgatgtgacagtggggtgtagcaagcaaatgctcacctncccctctaaaaaattaatggatttggattctcccaattcaattaaatttatttcccaacatacacatgacatat

SEQ ID NO: 41198 - DNA, 482 bp, Glycine max
  unsure (1)..(482): unsure at all n locations
ntccagtggcccangcgagccanaggctagcttggtcaagccatgggctgcaaaagtcaccaaatgtccattgtgccctccttnttgggtactttccgcattcttttccgaaatgtcaaaaaaccttacagattgcacgacaattggtgttaagcagcacaattcggctggcaagaatccagatgtttgcaaatgattgtgcccggacgaaattagggtatgacagtcaggttggatagagagcccattatgccctcaatgtggtctactctcttctttggtgggctcgaattttaaggtccaaagtggtcaaggctacacatgtatacttagcccaacaacatcataacctagaggtgcctanggggaggaccctccaactgagaaaactctattntccgcctttgtataagtttccctgtcatcctttgngtgtgacaacttcanagttcttcttaggtgagccatttgggtcctcatgt

SEQ ID NO: 41199 - DNA, 377 bp, Glycine max
  unsure (1)..(377): unsure at all n locations
ctcagctntccatgaataagaaatctacacctgttgcaagagtctgtggtctatgttctcctacagatcaccatacagatctctatccttctttgcagcaatctggaatcaataagcaacctgaagcttatgctgcaaacatttataatagacatcctcagcagcaaaacaaacaatagtagaataattatgacctttcaagcaatagatacaatccaagttggaggaatcatccaaatctgagatggacaagtcctccacaacaacaagagcctgtccctccttttcagaatgctactagtccaaccaagccatatgttcctcctccaatacagcaacagcaacaacaacagtcacaacaaagacaacaagcaact

SEQ ID NO: 41200 - DNA, 461 bp, Glycine max
  unsure (1)..(461): unsure at all n locations
acattggaaagttagtttacaagaaatataacaatcattacaaacaagggccaaacaacacttctcatggcacgagtgtcaacatgcactntataaaataatcatattgnggtcgtgctattttatgacacatacgtatttgcacacataaaaattttgtgtgaaacattntacaacacctatccatgtacatatttttttgacaaaccttttcaatgctacatcctatatatatacacacattnntttggaaggcttcttttgttacctactcacaaatacacatattttgaanaacacttttacgctacccatccaacactttgtaaggcacttcatgctatatatattcatattatgcaaggcattntcatgctatatgtattcatatnttgcaagggcatttattcaacattntgcaagcatttccatgctatatatatattcacatatatacatac

SEQ ID NO: 41201 - DNA, 462 bp, Glycine max
  unsure (1)..(462): unsure at all n locations
actatgatgttcttgaactacctttagatccaacggtttctcagatgaagaatcacagagaaaggaagactaataaggctaaggctaaaaattgccttttctctactgtgtcaaaaattatttttacaagaattatgaatttcaagtctgccaaacagatttgggattatctcagatcagaatatcaaggctgtgaaagaaccaaaggcatgcaagtactcaacttgggcagagaattcgagatgcagagcatgaaagagactgaaacaattaaaggctacgctgaccggctgttangcatagcanatagagtgaggcttcttgggaaggactntcctgatgaaagaatagtgcanaaaatcctggtcactatacccgagaagtatgaatcanagatatcagcattggaggagtctaaagacctttcaaccatcaccttgggagaacctcataatgctctac

SEQ ID NO: 41202 - DNA, 490 bp, Glycine max
  unsure (1)..(490): unsure at all n locations
gataattgttgtaactatggctgtggtctttgtctattgatgaagatatttattggagcatttaatacatgtcactaacttgtcaactaatatgataaaacaaattgcttatctttctatttttgcactttcatatcttgtgtaagaggacatataaactgttacgaaccaaattattttaactttttcttcatctttcatcatcttctccatattgtatagagaataaaacattcattctctatacaacaacatatcaaattctcaaagaattaaatatgtataaatgttgagactcaacaatcataaactntctttgttaattctctctaatgcacgttaagacactaaatttatatcttaacattnttntacttacatcaaaatgttgatgggtcttaatttatgttatgactcaatactntatactacttannacatanagaaacacatacacatattaacattttatagttaaatagctcattat

SEQ ID NO: 41203 - DNA, 594 bp, Glycine max
  unsure (1)..(594): unsure at all n locations
agacgtgcnttttgaaccatgcgacccgggatctctaagcanctgatgatgcctctaaaacccagtgttaccactctanacgcctgatgtgnancctggaaacatgctatanagacagctttcttggtatatgcaacaactattgatgcatgcagaatcacctgcatccgttttcaagtcatatcattgctaagacattgcgtgagactaaattggtctcttgtctacataggaacacgcgatgaagaccccttcatcacgaatcacgccgatacattattgatattgtttttgagactagcctaacaattcttattgatctattgtggaatatttatatgcatatcacatagcttgcctctctcattataatttctgcatagagcctcctctctgaacttgtatcaaggcaccctcttggaggtgaagctctttctatcatggttacaccctaagggatggtgcctactctcacctcttctactctatctatcatgtgatctccacgggggaaacactccatcgagagaactcattgaagcttagatatacacctacatatatcttccaagccgccacatcagtagaatccag

SEQ ID NO: 41204 - DNA, 335 bp, Glycine max
  unsure (1)..(335): unsure at all n locations
ctatcatggactctnttattttccttctaagacggttggtacccncctaatcatgtgatgttacattggccgataaacggtttcactgcaatattcttcacatgtcatcctgtatgcccagtacaactaactaatatattacgcttggcatgtctagtatgtgttatatacataataataataatatataataaaaacttgcatgtctcccattatatgtagctatgagaattgtgattgagtgatactatatcagtcgacccatcttgttgtcacttaaatattatgactcttatgtaagactgtcacatatgtaagagttgatgaagttctct

SEQ ID NO: 41205 - DNA, 595 bp, Glycine max
  unsure (1)..(595): unsure at all n locations
gagtgcnattgaacatctgacncggatcttagagcacctgctgaatccgtcgtattcanncaaatagaagaatcaccccatttatcttctatgaaaacttttcacaaacactttgtgttctaacaattatcaaggcttaaccactcatgatagaagctaaccaattaaccatggttaaccaccacacattgcagaaacttaagtcatcaaaaccaacctaaaaggctgaaacaataagccaaaatcttcaaaagcgtttaatcaaacacctttgtggcaaaaactggatagtgctagacatggaanaacttactctagccatgcaaattgaaattgttctggttcctcttccgctttccaccgacatcctttatcttcacaaaaccttgtgccacactaatgaaattaagatatgaagacgtcatctctaagagtatgggtgatgggtgatattgctccttataccatgataagttcanggtagagagatggaaagaagagaanaaagaaaccttgataatgctcaaaagacanatcanatntacatgaatacatcagcttatataataaactatactatttgtactactatacn

SEQ ID NO: 41206 - DNA, 477 bp, Glycine max
  unsure (1)..(477): unsure at all n locations
ctcttgcctcactcaccgccttagacatcttagaactgatacatatgagcatttgtggtccttttccaacacctttttggaatgagtaacaatattttatctcgttcatagatgactactttagatacggttacctttatttgatacatgagaagtctcaatccctagacgtttttaagagtttcaaggctgaagttgaacttcaacttgaaaagaaaattaaggctgtcaaatctgaccatggtggtgagtactatggtagatatgatggatcaggagaacaacgtccatgaccttttgcgctntttctcanagagtgtagaattgttccgcaatacactatgccagganaacctagcatgaatggtgttgcagaacgatgaaaccgaactcttaaggatatggtgagaagtatgaatagtcattcttctttgccatagtcacttttgggagaagccttanataccgcagcttaca

SEQ ID NO: 41207 - DNA, 394 bp, Glycine max
  unsure (1)..(394): unsure at all n locations
agtcttcttatccaaggctcatcttggtggtgaagctccttcttccatggcttattccttaatggatggcgcctcctctcacctcctttcctttgtcttccgctgcatctccatggtggaaaatcaccattaaaggaccccattgaagctcaaagatccagcctccatagaagccccacaagcaagcttccatcaactaatacccaaggtgccacccttatgagaaagcaagagatcgactcatcgagagggctggtcatcccanatccacaagaattggacattatatgtangaaatctatgcagttaacatgatccttatggatgcagatgcatgcaacctttgtcgtgaaacttgtaaatgcggacttcatatgaaacaatgcaatgtaat

SEQ ID NO: 41208 - DNA, 421 bp, Glycine max
  unsure (1)..(421): unsure at all n locations
ggagacacatgaacagcgctaggcaacgactttcatggcgctccgaacaaaggtggagtatggaggattgccttgagggtccgcacttaggcaatcatgaaactaagctccaaactcgaaagtggaggacacatgaacaaccctaagcaataatattcatgtggctccgaanaaggatgagaatggaggattgccttgagggtcctctcttatgcaatcatggaacacagctccaaactcgaaaacggaggacacatgaatgaaaccgcaattcattcacgtggctccggaacaggatgagaatggaggatngccttgagggtcctctcttangcaatcatggaacacagctccaatcatggaacacagctccatactcganaacggaggacacatgaatgacaacgcaattcattcacgt

SEQ ID NO: 41209 - DNA, 625 bp, Glycine max
  unsure (1)..(625): unsure at all n locations
tacatatcgttcnnnnnnnnaaagagatgcnattgtatccatcgagannccaganncagtagannnannccattgaaagccttgtanancngcgatnctctacactnacctgctgtatgcaagctngtctcancagctgtgcgagagcgagattatctgttagccatcatcactattacccgagaaaattataactcaccacggcccacgagcaccaagtggcggatattatgccaaatgtacgccataaacgaagcttgaagaatggtgatcgactccttacatcaagacgcaacaatgtggatggaccgattgtggacttacattgaacgggatacaagacatcctcgatggttggcaataaataagcagtggcggactccttctccaccgcataggagatccatagtgcttgtnactattgacagcgtacgatataactaatggccctaataattatggcccgatatgaagtttgtttgtgactcacatcttcgtaactttgactgtctttttgatcagatttactccggcaatacactataagtaggccgactcagccacacaacatctcgactataacatgcaatctaaactgctatatcgcctcacgctcgactttacg

SEQ ID NO: 41210 - DNA, 318 bp, Glycine max
  unsure (1)..(318): unsure at all n locations
gacagcctcatgcacaacaagccggttcggcgactntttacgttccagaatcgcggtcgagaagtccttcttccccgatntcctgcgtttccaaacaaaaactccaacatcaaacaaacctcacagtccaacaagctccatagtatagtgagcaaagaaaaagaanagaacaaaaagaattgtgattcctgaaatgaaatcaacgaaggtgcagagagttgactcacgggtccgatgattcgccttgctgtgacatccttgctggaattgaagaagatgatgatcaaagtgaagaattcagaaagttcagaacctaag

SEQ ID NO: 41211 - DNA, 386 bp, Glycine max
  unsure (1)..(386): unsure at all n locations
ctaagaaactagatctgtaactgcacaatcagttaaacccatttatattcttattaacatagaaagataaaccacaaagccataataagatatgtntggaagagcttatttaaacatattttatgcagttatgtaaacgcttganaaagcttatcaaaatagcttataagctgtccagtccagcataattaggatatgtacaaaaacaatttaacatcaataaatactccatgtactaacaatgtgaaggcattntacaatgttattcgatcagagattgacttctatattaaatttattaactnttataataataattataagatagtttacattaaattaaactcttaacccatttccncttacattataaaaacaacaactaa

SEQ ID NO: 41212 - DNA, 176 bp, Glycine max
cttcgctttcctaactgtactggaggcggttggcatggctttatcctctatggtcttctggagttttaacatgaccttcgagatggaagccatttgatcttttaaggccgatagatcggccttcatctgttcttgcacgccctcttcattatccatttttctggatcgaatgttat

SEQ ID NO: 41213 - DNA, 384 bp, Glycine max
  unsure (1)..(384): unsure at all n locations
ggataatgttntattaatgttntatatttcttgcttgttgtcgaagctcttagacgctgtccggtaatctgtcaccataggctaggctgtagccttcattcatgaactattttggtaccatctgtcaattctcatatatatatattagtatatataattgggtcagagaagagagatgagagagggagagacagagcgagacagtgagagagacagcgggtgggaaagagtgaggtcgagaagggagagaagagagaatgagaggacgagaggtatgaagggtccgtgtctgtctatcgtcatggaaagganaggaggtcaacaacgccgcatgcgagtcaactggagagatcatcggaatatatcnatcgtttacttcacacg

SEQ ID NO: 41214 - DNA, 155 bp, Glycine max
aaattggaacagaatctaagaattgagaacatttatatgccaacaataccagttaatggggagcagatgcaatatttggagtcagtccatagacattatgcttccacaaaggcttcattcctgtatacacattatatggacatagtcggaatatc

SEQ ID NO: 41215 - DNA, 461 bp, Glycine max
  unsure (1)..(461): unsure at all n locations
tgctttatatctctattaaactcaagatgcacttgtgtgaacagctaaagtaagcgattatccaataagctcatataatatgagaacttgcgtcataaatttaaccatgaaatttgttgaaatgatcttaacaagtgcttattttgataagcttcattataaagttcacttgagcaagctaaaaagagcatataggagtcataagttattttcataaacctcaactaacttgtagaatcatttccagacacccactcaggggcggacctatatatgtttcagaaggtgcagatgcacccnctcacctctgaaaacatataactatatatatagtgttgatatctttctgttctctctgatattataatttgaacacactagtttcaattttgttaagtgttgatatatgttgtcattcattggctcagttttctcatacatnttattatcttttcagctca

SEQ ID NO: 41216 - DNA, 340 bp, Glycine max
  unsure (1)..(340): unsure at all n locations
tgattgaaaactaaattctanaccacattccacttttgttagctagtggccgtaagatgaaccattacttatgtatcttcccggacaaatatagggacacatattaaggtgcagatatcatcatagagcaaatcatgccaaagtgatgtgacgctgataacttgaatcttttttgtccaaacttggcaggcaaggaatagcaagcatatattctctcacatgcttgtgatggccaacagaatccacagtatctgccaacaggcgaagggggtctagaaatgtttgtggtatctttcataaactgccctgtcttatgcaaactaccagcagtatacaaatg

SEQ ID NO: 41217 - DNA, 471 bp, Glycine max
  unsure (1)..(471): unsure at all n locations
tcacagctganagtatagaatggtcagtaacaatatcctgaattagatcatactagaaccaaactgcacaccctactcacacgcctaagatcactggcgactagaccagttggggtagagagacccctggtccatgtggatcctgctaccgggaaagcagatggtccctacaaaaagaagttaagaacctatttggggatcgtcgctcgtgataaggtgaatgtcacatacgagaattggaagcaagtccctgctgcttagaaggatttgatatgggaggatattcacgtattntagttttcatgttgcatattgtttattaaccaaaaattcaaatttagtaacaataaaacgtaatttttcgtttgtcaggctgaatgtgatatccctgaagcatctgatgtaaggataaaaaagaaaatacttcagactatgtgggagtggtggagacaatntaagtctgatttacgt

SEQ ID NO: 41218 - DNA, 489 bp, Glycine max
  unsure (1)..(489): unsure at all n locations
agcttgcatgtgtgcgctaagtgcacatgcatagtacaattggcttgagagaccatgaacaaagaanatggaggaaatggaagaggaagccctccaatggaatagtgtatccccttataagacacctcaaaatgttgcattgtcatgctttttgaaaagtcattgtacgctaagtttgcatatgcatgcttagcgcacatgcacggtacaactggtgcattgagcgtgcactggcacgctgaatgcactgctccaaatctttacacatcttttagtcatttgttgatgtactaaaactctacaaaataaaacaaaacactataaattcactaactttaacattcttaagcctaaaactcanaagaacttgaattcctgtctttntangtcanaagaagcattganagagaagaaatangtaattgtatgtaattaagtgacaaactaagtagcataacaattattgtnacacatcaccagttgatacta

SEQ ID NO: 41219 - DNA, 441 bp, Glycine max
  unsure (1)..(441): unsure at all n locations
cttcttctgattgtaatggtgntttgtgcattcactatggccacttctcgccatgcaactataccatcctctgcatcactcacattacaacaaactgaagcaaatgctttgttgaagtggaaaacaagccttgacaaccaaagtcaggctntgctatcttcatggngtggcaatactccttgcaattggcttggaattgcttgtgaccacaccaaatccgtctccagcataaatcttacacacgttggattaagcggtatgcttcaaactctcaattnttcatcacttccaaacatcctcactctagatatgagtaataactccttgaaaggaagtattcctccncaaattanggtgttgcaaaactcactcatcttgatttaagtgacaatcacttctctggacaaattcatctgaaataactcagtggtcagcttcgtg

SEQ ID NO: 41220 - DNA, 327 bp, Glycine max
  unsure (1)..(327): unsure at all n locations
gctacccatgcttcctgttatacaatattttcgtttcaatccacgtatctgatatagggctgatagctgcactaccactacttctaagaaaacgccattaaaggctaaagggaaagctataaaaaagataaaatataacaactcanaattttcattcattgatgataataagtaaagatggatacatttatatagtccttagtaatgtcaattagtggataataactatccaagtgtcaacattgtattactttaacacaagccanataaaaactataatttataaaatacatatttaactccatcctatatagtccttagatcatt

SEQ ID NO: 41221 - DNA, 428 bp, Glycine max
  unsure (1)..(428): unsure at all n locations
tgtatatgcttgtgagtgannatcccatgctgtagaagcactctaacataatctacanaacaaatttgtggctgatcgttgtatcatacttgaagtagataatcgaattacagctcccaaggtatagtgtgtgtatttaactatttattcacccagcaaggaggaaattgatttaccaaatcagccggccatctccatgttgaactcctaccagagaaagagtttaattcaccgcctgagaagtgagaatcagtctcaggcataatccatctaaagaccatgttttatgccatagataaaccttcccatacttcgcattaactctagcaagtatgcataaataattaagatgaaatgaggaattaagtgaaggggaagaaattttacagaggaatctgagttaggattgtaatatntttcttcccttg

SEQ ID NO: 41222 - DNA, 332 bp, Glycine max
actcacacacccctctaatagctaagctcatcttcttgagatgagaaactagagcttatgttagtcggtgaaaacgactaacttttgtgtataaaacttgtataaattgtatcaaacactcccaatttatggttattttgtaatgttataagtattttctattaagtatagttaataaatacttaatattttcattttgtgtgtttaataatcattttctctcaatttcaggttaattacgcaagctttggataaggctgtattcaccttctcgctaagccaatctgctggctcagcgagcatccgctaagtgcaacactcctgggccaagc

SEQ ID NO: 41223 - DNA, 415 bp, Glycine max
  unsure (1)..(415): unsure at all n locations
atgacaatgacagtgtgttaccctgtcgaatgcttcttggcttaccttcttactttagactctcgttgaactctagctgttacaaacttgtatactttttcatagtcttgatcactcattgaattatgaaatgtaatttcactgtatgtcctctttcaatgatatatctctgaacaattatatagagccttctatatctagttgccaactcttacagatcgagagtaanaactggtcacgcattctgcttccttgggttgttgaaacattttcctctgatactatacgatcttcagccatatagatgctttgtcacatcttgtgaaaatatggaacagcaggagtaccactttctcaaggatggttagccatgacactgtctaaattacaaaggtctatgaagagatcacatgat

SEQ ID NO: 41224 - DNA, 336 bp, Glycine max
tgcgtagccgctcttgccgctcagaaaatcccacaaactatttcctcttattactagctattttgaattcggtagttcctgaatgtacgaccttcacattgttgttcgttcccctctttcttttctgcataaaagagaatcaaatgctgtgaaaacatggatgaagtcctatgaaaatcaatatcaaagaaaacatggatgaaatcacaatttaaaagcacaactacctatctttcaaagaccattggacaattcgtcttgtctccttatgtggtggagttttgtttaataatgctataatctgtgcctgcaaataaaacttacgactaatcctct

SEQ ID NO: 41225 - DNA, 458 bp, Glycine max
  unsure (1)..(458): unsure at all n locations
gagcgatctcgaggattcntagcccagaggttgttgcatagacattgtctctgtttatagtccatttaaaaaggcattattaatatccaaatggcacagaggccacctatttgtgggagccaaggtgaggataacctggatggtttctggtttgaccacagtagaaaacatcttagtaaaatcaaagtccaaaaatttgatgaaaaactttggcttcgaggcatgccttgtagtgataaacaaaaccattagcattttcttttattcaataaacccacttgcaacctatagcttgtatatgaggaaatggtacacgcgcccaagttttcttgtgcagcanagaattatactcatgtgttacatggcagcatgccattgaggatcccgcaaggcaagtntgncactcttgggacatgaataaagaatatacgagagatgcgacagggaatgatacccta

SEQ ID NO: 41226 - DNA, 265 bp, Glycine max
  unsure (1)..(265): unsure at all n locations
gcaactatgtntttattaatatgtgtggcttaacgacacttacgtgaactaatgttaaaaacaacaagtagatgattcacaagccgataccgatgatcctaacacttagcanagtatatacaaaagaagacagcagagaacattgatccttagcattacggtctgttacctccactatctccccattcaccacttccttgaagggccgatagctccaaaggcgacatcgttggcacaactttcacttgctccatcatggcattaa

SEQ ID NO: 41227 - DNA, 124 bp, Glycine max
  unsure (1)..(124): unsure at all n locations
atataaatttagccctctggcttgttgttgataggcttagannaccggcgctcaccaggaaaatccattacatgctcgtggtcatgtgttccaatggtgccaattgacaagttattcccttgtt

SEQ ID NO: 41228 - DNA, 526 bp, Glycine max
  unsure (1)..(526): unsure at all n locations
atgatacttgttaatgttntcttattaattgtgggtatntgtattttgtaataatttcttttataataaactcacccctcngcaattttgtaccgtgtggttggtacctgtgatgatcgcgaagctttgtttgtaggagcagaatgacagtagtagtggacgagaagtgagattcttttatagagccgtcgagccgacatgatgacgttgagattattttgggagagttgtgttttgttaatcaactcctccatagatggttccgtaattctttntgttgatttgaagatgtgaatcacaaatntaattatatatatgaacaaatttattttccattatgtgaatgatgtgtactaggttactatacttatatatatatatatatatatatatatatatatatatatatatatatatatatattcacttangtaatggtgcattgctnggtgaatgtatataaaaaaaaatactttcatttttcataagcagattaaccggagtttcattataaaatttgagattn

SEQ ID NO: 41229 - DNA, 328 bp, Glycine max
  unsure (1)..(328): unsure at all n locations
cacccctgaccatgaacgcctgaccactgcctccttttatacngatgatcgtgctttggcctgnttccaatggatagcctacaacgatcagctcacctccaggcctattttcctccacgcccttcaaacctgtttcctaccctcccaatacgagaagtcgtcggtagccaacaaagtatacttgatgggtcggtngtttaacctcaagatgggagaaggtaactctataactgatcatattaatgaatttactactactcttgcccagttggagtcagtgcagattaaattatangataaggtgaaggcatcgattctattgtcatct

SEQ ID NO: 41230 - DNA, 364 bp, Glycine max
  unsure (1)..(364): unsure at all n locations
tcttatgcatggcgggtctacccttctcctttttggttggtcaacaataggacgacacatattgactcgttntaccacccttgtgtgggaggcacaagagatagagagaggatgatggaagcttgcttgtggggcttctatggaggctggatctttgagtatcaatgaactcctttaatgcgtgatttccaccatggagatgcatcggaagacataggacacgatgtgagaggaggcgccatccactaaggaataagccatggaagaaggagcttcaccaccaagatgagccttggataagaagcttggaaggatgctattatggaggaaaagaaagacggagagaaagagagaggggggagca

SEQ ID NO: 41231 - DNA, 341 bp, Glycine max
  unsure (1)..(341): unsure at all n locations
attaggaattggagaaccactgtattctcatccatgacaagagaatctcatacataaattcactgctgaaaatactggagctggctgtaacggtggataagctaatcctgattcaatgtgctcattctcatatgcaatttcaacattcgcattatttactttactattttaatgtntatcagaaaaaaaaaccactcctacttgttgctgaagatgttgagagtgatgcattggctatgctcatactctacaagcatcacgctaggcttaatgtgatcgatcatacagctatntagcctcagtcatatttcctgctacctctcgtttcaatgaactagaat

SEQ ID NO: 41232 - DNA, 361 bp, Glycine max
gtgcacggagaaaccttctaagagacattgtgactctcatgagtcgggtctgtaaaacttaatagcgcagcataccatatacaacttggcctaccattatattatcttgtcaaatactaacgagtctatctttgaataattggttacagatctataacaaaattatcacaatatgtagaaatatattatccatacactctgttactactctctatgatcgttggaataaatatttctttttaatttcttaaacaacttctccacgacactcattaataagatactactatctttaataagatttagacacatcttctctttctccattgcatatactatatacccctaaataaacatgtga

SEQ ID NO: 41233 - DNA, 220 bp, Glycine max
cagaaccatgctatgtactcgcgactggtccctttcttcccttcgcaactagagttcactattgctaccccatagagctccgcacatctgttccagtcatactcttccttgcgagctctcttggtctcttgttcaaaggctctagcggtaattgcattctcttcccgtaacccggcacactccttccgaacgtgtgtagcggccaacttgaacttctcct

SEQ ID NO: 41234 - DNA, 403 bp, Glycine max
  unsure (1)..(403): unsure at all n locations
cataagcacttagactatgaaggaaagctggagttgctgcacatgatgtccaacgttatgtcaaagaataagatcgggctgcacaatgcacaaggcaagataaagtgtcaaatgaagaattgaagctgcaggattcacgatgtcggatataatgtccaggacatcctgcctgaaaatactggaattgctaaaagcattgaagctgcaggatccacgatgtcggatacaatgtccaggacatcctgcccgaaaatactggagttgctaacagcattgaagttgcaggatccacgatgtcggatacgatgtccaggacatcttgcccganaatactggacatataaatctgttatatctgtaacagattattgtgcagttagcaagagattagatgatctatctt

SEQ ID NO: 41235 - DNA, 370 bp, Glycine max
  unsure (1)..(370): unsure at all n locations
aattattataaaacatgaccactgacanatgagactcacttacaatcttatctacaatttcttttcctaccttagatgtcatttgactagatattttcatgcgggccatcttccacttcacgtgtcatctaatgggagatggaggatcaatgattgtgttagtgttcccagaatgggctgcttnctccaatctttcctttatcttgtcctccatcgactttgcttctagataatcataacccccacgagccaacatgtgaaagacaatgttttgttctaaatggcctatgccttctttcaacattntataacattacacatagtctacttatatgttgacatatccgtaatacaagttaaaaatgaaatc

SEQ ID NO: 41236 - DNA, 399 bp, Glycine max
  unsure (1)..(399): unsure at all n locations
gtgaagtcaanaacttttaatgttggagatttatttggaaggttatcctgcccatagatagtaaggatcgagccttgngcaaatggtccccaaattgngaaggaccgtttaaaataattcagatctattcgaatggtgcttatgagttagaggagctaacccctcagaaacgtactttgagcataaatggtaagtatttgaaaaaatataaaccaacactgctcgaagttaaaataagcatagaataagagaaatacgggaaacataaaaatggcgataacagtaaattgccacgaaagggcatgtgtcaatattacatcgaanagtagaatcgaaatacagaattcgaaatanagaaatcataagttctactaagtcatgaccaaatcctcatacagc

SEQ ID NO: 41237 - DNA, 418 bp, Glycine max
  unsure (1)..(418): unsure at all n locations
agctntgcagatttggtcttcgccagtgaaaggatcaatgtgggtccgaaaaaaggcaaatttgatcatcctactangacgactgagaaaactggggcaaataaagagggtgagaaagagggagaaacccatgttgtgactgccattcctgtacggccaaatttcccaccaacccaacaatatctttactcagccaataacaaactttctccttacccaccacccagttatccacaaaggccatccctaaatctaccacaaagtctgtctaccgcacttccaatgacgaacaccacctttagcacaaaccanaaacaccaaccaagaaagtgatatttgcagcgagaaagcttgtagaattcaccccaattccagtgtcctatgctgacttgctcncatatctacttgataattcaat

SEQ ID NO: 41238 - DNA, 492 bp, Glycine max
  unsure (1)..(492): unsure at all n locations
catccaagcaaaacaacattcanacagcacaagctatcacagccaaacaaaacatggcaaaggcagagaactctgccaaaacaccaaccaaatcacagcttttctcacttaaagaccccagtaacaattctttcgatccaattcgttaaccgttggatcgactccaaaattctactggaggtctatagtacattatcctacattgtgaccgttgggatctactagcaaacatccagaacgcattntacattactctttccacaaccagcaaatacatggattnttctgcacttgtgcaaaattctgctgcacaattntacagcaaaatctgcacaaagagcatatttcgaanaccacacttcccctcatctaatcttgcccaaatcanatcctacaagtcccanatcatgtatcaatcatgtctaaaccaaagtcaagcttcaaaccacagcaacacaaaatctaggtgtccaaaatcccttcatttaatgg

SEQ ID NO: 41239 - DNA, 433 bp, Glycine max
atcttcgaactgtcatcgcttcattctcgtggcgatagattatttcaccaaatgggtcgaagcggcttcttataccaatgtcacgaggaatgtggtggtcagattcataaagaaggaactgatttgtcgatacggactccctaggaagatcattactaacaatggcactaatctaaacaacaaaatgatgcaggaaatgtgcagggatttcaagatccagcatcataactccaccccctatcggccaaagatgaacggagctgtagaggcagcaaataaaaatattaagaagattattcagaagatgacagtgtcatacaaagattggcatgagatgctgccttttgccctgcatggatatcgaacctcggtacgaacttctactggggcaacgctgtattccttggtttatgggatggaagtggtactctta

SEQ ID NO: 41240 - DNA, 494 bp, Glycine max
  unsure (1)..(494): unsure at all n locations
attgtctcaatcatttccaaatatgcatgtgtattangaagcatcaacaagaatcaagccaaggctattgtgcaagcaatcaatggggcaaaacacaccaaatgattatgatgatggatggctcanattctcacaaaggtaaagtcatcactttcaaattgagctttcaaaactatcatgacatgtagaggagaatcaaagatttcaagtcacaaaatgtcaagaacttttattttcaaaacaattacccatttcatgaacatatcctataattcanagaanaacatgcaaagttgtacatgcacacagaattgacccanaatattaaactagaaatccgatgaaactaacaacattaacaaattaacacaactaacaaattaacaaaaccaacaaaactagcanaaccaaagaacactcccncccatacttaaacaacacattgtcctcaatgtagcacaattaanagaataaaaacaattaaatcattaaat

SEQ ID NO: 41241 - DNA, 160 bp, Glycine max
  unsure (1)..(160): unsure at all n locations
accttgtcacctgcgttaatatctggcattgtgaaacgggtcgaatacttgtcntattgccaggtntaataaaactgtgaagctaccaggattggagaacgaaaactatttaataacctataggaagtggccagatttacctaaccgccaatttgcgaan

SEQ ID NO: 41242 - DNA, 410 bp, Glycine max
  unsure (1)..(410): unsure at all n locations
tttctcacatcctacacaatccatcaatgcactgcattccacanaataacattccattgccaatgagataaatcaaaagtgtaagttgaatcagtagtagaataataaatggagaacaagtaaaaggagtggtcatttagttgtcttatgttcagattagatcagcaatcaaagagtccagataaaccaaaccaatttagcatccatcagtatgtggaaaactcaaaatgaaaagaaaaaacatactgcaggactaanaatatcaatgatggaattntagatagaatccaacctatatatactatgattccttccacaaaaatggttttgtaagcattactacgaatcattggtaatcaattgtcatttgttagcagtatgatgcatgcttacaagagactaagccacaa

SEQ ID NO: 41243 - DNA, 148 bp, Glycine max
ctatgtgtgtgctcatccagagagctaagatagtgaacatgattatcgtgttacttactcttccatcctcagttaattcttagatatttcacatgatagaaaaaacaattgagggcctattaaaagttaagaataatacattagtcta

SEQ ID NO: 41244 - DNA, 420 bp, Glycine max
  unsure (1)..(420): unsure at all n locations
ctaatgttgtcaccccaatcttgctatctctgctttcaactatgaactgattgatgcctgctagtgtcataaagctaccactctgattctgcagtgcaacaaaaataatcactgtgaaggtaaaaccagctatatcaacaaacattgctgctgacatggttaaacgtcctatatcagtgttaatgaatttgacatgtttcaagagcattgctatgctaataaatacaattaaggcttgtgagagagccataaagggcaatgcctgtgcaaggctcctgtccatcgtagcatatttcctcaacagaatggctagtccagtatggattaccaatgtaagagcgaacacagaaatatcaacattgatggccagtctttcaatcttcatcactgtggaaatattcantttaacacaacatatga

SEQ ID NO: 41245 - DNA, 557 bp, Glycine max
  unsure (1)..(557): unsure at all n locations
aatgaaaagcccatcgtcgaccccgngatnctctanagtcgacctgcttgtttgccagctttgcagatttggtcttcgccaagaaatgattatgtgggtcccaacagaggcaaatttgatcatcctactatgacgactgagaatattggggcaaatgaagaaggtgagaaagagggagaaacccatgctgtgactgccattcttataccgccaagttttccaccaacccaacaatgtcattactcagccaataacaaacctccttacccaccacccagatattcactaaggtcatcccttaatcaaccacaaagccttgtctaccgcacttcaatgaccaagaccacctttagcacataccaaaatacaccatcaacaaagaatatntcatccaaaagccttgatgggttcacaccacattcggtggtctatgcttaacttgatccctatccccccgaaaatcattgtgaccataaccccaccaaaggtcctcaactccaattttttatgatacacctcaaccacctgtgctatcttgagagccctggcctcttttt

SEQ ID NO: 41246 - DNA, 461 bp, Glycine max
  unsure (1)..(461): unsure at all n locations
tcatgaagtgtataatatggatcactntcaattctatatanaagattaatattaattgtgttctaaattaatatacacaatttataaagcaagaatttctctttgtttatcttcttaattatatattttataattttctgttttttctttaaatagacatttatagtagcattagtataaaatttctctctcaactttctcaaactactattatgttactttatctatatatttatattcttaatcaccaatctcttatatcccattntttttatcacaatgtgtgaaatgaactttgataaaaataaataaatatcaataattaanaaattatataaaaatataaattatctactttgatttcaaaatatantttatatattanaaaacgtttatntatcataaatattaattatataacaacaaacatttattacatgtcattcacaagttaaactact

SEQ ID NO: 41247 - DNA, 125 bp, Glycine max
aagaaaaaggaaaaaattcacatatatgtatatatatccatatacatatatgtatatatatctatatgcatcagaggcgaaataagcactggcagaacatacacatgttctatacgagtaaaagc

SEQ ID NO: 41248 - DNA, 450 bp, Glycine max
  unsure (1)..(450): unsure at all n locations
cactatacaagatntcttntgcctcctagcctcctcatcaacctcactagcaatcaagactccatgtagcagctgtcgacccttaacaaatgctgactgtctttcatcaacaagatgatccagaaccttacttagcctattagataggattntggcaataatcttgtaaacacatcctatgagagatataggtctgaagtgactaatagtttgaggatccttgatcttaggaataagagcaatgaatgaagaattgaggcccttanganaagcagcattcacatgaaattctgctagaaatcttaagaaatcacgtttcagctctttccanaactgcttgataaatctaanattcagcccatcaggccctgngctnttgtcattgccacaagcncacacagcagaatatatctcctcctctntanatggctccaccatcanatccctctg

SEQ ID NO: 41249 - DNA, 378 bp, Glycine max
  unsure (1)..(378): unsure at all n locations
tgtaatctctctgtttcatattataataatgatcattgtcttgttatatgatatcttntaaaatgaatgatacatgcactgacaatgtaatggtcttttatactgccatccaattacaaaccgtggcgtatgataagtttgttaatttttatgatagtaactatctcagaagtcataccaagaatgattttttattgttaatagtgtaaaagctcacataccagtcatcagttgcatagcctgtagaactctggtatcangggtgactgtgataagtttgttctgcagccaggacattcgaattttagtttagatatcatgaatggatgaaccactaactangggaacagttcaattgcatgttccctttacaataat

SEQ ID NO: 41250 - DNA, 501 bp, Glycine max
  unsure (1)..(501): unsure at all n locations
aagcttatgaacactaatgtanaaatagaaagcttttttgaaacacgtaattaatatantttttgtattacaattntatgtatattcgatctctttgttatcttctgggtgtnttatcttcctttgggtattgtctgtaagtctctaacgtgctgtttaacttgaatgcatagatctaaacatgctgacgtaactttgagaacacaaatacgaattagttaaaaaattacatattcgtttctagttaaaattattttttatgtatgcgttgaaatgactcgttatactcatttctgtttaaaaaaatatttattttgaacanaataactaaaaatatttaatataaattaaactttaaataatctttgtcacatgaaaagagatgtttcgataaattatttatgccattaatattntagaatatataaatattataattctatatgagattaatacatgaatatttacgaaaaatatctatgtagactaaatatatattta

SEQ ID NO: 41251 - DNA, 368 bp, Glycine max
  unsure (1)..(368): unsure at all n locations
agactaatgtcaagtggtcgcgatatgtgaagatgatgttccaagtaccttggatttggtccgaccatgccctcctgatttccagctgggaaattggcgggtggaggaacgccccggcatttacgcaacaagcataatgtaaacctttacggttttaaaagctctatagttgggcctaggctttagagttttcattntgctaaggctttgtgtcttttgtctttgaatttataatacaaggatctttcttcatctgttcctggactctacccattctcattcatgagcatgtntacttctntgtctgagacggcagattcgatgacgagtcccccgaatgtactaatacctgngacccgtgtatcaac

SEQ ID NO: 41252 - DNA, 391 bp, Glycine max
  unsure (1)..(391): unsure at all n locations
gcttgtctcagcgtttatgcgagacagagactctcatgttagctatcatcgccaagtaccaagaagagttatgtctagccacggcccacgagcatagaatcgcggatgagtatgcccaagtatacgcggaanaagaggctagaggaagggtgatcgactctttacaccaagaggcaaccatgtggatggatcggtttgctcttaccttgaacgggagtcaagaacttccccgattgttagccaaggccaaggcgatggcagacacctactccgcccccgaagagattcatgggcttctcggctattgtcagcatatgatagacttaatggcccacataattagaaatcgttaggaaacttgtatggtctctcagaccttgactagatatga

SEQ ID NO: 41253 - DNA, 282 bp, Glycine max
  unsure (1)..(282): unsure at all n locations
ctcagaagaaagtgatgaggtacaagctctataggcagagcttgttatagcccgagtagtcgaagagaagttcaagtccatagccatcaaagtctgaaaagagtatgatgaactaagggacgtcaatatggccaccgctgaagccttggaacgagaaaccaagaaggcccgaaaggaagaacacgtgcaagcaaagttttgaggggctttatatggcagcaatagtaagctcaagctccgaagaggtgaaaggaatcatcacgggtcanaggcatgatcttg

SEQ ID NO: 41254 - DNA, 601 bp, Glycine max
  unsure (1)..(601): unsure at all n locations
cgacgtgcnatttgaaccatcgagacccgggnnnncgtgcgcgagcggcgtggngccctctttactccgaatgataccttcgagcnccgtgaancnagaagcacngcaggtgcagcgtagcaatggacctagtggtgcccattgtgtgnnnnncncggatgaccgatagcgtcccgtaacatatcgagacgctctaaagtgaatggtcctatctctgaactagatcaaacgactaatgcattctttcgctgataaatgacgggcagccgatagacataatcgcaacgtgaataatcatgtataacggtgataaagtatcattcatttccacaagaactaacatcagaaggtccacaaatatcagtatnnnnganttcaagaagctgagtgcttcttggagctcctttctttgtatgtttgcttgtcttcccttaatacaacccacacaaatatttagatccatataatctaaaccaggaagaatttcattctttattaatctttccatcctttctctagaaatgtgacctaaacgtgtatgccacaagaaagcanatcgttcattcactaaactatgtttagggccaacattatgatgcag

SEQ ID NO: 41255 - DNA, 415 bp, Glycine max
  unsure (1)..(415): unsure at all n locations
tgtcgtaagtgtagttttagttnttccgtctttacctcatnttattgttcccattatntatgtctatttattgaaagtttattttcttgattgtctttaaatgaaaggttttccattgaaatttataatacatgagttgacacatgcaagcttattactaatttaatggaagatcttccttgtttaattntatttcatagtttgaaatcgccaaaataattntatttcaacttatataaatctctcatgaaagtttaatttgtttcgttgtttgcaattgccacaataatcacgaactgagcgtggtagtagggttgcttctatgcgtgcagcaataaatgacactttccctgaaccaaatcgccgcttactgcanaggtatttgatngataacaattnttttttctcatttctt

SEQ ID NO: 41256 - DNA, 273 bp, Glycine max
attatgacccacccaatcacctaaaaacccatcagatacatcacataatacatatttacacgtttccgtccacaaacctgcgtctgtgtcgtggcaatctcaaatgctcaagtcacgacagtaatagtagaattatacccagagttatgaggcgtgcaatggccaccataatcagcccctgtgcgaataaatgcgcaccgttcattaataaccgattatacttgtacacaccacgatgactcctccatcgcttacacgctgtgagcggatcac

SEQ ID NO: 41257 - DNA, 486 bp, Glycine max
  unsure (1)..(486): unsure at all n locations
tcttcactggacaaagaanatggtatgatatatgcaactgtaaaggaactcaatatttagattcactctggaacatgacaaatcantttaaaccccttcaaaacattttcttcattcaaaaaccaatttaaatcattttattccccttcacttgttgaattgtcaattcctaaaattctctcttgaatgcttagaaccaaccccccaccagtcaaccacacaagacattcttgaacatgtctctggcgtgaacacacggtataggagaaatttcaaaaatcatcttacatataatgtgtgctaaaaacctanaacctanaataagtaattaggcaaagacccatctanggaaatggatntagcactgcanaaaattacacgtcgacaaatntaacataactaattaagaaaccgttggataagatcggttacatttacatgtgattagtgatatatatgcatagaataaattaaagtcccccacat

SEQ ID NO: 41258 - DNA, 388 bp, Glycine max
  unsure (1)..(388): unsure at all n locations
gatccttaagcacctgctgctgcagctttactcggatgtctgattgcgtcccgtatcatatcgagacgctcgaaattgaatgttaatgctctgagctaattcaaacgacaataactttntactcggatgtctgattgagtcccgtaacatatcgagacgctcgaaattgaatgttgaagctctgagctaattcaaacgacaataactttttactcggatgcctgattgagtcccgtaacatatcgagacgctcgaaattgaatgtngaagctctcagccaattaaaacgacaataactttntactcggatgtctgattgagtctcgaaatataaccagacactcgaaattgaatgttgaacctctgagccaattcatacgacaataac

SEQ ID NO: 41259 - DNA, 513 bp, Glycine max
  unsure (1)..(513): unsure at all n locations
ctatcatactcagcttcccattcaatgtcaagcgtctcgatatattatgggactcaatcagacatccgagtaanaagttattgtcgtttgaattggctcggagcttcaacattcaatttcgagggtctcgatatattacgggactcaatccgacatccgagaaaaaaattattgtcgtttgaattggctcagaggttcaacattcaattttgagcgtctcgatatgttacgggactcaatcagacatccgagtaaaaagctattgtcatttgaatttgctcagagattcaacattcaatttcgagggtctcgatatattacgggactcaatcagacatccgagtaaatagttattgtcgtttgaattggctcagaggttcaacattcaatttcgagcgtctcgatatattacgggactcaatcagacatccgagtaaaaagttattgtcgttngaattggctcagagcatcaacattcaatttcgagcgtctcgatatattacgggactcaat

SEQ ID NO: 41260 - DNA, 440 bp, Glycine max
ttgatgccatctaggacctgatcgagatccactattcatcattagtttctagagagaactattccggttgagtggatccaaactccggatgaacacctcttaccaccctcagacagagatcctcaatcgtaccctagaataatacttgcgtgctttcgttcatgacagaccatctcaatggttcaagtttttatcaatagcggagtgatcatacaacaccgcaacccattcgggcactcggttttccccgtttaaggtcattttcggcaagcccccaccttctatcccacaatacttgcaaggttcttctctggtggatgcagtggacaatcttccatcaactctcgaggccattcatgccactctgcagtgcagattacttatagtgcaggcagccatgaacgccaccattgacagtcaccgtcgcgatgtccaattct

SEQ ID NO: 41261 - DNA, 513 bp, Glycine max
  unsure (1)..(513): unsure at all n locations
cttccttataataggctgccatacaatcctgcttttagagctcacccctactagaattccaagataagagaagggaaattccagttgactacagttaagagaaagagttgcatccctacaccagccttcagatttacccaggcacccgaattggctnttattgtaatttatcttaagaccagaaaccaactcanagcatctcagaatacatcttanaactctaacattatcattagtggcaaccccaaagaacaaggtatcatcttcatattgtagtatattaacttcctctttntgccttcccacttgatagctgttgaagagattcttagctacagctgacctcatcaacccagtaaggccttccactactatattgaagagcanaggtgcaaggggatcaccttgtcttanacctctcttanggacaaattccttagaaggacttccattaattnaaatggatattgttgctgtagacatacacaaccatttatccatnntctccatctt

SEQ ID NO: 41262 - DNA, 544 bp, Glycine max
  unsure (1)..(544): unsure at all n locations
ccgtgaaaccattggaanccacattgataccctgganaacntgtnnnccnananggacgnaaggaagaaggtgacctgttgccagactctgcggtttatgcggcgttgcctaccaccacgcagagctttgccggtctgtgcaccaatcttaagcatatgaatatccggaagcttatgctgctaacatctacaacagaccttctggacgcttgcacgtatatccgccacatcagaacagttcctacctctacaacagcaagaacaatcccgggtggaggaatcgtgcacagcttacatggtagaatctttagaacagttgcaacgactaccatatgttcataatgctgatgtgccagcagaccgtactgtccttcactaatggcacgacaccacatcgacgccagaactgctatagatgacgctcctccggtcactccattggaaactggcgaaggaagacgatgcacacatgcctttcacacgagatcgagacacatgagagctctctaatagatgggacattgttgacacctggagcacacgg

SEQ ID NO: 41263 - DNA, 452 bp, Glycine max
  unsure (1)..(452): unsure at all n locations
aggatcatcgatgcgagggattagtcgcaagtntgagaatatgatttaagagactttcaggtgaaagagaggagaaatataaagaatatacgcgaatgttttgaaagattcttctatcaagaagagaatttcaatttctcactttttagaaggaaattgaaattccacattnttagttgtttaaaattatgttttaaaattccaaaatttaaattcttcataacaaaacatccaaacaatgaattgtagattatagaaatttaaattctctgataaataactttccacaattaaaattctttatccaaaggtactctaaggcttactataaaccttcctatgtatgtngaactcactaggcttgtntaccacacttttagaagttcaatattcacttaggatcaaaatttcatacaacaattcaatcaccaatactaatattcacaatagac

SEQ ID NO: 41264 - DNA, 532 bp, Glycine max
  unsure (1)..(532): unsure at all n locations
atcttagctgaattcaattcancattgatttggcttagcttcaccttggctagcttagcggaaataatcttatcttatgtaccagggttgcgcgttaagcgcttgatactcatggcttagcgcatgaatgattatgcgcttagctaggagcaggtgcttagcgaaacgactaattntcaaaatgattttctaagttctaaacttagtcctttcccaagaaatcgaaacccttaattttaccattcaaagggaggctgatatgctccaatgttcagattatacagcaagttcccaatgatcaaatgcatngaaaaccaaaaataacacanactgaaactgagttgcctcccaaggagtgcttctttaacatccttagctngatgcttttacctcactgggagatcttacattntggttctcaccttcagaacctcttgaccttcttccattacccgcaagcaaacattgtgttctggagcaggcttgtcttcaacaaacaagtcanaatcaaatttctggtcttcaaaaccta

SEQ ID NO: 41265 - DNA, 516 bp, Glycine max
  unsure (1)..(516): unsure at all n locations
aatctntggttnttctaggattcaaaggcttagattctattagacccaaatcctatacttatccaagtaatcttttcaatacaattagcttactcactagcctttcactttaattttcttttgaccttattacaacagcacacattttctttgattgctctttnttttcaacatacaacttatttattgtgtgtgctgatgctctacattttactttacatcctaatcaactccactcccctagatttggggtaaaatttccttgaaccatatgctttcctagaatctaagcaaggtatttggagatattcattcaagttcagggttcaatttttaacaatatcatttagcacacaaagggtgcaaaggatacaattataattcaaggtaagctctttggtcaattggcttgtatatacacaatcatggccttcatcatgtcctcangtatacatttcattctanaattcagagattgatgcanagaatattactcaaagctagttgttcactcac

SEQ ID NO: 41266 - DNA, 228 bp, Glycine max
cgtactccttcctctactacctgtgtatgtgtgcgaccttataatcgccgccgcaaatccgttgtcatgagccacagatcgagcccaccgcgaaacatcctctcgacactcagacaccgtgtaaaaccagctaatataaggtttctaccagtatacatatgattgaggatgtgacacgcgttaacagtataacctgagaaggcttgaacgcggtcgaactatcaacat

SEQ ID NO: 41267 - DNA, 257 bp, Glycine max
gatcacccacctcgaatttcacgtcttttcttcttttgtcctgaatactcttctgcctactctgaataggtcttattctctcttggattaacttgaccttcttaagtggttgttgtaccactttacgtcctaaagtgatgttgtcttcaggttctagccaacacaagaatgttctacatcttctatcatacaaggcttaataaggagccattcccatggtagaatgaaaactattgttatagctaaactctatcaat

SEQ ID NO: 41268 - DNA, 446 bp, Glycine max
  unsure (1)..(446): unsure at all n locations
ctgagtagccatctgttctgtccgatntgtcagactctgaatggaggctcttgtctcttgctgaaattgcatattctggatggtcattttcctcattaactcctctaaggaaggttgagaagagttctcagctgcttgttgtctatgttgttgctactgctgctgctgcattgcaggaggaacatatggcctgcttggaccagtagcattctggaagggagggacaggctgttgttgctgttgttgttgttgtagaggatttgcccatctcaaatttggatgattcctccaacctggattgtatctgttgcttgaaagatcattaattattctgctgttgtgttttgctgctgaggnggtctattataaatgtttgcagcatangcttcangttgctcattgactccagattgctgcanagaaggatagagatctgtatggtgatc

SEQ ID NO: 41269 - DNA, 499 bp, Glycine max
  unsure (1)..(499): unsure at all n locations
taacaccaagctntagaacctagtatctntntttgtgtgtgtgtctaanagtcattattggctctaacacaaatcataagatcagaagtttggttgctcactgactagtcttaattgtcttanaaataaatgtacaatctaagtacttagtctatactctcaagataatcaaagtgtcttgagagcttttgaattttacaaaatttatagaanaagcttgagaatagagaacaagagaatttgaatattnttgcgttggtttgtttaccataactcttcaaaacttctggtaggcataggtcttcttcttcaagtatttgttgtgcccaaatggatataattctttattgaagcttgcatatgaagaagtgtttgttggggcattattaaatgcatgtcctcttcatgcctgaaaatcattctctntagcttccttgaagaatatnntagcagagnaatcacttgttttttgcacggtaaggtgcattatttgatatta

SEQ ID NO: 41270 - DNA, 292 bp, Glycine max
  unsure (1)..(292): unsure at all n locations
catatcatggactcttctaaggacaatagcatcacttcttgcactgaattgtggggagttggaagccatcntcttaatcagattcctagcctcaacatgaagtatatcaccaagagctccaccattggcagcatcaatcatactcctctccatggtgctaagtccctcatagaaatattgtaggaggaagtgctcacaaatctggtggtaacgacaacttgcacacaatttcctgaatttttcccagtactcatacaagctctcttcactaagttgcctgatgcctgaaatg

SEQ ID NO: 41271 - DNA, 498 bp, Glycine max
  unsure (1)..(498): unsure at all n locations
ctgtgcacgagctccgatttcgtgagtatntatagaagatgacgcattgtaatcgattacaggtattggtaatcgattacaggcccaataagccttctggtaatcgattacaggatgttgtaatcgattacaggctgcctgttcatgtgtaatcgattacactggatggtaatcgattaccagagcctatcctaggctagtttctaagagaatatctatatttatgctcaaatacatcctatatgtctaattntcactactaatacactaaattcaatcattcaattactatatacacaagaaatcataaattctatcataaaaacaagaattcaaacaagatcaaccaanataatctacaatcaanaggtaaaaagtaaatcaaccaatcaatcaaccaatcaatcaaccaatcaatcaaccaatcaattcctatttttctaaatctcttacatctaagagacctaattctcttctaatagagaanaacactttctt

SEQ ID NO: 41272 - DNA, 246 bp, Glycine max
aagcttcaaaatccctcctcatttctactcccaatagcagcgagaagccattttcggagtcgtgaagcacacctctacattgtgggacttcgaatatcagttatgggtggacttcttttcacatgaaactacgcggtattgggtctctgggagctatgatgggtacttctactaagataatgccttatggtagttatatgtgaaggaacttattgaaatcatgctaaacttgacatgtatgatgtg

SEQ ID NO: 41273 - DNA, 458 bp, Glycine max
  unsure (1)..(458): unsure at all n locations
catgatgatgaatcaagtngattcaagtagtcttgatgatgtctaagatgatgacatagagccaaagaatgatntctatgatcagtcaccaagctcaagatcaagcttaatctctagtttcatgagaagaaatcaagaagattcaagaatcaagagaagtttgatttctagattcaagtgaagaagaattcaagattcaagacaagagatcaagaagacttcacaggggaagtattgaaaagatgtttcaaaaaacaaacatagcacaattntggttttcaaaagagttgttctcagaattntctaagttaccagagtttatcctctctgataatcgattaccagtggaaaagattgatttcanaagcttttaactgaatctgtaacattccaattggtttttaaatggtgtaatcgattacaatatattggtaatcgattaccaatgtatctgaacg

SEQ ID NO: 41274 - DNA, 440 bp, Glycine max
  unsure (1)..(440): unsure at all n locations
gcttcgcgatattatttgcgccttaatcggtcttncattnngaaagttatgaccatttgaatttctcgagagctttcgttgttcattttcaagcttctcgatatagtatgcgcctgaatcggacttccacttgaaaagttatgaccatttgaatttctcgagagcttccgttgctcaatttcgagcgtctcaatatattatgcgcctgaatcggactttcgtgtgtcaagttatgactatttgaatttcttgagagctttcgttgttcaatttcgagcgtctcggtatattatgcgctggaattggacttccatatgancaagtttgaccatttgaatntctcgagagcttccgtgaccgttccaggtttaaataagaagaatcaccggacgacgccgatcgaacatttcctaatagacatcgtccaaatattatcgggg

SEQ ID NO: 41275 - DNA, 378 bp, Glycine max
  unsure (1)..(378): unsure at all n locations
tgagattaacaatggaagcactcgagatattcanatggtcataacttatcacacggaggtctgattcaggcgcataatatatcgagacgctcgaaattgaacaacgaatgctctcgagaaattcaattggtcataacttgtcacacggaagtccaattctggcgcatcacatatcgagacgctgtaaattgaacaccggaagctctcgagaaattcatatggtcataacttatcacacagaggtttgatataggcgcataatatatcgagacgctcgaaattgaacaacgaatgctctcgagaaattcanatggtcataacttatcacacggaggtctgattcatgcgcataatatatcgagacgctcgaaattgaac

SEQ ID NO: 41276 - DNA, 607 bp, Glycine max
  unsure (1)..(607): unsure at all n locations
tgcnaatgcgacnatttgaaagccccttngannnccctttgagnnccntngnanattgaacnacatttgtatanaccngacncnnntnnannantnnagcctgtaantctatctagacgcgcctgaaatanctagangtcagtttntgctctgattacatgggcaactaaagcgtgccatcccgccccactggcaacttctgcactgaagtaaaagttaaaaatagtctacatactgattatagatacattcagagaatcatgatcttattgtgtgcattggtgatagatgtcaatataggaagattcatgataagncacaagaattcaccatcaattcagcaagagtctcatatcatagaaaaatgactgagttacttgacagaatatgagagacaatcaagatccttaatgaatctagattcctgagacaactagctgaagattgttaatgactatgcatacgcacggaaatggtgagaggaccttaactagatctcgcaatattgtgttgtttgatacacggaaagatatcattccgcagatcatgaatcataacgagtanactccgatctaaactaagtaacacgcaacgactaggaattatg

SEQ ID NO: 41277 - DNA, 435 bp, Glycine max
  unsure (1)..(435): unsure at all n locations
ctatcatcgccaagtaccaagaagagttaggtctagccatggcccacgagcatagaatcgcggatgagtatgctcaagtatatgcggaaaaagaggctagaggaagggtgatcgactctttacaccaagaggcaaccatgtggatggaccggtttgctcttaccttgaacgggagtcaagaacttccccgcttgttagccaatgccaaggcaatggcagacacctactccacccccgaagagattcatgggcttctcggctattgtcagcatatgatagacttaatggcccacataattagaaatcgttaggaaacttgtatggtctctcagaccttgactagacacgacttcnncttttttgaaataaaatgagttggtcccatgtntctactnccaaaagcttgtgcanatcaaatcactcctacattttatc

SEQ ID NO: 41278 - DNA, 392 bp, Glycine max
cttgaccttaacttgatagaacctcttttaaagcaaaggcctttgacttgatcccatgttttactaaagtgaacaaaaatcggcgcgaatcaaaactccaacatctatcatgggtggaatggatgaatgcatgaaggaatgcatatgacacagatgtaatttaagaatgcgggtgcccgggacattgtctccttcttagacacaacgtctatgggtagcaaagtgccccaacgtatgtatttaaaacggtgacccggaccctccgttgatttgtctatagaggggatcaagacagaacccatatgcgatgcatatgcaaaaggtgcaatgcgggaatgtacatagtatgacaatattcactgaacataagcaaagggtatatgatacttatg

SEQ ID NO: 41279 - DNA, 547 bp, Glycine max
  unsure (1)..(547): unsure at all n locations
atcctctgagtcacctgcttgctgcatgctgtaccggcttcgagaccttgttcttccaattctntatctgctcncgccattggatgtggtggtgccgtctctgagtctctcttctttctgatctaacacggaatcgcgccacacactctcttctgtttcactccatcgatgccctgaaaacctccaatcgaatcgatttgagatggaaagagaaagattagggttctttacttaaagaanatttccccctttttccccttttacgagaaacaagaagacagagaggcctggtgacaccacaaaataaatctaaacaagagaaagaaaggtctgttntanggaaatttataacctgtatcaatataacggaacggtatatatatagagagagagtgatntaattgtgatacgtgtgaattaaaaatacttgcagaanaatanaatatataatctggataatatnttctactttatttcatcaattaaataaaatattttatggtacaaatgtatactcatgttaacntattgatataataaatcattg

SEQ ID NO: 41280 - DNA, 495 bp, Glycine max
  unsure (1)..(495): unsure at all n locations
agagagagaaaagatacatgtgaagtctaattaaatagaatctagcaagcaacagataattccaaacacaaaattcaacaaaatgataactattggagtttccagtggtggcaggcgaaaaagaagttaattagtgacgagaatactacgatccatctattccttaccaagtcgagcaagccggttgacccaacgagggattgactttccggtcaatttgagacaaacatcgttacagaaatggttgcaattcttggaaatgagatggtaggtattgccagaataatcttgagctagcttctccatgaatgctcgaacatccttggcacccagatctgttgttccgatgaanattgactntctgaaggtgaacccagggcagtgtttcggttgaacttgganaatccccgttgtgtcgtgctcgttcgcaccanatccatattccagcccatgaactanagaagaaaagaaaaatttaatttaataattatcaac

SEQ ID NO: 41281 - DNA, 501 bp, Glycine max
  unsure (1)..(501): unsure at all n locations
atcctctgagtcacctgctgcatgcaatctntatatatgtcaagaaaatgaggctatccgagcatagttacaacattcacaagcaaaattgtggatgctccccttcctcttgaatggaagcctttaagcattgactaatatgatggagccatagatcctaatgaacacttggaagcgtacattatgcaattaaattatacactaacaacaatgacatattatgtagggtctttccaagttccttgaagggacccacactaacatggtggcatcaacttcctcctcagaggttgacttttttgacacacttgttgaatattttggtgcacaatatgccacatgccaacctcaccacacaacatcagtagcaccgatcaacttgcgataagccgataacaagtcattacatgattttatgggccgaatttcacaaattgcagtcagaattcaagatcttgaactcagagtagcccttcattccatgataacaacacccaagtc

SEQ ID NO: 41282 - DNA, 525 bp, Glycine max
  unsure (1)..(525): unsure at all n locations
accccacttgacgtccncaaggtctcctgacccccgcgacatatctccaggtaccactatgtggtcaacaataaaagcaggaagtttcacccttcaacacttcctcatctcaagcttgtaggattatggggtacccatcacatgtggtactaggtggcggtcgggcgatggtgcacaacaagtttcccacatccacaatgcgcgcataaacccaccatcccctgttgcccacctccaactgagctcacgtactcccacgtagcccatatcctcgtttctctcaacaccgggtccccatcaatcctcccaagtttccacaacatccaagcaaaacaacattcanacagcataagctatcacagccaagcaaaacagagcagaggcagagaactctgctcaacacatcaaccaaaatcacagcttntctcacttanagaccacagtaacaattcctttgatccannattcgtaaccgtggatcgactccaaanatttactggaagtctatagtgcataagcctacat

SEQ ID NO: 41283 - DNA, 349 bp, Glycine max
  unsure (1)..(349): unsure at all n locations
ttttttctaagattcaaggctagagctaggctttatcagtgttcggtctcttaaaataacgggggatttgagaactaggggaaataaggaattcaaaacatgtagtgttttaaaaaaaggaggagactctgtttccgacgcggcggcgccgccacccatggccggccagccactgcgccggtaaacagcttccggcggtatgtggttagagagagaagagagcttctgatcgtttctttagagagaggaagaagttggatctatgttattttacggtttattntctagattatactgctgccatgaccaatactatggtgcacgcggatctctgtgtccacatggacca

SEQ ID NO: 41284 - DNA, 482 bp, Glycine max
  unsure (1)..(482): unsure at all n locations
acagcttcaccttgtgaatgggtctatgtccttctctttggcgagagcactgatcttattttgagaatgataacctcaacgtacgtcgtcgtttgggtcagtctcgtggcggtgcatgcatgacgtanacaacgaaggtcgtcgtcaacagggtttggtggaggatatgggaaagtgggaagaagagggtttggattgatgaggatttgatgttgcagtcatgggattcgatttgtgtgagagagagagagagaggagaatctgataaggagctatgcagcacaagttttgctgtaaaggagttgccacaactaatattacgtntagaggtgagaatatntacanttgttactaaccgatgtcacatttgcagcatattacggaattgtcactgcatggtttttaagtcattttgtaagcaatcattgtaaattcgtgatgtatacagctctttttttatactgtgtacatataatgagtta

SEQ ID NO: 41285 - DNA, 433 bp, Glycine max
  unsure (1)..(433): unsure at all n locations
atcttgtgtcacgtcctcttcanagctataccctatgtgttaataactcaagaaatagttcatcaaatgcataagaagaagaaagggaacaaagggtttgtcatgttcaaaattgattntgaaaaagcttatgataaagtagattgaaaatgtctgagaatcacctttagtgattntggactcccccaaaagattattgacattatcatgaattgcaccttctccacgactttgtctatgaaatggaatggagaanagcttaatatttttaagccttagaggtgtcttagatagggggaccccgtgtttccttatttgtttgttctttgcatggaanagctgtcattgcttattcaatgaaagtgcangagaaaagttggttgcccattataatttttcaccatggtcctagtatttctcatcttttctatgt

SEQ ID NO: 41286 - DNA, 420 bp, Glycine max
  unsure (1)..(420): unsure at all n locations
ctcagcatcaaatcttggagggaaactccattcttacccganaacattgtatcaagatcttcaccactgttgcttgatttctcctcagaaccatntagttcttgctctttcatctcctccaagtacatttactccagcattggcagccaaagccgctagcattaatgaaccaatttgaaagctgttccattaccatgtactaaaaataacaataacatattaaaaatttaagtcaactatggctctaaatggttaggacagcggaactaacctcaatgttatgacggtgatatttgagagtcaattcaaaatttgataaacagatatgtataatgttgaacacctcaatatcaaacaagagtcttatctatcaaaccttggttcctcaacacaaaaaccaaagctcgttggatcctcaac

SEQ ID NO: 41287 - DNA, 205 bp, Glycine max
ggatgtctcctccacctctaggacctctcaatcactcacaaactcagctcacgctctcaagacgacttccttttccagctctggtctctgcagatcttcacacaacaaaatctctcaaactctctggaatttggacctctctctctagaactgaagacatgcaagagctcctcaagaagaatggccaaactccatctctaaatct

SEQ ID NO: 41288 - DNA, 353 bp, Glycine max
  unsure (1)..(353): unsure at all n locations
aaatggtcctctttgcttttatcagataacatggaccgttcaaaagcataaaatcaacacataactttaccgcttttggtaagaaactcgtagatccgagttcttcaccacatatcgaggattcgtangagcaaaaaccccgctattgtcgaccaccccttttcaaacaaaccaagagatcgttaatggtccaatgccttaatgtttctcttctttcacaaccaagagatcgctaatggtccaatgccttaaacgttctctcctttcaaaaaccaagagatcgtaatggccaacaccttaacgtttctctcctttcaacacaaagatgcgtatggtccacgccttacattttc

SEQ ID NO: 41289 - DNA, 593 bp, Glycine max
  unsure (1)..(593): unsure at all n locations
cgggaagcggagatganccctttgaanncccttgatatcattgcgagttcgcacactgtgaagtgctccatcgcttgccgaagagatgtggaagggtgatacttcacacgattattctctgaccacagagaggtacctgtagatgtgtcccggaggaacgacacgattgggacatcaagtggtgcgctattggactccaccatcttgatccatcccgacccattcggggcgcgatcgtctgtgagaacctcgggcgcacctaccatgagagctcctgtctctcatcgatataataacctgaccacaatcatggagtgctgtgtggtgctcggcctctagcaactgtgagtgatacgtgcgatatggcctctggtaatctattaccaaaggtgggtaagcaatggcacacgcatttgtctgtgcgcgagattagcctgtgttattcgattaccaaggcgctgttatctattactcagatgagnagcactgagataaccgtnttacttactggtcatggtcttgagacgcatattgtatgttcgtaggtatatatcacttacaagagtctacacctaacgtgtatacnttgagag

SEQ ID NO: 41290 - DNA, 600 bp, Glycine max
  unsure (1)..(600): unsure at all n locations
tgggatgtgntgttgaagcccttgannnccattgataccattgcattactgaccnttggaatactcagcctcnggtacaaagaacaagaatatgttcacagagagctcangagtattaatgcttgtattagaatgaatgagtttgtgagaagataggaatatgatagattctacatgcacaacgttgccttgcatctatagactctacttgcctgatcaagacgaccattctgaagagtcataactctttagaataacttaataccgcttagaatatgtcataacctttgtgaagagctacatctttgtatctttgagaaacaaacactggtaatcgagtacgatgtatgtgtcggcgaatacacaaccgcttttgagtgatacaatgcgactctccacatttaaatgtgactctcattgtttactgacactggtcatcgattaccaagacattgcatagactacggtcgtgtganaatattcggaacgttgtagattcagtcagaacacactttcttacttatgttgctactggtaggtcgatacaacactcatggtactcgatcaccncagagtgagacctctctggctaatgatctg

SEQ ID NO: 41291 - DNA, 472 bp, Glycine max
  unsure (1)..(472): unsure at all n locations
gacggccatgatctctgagancngaanttaggananncatgntgcatgagacccgattttgcatgacgctttttctacttataattagcccacgtgatattttttaaagagaccacctttctctctatcattttaattatgggggcaccctgtctataccataagacaagaattttgatgtcgtcctctaatctactccaatcccgatatgtgaagaatgcaccattcatgtgcttcgttcttggaaaaacattctcagacaccaacttagatacgtgaatggtatatttggggtacttttgcaaccatgatacgtagttcatacaagatagagttcttctgtaataatacctcaaactttattcacaacccttgaacttatttctaatgtttagtgaatgatcggccatttaaactcattaaaaatacgtaaatatctcagcttaaactgaatacccctgtcaatttatag

SEQ ID NO: 41292 - DNA, 499 bp, Glycine max
  unsure (1)..(499): unsure at all n locations
tcctcgaagccatctcctgcgatgacaacattggaaagttattttacaagaaatataccaatcattacaaacaagagccaaacaacacttcatatggcgcgagtgtcaacatgcactttataaaataatcatattgnggccgtgctattttataacacatatgcatttgcacacataanaatttggtgaaaggcattttacgacacacatccatgtacatattttttgacaaaccttttcatgctacatcctatatatatacacacatttttntttggaaggcttcttttgctacctactcacaaatacatcacaaatacatatgntttgaaaaacacttttacgctacccatccaaacactntgtaaggcacttcatgctatatatattcatattatgcaaggcatnttcatgcgatatatattcatattntgcaagggcatttattcaacatntcgcaaggcgtntcatgctacatatntacatacatacatattat

SEQ ID NO: 41293 - DNA, 579 bp, Glycine max
  unsure (1)..(579): unsure at all n locations
ccactgatnagcanttcgtagnanccngngattgatttccactctgaactgcctctcgtgcnatcntnnatattcnacccaagatggagatgattctatagatgccattganctccatctagatgatgatcttagtcaatttgtggaaagattcaacacatttctcagagtgataggacatgcctgaacatcacatcttaaattcaagacaacggcacaagattcatccgtcacttctaaatgttatgactgccatccactcggacatctgagggttgatttcgcaacttctgatatatatatacagaaatttgaacagaaagtctttgatgaacagaacgctaataacgtctacattacctgggatgactatgatatggactcctctgaagattcacaaaacgaagtttgtttacctattatgatggccaagagatactagagtgatcataatgtttccttgaaaaagagtctgtacatacatagtggctgctctacacacatggccggatatgcatcacagttattcatatttcttctcagaaactgaattgtgactatgagacaccaactatgcct

SEQ ID NO: 41294 - DNA, 466 bp, Glycine max
  unsure (1)..(466): unsure at all n locations
tctatagaaggttcgttcctaatttctctacaattgcatcacctctcaatgagctggtgaagaagaatgtggaatttacctgnggtgaanaacaagagcaagcctttgctntgctcaaagaanagcttactaaggcacctgttctagctcttcctgacttttctaaaacttttgagctagaatgtgatgcctctggagtgggagttggagctgtattgttacaaggtgggcaccctattgcttattttagtgaanaacttcatagtgccaccctcaactaccccacctatgataaagagctttatgccttaataagagccctccatacttgtgaacattaccttgtttccaaggaatttgtcattcatagtgatcatcaatcacttaagtacattagagggcaaagcacgttanacaagaggcatgcaaaatgggtagagtacctagagccatntccatatgttat

SEQ ID NO: 41295 - DNA, 386 bp, Glycine max
  unsure (1)..(386): unsure at all n locations
agcttcactcctacccccatttttattattttcgtgtagggggtgctcgcccaagcgagctaaccctgtgcatttttttttacaataattctttgcaaaatcgtgtttaacctctgggttggtgcttatttttattctaagtctacgaataagaataaactacgaatattcaactatgactttagaaatatagatgaataaacnacaagcacaaactttagaggatactangctgcctcccaacagcgcttctttaacgtcttgaaccggacgtgggataatgatctgctgaccacaagcctagcatctgctcgtacccatccctaagtatctgagagcaggaaatggcgccacacaataaaacatgactacactaccacttacct

SEQ ID NO: 41296 - DNA, 410 bp, Glycine max
  unsure (1)..(410): unsure at all n locations
ctgaaggagaactngatgccttggtcaacctagtaactcagctttccatgaatcaganatctacacccgttgcaagagtatgtggtctatgttcttctgcagatcaccatacagatctttgtccttcttttgtccttctttgcagcaatctggagtcaatgagcaacctgaagcttatgttgcaaacatttataatagacctccttagcagcaaaaccaacaacagcagaataattatgacctttcaagcaatagatacaatccaggttggaggaatcatccaaatctgagatggataagtcctccataacaacaacagcttgtccctcctttccagaatgatgttggtccaagcaagccatatattcctcctccaatgcagcaacagcagcagcaacaacagtcacaac

SEQ ID NO: 41297 - DNA, 351 bp, Glycine max
  unsure (1)..(351): unsure at all n locations
ttcatctcagagctcttatacaaaccatataattcaaaagttggagaatttgcttggaaaccttgtagctgtgcttaaagtatgaattgcagaagatccacaaattaatcaagttttagaagctattgatccagaggtatgaatttataattctacttattcaacgatttaactatgatatgatactttacaaagaaaaaacattcttttaatttaggtacctacaaatgattctaccagtaaagatcatcanactacaaacaatcttagctagaggtgagttgaaatatagtactatattttaactatatatatatatatatatagatatatagaatatatcatcattat

SEQ ID NO: 41298 - DNA, 494 bp, Glycine max
  unsure (1)..(494): unsure at all n locations
gtttatatatttataaatgaataattagtcacaaatatctataaatgaataattctttgtggtgaagatattataattaaataagtaaatacggaaacagttttggaacgtatctatattaaaaaatgccagcatgatgacgagaaatactgaaataccagattcaaaaaataaattaaaatagtgtgaaatatatcttcttgaaattggtaaaagccattcaattgtgcacctgtggaataaaaaaatccatgtttgtctgttgccaccaagcggcagaaatgatcccttcaagaacttgtaactccttaggcatctcatgagatgttcctcattntaattctactctttacgccacacctaagagtaatcagcatagccaccgctgtagtcaaaattaaccaatatataatgctaaatccaagaaccacatttttgccacggtacgtaaaataagganatcaaacactcagagaacgtgtctagacacatat

SEQ ID NO: 41299 - DNA, 292 bp, Glycine max
gcacggctggacatgatatatgtcatggtttggtttaattaaacgataaaaggggatgtatcatgagatgtctgccggggtttgacccatgcgggcgccgaagtgacagcgtgggcatctccctccttactctttgcaccagttgctccaattcttttagcattggcacttgtggaggaaacgtaatcgaacttccctcttttcaaccatacttcaattctttcctcggcgaatacttggtccgcgaagctggacggcatgtaacctatcaacttctcatagataaacactg

SEQ ID NO: 41300 - DNA, 435 bp, Glycine max
taatcttacctccttgagataataagctagagcttagctacacacaccccactaatagttaagctcacctccatgctcaaatacatgaaaataccaaaaagtctctactatatagactactcacaatgcccttaaatacaaggctaaaaccctatactactagaatggccaaaatacaaggcccaaaagaaggaagacctattctaatatttacaaagacaagtggacccaaccttgacccatgggctcacaaatctaccctgaggttcatgagaatcctatggccttcttcaacagctctatcccaatcctcttggagcctcctacttatggctctagtgattggtcccttcctaaggaggattgcatcatcctcttccccttgaagaggatttgacctcaaatctgttggtgtctcctcctcatcatcagctc

SEQ ID NO: 41301 - DNA, 203 bp, Glycine max
  unsure (1)..(203): unsure at all n locations
cgtgatatcttctagtgtcatcctaatgcagngaagatatgcaatgcttatacattggtatttttgatagatagtacctgcgaaacaaagaggtgcaggctcctgttacttgactttgttggtgttacaccaacggggatgacattctctactggttttgcctatttggagggataacatctgaataatgtggtatgggctct

SEQ ID NO: 41302 - DNA, 370 bp, Glycine max
tcttatccaaggcacattcttggtggtgattctccttcttccatggcttattccctagtggatggcacctcctctcacatcttctcctttgtcttccgttgcatctccatggtggaaaatcaccattgaaggacctcactgaagctcaaagatccagcctccatagaagctccaaaagcaaacttcattcaagtggtatcacgagcctaccccccaagggcattggatagaagactccaagaagattatgccagagatgcaagagaaggccctaaggttctcatgagccttacggtagatttggggcccatgggctaagtatgagcccacttatctttgtacatattagattaagatttcattatttttg

SEQ ID NO: 41303 - DNA, 261 bp, Glycine max
  unsure (1)..(261): unsure at all n locations
atgccttggtttacctggtaacccaactggccatgaataaaaaatctgtacttgtcgccagactctgtggtttatgctcctctgccgaccaccacacgaacctttgcccttctatgcaacaatctgaagcaaatgaacagcctgaagcttatgctgcaaacatctacaacagacctcctcaacctcaacagcaaaatcagccgcaacanaacaattatgacctctccggctacaggtacaatctcgggtggaggaatcatc

SEQ ID NO: 41304 - DNA, 375 bp, Glycine max
tactcaagcttgaaggcgtgtaacccaccatcttctcgtattacattaccggtaacatgcctactatcattgttatcatctccttctccgtcattgagggcactacttgagctgtcagatccatccaccgttgggcatattctttgaaagattcatgctcttttttacacatgatctgtagttgcatcctatccggagccatattagaattgtactgatactacttaatgaaggcaaacattatgtctttccaagaatggactcgggaaggttacaaatcagtataccaggtgacggctgccccagtaagactttcctagaagaaatgcatcagcaatttttcatctttcgagtatgcccccattgtcataccat

SEQ ID NO: 41305 - DNA, 364 bp, Glycine max
  unsure (1)..(364): unsure at all n locations
ttggtggttaatctncttaatacttggcttattccctagtggatggggcctcccctctcctattctcctttgcctttcgctgcatcttcatggtgaaaaatcacccatgaaggaccacattgaagctcaaagatccatcctccatataagctccacaagcaagctttcatcaggaaggttccaagttagtgtaccacgtaacaactaccccagttagactttcttggaaggaatgtatcaacaatctctcatcttttacgtatgcccccatctttcgataatacaattttagatggttcttggggcaagtagtccccttgtacttgtcaagtccaaccccttaactcggaggggacatgatatt

SEQ ID NO: 41306 - DNA, 365 bp, Glycine max
tcatggtgaatcaaaggtgattcaatggtgtgttgatgataacaatgatgataacaaaagatgatgacaaaggtgatgacaaaaagctcaaagatcaatctaagaacaactcaagtgaatcaagaacaattcaagagttcaagataagaatcaagaagaattcaagattcaagaagaaagtttagagtcaagaatcaagattcaaggttcaagatctcaagaatcaagatcaggattcaagaatcaagagaaagcttaaccaagataagtatgaaaagtttttctcaaaaattgagtagcacatgatttttctcaaaacatgtttaccaaagagttttgactctcaggtaatcgattaccagatt

SEQ ID NO: 41307 - DNA, 407 bp, Glycine max
  unsure (1)..(407): unsure at all n locations
agctttancatataactctcataatgtgttatgtgttgatacacaatgaataagaaaaagagttattttattctattgtgttgatgcagcataatagtatataaatttcttggtagttttcttcaatttttatcatatatatatttaaaaaaattgaataaaaataccaaaaaatttatatactaaaaaaaaaacagtagtagctcctaaaatagaaattggaaaatgttcttttttggtcctgtaagctaaaaaacaaacaaacagaaaagataaattcctcacaaagagcactattatgttatatttatttctttgtaaattataatctggcctccacccctttctactccagctttcttttatataatgttgtcagtagtataatacactnnttattatttatt

SEQ ID NO: 41308 - DNA, 365 bp, Glycine max
tctgagtttggattatacatgttaacaccatagtccttgtcatcttggagtcttttgtccaagtagatagatggcaggcatggtcctattggctttaatggccaaatcttcaccagccaatccacaacctacaataaatttcatttcaaatttcaatcatcaatattatccaacaaaataactaggataaaaatgtattctagatctctctaatttcaatcaaaattgttcttagtcgttatactttaaaaatgatatttttggtctttgaattctttttataattgatgaattttttctctttttatggaacttaggatactaggatgagagacaaaatccatcaattataaataaaaaagaag

SEQ ID NO: 41309 - DNA, 369 bp, Glycine max
agctatactatgcagagaatatccaataattataccttcatctgacttagcatcaaattttcctaagttatcttttccattattcaatacaaaaacatttacaaccaaagatatgaagatgtgagatgtttggttttctgccattgaacaattcatatggagttttctttaaaatgggtcttattaaagccttatttaaaatgtagcatgtagtgttaacggcttcagcccaaaagtattttggaagaggagtatcatttaataaagttctagcaatctcttccaaagatctatttttccttttaacaacaccattttgttgaggggttcttggtgcagaaaagttatgctcaatctcatgcttatcac

SEQ ID NO: 41310 - DNA, 367 bp, Glycine max
gactagggatttatctaccacctcaaaaccaggaggctgtgtcataaatacagattcctcaaaaaacccattaagaaaagcattgttgacatcaagctgaaataactcccatccttgagaaagagcaagagtgagaacaacatgaattgtgacaggcttgaccactggagaaaatgtctcatgaaagtcaaaaccatgaacctgatgaaaacccttagcaaccagcttggctttgaacttgttgatagaaccatcagcattttcttttactccgaaaacccctttcacccaatagcttgtctattagaaggtaggggaactaagtcccaagttctgtttttcagtaaagcgtcatactcctcttgcg

SEQ ID NO: 41311 - DNA, 279 bp, Glycine max
aatacaaaagtattacagtttacgatggacgggatttacttcatcaattaatctgtaaaagaggtctattctatcgtacgttatcatatgattagttgattacttaggtataaaaatattgcctaggttttcaaaaagaaaaacactggatatatcactgaagtttaattctaacatacatctaggtgagggttcaatttaactacactttttcattttaacaaagtcactaaattgaccctatgtgattctctcctatagttggactctttaattctg

SEQ ID NO: 41312 - DNA, 359 bp, Glycine max
ttgttctattgaattgatgttatgtttgttaatttggtatccatgataattgagctatgcaatcttatttgttgctccttttttttggttcattggcatatggcacattgttgttgctcatacttttctgtctctaaatgccattgatgttgtttgcagacccccgtgagtcagagactttccggccattagacatgcatcatgggatggaagttcgccttggtctatctaagggaccagtgtacccaagtattatataattaaatttgactgttattctagtaccagaaaacagtattttgtgatcgaagcttcttgttattcattaaaatggaagtgtccgaggattctccatatgt

SEQ ID NO: 41313 - DNA, 510 bp, Glycine max
  unsure (1)..(510): unsure at all n locations
tgaaaactgggggnnngttgacttcgctcgatcgcccgnacncattntatanagtctacctgcatgcatgcatgcttgtatgactataatgacctttggttctatctgtttaccacctcctgtgncatgagacaactatatatagtaacatgttttccatactgctgagtgatatagaaactgtgaccgatcgtcacacaatgcctttggactgctatgccaacatatgtagcaagagaacacaattatttttgtgctttaaacctctacatcaggactatttaaacttaccacgccaaccaagaccgaataaatcatatatgctctgtaccgcgcatgaaaatgtttngtcgtgtggaatgacatcaccatatgatgattgatattatctctaattgcacgtttgcgaccattacaaatacccaattttccaatgcttgtggtcaaatatacattgtttcttctccatgttgtatcacagcgaatatattcaactctatagaatatctg

SEQ ID NO: 41314 - DNA, 348 bp, Glycine max
tattaaaaacatgaaatgtttttaaatattttaaaaaatttaatcatttatttcattcttaacgtgataatttatagagttaaataagtttttaatatttataatatatttctttttcaatttacattaatactaatggtttatcctgacaacatttatcagaataagaataataataattaaaaaaataaaaatctaaacatgtcaaataataaaataaaaaatatttttcagataataaactgaaaaaaagatatattacaaatataaaaatatatttaaatttaatttttattatgaagaaatatttgtttatattgggacatatattattgtgtcaacgaaaac

SEQ ID NO: 41315 - DNA, 396 bp, Glycine max
agctattgaacaatatactggccttcatttaactgtctctgggcttggcggccacgctcaacaaagtactttcgacacctactgtacgtttgatttgaccaaggctgttatgggaatgttgcgacaatccttcaaaaccttattgatacattctgagaggttggttgtcatgtggccatatcgacgtccttctttatcataagccatcgtccatttttcctttgaaatgcgatcaatccatgttgctatggctggacttagttcacgagatttttctaaaatttgatcaaaaatgtgcttgcaaggagtgtatgctgcataaaattagttatcaataacaattttaagtatatatggaagttaaataaacgtgaccattaaatatgaaatcttacc

SEQ ID NO: 41316 - DNA, 360 bp, Glycine max
tgaatagaatacgagttgataaggtttgcataacaaatggtgatgcctagtacgtatagcttaactttcatcggagattttaaaactcaattgccataaaatatcataacaaagatgaaaaacaaagggagagaaattcaacagaatgaaattgtttgtctattattaaaattatgcaatcagataaaagagagttacatttatattggtagtttgactaaaataatattatttcaaaagctaaaagagtatacaactagttagttagttacacatggttaattcaataaggtctgcaaaataccagcaaaagctccttaatttgattggctccgaatatttaacgcatgattcaaagat

SEQ ID NO: 41317 - DNA, 170 bp, Glycine max
tatcctatgcgtagaatggactatggatgtaccttactttgtggccacatccccgcggcttaagctaacgcttccattgcccaccaccagaacatattcatgccttgacaagagagactgaaatgattgggaatgctgacatgtgaacaatctatggtgtagaaaaaact

SEQ ID NO: 41318 - DNA, 358 bp, Glycine max
tatagctgtaagtggtgcctccaatctattctaatatttaaggggtgtaacagtataagtaacttttctgtgaatacttaacctcttggcatttgagtgaagaatttattcttgaaataatccgggttagcttacctaatggcggtgattcaacaatatcctctaagccaaattttattccatatttctattaacaagtacatcttttgtcttatataaactcaagttggatggttgtccaatgagtggagatatttggagaggagcaactaaggaatctattgccttttctgttcaattgtctaaagcaaaagaaagacctcctacgttgtatttctagctcaatttatggtcccta

SEQ ID NO: 41319 - DNA, 323 bp, Glycine max
agcttctcgaatattatgcgcctgattcagacttccgttacaaaagttatgaccatatgaatttctcgagagccttcgttgttcaatttcgagcgtcttgatatagtatgcgcctgaatcggacttccgtgtgataagttatgaccatttgaatttgtcgagagcttccgattttcaatttagagcttctcgatatattatgaacctgaatcggacttccgtgtgacaagttatgaccatttgaatacctagatagcattcgttgttcaatttcgagcgtgtggatatattatgcgcctgaatcagactttcgtgtgacaagt

SEQ ID NO: 41320 - DNA, 302 bp, Glycine max
tctcgatatattatgcgcctgaatcggacttccgtttgaaaagttattaccatttgaatttctcgagagctttggtttttcaatttcgagcgtctcgatatattaagcacctgaatgggactgcggggggacaggtatgaccctttgaatttctcagaagctcccgtggttcattttccacttttcgtattatatggcccctgattcgaacttccgggggaaaggttatgaccattggaatttctcgagagcttccgatgttcgatttcgagcgtctcgatatattatgcgcctgaatcgga

SEQ ID NO: 41321 - DNA, 318 bp, Glycine max
agctttgtgtaatcgattacactgatttggtaattgagtaccagtgatagtttttgaaaaaaatcaaaagatgtcactcttccaatagttttcacgtttttctaaaagctgaaacttttacaaatggtttttaagtttttctaaaggttataactcttctaatggttctcttgaccagacatgaagagtctataaaagcacgtccttaacttgcattttcaagacaattgattacaatcttttacatcctgtgaatctctttgaacatcatcttgaatttcttcttcttcttcctttgcaaaagctgtattaagtttc

SEQ ID NO: 41322 - DNA, 341 bp, Glycine max
  unsure (1)..(341): unsure at all n locations
tcccactaagcttaagtgactcatatagtttctcagtgaaaaaagatgatggaactcacaaaccaagatggggggggggggttaatctccttttatttttnntttatttttttttcacatatttttcttctattttactttttattattttttcttctttctttttttttttcctttttttcatattttttcttctttatttttttttattatttacatatttttttttattatctatatcttttttgtctttataccttttcttcttttattttttctcctctacattttttttcctttcctatttctttttctttttttttctttttcttttttttttt

SEQ ID NO: 41323 - DNA, 381 bp, Glycine max
agcttccctttctttggccaatgctgtacttgtttggcagtgatttccttggcaatttgatgctcaaaaacagcaatatctatcactccatcagtaggtctgcccagatacttgttaatcacagcaggggagaatttaacacactttcctctgacaaacaccttttgatactcatcactttttctgttacatatgtcagagggaatgttgacaatgaattccctgactaagccttcatagcaatctcccaacttgctgacagtcttcagcagtccagcagccttgatgaggtccatgatctccttgcaatccaaggcatctcttcccagttctctctcaaccgcaagtctgcgttgatacacatatttccacttttcaaca

SEQ ID NO: 41324 - DNA, 275 bp, Glycine max
aaaaaaaaatggggccaattcctccctcccccctcaaaacctttaaaaaaaaaacaaagagttttcactcggggttactctttccccttgaaattttgcccgaatgaccactctcaaaatgaaggaggggcaaagccatcctaaaaacaatttatgaaaatatttgtccttacgttctccccccagaagactttgtgcgaagtattcaagtcaaatagggtttcttcaaaaaactttttgggggggccccacacactgtcaaatttgtgttttaa

SEQ ID NO: 41325 - DNA, 258 bp, Glycine max
ctagttccgctccggagtatgacagtcaccgctttaggagcgctgtacaccagcagcgcttctaggccatcaagggatggtcgtttctccgggagcgacgcgtccagctcagggacgacgagtatactgatttccaggacgaaatacggcgccggcggtgggcatcactggttactcccatggccaagattgatccaaaaatagtccttgagttttatgccaatgcttggccaacagaggagggcgtgcgtgacatga

SEQ ID NO: 41326 - DNA, 368 bp, Glycine max
ttggctgcgcacgagctcagatttcgtgtgtatttatagaagatgacgcattgtaatcgattacaggtattggtaatcgattacaggcccaataagccttctggtaatcgattacaggatgttgtaatcgattacaggctgcctgttcatgtgtaatcgattacactggatggtaatcgattaccagagcctatcctaggctagtttctaagagaatatctatatttatgctcaaatacatcctatatgtctaattttcactactaatacactaaattcaatcattcaattactatatacacaagaaatcataaattctatcataaaaacaagaattcaaacaagatcaaccaaaataatctacaatc

SEQ ID NO: 41327 - DNA, 383 bp, Glycine max
agcttagtgcaaaaattgttggatccttatttctatcccccttcccctatttataggagaaaaggggaggtggttgccgcccacaggattcttgaggaagatttatgagcgcatcccacaattgataagttcaccctcgtctctagagccttcctgagcacacccacaattgataagttcacccccccttcttgaatgttctggatgaagtttcctaagcgcacctccaatttgatgagtacaccccccaatttgaagggggttgcttagtgatgaagtttcctgagcgcaccccccaatatgatgagtgcacccctcttcaggttgcttattgattaactttcctgaacataccccccaatttgatgagtgcaccccctttc

SEQ ID NO: 41328 - DNA, 370 bp, Glycine max
ggcggcccaagtggtacccccaatgatggaaagggagacgatgatcgtgatggtagacacattatcgatactctactatgaaaagatggtgggctacgcaccctcaaagctttgcggatttggtcttcgccagtgaaaggatcgaagtggatctgaaaagaggcaaatttaatcatcctgcttggacgaatgagaaaactggggcaaataaagagggtgaggatgagggagaaacccatgctgtgactggcatccctgtacggccaagtttcccaccaacccaacaatgtcattactcagccaataacaaaccttctccttacctaccgcccatttatccacataggccatccctaaatcaaccacaaag

SEQ ID NO: 41329 - DNA, 375 bp, Glycine max
  unsure (1)..(375): unsure at all n locations
tttctctcaacatttgggaggctagttttggaccctttatcattgacttcgaaactttataaaagaagacatgaggattgcagagaatcaatttatgttaagaaagtttacaacgtaagtcatttatctttaatgaggttttgatggaaatgtacctaattaaaanagagacttacagaagtgttaagagaagttttgtgaaagactttggggtaaaaaaagtgtctaaatggttgaatgtaacattgactatttacatgtcaatataatcataattcataatatttggataatcaatatatgtatatataatcataattcatactaatcaatcaatacttattatctatctatatgtcaacatgtcattattta

SEQ ID NO: 41330 - DNA, 368 bp, Glycine max
agaagtatatatatatatatatatatatatatatatatatatatatatatatatatatatatatatggtttaaactcaaagatcataaggttcatggatagttacagttttaaaagtggaatcaactcaaaaaaataaccacaactaaatttataacaagaacaagccacaatatacaaacaaaacaccaacaaattcatgccatctttaagcacgtcatgctatatctcatgctttcatcaaataaacttcaaacaaaccatatatcatgaaatatacagcaaacacaataacgaaacaacactacaaagcatgcatagcacacacaaggtagctttccttatgggtttctccttagccaactcaaa

SEQ ID NO: 41331 - DNA, 226 bp, Glycine max
atactccgacgatatttgccaacatatgtgcttttggcctaagatgtcaaacgtggtttgtctaagaatgcttctaaatcataacaattgagtagctattcgaggcctattcacaatagtggatcgtatttaaaatgctgcattatggatttgcacatcgcgacaatccagttagctggacgtaaagcggattggagctgatcaatgcagtatgtattggcactat

SEQ ID NO: 41332 - DNA, 367 bp, Glycine max
tgcttctacattaatattacatgtttctacattgtgagtgatccatagtttcccatttgagattcaatacaatgattaatatagacagtttgtattaattattgtattgaaacttgaattgtccgttttgacagtttgagaaggataattattttttacttaattctttcttataagttaagtatgttgtgttaattttgactaaatttcagtttattgcatcttgctttgttctctaggtgtgtacaggattgtggtgttgatgtcaccgctttcatgtcgtgtacttggagatcaaagtgaaatgctgccaaaatttcgtcaaatttaacataaccgtcttaacttgtttgtgtgaatcaagtaa

SEQ ID NO: 41333 - DNA, 279 bp, Glycine max
cctgctgcatgcagcttatattaagaactgaatttatatgttttcttatggagttattggctaatgctcccgcttcatccactttaaagcgtacgagtaagtaagcaaatgaactaaagataatgatgctgggcattgcgtttcagacagaaaatactatcatgtatcatttattaattctgaaaggtactacgagccccaccttgttgggggattgtttggaacataatatgggagcactattaaaaaaattacattctatgattgcaaaacgacgac

SEQ ID NO: 41334 - DNA, 244 bp, Glycine max
ttcatccagttctgagaaccactctcttgtttccagtcatatgattgctgcaaccggagtcaaggaaccacacttcttccattttgtcttgctccaattcaacataagacattaataacaattcttcatctttttccttctctaattcaacataattggcatttttctcccaatcaggacattcatattgatagtgtcctaacttgtgacatttgaaacattcaataacagctttattgaatta

SEQ ID NO: 41335 - DNA, 421 bp, Glycine max
  unsure (1)..(421): unsure at all n locations
ttaagtcacctgcngcatgcagcacatgttaagaactagttgttgtattttctctttatcattcattctggggttaagaaatggaagggatttaagaagcatcaaccttttgcttctgggaatttgatgtgctctgaaatcccatcaatattagtgtaatactttatagttagccatttttttctttttaaatttaaatgaaagcgtgattgacttggtactggtttttgatggtgagctgacatttaatgtgcttggcatcatgcagatatattgtatgattcatggtctccggcgatgacagctagttctatctgcatcaatattctctcaatgctttcacgctcaaccacaaagggtgtgaaattttttaccatgaatcatgcattttcctaatacttttgcgctatgatgggatact

SEQ ID NO: 41336 - DNA, 362 bp, Glycine max
tgaattattaaattttttcataagtcattttaagaattcgatttgactgtttataccctaagtaaaagttctcatatctactttaaagttagcttaactaaaaatagacaacttcttttgatgtctctgatccacaatatccaatatcatctaattctcaaacctaattcctaatcagcggggaagaccctaaaagtgttacaatcttttgatggttcttttgatttcttattggtcgatagtatacatttttttttacggtgatacagtacacaaccagtaaatttatataggtttttaggtttacatggttgtgtaactgcaacctgtccaaaaatcaattcaccaagagatgcataatc

SEQ ID NO: 41337 - DNA, 366 bp, Glycine max
catatagttatatatgcatccatttacgctataacaataaaaatgtattacaataaagatgtaattttttatataaaaataaacaatttatcatgcgcaatactttatgattaaatatgagcataaaatatcttttaactaatgacattaattatttatccttatataatatcactactagaaataagagattctacatcgggtattttcaacatactacatcgatttacgaccgtcgatcgtggggacgtcgtaaaaaggagaagcctattctacgacagttgctcaagactgatgtagaaatgctggatattctaccatgggtgcgtctaaatgaccaacgtagaatgctcaacattctaagac

SEQ ID NO: 41338 - DNA, 361 bp, Glycine max
tgatcttgaattaatcttgaatatatgcttgtttgttgaaacaaccctagtcttgatcttgaagcaatgcttaacctttgaatgtttgttaaagtgatcttgaaagaaactttgtttgcctattttttgacatcatcaaaatcatgtattcatacattcacaatctccccgtttttgatgatgacaatcattatcaagtaaattcttctcaacatcatcaaaacctgcattattcacattctctcgcttttttatgatgagaataattattaagcaaattctttttggcatcatcaaaacctgaaacctatatgattcacattctcctccttttgattatgacaatgatctgtaggttatg

SEQ ID NO: 41339 - DNA, 368 bp, Glycine max
ctaataattctaattgaaaggtcatattcttgttctttctttgactaacatacatacttgctcaaacttatgaaaagaaacacaaactccatcacaatcatgcattcaatccaaaatcaattcataacatcaattttcacaaaaagataaaagtgtctcactgcataatcatcatgatcaagtaaaactgttttgtatgcttcaaaacatgcatactaactatccaccaaaaaaacataagtatataaacgtaaatcataatcactaaaaacaatgtactgaaactaatatagttataattattatccaaaaagcaaaatcatcatgaatttataagtcctgagatagatcttgggtatcctgagtct

SEQ ID NO: 41340 - DNA, 362 bp, Glycine max
tgcacgaaattgatcaaaacctgaatcccagtcctctaatgtgtcatctctcaatagattatccgatgattcgctgcggatatgagcattccaagatgttatatggggttgatttgcacctttactgtggttcttctcttgacgcggtaagaaccgggcaatttcacctgctaaactcttcatagaatccacaacatcctggatgggtaattcaccgagcttttccaaccagatttcacaggtggcatatattggaggaccatacattcttaggagtggacgttggggtctctttttcttgcctggcttttgtttaagagaaacacatttgtgcagccatccatttatggcctccagataga

SEQ ID NO: 41341 - DNA, 413 bp, Glycine max
  unsure (1)..(413): unsure at all n locations
agcttcacgggtgcaatttattgaagcatacaaagctttaatattagtgttttcaacatcctcttctgaagctaccatgtgcaaacattaaaatactgtagttttgggctttttcagtcctagctttttcattgctagcttcacgacaatcataaatggaaaccatgtggtagcttcatgagtgctaaacactattgttttcggctttttcattgctgcgcattgactgaacaacacactacatcaaacaagcttcatgtaaaatcaaaatggtgcagttttattcagcattttgcagcactttaactacatgctaataactaatgttgttgcattaaacgggcgaaaagatcactgcattctgcaatgaagacacgcganatggtaaaccaaacagctgcaaattgaagctt

SEQ ID NO: 41342 - DNA, 361 bp, Glycine max
tgctcagcgaggccctttcagccaatgagtaggggttgatgcacttattacgagaagtaactcgctcaatgcgtgaacaaagattcacttaacgcatagggcatgctgagcgagtggatggctaaaaaaatttctaatttatttttccatccacaacttcagagaagcttaatgaacctcatatccaaatgcaaaacatgctgatgattcattcaagcaatcacaaacaagtaatcctaactatatgcagtgatgaataaaattaaaaagggttgggttgcctcccagtaagcgctcgtttaacgtcattagcttgacgcatcttacttcatatgtcttgaaaatacatgagagtggtcat

SEQ ID NO: 41343 - DNA, 380 bp, Glycine max
  unsure (1)..(380): unsure at all n locations
agcttcgatcttccaccttcttcgttatcatcatcttagatttctatatgattagtactttgattttcagccttgtattttggctatattattatggtatttgaacaatttactatatccttatttgcatggtgtgtncgaacaaatattaacgaagttatttgagtatgtgggatttatagctaatttattcatgattattgcttcatggctcttgcttcatgatatggttgatagttctttccatgaatgttgtatggatgtttagttatatttgaacacttcanatttgatatgcactttggatttttgttgatgccaacgggggagagaaatagggattaaatcaccaactcacatgagtaatctaacttaattta

SEQ ID NO: 41344 - DNA, 344 bp, Glycine max
tatagaccatattgagataaaagagtgccaccttatgtgctgtgtaatggttagggagggcacccaagtgggctcccttggtaaagcgatatactactaccaggatggcaatatatccctatgaagaagggaggccagtaatgaaatccagtgatagatcttgccacagagaagttgtaatgggcaatggttagagtaagcccgcaagtctcttagtctcatattttacttgttggcaagtggtgcacaggcatatgaattgtttgacattcgcacgcatattggcccagtagaatttcttatgcactcgatgaagggttcttggcaaagttaaatgactacca

SEQ ID NO: 41345 - DNA, 396 bp, Glycine max
  unsure (1)..(396): unsure at all n locations
cagcttgntaaatggtacaagctttttttattaattatataagatattcttattcaaaagtttgttgaatatctgtgtcatgcgcttaattagcgcttgatatttcaaaggtaaggaaagcattaaaaggcttctatagattgaaaatatttgaatttaatttcttaaaatttcaaaacgaatcgtatatgttgcaagaaaaaattgattaaatctattgtataattgaacgagcacgtcaaatacttaaaaactgttaaataaaatctaaaacgtgctagtcacactcactaacatgaaaaaatatatcctgatcttgagacattcactaaacagaaatttaaaatatatgattctctataatatacttaatcagtatgtacatttttttaatat

SEQ ID NO: 41346 - DNA, 356 bp, Glycine max
tttaatttatatatatgcattgctctcatactacttgattagtgtggatttttaatttataactcattgtgttttgaatactaaaagtattttaattgtaaaaaatgacattttatgagtagaaaatgaaagttctagataggttgagatcttaactgatctagaaagttgatatattagaatcctaaccaagttagaaagtgaaatttctagaaaaattctaattggttctctaaactaatttagaaagttgattttttacattggttttgtaaagaaacaagatacaatctcacttaacatcaattttaaaacaagtttgaaaacttttgattttatatattaattgactaaaa

SEQ ID NO: 41347 - DNA, 308 bp, Glycine max
agcttaggttctaggagagcattcattcttatattaacctttttctttttattccagctctattacttgcttttccgcacttagctcttctttttcttaattggcagcacacactgttattatatacttactactttttttaatacttgctgcttattagatgattgtgtgtgttgctcttttcttaccattacaagctttcaccccataattcccccaaattgtggcaaaattgctttgaaccaatgtttctttttatgaaagatgcttttctacaacctaaaacaaggtagaatcggtctctcaca

SEQ ID NO: 41348 - DNA, 366 bp, Glycine max
taactgtgactaccctaattcgtctaacctttaccgctaaaatgctctagtacattacaccgccgcaacacctgcaggccaataagactttcaatataagggatctccatatccatagatctgctatcgctatttactcgtttatgccagtcaccaagttgagtcatcgactctaataccaattgttgtgaaatcgatgaggataaatactacgaagatttatcaccagtggaccatgaacaaattatgtaagtgaatttgacaccacattttaactaaaaactttaagacttaagtttatgggtcttattcccacttatgtaatacttaatattttcattattattcgatgtaagacttcacctc

SEQ ID NO: 41349 - DNA, 414 bp, Glycine max
  unsure (1)..(414): unsure at all n locations
acaacatccaagcaaaacaacatttaaacagcacaagctatcacagcccagcaaaacagagcaaaggcagaatactctgccaaaacaccaaccaaatcacagcttttctcacttaaagaccccagtaacaattccttcgatccaattcgttaaccgttggatcgactccaaaattntactggaagtctatagtacataagcctacattntgaccgttgggatctactagaaaacatccagaactcattctgtactactctttccacagccaaccacacacaagcatttttctgcacaagccaaaatcctgttgcacctattntgacagcaaaattctgcataagtgcagatttcgaanatcacactttccctcattccatcttggccaaatcattcctacaagttccaaatcat

SEQ ID NO: 41350 - DNA, 368 bp, Glycine max
tttgaagatttggtggtcccgtgaagtagttgttttgtatttgaagttgtgttagtcgttgctgttcctatttcgtcggaggtacgcatttatcgatttttttttgcaggtagatgtttagagaagatgaacactagaaatttattcccagaagaactttaaactacaggaggaagtagttctggaatgagaattatgaatttccggaagtacttcttccggaatgttagtttattaacaaatttttttaattctattttaaaatttatatatatatatatatatattgagatttataatatctgtattttcaattgtggataattggtttaattaggtataatgattttggtataatattaaattat

SEQ ID NO: 41351 - DNA, 365 bp, Glycine max
tggaagaaagatcagaagtttcaaggaattcaaagaaatgagattttgatttgcttcttgaagcttcatcctgtgcatcctacttgtcgttttggtaagatctagctatgatattcaattaacttaaatcacatctttgttgacttgaaactttctttttatctccataatgtaacagtcctacaggtcttgcaatttaattagttttttttcaactgctgcttgaaaagttttgccttttggtcatctttttttcaagcaaattaactttgtttgaaatgattttggctccttagttttcatcatcctgttgatatgagaatggttgcttttatgataaatttgtccatgaccctccctcttga

SEQ ID NO: 41352 - DNA, 401 bp, Glycine max
  unsure (1)..(401): unsure at all n locations
agcttgcttgtggagcttctatggaggctttatctttgagcttcaatgaggtccttcaatggtgatttttcaccatggagatgcaacggaaggcaaaggagaaaaggagaagggaagcaccatccactatggaataagccaaggaagaaagagcttcaccaccaagaattgccttggataagaagcttgaagaggatgctttaatggaggaaaagaaagagagaaggggggagcacgaaattgaaggaataaaagagggaaagaagtggaactttgaagtgtatctcataagactttcattcatcagagttacaacaagtgttacacatgcttctatttacatactangtagcttccttgagaagctttcttgagaaaactttcttgagaagcttctttga

SEQ ID NO: 41353 - DNA, 366 bp, Glycine max
tcttatccaaggcaattcttggtggtgattctccttcttccttggcttattccctagtggatggtgcctcccctctcttcttctcctttgccttcaactgcatctccatggtccatagaagcttcacaagaaagcttccatcactaccggggaaggggagtatgctgatgaaatcttctcataaccacaaatgagattttggatgttagcgtttcgtttctaaatgaccatttagaggaaacactgggttcaacaaaaatagaagaaaatcactcaaagtgtattaatctcacacgggtaagtgtttcatcctaattccgaaccatagatatgccatgacttgatcttgcaaatcatttcctatca

SEQ ID NO: 41354 - DNA, 489 bp, Glycine max
  unsure (1)..(489): unsure at all n locations
cgccccgccanntttgttgctacgtcgtcgcacggacccgtanagtctacctgtccgcatgcaagcatgccttcttgaggatcagacttttttttgtttgctggaagtactacacacggatctgagggcgcctatccccgttgtaagcctgcgtggcaccaggtatgcctatgtggccgtggaggatggctccatatttacctgcgtcactttctttttaggacgaagagctcttctgactttattccaagagacttggctccgacttgggcaggagctgaccgtcccatctccaaaattaagctagaccctggccttgattcttaaaacagtacgtgcactgaatactgcggatcagaaggcatcacatctgagctggcggcagtcattactccacaacatatcgtgattgttgagaggatactcaggattctgcttgacgctgttcgggccctgctttatgctctataacctccctatgatctctgg

SEQ ID NO: 41355 - DNA, 398 bp, Glycine max
ctcgagagctagcgttgttcaattacgagtgcctgtatattgatgcgcctgaatcggacattcgagtgaaaagttatgaccatttgaatttctcgagagcctcctatgtttaatttcgagcgtctcgatatattatacgcctgaatcgaacctcagtgtcaaaagttatgaccatttgaatttctttagagcatccgatgctcattttcgagcgtctctatatgtgatgaaccttaatcggacctccgtgtgaaaagttatgaccatttgaatttctcgagagcttccgttgttcaatttcgagcgtctcgacatattatgcgcccgaatcggacatccgtgggaaaagctatgaccattcgaatttctcgagagcttccgttgttcaatttcgagcg

SEQ ID NO: 41356 - DNA, 360 bp, Glycine max
ttgtgtaatcgattacattggttttgttttctattaccagcggttgtttctgaataaatcaaaagatgtaactcttcaaatggtttttgactttttcaaattggttttaagtttttctataagttataactcttcaaaatggttctcttgaccagacatgaagagtctataaaaacaaggctttgttttgtattttcaatcaatctttctaagtaatctttctatcaattcatctcaatcatttgttttaatcatctttcaatattttctttcatctctttcaacagtttttctgtttcatcttctcttcaactttctaaaagtttttgttcaaaactttctcttccaagaaaagttctt

SEQ ID NO: 41357 - DNA, 351 bp, Glycine max
cttatgctcactgaatttgttattttttccctgaatctaacagtcttgctatcactcacagactgcgctaaattaactagcttggacatcaagcttgttattttaaatgctaatacttcaatgaccaccttctcagaattagcatcatgcttccgaggagccttccacagactactagaccatgattctgcaaccattgctaatataggaatggagaaaacctatactctcgacaaaaccagcgccatagctctgtaatactcagcaaataaaatacaaaatgagattgttaaaacagcaattaattatctcatacacatttcagataaatttcagtcttgataaaaatat

SEQ ID NO: 41358 - DNA, 363 bp, Glycine max
tccagagtctgaatccttctctctattattccaaactaacttccaatcaatataaataactaaaccgacacctttttcattgttttcttcaaaaacgccacctgcttcctgggattattacaatttcgccactgctttgtccttttccactcctgtcgttttctcacactcacgttacttaaaatactccctctccatttgtccattcgtttcatatcatatattttccatcatttttttacctaatatatttttattcatgaacaaataataataatgtacatatttcgtagaaaatgaaaaaaataataaaatcatagcttactttaaaaacacaataaaattttttataaatacattaaa

SEQ ID NO: 41359 - DNA, 399 bp, Glycine max
agcttcatggagtttgtacagtctttttattggatgaaatggttgtggtgacaaaaagtttgaagaaatatgagaaccctataaagacaaccaattgagttgctacaaaattccaataaaactgtataacatgcatggtaatttctgctatttagcatgatgtaaataagatcgaaaaggaaaggaatataatctgagatataaatgttagctagtctaggataaaatacttcaaagtataaagtgcaccaaagcaataaccgaaaataattggttattctcgatcttgacatcatttatgcatgtctttaatatagatatattgattatgtttgaagctaacagttaagttattaatagctacgagttaaaaaattaaattattaaattagaaatgtc

SEQ ID NO: 41360 - DNA, 362 bp, Glycine max
tgtaacacattacagctcaaattgcggattgatggtgatcagaatcagaatctgcctgatcccaaagatatcaaatgcttggaaaggataggcagtgtaaatgttgaagctgattccatctacgaactttacaaggatcccagccctataatggaacctggttctgtttggaaagacattgttctttcaccttcaaggtataataatgatcagaaggaattgaaggaattcattcagaaaatagaaacatccatcagaaaacggtaaccattgatattgctgcatgatattttcctcccaaagccaagttttggagtatctaacaaagtttgagttaccaagttttgtatctgctattccct

SEQ ID NO: 41361 - DNA, 381 bp, Glycine max
actatttattttaggagaaattaatttaaccaaaatatgtaggcttttattattttttttattgcaaattatgggaatataatctttgttttgtagtgccctaagcccacttgtttgttcttcagaaaaatttggagctatgcttttctcacaattttcgttgaaaaagtctaccgtttttttaatttggtttaatctggtttccaaagtggaaatcctgttattaaaaactttttttcaaaatcattttccttttaaaatcagggaaattgattttcaaaattgtttgtacacaagttttgcaaaaattcttgtagcataaactacaatgagctcttaacgttttgcaatttgtatctctcgttgagggattcttggaat

SEQ ID NO: 41362 - DNA, 360 bp, Glycine max
tgtttatagttatcatttaggttaaggatatttactaaggggaactgcttgaaactaaaaaactataacatggcattcaaaagaaagataacactcacttgtttccttgctcttgaatgggcaacaggtataaccataaaactaatccctacatatgcaatttaaccttaaaattagaagtttatttcgacagaagacaatgcatattcattcgtggaccttaacactaatttccattatatagttctctcaattaggttccaagcctacaatccaaacaaaccctaatttgttctctgaattagattctaagtctacaattcaaacaaatgcaaatactaactagagaactcacctcgc

SEQ ID NO: 41363 - DNA, 417 bp, Glycine max
agctttattaaccttatcattttatatgccagttaattatgagaaaatggtctttaacatgcactcaactaataatcaaaatgattaattacaatatagaagtgaaagcaataaaaagatacaattaactgaataacatcaaagaactttattaaaaagagaaactagagtacatgagtacaactacatcacaatctaaattctaaggggtttagccaaccatgttcatagaataactaaacaacatacaatattacattaaaaataaaagagattgaaaacccttatagattcgaatcctaattgttcctggtgtagttcttctttcaaaatctcttatcgtttgtaaaatgcctcctgaatttccaatcttacaaattacagactctaacttcttatctataaactcctaaagat

SEQ ID NO: 41364 - DNA, 365 bp, Glycine max
tataacaagaatattttggcctttttcacagcttgatggtcgcgtcaaaactttgcaccctaacatacatgggggtatcctggctcgaagggaccaaaaacatcatatcgaagccctcagtactcatgggattggtaagttatgttattagctgttattacaagtacgttgtgctagaaatttgttgtgttacattagagttgtgatcattcagtttgtgagattgtatttttttgcttttgcttaaagttttccttttcaggtacttttgatgttgtggtggtgaacctgtacccattttacgataaagtcacatcagctgggggcattgaatttgaggatggaattgaaaatgttgacattgg

SEQ ID NO: 41365 - DNA, 324 bp, Glycine max
catgcaagcttgtacaaccggtatagcttattataccaagtcattgatggctctaggcacaatcaccagatatgttgggatgaatacacaatgactaacaatctattgtattacacacggataaataatatcaacacttattctattctctcacgatgagcaaagtatcttgagtatgtttatccgctatcagaattgacttagctagcttttttctccaagaaagacataatgagtgcattaaagtcatgcttcatgtctataaagcttctagggtatataggcctcattcaatcaggtatatgctgactctaaacagacata

SEQ ID NO: 41366 - DNA, 327 bp, Glycine max
tgaagtcttttagtgctaaacttggatttattgttcttaaattggatgagttagtggtaggaggttctgccgaggtcgtggcccttgagctgctcaagttgcttggctttcaagaagggaaggtgctggacagtgaccactttgatctggttttctttcacaatggagctggtgaacaaaaagtggttgctgctgatatgggatatatggatgccttggttggaggggtaatgagtcaaatgcaacctggatctgacatcagttcacgtctgcacttgtccgttgtcgtgagctatggcaatatcttggagggggatgattctaagt

SEQ ID NO: 41367 - DNA, 397 bp, Glycine max
  unsure (1)..(397): unsure at all n locations
agcttgtcatctctcagactggcttattggcttggtaaagagaatgaaatcagaatcatgaatttttagacaaatattctacccggaagagcaagcactctaagtgatgtttaataaatatgttatagataatttgttgaaaactcggacaaataaaattctatccatgaaagatgaaccttaaagaaactacaaattaatggatagcatatgttcatagatataattaactctttacagtaatccacccttacatattaaatttgaagtttaattttaaaaataactcatcattctaagtttttcattttcaaaaaaagaaattgagcattcttccttttactaagtggtgggcatagtgtcaaaaaaatacgttgctacataatatntttaaaat

SEQ ID NO: 41368 - DNA, 353 bp, Glycine max
ttggttagccatgccttcttattcattgatagtgttagttggatagacgagcgagaggtcatacttgatgcctgcgcatacttcaatgtccaccgtttcaccacatgcatactgtctgctgcaaccacattcggatatgatctgaaagttgcctctcgctggggattctgctgttgtaatcctgtattcggtgtcatatgttctgctgtcccctttcctttacctttgtctctctcttccaccttttctatggctacctcctccttttcctggtgtttcttgttgactgtctctatcggattccattcccttccatgcatcgggatgttcacgtgtagctttaatcctccaag

SEQ ID NO: 41369 - DNA, 284 bp, Glycine max
  unsure (1)..(284): unsure at all n locations
gcttgagttttaggttaagtcacttattttattatggatttgacttanaattcaaggattaatcaccaaagaaattacgattaactcatttagtttgaatattggttgaattgaactgtgatattgattatgaacgaattacatacataaaattctttggatttcatctcaataatgcttttctgctatcaaatatgattttgctccaaagtttcttcagaaaaaccaaaattggtttattttgtcatagcgattcttatttgatatacggaaactttttaaaa

SEQ ID NO: 41370 - DNA, 365 bp, Glycine max
  unsure (1)..(365): unsure at all n locations
taagccattagatcaaaattctaattttacattttttgtgattngattcaataaatgccctattaaaagatatatttttcttctacattgggtaaaaaataatatttcaacttgattttaaaatgtttctccaattcaagatacttgcacgatatccataacatgcatgatcatttggagtatccttttattatatttcttttttttacacaatttggagcacaaattgaattttctatgcgtgatctttaggaaaaatgtactttgattttgtatttgcttttacttttttggcaatggccgaattgaaaatatttaattgaataagctttttcaaattgttgaatttgacaataatacatgtg

SEQ ID NO: 41371 - DNA, 394 bp, Glycine max
agcttgttcgcacatcgttcgcgttatgatatccactcgacaggtttgaagtagaggagaccttcaatcctataacgcaatgcggcggacaaaaatgggcagttaacttgaatggccattattgtcaatgcggaaggtattatgcgcttcactattcatgttcacacattattgcagcttgtgcttacgtgagcatgaactactaccaatatatagatgttgtttacaccaatgagcacatcttataagcatactccgcacagtggtggcctcttgggaatgaagcggcaattccttcttttgatgaggcatggacactaatccctgacccaactacaattcgtgcgaaaggtctgccaaaatcaacaaggataaggaatgagatggattgggt

SEQ ID NO: 41372 - DNA, 364 bp, Glycine max
gatgaaactcttttttctctttttctctcatttattcttcattctcctctctcttttcacttatgttctttctttttcttgcacaaattcgttgcaatttcattggtgatgatcatgaaagactaaacactcaatcaatccaaggatacactccaatcataatggagaaaaatagacaattaaatcttttttaaaagtaattaaacctaaaaaataatatattataaaaataataagaagaaatgtttgtaacatgttttctttttattgttttagaattttaatttaatttagttaataaattgaatgcaaattttatttcattctctatttaataaaacttactattaatttaatattaata

SEQ ID NO: 41373 - DNA, 282 bp, Glycine max
ataacttatgacacagaagtccgattcacgcgcctaatatattcgagacgctcgaaattgaacaacgaaagctctcgagaaaatcaagtggtcataacttttcaaacggaagtccgattcaggtgcataatatatcgagacgctcgagattgaacaacggaagctctcgagaaattcaaatggtcataacttatcacatggaagtccgattaaggcgcataatatatcgagacgctcgaaattgaacaacggacgctctcaagaaattccaatgggcataac

SEQ ID NO: 41374 - DNA, 365 bp, Glycine max
tgaaattgaacaacggaagctctcgagaataaaaaatggtcataacttatcacacggacgtgcgattcaggcgcataaaatatcgagacgctcgaaattgaacaacgaatgctcttgagaaattcaaatggtcataacttgtcacacggatgtccgattcagctacataatatatccagacggtcgaaattgaacatcggaagctctcgacaaattccaatggtcataacttttcacaaggaagcccgattctagcgcatcacgtatcgagatgctctgaattgaaaaccggaagctctcaagaaattcaaatggtcataacttgtcacacggaagtccgattcagacgcataatatatcaagat

SEQ ID NO: 41375 - DNA, 360 bp, Glycine max
  unsure (1)..(360): unsure at all n locations
gcttgaaatgaggaagtgtggaatggtgatacttcctacttttattcgttgaccacagagtggtacctggagatatgtcgcgggggtcaaaaaaccttggggacgtcaggtggggtgctattgcccaaaaccaagcttgaccaatcccgacccaacccaggcatagtcagtcagtgagaacctgtgatgtacctaaacaggcgagctcctggcagttaaccgataaaagaacaaagaccacaaagcaaggaggcttgtgtggtggctggccaactgtgaatcttgagtgatatatgggatatggcctctggtaatcgattaccaagggtaggtaatcgatacaaggcttanaaacgagat

SEQ ID NO: 41376 - DNA, 367 bp, Glycine max
tcttggcaatcctcattccagcgatcagtctagtttttgcgtaagagcttgaacaatggctcacaaatggcggtgagctgcgatatgaatctggcaatataattcaagcgtcccaggaaacctcggacttgcctctctgtacggggttctggcatctcaaggatagccttcaccttttcggggtctacctctatccctttctggcttacaatgaaaccaagtaatttccctgatttgaccccaaaggtacacttagcggggttcaaccttaattgatatttcttaagcctttcgaacaacttccgcaggttgacaaggtgttcttcctcggatttagatttagcaattatgtcgtccacgtagacct

SEQ ID NO: 41377 - DNA, 258 bp, Glycine max
agctatttgtacatgcaaccaacactataataacttgtaatttaaatgactgatatttaaagcaactatgtaacaaataactaaatcgttcaaaatttgcagaaattaaaacaaaacagaatttaaacatcatgctcatcctatggctgaccttcatataaatctagcacgggctccatggctattactaacggtatactgtacttagatatatgtgcaggggatggctctgccatggaatctgatgaaaatacctcc

SEQ ID NO: 41378 - DNA, 370 bp, Glycine max
tttgtgctctgataccacttgatggaagcttgcttgtggagcttctatggaggctggatctttgagcttcaatgaggtcctttaatggtgattttccaccatggagatgcagcgaaagaaaaaggagaagaggtaagaggcggagccatccactagggaataagccatggaagaaggagcttcaccaccaagatgagccttggataagaagcttggagaggatgcttcaatggaggaaaagaaagagggagagaaagagagagggcggagcacgaaattgaaggaagaaaaaaggagagaagttgaactttgagttgtatctcacaagactctcattcatcaaagttacaacaagtgttacacatgcttc

SEQ ID NO: 41379 - DNA, 271 bp, Glycine max
attaacaacttccgtttgcccatcggtttgtgggtgacaagtggttgaaaataacaatttaatggccaacttgctccacaaagtcctacaaaaatggcttatgaacttagagtccctatcactaacaatgctccttggcaaaccatggagtctcacaatctccttgaaaaacagatcagtctcatgggaagcataatcaacttttttacttgggataaaatgagccattatataaaacctatcaacaaccactaaaatggaatctctacca

SEQ ID NO: 41380 - DNA, 373 bp, Glycine max
gaacctcaagcttacagcagattttagtaatgacccacttatctagaattaaaataacttaatgccattaacctagggaattaaaacaaacttaatggctgagtgtaactgaaattgtggcaaccaaaagtcacccccaacagccaacaagtcagccaccatttggtctcccaaaaggctgatgcctaggttgccaattgggcccttattacaacttgaactaaagcccttttagttgattaacccaaaacatatttttggtcagccaactttacaaggattgggccattatttagacaaactaaacactctaaaattgaaacaaagtggtgtcatttagtcctcctccatttgggccatgatacaactcacc

SEQ ID NO: 41381 - DNA, 369 bp, Glycine max
attgggagtatgactgacaagttagtcccttgtcagattgattgtgaaagacaacattaattgtatcccaatgagagtgtgatccttaaattttgagagaaatgactatcctttagtactcgattttgcatgaatcttctgaagtattgactcaatgcacgaaattgaggatgatgaaggccatatttgattgtgatagccacttagccacaaagctgaccatgtgcttgaatgaattatcccttatacctagtttgagctgaatgaatgaatgattgattgaaccctgagcctatacagtgttatctcctgctaccttgacttaggttgtcggagaacatcatccacagaaagcgggttcaaagcaaa

SEQ ID NO: 41382 - DNA, 362 bp, Glycine max
tgccagtgtacctgaagatactattaggttcagcctattatcattttctttatctggggaggccaagagatggttgcattcattcaagggcaacggtttaaagacatgggatgaggttgttgagaagtttctaaaaaaatatttcccagtctaaaattgcagagggaaaagctgtaatttcttcattccattagtttcccgatgaatctttgagtgaggcattagaaagattccgtagcttgctgaggaaaactcccactcatggtaaggaagctagccaaacagcttgcagaaaaatcttctagtacttttggagctaacactgagcagaatccaaaagaagaatgcaaggttgtgatgac

SEQ ID NO: 41383 - DNA, 402 bp, Glycine max
tacattcaatttcgagcttttctatatattacgggactcaatcggacatccgagtaaaaagttattgtagtttgaatttgctcaaggcttcggtattccatttcgagcgtctcgatatattacgggactcaatcggacatcagagtaaaaagttattgttgtttgaatttgctcagagcttctgtattccatttcgagcatctcgatatattacgggactcaatcagacatccgagtaaaaagttattgtagtttcaatttgctcagggcttcggtattccatttcgagcgtctcgatgtattacgggactcaatcagacatccgagtaaaaagttattgtcgattgaatttgctcagagcttctacattcaatttcgagcttttcgatatattacgggact

SEQ ID NO: 41384 - DNA, 326 bp, Glycine max
catttcaacgaccatttttcttttctcggatgagctagagcaaccggtcacatatggagacgctccgcaagttaaacctgagcttttaacttaagcgacccaggaaacccttgacttgcctttttggacggggttcccgcatttatggaatgccttaaccttttcggggactacctttatccctttctggcttacaaagaaaccaagtgatttccctgatttgacccccaaagttcactttacgctggtcaaccttaattgatgttttttacaccttttaaacaactttcccttgttgacaaagggttctttctcggctttaaatt

SEQ ID NO: 41385 - DNA, 383 bp, Glycine max
agcttgcctcaaagaggtccaggaatgtacaaggcggccgaaggaactagttccgctcctgagtatgacagtcaccgctttaggagcgccgtacaccagcagcgcttcgaggccatcaagggatggtcatttctccgggagcgacgcgtccagctcagggatgacgagtatactgatttccaggaggagataggtcgtcggcggtgggcatcactggttacccccatggccaagttcgatccacaagtagtccttgagttttatgccaatgcttggccaacagcggagggcatgcgtgacatgaggtcctggatgaggggttagtggatcccgtttgatgtagatgttatcggccaactcctgggatatctgttggtgctgga

SEQ ID NO: 41386 - DNA, 361 bp, Glycine max
tcgcacttgataatggagacacatgaactgcgcttagcaatgacattcatggtgctccgaataaaggtggagtatggaggattgccttgagggtcctctcttatgcaatcatggaacacagctccaaactcgaaagtggaggacacatgaacaaccctaagcaataacattcatgtggctctggaacaggatgagaatggaggattgccttgagggtcctctcttatgcaatcatggaacacagctccaaactcgaaagtggaggacacatgaacagccctaagcaataacattcatgtggctccggaaccggatgagaatggaggattgccttcaaggtcctctcttatgcaatcatgga

SEQ ID NO: 41387 - DNA, 327 bp, Glycine max
  unsure (1)..(327): unsure at all n locations
agcttgtgcaaatcaagtcactcccgtattttatctctagcatgcattgtatgttggtctcgtcctttgtcacgggaagccggaaggtccatatcaccttcttaattgtacacatggggcactgcgcccccaaatgcacaagtaagaagagataattttccgggctctcgtgtccgtaaaatgcattcatatcatgcaccacataagcatctcttcataacatcataatggacatatcctgcatttgtccgttatcatattccagcctcacattttgcatgagtcatggcatcattatgcatatgcgttcaacaaacttnttgatct

SEQ ID NO: 41388 - DNA, 357 bp, Glycine max
ttataagcgcgggttcgggagacaaaggtcaagcgttcgcgatatgcgaagatgatattccgagtactttggatttggtacgaccatgccctcctgatttccagctgggaaattggcgagtggaggaacgccccggcatttacgcaacaagcataatgtaaacctttacggttttaaaagctctatagttgggcctaggctttagagtttttccttttgttaaggctttgtgtcttttgtttttgaatttataatacaaggatctttcttcatctgttcctggtctctacccattctcattcatttgcatgtttacttctttttctgaaacggcagatccgatgacgagttccccga

SEQ ID NO: 41389 - DNA, 369 bp, Glycine max
agcttgcagtgaaactttttaagtgtgtgacataggagtaagctgagataaaaaattttaggtcatcttgtaaaatatcaacgatttttcttttttcttaaaatatgtttcgaaagaaaatcaaagaaactttttttacaaagataaaatcaaaactcattcctcttataaggatggaaaacaaatttaaatctaaaatataatgtactatatcttatctttaacgtaaataatgtaacacagaaatcttgacatcgcctaattaaaaatcttaatgtaaatagaataatcttaacggaaataaaaaaaattataaaactaattaacatcaatccaaaattaaataacaagcatattctttctatatat

SEQ ID NO: 41390 - DNA, 352 bp, Glycine max
tgttatggtagcctataattctgtttacacatcccttaaagaaggcggattgggaattagatctttaaagcttattcacagatgtgttttttctgaaattcagctaggatgctattactacaaatttccagcttgctgcaatgattcaagatagattttaaaaggaggttttcccatcttttactacattttcttttctatttaccctacgatcaaggattgtcttcatattattcaataaaactcttcatggtagtcaaggatgggagataatataaatttatgggtggacaaatggttatcagatatctatgtgaatcttcacaatattccatatcatttacatagcttg

SEQ ID NO: 41391 - DNA, 368 bp, Glycine max
gcgatggtgcacaacaagtttttccacatccacaatgcgcgcataaacccaccatcctctgttgcccacctccagctgagctcacgtactcccacgtagcccatattctcgtttctcttcacaccgggtccccatcaatcctcccaagcttccacaacatccaagcaaaacaacattcacacagcacaagctatcacagccaagcataacagagcaaaggcagaaaactctgccaaaacaccaaccaaaaatcacagctgtttccactcaaagaccccagtaacaatttccttcgatccaattcgttaaccgttggatcgactccaaattttactggaagttatagtgcaaaacgtacattttgaccg

SEQ ID NO: 41392 - DNA, 367 bp, Glycine max
tggttttgggcaatagcaccccacctgtcttcccctatgtcttctgacccccgcgacatatctccaggtaccactctgtggtcaacgaataaaagttagaagtctcacccttccacacttgctcatttcaagcttgtaagattatggggtacccatcacatgtggtactaggtggtggtcgggccatggtgcaatttaactctgcacatgcactaaacacacataatcccaccatgcccagttgcccaccttcactgagctcacgtactcccacgttgcccttattctggttcctctcatacactgggtccccattaatctatacaagcttccacatcatccaagcaatatatcaccccaaacatca

SEQ ID NO: 41393 - DNA, 243 bp, Glycine max
gagcattttcggggtcgtgaagtgcgtggctactagtgggactttcaaaatccaggtgtgggtggacttctttctctcttaaatttcgtgggtatggggttttgggagatatgatgggtggttttgttagttttctgctgtgtgatgattatttgtgaaagcaatttgctgaaactctgtgaaatcgccatgtttggatgagttagacataccctttctgtttaaggctcttgtgatgatgtt

SEQ ID NO: 41394 - DNA, 367 bp, Glycine max
tctttgagaaaacttccttgagaagctagagtttatctacgcacacccatctaaaaactaagctcacctccttgagaagcttccttgagaagctagagcttagctacacacacccatctaaaaactaagctcacctccttgagaagcttccttgagaagctagaggttagctacacacccctataatagctaagctcacccccatgacaaaaaaacatgaaaatacaaaaaaaaaatcctactacaaagactactcaaaatgccctgaaatacaaggctaaaaccctatactactagaatggccaaaatacaaggcccaaaagaagaaaacaacctattctactatttacaaagaagagtggaccca

SEQ ID NO: 41395 - DNA, 373 bp, Glycine max
  unsure (1)..(373): unsure at all n locations
atgttcataaattgtgtaaaaagttgtatgaaaaagttattgaaatgcacgttaaagtcttgcttttatagactcttcatgtctggtcaagaaaaccattggaagagttacatcttctgatttttattcaaaacttgtcactggtaatcgattaccaaaaccatgtaatcgattacacaaagcattttatgaaaggatgtgactcttcacaattgattttgaatttcaacgttcagatacactggtaattgattaccaatatcttgtcatcgattacaccattttgaaatcaattggaacgttgtaaattcagttaanagcttttgaaatcaaactttgccactggtaatagaatacaggaaactggtaatcg

SEQ ID NO: 41396 - DNA, 365 bp, Glycine max
tctagagaaagctacatgaagctgcctctgtacaaacactgcccagcctttgttaaccgttggatcttctcgaaatttggtttgcagcttcacaagacacttgtccatgacctgaccgttgggatctttgagaagatatctggagtgtgctagaagcttccgttcccgagagcatctcttatttaagcatttcagccattgcattcgtgtagcttaggaaaaacgtcatttcttcttctttctttcttccaaagccatttctaaagttccaagaactttctccatcacccacaaccaccattagccaccacaaaccatcgttgttctccacaccgagaggaacccttcaaccgaagcggaatctt

SEQ ID NO: 41397 - DNA, 374 bp, Glycine max
agcatgttaacatactcattaaatgtttttatcttcttcattttctgcatcttaaattctctaacctgatatagggcttgccgtccctttaaatcctttcatctccttcatattcattatggaagaaactccatattttatatgttgattagatggtcatgattctagtgaatatttcttttgagacaacaacaaacagagtagcttttgtctttgactttcttgctttcatttcttttttattttcatctgacccactgttggattagttggtaagggaagaacttcttaaacttcctcaacactttccagagatcatttgcttaagacggcctccttctcgctgccagattgatattatcgtctcaaacaca

SEQ ID NO: 41398 - DNA, 359 bp, Glycine max
tggcagtaatttgaattctgatatgttctctctcctttgatacagatgagtgaaaggaattcaggatgggaggatttgatttttattccaccaggaaaaagtcgctctcaacacatacaagaacttaatgaatgattcccagggtgcgaatttaagctaaccatgatttcatgtggttttcttgagcaaattggatgttactgttgtgacaatttagtcggctggtgagatgctaggacctctgtcttcaaatagttgtgctcttccttctgaggcgaatactgcactaagattctcagtggatataaggtaaatgtgtatgtgagaggacgtaaacgctaacatacatttcaattaag

SEQ ID NO: 41399 - DNA, 356 bp, Glycine max
agcttcacagctttcaccgaagtttgagcacctattgttattctcatcttcataagcagattccggcttgagcttttctaattatgcggtaccaaacttcgtatgatcaccgctatcaaccttagagcgaaggccaaatggaggtgctcaatgatgtataggaacaatacttatgtagcatcattctccacaaatcatcccaatggggtaaatttctcagccttacatagtggtgttacaacaccacgtgccattcctccaccaactggttcccatacgaggtaacttatggcaagcccccaccgggagttccatattaccttcccggtttgtcaacagtataaatcgtggactta

SEQ ID NO: 41400 - DNA, 349 bp, Glycine max
aggaactatgaacctcagcttcttactgaaaaggaagagcttttcttttttctcaatgaccgcaactacattacctcttctactgatgtgtacaacactgccattacttgctacttacctactaccaaattatcttctctcttgccaaactacttgatgaaatccccatggatgatttaataattttacgaaaaacaataggcttctgaagatatctgatgattctgtatgttttggttcttagagaaaccataatgctggaaattaatcactcaactgaaatggttgtaaaatactttaactatattttttaaataaatctttaacaccatacttgaaaattaccact

SEQ ID NO: 41401 - DNA, 329 bp, Glycine max
ttgtccccattgacgatactataatctatcacacggatctccatctctgtatactacactatatacttaatggtttttttgtaaccgtttgttacaaaggatggggtatatatagggcgaaaaataagatctaaatctacttcaaaaattgtaagaaaaaaggctatctataatgatgcaaaagctatttcactgccatcatgtgatcatgtacaattgtttattcttctgttccaatggataacccaatatcgcttgtacacaaagtcttggattaatttcttatcttcaccttacctcaagtcccatatattcttggtattgattta

SEQ ID NO: 41402 - DNA, 349 bp, Glycine max
ttcttacgtcttgagaagactcatttcgtttatgatccacatacaggcagattgcagatgcactgtactatagtaacaaagcgctgcacgtatttagttaatgcccactaaataaaacacaactaataaagcacatgtgaggtatggcccacccaagaggaccaaatggtagccatatgacatcccaacggaacttaggcaacctaccaaaaaaattattattatttaacatgaaaagatgagaagcacctacagatagcagaaaacaaaaccgaagagtgtgcatgaagcacttgtaaacatttgtttgttcctccttcccactactactgtgtacaagttgctttta

SEQ ID NO: 41403 - DNA, 181 bp, Glycine max
ggtccacattgtgattagtgcagtattatgtctcgttagataactatttataccccctgttgacatgcttaagccattatgcttaagtcatttctcgcttaacttatggaataaatacatttccaccgaacgtttgaattgttgtatccagtaacttctgataaaataaatgccgaccgtt

SEQ ID NO: 41404 - DNA, 363 bp, Glycine max
tgtgctccaaacagatgcacagaacagatttgttttcacctaacttcatggtaatttacataaactcgtgtcattttttttaatttgttattgtgtacattagtaaaatttaactaagaaaatctaatttaaatttattttcaaattttctatcaaattaaacacttcaaaaacatgaccagatacaaggtaagattcactcactaaacctccaaatttgcctactcagtttcttcagctcagggtcaaactcatttctgaaatgacgcccctgctgaaatcaaataatattctgtttttttcactcagatgtttgacctctttcaaaagtctgacccaacttaagcttccggggaaggggtt

SEQ ID NO: 41405 - DNA, 397 bp, Glycine max
  unsure (1)..(397): unsure at all n locations
atggggaacccattatatgtggtactaggtggcggtcaagcgatggtgcacaacgagtgttccacattcacaaagcgcgcataaacccaccatcccctgttgcccacctccaactgagctcacgtactcccacgtaacccatatcctcgtttctctcaacaccgggttcccatcaatcctaccaagcttccccaacatccaagtaattcaacattcatatagcacaaactatcacagccaagagaacagggcaaaggcagaaaactctgctcaaaactccaaccaaaatcacagcttttctcacttaaagaccccagtaacaattcattcgttccagttcgttaaccgttggatcgactcgaannatatactgtaagtctctaatacataagcctac

SEQ ID NO: 41406 - DNA, 363 bp, Glycine max
tataagaacaaaattgccttaatcattttcaaatatgcatgtgaattaggacgcatcaacaagaatcaagccaaggctattgtgcaagcaatcaatggggcaaaacacaccaaatgattataatgatggatggctcaaattctcacaaaggtaaaatcatcactttcaaattgagctttcaaaactatcatgacatgtagagaagaatcaaggatttcaagtcacaaaatgtcaagaacttatattttcaaaacaattacccatttcttgaacatatcctataattcaaagaaaaacatgcaaagtcgtacgtgcacacaaaattgacccaaaatattaaactgaaaatccgacgaaactaac

SEQ ID NO: 41407 - DNA, 370 bp, Glycine max
agctgtcttgagaaaacgaccttgagatttttctttgacaaaactaccttgagaagctagagcttatctacacacaccactctaaaagctaagcgcacctccttaagaaactggcttgaggagctagagcttacctagacacacctctctaatagcaaagctcacctccttgagatgagaagctagagcttatccacacacccctataatagctaagttcacccccatgactaaggacatgacaatacaaaaaagtctctactacaaagactactcaaaatgccctgaaatacaaggctaaaaccctatactactagaatggccaaaatacacggcccgggagaagatgaaagcatattatgatatttac

SEQ ID NO: 41408 - DNA, 365 bp, Glycine max
tcttatccaaggcaattcttggtggtgaatctccttcttccttggcttattccctagtggatggtgcctcccctatcctcttctcctttgccttccgctgcatctccatggtgaaaaatcaccattgaaggacctcattgaagctcaaagatccagcctccatagaagctccacaagcaagcttccatcacgatgagtatactgatttccacgaagaaataggtcgccggcggtgggcatcactggttacccccatggccaagtttgatccacacatagtcctcgaattttatgccaatgcttggccaacagaggagggtgtgcgtgatatgaggtcctgggtaagggtcagtggatcccgtttg

SEQ ID NO: 41409 - DNA, 376 bp, Glycine max
  unsure (1)..(376): unsure at all n locations
agcttcatggtagagggtgagccttgtttaaactgttaggctactaccttgtgaccaggtcatcataggttcaaatcttggaaataggatttttacttgactgcatgcatctaccctccctagtccccgttgttggatcgaatggcctcagaataattaagaagaggggctgaattaattattcataaacctttactaattaaaaaattactcttctaaggcttttactaaattgttaagagaatgaggagtagaagagaaacttaacaganagtaaaaacagaaattaaatgcacaacgaaaattaaaagagtatggaagaaggagagaaacacacaagagtttttatactggtttcgcaacaacccgtgcctac

SEQ ID NO: 41410 - DNA, 313 bp, Glycine max
taagagagaagtacaaacccttagtatattacggttcactcaaactaagctacatccaattctctttcacaaacttgtaaaaggttccactaatcaagactcgattacaaacaattattctatcctacctgtcgcaaccaacccttcggcggaagggcaatgcgagactcatgggtgcgtcttccaagggaggaaaacgcgcggagttctcccttaacccatttagtctgaagttgttaaacaaccctacccttagaatccggggctaataaaggatatggctgcatgttcttttattcttccttattgattt

SEQ ID NO: 41411 - DNA, 404 bp, Glycine max
  unsure (1)..(404): unsure at all n locations
agcttctacttatgtggcagggcgagcttctttcactttcttgtctccaacgcgagctttgaccactgctcttccttcccgcgatgcttcttttcatatccgcctgagtgggcttatagcctaaaccatacttcccacgatttcctttggcatttatcagactagttatgccgccattgtccttgcctaaacccattccgggttcgtaaccgttccctaacataactcgggccatcattactgctgcatcggacaggcaaggctgcccagagaaggagtccacggaggaaatgctgaccacctcaaaagactggaaagtggtttctaacgattcttctgcggcttccacataaggcatagaggatgggcagctcaccaagatgtcttnctcgcctgacacgatg

SEQ ID NO: 41412 - DNA, 353 bp, Glycine max
tcttatccaaggctcatcttggtggtgaagctccttcttccatggcttattccctagtggatggcgccgcctcttacctcttctcctttgtcttccgctgcatctccatggtggaaaatcaccattaaaggacctcattgaagctcaaagatccagcctccatagaagctctacaagcaagcttccatcaagtggtaatcagagcacaagagcttcaagtaggtgctccttaaacctccattaatttttttgctttaccttctcttcgattgttgtttcttcattttttctccacgtatctcctcacatgtcttgtgctaaatgttgttaacatgattctttagattttccac

SEQ ID NO: 41413 - DNA, 521 bp, Glycine max
  unsure (1)..(521): unsure at all n locations
ctcataccttattttctcctagttacacactcaaccccattcctcccagagaagganattgagcttcatcgtcccggagcataagaaaacggcagctgcaagcatgtgctgaaaccctcctctgacaattatagaccaactccatctgctggtccgggcatgaaaaacacgaataagcgctaccgccaacagtctcttaggagttatcacagtccaacacaagctctggaagtacggcaatgccaagttcttgacatcacgttgaaacccaaaatggcagcttaagtctgagctaaacttttgtactctgccttggtgctagagcaagctaccacttgatgttttcgtgaccaccaggagatcagatctggacctaagaagaaggctgcaccagaggtggatcttgcgtcatcaaggtcagctgcccattcagcatctcacaaagactgcagactgataagctgaggaagaaaggctgcccaaatctgatccaaagtgcagggagccttcagaatctgagg

SEQ ID NO: 41414 - DNA, 427 bp, Glycine max
  unsure (1)..(427): unsure at all n locations
aggggnagggnacgnattgaaactgatatcgtgacgncaccnanagaatactcaagcttgacatgggtgtcatggtgagacannntctctctatttttcttcccgccagaaataatattatttatccacttggtttgctttcgtataattctttttactgcagtattttgtaaaataagtataattaaatctaaaatgacaattctaacaattaaccgataaagaaaataatatatatatatatatatatatatatatatatatatatatatatatatatatatatatatatatatatatatatatatatatatatatatggtgtggactctatacttactgacaaataaatgtctgctgaaaaaaatacatatcttataattatcttaaataagtgaggtatatatctttatgttttaatagtaaa

SEQ ID NO: 41415 - DNA, 474 bp, Glycine max
  unsure (1)..(474): unsure at all n locations
tgaacccggtnnnntttgacttcgatagacgncngatcgatanagtcaacctgcacgcatgcatgctatacaatgcaaggaggcattatttcttgttaactngacttggccattggcttaagcaaatattctttaagcttaatgaataaaatgaccgtgtctataccgaattgtactaatccgaaaaataccggaattaaaaaggaatacgaaatttcagcgatcccgtaaagaagatcgagtgcattgcatgcgtactcgaaaaaccattgatattgttgatccatcactaatgatttggaatattatttaacctaattcaacgccgaattatgcttcctttgagacaaaaacatcctagtattttatgatatagcaacctctgcatgaacaaaaagcttagtatttctggtagcttactcacaaaggataggccttactagcaacgttttttttttttgacgaggtattaag

SEQ ID NO: 41416 - DNA, 226 bp, Glycine max
ctgccggaacggatttgggcttccatattcttaatgacgatctgtaaatttccaccatatgcttcattgctaggagtaaggcttttacccttttttatacattgggaaatgcaaggtctcacactcaagggaatatcatctacatttaaaagttcagtcttttacatcaaaatgagtatccatctagaataagtgatgcttgggcgaaaccataaatgacaattta

SEQ ID NO: 41417 - DNA, 400 bp, Glycine max
  unsure (1)..(400): unsure at all n locations
gctttacagcagattntagtaatgttctactaacctataattaaaataacttaatgccattgacctagggaattaaaaaaacttaatggctgagtgtaactgaaattgtggcaaccaaaagtcacccccaacaaccaacaagtcagccaccatttggtctcctaaaaggctgatgcctangttgccaattgggcccttattacaacttgaactaaacctaactaaagcctttttagttgattaacccaaaacatatttttggtcagccaactttacaaggattgggccattatttagacaaactaaacactctaaaattgagacaaagtggtgtcatttagtcctcctccatttgggccatgatacaactcacaaccttggacttttatccttgaatctt

SEQ ID NO: 41418 - DNA, 368 bp, Glycine max
tctccacacaggcgatgttcccatgcattgttgccaacataagcggagtctaaagcattcccgttttttctttcttccatattaagcgcaagaagtataaacccatatggaaacaaacattgaaaatatgtttgcaaattaataatgaacatcaattttaaaaagccaaaatatgtttgcaaatatgggagcttacaggagttttgttccatttaaaataattgaaaacgaaggaaggaggcatgatttcatttccaaaactagtgatatgaaactcaagcaacacgagaaatgcaggtacctaataagttaacttttcaatgggattgcgaaacttgcaaagcaaagaaacaacattggagaactct

SEQ ID NO: 41419 - DNA, 253 bp, Glycine max
cttcattcaaacgtcagttaacccaacacctgctctgttattgaatgcaatcaccccataatgaacatatagcactttttctattacaagcattgtttcggataataacgtaaaatatttaatttataaataatttaattggtctgattatatatatattaatgactagataaaacttattttttaataatttattactaaaaaatatttatataggataacaggaaattatatctaaaaatagtttatgcat

SEQ ID NO: 41420 - DNA, 365 bp, Glycine max
ctgtgacatcaagaaaatcatgtttcagattttattttcctggcaacattttccaaaaaaactgattgaaattaatttaagtttcacatagtaatcacagtcttaaagcataaaagaacccaaacatattattctggcaaagctgagctttattaaaatcttaagtattaattaaacagcttatatttgttgcttggaattgtagattaacggcgtcagaacatatatcatttgctgatgtggccgcatgtgggttaggtactaaatatcagacatatagctaactgatacaaaatcatatgctaggaagccaaaattttgatatccttgcatagaagagctggctcaaatatattgaaaattat

SEQ ID NO: 41421 - DNA, 318 bp, Glycine max
ttccaaagtggggattggaaccgataacggacttggcgccccccccatactgtaaatggacacggatttgatggtgttgcaagataacggtttctgttcttgctctcattttgggtgagtgaggaactcgataagtgtttatgaggagcatagtggttttattgtaagactgttaatagatgtgcttaggaggccgaggaccttggaacactcagtgttaatgctaatgctaatggccgcgataattgtaacatattggcgaaattttaacacgttgctaaaaactaatgtagttgagactatccgctcaacagatcg

SEQ ID NO: 41422 - DNA, 371 bp, Glycine max
tcaaattggcgggttcaatgttgtttaagtatcatgtttatataaaagaaaaaagccttttgaattgagtgttttgttcttgaaaattgaatccaaccacaatgcaaagtccaactcagatgcaaactcaaaacaagcaatctcgggacgaatggaaaggaaagcaaggaaaataacggaaaggacatgagaggagaaaatgacttgttgagaaaggtatggaatgcaagagagacaatgatcccaccactctcaattcctaatcttctcagtgcagaaaagattcttactaatgttgaatgtcatacaaatgctcatcaagagggtttttttttttttttttttatcgaaatgttactgtaacttttcaa

SEQ ID NO: 41423 - DNA, 380 bp, Glycine max
  unsure (1)..(380): unsure at all n locations
tcttcacttattatcatcacacagcagaaaactaacaaaactacccctcatatctcccaaaaccccatacccacgaaatttaagagagaaagaagtccacccaaacctggattttcgaagtcccactcgtagccacgcacttcacgaccccgaaaatgccctcctttcgcgatttggagcagaaatgagcaccaaaggttggagctttgttggggtttcaatggagaatggaggagaaggaaaaagcaacgtgaggaagagggagagcttctgaattttctgttttggctgagtgaggagagagaanagctnnttggtcttanataanaggttgtcctctntntctattattttattcaagctctaccacatgtccctat

SEQ ID NO: 41424 - DNA, 358 bp, Glycine max
tgagaatggagaattgcactaatcaatctctacgcatagctccaaactcgaaggtggaggacacatgaacgaaaacacaattcatggggctccgaaaaaggggttgagaatggagaattacactaagcaatcactacgcatagctccaaactcgaaggtggaggacacatgaaagataacgcaattcatggggctccgaaaagattgagaatggagaattgcactacgcaatcactacgcatagctccaaacgcgaaggtggaggacacatgaatgaaaacgcaattcatggggctccgaaaagattgagaatggagaattgcactaagcaatcactacgcatagctccaaactcaaa

SEQ ID NO: 41425 - DNA, 362 bp, Glycine max
agctggttcgaggtacttacctgttgaatatcgaagaacgaatgaagaacgtcgaagaacggttgaaacctttgcgaaattcttcacggaaaacgttacggaaacgtttcggaagcgcctcggcttaaattttcttcacggaaacaatttttccaagcaaattcgaaagagagagaagtgcctaaggggctgaacccttttcttcttcacttcctcccctatttatagcaaaataggggaggtgtttgccgcccagctcgcccaggcgagccaggttgcttcctccagaagcaacagccttctggaggaatattctagagggcccaagtgggcttgggtggctattgcacccccatttttac

SEQ ID NO: 41426 - DNA, 360 bp, Glycine max
tcaattggagtcttgtcttttacaaacttagttggacatctgttgagtatgtaaacagcagtgtagactgcttcagcccagaatgtgttaggtagtcccttctccttgagcatctctagccatctccataactatgtgattctttctctcggacactccattttgttgaggagaatatacgactgtaagttgtcgcttaatgccttcatccttacaaaatctttcaaactcgcgagaggtgtactctttgtcgcgatcacttcttaatacttttatccgttttccactttgattttcaggaagggccttgaactttttgaatactccaaagacttctgatttttcttttagaaaatatac

SEQ ID NO: 41427 - DNA, 255 bp, Glycine max
cagcttgaaattgataaacggttgtttatgacaaattcaaatggtcataacttgtcactcggatgtgcgattcaagcacattatttggtcggacgcttgtgattgaacgtggaagctctggtccacctaacaccgccataactttatacatggatgtacgattgaagcccatgatatatgtagccgctcggcattgaaagcggcggttctcgagaaatctaatgactcataacttttacactccgatgtccaatt

SEQ ID NO: 41428 - DNA, 361 bp, Glycine max
tagaaaacccattgaattgaggggttttgtacacctagattttgtgttgctgtggtttgaagcttgaccttggtttagacatgattgatacatgatttgggacttgtaggatttgatttgggcaagattggatgaggggaagtgtggttttcgaaatctgcattttgtgcagatttttgctgtgaaattgtgcagcaggattttgcacaagtgcagaaaaatactaggcatttgctggttgtggaaagagcagtgcagaatgagttctggatgtttgctagtagatcccaacggtcaaaatgtaggcttatgtactagagacttccagtaaaaatttggagtcgatccaacggttaacgaa

SEQ ID NO: 41429 - DNA, 388 bp, Glycine max
  unsure (1)..(388): unsure at all n locations
agctngtggtctaattagattagtattaatataaatnggataatatatgttagaatatgtcaactccttaaatgaaactaattacttcaatgaattagcctctagttcttggtgaaaagatattttgagtttatctaaaacatgtataaaaatattaggcagaaaagaaaataaaaactgtttcatacacctttacttagagattctcttatctagaccattaattaaactagaagatacccaaaacgtttgttaaaacagttgatgttgatgactgagtcaaatttggaaaactcatcacacggctaagagtgcatgccgacctctttcttgtttccactggctatcaatcatgcaagttgatggatggttgatatataacatacca

SEQ ID NO: 41430 - DNA, 361 bp, Glycine max
tttgcttctctttctctcaacacttaagttaatataagcaaacatttcgttttgcctatattttaatgatgtgaatttgttcattgtttaaagaaacaaataatgagttggctgatgagcactaggagtggaatccttgcatgagaaagatgtggatcacacaccccctgggtaaagaaaaaataattattttctttcaaaagaaaagcgtaatcacttcaaaatgtcctgctcattgaaacatacggtgcgtgattagtattagatgcagttcattctacatgttgtagagtacgaaaaagtatagcaggacaggaacataatgcatttttttattataatttctttacttcttttttga

SEQ ID NO: 41431 - DNA, 103 bp, Glycine max
  unsure (1)..(103): unsure at all n locations
agcttgcacttgaggaggnatttatttttttttctctaaaacaaacacccgatacacaaagcctctgggggaatcacaagctcttcgttaacatacatataat

SEQ ID NO: 41432 - DNA, 363 bp, Glycine max
ttcttgagaaaacttccttgagaaacttttttgagaaaacttacttgagaagctagagcttagctacacacacccctctcataactaagctcacctccttaagaagcttccttaagaagattcccaaagaagatagagcttagctacacatacctctctaatagctaaggtcacctccttgagatgagaagctagagcttagctatacaccccctataataactaagctcacccccatgaaaaatacatgaaaatacaaaaaaaaatccctactacaaagactactcaaaatgcctcgaaatacaaggctaaaaccctatactactagaatggcgaaaatacaaggcccaaacgatggaaaaa

SEQ ID NO: 41433 - DNA, 408 bp, Glycine max
agcttcccccttgttcattattttttttaacaaaaacataattgtgttgtgtattttactcaaggaaaatatgttctattgtgttgaaattttaagatttttaattaattatgcacattatctttatattaatcaaattaattgagatataatttattttttaaaattaaaattaaatacattagatctaaggtaccatttataagattaattaccttaattattacatgaattgtctgtattaatagtaatcaaattattttttttgacaaaataatacaattaattatgatactcattattttcataattaatttgagtataattaagaatgataattttcgccatcattaattcaaacataaattacacaaggtgacgtgtgagggtgacgttatttaattaaaa

SEQ ID NO: 41434 - DNA, 347 bp, Glycine max
tgcaagtgatagattgatgttttttactgttgcttttgggattttggtctggccttactaattccgtagccttgagcttacatgggtaaatatttcttatcaagttattgtttaaagcttcaataaaataatatagttacggggaaagagtgtcaatgacttagattataaaatatctggtttttgagtgagaaaaaatagcaactttttaataaaagtgttaaaaaaaacattattttttatacaagataaataaaatgatagtttgtagctcctttcaacattaatatcatctaacaacccagtcattttggcattagaatctgcacataaatctggtattaaaa

SEQ ID NO: 41435 - DNA, 346 bp, Glycine max
  unsure (1)..(346): unsure at all n locations
agcttcgttctagaggtgatggaccttctcangtcttggagaggatcaataacaattcctatagcttggcctcccagaagagtgtggagatagcatcacttttaacatttctgatataattccttatgtaggtgaagctgatactaatgaggaggaaccaacatatttgagctcaaatcctcttcaagggggtgggaatgatgcaatcctccctaggaaggaaccagtcaccatagccatgagcaagaggctccaagaggattgggctagagtgtctaaagaatgccctacggttttcatgaaccttacggtagatttctgagcccatgggcccacgtccgaactc

SEQ ID NO: 41436 - DNA, 356 bp, Glycine max
  unsure (1)..(356): unsure at all n locations
ttgcggatttggacttcgccggcagaatgatcaaagcgggtctgaaaagaggcaaatttaatcatcccacttggacgaatgagaaaactggggcaaatgaagagggtgagaatgagggagaagcccatgctgtgactgccattcctatacagccatggctnnnnaaacccaacaatgtcattactcanccaataacaaaccttctcctttcttatagaactntttatacnttngccttgatggggncaaccacaaagtctgtctaccgcacttccaattacgaacatcacctttagcacaatccaaaaacaccaaccaagaaatgaattttgcagcaagaaagcctgtagaattca

SEQ ID NO: 41437 - DNA, 393 bp, Glycine max
gcagcctgaaaaagatggaaatgaacatatgttgaatttaaaaattgctgaactagagggacaactcacggttttgaagtgagtgaactccgaagaagctgatcatgagaataaaagaaagatagaaatagaagagatagaagaacaattggaggacatgatttttgatatgtccgtaaaagatgatgaaaatcaagctttggagaagaaggtacaagaagctaaaaccgagctagaagatgctaggaaacaagttattaaggtaaatattctgttctgagaaaatccttaatctaatccttatactaaggagacactttagttcataatgttattacaccttctactttaattgttcaacttcacaaaatgtaattcattttgtacttttac

SEQ ID NO: 41438 - DNA, 365 bp, Glycine max
tggttttttaaactatggggcccacctaatgcagtcatcgtgagaattaatatatcagaatatatatttgacatgcttgatttcaagtcttacatttcaaacgaaagatatatttggttgccaactaaataacttggtaattgtgatcttagattcggatagtgtgtgtattatatttatatagagccacaggcaagaaacataacataagtgttacatccatgactccttaaaagacgtttcttgtagtgcttttctagctctcccttggcaattgctggtttggatgattttttttttcttgtttgtgatgtgctggagatgataaggtatatgttttatgtaagaaataagaaaagaacatt

SEQ ID NO: 41439 - DNA, 274 bp, Glycine max
acccagtcaccctcattaagaactaactcttttctttctctattgcctttagttgaatacacctttgtttggttctctatttggttcttaaccctctcatgcaacttctttacaaattctgacctacattcccattcttttatgtataaaagaaatgtccactgggaggggaatgacgtctaaccgtgttatgggattgaacccatatacaacctcaaaggggactgcttggttggtctatgaacccccctgttgtaggcaaattctacatgag

SEQ ID NO: 41440 - DNA, 367 bp, Glycine max
tagatggagaagaagacagagagaaggagaagacttctcgaaggagacgaaacatacctaggtattgtggcgaaggagaagaagcagagacttgtgacgatgctcgagtgcgacgaagacgatgctcgagcttagacaaaacgatggtcagatggagaacagacagcttcaaggtacatggagaacaaagagagcaagaaagcttagatggagaagaagacatcgagaaggagaagacaacgcaaaggagacgaaacatacctaggtatggtggcgaaggagaagaagcagagacttgtgacgatgctcgagtgcgacaaacacgatgctcatatgcagatagggaccttgaaggtagacggagatt

SEQ ID NO: 41441 - DNA, 398 bp, Glycine max
  unsure (1)..(398): unsure at all n locations
gcttatcgtctatgttagccattatgcatatgttggcttgctcattgtctaaactgttactattctcactttcttagtcgtcttaggtgaccattacactatttattttatcaccagagtatcttcttttcttcagctgggaacactcaaccttcatgtgtccaggattttttcattcttagaaaattatctctttgctttcctccttgtacttcttcttgaatcttgtgtcctttcttctataaaagtgttgaaactgtcctttctttcctagcatcagtttaaattttttggacataagcaccacttcatcgtcagtgaactcttcaaaattgttgtctcacttatcacacttaaccagatgcactttcagaactgtagaagatatnttcttgtct

SEQ ID NO: 41442 - DNA, 366 bp, Glycine max
tctcccttattttgctataaatagggggagaagtgtagaataaaagggttcagccccttaggcacttctctctctctcgaatttgctgaggaaaattattttcgtgaagaaaatccaagccgaggcgcttccgtaacgtttccgtgagtaattacgcgaagattctcgaccgttcttcaagattcatcgttcgttcttcgttttcttcagtcttcaatgagtaagtacctcaaaccaagcttttcaattcattttatgtacccgtggtggtccacattttgtttcatgtatttttattctcgttttcatttactttttatacccccttttgacgtgcttaagccatttatttaagtcatttctcgc

SEQ ID NO: 41443 - DNA, 381 bp, Glycine max
agctataaataggctctgaattcacatcgttgcgcttagcaccaccctcgcgcttagcgcgattaagtgaatttgagcttagcgccagtcgtgcgctgagcctggctgaaaacaactgttgtgcatagtgcacagatctcgcgcttagcgcgcggccttgatattgatgctctgtcagattcttctgtcgcgctaagcgcgctgaagctacgcttagaggtggatgtgcgcttagcccactgatgagctaagttcaattgtcacttttagcacttcatgacttagcctctgtttcacctgaaattgcacatatttcatcattaaatccaatggacatattctagagcagctttaacaataaaacaagaattatttacaaaa

SEQ ID NO: 41444 - DNA, 365 bp, Glycine max
tcccgcatccgcacctggaaggatctgattacggtcttccttaggcaatatcagtacaactctgacatggctcccgaccgaactcaactgcaaaacatgatcaaacgagaacatgagtcttttaaagaatacactcagcgttggagggacctagcaacgcaagtagcctctcccatggtcgagagagaaatgattactatgatggtggataccttgcatgtattctactatgagaaattagttggctacatgccctctagcttcaccgacttggttttcgccagagaaaggattaaggtggaaagtttgattacgtctccacggtaggtgccagtggtagaaggaccggaacagctggggccaag

SEQ ID NO: 41445 - DNA, 223 bp, Glycine max
gggttataggcaagacgactgcgtgctgactatacctgaaagcgccaaaaggataccgtggacagattggcttcgccgtacaccctctcagcagatctaaaagaatcatttcggaacaaagaccggtggattctgatgggggtagccgccccagttcgtaggatacccgccctgcctccatatttacatctatatatacccgggttggggacacttatgtaat

SEQ ID NO: 41446 - DNA, 371 bp, Glycine max
ttaagttgctcattgactctagattgctgcaaagatggacaaagatctttatggtgatctgcagaagaacatacaccacagactcttgcaacaggtgcaaatttcttattcatggcaagctgagttactaggttgaccaaggcatcaagttttccctcaagctttttattttcaatagatgaagatgaatccatggccacttcatagactcttctaaggacaatagcatcatttcttgcactgaattgttgggagttggaagccatcttctcaatcaaattcctagcctcagcaggggtcatatcaccaaaagctccaccattggcagcatcaatcatactcctctccatgttgctaagaccctcataaaa

SEQ ID NO: 41447 - DNA, 398 bp, Glycine max
gcttggatttccttttactatgtaatctatccttcctaagatggatccaaacccagtcaccgtcattaagaactagcttttttcttcctctattgcctttagttgaatacacctttgtttggttctctatttggttcttaaccctctcatgcaaattctttacaacctatgacctaaattgcccttctttatgtataaaagaagggtccagtgggaggggaatgaggtctaacggtgttaggggattgaacccatagacaacctcaaaaggggattgcttggtggttctatgaacccccctgttgtaggcaaattctacatgaggaagatactcatcctcagacttatggttacctttcagaagagcccttaaagggtggataaagacctattcacta

SEQ ID NO: 41448 - DNA, 360 bp, Glycine max
ttacagcagattttagtaatgacccactttcctagaattaaaataacttaatgccattaacctagggaattaaaacaaactaaatgactgagtgtaactgaaattgttggcaaccaaaagtcacccccaacagccaacaagtcagccaccatttggtctcccaaaaggctgatgcctaggttgccaattgggcccttattacaacttgaactaaagcccttttagttgattaacccaaaacatatttttagtcagccaactttacaaggattgggccattatttagacaaactaaacactctaaaattgaaataaagtggtgtcatttagtcctccatttgggccatgatacaactcaca

SEQ ID NO: 41449 - DNA, 326 bp, Glycine max
  unsure (1)..(326): unsure at all n locations
gcaagcttggatntccttttactatggaatctatccttcctaagatggatccacacccagtcaccgtcattaagaactagcttttttcttcctctattgcctttaggtgaatacacctttgtttggttctctatttggttcttaaccctctcatgcaaattctttacaacctatgacctagattgcccttctttatgtataaaagaagggtccagtgggaggggaatgaggtctaacggtgttaggggattgaacccatatacaacctcaaaaggggattgcttggtggttctatgaacccccctgttgtatgcaaattctacatg

SEQ ID NO: 41450 - DNA, 361 bp, Glycine max
ttacagcagattttagtaatgacccactatcctagaattaaaataacttaatgccattaacctagggaattaaaacaaactaaatgactgagtgtaactgaaattgttggcaaccaaaagtcacccccaacagccaacaagtcagccaccatttggtctcccaaaaggctgatgcctacgttgccaattgggcccttattacaacttgaactaaagcccttttagttgattaacccaaaacatatttttagtcagccaactttacaaggattgggccattatttagacaaactaaacactctaaaattgaaataaagtggtgtcatttagtcctccatttgggccatgatacaactcacaa

SEQ ID NO: 41451 - DNA, 210 bp, Glycine max
agctatgagaattgcccacacttctttctcaaatctgattataggcttaaatgggtggctttgtttgttctaacgcgcttaaggcgactattgacagtcttgtatgcaataatggagtttggcttatcgcgtgctttggatcctcagcggatggactgaactggagcttttaacaggatggagattcgctcagcccaaatgcacatctca

SEQ ID NO: 41452 - DNA, 359 bp, Glycine max
tgttgtattgactctacagtatctttgatttgcattaacagatcatccagattaataactccttctgctttattgtgataatcagattgtcagtatgactcccattggtaacctgcagaagactggttcctttcaaattgagttccctgttgttgcataaaataatagtaacctttagagctagcttggtatgtcatgaagtctccaaaatactttcaagatcaggggctctttctttctcatggtaatcgtacatgaccggttcctgttttcggtcaaagttatttatagaataaaaataacaactgtccttgcgatgctctcctccggctaaatcacaattcattaatggaattgag

SEQ ID NO: 41453 - DNA, 398 bp, Glycine max
agcttccctttcttcggccaatgctttacttgtttggcagtgatttccttggcaatttgatgctcagaaacatcaatatctatcactccatcagtaggtctgcccaaatatttgttgatcacagcaggggagaatctaacacactttcctctgacaaacactctttgataatcatcactttttctgtttgatatgtcagagggaatgttgacaatgaattccctgactaagccttcatagcaatctcccaacttgctgacagtcttcagcagtcctgcagccttgatgaggtccatgatctccttgcaatccaaggcatctcttcccagttctctttcaaccgcaagtctgcgttgatacacatatttccacttttcaacattgccaatggagtggaa

SEQ ID NO: 41454 - DNA, 363 bp, Glycine max
tttttggagtagaaacatgggaccaactctttttatttcaaaaattcgtatctactcaaggtctgagagaccatacaagtttcctagcaatttctaattatgtgggtcattaagtctatcatatgctgacaataaccgagaagcccatgaatttcttcaggggcggagtatgtgtccgccatcgccttggccttggctaacaatcggggaagttcttgactcccgttcaaggtaagagcaaaccgatccatccacatggttgcctcttggtgtaaagagtcgatcacccttcctctagcctctttttccgcgtatacttgggcatactcatccgcgaccctatgctcgtgggccgtggctaaa

SEQ ID NO: 41455 - DNA, 351 bp, Glycine max
agtcctacatcatttatttatgtttaattatgaaaacaaacagaatactaaagcagagtggactatatagtctaatgtgcatgactattgatttttgattgatatttaatgccaattatttgaattttgatcttataaaatgagcagtataaatatatactgtatcataaaaaatataaaatatcatcatataaaaaatatacaacctttctaaccgtgtcactgtccatcttttcttcattctttgagcagatcaccatagaagctttattccaaaaattgttaaaactgtattattgaatatatcattgtcaaggataatagtaaagccgaactatgcaatttgtgtga

SEQ ID NO: 41456 - DNA, 157 bp, Glycine max
tgctgtctgggtcttggacatattctaagtttgacggagatattatgatctatgccattcttcgcgtttttgaattataaatgcggacgtgccaatcgattaaggacattattatatgtctctgaaaaaaaattcccacgcatggcactgatttaag

SEQ ID NO: 41457 - DNA, 318 bp, Glycine max
  unsure (1)..(318): unsure at all n locations
ctaaaatgtgggaatgtgctcaaatatgtggggcaattttggtttgtttcattgcttgattacgatgaaatgggggtttgtatgaaatggccctaggcctataatgcattttgaagcaatgggacatgccacattgtccccgttatcttgctattgatgcctaaacgtgcgcccaccaagtgttcggtgaaatgcctcaatggcattagcacgtgatttttgtaaggaaacaacccatggggcaatttggtttgcacatattttntgggacatgcattcattcccgaaaggctagagtaattgccccacatatatcct

SEQ ID NO: 41458 - DNA, 290 bp, Glycine max
aaggaagtgaacaaattagcatgggctgaaatgtttccgcattgattggtaaatctgttcctcaaatttctgaaagatgcaaagatccaggttcattcagcataccttgtattatagggaattgtaagtttgacaatgccacgctagattgaggagcctatgacggtgttatgcctcagtcgattgctatcttatatctttggtcccatgcagtcaactgatgtggtaatatatttggcttatccaaatgccgcctgtacggtcggtttaatggaagacgtttaactatt

SEQ ID NO: 41459 - DNA, 349 bp, Glycine max
gatgtgttggatcgagtggcctcataataattaagaaagggggggggatagaattaattattcctaaaaccttaccaattaaaaattactcttttaaggcttttacttatgttgttaagagaatatggagtagaagagaaacttaacagaaagtaaaagcggaaattaaatgcacagtggaaagtaaaagagtagggaagaaggaaacaaacacacaaggatttttatactagttcagcacaaacccgtgcctacctccagtccccaagcgacctgcggtccttgagatttctttcaaccttgtaaaaattcttttacaagcaaagatccacaaggtatgtacccttcc

SEQ ID NO: 41460 - DNA, 334 bp, Glycine max
tatttttcaatttcgagcgtctcaatatgttaatttcccgaatcaaacatcagtgtgaaaagttatgaccatttcaatttttctagagctatcgttgttcaaattcgagcgtctagatatgttatgcacttaaatcggacatccgagtgaaaagttatgaccatttgaatttctcaagagcttctgttgttgaatttcgagcatctcgatatattatgtccccgaatcggacattcgagagaaaagttgtgacaatttgaatttctatagagctgtcgaggttcaataccaagtgtctcgatatattatgcgcctgaatatgacatccgagtga

SEQ ID NO: 41461 - DNA, 224 bp, Glycine max
aacaaagccccgacgaactatgattaccaaaaagaagagatattgggtagcaggtcacaatgagaaaataaggggaggaactgtataatcatgtaacaggggctaaaatggatgcagggcatacactcataaaaccggacgacggcgaatccttgccatctacggggaacgaccaattcccgagcaccttctagggggaaaaaaaggagggcgaaaaaggcagt

SEQ ID NO: 41462 - DNA, 368 bp, Glycine max
taacaaatggacctgggtgttgcccagtttcatcatatcttccgtaatacttatcacctctataatatctaataattttcacatttatgtctaattgccattttacttcattgtagtaaatttctaaggcatccattgcctaagaaatctcgggcaataagtagacataaccgtaacgtgaataatcatcaataatggtgataaggtatcattcctttccgaaagaactaacatcaaaaggtccacaaatatcagtatgtacaatttcaagaagctgagtgcttcttgtagctcttttctttgtatgtttttgcttgttttcccttatacaacccacacaaatatttagatccataaaatctagataa

SEQ ID NO: 41463 - DNA, 363 bp, Glycine max
agctttacttaacaaagtggtagacttctttctatttgtattgactcagcccaatatgaccttatgaagccgaagttgtaatactgctagctagtgggtcttcacatggaccaaatcaggtagtaggagtgctccctaatttgggcctaaatgcaggcaatactataaatagtgatgaaaagaaggttgttagaataactttagtggttgatcccaaattgggatcttaaatcactttttggtggacccataaagccacgtatgtttaaagatctcataagatctctttcattatttttctttactggtagatctcatgttgggatcttagataattttttgtagatctcacatgatactcac

SEQ ID NO: 41464 - DNA, 366 bp, Glycine max
tgtaggattatggggtacccatcacatgtggtactaggtggcggtcgggcgatggtgcacaacaagttttccatgtggcgtccctaaattaatgactggtttaatagtaataatttaaataacaaaaaccatggtaatttttttttctcttcgttttctttttcatttctttctcttttcaccataactaggtttagaagggaaatcctcactataaagtcctgaatggccagttcacaactttactcggagtcatttctttcttaccgctcataattctctaaattattttgctgtttcaaaaggaagaatataccagccattactttaggtcgtcacgtgaaaataaaaggataaagtacagtc

SEQ ID NO: 41465 - DNA, 91 bp, Glycine max
tgatatcgtcacattatctaagaaaccttgtggtggatccaagagctctgatcattcatttgcatattcatgttttggtggcatactcacc

SEQ ID NO: 41466 - DNA, 327 bp, Glycine max
agtgacactgtgaagtgctccatcccggctgaggtgagtttatcatttacggttacacgggggagtgccccgaaaagtgtgacattgtattcagatgtccggatggaagagctaacagctttgatcttaacatgtaatagcctcatggataaaacccccgattgaatctagtgagacacatatatgtgacgatattgtaatgtttacgactcaaagatctaagcttattccaagcataccttatatttcgaaggttgtgagctgaaaacaaaacaatactttcataaagtgtcaacacggtcatgcttccgaaaaatattagggcca

SEQ ID NO: 41467 - DNA, 394 bp, Glycine max
agcttctacttccatggcttatcttatgttgatggagcctgctctcaccacgtctcctttatcttttgctgcaactccatggctgaacatcaccattgaaggaccttagtgaagctcaaagaaccagcctccatagaagcttcttaagcaagcttgcataagaaataatcatgaatctgatctcaaacctcatacaaatgggctgatctgagaactctggaaaggatcaacgtaaaatgcatcatatgaaaccacataacaagaacttgagcccattactcccaggattcatacccaggattctcaatgggcttcacgatcttcttcagagagaaatcatagacagaattgcggaatgacaacaaatcgttgaagacgatgggacttaataact

SEQ ID NO: 41468 - DNA, 358 bp, Glycine max
tatttattagtgttatgttagagaaactttgcaacactgtaccattatattgatttgtgactagcggacaatgttcaactatatcacatgcgaacccaatgatcttcataaccaatatttaaatatctattaggttactctgaattgcaacttcaaaaactatcttgctatcacattctgaagctctcttatctttttgtatccatatatattaccaaaacacaatcttagttttgtcattagctcatcccaatataatgtccactcgaaagcaaaccattcaaactattatccattacgatggggaaatgcgtgactccgttgaaggagtggagttctattccaaaaaacgtgcatg

SEQ ID NO: 41469 - DNA, 403 bp, Glycine max
  unsure (1)..(403): unsure at all n locations
gtacacctacattcgtatacacgacaaactttntctgtatacacacgcattaaaaactctttctctttatatcaacacggtctataataaaactctattcctgttcaaagatttctttttcgattttcaacatacaactcgtggtttatacaaaaaacttctttatatacactcattgctcacacacaagaatttcttttcacgcattatttacacacacacaaaatctttccatacactttatatatagacacgacatttgttcacaacgcctctttcttttttttttttctttttttttcggcgttatcatgatttttgttcgttttattnttaggacaatgttcctaaaggaaaactctacaaggttccggaatttcaacaaacattatcaacaataacg

SEQ ID NO: 41470 - DNA, 361 bp, Glycine max
tggttcgaggtgcttacccgttgaagatctaagaacgatgaagaacgaatgaagaacgtcgaagaacggttgaaacctttgcgaaattcttcacggaaaacgttacggaaacgtttcgaaagcgcctcggcttagattttcttcacggaaacgatttttccaagcaaattcgaaagagagagaagtgccaaaggggctgaaccccttccttcttgccttcctcccctatttatagcaaaataggggatgtggttgccgcccagctcgcccaggcgagcagggttgcttcctccagaagcaaccgccttctggaggaatattccggagggcccaagtgggcctgggtgctatttgcaccccc

SEQ ID NO: 41471 - DNA, 403 bp, Glycine max
agcttgatttgtgagttgattttagccttagtttcactttggttattagtcaattcattaaaggaaacttccaaataaaaacatccgattgatttttttgattattttattaaaagatattttgattattttattattaattcttcaagatattctgattattttattattattttgctttttttttttttttaactgaggttagattttgctttaacggtgattaaactatattacaacacaaatgattggttgaaattcattttatcatttattaggtgagaaaacgacttaaataaacggttaaaagctcgttaaagcggaagaaaagaaaactgagagtaagcgaaattaaagtgcaagtacacaaaacaagtaaggaccactaagggtgcatagaatg

SEQ ID NO: 41472 - DNA, 362 bp, Glycine max
tggttttgggcaatagcaccccacctgacgtcccaaaggtctcctgacccccgcgacatatctccaggtaccactctgtggtcaacaataaaagtaggaagtttcacccttcaacacttcctcatctcaagcttgtaggattatgaggtacccatcacatgtggtactaggtggcggtcgggcgatggtgcacaacaagttttccacatccacaatgcgcgcataaacccaccatcccctgttgcccacctccaactgagctcacgtactcccacgtagcccatatcctcgtttctctcaacaccgggtccccatcaatcctcccaagcttccacaacatccaagcaaaacaacattcaaac

SEQ ID NO: 41473 - DNA, 178 bp, Glycine max
tatgaagacgtggttgctctacatgctatctactgtgacttcacatggaccaaataaagtactatgattcctccttaatttgggcctaagtgcacgcgatccgctcataacaattgttactaaggttgctctaataccttgagtggaccagccctaaatgggaacacaaagcactttt

SEQ ID NO: 41474 - DNA, 361 bp, Glycine max
tgagatgaggaagtgtagaagggtgaaacttcctgcttttattcgttgaccacagagtggtacctggagatatgtcgcgggggtcaggagaccttggggacgtcaggtggggtgctattgcccaaaaccaagcttgaccaatcccgacccaacctaggcatagtcagtcagtgagaacctgtgatgtacctaaacaggcaagctcctggcagtcaacagataaaaggaacaaagaccacaaagcaaggaggcttgtgtggtggttggccagctgtgaatcttgtgtgatatatgggttatggcctctggtaatcgattaccaagggtgggtaatcgattacaaggcttaaaaatgaagaca

SEQ ID NO: 41475 - DNA, 365 bp, Glycine max
agcttcaacatcagaccacttccattgtgctggaactactccacatggatttgatggggcctatgcacgttgaaagccttggaggaaagaggtatgcctatgttgttgtggatgatttctccagatttacctgcgtcaactttttcagagagaaatcagaaacctttgaagtattcaaagagttgagtctaagacttcaaagagaaaaagactgtgtcatcaagagaatcaggagtgaccatggcagagaatttgaaaacagcaggttcactgaattctgcacatctgaaggcatcactcatgagttctctgcagccattacaccacaacagaatgggatagttgagaggaaaaacaggactttg

SEQ ID NO: 41476 - DNA, 326 bp, Glycine max
tgcctaattaacctaaaattgatagaaaatgattattaaacactcaaaatggaagtactaagtatttattacctatacttaatagaaaatacttataacactacaaaataaccataaattgggagactttgataaaatttatacaagttttatacacaaaagttagtcgttttcaccgactaacaacttccccaaatttacagttttgcttgtcctcaagtgataatgacatgtagtgactatgtacagaggtgtatgcataaaaaattactgattgcttgatgagaaagacgaagcaatgtgcacctatcacttgtcttcacaaa

SEQ ID NO: 41477 - DNA, 345 bp, Glycine max
  unsure (1)..(345): unsure at all n locations
agctttctcggngccatttcttgttgttgatgaacaaaagcgcaaaacggaatcaaaaaatgcgaaaaaggatgaccctatggctgcaaactcgtcaataccgtgggtatggcttttgaaaggggggaaaagaagtttttgaatgcaaaaaacgtcccccctttcatcattcttataatttggtgcaggggtggctcgcccacgcgagctaacctgcactttttttttttttttttttgaggggaagattaaccatgtcccctcccttcttatggattagcatcttgcctaacttgaacttacttaagttagaattaggtggtgattacttatttttacttttta

SEQ ID NO: 41478 - DNA, 350 bp, Glycine max
tttcgtcttacaaacagcaaaaaagaatgtttatacggataaccactcgggtatttccgctcatcagcgtgactcaaatgtgagtatgacagatcttttgagcgcggaagatgacgtaaatctccgcgtgtcaacgggcttgtcggccgcgattgacgaagggcgcagaagactacgttagtctttgcgtgctatcatgcttttcgtcttacagacagcaaaaaagaatgtttatacggataaccactcgggtatttcagcccgtcagcgtgactcaaatgtaagtatgacagatcttgtgggcgcggaagatgacgtaaatttccgcgtgtcaacgggcttgtcggcca

SEQ ID NO: 41479 - DNA, 438 bp, Glycine max
cgccgattgttgctctcacgccctgaatatcagcgctgcagctcctccgaagggcttatttctctcttgcctacctaacacgactctggtgttgggtcccgcgacactaccaactcgtgacctccctcaggatgtgtgacatgtgagaagctcggcttttagtcgggaacactccactggactgcacttcacaatgggttcttttgaggccttatccacaacgtatcgggctgtgttatcagcatctgctcagtagtattttggaggaggagtatcattgcgtaaacgcttaacgaactctgacatggaacttgtatccttaacacacgccattagcggagcggggttttgccgcaaaaaggactgcgctccttcctggcttatcctatcatatacggaatctctatgtctcgactcacacctctgatcactcctaag

SEQ ID NO: 41480 - DNA, 355 bp, Glycine max
ttatgtaggtcaggtcgtaagcccctgtatgccggcctgacctattcctacccctatggagaatactaataaactattttattacggaagaatatgaataaaatataactaatgggattattgtaaatatatatttttttggtttattatcttttcacttaattaattcattgattattttattttatttgagatacaaaatataagtaaaattaatgtctaaaatttatgtaaaattatggggtggggtctttctttcatcttcttttcctagtaaattaagtacaatatatgaaaatgataattttaagacaagtaacaaaatctatacttagtttatggagatggacatttt

SEQ ID NO: 41481 - DNA, 818 bp, Glycine max
  unsure (1)..(818): unsure at all n locations
tgagggnatgtcgcgtcgttgcgacctataaatctaagcttgtatcggagcgatcatcataagtaatgttacgaagtcgctgtgtgtgttaatcccttaagtcacaatggtcttttgtgctgtctattctgtcactgtagggctatagtacttcttgtgatgactctgaaacacactatccattgtgaacgaattcgcatacttcttttgtactcagcggcgaacacgcgaagagtgcatcggataaagaaggtgcttattaatgcttttgggcgtgagatccatatttttttagcgtggactcccaaattgcgagaatctaataagttggtgtgtgaccaagggcgtggcagaatctttggccatattttagcactaacatgcgtgtgcggtccggatatgacacactgtttttgccggactaaggtagttgacttaattgcgaactgtggtcaagatctgagggtcaccattttacaaaacctacacttggtcatagcaaattgctttgtaaatcgtattggtggagggggctctgatagctccagacatagaattatatttttaaatatggctggtttccgttataaaaaacttttataccagtctatcccctcttataatcgttggccctttaccgatggcgttaggagcaaacggtctacacgggtcgggtggtggactccccacaccatctatggggttgctagttcgcgaaaggacgatttgggaaactttctgtgaatctttgtttgtgtggcaggaccagattctttcttacaagaatatctccttaaaaattgggctcttggggatcg

SEQ ID NO: 41482 - DNA, 638 bp, Glycine max
ttgccttctgggaatttaagtgctcttgaaccccctcaatattaatggcatactttatagtagccatttttttcttttaagattagatgaaagcgtgtaggattgggactggttttgatggtgagctgacatttaatgtgctttggcatcatgcaaatatatggaatgattcatggtctccggcgataacagatagttctatctgcatcaagaatttttctcaatgcttgtaagctcaaccacaaaggtgtgaatttttttacactgaaatctggtattttcctaaatcctttttgtgctatgatgggattactgcgccatataggaaatgctattttttataccagggggtaataaacattaatttgataaagaccggttattatttaagattcttctagtgaaattaggtatgccctccgatccctcttgagggtcgtttcggctttaaaaccctttaatttatttcttttgcgacacccccttaaatgaaaccgtttgtaaaacccccaaatgtggataccccggagaaaaggggggtcctgtatacaagcatattttgttaccggttttttattttccacatagtgtaaggatttcttttgatacaaagagaaatgtgaaatacttttttaaac

SEQ ID NO: 41483 - DNA, 874 bp, Glycine max
  unsure (1)..(874): unsure at all n locations
cctcagggccattcctgcgaatgaaggcccgagtgatgttggtgtttcttacnccaacnnaactcgtttatctatgctggcatataaccttctcccatacatacacaacatgccttgtgatgtctcgtgataacactacgtctcaccatttattaaagctacactctccagcccgcatcataacgctagcaaacgcgctggatcgacggatgaaagtgtcgcccatactttgcaggcgctatttgaatgctaaatgatccacaccatacatcctatgcgtaccgtgtacctacaccagacacatatacttggctaaattcacatacatgcatactcaaagcattttgagggtccaaaaattgcacatgtgcaccacttgggatttcttatacctatacctacaccactgttatgagcacgactgactgtctgtatgcttaagagtgaccatccgtgctctgaaccctttgacggtcgcctaagaccagagactactccattgttcatacattagtgcctttaaaacatccatcgtaagacgtgggcgttatgcggaccgtatcccccttacaaaacatgactttaaaaatgtgttatttcttgtggacgttatcagcagccctaaatatctgttcattcacccatgtattctgctttcgtcccctattacccgtatggacctatacgtgtaactcgtattctccacagaccgcttggtgtgtacaaccaacaacccctctagtctttggcataattattatcgagcctcccttatgttggccaaaagggaccttactcatttgggtccttgggatctaattgtgatttggtatctacaccatccgataaatgaaaacatctctctctgctcgct

SEQ ID NO: 41484 - DNA, 363 bp, Glycine max
acacaccaaatgataacaatgatggatggctcatattctcacaaaggtaaaatcatcactttcaaaattgagctttcaaaactatcatgacatgtagagaataatcaaggatttcaagtcacaaaaatgtcaaaacgtttattttcaaaacaattacccatttcttgaacatattcctataattcaaagaaaaacattgcgaaggcgtacgtgcacatgaaattgacccacaatattatactgaaaatgcgacgaaactatcaacattaccaattaacacaacttacaaattatcaaaacccaccaaactagcacaactttagaacactcccccctctacatataaaacacattggcctcaat

SEQ ID NO: 41485 - DNA, 988 bp, Glycine max
  unsure (1)..(988): unsure at all n locations
gacacgacgattcgtaaacccanccacgtccttacacgccnttacgtcctgacaatcgaaaactaattnnttcccncccacagaagttgtgccacgcgatgcaccanccaactaagcacttagctcgtagcacaaaacacanancgcggaaagcaggatttactcttcattcacctcgcaagggaatgagatgccatagaataacacacattgccccacctctccaagacccatatccacatatatcgacacaccattgaaaagcatctcccacgcgacttaggtgcagagagccaatcatggggcagcgcaaaaccttacaaaaagaacccaaactaaggctgcagcaattccaaaaccaaacattggaaaactaaaccaaagcaagagttctcacaatgaaactaaaacaaagtaggggctcccaagcttgcgataacataatggacacccatatcgactgtcccaagcggaggcgaaattcataaaacagccccactgatcaaggccgtacaccaatcaaataaacatcagactgcaaaactacagaagagaaactagcgcgtccaaatgagacgacaacccaaaggtcctaactactcgcacaacataacacacagggcgggcgggtataacaccaaacacaacaacaaacgaaacagaaaacgaaacaaaacagttacatacagagaacgaactaaatcagaccaataacatgcattgaccgacaccaggacaaacgatagacgcaacaaacgagacgacagtactaaaagacaacagacacgcacaccaaagagcgacagacagcgcagatacatcatatacaatatatatataacccaccgcactaaataaaatgattactgacagaacccgtggcgacgataccacaacgaagctataatgctactacgcactcagaaagatcgaaaagtaacgacaactncactgaacatataacacagagcatcctgacgaaagtcgt

SEQ ID NO: 41486 - DNA, 555 bp, Glycine max
agcttgctcgctaaacctgtgctgttcagtagagtattcccgctaagcgccaatccttatctggttgaaaatttggggaatccgggcttagcaagtctgctcactaagccaattctgtagaaaaaaattggatacgtgttcaatggctaagcgcgtagctatcatgcttagctcttgagtagttttctaagacgcgctaagtgagtcacttgcgctaagcgctcggtctgatttttagttttattttctactttttattttgaataaattcctgtctaatcttgtgtttttattcttttgtatagcagatggcttcccataagagaaaagccataactttagtgtcgcagggcggttatgatagatcaagatttatatcagagaaggcctgagaccgttactcagataatgtgcttgccaggaacattctgccagaaagaaatgtcaaggtgtatatcaataagtttgattattttagaagagaattgattataagaaactggcataaacagctgaccaacttgactgaaagaagcattgatgtggaaattgtga

SEQ ID NO: 41487 - DNA, 585 bp, Glycine max
  unsure (1)..(585): unsure at all n locations
tcctctcacgatgtggaggttgagccatgttctcagtatgaaaattagcagccgaatgctcaaaattagaatatttagaatcaccatcaacagaatgctcagaatgcacagaatgcacggaatgctcagaatgcataaaatgcacagaatgatcaggatgcacactatgccaaaataatgtatgaaatgttctatctatttcaggatcaaagggttgtaaatcacctggattgcccctagtcatgtactatatgcaacaaatcatgtatttctcaaacaagcactatgggtaaaaagggggtaaaactataactatactcaaacgatatccaaatgagctcaaaatttgtgagcaacaccctaaaatcatgaaaagatagaacaaaaattttcagacaaaaattcaaagtctaactatgaaaactgcctaagaaaagtttagaanaatatgacaataatacttaaaaaataaaatanaaaacttagtaaacaactgattttttaagcgctgagtaccgcaaccggtgctagtgggttgggctgcatgggaaattntaaattcatatataataatagtcattctga

SEQ ID NO: 41488 - DNA, 451 bp, Glycine max
ctctattactaactattttgaattctttagttcctgaatgtacaaccttcaaattattgctcgttcccctctttgttttctgcaaaaaagaaaatcaatatcaaataaaacatgcacagaattgtcatggttattattactcaaaccagaaggaataacatctaaacaagtcattttattcttaaaatgtgaaaactctgcatatttatggagaaaatgaggtatggaggcacgtaagcatgtgaataccacaagtcattttctccaattcaagggcttgattaattgctctaggaaaaaagcatacatctggtatattgtttggtttgcagctgtttggagcatttggcagaacaaaaattttggtttacgttgggttgaccatgttcactggttaaactaatgtcacttatactcttatttatgcttgaaataacacctatcaggaaat

SEQ ID NO: 41489 - DNA, 584 bp, Glycine max
tgccgcccagctcgcccaggcgagcaaagttgcttcctccagaagcaacagccttctggaggaatcttctggagggcccaagtgggcctggttgctatttgcacccccatttttactaaatacaccccctttttatttttttggtgattctttttccgtaatgttacgaaactttacgaatttcgtaacgatacttatttttcttccgcaaggttacgaatccttacggattatgtatttactcttttttagctttcgaagaagttacggaaacttacggattgcgcaaaaacacctcttttcgacttccgccacattacggaatttcacggatcgcgcaagcctgcttcctttagatttctgagacgtctcgggacttcatttgttgtgcaacaaaggacgccaagtatctcaaagcggctaaccaaagattgcatgtcatcaagtaatattccccggacgaaattatggtatgacagatgcccctctttacttacctctcatcggagataagaggaaagcaaagataggacactgatttcgtccgttctgccccttttgcgatgatgactctcatctctact

SEQ ID NO: 41490 - DNA, 563 bp, Glycine max
tgcctgtccgatgcagcagtaatgatggcccgagttatgttggggaacggttactaacccggaattggtttatgcgaagacaacggcggcataactagcctgataaatgccaaaggaaatcgtgggaagtatggtttaggctataagcccactcaggcggatatgaagagaagcaccgcgggaaggaaaagaagtggccaaagctcgcagttgagacaagaaagtgaaggaagcccgccctgccacataagcagaagctttataagcgcaggtttgggagacgaaggtcaagtggtcgcgatatacgaagatgatgttccgagtacattggatttggtacgaccatgccctcctgatttccagctgggaaattggcgagtggaggaacgccccggcatttacgcaacgagcataatgtaaacctttacgggtttaaaagctctatagttgggcctaggctttagagtttttccttttgttaaagctgtgtgtcttttgtttttgaatttataatataaggatctttcttcatctgctgctacgtctctacccattctcattca

SEQ ID NO: 41491 - DNA, 377 bp, Glycine max
aattgtagaatggtatttgagaactttgctggatttgtgacgatacacggagtgcatatttattatggtaagaagtacgaacacagcagtgctactagtgagatgtttggggagtgttcaaatataatattaattttaaagatggaaaaacccttataaacatgaaagggagaaaacacgaatatgatgtttacttgctcttacgctaaaagctctactttacttaaagttcagtcgaattcacggctatattaagagaaaaggtgtgcatttgattagggagttcacacgtcgagcagcatgaaccacattcaattttcattagcaatttctcattgggacatcaactggtgcatcaaaagtatataaatcacact

SEQ ID NO: 41492 - DNA, 629 bp, Glycine max
  unsure (1)..(629): unsure at all n locations
tcctagggccattcctgcgaaggaaaacatttggaaagttagttttaccagtgggacgttactcttaaagcaaaaatggcatataacctcctcccataaatacaaacatcaatgtaaatttagagcaagcttatgcgcatatttccttacaaacgttctcttgcacaagacattctattaaccgaaaaaaatgcacccatatacaatcaaggcagcttcgttacctagattatttacacgtacttccaaggcgtatttgttacatacatcacacacatctccttggctaaattcacatacatgcatactcaaagcattttggggtaccaaaaattgcacatgtgcacatcttggtatttctaatacctatacatacacaaacttcatgatgaatcttgactatctacacaataaggtgctacatttcatgctcttttcaagtttttgctacctaaagccgcatgcaaattcaagtatattttcctttgctgactaaaatggtattcaaattaaaaggtatacatcttttggtaatgtatcttctttacataacatgcaacatatntatgtatatttttttgtgagacattttgactaccaaaaattatatgtacatacatccaagtatt

SEQ ID NO: 41493 - DNA, 656 bp, Glycine max
  unsure (1)..(656): unsure at all n locations
actctagcttaacctgttagatggaggctacaaaagtttatatctctcacacatacctctaagatgaaggccaggaatggctctgaatttctaacacacagaaaaagtctcttcagtttcacttatttctaacaaaattaggcaacatgatgcttcaataaaagaactagaccagatcaggcgaaatggttgcaaatcaaacaattcagaaaagaaccacaataacacatcattctgaagtcaatctcaaataactgaaaaggcattgatagggtttttacatcttgtattacaggccatcaactgtctctaaaaactaaaatgcaataaattctgcaactcgtcttatcttgctatttacatatttgagggtgttgactcaactcccaggatttcatttgtcttttacaagtttatttgaccttaaacatacgagcagcttaagtatttctttgggccttttatatatacacaacatataaaatagattagtcctagcacagtaattattataaactagtaaaagcatattttttatgtaaccccaaattttcggcaccgctgtagtcttgacagtatccaaattaattcaacacggcaggggtatgaaaccttctggtancaaaaaaatccatctaataaaataacatctatga

SEQ ID NO: 41494 - DNA, 423 bp, Glycine max
  unsure (1)..(423): unsure at all n locations
tgaaattgaacaacggaagctctcgagaaattcgaatggtcatatacttatcacacggaagtccgattcaggcgcataatatatctagacactcgaaattgaacaacggaagctctcgagatattcaaatggtcataacttatcacacggatgtccgattcaggcgcataatatatcgagacgctcgaaattgaacaacggaagctctcgagaaattcaaatggtcataacttatcacacggaagtccgattcaggcgcataatatatcgagaagctcgaaattgaacaacggaagctctcgataaatncaaatggtcataacttgtcacacggaagttcgattcaggcgcataatatatcgagacgctcgaaattgaacaacggaagccctcgagaaattcaaatggtcataacttgttaca

SEQ ID NO: 41495 - DNA, 446 bp, Glycine max
ccttatagccaaacttgaaagaacccgggtagtccaaaaaaaattcaagtccatagccatcaaagtctgaaaagagtatgatgaactaaaggacgtcaatatggccaccgcttgaacctttgaacgaaaaaccaaaaaagcccgaaagggaaaacaccaccaaagccaagttttgaggggctttatatggcagaaatagttgagctcaagcctctgaaagaggtgaaaggaatcatcatgggtcaaaggcatgatcttgaaagacgagctaaaggcttgccttatgtcgaaaagaaatttgtcccaacagttaaagcgagactgaagggaatatgtgggccatcatcgatgagtgcaaagagaagctaaatctagccgcgactcatgaacaaaggctataggatgagtacgccaagatatcaacccaaagggaagcaccggaaagg

SEQ ID NO: 41496 - DNA, 527 bp, Glycine max
ctcggtggttatcgggcgatgacacaaaacaaacatcccatttccacaagcccaggcataagcacaccattcccagttgcccaccttcaaatttagctcacgtacatgtacgtagccttctccttgttcctctcatcaccgggtccccatcaacctctccaagatttcacaatatccaaacaatacaattccatttgtcatgaaactaccttaaaaacaaagtggaggcagaaatctttacacaagattcattcaaattccacagagtttttcctacccacatacctcagtaaaatcctctttgttccgactcgttaaccattggatcgccttgaaattttaattgagggtttctaatacgtaaatctaagttttgaccgttgggatctgctaaataatgtctataacgcgagatacactaccctttcccgtgatagcagaaaccaacactacacaaccattttttttttctgcatatattggcagatttgctgcacaattttgacagcttttctgcataattttgc

SEQ ID NO: 41497 - DNA, 580 bp, Glycine max
  unsure (1)..(580): unsure at all n locations
tagtaaagctaagcactaacaatctccccctttggcaaattttgtctaaaacatacttagacacttcctgagcaggtacgagcagttatgcaagtgggatcagcaacttccattatcagagtaatcaagcacagcggaatctgtagtctagacaagttgcaagtcgtttccaggatgtcaagacatctcacatgacatctgctttctgcttctgctccccctgtctccatgcttactgcagcatcttctatcagctactagtcttctccaggatgtcaagacgtctcctgtgacatcagctatctgctccccctgtctccatgctcttactgcagcatcttctagtagcttccatcagtcatcatcagcagcagcagtctccccctcaaaatcgtatacatacaactccccctcaaaatcatgaatcatgcatacatcgtatcctactgccatacatcatacatagtatcctactactcanaatcatgcataatagcaagcataatactattactccccctttttagacagaaattgacaaaagtagaatgcatgcaagcattaatgtgcaaatattaca

SEQ ID NO: 41498 - DNA, 584 bp, Glycine max
tctaagacactgcggcatgcaagcttctggaggaagcctcttaatgaagctttctatatatagctacatgaagctgcctcggtaaaaacgcttccaagccttcattaaccggtggatcttctcaaaacttggtctgcaacttaacaagacacttgtccataatctaaccggtgggatctttgagaaaatatctaaagtgtgctagaaacctcttaatgaaacttctagaagaagcttcttaatgaagcttctagagaaaactacatgaaactgcctcggtaaaaacgctactcagccttctttaaccggtggatcttctcgaaatttggtctgcaactttacaagacaattgccaatgatctgaccggtgggatctttgcaaaatgtctatagtgtgctaaaagcttctgttcccgagagcatttcttatttaagcactttcgcctttgctttcgtgtagcttaagaaaaaacgcatttctccttcttctttcttccaaaagcatttctaaagtcccagcactttttcatccccatatccaccttagccccccaaacattgttggtttccattgaacccccacc

SEQ ID NO: 41499 - DNA, 435 bp, Glycine max
tcgatgcgccgtcgagcaccctcgacgccacgtcggtggttgccggcagcggcagcctcccctgcacctgcaaaaacaccctgaactcgtcgctcttcctgatcaccggatgcgtcgccagccgccgcaggtacttctccagcgccattctcctctgctccacgaactcctgcttctgcatcacctggctctccaccacgctcttgtccggccgcggcgggatgaaaaacccgcggtacgcctctgcgagccgatcagagagcgtcaccacgtcacggaaccgccgccggaccgcgaaatcagcgccggaggcgccgaattcctgaatgttcgtctcgtggtgaccaagtatgtcacgtaactgttgctaccaggaacaatagaattcgatgattcttgctccttgacagggttcgaaacggttatctttagata

SEQ ID NO: 41500 - DNA, 464 bp, Glycine max
  unsure (1)..(464): unsure at all n locations
ctgaaaatccaaaatactctattcaactgacggtgttctctactcaccgngttgccaacaatatcgtcgtgcagtatttgaaaataggatccaggagagtgatcttgcatgtgttttagccacgacgaaagtttcgcatatgactcttcacaatcgtcatattcaattgtaatcgcttattgttttgtcatccatgcttttttgtatgaaaccttatgcgaaaatgcactgtttatactttcttgaatcataaaaacttttatagatggatattctctaatcatgcctattaataaaataacaaaatttaaataaccaataaatgcaaaagtaggataatatgaacataaaacacgcacctactacacaaatgacaatgaaatttgaatcaagcttctcatgatcttgtgtcatagtcatattcagacatgtgtgtggtccaccccattgggtcactttccatg

SEQ ID NO: 41501 - DNA, 936 bp, Glycine max
  unsure (1)..(936): unsure at all n locations
tgatggaaggtagacatcatgtagcaccacnnaacttancttgttgacgtctaaactaaagattcttgcactgtctttctttttttttgacggaaagatttcttattcatcacttcaattgaaagaactatcctaccttcacccggtgggtttctatagagcccttgcctatcattctcacccttttcattaataagaatccatttaaaagaatgccataaagagagaatttggtgttggacaaaagcgattgctatggtaatttgactttaccccttgattaaaaggtcattagccaggctctccctatctataaatcaaagatggtgcaaaataaacttatccagcctatccgtgctggccatgggagatatatcctgccaacatttcttttaaaccctgcggcatttgattacagctcgggttgggtggttcttaattgaataagactggacagtctcatcctcttgtgctccattttcaactggatacaattttataactcttatctctaataaactgtttttatgtggaatataatttagagtgatgccctccactatgggtgcagacaatgataggcctttggtttccccatccctgggcttttacatcaggtctatgacttaaacaaaccttctttctcgtccttggtatctcggtctctaaggtttttctagtntaaccaacaagatcccacaatgtagtatatgcctccctcctcttaccatgactggattgcgaattacaacctacaatatttggagcagttttatctccttgccaacttttaaatagattgttaccacaacacatgtgaagtggactcctttatcaatatacctacaatgcaatatgcatcggtgtctatccgggtgagcacacgtgggtgttgcctactctttatctcgttccttaaactacaattatttatct

SEQ ID NO: 41502 - DNA, 839 bp, Glycine max
  unsure (1)..(839): unsure at all n locations
gcatgatgtggaggttgatgatcgtcactccanacnnncnnaaaatnaanantggccaagcttcgagagcacaacacaacggccatggagcaagtacaattgttttttgattaanacaggatcttttcacggggtagcaggttgttcccttatcttataccaccacctatacaaattctaccgctgaaatatatcttccattgacattctgtgaattgtcgacaaggtagctaattcaagatatactgatcttatacgcatgtgctttggacgcgccagatgcgcgtacgatagaccgatagaattttcaatagacatccgcctagaagaaataccactataacattaacctgagccggatactataactctggtgcgacgtagtacctcaatccgagaaatgtctatcgtcacggtgtccacgtgtctgaagattatgttgctaccattcaacacttccagtattagtattctacatccttgacatggcccaaaatggataattttatacccatactttttgcggatattaagaggcaattttgaactgagagacgttatattgagtgcctcataaaggggtgatagagcgtgcatcatagaaggttatgaacaaaagatacttgaacatgtgattgcgataagtgtattatctgtcggttgtatgactgataatatactttatataatcttatttgatagatattgtaatggaagattaaagtactcttcgtgcctctaacaacatcagactatacttaattgttactattataaccatgttcaaattctctgtaaaatacacctgactcttcacagttattgaggttcacgaatcg

SEQ ID NO: 41503 - DNA, 685 bp, Glycine max
  unsure (1)..(685): unsure at all n locations
agcttgtcattgaacacatcaatagccttgcatcatttttcatcatttctcaacattttcctctacaaaaaaccaaaacttggaccttcattcttctccatttgcacgagacactcaaggagggagaggcctccattttcatattcttccaagctccatctttgtgttttgagacttctctcaaaaccttggtaagaagaccttaaacctctcttttgttcttatttctttctcatttctgtgcaaaattcttacttgaggttccaaaatttgtttttcatcctttgaagcttgagacttcaagatctgagcttttcttccaggaagcttcactcaaggaaaggggagtttttctacttcttaaaccctaaccttgttgtctttgtaagctaggcttcattacatgttgtgatgtttaaaatttcgtatttgctgccatgactagaacttgatgatatgttgtttttctagaaatttagaggttaaaaatgagttctttgaatgtttaaacatatgtttagcctttaatttcaattaaatcggagtttccctaacaaagctatgaataagacaagtgttatgacactttaccaggtaaattttgtcatgaaaataaattggtaattagagttctatggactatttttcttaaagttttgaccttaanaatgattttttaggtaga

SEQ ID NO: 41504 - DNA, 437 bp, Glycine max
tcttatactttttggagtgggccactcaagaatgacccttttctcgtagggtctgtgggaacctcttgatcactatttaaaaaattaaggaaagtaatgcaataaaacatacacttttctgtattttcatgttgattactcctaccaaaaaggatgacaaacctaaggtgttccatatgagcacccaggtctgtattgaaaccaaaaataagaacaaatctacctaaagagtccatatgtacacgaatcatgaagatgttgggtgcatgggtgattttacaaaagagggttacaccactcaacacattcatcataccacctatcttagggatttggtgcttaataatacctaatttgtgcaccaacaaaaacacaaggatttaagctcttacgaaccaaaccctcatccaacaactcttttacttgaagaataacct

SEQ ID NO: 41505 - DNA, 995 bp, Glycine max
  unsure (1)..(995): unsure at all n locations
ttccactgtctcganacgccttantctactcttctctctttcngtgtgtaacttcttgtacaactctacttctttncnccncagccnccgggttgtggcatctccatgcgaccacgaaacttaactttaatcccggaagagaccgtctacgagagagtgccagcattgctcgttttttctttgggaaatgaatccgacatgagaaatgggtgactaccatccacaatacacaatcatccttgggtgtgtgcacctcgcaggaaacatccgcgttctcatagtctccctgggtgggaacatgcaatgcacttgtatttgagaatgtgacgacttttgggttggtttacacactgtatgccacttctgtggacccaaagaaaggtaaactcgggataatagccccaattgcaactggtttcatttggggtgctaacatcatggcaggtggtacctttaatggcgcatccacgaacccagcgatttcttatggacctgctgatgctaacgggacaatggctaaccactgcggtcactgtgccgngccacatattaggctctgctattgctgctgttgtgtacgagactttcttcatcacccctaactcttatgaacagctactcgtcacagaatataatgacctagttgcctcatttaagacttctaatctcttaccaaagcttacatcatcttgtttgtttgaaagaccattgacctcaagaaccatccttgtcgatgcgtacagatattatagtcaactttctccaataaggaagaaggcaaaagtgagtgccttaccgttcataccatattgttntggctgtctctcgacctagaacaaacctttatgagaaattatttatagtgttactaccataggcctaacatgtcaatatacaccaaccggactgcatttgtataatacaagaactattatctctacacagctatgtgccgcattaattacaccatcgtgggataggctggcacaacaaag

SEQ ID NO: 41506 - DNA, 560 bp, Glycine max
tcttcacctgaaaacgaggatgatatggttgcctaaaagttatagcttcctaacaaaaaatatcatgcccgtggaccctcttctagtaattctgacttgcagtagcctcacatgcctcttgcatttccacctaaggaaattccaaacaaaaagatggaataagtggaaagggagatcttggagaccttcatgaaagtagaggagaacatacctctgctagatgccatcaagcagattccaagatataccaagcttctaaaggagctgtgcacccacaacatgaagctcaaaagcaatgaaaggattaacatgggcagaaatgtgtccgcattgataggtaaatatgttcctcacattcttgagaaatgtaatgacccacgtactttcagtgtaccttgcattattgggaacacgtaatttgagaataccatgctatatctaggagcatcagatagtggcatgcctctgtccattttcaattcttttgcaatctacagatgtggtgattcatttggcaataatagtgatgcttactccacaagtttcacagacgatgtgtt

SEQ ID NO: 41507 - DNA, 618 bp, Glycine max
tctgatttagcttattgaaacaaataaataaaaaaagcttatatgtttgttatgagctagtttcataagctcaaataaaccttgtacgatttttattttacaaacctgccctaatgctataaatgatttatggcatgtatgcactgaaaaaatattgtgcttggattcttcatataagttctttatacttctaaattttctttaagctttaatttctgttttttccccctaagcattttgattctgtatttctatatcatttgcaatataaggtgtacataaacttacacatatctaggagtgaaggttatttacttgttagattgggcttttaccaaccatgcctacttatgttaagttataactgatcatgattgagcaagggtgcatgagttgtaagcttcctgatattatctttgattcctacaaataacaatataataattgatcatgatttgaaactattgtttatttagtggtctacttctcccacgatggtagacatttcttaatgggtatgtaatacaatgagtttttgtctataagttggccgaatacacaatcatagtgtcttattgacatgctctgattttctgtgcatacctatgttctcatcct

SEQ ID NO: 41508 - DNA, 407 bp, Glycine max
tgcaagctttgttcgaggtacttacccgttgaagatcgattatcgatgaagaacgaatgaagaacctcgaaaaacggtttaaacctttgtgaaattcttcacggaaaacgttacggaaacctttcggaagcgccttcgcttatatattcttcacggaaacaattttttcaagcaaattcctaagagagagaagtgcctaacgggttgaacccttttcttcttcacttcctcccctatttatagcaaaataagggaggtgcttgccgcccatctcgcccaggcgagccaaggtgcttcctccaaaaacaacagccttctggaggaatcttctggagggcccaaatgggcctgggtgcttttttcacccccattttactaagtacaccccctctgctgttttttgcaga

SEQ ID NO: 41509 - DNA, 554 bp, Glycine max
tgccgccctgctcgcccaggcgagcaaagttgcttcctccagaagcaacagccttttggaggaatcttctggagagcccaagtgggcctggttgctatttacacccccatttttactaaatgcaccccccttttttattttttttttgtaattctttttccgtaacgttacgaaactttacgaatttcgtaacgatacttattttccttccgcaaggttacgaatccttacggattatgtatttactcttttttggctttcaaagaagttacggaaactcacggattgcgcaaaaaacacctcttttcgatttccgccacattgcggaatttcacggattacgcaagcctgcttccttttggatttctgagacgtctcgggacttcatttattgcatgtcatcaagtaataatccccggacgaaattagggtatgacacttatttatatgtatgtcggggtagagggtgtcacacacccagtcaaagttactgagaatcgaggagaccaatcggatatgacgttcgaggaaatcgaggagtacaaagaactttt

SEQ ID NO: 41510 - DNA, 435 bp, Glycine max
  unsure (1)..(435): unsure at all n locations
gtatgcccaantcattcatccctatgagatgttgttgaagtattgtttatcagaactgccattccttggattataaggttgaaccaagctcatgcttttataaaaaggttcatcaagtctaaactatggaagtatccgtcttgctgaattggggcaaaagatgaatcgagtcacatcactgcttcggttactgccaaacatatttaggattgtctatgaccttgttacttccactttcaccttgacaaagatgtcatggaccatgttgaaaatctaaaatgattcatccccatatcttgcgtaaaaattcgcaatacttcaattgtacatcattctcatgcatccatgcttttcaatggtagcatgctcggcgcattctttcttgaaaaataatataaaatgaacttaattcttgttttaaaaaaaaaagggaca

SEQ ID NO: 41511 - DNA, 631 bp, Glycine max
ctgcagctgcagaatgaagtaaacaggacaatttttgattaccactactgtttaaggaggaaatattcagggagacgaaaatagtatcttggtggttggtgcaatagggttataaaagaaataatatccaattagtggctctcatttttttctcccgtcaaacatttacctttttatccaatttttgtcttttttggttgacggcatccaagtgactttatattaaaggtataataatttttttaattataatattatatttactttatttctcaattatttctcttaaaacaaataactcaatatttaattttatttctactttatttcaccttttataaataggatcttatctatttacatgttctctatatctcttttctctacccaacacattcgagaaacatgtcttcaacaagtataataacaacgtacttttttttccggggtaaataacaccaaggtacaaatatcacatactctgagtgttttcactaccattacactattatacctttttttaccttggatttaaagacagtccatattatataacggccgcctggtttttttcttaacaaatcaattaactttttaaactcacacttcctgaaaaacctgacaaatataa

SEQ ID NO: 41512 - DNA, 567 bp, Glycine max
gcgcgcaagcgcaagctaagcgagccatgcattcttgctaagcttgtgatgctcgctaagcggatttagtaggaaatttcctcctacaaaactcgctaagccccatatgacgaactaagcccaataatatctttggagttgcaatttaattatttggacttagcacacaacttcgggcttagggcgcaaaaaaaaagtcaaaatttcttgtacttttagtgcacaataggcttaacacgcacttacgcgttaagccctagcgttcttcaatgtttgcattttttttgttgcgccaagcaccagttgcgtgctaagcctaataagcttgttgttcttttttggtgtcaattggacttagcacacacttacgcattaagcccaccatgcatttatgtttggtttgtcttgtggagtgctaaacacgcacctgtgcacttaacacaccactccctcctaccttatttcattttttgttacttttcaaattgaattctctattatgttaaatttgcatgaaaacatgatgattcatttggtaactctataattacacattttaggcatgtt

SEQ ID NO: 41513 - DNA, 564 bp, Glycine max
agcttgtcactgttgataacataattagccaacatttgtctacttatgggcgccattattatactcaatatgactatgaagtttgatgcaatcacattttcctcctgattgttataatctggtttgagaaacaattagtgacctcaattttttttttcttaaaaaacgtggatgcaagtgcagcaaacgaactgatggcatatttggtcaagctgcattcctcactttcagaagtcaatcagtatgttaattttagtacactaacaatatagaaaaaaaaactatttatggatgtaagtcatgatattgataacccatgttattaagaaaaattttcggccctaactgaaagatataacacaaattctggtatggtaattacgttatgcttgattgaatttgattaagtttaaaaatttcactactagtaatccaaaaaaatccgactcaagacagatgtggtcaatttgtggtaatttttaagactgctaatggtaatgaacaaaatatattggggatcttaaaggctgggtgagtttcccctggtgcgcataaataaaatta

SEQ ID NO: 41514 - DNA, 554 bp, Glycine max
  unsure (1)..(554): unsure at all n locations
tggtggggttgaccggcactccatagaattggcacaggcctgttatctaagcaggaaaccccagggccctattggacttctccgggtccactgggtgtctaggaggcgctatccctacaaactgatacatagcatctgagatcagctgggcaacatgtacactcacctgagtcaggatggcgtagaccagctgatacttcgacagggggaggtctaagttatggtcgttggggagaatgttgctaagcagcaacgtcatcctaatctgtgtgaggttggtcatgcttgtgcgcatgatccgcacccgtctccccgctatgctccaagaaaagtcctaccccggaacgcacagcaattggctgatagcctcctcgtcgaaacctgaggcttggctcctcctctggctgtactcacaacgttggctctcttccaagatcaatggatgccccagaaactggttaatggcatcctcattgaaagggatccactggcccctcacccangagcgtttgtctctgactccctccttcgtgggctaagcgttggcataaaac

SEQ ID NO: 41515 - DNA, 366 bp, Glycine max
acccacttcttgccagggtccagggaaatggacccactgttgtgggcagtcgtggatgaaaagcccacagatattgctccacgacgtggttgagtacctcaacttgatcgttcgttttaaggtgatatgttgtgctcattcagaattgggtactgcttaatcaaaataatttcttccaaaaactgctaacaaaaatcaagtctttgtccgacactaagctctatggaaacccatggagtttgcatactagtgcaagaaaaggatgccacaaaatgacccgattttggctggtaaggcacctagtgcactccctggagaaacaacactttgactagatggaacaatacccttaggatgaggaggcca

SEQ ID NO: 41516 - DNA, 660 bp, Glycine max
tagtaagataccacttcaaatgttctagttcttccaggatagcaatgtcaacatccctggatggtataaattgatagcaatgtcagcatccctagatggtataaattgacagctatctcttcaccaggcattatactccaccttgcatctgaaaaatacacatgagaatgacaaaaatataagaactgacgacattgatatgaaagtatgaaacataaagtaagattgttggcataaaccagttcttctggtgaagtaaaattgagattggtgggataaaccaattcttcatttgatttgcaaagccatggaaccagcagagtgagtttctgctttgcagcttgtgatgaatatacagctcgaaatagtgggtttacagttgttcccgtcatccaaggaagcaaatatataaactagctgactgcctagaaaactacagcaaagaaagcaatatataatcctggcacgtcatgaaaacttgatcttgcacaaattctagaaaaagtaataactatatcatttgatgagcactagaaatttaacttgcttgaaatgatgagacattaactgcttcaaatcatgagacataacttgcttcaaatcagaacacatttggtttgagggcctataatcataaccaattatataattctagagtct

SEQ ID NO: 41517 - DNA, 614 bp, Glycine max
  unsure (1)..(614): unsure at all n locations
tgtggtgcatgtgttgttgttgttgtttgtcaagttgaccttgatgaagtgaatgctctagcagagctaatgacatggaagacagttgtagcggacattccttatggaggagcaaagggtggtattggctgcaacccaaaggagctcagcgtcagtgagttaggaagtctcacttgtgttttcttccaaaagattgatgatcttattggcatttagagagatgttcatgcccctgacatgggaactaatgcacaagttctaatttaattatattccatttccttacataattntttgtttggggcaatttcttatgtaaaccaacatctagaacttttatttattattctatcattttcatttgtttactatttcactgacaaaggcttgcattcttgatgagtattcaaagtgctttatagtttatattatcaataattttaatttaaaactattaatattacttttntttgtagaagttggtatatttacaaaattcatttgttgccaaattgtgttgattaacataaaattttattttaaaaatatgaaattttatacattgttgtcatgaaaatgaaatttttggttaaaaatataagaaaaaatatttt

SEQ ID NO: 41518 - DNA, 574 bp, Glycine max
tgccaattacctgttaacagcagccttaatgtgaacatcaggcttttttcttaaagaacaaaaccaaagtacaatattgtctcgtgaacacaaaacaagaagttgccaatgtgccctaaaagtcaacaaaatcaaattattttacttttaatgcaaacacattgataacagtctcatggattcacttactgattcaagtaaggtcctaagtatacttctcgatgtgattccttgacccagttggcgatgtactgttcacattttgtacgtttgtcctttgcacagtgtattgcctggggctcaaggaaaccataaactggagccaatcctctgcttgtactacaatcattcataaacctatttcatgcacaggaaacaatattgttagccatatattgtaaggacaatttacttagacttacataacggtaaacaataatttacttacatcatccacaactgtagtataaatatgtttagaaacgtattccctggaatgattttagtcacatctgcatgtgtgatgaacaacccaattttggcattaggcagcccaatatttgttcgtcccatg

SEQ ID NO: 41519 - DNA, 376 bp, Glycine max
gcttctagtctaatttagcggtggagcagtccctttctacgggacatcgagtgaaaagtgatggacattgaatttctctacgagcttccgcttgcaattggcagcgcttcgatattttacaggactcagccggacatctgtgtataatagtatgggcggattaattttctcagagcttttggatctatatttatggagcgtctttgatatattacggggacttataccacacagtttggggataaagttattgtcatttcaatttgcttagatcttcaagtggcaatttagagcatttcgatctatttccttatatgaattagacattcgtctaaaaagatatggtctgttgaattactataagctctccgtttaa

SEQ ID NO: 41520 - DNA, 521 bp, Glycine max
aacgacaataacttttttctatgatgtccgattgaatcgggtaatatatcaggacgctcaaaattgagacttgaacctctaagaaaattgaaacgataataactttatacacggatttccgacagattgccgtaatatatcgagacgcattaaattgaaaaaagaagctcgtaggaaattcgaacgacaatatgtttttactcatatgtccgattgagtcccgtaataaaaaaagacgctcgaaattgagagcagaagctctgagcaatttcaaacgacaataactttatactcgaatgtcctcttgagacccgtaatatatcgagatgctccaaattgaaaatggaagctcgtagcaaatttaaacgacaataaatatatacatggatgtccgattgagtcccgtcgtatatcgagacgcttcacattgagaacggaaggtcgtatacaattcaaacgacgattactatttactgggatgttcgactgagtctcgtagtatatcgacatgcttcatattg

SEQ ID NO: 41521 - DNA, 533 bp, Glycine max
agcttttttcctgaatgccttcttaggtacttgaggattcttttaatggcaatttgtttgagaagaaagaaagacgcgttacttgaagagaagaaggtttttaagttaggggttcttcgccttattttattaagtgtttatattaagccaccaacatctaataaaaattggtttcttagtgttatataagcaccacatcaggaacttcattcccatttaacttgatggccaacatttagaagtttcctccttgagtctccctaaggttaactagtttctaacattgattctgacataaaaataacaagtagtgctttttactaaaataagaaaacaaacaagaatgaattggatttaacaggcaaaccatgaatcttcaactattaatttcaaattctgcagtatacatgaatcgaattagtacacatacacgttcattttcctcattttgaatagattgcatgaaactttgaagcaagcaacttgtcaagcacttgaaaaaattcctgaccaagacacatacatttgttaca

SEQ ID NO: 41522 - DNA, 545 bp, Glycine max
gtctcacgattgtcacgtgctcatgcaacaattgttagtcgtggctatacgagacatcttgccaaacaaagtcaggttcacgataactcgcctgtgctttttcttccatgctatatgtagcaaagtgattgatccagtaatgtttgatgagttggaaaatgaggccgcaattatactatgccagttggagatgtattttcccctgctttctttgacatcatgattcacttgattgtgcatctggtcagagaaatcaaatgctgtggtcctgtttatctacggtggatgtacccggttgagcgatacatgaagatcttaaaagggtatacaaagaatctatatagtccggaagcatctattgttgagaggtacattgcagaagaagccattgaattttgttcagaatacttagagaaggctaaagttgttgggcttcctgagtgtcggcatgatgacagagtgggtggtaagggttcaagaggactgcatgtgatcactccaagtgtagaagatttgttacaagctcacttgtatgtcttgacaac

SEQ ID NO: 41523 - DNA, 611 bp, Glycine max
agcttttaaagttgtgccaagttggttttcaacaagagatttatattggaggaaagcagtaaatgcttgagatttattttgaagcaaatacattcaagtatatctagagaatgcatcaacaaatattatgtaatatcttgatccattagaagaatttaatggagctggaccccaaatatctgggaaaacaagatcaagaggactagcgtaaacagattgagaggtaaagaaaggaagctgacgtgccttccccatacaacatgattaacaaagcaaagaagtagctgaataattacatggtatactacaatgactaagtactaatctaacagctttaagagaggcatgagcaagtcttgaatgccaaagcttcaagactatgaatgaagaatctgttgtagaatggaaagcataaatgtggttttgatgctaaacggtgtgaaaaacataaagacccttgctaacttggcttgagaaaagcctaattgtattgtcctatttgcattacaactatatcatgaaattaaaaaatcttgatatctcgacaaaatgtgcacactgagaagaatttttgtatagatggaacatgtaataattgattataacaaagt

SEQ ID NO: 41524 - DNA, 179 bp, Glycine max
acatcttggaattgatacctaccaatatttgggggctattttctacaccttctttgtattgttcacaatattttatatcattcctaaaccaatactccaaatatgcatacttggttcctatacatgaaaaggcaccatcttttgatggggtccaaacatttaaagttgaagttgaaaat

SEQ ID NO: 41525 - DNA, 197 bp, Glycine max
gctcaaatgttcaacatgtaatctctagcgtctcgcaatattataagactcattcagacattcttatactgggtgtttggcgaaagcatcggtttatagctatttcattcaatatcaaccgtctcaccttataaagggacttattcttacacacttgtaataacgtattgtcatttgaattggctcagagcttctac

SEQ ID NO: 41526 - DNA, 613 bp, Glycine max
  unsure (1)..(613): unsure at all n locations
tgatgacatgggctgatcatgaaataatttatataacgaagctacccttggattcaaaaggaatcccaaggagtttgcatgagagactaacatcatatgtaccctactatcccaattgtctttacgcatcttccacgagctcttggtcaaatgagttttcttctcaaatgtgcaagtgcgaacctcaaggtttttcttgctttttatatatactctactccttttgccttatacattaatccttattacactttttgtgccttccttgtaaaatctggagatcttttgtctcttttttttctttacttgcctttggcggattttatctctctttttcctttcattattgcccaacttcatgcatgtgttgttcgcattgcccttcctgccggtttagcggtggttcctactcanggtttctattttgcttttttttttttaatatgctttggctcggagggggtagtaagggataaattaatgtttgagatttgaaaaatggccatgtgtcatttcaaatcttgacttagatcctctttgtagttggattttgggacaaaaccttaataacacaaccccgatttatttatnttatattcaccctaatttttgc
